United States Patent Application Publication US 2025/0333808 A1 - sequence listing, part 11

SEQ ID NO: 181338 - DNA, 80 bp, synthetic construct
  source 1..80: mol_type = other DNA
acagacaactgcacagggataggggaggaacaggtagtcgagtgtaactttaatatgacaggattagagagagataagat

SEQ ID NO: 181339 - DNA, 80 bp, synthetic construct
  source 1..80: mol_type = other DNA
cggtgctccactggagtaaagaccctggtctgttaggaccctttctgctttgggaaaccaaggcaggaaaatccctagca

SEQ ID NO: 181340 - DNA, 80 bp, synthetic construct
  source 1..80: mol_type = other DNA
cggatcaggttttaccaaccagataggggaaaaagttgctgaattgactagtatggtcactagttcaattacagacaaat

SEQ ID NO: 181341 - DNA, 80 bp, synthetic construct
  source 1..80: mol_type = other DNA
atgagttggtccagacccgcccaaaatgctgcctccttggagagatattggttccaaggtatggttcagtgtcataatgc

SEQ ID NO: 181342 - DNA, 80 bp, synthetic construct
  source 1..80: mol_type = other DNA
caggggacacatactacgggttagtgtccatcaatgacttcggcaccttagctatcagagtggtgaatgagtttaaccct

SEQ ID NO: 181343 - DNA, 80 bp, synthetic construct
  source 1..80: mol_type = other DNA
aacttcaaggattcacaaggaaaactcaatgtggcggctgcttttaagccatgtgatgtggataataagataggaaatgc

SEQ ID NO: 181344 - DNA, 80 bp, synthetic construct
  source 1..80: mol_type = other DNA
atcggtgaaatctcaagctattacacccaatggacaggaagtgtccgcttcagtttcatgttttgtggaacagctaatac

SEQ ID NO: 181345 - DNA, 80 bp, synthetic construct
  source 1..80: mol_type = other DNA
tcaccatgcttggcatttacgacagagtggctgtcttgcctacccactccagacctggagagaccataaccatagcaggg

SEQ ID NO: 181346 - DNA, 80 bp, synthetic construct
  source 1..80: mol_type = other DNA
agagccgcacctggacaactgcttcaactggatggtggtggaagttacccgatgccctcaaaagtatgggtatatttggt

SEQ ID NO: 181347 - DNA, 80 bp, synthetic construct
  source 1..80: mol_type = other DNA
gttatacctacacatgctgaccccagtagaaatgtgaaagtagatggggtggaaacagaggtattagattcttatgactt

SEQ ID NO: 181348 - DNA, 80 bp, synthetic construct
  source 1..80: mol_type = other DNA
ggttgtgccagtacaagaggaaggccaccgtggattttgacgtgactccagtcacgtcacacagacccgacattaacaac

SEQ ID NO: 181349 - DNA, 80 bp, synthetic construct
  source 1..80: mol_type = other DNA
gacgaacttttcgccgccctcgacgaagagtaaggagacgccggtgggtgaggcgtagatacagacggggatggcgacgc

SEQ ID NO: 181350 - DNA, 80 bp, synthetic construct
  source 1..80: mol_type = other DNA
ttcgcttagtgaaaacttttctaaaattggaaatgattcaggtggagaaatcttatcaagggttgctgacgatgcttcaa

SEQ ID NO: 181351 - DNA, 80 bp, synthetic construct
  source 1..80: mol_type = other DNA
tgcagcggcgcaagcctgccatggcgtcagctggtatgccgggcgcctatccagtccagacgcttttccgccatgtggag

SEQ ID NO: 181352 - DNA, 80 bp, synthetic construct
  source 1..80: mol_type = other DNA
ggaatcccattcagtggatgtggtaccgcctgttggtaaactcgtgcctgaggagcgcccactgtcttttgcctatacct

SEQ ID NO: 181353 - DNA, 80 bp, synthetic construct
  source 1..80: mol_type = other DNA
gaattatatagatgaagttcttaatgaagttttagttgtcccaaatattaatagtagtaaccccacaacatcaaattctg

SEQ ID NO: 181354 - DNA, 80 bp, synthetic construct
  source 1..80: mol_type = other DNA
taacatgctggtatcaaactaaccttgtaaccccacccaacacaccttctacagccagaatgttgtgcttcgtttcagga

SEQ ID NO: 181355 - DNA, 80 bp, synthetic construct
  source 1..80: mol_type = other DNA
gtctccgccaagctgcacaccactgtggccatcaatgtggccatcatacctatcctgtgctcagtggccatgctcatcag

SEQ ID NO: 181356 - DNA, 80 bp, synthetic construct
  source 1..80: mol_type = other DNA
ccatggtggccacctgtccgcgaccccacgccaaccactcagactccaccaacaaatacgaaacagggcccggaccaggg

SEQ ID NO: 181357 - DNA, 80 bp, synthetic construct
  source 1..80: mol_type = other DNA
catctgcttctggctcttctgggaacacccccaccccaccgaacgatgaggaacgtgaatctaatgaagagcccccaccg

SEQ ID NO: 181358 - DNA, 80 bp, synthetic construct
  source 1..80: mol_type = other DNA
gaaaacaaagacattgtctcaggacaacaagcacaaacattatcaatactaatagaccgtatagcagacaatgcagaaaa

SEQ ID NO: 181359 - DNA, 80 bp, synthetic construct
  source 1..80: mol_type = other DNA
aacggtcgcatagcgagagagtggccagaatctcctgcgtttctgcgttcaacctgctgaagtagagaaaagccgcgggc

SEQ ID NO: 181360 - DNA, 80 bp, synthetic construct
  source 1..80: mol_type = other DNA
tgctgttggtattgaatttcaatacaacaaaatgggcgctcaagtatcaacgcaaaaatctggctcccatgaaacgggca

SEQ ID NO: 181361 - DNA, 80 bp, synthetic construct
  source 1..80: mol_type = other DNA
cacgaagagcaacggccgggtgtgggggacgacggccagagccgcggaaaagacgcgaaaaagaggaagtccccaggtgg

SEQ ID NO: 181362 - DNA, 80 bp, synthetic construct
  source 1..80: mol_type = other DNA
tacccacactaacgatctcagattactggccagtgtagtacagaaaataggcaaggagagcctagtaatatggggacaat

SEQ ID NO: 181363 - DNA, 80 bp, synthetic construct
  source 1..80: mol_type = other DNA
gattacatgacaggtgcgacccctactataccaattacccttacggtggcacccatgtgctcagagtttgggggtctgag

SEQ ID NO: 181364 - DNA, 80 bp, synthetic construct
  source 1..80: mol_type = other DNA
gcctggccaccaccctgaggtgctttttgcacgagccgtcgggtctcagatcgggccagagcggcccttgcctgggtctc

SEQ ID NO: 181365 - DNA, 80 bp, synthetic construct
  source 1..80: mol_type = other DNA
ggattcaccggcaccgccaggtggttacaggagacgtgggtcccctctgccgtggaagggttgccgtggttgggcagaac

SEQ ID NO: 181366 - DNA, 80 bp, synthetic construct
  source 1..80: mol_type = other DNA
ttataccagaccacaactatataacccacagaaaccagactggggatacgtaccttacgactataactttgctcaaacca

SEQ ID NO: 181367 - DNA, 80 bp, synthetic construct
  source 1..80: mol_type = other DNA
ggggtgtgcggggccgggacgggagccttttgcgccggagacttgcgggcttttgcggctggaacagtggtgtggacgca

SEQ ID NO: 181368 - DNA, 80 bp, synthetic construct
  source 1..80: mol_type = other DNA
ccacttttaccttctcaaatctatacggggggggggcctctgtaacatttggtgggacctgatgctgctggtgtgctgta

SEQ ID NO: 181369 - DNA, 80 bp, synthetic construct
  source 1..80: mol_type = other DNA
aagttcaggctattcttgaacaagatgccacagacggtgaacgttttggtgataacgactggacccaatttgactcaaac

SEQ ID NO: 181370 - DNA, 80 bp, synthetic construct
  source 1..80: mol_type = other DNA
agcataaagcccagcagcagctcgtattcggaagggaactcgtagacgtccacgtctgggcccacctgcccgcaggtgcc

SEQ ID NO: 181371 - DNA, 80 bp, synthetic construct
  source 1..80: mol_type = other DNA
tatccaggtggttgcccatgattggtatgagattcaagaatcagattattatccaaaacatatccaatacaacctgctaa

SEQ ID NO: 181372 - DNA, 80 bp, synthetic construct
  source 1..80: mol_type = other DNA
atgcgtgtatatttgctcagcatggtggccagcaccgggtgggtggcctctgagatctcggtcggcaactccaaaacgac

SEQ ID NO: 181373 - DNA, 80 bp, synthetic construct
  source 1..80: mol_type = other DNA
gttgagattctgatgagaggcttgggggggtctttgccctcaaggcgaggctccttctcctaggaatgccgagccccctg

SEQ ID NO: 181374 - DNA, 80 bp, synthetic construct
  source 1..80: mol_type = other DNA
gcctgcaatggatatatagactgggtaaaaaaagaaacagataactgggtaataagtacacaagccagagtactaatggt

SEQ ID NO: 181375 - DNA, 80 bp, synthetic construct
  source 1..80: mol_type = other DNA
tataacaaatgtcactgactcatatgacctacataacaaagagggtatcaaacttgaaatcacagtcataaagctggata

SEQ ID NO: 181376 - DNA, 80 bp, synthetic construct
  source 1..80: mol_type = other DNA
tttcttgccaggatgataaccaatgagagtgatgtgtattctttgccacctgaccctaagtattttgatgggtacgatca

SEQ ID NO: 181377 - DNA, 80 bp, synthetic construct
  source 1..80: mol_type = other DNA
gcccagaaaaatttctccctacgtctaccaaaagacacaggagacatttcacagactgctgtccttcaaggagatcccat

SEQ ID NO: 181378 - DNA, 80 bp, synthetic construct
  source 1..80: mol_type = other DNA
gtccctagattactcgtctgatgcctccacatatgtgcccattaccgtcacagttgcaccaatgtgtgcagagtacaatg

SEQ ID NO: 181379 - DNA, 80 bp, synthetic construct
  source 1..80: mol_type = other DNA
aatgcacgctgttgtccatttatttgtggcaaagcagtaatgttcagagatcgcaatacatgtcaaacttacacactagc

SEQ ID NO: 181380 - DNA, 80 bp, synthetic construct
  source 1..80: mol_type = other DNA
tttctttttccccgttcctgcaccaaaaccagaaaacactaaaaggtcaatcctaagtgatgaaagtccatatgatagtg

SEQ ID NO: 181381 - DNA, 80 bp, synthetic construct
  source 1..80: mol_type = other DNA
atcctgccaacacatgcagaccccggtagtgaggtacaaattgatggaattacaactaaagtagaagattcttttgattt

SEQ ID NO: 181382 - DNA, 80 bp, synthetic construct
  source 1..80: mol_type = other DNA
gatgctctatatcaaaatgatccagcgcaggcaatacagagcgcagtgggtcgtgttgcagacactatagcgagtggccc

SEQ ID NO: 181383 - DNA, 80 bp, synthetic construct
  source 1..80: mol_type = other DNA
gtgtcgcccgcgtctatttcaagcccaagcatgtgaaggcatgggtacctcgcgcgccacgcttatgtccatatttgtat

SEQ ID NO: 181384 - DNA, 80 bp, synthetic construct
  source 1..80: mol_type = other DNA
aagacctcgtcttacaatacatgtatgtaccacctggtgctcccaaacccactgcacgcaacagttttgaatggcagaca

SEQ ID NO: 181385 - DNA, 80 bp, synthetic construct
  source 1..80: mol_type = other DNA
actgtttggctggagatagtaatgtgaaaaattcttacaccacttataaaaacgccaatcctggtgaggctggaggagaa

SEQ ID NO: 181386 - DNA, 80 bp, synthetic construct
  source 1..80: mol_type = other DNA
tccaccaggggcaccccgtccatcatcctgggatgactatacatggcaatcctcctccaacccttccattttttacatgt

SEQ ID NO: 181387 - DNA, 80 bp, synthetic construct
  source 1..80: mol_type = other DNA
gcaacgcgggcatgggcgtcggcgtgggtaaccttactatctaccctcatcaatggatcaatttgcgcaccaataactgt

SEQ ID NO: 181388 - DNA, 80 bp, synthetic construct
  source 1..80: mol_type = other DNA
catcaaataatgtacgtaccacccggtggaccggtacctgagactgtggacgattacaattggcaaacgtcgacaaaccc

SEQ ID NO: 181389 - DNA, 80 bp, synthetic construct
  source 1..80: mol_type = other DNA
tctcgcggggccggggccgcgttgaggctgtttagggtatgtgcgggtgtgtggagtcggtggtgacagagaaccttgag

SEQ ID NO: 181390 - DNA, 80 bp, synthetic construct
  source 1..80: mol_type = other DNA
atgataacaaaacaacaccttatggaatcaatgtgttgaatcacatgggttccatagcattcagagtagttaatgagcat

SEQ ID NO: 181391 - DNA, 80 bp, synthetic construct
  source 1..80: mol_type = other DNA
ttaaagcaattgagcatgcttgagaatcaaatcagtaccatacaccaatcatgccccagtcaggagcaacaggaggtgct

SEQ ID NO: 181392 - DNA, 80 bp, synthetic construct
  source 1..80: mol_type = other DNA
taggtgggttcagacgcttaaagtgtgttgtacatattcttttctaacctgtgttttacacagggtggcagatggcgtgc

SEQ ID NO: 181393 - DNA, 80 bp, synthetic construct
  source 1..80: mol_type = other DNA
taaggtcagagtatacttaaagcccaagcacatcagagtgtggtgccctcgcccaccgagagcagtggcatactatggtc

SEQ ID NO: 181394 - DNA, 80 bp, synthetic construct
  source 1..80: mol_type = other DNA
tctgttaggatgctgagggacactccgttcactagtcaaacagcaatactgcaaggtgacgtagaggaagcagtgagaaa

SEQ ID NO: 181395 - DNA, 80 bp, synthetic construct
  source 1..80: mol_type = other DNA
agacctaccactatgggctatatgctatggctatgtagactgggtagtaaaatccacaggagtcagcagtgcagtaacag

SEQ ID NO: 181396 - DNA, 80 bp, synthetic construct
  source 1..80: mol_type = other DNA
aaaccaactccgactcatcttccgagagctacagaaaacccaagcgggtctccacttaaatcctatgttatcaaaccggc

SEQ ID NO: 181397 - DNA, 80 bp, synthetic construct
  source 1..80: mol_type = other DNA
tggtaatcaggaagtagaccacctagtaagtcaaggaattaggcaggttctattcctagaaaagatagaaccagcacagg

SEQ ID NO: 181398 - DNA, 80 bp, synthetic construct
  source 1..80: mol_type = other DNA
cgctgcgccggacgcctcggacccccgctcgtgctgacgcgctcgcgcgcgtcagaccacttcgggctcgcggtggtcgg

SEQ ID NO: 181399 - DNA, 80 bp, synthetic construct
  source 1..80: mol_type = other DNA
gctaaagtaccaaaaggccagcaggcccacgctacctaacagattcacgtagactggagacataattaaagaaagaagtg

SEQ ID NO: 181400 - DNA, 80 bp, synthetic construct
  source 1..80: mol_type = other DNA
aggggctataggcctgttttctcctcccctcccggttacctccaacagatccatatccacaaggattgggaacagccagc

SEQ ID NO: 181401 - DNA, 80 bp, synthetic construct
  source 1..80: mol_type = other DNA
acatggaggtaacttttgtcataacgagcaagccagcttccgttaccagcacaataagcgacatacccatcacacaccaa

SEQ ID NO: 181402 - DNA, 80 bp, synthetic construct
  source 1..80: mol_type = other DNA
cccgaaactcctcggcccgcactacacattccacagctgggacaaaagacgtgactactataacggacgagctattaaga

SEQ ID NO: 181403 - DNA, 80 bp, synthetic construct
  source 1..80: mol_type = other DNA
tgtcacttgtggtcagcccagcttcctttctacatccgttctgcccaccacaaactgacaatccttgcatcaccttccag

SEQ ID NO: 181404 - DNA, 80 bp, synthetic construct
  source 1..80: mol_type = other DNA
gatttccattggctccaggcaaaagaacagttccttaaaatcccgcaacacttgtcggtataacgccatgggatcctcgg

SEQ ID NO: 181405 - DNA, 80 bp, synthetic construct
  source 1..80: mol_type = other DNA
agtaaacatgtaagaaaatgtaaatactgcagcagtgtcaacaaatgtatgctaatagtaaaatatcatgctcaagatga

SEQ ID NO: 181406 - DNA, 80 bp, synthetic construct
  source 1..80: mol_type = other DNA
ccgtgtcgcgcacccggcgctgacagcccaaggggaaaaggaatagcaagaataaatcaccgtgaaagtgatacgttgtt

SEQ ID NO: 181407 - DNA, 80 bp, synthetic construct
  source 1..80: mol_type = other DNA
acgcgtggctgacaccattagtagtggtcctagcaattcacaggccgtcccagccctcacagcagtagaaactgggcaca

SEQ ID NO: 181408 - DNA, 80 bp, synthetic construct
  source 1..80: mol_type = other DNA
acacaaaattctgtatcaaatggatccagtttaaattactttaacattaattattttaaagatgctgcttcaaatggagc

SEQ ID NO: 181409 - DNA, 80 bp, synthetic construct
  source 1..80: mol_type = other DNA
gctttacccaaggctgaagctaaagcgctcgttatccgcactactactgcgcaatggctagtaggactctggatatgctg

SEQ ID NO: 181410 - DNA, 80 bp, synthetic construct
  source 1..80: mol_type = other DNA
tgatgctggtgctaccaacaagtacggatattccagcattaatgactttggaacaatggctgtgcgcattgttaatgagt

SEQ ID NO: 181411 - DNA, 80 bp, synthetic construct
  source 1..80: mol_type = other DNA
agccgcggaggcggcgaccgacgcggaggtcgtccgaacgccctctgtgacgctgtcgtccggccagtcaagaaagctaa

SEQ ID NO: 181412 - DNA, 80 bp, synthetic construct
  source 1..80: mol_type = other DNA
ggcggattcgtgacgtcacggccgccattttgtgtaaggcggaacaggctgacaccccgtgtcaaaggtcaggggtcagc

SEQ ID NO: 181413 - DNA, 80 bp, synthetic construct
  source 1..80: mol_type = other DNA
gaccaacaaataaccacaggatttacattaaaagaccaaccatattactacacattaaaatataacccattcaaagacaa

SEQ ID NO: 181414 - DNA, 80 bp, synthetic construct
  source 1..80: mol_type = other DNA
tgtgcattacgatataagtacgtcatcggtgtaattggatgtctattatgtatcaccggcgttgttataacgttgtaaaa

SEQ ID NO: 181415 - DNA, 80 bp, synthetic construct
  source 1..80: mol_type = other DNA
aaaaggttgggagataagctacacaaaactcatggccccaatatactatcaaaccaatagaaacagcacatataactgga

SEQ ID NO: 181416 - DNA, 80 bp, synthetic construct
  source 1..80: mol_type = other DNA
ggcctaccagtcatgctaacccctggttcagaacaatttctaacaactgatgatgcccagtcaccttccgctttacctta

SEQ ID NO: 181417 - DNA, 80 bp, synthetic construct
  source 1..80: mol_type = other DNA
cagggggcggcagcgcgggtccccggggacacacaaagagcaacgcccagagggcacgaggaaggggggatcgcgggccc

SEQ ID NO: 181418 - DNA, 80 bp, synthetic construct
  source 1..80: mol_type = other DNA
gtacacgcacgctggttaccaggcttaacactagtcatcacagcgtagtctggcaacgttatgatatctacagcagatac

SEQ ID NO: 181419 - DNA, 80 bp, synthetic construct
  source 1..80: mol_type = other DNA
tgacatggaattcacttttgtggtgactgaacgtttatataccagtggtccgacatcaaatcacgtttaccaaattatgt

SEQ ID NO: 181420 - DNA, 80 bp, synthetic construct
  source 1..80: mol_type = other DNA
aaaaaattgtacctcgctcaatggaacccgccaatagtaaaacgctgcttcataaagggggcactgcccctcatactgtg

SEQ ID NO: 181421 - DNA, 80 bp, synthetic construct
  source 1..80: mol_type = other DNA
gtgatacacaaggagccatagtttccaccacccacaccagtgaatgtggactaaatcctatcaatgtgcctaccaatact

SEQ ID NO: 181422 - DNA, 80 bp, synthetic construct
  source 1..80: mol_type = other DNA
gaactttgatagtggctgctataccagaacatcaattggctagtgcagatagaggcaatgtagctgctggatataattat

SEQ ID NO: 181423 - DNA, 80 bp, synthetic construct
  source 1..80: mol_type = other DNA
ataagtcaaaatataataaatcaaggttagccagaaagtttctgaccatgtctaccaaatacaaatggactaggaacaaa

SEQ ID NO: 181424 - DNA, 80 bp, synthetic construct
  source 1..80: mol_type = other DNA
agtccatggaagcgttccgtattccggtacagtgttacaatgtgcaaggaggtcaagtttttggcttccaagtacaaccg

SEQ ID NO: 181425 - DNA, 80 bp, synthetic construct
  source 1..80: mol_type = other DNA
cgggattatccaccagttcatcctgctgaacaaagtggatgattgacgtgctggtgttaccggccgtcgtattgatcatg

SEQ ID NO: 181426 - DNA, 80 bp, synthetic construct
  source 1..80: mol_type = other DNA
tcagaggaagaaaagctcccgtgctttacagaagaggagacgacgaaaacgatacagcagcacctccagctccagctccg

SEQ ID NO: 181427 - DNA, 80 bp, synthetic construct
  source 1..80: mol_type = other DNA
tacagtttacgagtcaataaaacaggaaaagatccgaactttaaaattgtgtatttttattttcccatccccctcttttt

SEQ ID NO: 181428 - DNA, 80 bp, synthetic construct
  source 1..80: mol_type = other DNA
ttaggtaccatttatgccatatataaactactgtgtgtgtcacagggggcttactcaggcaatgcaaatcctgtccctag

SEQ ID NO: 181429 - DNA, 80 bp, synthetic construct
  source 1..80: mol_type = other DNA
aattaagcacaataaccatgaaaataccaacatttttgactactacacaggcatgtactgcagcatatttttatccagcg

SEQ ID NO: 181430 - DNA, 80 bp, synthetic construct
  source 1..80: mol_type = other DNA
cggcgctaggcggcgctatcatctgcggagggattactggctgacggatccgaagatcgggctgctggccgcgggatcgg

SEQ ID NO: 181431 - DNA, 80 bp, synthetic construct
  source 1..80: mol_type = other DNA
tgatgagcgactcaaccaccccttctgcgagctcaggaattgacgataaagggtactttgaatggaaagcaacagctaca

SEQ ID NO: 181432 - DNA, 80 bp, synthetic construct
  source 1..80: mol_type = other DNA
tgaattattatccgcggcgtatagcccatgcaggataatacccgggaaccaacaaccaccttcaggttcccaccaactcg

SEQ ID NO: 181433 - DNA, 80 bp, synthetic construct
  source 1..80: mol_type = other DNA
attgtcggagatatgtctcatgggatagtagaatacaagagatccggatcagacagaattgaactaacagggcaagtaaa

SEQ ID NO: 181434 - DNA, 80 bp, synthetic construct
  source 1..80: mol_type = other DNA
ttttttgctctaacaaatttatttaaaaacatacattaaatgattattgtttgacagctattaaggttatatttacttgt

SEQ ID NO: 181435 - DNA, 80 bp, synthetic construct
  source 1..80: mol_type = other DNA
accaagtaagaccaagttacaacctagtgtcttttatgatgtattcccaggtaataaagaaccagctgttctctcaagta

SEQ ID NO: 181436 - DNA, 80 bp, synthetic construct
  source 1..80: mol_type = other DNA
cagagtatcctttaagcttggattcacccccgaataaaattgctacgccgtgggagtttcacttgtcggtgtctgcttct

SEQ ID NO: 181437 - DNA, 80 bp, synthetic construct
  source 1..80: mol_type = other DNA
aaggtgtgtcaccaggtgggtggtacctggaggtcattctattgggataacgagaggaggagaggctagaggtccgcgag

SEQ ID NO: 181438 - DNA, 80 bp, synthetic construct
  source 1..80: mol_type = other DNA
aatatgcaaatggcttgggatccctaaaccaccctccaagcaaggtgatggttggctcaagaagtttacagagtggtgca

SEQ ID NO: 181439 - DNA, 80 bp, synthetic construct
  source 1..80: mol_type = other DNA
cgacaagacggaagcacgtcccaccaccaccacaccacgaaacagggaacacagaaggccccccaccaacaccaccacct

SEQ ID NO: 181440 - DNA, 80 bp, synthetic construct
  source 1..80: mol_type = other DNA
aaggagaccctatggagcaagcaattgaaaatactgtaaacaggactctcaatgcaagtttagatagagtgggtactcac

SEQ ID NO: 181441 - DNA, 80 bp, synthetic construct
  source 1..80: mol_type = other DNA
accagcaatttttcagtacacaatgaggcaggtcttagagccattcagaaaagcaaactcagatgtcattatcattcagt

SEQ ID NO: 181442 - DNA, 80 bp, synthetic construct
  source 1..80: mol_type = other DNA
acgactgtgattttccatgtaacacgagtgactatgaatatgacatactaaactattttgacaattgtactactaccata

SEQ ID NO: 181443 - DNA, 80 bp, synthetic construct
  source 1..80: mol_type = other DNA
agtttaaaataacagaaggaacaacttactataactgggacaactggtggagatatgacttttactcctccaaagcagat

SEQ ID NO: 181444 - DNA, 80 bp, synthetic construct
  source 1..80: mol_type = other DNA
ccaggtatacaggaaccaacaaaacagagaatattaaatttgcggcgccagggaaaggctcagacccagaagtggcatac

SEQ ID NO: 181445 - DNA, 80 bp, synthetic construct
  source 1..80: mol_type = other DNA
tcagtggagaatttcctcagtagatcagcgtgtgtctactacgacacatacaagacaactgccagtaaacctgaagatca

SEQ ID NO: 181446 - DNA, 80 bp, synthetic construct
  source 1..80: mol_type = other DNA
ggctttacagtatttgtatattggaagaacaaattacagtccaaaccctaatagtcctattaaacccagagaaacaatta

SEQ ID NO: 181447 - DNA, 80 bp, synthetic construct
  source 1..80: mol_type = other DNA
agaggttcactgattattaggttgtctgtttatgctagcacattcaacagaggtagacttagaatggggtttttccctaa

SEQ ID NO: 181448 - DNA, 80 bp, synthetic construct
  source 1..80: mol_type = other DNA
aaaacccaagcgggggtccatctcaatcccctattattcatccagcggtaaacagggtgtatcttttcccagagagagag

SEQ ID NO: 181449 - DNA, 80 bp, synthetic construct
  source 1..80: mol_type = other DNA
cacatttaaaacagaagaacatataaaagaccccaaaataagcacagatggaacaaaccccaacaaagaaccactaccta

SEQ ID NO: 181450 - DNA, 80 bp, synthetic construct
  source 1..80: mol_type = other DNA
gaggaccatagcaacgctgtaagtgtgttgtggaacagggatcttatggtcaccagtagcaaagcacaagggacagatac

SEQ ID NO: 181451 - DNA, 80 bp, synthetic construct
  source 1..80: mol_type = other DNA
attgactcagttttttgcatattacacaggggaattgaacatacacattttgttcttgtgtgaaaaaggatttctcaggg

SEQ ID NO: 181452 - DNA, 80 bp, synthetic construct
  source 1..80: mol_type = other DNA
aaaccaaatggaattcagtaatacaagatgcctataatttagtaagagaagaataccaacaattatacaccaccactgtt

SEQ ID NO: 181453 - DNA, 80 bp, synthetic construct
  source 1..80: mol_type = other DNA
gcgccgccggcgggagcgcgatttgcgtgccaaacgcggacgcgcacgcggtggtcggaacggatgcggcagcggcagca

SEQ ID NO: 181454 - DNA, 80 bp, synthetic construct
  source 1..80: mol_type = other DNA
ctcgccgggcaggtacgcaaaggcgtgcccgtgcccggagacccagatctcgggcgccgtgtttgcgtccggcacgcatt

SEQ ID NO: 181455 - DNA, 80 bp, synthetic construct
  source 1..80: mol_type = other DNA
gaatcttgcccatagcccgctgtgtcctacgccaggacacaaaaacatgccgtggagaccgccggcgcaccacgtccagg

SEQ ID NO: 181456 - DNA, 80 bp, synthetic construct
  source 1..80: mol_type = other DNA
cctatatgattttgctattgacatggctcgctggactaattttttccgtgcccgcagctgtttacaccacggtggtgatg

SEQ ID NO: 181457 - DNA, 80 bp, synthetic construct
  source 1..80: mol_type = other DNA
ccagatgtccaaccagaagatgtgattgaaacccgttatgtcatcaacaaccatgttaataatgaggcactgattgaaaa

SEQ ID NO: 181458 - DNA, 80 bp, synthetic construct
  source 1..80: mol_type = other DNA
ctaccctcaaacatccgttctgccaaccacaaactgccaacatttgtgtaaccttccaggtgttgcgagagaagtattac

SEQ ID NO: 181459 - DNA, 80 bp, synthetic construct
  source 1..80: mol_type = other DNA
gagagcttgggtacctagaccccttcgatcccaagcttatatggtcaagaattacccgacatatagccaaacaataacta

SEQ ID NO: 181460 - DNA, 80 bp, synthetic construct
  source 1..80: mol_type = other DNA
tgtggttgtacccaccaccgggcatactgtgcgtggtacactgtgattccggtcaccttgtacgcctgtttgctacccta

SEQ ID NO: 181461 - DNA, 80 bp, synthetic construct
  source 1..80: mol_type = other DNA
atactacccagtaaacctaacacaccacagttggtatgtaatacaagaatccagctactacccgaaacacattcagtatg

SEQ ID NO: 181462 - DNA, 80 bp, synthetic construct
  source 1..80: mol_type = other DNA
tcatgctcaattatgtgctttgtgtcagcttgcaatgacttctctgtccgattactgaaagataccccatttattgaaca

SEQ ID NO: 181463 - DNA, 80 bp, synthetic construct
  source 1..80: mol_type = other DNA
cttggcactgcgcgtccagctgcaatacctgcttgttggtgacgcgaacgtatgaggggaagatctcgtacttccacacg

SEQ ID NO: 181464 - DNA, 80 bp, synthetic construct
  source 1..80: mol_type = other DNA
acgaaagtgagtggggccagacttcgccgtagggcctttatcttcttgccattggatggtgttggtggttgccataggct

SEQ ID NO: 181465 - DNA, 80 bp, synthetic construct
  source 1..80: mol_type = other DNA
cttcgaccggtagagaccgtcgctcagtagaagtcgttagcccgctcacaatgggaccccagtttatattccactcatgg

SEQ ID NO: 181466 - DNA, 80 bp, synthetic construct
  source 1..80: mol_type = other DNA
tctacagatgtggatgtgactgtaatgggtagtttactacaattggattttcaaaacccaagaccctatggtgaaaacgt

SEQ ID NO: 181467 - DNA, 80 bp, synthetic construct
  source 1..80: mol_type = other DNA
aagaccgtcactaaccacgtgactcccgcaggccaatcatatgctacgtcgtcaacttcctgggagtgtcctatatactg

SEQ ID NO: 181468 - DNA, 80 bp, synthetic construct
  source 1..80: mol_type = other DNA
gaaatgctgaccgcctgtcagggagtaggtggaccaggccagaaagccaggctaatggcagaagccttgaaggaggccat

SEQ ID NO: 181469 - DNA, 80 bp, synthetic construct
  source 1..80: mol_type = other DNA
tttgtacatcctagctctggccatagagttagcccacccttgtgtctccctttggcctttgcggtgccaatttccggtgg

SEQ ID NO: 181470 - DNA, 80 bp, synthetic construct
  source 1..80: mol_type = other DNA
ttggtacctttgggggcctgttttatatcccttccctcattgtaacttagaagtttcaaaatacagctcaatagacagta

SEQ ID NO: 181471 - DNA, 80 bp, synthetic construct
  source 1..80: mol_type = other DNA
tagcaccaaacaaatcggaattttctggtgccaaacagaaccagacacagggaatcccagtgcgcatgcccagtgggtct

SEQ ID NO: 181472 - DNA, 80 bp, synthetic construct
  source 1..80: mol_type = other DNA
tttgaacccaccaactgtattaaatccagaagcattggcacgcagatttggatttgatttggatatgtgtctacactcat

SEQ ID NO: 181473 - DNA, 80 bp, synthetic construct
  source 1..80: mol_type = other DNA
gctaagcatgaaatacaaatttagatttaactggggtggcaatcctattcttgaacagattgttagagacccctgcacgc

SEQ ID NO: 181474 - DNA, 80 bp, synthetic construct
  source 1..80: mol_type = other DNA
ctgggtgcaggagcgtgtcagctgaatgtcgctctgcccgggcagaatctgcaggtagaggtaggggttcttgaccaatc

SEQ ID NO: 181475 - DNA, 80 bp, synthetic construct
  source 1..80: mol_type = other DNA
ttcccactaacgcatcacccactttacctattacagtcacaatagctccaatgtgtactgagttcacgggcataaggtct

SEQ ID NO: 181476 - DNA, 80 bp, synthetic construct
  source 1..80: mol_type = other DNA
attatatataaattattttgttcacttcaaggcccatattcaggtgaacccaagccaatcacaaagaaaccagaaagaag

SEQ ID NO: 181477 - DNA, 80 bp, synthetic construct
  source 1..80: mol_type = other DNA
accttcatcaccgtcgctgactccgccatccaagcctaggggagaccgaagtgaagtccctggaccagcccggcccgggc

SEQ ID NO: 181478 - DNA, 80 bp, synthetic construct
  source 1..80: mol_type = other DNA
acgctggagtccgtggtatggcaaaaaggtagcaatggatggtggtggaaattcccagaggcattgaaagacatgggact

SEQ ID NO: 181479 - DNA, 80 bp, synthetic construct
  source 1..80: mol_type = other DNA
ctagaaggcagggatgctggaaatgcggaaaacaaggacacatcatgtcaaaatgcccagaaagacaggcgggtttttta

SEQ ID NO: 181480 - DNA, 80 bp, synthetic construct
  source 1..80: mol_type = other DNA
tcaggaggtcgtcaaaatccatcaccgttgggaggcttgggtcctcaaggtaggagagataatcggaggccgccgaggcc

SEQ ID NO: 181481 - DNA, 80 bp, synthetic construct
  source 1..80: mol_type = other DNA
ctggagaattggcctacaaactatgtaacacaacccatatatacaaagatgaaatgtattctgtaaaaggagggatgcca

SEQ ID NO: 181482 - DNA, 80 bp, synthetic construct
  source 1..80: mol_type = other DNA
acaaattacccctactaatactaacacatatgccccttcaggagctcaagaaacaataacatggtctaactcagactggc

SEQ ID NO: 181483 - DNA, 80 bp, synthetic construct
  source 1..80: mol_type = other DNA
gaggggaagccatttaagtgacaaggtgtgaagagtctcgtgtgctccacgtagaatccttccggcccctgaatgtggct

SEQ ID NO: 181484 - DNA, 80 bp, synthetic construct
  source 1..80: mol_type = other DNA
taggcctaaaacccccaggaagcgggtctatggttggctgcgctgctgctatctttagaggggaaaagaggaataagccc

SEQ ID NO: 181485 - DNA, 80 bp, synthetic construct
  source 1..80: mol_type = other DNA
aactaattgaatgggtcaaaaacaaggtacttccacaggccaaagagaagttagaattctgcagcaaactgaaacaattg

SEQ ID NO: 181486 - DNA, 80 bp, synthetic construct
  source 1..80: mol_type = other DNA
cgcgcaaggatgagcctccttcattaaaacccagaatggaggtggaatttctgaagcgtaagcccggttacttcccagag

SEQ ID NO: 181487 - DNA, 80 bp, synthetic construct
  source 1..80: mol_type = other DNA
accatcaagcagccatgcaaataattagggagattattaatgaggaagcagcagattgggatgtacaacacccaatacca

SEQ ID NO: 181488 - DNA, 80 bp, synthetic construct
  source 1..80: mol_type = other DNA
actactttaaatcaaaggaaaatgaaaacattctagtaccaaaacacttcattaagccaagagcaaatataaagaatgta

SEQ ID NO: 181489 - DNA, 80 bp, synthetic construct
  source 1..80: mol_type = other DNA
gggttgcagtcaagttgcacaatggtagcaccttggatttccaacacagtttatcgtagatgtgtaaaggatgacttcac

SEQ ID NO: 181490 - DNA, 80 bp, synthetic construct
  source 1..80: mol_type = other DNA
ctcaagtgagtaaacaaaatgttggttcgcatgagaacagtgtttctgccagtggaggctcagtcatcaagtattttaac

SEQ ID NO: 181491 - DNA, 80 bp, synthetic construct
  source 1..80: mol_type = other DNA
tttacattaagaattttatatgatcaatttacaagaggtcaaaacttctggacaaagtcaaatgaagacctagacctcgc

SEQ ID NO: 181492 - DNA, 80 bp, synthetic construct
  source 1..80: mol_type = other DNA
taaattcaaaaaaccagagtgccactgggaaatccaagacatgcccctatgggctctctgcaacgggtacgtagagtacc

SEQ ID NO: 181493 - DNA, 80 bp, synthetic construct
  source 1..80: mol_type = other DNA
cacaaacggtgacgcatggaaaaactattatagagaatttttacaacaagtatttacaactaatagatcagcaaacaaac

SEQ ID NO: 181494 - DNA, 80 bp, synthetic construct
  source 1..80: mol_type = other DNA
gagcatccagtggaggttgtcacacgtgtgtatcacaaagctaaacacgtcaaagcctggtgccctagagctcctagagc

SEQ ID NO: 181495 - DNA, 80 bp, synthetic construct
  source 1..80: mol_type = other DNA
gacggaggcgctggtggttccggaagcggtggacccgtggcagacttcgcagacgatggcctcgatcagctcgtcgccgc

SEQ ID NO: 181496 - DNA, 80 bp, synthetic construct
  source 1..80: mol_type = other DNA
ataacaaaaggcctagtgatgatagttggctaaattttgatgggactttacttggtaacttacccatttacccacatcaa

SEQ ID NO: 181497 - DNA, 80 bp, synthetic construct
  source 1..80: mol_type = other DNA
cacacagaatcgcccaggtcgccaaagtcgtctatcgccatcccccgtaaacgatataagcgctatcgccagatatcgcg

SEQ ID NO: 181498 - DNA, 80 bp, synthetic construct
  source 1..80: mol_type = other DNA
gatgtaggtcccataactatggcaggtttaattaatttaagtagcacaccaacaaataggatgattagatatgattaccc

SEQ ID NO: 181499 - DNA, 80 bp, synthetic construct
  source 1..80: mol_type = other DNA
cgctgatacaaacaccacctttccagcaagtgaactaacaacagaagatacacctcatgtgttcacaccagattcaataa

SEQ ID NO: 181500 - DNA, 80 bp, synthetic construct
  source 1..80: mol_type = other DNA
aggaagtccccaggtggacggccgcgcgcttcctcttttccgcgcgcggcgcgactcgtccctaggggaccgcggaggaa

SEQ ID NO: 181501 - DNA, 80 bp, synthetic construct
  source 1..80: mol_type = other DNA
ccggtcggctgacggcgagggctgctgctgaggaagaagtggagagggagccggtgcggctgattgcgcgggctgctgct

SEQ ID NO: 181502 - DNA, 80 bp, synthetic construct
  source 1..80: mol_type = other DNA
tcctcgatgtttgtgcatgtaggcaacttaatttatagaaaccttcatctttttaattctgacctagatgagtccattct

SEQ ID NO: 181503 - DNA, 80 bp, synthetic construct
  source 1..80: mol_type = other DNA
cgatgacaggccaaactcaagggctaccaacaaggatcccagcaggcggtcagcagtttatgacaacagaagatgaacag

SEQ ID NO: 181504 - DNA, 80 bp, synthetic construct
  source 1..80: mol_type = other DNA
atgctgacagcaaaacacaggatagtagtaaagagccaagagaccaaaaaagggggcaaaaaatatgtaaaatttagaat

SEQ ID NO: 181505 - DNA, 80 bp, synthetic construct
  source 1..80: mol_type = other DNA
acacaccctggtgagggtggtagagatgtcagtttgtcaaacagatctgaccttagcaaacaacctagtgatgatgcctg

SEQ ID NO: 181506 - DNA, 80 bp, synthetic construct
  source 1..80: mol_type = other DNA
acatgggtactttatgttctagaataataactgataaccataagcacccaattgaagtgacgacaagagtctatcataaa

SEQ ID NO: 181507 - DNA, 80 bp, synthetic construct
  source 1..80: mol_type = other DNA
gcaacaaatccctcagtgttcgttaaaagtagtgacccaccagctcaagtatcagtgccttttatgtcacctgctagtgc

SEQ ID NO: 181508 - DNA, 80 bp, synthetic construct
  source 1..80: mol_type = other DNA
agcccacctacgacatacccggtgccagtaacatgcctccgagagtacaagtcattgacccgagggtcgtcgggcctaac

SEQ ID NO: 181509 - DNA, 80 bp, synthetic construct
  source 1..80: mol_type = other DNA
ggggagaccacgtatatgaaaagaccagcactaaaagtatactagaggccatgaaagagaatgccactaaaatgtataac

SEQ ID NO: 181510 - DNA, 80 bp, synthetic construct
  source 1..80: mol_type = other DNA
acagacactggcagcgacagcagatgctatataaaaacctgcaacacaacagttatccaagagtcatgtgacaaacatta

SEQ ID NO: 181511 - DNA, 80 bp, synthetic construct
  source 1..80: mol_type = other DNA
tctttcatgtaaattcctaccactctatgctagtgaggctaaaagaattaagattttacataataagtgtaacacaatta

SEQ ID NO: 181512 - DNA, 80 bp, synthetic construct
  source 1..80: mol_type = other DNA
cacgattaagcctattgagtaccccaagccggatgggtgcaatagaactggcgaccatttcacgatggagcccggagcta

SEQ ID NO: 181513 - DNA, 80 bp, synthetic construct
  source 1..80: mol_type = other DNA
agcaatgctgtccattaacttgtgggaaagccctgatcctacagaataagaggaccaaggccagctattcaatcaacact

SEQ ID NO: 181514 - DNA, 80 bp, synthetic construct
  source 1..80: mol_type = other DNA
ctccaggaaactcatttccatcaattactacatttaatcaatgggtcaccacaggactaactgtaacaaatggtgactct

SEQ ID NO: 181515 - DNA, 80 bp, synthetic construct
  source 1..80: mol_type = other DNA
ccacctagatccatccctattgtaggccccagaaagtggctgttcccagagaggatgcccgcccccgcccctagcagcgg

SEQ ID NO: 181516 - DNA, 80 bp, synthetic construct
  source 1..80: mol_type = other DNA
tagccagcacttcctgacgattgcagctttcgctcgctgcgattggcttaagcagttgagttccgactggcagggtattc

SEQ ID NO: 181517 - DNA, 80 bp, synthetic construct
  source 1..80: mol_type = other DNA
agttaaagatgtattggagaaaggcattcctacattacaatccccaactgttgaggcatgtggttattcagacaggatca

SEQ ID NO: 181518 - DNA, 80 bp, synthetic construct
  source 1..80: mol_type = other DNA
ggttgaaactagtgtggatcatttcttctcccgatcgggtttagtaggtgttatgaatatcttggatgggggtacttcca

SEQ ID NO: 181519 - DNA, 80 bp, synthetic construct
  source 1..80: mol_type = other DNA
cagtcacccagtgcaatgcccaattatgaaccaacaccattaatacacattcctggagaggtaaaaaatctactggaaat

SEQ ID NO: 181520 - DNA, 80 bp, synthetic construct
  source 1..80: mol_type = other DNA
ggtatctctcctaccaatgacatgggcaccttatgcttccgctcattggaaggaacaggcaatgcagaggtgagggtcta

SEQ ID NO: 181521 - DNA, 80 bp, synthetic construct
  source 1..80: mol_type = other DNA
caggaacccgaaacagtgtttcccagaagctgtaaaaatagaacgccctggaactgccccactgtgcaatgcagctttta

SEQ ID NO: 181522 - DNA, 80 bp, synthetic construct
  source 1..80: mol_type = other DNA
tcaattaaacccaggtaatagcactgtcttgcgacgcaccttgctgggtgagatcctaaactattacgcacactggtcag

SEQ ID NO: 181523 - DNA, 80 bp, synthetic construct
  source 1..80: mol_type = other DNA
agtatcactaacctgggacccagtgacatgtatgttcatacaaaagaggccatttataaatgtgcacacctaactgagcc

SEQ ID NO: 181524 - DNA, 80 bp, synthetic construct
  source 1..80: mol_type = other DNA
tggatccaaacacacccaaaaagtgccttcactcaccgctaatgaaaccggagcaacactgccaacaacaccatccgaca

SEQ ID NO: 181525 - DNA, 80 bp, synthetic construct
  source 1..80: mol_type = other DNA
gactcccagactcaagagagaatgaaacatgagattgatactctacacgacctctcatgcaaatttctcccactatatgc

SEQ ID NO: 181526 - DNA, 80 bp, synthetic construct
  source 1..80: mol_type = other DNA
gtcgcattagttggtgaaagagctttttatgatcctaggacagctggcagcaaatcacggtttgatgaccttattaagat

SEQ ID NO: 181527 - DNA, 80 bp, synthetic construct
  source 1..80: mol_type = other DNA
gggtcccactcctctttctaccctcagcattccagagagaagacggcggtgccgaaagcgactccggttcaccggccaaa

SEQ ID NO: 181528 - DNA, 80 bp, synthetic construct
  source 1..80: mol_type = other DNA
gctacgtcactaacctacgtgtccgtctcctataggccagacaccgtctacgtcatacacttcctgggcatggtctacgt

SEQ ID NO: 181529 - DNA, 80 bp, synthetic construct
  source 1..80: mol_type = other DNA
agggggctccagcattaaattcacccaacattgaggcatgtggctatagtgatagagttgaacaaataaccataggcaat

SEQ ID NO: 181530 - DNA, 80 bp, synthetic construct
  source 1..80: mol_type = other DNA
tgttagtgacacccagcccaatgggcctagcaattcagaggggataccaatgttaactgcagtggagacgggccatacgt

SEQ ID NO: 181531 - DNA, 80 bp, synthetic construct
  source 1..80: mol_type = other DNA
ctaaaccacagactttaggtgctttggagattggggcaacagctgacataggaccagagacactaattgaaacaaggtat

SEQ ID NO: 181532 - DNA, 80 bp, synthetic construct
  source 1..80: mol_type = other DNA
gatgctgtattatattttttagacaccccactgtagactttatagccagaataagaaacatgcctccctttgaagacact

SEQ ID NO: 181533 - DNA, 80 bp, synthetic construct
  source 1..80: mol_type = other DNA
tcaccagtcctacgtagatcagcagcgagccacgtaacgtctgagcagccggcagttcgtcgcggatgtaacgcgtgccg

SEQ ID NO: 181534 - DNA, 80 bp, synthetic construct
  source 1..80: mol_type = other DNA
gactcacagaccgaggggacggagaacaaccaagaaagcgaagaagaagcggagacgacgacactcgtcaagcagcagct

SEQ ID NO: 181535 - DNA, 80 bp, synthetic construct
  source 1..80: mol_type = other DNA
gaggccttgcggttggtggtgaaggccgggtccagatacacgtaaagcgtcttgccgaaataatcgtaggcgttggtgtt

SEQ ID NO: 181536 - DNA, 80 bp, synthetic construct
  source 1..80: mol_type = other DNA
gtttgtccattacaggttgatcagcaggcaactaggtttgtgccaataactatttcaattagtccaatgtttgcagagtt

SEQ ID NO: 181537 - DNA, 80 bp, synthetic construct
  source 1..80: mol_type = other DNA
tagtatcaatgatacagtacaattcagaatgacttttggtaggcttttccaagcattccacaataatccaggtgtagtta

SEQ ID NO: 181538 - DNA, 80 bp, synthetic construct
  source 1..80: mol_type = other DNA
cacctggagcacccaaaccggacggcagggaagcttttcaatggcaatcctcgactaacccatcagtgttcagcaaaatg

SEQ ID NO: 181539 - DNA, 80 bp, synthetic construct
  source 1..80: mol_type = other DNA
tggatgcgcgaagctgcgcaggccgccgctcaagccgcggtgcaggccgcgcaggccgccgccgctcaggtcgcccaggc

SEQ ID NO: 181540 - DNA, 80 bp, synthetic construct
  source 1..80: mol_type = other DNA
cttttacgacatcgggcgacaggtgcccaagctgggcaatgcccccgccgcgcaggtcagcaacgtgctcatcgccaacc

SEQ ID NO: 181541 - DNA, 80 bp, synthetic construct
  source 1..80: mol_type = other DNA
gctgtccacttttgtgtggtaaggcagtggtcttgcaaaacaagagaacacaaggaagttactctgtcttgactgtcatt

SEQ ID NO: 181542 - DNA, 80 bp, synthetic construct
  source 1..80: mol_type = other DNA
agaattcgtcttgctctattcaccctaacttttcttcttgcccgttctctttcttagtatgaatccagtatgcctgcctg

SEQ ID NO: 181543 - DNA, 80 bp, synthetic construct
  source 1..80: mol_type = other DNA
ccatgtttatgaaagagcaagataaattcaaaagctctaatggctctactgcattaaccgaaagcaaagcacagaacatt

SEQ ID NO: 181544 - DNA, 80 bp, synthetic construct
  source 1..80: mol_type = other DNA
atttaatggaaatcgccgaggtggactccgttgttccagtcaacaacctcagcagccacataaactccatcgaggcgtat

SEQ ID NO: 181545 - DNA, 80 bp, synthetic construct
  source 1..80: mol_type = other DNA
tgttgtacatgtgcagaaaaatgtgtaaatacgtgttatttatcccatgcgtcttgtacatagatatatgtttttatata

SEQ ID NO: 181546 - DNA, 80 bp, synthetic construct
  source 1..80: mol_type = other DNA
caaagtcattagcaatgctctgcaattatcacaaccaacacggcccgttactgcctctgacacacccggtacgagcggag

SEQ ID NO: 181547 - DNA, 80 bp, synthetic construct
  source 1..80: mol_type = other DNA
tgccactgaaagatgagacccaggattctggtgacacctactatggcttagtctccattaacgactttggggccctagca

SEQ ID NO: 181548 - DNA, 80 bp, synthetic construct
  source 1..80: mol_type = other DNA
ggaagcacgggtcatgtcatcgggatccatgttggaggaaatggaagagtgggttattgtgcagctttgctgcgacggta

SEQ ID NO: 181549 - DNA, 80 bp, synthetic construct
  source 1..80: mol_type = other DNA
gaaatggttggattccttctaaatttaaaaacaatttgggcataatggtaaattggcttaaccctgccggacttaccgaa

SEQ ID NO: 181550 - DNA, 80 bp, synthetic construct
  source 1..80: mol_type = other DNA
tgggtttacaagtaatataaaagatcacctaacaggtctgtgtacatcaattactgataaaatcaccaccagagtcatca

SEQ ID NO: 181551 - DNA, 80 bp, synthetic construct
  source 1..80: mol_type = other DNA
acccgaaagtcctcggcccacagtacacgttccacagctgggacaaaagacgtgactattatagcagaaaaactattaag

SEQ ID NO: 181552 - DNA, 80 bp, synthetic construct
  source 1..80: mol_type = other DNA
tggtagcctcaatccagtatggtttaaactactaagtaaagttcttaatgatttgggttttccaggagatctagtgaata

SEQ ID NO: 181553 - DNA, 80 bp, synthetic construct
  source 1..80: mol_type = other DNA
accactgcagatggataacaccctcttttcttccacccttcttggcgaggttctaaattacttctctaattggtctggta

SEQ ID NO: 181554 - DNA, 80 bp, synthetic construct
  source 1..80: mol_type = other DNA
tactgatgttcatcactactcttggtataatctatatgatttataagctctttgcacaaactcaaggcccatattctggt

SEQ ID NO: 181555 - DNA, 80 bp, synthetic construct
  source 1..80: mol_type = other DNA
accccgccccgtcacggtgacgtagtctgtcttgaggagatgtagacttgtagacactgcaaaacctcaggacctacgct

SEQ ID NO: 181556 - DNA, 80 bp, synthetic construct
  source 1..80: mol_type = other DNA
ttcatataaaagaacccatcgccaagaaccagtgtgtctccttatccatggtgcaccaggatgtggcaaatcattaacaa

SEQ ID NO: 181557 - DNA, 80 bp, synthetic construct
  source 1..80: mol_type = other DNA
tgaggaatatccaaaatctccaaagagacctagaattttcccacctacagagcagctccaagaagacccgcaagagcaag

SEQ ID NO: 181558 - DNA, 80 bp, synthetic construct
  source 1..80: mol_type = other DNA
atagacaccacaacttcaccttgatgatcataccttttgtggaattggactatgcaggagggaccacctacgttccaatc

SEQ ID NO: 181559 - DNA, 80 bp, synthetic construct
  source 1..80: mol_type = other DNA
cagttttcaaacgagacctaaaggcagaaagagatacagggtaacaataaggccccccaacatgttcaatgacaagtggt

SEQ ID NO: 181560 - DNA, 80 bp, synthetic construct
  source 1..80: mol_type = other DNA
ataatctggacaataatttaaggaaggtaagtctttacactgtaccattgactagccaggtaaaaacagctcagaaagtt

SEQ ID NO: 181561 - DNA, 80 bp, synthetic construct
  source 1..80: mol_type = other DNA
tgtcattatataaaaattactatgatagtaacttatataacaatgtagaactatatcaaacatttcaaacaatagctcaa

SEQ ID NO: 181562 - DNA, 80 bp, synthetic construct
  source 1..80: mol_type = other DNA
atgggcgctcaggtctccaaacaaagcgtgggagctcatgaaactatggtgcatgctggctctggtgcagttgttaaata

SEQ ID NO: 181563 - DNA, 80 bp, synthetic construct
  source 1..80: mol_type = other DNA
attatgcctcgagcagcacacgaaatactggataactctataacaggagcaagggaagagatatcaggtatgttagatac

SEQ ID NO: 181564 - DNA, 80 bp, synthetic construct
  source 1..80: mol_type = other DNA
agtgcagcagctttacgacggcgactcccatcggcaatttctatgacaccagatactcttcgaccgaacgccggtgtctg

SEQ ID NO: 181565 - DNA, 80 bp, synthetic construct
  source 1..80: mol_type = other DNA
cacttcgggctcgcgggggtcgggaaatttgctaaacagactccgagttgccattggacactggagtctgtgagttagta

SEQ ID NO: 181566 - DNA, 80 bp, synthetic construct
  source 1..80: mol_type = other DNA
aaaacatgggtgtacaatataacactaaactgttattagccgtattagcaattatcccagctggcattctagtacaggca

SEQ ID NO: 181567 - DNA, 80 bp, synthetic construct
  source 1..80: mol_type = other DNA
caacactcaatttaactttatcacacacgagaatgacatacccccaagaggagcctcctatgggggcaaccttactaaca

SEQ ID NO: 181568 - DNA, 80 bp, synthetic construct
  source 1..80: mol_type = other DNA
tggtgcggtttacgtgggaaactacaaaatagtcaatagacacttggccacacatacagattggcagggttgcgtttggg

SEQ ID NO: 181569 - DNA, 80 bp, synthetic construct
  source 1..80: mol_type = other DNA
ccaccacacagcatggcaacgaccagtcatgttgagcatgagctcctctccaaattgattgatgagttaaaggtcaaggc

SEQ ID NO: 181570 - DNA, 80 bp, synthetic construct
  source 1..80: mol_type = other DNA
ggcacaatggtgcaggcaccgtctgtatacgtctgcggcttcgtggagcgcccggacgccccacccaaggacgcctgcct

SEQ ID NO: 181571 - DNA, 80 bp, synthetic construct
  source 1..80: mol_type = other DNA
cctcaagaaagtacaggaagaacacacaggccaagaaaatttaaaaaacttaatacacccagttttctgtcagtacgtag

SEQ ID NO: 181572 - DNA, 80 bp, synthetic construct
  source 1..80: mol_type = other DNA
tcggtgacacagcttcagaaacaacgtgtgtggcgcacgctacttatggggaacccccggagcccgctcgatcgacggct

SEQ ID NO: 181573 - DNA, 80 bp, synthetic construct
  source 1..80: mol_type = other DNA
cctatgcgcttctaccctacagaccccccaacctacccatggctaccaaaaaagccagttacccacactacctatagagt

SEQ ID NO: 181574 - DNA, 80 bp, synthetic construct
  source 1..80: mol_type = other DNA
gcgcgagcggcggcacagctcggcccgatgatcgggatgcaccaagggcacgttgggttgcagacgcgcgcagatggatt

SEQ ID NO: 181575 - DNA, 80 bp, synthetic construct
  source 1..80: mol_type = other DNA
gagcagccatggcgtggagctggtggtggcagagatggcgccgacgaccgtggggcagacgccgacggtggaggagacta

SEQ ID NO: 181576 - DNA, 80 bp, synthetic construct
  source 1..80: mol_type = other DNA
tacggagcctgtaaaggacataatggtgaagtcgctgcccgcactgaattcaccatcagctgaggaatgcgggtacagtg

SEQ ID NO: 181577 - DNA, 80 bp, synthetic construct
  source 1..80: mol_type = other DNA
gcccgcgaatttcaaaaagtgttgccctctaatttgcggcaaagctatacagctaatggacaagcacactagacagagat

SEQ ID NO: 181578 - DNA, 80 bp, synthetic construct
  source 1..80: mol_type = other DNA
atctgaagcacgtaggattaaaaatttgtatattaagtgtaacaatattattaaagggggaaaacgaaatgagccagttg

SEQ ID NO: 181579 - DNA, 80 bp, synthetic construct
  source 1..80: mol_type = other DNA
gtgtaaattaacttttctaactcacaatttgtgtggggtggcagatggcgtgccataattctattagtgagataccacac

SEQ ID NO: 181580 - DNA, 80 bp, synthetic construct
  source 1..80: mol_type = other DNA
aaggtcaagagcaaccttagggctatctttcaaggtttgggtgacaccactccaccaggcttcatagtagacttgttatc

SEQ ID NO: 181581 - DNA, 80 bp, synthetic construct
  source 1..80: mol_type = other DNA
agagagccttcccaacacacagcagtctgcacccgcacactcacaagaagtcccagcattaacggcagtggaaacaggtg

SEQ ID NO: 181582 - DNA, 80 bp, synthetic construct
  source 1..80: mol_type = other DNA
tataactaccttagagacatggctatatggaaaatgcacacactatcaaacatttgccacagacaccagacttaatccac

SEQ ID NO: 181583 - DNA, 80 bp, synthetic construct
  source 1..80: mol_type = other DNA
ttatggctgattctactacaccatctgaaaaccatggtgtggatgctaagggttattttaaatggtcggccacaacagct

SEQ ID NO: 181584 - DNA, 80 bp, synthetic construct
  source 1..80: mol_type = other DNA
gtgcgcttattgagggacaccacacacattagccagagtgccataatagccactactcaagggatcgatgaagtcatcga

SEQ ID NO: 181585 - DNA, 80 bp, synthetic construct
  source 1..80: mol_type = other DNA
tctacctctcaaaaacctgcactacgaaataaagaagaaatacctaatgatcacggatacttaaacacaacaccaactga

SEQ ID NO: 181586 - DNA, 80 bp, synthetic construct
  source 1..80: mol_type = other DNA
tcagcacccatcctgccgaactttcaccctaccccatgtattcatatacccggggaagtcaggaatttgctggagctgtg

SEQ ID NO: 181587 - DNA, 80 bp, synthetic construct
  source 1..80: mol_type = other DNA
cccggggagacccgccccggcagaaaacggacacacatccacaaagagtcccggccacccgactgaaccaacaccaatta

SEQ ID NO: 181588 - DNA, 80 bp, synthetic construct
  source 1..80: mol_type = other DNA
tcaggttccagtggcatttatagcactaaaacagacagtaactatgggtaccactcttttcaagttaaaggcaaaaaaag

SEQ ID NO: 181589 - DNA, 80 bp, synthetic construct
  source 1..80: mol_type = other DNA
agaattagagatcaggcaaatacagtggaaacaatagtactaatggcagttcattgcatgaattttaaaagaaggggagg

SEQ ID NO: 181590 - DNA, 80 bp, synthetic construct
  source 1..80: mol_type = other DNA
gctgccgcatcaggggtctcttacccatagttatctgtggacacggacggagtgccagaaactatgccctgcactctgat

SEQ ID NO: 181591 - DNA, 80 bp, synthetic construct
  source 1..80: mol_type = other DNA
ggtataaataaatacttctttacaccagatggactctggggagatcctatttataactacacaggcaacggaacacaaac

SEQ ID NO: 181592 - DNA, 80 bp, synthetic construct
  source 1..80: mol_type = other DNA
atactacatacagacaaaccattgacgacagcttcactgaaggtggttacattagtgtgttctatcaaactagaatagtg

SEQ ID NO: 181593 - DNA, 80 bp, synthetic construct
  source 1..80: mol_type = other DNA
atctacctgagcatgaggatgactacatggagtgcaatctggctctagtggctaatcaggaacaaccaactatcatagag

SEQ ID NO: 181594 - DNA, 80 bp, synthetic construct
  source 1..80: mol_type = other DNA
tggatggccaactgatggcgtttgattactcaaattttgacgcctcactatcaccagtgtggttcaagtgccttgagcaa

SEQ ID NO: 181595 - DNA, 80 bp, synthetic construct
  source 1..80: mol_type = other DNA
ccaacgcacgctaatccaggtgagaccattgtgattggtggtaaagaggttagaatcacagatgcaaaaagactagttga

SEQ ID NO: 181596 - DNA, 80 bp, synthetic construct
  source 1..80: mol_type = other DNA
gcaaggctgcctccattgtctcagcaccgatttctaggcagcaccctctttaataggtgcaaggggggtgcggtgttggt

SEQ ID NO: 181597 - DNA, 80 bp, synthetic construct
  source 1..80: mol_type = other DNA
gacccgcgtgacttatcacgtggtgcgtgcgtcacggcggccattttgtttcacaaaatggcggacttccttcctctttt

SEQ ID NO: 181598 - DNA, 80 bp, synthetic construct
  source 1..80: mol_type = other DNA
gcgaatgcgcgctcgttaatctgaacgaaggccgcgtcaactacgcctccctgctagccttcagtcatcatcccgagttc

SEQ ID NO: 181599 - DNA, 80 bp, synthetic construct
  source 1..80: mol_type = other DNA
atttctatgacgggtttgcacgtgtgccaataaaggatgaaacaactgattcaggagatacatactatggcttggtttca

SEQ ID NO: 181600 - DNA, 80 bp, synthetic construct
  source 1..80: mol_type = other DNA
ctacgaacctgaaagacagcttttccacactagccgggcaaatacaggacaagataacatcaaaagttatcaagtggcta

SEQ ID NO: 181601 - DNA, 80 bp, synthetic construct
  source 1..80: mol_type = other DNA
attataaaaggtaaccgagctgacgcgggccctgacgctctccgcgggtgtttccatcattgtttgagatctgaggagga

SEQ ID NO: 181602 - DNA, 80 bp, synthetic construct
  source 1..80: mol_type = other DNA
tgaatttgtttcattaattgaacacataccagagctcatttgattggcatttttgcttagacaattgtaccacaatggga

SEQ ID NO: 181603 - DNA, 80 bp, synthetic construct
  source 1..80: mol_type = other DNA
aactggaaaggagccatgcaggaggtgaagcaaacccttgcaggacatcccaggtacaaaggaaccaatgatacgagtaa

SEQ ID NO: 181604 - DNA, 80 bp, synthetic construct
  source 1..80: mol_type = other DNA
aaccccagcatattttggacagagggtaatgccccaccacggatgtctatcccatacattggcatgggcaacgcgtatag

SEQ ID NO: 181605 - DNA, 80 bp, synthetic construct
  source 1..80: mol_type = other DNA
acgtccggtttgatattgaagtaacctttgtaattacaagtaggcaggataaaggcgccaaactgggacaagacatgcca

SEQ ID NO: 181606 - DNA, 80 bp, synthetic construct
  source 1..80: mol_type = other DNA
caccgccgccattttgtgtcacaaaatggccgacttccttcctctttttcaaaaaaataccggaagtaacgtaccggggg

SEQ ID NO: 181607 - DNA, 80 bp, synthetic construct
  source 1..80: mol_type = other DNA
atcaattggctacagttaataaagctaatgttactgcaggttacaaatacacacaccctggagagtctggtagagtggtt

SEQ ID NO: 181608 - DNA, 80 bp, synthetic construct
  source 1..80: mol_type = other DNA
gccggagacgccggtggcgccgctggaggaggcgccggcgtcctctccgccgccggaggtggcggagacggagacgctgg

SEQ ID NO: 181609 - DNA, 80 bp, synthetic construct
  source 1..80: mol_type = other DNA
cataaccagtctaggcagggcttttggtgtgggattcacagaccaaatatcagctaaagtagtagaattacaggatgttg

SEQ ID NO: 181610 - DNA, 80 bp, synthetic construct
  source 1..80: mol_type = other DNA
ttctgtgagaatgttacgagacactccttttatagaacagaagcagctgctacaaggagacgtggaagaagctgtaaaca

SEQ ID NO: 181611 - DNA, 80 bp, synthetic construct
  source 1..80: mol_type = other DNA
aactgcagaaaaatcaacttcaaaatttcgccaaagtcaacgcgtacacagtccatgaatgtcaaggccaaaccttccct

SEQ ID NO: 181612 - DNA, 80 bp, synthetic construct
  source 1..80: mol_type = other DNA
acgttgaaagtcagcgagaatatttggccgagatgcaattgcgagaaattccaagtggcgtacggcaggcggtactggag

SEQ ID NO: 181613 - DNA, 80 bp, synthetic construct
  source 1..80: mol_type = other DNA
aaggctgggttgggaaagtccagcctttactgcactgggagagctgctgagcagagacacatagaaggtcttgttgggta

SEQ ID NO: 181614 - DNA, 80 bp, synthetic construct
  source 1..80: mol_type = other DNA
ggacatcattgagacagtagcccaaaatgcactccaattgtcacaacccagacctactcaaagacccgctctcactaatt

SEQ ID NO: 181615 - DNA, 80 bp, synthetic construct
  source 1..80: mol_type = other DNA
caacaaaatcaacacgtcaaccctaccttattgccaagggatcaggctttaatctgctggtctcagattcaataataaac

SEQ ID NO: 181616 - DNA, 80 bp, synthetic construct
  source 1..80: mol_type = other DNA
cacgatcttcaagagtctcgccatctacccaacagtcttcaggtctgacacccacgccttcgttctcccgaccacgcacc

SEQ ID NO: 181617 - DNA, 80 bp, synthetic construct
  source 1..80: mol_type = other DNA
cccggaaggatgaacctccgacactaaaaccacgtatggaggtggagtttctgaagagaaagcctggttacttcccagag

SEQ ID NO: 181618 - DNA, 80 bp, synthetic construct
  source 1..80: mol_type = other DNA
tcataacaccacagggtatagaagatacaattgacaaagttataggtgtagccctcagtacatcaatgcctcaggttaaa

SEQ ID NO: 181619 - DNA, 80 bp, synthetic construct
  source 1..80: mol_type = other DNA
ggagatgaagcacgcaccacaaaggatacagtggccaataccacaccaagtggccccgcgaacaccgaacaggtgcccgc

SEQ ID NO: 181620 - DNA, 80 bp, synthetic construct
  source 1..80: mol_type = other DNA
ggtttcaacgtcctaattgagaaggtcgcctggcatggtagtcaatttgaactcgcaatctctaaagtcacggccggtgg

SEQ ID NO: 181621 - DNA, 80 bp, synthetic construct
  source 1..80: mol_type = other DNA
caaacggagagtttaaaacaggtggcaatgtccactacaactacacccaatacaaaccagacactgacaaacttaaaact

SEQ ID NO: 181622 - DNA, 80 bp, synthetic construct
  source 1..80: mol_type = other DNA
ccagttcagacggcacctaaacaggtggtcctactccaacgaacagctagacctagccaggtacaggggctgcagattta

SEQ ID NO: 181623 - DNA, 80 bp, synthetic construct
  source 1..80: mol_type = other DNA
cctatatacctatagaatacagattcaagtggtacccctgcgccttccaccagcaaaactttatgaatgacatgacacag

SEQ ID NO: 181624 - DNA, 80 bp, synthetic construct
  source 1..80: mol_type = other DNA
caagtttatatggtggagggaggcatgccatcaggtatttgtggaaccagcatctttaataccatgatcaacaacataat

SEQ ID NO: 181625 - DNA, 80 bp, synthetic construct
  source 1..80: mol_type = other DNA
taaaaatacacggagacagtagatagagttacgaataaaccggtttatttattcaagtgtctcaggagattattgaacga

SEQ ID NO: 181626 - DNA, 80 bp, synthetic construct
  source 1..80: mol_type = other DNA
cagtgagggaccacaaacaacaaactccactgatggctacagccagcactggactacccctaccacagatgcctacgagt

SEQ ID NO: 181627 - DNA, 80 bp, synthetic construct
  source 1..80: mol_type = other DNA
cgaacgagtcaagaatcaggctcttgaagcggtcaagggtgtccttggcgtccgggtgggccccgaggctctcgcagagt

SEQ ID NO: 181628 - DNA, 80 bp, synthetic construct
  source 1..80: mol_type = other DNA
ccacacaggcatctacagctctatattcttatctgcaggcagatcttactttgaaaccctaggggcctacacagacataa

SEQ ID NO: 181629 - DNA, 80 bp, synthetic construct
  source 1..80: mol_type = other DNA
gctgtcctgcccactcactccagccctggtgagactatagtcatagctgggaaagaagtgaaagtcaaggaagccaagcg

SEQ ID NO: 181630 - DNA, 80 bp, synthetic construct
  source 1..80: mol_type = other DNA
acagccaagtaagccacatcggaaacctcaagacggatttcaacgttcaggccgacgtcaaaaacgagccatgcctcccc

SEQ ID NO: 181631 - DNA, 80 bp, synthetic construct
  source 1..80: mol_type = other DNA
ataaatctgaatctaggtatggtgtgtctgtaaccaaccacatgggcactttatgttctagaatagttacaaacagtcag

SEQ ID NO: 181632 - DNA, 80 bp, synthetic construct
  source 1..80: mol_type = other DNA
gttaaaaatttagaaccattagacttaactacaagtgctggcttcccatatgttgcattgggcataaagaagagggactt

SEQ ID NO: 181633 - DNA, 80 bp, synthetic construct
  source 1..80: mol_type = other DNA
tgcatcgtggccatgctgctgtttgtggctgtgggaattttgtacgccatcttgctgctcttgctgaaagatatggctac

SEQ ID NO: 181634 - DNA, 80 bp, synthetic construct
  source 1..80: mol_type = other DNA
gtacacttctgtacttagctcccactctgctatgtgcgggtgttccgacgctatcgctcatcttaatcatcttgctaatc

SEQ ID NO: 181635 - DNA, 80 bp, synthetic construct
  source 1..80: mol_type = other DNA
taggcacacatgttatatgggatgtgggcctgcagtcctcttgtgtgttatgcatcccctggattagtcagacccattat

SEQ ID NO: 181636 - DNA, 80 bp, synthetic construct
  source 1..80: mol_type = other DNA
tgggagaatgctacctttctcaaacgaggctttaaacctgatgagagataccctttccttatccatccagtctacccaat

SEQ ID NO: 181637 - DNA, 80 bp, synthetic construct
  source 1..80: mol_type = other DNA
ccagggtttaggtgacccagaaacacctggtttcattgttgatttgcttcgatcttcaaaggatcccaaggtcatacaat

SEQ ID NO: 181638 - DNA, 80 bp, synthetic construct
  source 1..80: mol_type = other DNA
cattaaacaacatgggcaaactgtacgcacgtcatgtgaataaggacacaccataccagatgtccagcacaatccgtgtg

SEQ ID NO: 181639 - DNA, 80 bp, synthetic construct
  source 1..80: mol_type = other DNA
atctcaaccccaccattagtgagactagcctacaacttagtcaaagaccccctagaaaaggtagaaacctactacacaga

SEQ ID NO: 181640 - DNA, 80 bp, synthetic construct
  source 1..80: mol_type = other DNA
gaaacaggtcatactaaccaagtgcagcctgaggataccatagaaaccagatatgttataactgaccaaacaagagatga

SEQ ID NO: 181641 - DNA, 80 bp, synthetic construct
  source 1..80: mol_type = other DNA
ttttcagagagggattttattcgcttttcagctttaacaaatttaggttcttccatgttaaaattttgttcctccaacca

SEQ ID NO: 181642 - DNA, 80 bp, synthetic construct
  source 1..80: mol_type = other DNA
tagattctacactttggagagcaaaacatggaccaatagttctaaaggatggtgctggaaacttccagatgcactaaaag

SEQ ID NO: 181643 - DNA, 80 bp, synthetic construct
  source 1..80: mol_type = other DNA
atggcaacaggtaaactgctccttagttacagtccaccaggtgccgcccctccaaaaaccaggaaagatgctatgttagg

SEQ ID NO: 181644 - DNA, 80 bp, synthetic construct
  source 1..80: mol_type = other DNA
ccagccccctcccgcccctgtacactgccccggtccccccagaagcccccaaaagtagaggctcaggccatgctcgccct

SEQ ID NO: 181645 - DNA, 80 bp, synthetic construct
  source 1..80: mol_type = other DNA
caagtacaaacatacctgagggatcatactttcaacctttagatgccttatggggagatcctatttatggcaactcaaat

SEQ ID NO: 181646 - DNA, 80 bp, synthetic construct
  source 1..80: mol_type = other DNA
cttacggatgacagagtccggcaggaccacgggtgtcaccagcaccgccacgggaatctccaccgaggcgtccagaagca

SEQ ID NO: 181647 - DNA, 80 bp, synthetic construct
  source 1..80: mol_type = other DNA
ctaggttatctaatgtgtcaaccaatgttacaagggactgatagggctaaagcagaagtttacttaagcttgagatgtcc

SEQ ID NO: 181648 - DNA, 80 bp, synthetic construct
  source 1..80: mol_type = other DNA
aggaggaagcaattcaccacatggcccatctcctacactaacacagtccaactcaggagaaagctggaattctttacata

SEQ ID NO: 181649 - DNA, 80 bp, synthetic construct
  source 1..80: mol_type = other DNA
gcatacacccctccaggtgctgacatcccggagacgcgtcgtgacgcaatgcttggtacacacgtcgtgtgggacctggg

SEQ ID NO: 181650 - DNA, 80 bp, synthetic construct
  source 1..80: mol_type = other DNA
ccgctcgggcgccgccgggccgtgtggcggcggcagcagcccgacgtggcccgcgggtcctcccaccacggcgccgccgg

SEQ ID NO: 181651 - DNA, 80 bp, synthetic construct
  source 1..80: mol_type = other DNA
actagcatttttaacaccatgatcaacaacatcataatccgtactttagtacttgagacttataaatcaattgacctaga

SEQ ID NO: 181652 - DNA, 80 bp, synthetic construct
  source 1..80: mol_type = other DNA
ccagagtacttgttatatgtccttacacttttccaaaactatatgacagtacaaatcctaacagaggatttgtagtaata

SEQ ID NO: 181653 - DNA, 80 bp, synthetic construct
  source 1..80: mol_type = other DNA
aattgagaaggaaattagagatgttcacatattctagatttgacatggagtttacatttgtggtgacagagaggtatttc

SEQ ID NO: 181654 - DNA, 80 bp, synthetic construct
  source 1..80: mol_type = other DNA
ggcaagagtcactgccatcgagaaatacctaaaagaccaggcactactaaattcgtggggatgcgctttcagacaggtct

SEQ ID NO: 181655 - DNA, 80 bp, synthetic construct
  source 1..80: mol_type = other DNA
ggaggagtttgtagagcacacattaaaggaggtgttggtagttccagacactcaagcttcagggcctgtccataccacca

SEQ ID NO: 181656 - DNA, 80 bp, synthetic construct
  source 1..80: mol_type = other DNA
ctaaacacatttagaacacagggatgcttaagccatcctcaggtaaatgtacccaatgctaccagtaatccaaacaacca

SEQ ID NO: 181657 - DNA, 80 bp, synthetic construct
  source 1..80: mol_type = other DNA
gaacctgacaaggggtgaaacagcacacaagtttgaaccaaccagaaccacaggtgagcacacagtgcagtcaatagtat

SEQ ID NO: 181658 - DNA, 80 bp, synthetic construct
  source 1..80: mol_type = other DNA
ttggcaatgattctggtggtgagattttaactagagtagctgacgatgcctctagtgtattgggtccaaactgtttagcc

SEQ ID NO: 181659 - DNA, 80 bp, synthetic construct
  source 1..80: mol_type = other DNA
ccgcgcttccgtgtttacacaaaatggccgccaaatacttccggggttaaaggtcagcctacgtcataagtcacgtggtg

SEQ ID NO: 181660 - DNA, 80 bp, synthetic construct
  source 1..80: mol_type = other DNA
gggatacacggtaccttccgcgcatttgaccaaatcgtccttgacgtggggtagtacgcccgcgttgtcgcaggcatagg

SEQ ID NO: 181661 - DNA, 80 bp, synthetic construct
  source 1..80: mol_type = other DNA
ttaccgacaactttttgcgcaaagtcaacatgtaaaaacacccatcacggtagttcagggagatacagtttaccttaacg

SEQ ID NO: 181662 - DNA, 80 bp, synthetic construct
  source 1..80: mol_type = other DNA
cagcagagactggggctacatccaacacttcagatgagaacatgttggaaacccgttgtgtgatcaactcccatagtgtg

SEQ ID NO: 181663 - DNA, 80 bp, synthetic construct
  source 1..80: mol_type = other DNA
tgcgggtggccaaccccctaatgctggggcacccataaggtgacctgggtgtgaagagcttatgggcttgcttgtgagtc

SEQ ID NO: 181664 - DNA, 80 bp, synthetic construct
  source 1..80: mol_type = other DNA
cttggcggctgccagggatttccggtagggccacgagccgttcccggccgctgcccgggccagggcggcctcgagtggag

SEQ ID NO: 181665 - DNA, 80 bp, synthetic construct
  source 1..80: mol_type = other DNA
caaaactttatgcacccacaaactctcactgacaacaaaggccagtggcagtacacatacaccagactaatgtccaagta

SEQ ID NO: 181666 - DNA, 80 bp, synthetic construct
  source 1..80: mol_type = other DNA
cattggaagcctatcgcgttgccgtggcatcaatgacaaattcggggcagcaggtatttggattccaattgcaacccggt

SEQ ID NO: 181667 - DNA, 80 bp, synthetic construct
  source 1..80: mol_type = other DNA
ttgccctatcgtacctgggatcgaatgacagagaagctgcttgtctccgcaaaacccggcggagagaacgttaaggtttc

SEQ ID NO: 181668 - DNA, 80 bp, synthetic construct
  source 1..80: mol_type = other DNA
actaaaaggccccctcagatccggcaggtccttcgtcttgccaaagatcaggctcaacacatgctcatctcccttctcgg

SEQ ID NO: 181669 - DNA, 80 bp, synthetic construct
  source 1..80: mol_type = other DNA
tctctgtgcgtttgctgagggataccccgtttatttcccagaacgccctcctacaaaatgatccagcaactgccatagtt

SEQ ID NO: 181670 - DNA, 80 bp, synthetic construct
  source 1..80: mol_type = other DNA
cggatctccgcgccctgccatggcatggggatggtggagaagaaagaggcgctggtggtggagaaagagattcacccgtg

SEQ ID NO: 181671 - DNA, 80 bp, synthetic construct
  source 1..80: mol_type = other DNA
aaaacatggatacaaaactcatttcctactggcaacaacagcacatttggatttaattcttatgcaccagacaaaacaaa

SEQ ID NO: 181672 - DNA, 80 bp, synthetic construct
  source 1..80: mol_type = other DNA
aagcactccgagcgccagcgaggagtgcgacccttcctcaaggggcaactccctcgaagtccggcgctacgcgcttcgcg

SEQ ID NO: 181673 - DNA, 80 bp, synthetic construct
  source 1..80: mol_type = other DNA
ccaggagagggcggacacactatcggggaaaactccaacaggggtgacaaccaaccagatgaagaccctttctataattg

SEQ ID NO: 181674 - DNA, 80 bp, synthetic construct
  source 1..80: mol_type = other DNA
cgcaactcatctggcacgcgtgggacttcagacgtggactgtttagcaagacaggtattaaaagaatgtcagaacaacca

SEQ ID NO: 181675 - DNA, 80 bp, synthetic construct
  source 1..80: mol_type = other DNA
agaaacatttgagaaattagattataataatgttactttccttaagagaggattcaaacaggatgcaaaatacccctttt

SEQ ID NO: 181676 - DNA, 80 bp, synthetic construct
  source 1..80: mol_type = other DNA
aaaagaggctgagcaacgcgatgctgcccgccgccacagtacatatgctcaacaacgcccagtgtcccaacgcgcgactt

SEQ ID NO: 181677 - DNA, 80 bp, synthetic construct
  source 1..80: mol_type = other DNA
ccttttacagacacaaaaaaacttactttatagtgacctggagccgcagacccccctttaagcttaacaagtacagcagc

SEQ ID NO: 181678 - DNA, 80 bp, synthetic construct
  source 1..80: mol_type = other DNA
gtacattagatgcgtcatctgcaactttagtcaataaattacctccaatgtcattaccaacattccctaccttttcacta

SEQ ID NO: 181679 - DNA, 80 bp, synthetic construct
  source 1..80: mol_type = other DNA
aagcacataagggtgtggtgtcccaggccacctagagttgtggattacaccggcccgtcagtggattacaagcaaactaa

SEQ ID NO: 181680 - DNA, 80 bp, synthetic construct
  source 1..80: mol_type = other DNA
ttcttgaagttgaaaattttaatgctactgatgctacagacaagaagaaacaatttgtcgtgtggcccattacttacaca

SEQ ID NO: 181681 - DNA, 80 bp, synthetic construct
  source 1..80: mol_type = other DNA
aaactttggcaatggaaaaaacccagacggtaccggccaggtgcatacatactggatgatgaggtggagaccctacatga

SEQ ID NO: 181682 - DNA, 80 bp, synthetic construct
  source 1..80: mol_type = other DNA
actgctaccacaactttgtagaagaggagctaggcatctcctcagaaatctacaacgcctgtatagtgtgtgtacagtgc

SEQ ID NO: 181683 - DNA, 80 bp, synthetic construct
  source 1..80: mol_type = other DNA
ggtcaaaggttgctgctacgtcatcgagacacgtggtgccagcagctgtaaacccggaagtcgctgacacacgtgtcttg

SEQ ID NO: 181684 - DNA, 80 bp, synthetic construct
  source 1..80: mol_type = other DNA
gttatttgctttgcaaaccacttttaacaggtacaagctcaggtaggattgagatatttcttagtttgagatgcccaaat

SEQ ID NO: 181685 - DNA, 80 bp, synthetic construct
  source 1..80: mol_type = other DNA
agatggcctggggatggtggagacgacgccggcgagggtggctccggagcctatggagaagacgccgcactgcccgaaga

SEQ ID NO: 181686 - DNA, 80 bp, synthetic construct
  source 1..80: mol_type = other DNA
tgtagaatggattcattatgaacaccctacacataaaatgtgtgaactaggcaactatcatcaaaccacaccacgacgtg

SEQ ID NO: 181687 - DNA, 80 bp, synthetic construct
  source 1..80: mol_type = other DNA
cacacttgctggactacaaaactacctcacaggagaaggaacaggaaaatttaaaactggaaacaatagtatttatggac

SEQ ID NO: 181688 - DNA, 80 bp, synthetic construct
  source 1..80: mol_type = other DNA
ttcgtgacgtcatggcggccattttaagtaagctccacccaggtctgacgtcagtgtgaaaggtcatcctcggcgggaac

SEQ ID NO: 181689 - DNA, 80 bp, synthetic construct
  source 1..80: mol_type = other DNA
gtgttttcgaacatgaattcgaaaaaataaaaaggcctatcttcgtttcaaaaaaaggacagatatcaatcttcttaact

SEQ ID NO: 181690 - DNA, 80 bp, synthetic construct
  source 1..80: mol_type = other DNA
cccaggtcgcgcgtgcagaagctgcgcacgtactcctccacggtggagatggtgctgtactggccctcgaataggtagta

SEQ ID NO: 181691 - DNA, 80 bp, synthetic construct
  source 1..80: mol_type = other DNA
caataaatttgtgaatggaatcagaagcactgaaattggaaaggcattgctaattccttcttattctgttcttaggcaca

SEQ ID NO: 181692 - DNA, 80 bp, synthetic construct
  source 1..80: mol_type = other DNA
catgttcagccccatattcctcaccccgttcaggtcagcggggctggactttcccagagcataccaggacgtcacataca

SEQ ID NO: 181693 - DNA, 80 bp, synthetic construct
  source 1..80: mol_type = other DNA
aaacgcaaacaaatactatgtatctaaaccctacacatatgaaacagtcactagtttatggggagactatgtatataaac

SEQ ID NO: 181694 - DNA, 80 bp, synthetic construct
  source 1..80: mol_type = other DNA
caccaatgttgagcgccacttaagtagagctgtcttgattgtgcaatctgtggccaccgtggtggctgttgtgtcccttg

SEQ ID NO: 181695 - DNA, 80 bp, synthetic construct
  source 1..80: mol_type = other DNA
gatgtacacaccgaccaatagggagtggccaaccaggtcgctaaaggtcaagcacttctgtttccccggttggtttggat

SEQ ID NO: 181696 - DNA, 80 bp, synthetic construct
  source 1..80: mol_type = other DNA
ggagcagaaagtagtcgtcgaccagcgtctgcgaccagtcggcgaagcccaggtcacgtgatacgctgtcctggacgcgg

SEQ ID NO: 181697 - DNA, 80 bp, synthetic construct
  source 1..80: mol_type = other DNA
atatagatctccctaaacttaaaacttatcaaggaacattagaagacaatacaggcaattccacaaacaacgaagacttt

SEQ ID NO: 181698 - DNA, 80 bp, synthetic construct
  source 1..80: mol_type = other DNA
gacgtcggtcccatcgcccacagtagcggtaccagacgcggttcggcaaatgaaacgtccgcctgtacgcggaccgatca

SEQ ID NO: 181699 - DNA, 80 bp, synthetic construct
  source 1..80: mol_type = other DNA
acggcgtcggtgttgccctggggcgcccctcgcccatgcttgcggcgcgggagatcctggagcgtcagttctcagcctcg

SEQ ID NO: 181700 - DNA, 80 bp, synthetic construct
  source 1..80: mol_type = other DNA
tcagacgaaagagaaagagactaataatcaaacagtggcagcctaacaatatcagaaaatgtagaataactggcatgtta

SEQ ID NO: 181701 - DNA, 80 bp, synthetic construct
  source 1..80: mol_type = other DNA
cacttgggtgatctgggtgggaacaacccagatcccccaagtggtgtagtgctctgttattccggtaaccttgcacgcca

SEQ ID NO: 181702 - DNA, 80 bp, synthetic construct
  source 1..80: mol_type = other DNA
ggaagccaatttggatgaagcggtcttaggtaaatacaaaggcaacaagcaagtagaattcaaccagtacatacagatag

SEQ ID NO: 181703 - DNA, 80 bp, synthetic construct
  source 1..80: mol_type = other DNA
ggtaaacccaagcacataactgcatggatcccccgcccacccagagcaacccaatacctgcataaatttagcaccaacta

SEQ ID NO: 181704 - DNA, 80 bp, synthetic construct
  source 1..80: mol_type = other DNA
ccattgcgcccatgtcagctgagtataacgggctgaggctgggttcagtgcagggactccccaccatgaatacaccgggt

SEQ ID NO: 181705 - DNA, 80 bp, synthetic construct
  source 1..80: mol_type = other DNA
tgacacagtgcctcccatgcagatggacgagtacacttcacctaacacgcacccagcgttcctcatgcaggccaaaaaaa

SEQ ID NO: 181706 - DNA, 80 bp, synthetic construct
  source 1..80: mol_type = other DNA
ggcaatccaggaggtgaaggagaccattgccaaccatcccaggtatcatggtaccaagaatattagtcagataaatctgg

SEQ ID NO: 181707 - DNA, 80 bp, synthetic construct
  source 1..80: mol_type = other DNA
aaagggcaacatgatctggtgcgaccctctaacaaagggagacaacctgtacaatgacaaacaaagcaagtgcctaataa

SEQ ID NO: 181708 - DNA, 80 bp, synthetic construct
  source 1..80: mol_type = other DNA
gctattgacaaaccaactagacctgacacctcctccaatagattttataccttagaaagccagacatggtcccccgattc

SEQ ID NO: 181709 - DNA, 80 bp, synthetic construct
  source 1..80: mol_type = other DNA
actgatgaattaagtcttaaagaagcactttacggtgtagatggactcgagcccatagacataacaacaagtgctggtta

SEQ ID NO: 181710 - DNA, 80 bp, synthetic construct
  source 1..80: mol_type = other DNA
gtatgtacacacgcgggaagcaatctacagaaatgcccatctagcaagtgttaatgagaatacaatattacatgccataa

SEQ ID NO: 181711 - DNA, 80 bp, synthetic construct
  source 1..80: mol_type = other DNA
attggtcgccagtaggcagggcatagaggagtttatagacacagcaattaaaaatgcattgaaagtgtcacaacccagca

SEQ ID NO: 181712 - DNA, 80 bp, synthetic construct
  source 1..80: mol_type = other DNA
atgcatctggtaacaacaactcctcgccccaggctggggcaccaccagtgatccgtagagccctgcctccgccagcggct

SEQ ID NO: 181713 - DNA, 80 bp, synthetic construct
  source 1..80: mol_type = other DNA
aggtcaccttatacgtcataagtcacgtggtaaggggcgtgcctaaacccggaagcatcctcgtccacgtgactgtgacg

SEQ ID NO: 181714 - DNA, 80 bp, synthetic construct
  source 1..80: mol_type = other DNA
gaaagtgagtggggccagacttcgccataaggcctttaacttccgggtgcgtgtggtggccgccattttagcttcgaccg

SEQ ID NO: 181715 - DNA, 80 bp, synthetic construct
  source 1..80: mol_type = other DNA
acagatactttccaatagtggtggctgagcacgactggtacgaaatacaagcatccccctactaccctagacatattcag

SEQ ID NO: 181716 - DNA, 80 bp, synthetic construct
  source 1..80: mol_type = other DNA
ccaacacctcctatacacatcccaggtgaggtacataatcttctggagattgcccaagtcgagagtattctcgaggttaa

SEQ ID NO: 181717 - DNA, 80 bp, synthetic construct
  source 1..80: mol_type = other DNA
aaggatataagcaagcttagggaggccctcgacaagtatggagttgacttacccatggttactttcctaaaggatgaact

SEQ ID NO: 181718 - DNA, 80 bp, synthetic construct
  source 1..80: mol_type = other DNA
catggtgtgatcgggattcttactgcaggaggcgagggacacgctgccttcacagatctaagaccctaccgtgatttgaa

SEQ ID NO: 181719 - DNA, 80 bp, synthetic construct
  source 1..80: mol_type = other DNA
ccagctaatgatcaggaaaaaatctttacagaaataagcaccctccatgatttatctttaaaatttttaccattatatgc

SEQ ID NO: 181720 - DNA, 80 bp, synthetic construct
  source 1..80: mol_type = other DNA
gatgagtatatgagagaggccgttgaccactacgcggggcagctaatgtctttggaaatccccactgagcagatgtgtct

SEQ ID NO: 181721 - DNA, 80 bp, synthetic construct
  source 1..80: mol_type = other DNA
tggtcgttgcccacgaaggcgcgggtggtgttgcgcggcgacgggtggcaggacttaagtaccaagtgccgccgtcggtc

SEQ ID NO: 181722 - DNA, 80 bp, synthetic construct
  source 1..80: mol_type = other DNA
ggacaaacaactgtgcgacgctggtgttaccatacgtcaactcgtcctcgaccgactgtatggcgaaacacaacaactgg

SEQ ID NO: 181723 - DNA, 80 bp, synthetic construct
  source 1..80: mol_type = other DNA
tcttcgcgcccctctgcgttcacgaggaccatttccatgtgcagctggtgatcggccgcggtgcgctgcagccggaggaa

SEQ ID NO: 181724 - DNA, 80 bp, synthetic construct
  source 1..80: mol_type = other DNA
gttctgccaaatggtttccaccacagaattcatagtaccaatggccaacatagaagaaaagggtagatcatttactagtg

SEQ ID NO: 181725 - DNA, 80 bp, synthetic construct
  source 1..80: mol_type = other DNA
cttatgtgcggctggggagcctacagcagaaactacagcagtcacttagaggacaaaataactgcgggaccgtacggtgg

SEQ ID NO: 181726 - DNA, 80 bp, synthetic construct
  source 1..80: mol_type = other DNA
gacgagttccccaccgcaaaagtgtggaaccgcccggtacgcaagtactactcagacaccccctactacccctgggcccc

SEQ ID NO: 181727 - DNA, 80 bp, synthetic construct
  source 1..80: mol_type = other DNA
tgtacaggccccaaaaccctatcccagtaggaaacatttatagaagatggattcagttagggctgcagaaatgtgtccgg

SEQ ID NO: 181728 - DNA, 80 bp, synthetic construct
  source 1..80: mol_type = other DNA
ctgcacaatcaacagaagcaaccagcggagtcaacagccaagaggtgcctgcactaacagcagtagagactggcgcatcg

SEQ ID NO: 181729 - DNA, 80 bp, synthetic construct
  source 1..80: mol_type = other DNA
tcgacattacaacttcaccttaatgataatccctttcgccaagttggagtacacagagcaggcctcaaattacgtaccaa

SEQ ID NO: 181730 - DNA, 80 bp, synthetic construct
  source 1..80: mol_type = other DNA
aaagataatgacgttgagttgtgagttaataaaaaatggggcaaataaatcatcatggaaaagtttgctcctgaattcca

SEQ ID NO: 181731 - DNA, 80 bp, synthetic construct
  source 1..80: mol_type = other DNA
atatcagtcaaagcttagaagaggcacaaattcaacaagaaaagaatatgtatgaattacaaaaattaaatagctgggat

SEQ ID NO: 181732 - DNA, 80 bp, synthetic construct
  source 1..80: mol_type = other DNA
ccttgtcactcctaaggaaaaatataattactgtaacaacatctaaaggagagtttactagtctgggaatttatgacaga

SEQ ID NO: 181733 - DNA, 80 bp, synthetic construct
  source 1..80: mol_type = other DNA
taccttgattcaaaagatgcaacggccattgataaacctactcagccagatacctcaaccaacagattctacacactaga

SEQ ID NO: 181734 - DNA, 80 bp, synthetic construct
  source 1..80: mol_type = other DNA
caaccagcagccttatcaaagaatgatccacggttggaggttgatttggacaccgcagtgttctccaagtacaaaggaaa

SEQ ID NO: 181735 - DNA, 80 bp, synthetic construct
  source 1..80: mol_type = other DNA
acgtactcgtaggccgagttcccggcgatgaagatcttgagactgggaagctgacattcctcagtgcggtggttgcccaa

SEQ ID NO: 181736 - DNA, 80 bp, synthetic construct
  source 1..80: mol_type = other DNA
gccctcactaccaccagacccagaccactttgatggttataagcaacaggccgtcgtgatcatggatgacttgtgccaaa

SEQ ID NO: 181737 - DNA, 80 bp, synthetic construct
  source 1..80: mol_type = other DNA
atgagctccgggcacctgagaaaatcaaagcagggaaaacccgcatcattgaagccagtagtattaatgacacagcccat

SEQ ID NO: 181738 - DNA, 80 bp, synthetic construct
  source 1..80: mol_type = other DNA
agaccattagccccatcacaagcaaagtcaggatttacttcaaacccaaacacgtaaaggcatgggtgcctagaccaccc

SEQ ID NO: 181739 - DNA, 80 bp, synthetic construct
  source 1..80: mol_type = other DNA
tgtcccactagaaatgcagagccgatggcgaccagaactcctgttccaggagcaagtactgactgaccttagcatgagcg

SEQ ID NO: 181740 - DNA, 80 bp, synthetic construct
  source 1..80: mol_type = other DNA
caggcagaagcagaagcaccccaagaaagtgaagcaggcctttaaccccctcatttaacaccatgttctcgtgcaagcag

SEQ ID NO: 181741 - DNA, 80 bp, synthetic construct
  source 1..80: mol_type = other DNA
acaaaacccacatcaggccactactggcaaactttcatgaccaacagcatggttagagctcacatagatgccagcgctgc

SEQ ID NO: 181742 - DNA, 80 bp, synthetic construct
  source 1..80: mol_type = other DNA
gggattgaagacttgatctccgaggttgcaagtaatgcattaaagttgtcacaaccaaagcctaacacccagcaaagcct

SEQ ID NO: 181743 - DNA, 80 bp, synthetic construct
  source 1..80: mol_type = other DNA
tcaccgaaggttcccgattatataccaccacggcgatacattccttcgagtgggcaatcttcagaagtcgtgctacctga

SEQ ID NO: 181744 - DNA, 80 bp, synthetic construct
  source 1..80: mol_type = other DNA
ttaaacacaattgttgtgttgtgacaactgacaagggtaaatttaccggccttggaatttacaaccagatcatggttctt

SEQ ID NO: 181745 - DNA, 80 bp, synthetic construct
  source 1..80: mol_type = other DNA
ttgtttgtcaaacccaatataaaaaacttaggtgtcaggactatgccattcagcatttacgagactccctacactgcagg

SEQ ID NO: 181746 - DNA, 80 bp, synthetic construct
  source 1..80: mol_type = other DNA
ggatttggcccctggggaaagaagcctcgcaacttccctgtagcccaagcaccccaggggatactgccatctgcaccacc

SEQ ID NO: 181747 - DNA, 80 bp, synthetic construct
  source 1..80: mol_type = other DNA
ggtcccccccgtccaggtggtggctaagcgactgccgcggcccgacacacccaggactccgcgccaaaagaagatttcac

SEQ ID NO: 181748 - DNA, 80 bp, synthetic construct
  source 1..80: mol_type = other DNA
acccaccgtcaaaagcctttaaccgttatccgccaaccaactacgaaacagctagtaataccctgtattcttgcgaggtg

SEQ ID NO: 181749 - DNA, 80 bp, synthetic construct
  source 1..80: mol_type = other DNA
gccggttacatctcatgctggtaccaaacaaatataattgtgccaccatcaacacccacgcagtgcttcctgttgggctt

SEQ ID NO: 181750 - DNA, 80 bp, synthetic construct
  source 1..80: mol_type = other DNA
aagtttacagtttctagccttaagagttgtacaagaaagaaagaatggatcccagggagagagtgccaccaggaaacagc

SEQ ID NO: 181751 - DNA, 80 bp, synthetic construct
  source 1..80: mol_type = other DNA
gctcttaaatagctatgttttttggtaggcctcacagaaagaagaggctactgtcactgtttagcttgccaactgcgaag

SEQ ID NO: 181752 - DNA, 80 bp, synthetic construct
  source 1..80: mol_type = other DNA
aacttatacaagttgatacattgattcccctgaataatctgggtgttacagacaccatgagtgagtaccgaattccactc

SEQ ID NO: 181753 - DNA, 80 bp, synthetic construct
  source 1..80: mol_type = other DNA
gatggggcaggtatcgaaagacagttttttgaatcctgctttcgatgccactccggttgctgtggttgtggcaattttat

SEQ ID NO: 181754 - DNA, 80 bp, synthetic construct
  source 1..80: mol_type = other DNA
atcagataagatcaccaccagagttatcaagtggctgattcgaattatcagtgccttgactatcatgattagaaattcaa

SEQ ID NO: 181755 - DNA, 80 bp, synthetic construct
  source 1..80: mol_type = other DNA
aggtccaataacactaaatgggccacctccaccagctatattagacttgctcaagtcagttcgcacaccagaggtcatca

SEQ ID NO: 181756 - DNA, 80 bp, synthetic construct
  source 1..80: mol_type = other DNA
acactgactttatagttacctttaacataaagcctcccatgaaaatgaacgagactacctcaccgaacgcgcacccgggc

SEQ ID NO: 181757 - DNA, 80 bp, synthetic construct
  source 1..80: mol_type = other DNA
caatgctagatccattatacatgatggatggaactctgattggaaatagcttaatttttcctcatcaatttataaacttg

SEQ ID NO: 181758 - DNA, 80 bp, synthetic construct
  source 1..80: mol_type = other DNA
cctatagttgatgctaccacaaatggaaactggtctcaatacataaactctcaaaaactaaatgaaacaccaccatctac

SEQ ID NO: 181759 - DNA, 80 bp, synthetic construct
  source 1..80: mol_type = other DNA
ccaaaaagcaggcaataaccaaaactataacactaacaaatgcatattagaaaactggctatacggaacaggagccctgt

SEQ ID NO: 181760 - DNA, 80 bp, synthetic construct
  source 1..80: mol_type = other DNA
cacgccacgcggcctctggcatccccctgtggctgcttcttagcgctcagtgtgagcagttccacgaggggcgtgagcga

SEQ ID NO: 181761 - DNA, 80 bp, synthetic construct
  source 1..80: mol_type = other DNA
tgagacgcagacggagacgaaagaggagactggtactgactcaatggcacccagctaaagttaggagactgagaatagcc

SEQ ID NO: 181762 - DNA, 80 bp, synthetic construct
  source 1..80: mol_type = other DNA
agggctagtacccatttattaccaaaacagatggtatccaagaataaagtttcagagccaagtagtgcatgactttatac

SEQ ID NO: 181763 - DNA, 80 bp, synthetic construct
  source 1..80: mol_type = other DNA
actgctgaatttacaacctcaaataatacactaggaagtaaatcagatatagccccctacttagaacaaccaacagcagc

SEQ ID NO: 181764 - DNA, 80 bp, synthetic construct
  source 1..80: mol_type = other DNA
tattagtggtgctcatcccagaacatcaactggcttacatcggtggagacaaagtggatgtagcctacaagcatacccat

SEQ ID NO: 181765 - DNA, 80 bp, synthetic construct
  source 1..80: mol_type = other DNA
tggcatggtggtggtggaggaggagacgccggccgtggagacgcaggaggcgccgctggagacgacgaccccgtgtacga

SEQ ID NO: 181766 - DNA, 80 bp, synthetic construct
  source 1..80: mol_type = other DNA
gaagcttgtcattggattcatcgtttcctgaactacaggcgtagggcctattgtagcaggcatgtcttcattcctgcgta

SEQ ID NO: 181767 - DNA, 80 bp, synthetic construct
  source 1..80: mol_type = other DNA
cctaaagctttcccaaccaaagccaaatgctcaacagagtctacctaacaccaatagttctgaacctactcactcccagg

SEQ ID NO: 181768 - DNA, 80 bp, synthetic construct
  source 1..80: mol_type = other DNA
gacttaatttgtttggaaccattctcagtacacccaatgctagaaaaattggtacaagaaaaatttcacaaccttctgaa

SEQ ID NO: 181769 - DNA, 80 bp, synthetic construct
  source 1..80: mol_type = other DNA
ccactttcacaggaaaggtattgagcagctggcagatcttttggtggcggcagagcccgtcgtagcgcagaatctcctcg

SEQ ID NO: 181770 - DNA, 80 bp, synthetic construct
  source 1..80: mol_type = other DNA
ccttctactcccacaaaccacttagaacagttagggatgagagtgggcttggtagattaatatgccagccgcttttaact

SEQ ID NO: 181771 - DNA, 80 bp, synthetic construct
  source 1..80: mol_type = other DNA
catgacacatagcgtacctctggacggtacagtatatgataacatgattcaaggaaagtatggattcctaccgacatgtt

SEQ ID NO: 181772 - DNA, 80 bp, synthetic construct
  source 1..80: mol_type = other DNA
tagccttagtgagggtgagaccgcaaagaaatttagcgcaactgcatccaatggagctcacacagttcagagtatagtga

SEQ ID NO: 181773 - DNA, 80 bp, synthetic construct
  source 1..80: mol_type = other DNA
cagtagtgccaataaacaacacaaaggagaatgtcaatagtatggaggcttataggatacccgttacggggggggatcag

SEQ ID NO: 181774 - DNA, 80 bp, synthetic construct
  source 1..80: mol_type = other DNA
ggaggcaggaactaaaattcccaaaagagggacatggggctttatcattattatttgcatacttcactggtgagcttaat

SEQ ID NO: 181775 - DNA, 80 bp, synthetic construct
  source 1..80: mol_type = other DNA
cactgtacctgctggggaacagatgaccctctcagttccatattattcaaacaaaccattgagaactgttcggcatgagt

SEQ ID NO: 181776 - DNA, 80 bp, synthetic construct
  source 1..80: mol_type = other DNA
tcacgcaggacgggggttatggctacaacacgctcaacaagatggggaagatctatgtcagacacgtcaacaaacaaaca

SEQ ID NO: 181777 - DNA, 80 bp, synthetic construct
  source 1..80: mol_type = other DNA
agataggagatatagtggacccatctgtggttacttaatttctagattactcttgatatgataagaacaataaattgtat

SEQ ID NO: 181778 - DNA, 80 bp, synthetic construct
  source 1..80: mol_type = other DNA
gattgcaactactaacaaaccagatttttctagtacagtgttattagactcaggggccctacgtaggagattcccataca

SEQ ID NO: 181779 - DNA, 80 bp, synthetic construct
  source 1..80: mol_type = other DNA
acactattccgcccagttatttatgttggacatcaacccagagcccatatctttggagcaggctgtgtatggtatgcaaa

SEQ ID NO: 181780 - DNA, 80 bp, synthetic construct
  source 1..80: mol_type = other DNA
aagaatggaatataacagtggatgattacgaggtggtaattgctaagttgatgcccatggtgtttgattaatttaaaaat

SEQ ID NO: 181781 - DNA, 80 bp, synthetic construct
  source 1..80: mol_type = other DNA
gggatgtttggccagaacatgttccaccatgcgctgggacggtcgggctacatcatacatacacagtgtaatgccactaa

SEQ ID NO: 181782 - DNA, 80 bp, synthetic construct
  source 1..80: mol_type = other DNA
gaaaggccatccaatttgtagacaaaatgacacgcaccagatacaccatagatgagctgaccactttgatcataaatgag

SEQ ID NO: 181783 - DNA, 80 bp, synthetic construct
  source 1..80: mol_type = other DNA
ggcagtaagccaacaggagtgggagtttgcggggacaacggtcgatagacggaccgcgtagcagcaggaacaggcagccg

SEQ ID NO: 181784 - DNA, 80 bp, synthetic construct
  source 1..80: mol_type = other DNA
tagtgtaattactacaattattaaagacgatatactatccgcagtgaaggataatcaatcacatcttaaagccgataaaa

SEQ ID NO: 181785 - DNA, 80 bp, synthetic construct
  source 1..80: mol_type = other DNA
caatgaggctacacggaccccactggcgacagtggtgtagcctgcgtggtgccctacctggggtttcataccccaggatt

SEQ ID NO: 181786 - DNA, 80 bp, synthetic construct
  source 1..80: mol_type = other DNA
aaagttaggccccccagactcctaactgacaagtggtacttccagtcagacttctgcaacgttccgctttttagcctaca

SEQ ID NO: 181787 - DNA, 80 bp, synthetic construct
  source 1..80: mol_type = other DNA
ccttcccactccggtagacagcctagagacgtacaagttgttgacccgatcaccatgggtcccagatgggtattccacgc

SEQ ID NO: 181788 - DNA, 80 bp, synthetic construct
  source 1..80: mol_type = other DNA
gaaacaggaattgatctaaatacatctgatgaggatggtcctatgaaggaaccgctttacatgatgaatggaaccttaat

SEQ ID NO: 181789 - DNA, 80 bp, synthetic construct
  source 1..80: mol_type = other DNA
cggacgaatatgcctgcgccagattctgggataggcccgtccgcaccaactacacagacacccctacctatccctggatg

SEQ ID NO: 181790 - DNA, 80 bp, synthetic construct
  source 1..80: mol_type = other DNA
gccgcgtacacggtacccgtgtcgccgcagagaatccgcacgcggtgaaagaaggtcttgtcctcggcgccctcgatctc

SEQ ID NO: 181791 - DNA, 80 bp, synthetic construct
  source 1..80: mol_type = other DNA
actaagaccccctactgggccacagccagacggcactccatataataccacttggttagacaaatggaaaagagcgtggc

SEQ ID NO: 181792 - DNA, 80 bp, synthetic construct
  source 1..80: mol_type = other DNA
gagtaaatgtcttatacaagacatgcccttgtgggcctctgtgtacggattctccgagtactgcagtaaagtaacaggag

SEQ ID NO: 181793 - DNA, 80 bp, synthetic construct
  source 1..80: mol_type = other DNA
acacctacaatgccaaaagcaataaacagaagcttacacagttaagacaagcctactttaaacagcttacctctgaggga

SEQ ID NO: 181794 - DNA, 80 bp, synthetic construct
  source 1..80: mol_type = other DNA
gtggactttttacaggcacccagacacagactttatagtgtacttcactaacaatccccccatgaagaccaaccagttct

SEQ ID NO: 181795 - DNA, 80 bp, synthetic construct
  source 1..80: mol_type = other DNA
tgaggttagagagtattgtgagaagaaaggatggatagttaacgtgtcaagtgaaacaacaattgagagaaatctgagtc

SEQ ID NO: 181796 - DNA, 80 bp, synthetic construct
  source 1..80: mol_type = other DNA
caattggcttacattggtagtggaaatgttagtgtaggatatagacacactcatccaggagaatcaggtcgcactctcaa

SEQ ID NO: 181797 - DNA, 80 bp, synthetic construct
  source 1..80: mol_type = other DNA
gagacaccaatttacattcacaaacagtgaatattacacaaaaccctgttgaaaaatatacagaggctttactcaatgaa

SEQ ID NO: 181798 - DNA, 80 bp, synthetic construct
  source 1..80: mol_type = other DNA
atttgtgtcatctgcccttacacaaaaccccccatgtacaacaagacaaatcccgccatggggtacgtgttttatgacag

SEQ ID NO: 181799 - DNA, 80 bp, synthetic construct
  source 1..80: mol_type = other DNA
cttgggtaccacgcccaccgcggttatgcccttacattaataaaagcgatgtgaacttcgcagtcacagaagtcaccgac

SEQ ID NO: 181800 - DNA, 80 bp, synthetic construct
  source 1..80: mol_type = other DNA
gtttctctttgggggcgacttactgtatccacagatcattaaaaacccctgtggagactccggagtcccttccagtcccg

SEQ ID NO: 181801 - DNA, 80 bp, synthetic construct
  source 1..80: mol_type = other DNA
atgccaaacccacatcctacacctacaaatgactactatgaatatcacttaggcctatttagtcctatatttataggacc

SEQ ID NO: 181802 - DNA, 80 bp, synthetic construct
  source 1..80: mol_type = other DNA
tctctccccagcatccgaccggcggttgcaatataccatgcttggtgaaatcttgaattactacactcactggactggtt

SEQ ID NO: 181803 - DNA, 80 bp, synthetic construct
  source 1..80: mol_type = other DNA
gacgtctgtccgcggggccgccgccaccgccgccgtccactgccttctcccctgctcgccggggagtagggcgtgcttac

SEQ ID NO: 181804 - DNA, 80 bp, synthetic construct
  source 1..80: mol_type = other DNA
gatcagggtgtgtccatatttctgatttgaaaatacattatgaagattataataaagatgggaaaaactttactaaatgg

SEQ ID NO: 181805 - DNA, 80 bp, synthetic construct
  source 1..80: mol_type = other DNA
ttgaggaccaacaactcatccaccattgttgtcccttacataaattgtgtgccaatggatagtatgttaaaacacaacaa

SEQ ID NO: 181806 - DNA, 80 bp, synthetic construct
  source 1..80: mol_type = other DNA
aacaaacacctagaataccacctaggactatacagtgctatatacctaagccctcttagaagcaacctacaatttcctac

SEQ ID NO: 181807 - DNA, 80 bp, synthetic construct
  source 1..80: mol_type = other DNA
cgggcaggggcacagcaccaagctccgccacgtattccccgttttcacagagagaatgtcctccgtggctaaaagcgtag

SEQ ID NO: 181808 - DNA, 80 bp, synthetic construct
  source 1..80: mol_type = other DNA
gaaaatggcggtcaattccttccgggtcagaggtcacgcctacgtcataagtcacgtggtggaggctactgcgcatatac

SEQ ID NO: 181809 - DNA, 80 bp, synthetic construct
  source 1..80: mol_type = other DNA
agatgtgtataagagcagagtctacgtcgtgcacttcctgggcatggtctatgtgataatataagacggggcacttccga

SEQ ID NO: 181810 - DNA, 80 bp, synthetic construct
  source 1..80: mol_type = other DNA
cactaaaagacccgcactcacaaacacagcagccgacaccccatccacatcaggggtgaacactcaagaggtgccagcgc

SEQ ID NO: 181811 - DNA, 80 bp, synthetic construct
  source 1..80: mol_type = other DNA
tagtccaccccatatatccaattcaagatatttatgaatcaatcaggtggacaaagaaccccagatgcttacaggagcat

SEQ ID NO: 181812 - DNA, 80 bp, synthetic construct
  source 1..80: mol_type = other DNA
aaggaaacatcgaactgaaccagtatgcatgctcatccacggtaatccaggatgtggtaaatcactagcaactaccatca

SEQ ID NO: 181813 - DNA, 80 bp, synthetic construct
  source 1..80: mol_type = other DNA
tggtattacaatgaacacacttttaacaatggtgatatctggcgtgcaccaattccatttccaaagaaaggccatgggat

SEQ ID NO: 181814 - DNA, 80 bp, synthetic construct
  source 1..80: mol_type = other DNA
agcttcctatgaaactcactataaaactaacttatatgaagtagtacaatactatgacacctttcaaacaatagctcaaa

SEQ ID NO: 181815 - DNA, 80 bp, synthetic construct
  source 1..80: mol_type = other DNA
acaaacattaatccaaattggaatgaggtacaaaacacaacacaacttaattcaacgggtgaaaatgcaactaaaagcag

SEQ ID NO: 181816 - DNA, 80 bp, synthetic construct
  source 1..80: mol_type = other DNA
gcagcttttggggcggggtttagcaccgagatttctggtaggatacaagaactgcaggaaactgtccagaatgtcattac

SEQ ID NO: 181817 - DNA, 80 bp, synthetic construct
  source 1..80: mol_type = other DNA
tcctggctcttacggctgatctccaggtggatggatgtgaacaacctgggcccgatacaatcccagattgtagctgcacc

SEQ ID NO: 181818 - DNA, 80 bp, synthetic construct
  source 1..80: mol_type = other DNA
taaacagccaagaggtgccagctcttaccgcagttgagaccggtgcttcaggacaagccattccctctgatgtggttgag

SEQ ID NO: 181819 - DNA, 80 bp, synthetic construct
  source 1..80: mol_type = other DNA
tactcaggtaatgctaaccccgccccccgcaagccagaacttaggagggctgtcaagcaaggcccagaacatgaatttgt

SEQ ID NO: 181820 - DNA, 80 bp, synthetic construct
  source 1..80: mol_type = other DNA
gtaaggcctcgaacatctcctcgccggcgctggtcttgacgtgcgtcagaaagtcagtgggaatgcctactttaggcagg

SEQ ID NO: 181821 - DNA, 80 bp, synthetic construct
  source 1..80: mol_type = other DNA
tgtgttttggacagaggggaatgcacccccacgaatgactataccatttatcagcatagggaatgcgtacagcaattttt

SEQ ID NO: 181822 - DNA, 80 bp, synthetic construct
  source 1..80: mol_type = other DNA
cagctgggaaactagacccaaaggcaaaaagtatagaagggttaaaattcacccccctaagatgtttgaagacaagtggt

SEQ ID NO: 181823 - DNA, 80 bp, synthetic construct
  source 1..80: mol_type = other DNA
actactaccaaacatttcatacaacatcatacattaactctggactcaaaccaggaaaagcaggacaagatgaactacaa

SEQ ID NO: 181824 - DNA, 80 bp, synthetic construct
  source 1..80: mol_type = other DNA
gaatctgaaatttactcactaccaccagacccgaagtactttgatgggtatgaccagcagaaggttgttataatggatga

SEQ ID NO: 181825 - DNA, 80 bp, synthetic construct
  source 1..80: mol_type = other DNA
tctgctcaccacaaactgacaacccttgcatcacatttcaagttctgcattcttactacaacgactacctctctatagta

SEQ ID NO: 181826 - DNA, 80 bp, synthetic construct
  source 1..80: mol_type = other DNA
atacacctatgtcagatacaaccccatgtcagacaaaggcataggtaacataatctgcatacaatggtgcagtgaaaaaa

SEQ ID NO: 181827 - DNA, 80 bp, synthetic construct
  source 1..80: mol_type = other DNA
agttcgttctagcaggcagaggttcaaacacgaagcccaatgaagcccctcacccgggatttaataccacctttcctggc

SEQ ID NO: 181828 - DNA, 80 bp, synthetic construct
  source 1..80: mol_type = other DNA
agctaacacaatggacatgtacagaattggattggatagcaatgcatccgacttgaacaacccaatattctgtctctctc

SEQ ID NO: 181829 - DNA, 80 bp, synthetic construct
  source 1..80: mol_type = other DNA
tcgggcagcagccgccgcgcggcctcggcggcgggcgccgactcgcgccccagcgccagcgcgcccaacacgcccgcgcg

SEQ ID NO: 181830 - DNA, 80 bp, synthetic construct
  source 1..80: mol_type = other DNA
agaacatgccgtcgagtctgctatctctagggtagctgacaccatcagctcgggacctagtaacaccgtggcaatacctg

SEQ ID NO: 181831 - DNA, 80 bp, synthetic construct
  source 1..80: mol_type = other DNA
gcgctcgcgcgccggtagggcgccagcgccccccccccgcgcatgcgcgggtcccccccccgcggcaggctccgcccacc

SEQ ID NO: 181832 - DNA, 80 bp, synthetic construct
  source 1..80: mol_type = other DNA
gggggtggcgacgcagacggtacataagacgcaggagtggacgcaaaaagaaactgactctgactatgtggaaccctaac

SEQ ID NO: 181833 - DNA, 80 bp, synthetic construct
  source 1..80: mol_type = other DNA
ctccaggtgtacccaaacccgctagtagaagagatgccatgctggggacacacttagtatgggacgtaggtctacagtca

SEQ ID NO: 181834 - DNA, 80 bp, synthetic construct
  source 1..80: mol_type = other DNA
ccaaactcagctaacatgttatgttttgtgtcggcgtgtaaagatttctgcttgagaatggcccgtgatacagacttgca

SEQ ID NO: 181835 - DNA, 80 bp, synthetic construct
  source 1..80: mol_type = other DNA
cgcgccgtgggctgccgcccccccccgcgcatgcgcgcggggcccgcccccgcgggtggctccgccacccggccacgccc

SEQ ID NO: 181836 - DNA, 80 bp, synthetic construct
  source 1..80: mol_type = other DNA
agactagacacgtcatccaaacaagatccagaagtgagtccaccatcgaatcattcttcgcacgaggagcttgcgtcacc

SEQ ID NO: 181837 - DNA, 80 bp, synthetic construct
  source 1..80: mol_type = other DNA
acctagtgaggtgccacggcacggtgattaaattctacagacactctgactttgactacctggtgcacgtcaccaggacc

SEQ ID NO: 181838 - DNA, 80 bp, synthetic construct
  source 1..80: mol_type = other DNA
aatagatgttcacagcacaccaccacctgaatgtattagtgacctactcaaatctgttgattctgaagaaataagggaat

SEQ ID NO: 181839 - DNA, 80 bp, synthetic construct
  source 1..80: mol_type = other DNA
aatgacacctcaatgttgcgttggaacggtctttatatatacaaacgccgttatgatcagtgtccggcaagatgctcggg

SEQ ID NO: 181840 - DNA, 80 bp, synthetic construct
  source 1..80: mol_type = other DNA
gggtggttctgggccacatggacttgaagcagaagttggccggggactggccggtgaggatggatttcagaaactccaat

SEQ ID NO: 181841 - DNA, 80 bp, synthetic construct
  source 1..80: mol_type = other DNA
caaaggcattgcaagcatgcacagattgtccaaagcccccccattataagcaatgctgccccattctgtgtggcaaagcc

SEQ ID NO: 181842 - DNA, 80 bp, synthetic construct
  source 1..80: mol_type = other DNA
taataactgggttgaaacccagttcaaaacaggcaaactagtaaagtacaactataatcagtatgctcctaacgtagaga

SEQ ID NO: 181843 - DNA, 80 bp, synthetic construct
  source 1..80: mol_type = other DNA
gtggctgcctgctcaccctattgggtgagaagcctatttattgacaaggtgtgaagagccgcgtgtgctcagagtgcttc

SEQ ID NO: 181844 - DNA, 80 bp, synthetic construct
  source 1..80: mol_type = other DNA
ccctactatgccaaatacaagcaatgcatcactttctaaaaaacctgatgaccttactaaaaccaaaacaacaaacgagt

SEQ ID NO: 181845 - DNA, 80 bp, synthetic construct
  source 1..80: mol_type = other DNA
cacgagaccatgattcatgcaggaactggtgctgttgtcaaatatttcaatgtaaactactacaaggatgcggcaagttc

SEQ ID NO: 181846 - DNA, 80 bp, synthetic construct
  source 1..80: mol_type = other DNA
acaaataatgcaggatatcaacatggtccactaggtacttactttaatacacttaaaacatcagaacatattagacaacc

SEQ ID NO: 181847 - DNA, 80 bp, synthetic construct
  source 1..80: mol_type = other DNA
ccagtaacagttacagggcctacattccagtacatggaagctaatgattacttccccgctagataccagacacacatgtt

SEQ ID NO: 181848 - DNA, 80 bp, synthetic construct
  source 1..80: mol_type = other DNA
agtctcattaggacaccgtgtagcgtttggctgttcttggaaaacattttttatttataacgtttctgaaagtagcggtg

SEQ ID NO: 181849 - DNA, 80 bp, synthetic construct
  source 1..80: mol_type = other DNA
ataatcactgatagcaatgacatagatacagaaattacaataatttggttggacagaaatgaaaaattcagagatatcag

SEQ ID NO: 181850 - DNA, 80 bp, synthetic construct
  source 1..80: mol_type = other DNA
agaaatcacccagtactacacgcattggtcaggttctctaaaaatctcgctaatgtacactggaccggcattgtctagtg

SEQ ID NO: 181851 - DNA, 80 bp, synthetic construct
  source 1..80: mol_type = other DNA
cccagtgttttccatgatgtcttccctggcagtaaggaacctgctgtcttgtctggtaaggatcccagactagaggttaa

SEQ ID NO: 181852 - DNA, 80 bp, synthetic construct
  source 1..80: mol_type = other DNA
aatccacagtttcaatggtggttccttggatttcagctagtaattacagattcactacccctgacacatattcacaagca

SEQ ID NO: 181853 - DNA, 80 bp, synthetic construct
  source 1..80: mol_type = other DNA
ggtactgggtgacttgtacaatacatgtctcaatatcgaccttcctcaatttaacgcagacggaagtataaacggtaact

SEQ ID NO: 181854 - DNA, 80 bp, synthetic construct
  source 1..80: mol_type = other DNA
tgaaaccaaaacacgtcaaagcatggatcccaaggccgccgcgactctgcgaatatgagaaatcagggaatgtaaatttc

SEQ ID NO: 181855 - DNA, 80 bp, synthetic construct
  source 1..80: mol_type = other DNA
gcggttggcgtggttgctcagctcggcgtccgagagcgccgagctgaactgcggcagccgcgtgcgatcctgcggcgcgt

SEQ ID NO: 181856 - DNA, 80 bp, synthetic construct
  source 1..80: mol_type = other DNA
cctttggtggtttcggtcaccaaaatatggcggtgtacgttgccgggtacaaaatttgtaactaccatctggctacgcag

SEQ ID NO: 181857 - DNA, 80 bp, synthetic construct
  source 1..80: mol_type = other DNA
tcaaaaacactacacgtgaacatcttcagcagcagcctactgaagaacactggctcaattttgatggtacattattagga

SEQ ID NO: 181858 - DNA, 80 bp, synthetic construct
  source 1..80: mol_type = other DNA
ccatgtatgtcaataccaagactcaaatccacaaaagtccagtttatggtgcggtggaagtcaagatgggcccggcagtc

SEQ ID NO: 181859 - DNA, 80 bp, synthetic construct
  source 1..80: mol_type = other DNA
tgtgctaaaccgcaataccagagatctgtctaaactacaatacatgatggacttgtatggtttggatttaccttatgtca

SEQ ID NO: 181860 - DNA, 80 bp, synthetic construct
  source 1..80: mol_type = other DNA
aatacagtttcacccatccaggagagcaaggtatagatcttaattctcaggaagaaaaaggtggaccagtaaaagatcca

SEQ ID NO: 181861 - DNA, 80 bp, synthetic construct
  source 1..80: mol_type = other DNA
tgagacagtaggggcttcaacctctcgggatgctcttccaaacaccgaatctagcggtccagcccactccaaagaaatcc

SEQ ID NO: 181862 - DNA, 80 bp, synthetic construct
  source 1..80: mol_type = other DNA
tcagtggctttggtgggcgagagagctttctacgatcccagaacagccggtagtaagtccaggtttgatgaccttgtgaa

SEQ ID NO: 181863 - DNA, 80 bp, synthetic construct
  source 1..80: mol_type = other DNA
tgccacattcctaaagagagggttccgagtggataagaggtataacttccttattcacccagttttcccggagaaagaaa

SEQ ID NO: 181864 - DNA, 80 bp, synthetic construct
  source 1..80: mol_type = other DNA
gaacatggcaactgctaccaaggcatgtgtggactgtcataaaccagcaaacttctccagttgttgccctttagtatgtg

SEQ ID NO: 181865 - DNA, 80 bp, synthetic construct
  source 1..80: mol_type = other DNA
ccagtgcaggatacccttatgttagtttgggcattaagaaaagggcaatattgaacaaagaaacccaagacacaaccaaa

SEQ ID NO: 181866 - DNA, 80 bp, synthetic construct
  source 1..80: mol_type = other DNA
aacaaaccattagattcacaatactttgcacctttagacgccctctggggagaccccatatactataatgatctaaatga

SEQ ID NO: 181867 - DNA, 80 bp, synthetic construct
  source 1..80: mol_type = other DNA
tgcttaccatcacgccgctgatcttggcccccgagctcgtggtgtacgtcgtggggttgtctaggatgctatcggtggcc

SEQ ID NO: 181868 - DNA, 80 bp, synthetic construct
  source 1..80: mol_type = other DNA
tctacactcttagttccgtcaagtgggagagcggctctgctgggtggtggtggaaattccctgaagcattaagcgacatg

SEQ ID NO: 181869 - DNA, 80 bp, synthetic construct
  source 1..80: mol_type = other DNA
agcccacggagacccttgacacatggaaggtgttgagcagggacacacgaaccgctcatagtttggagcacggattcatt

SEQ ID NO: 181870 - DNA, 80 bp, synthetic construct
  source 1..80: mol_type = other DNA
atagggaaggttcttgtgataccaccttactcagttcttagacatagatggcttgagctattctgaattaaactaaatac

SEQ ID NO: 181871 - DNA, 80 bp, synthetic construct
  source 1..80: mol_type = other DNA
ctgtgttcgaggccgcgcgtgtcaccttaatatgcgaagtggacctgggaccgcgccgccccgactgcatctgcgtgttc

SEQ ID NO: 181872 - DNA, 80 bp, synthetic construct
  source 1..80: mol_type = other DNA
attgcacacaagcaacttattactgtaaacataaagacaggtattatcctatagaagtgaagaaacatcagtggtatgag

SEQ ID NO: 181873 - DNA, 80 bp, synthetic construct
  source 1..80: mol_type = other DNA
aagggatggttaattgtaagttcaatatgacgggactggaacaagataagataaaggggtatactgacacatggtactca

SEQ ID NO: 181874 - DNA, 80 bp, synthetic construct
  source 1..80: mol_type = other DNA
tggtaaactggttaataaattgtgccactctaagcacatttacaagacaacatactatgaagttgaaggtgggatgccct

SEQ ID NO: 181875 - DNA, 80 bp, synthetic construct
  source 1..80: mol_type = other DNA
atgtctgctagaagacatcccactgtgggccatggccacagggtacggagagttctgtgaatcagagattaactctgaag

SEQ ID NO: 181876 - DNA, 80 bp, synthetic construct
  source 1..80: mol_type = other DNA
aagcaaatgtttaatagaaggcctaccgctgtgggcagcagtctatggctacgcagaatactgcagcaaggccacaggag

SEQ ID NO: 181877 - DNA, 80 bp, synthetic construct
  source 1..80: mol_type = other DNA
gagagaagggtagtgacacaaggtccacaagaagagtttggacgtagtctgctcaaacataatgcatgtatagttactac

SEQ ID NO: 181878 - DNA, 80 bp, synthetic construct
  source 1..80: mol_type = other DNA
gtaactaagcactccgagcgaagcgaggagtgcgacccttggggactcaacgccttcggagccgcgcgctacaccttcgg

SEQ ID NO: 181879 - DNA, 80 bp, synthetic construct
  source 1..80: mol_type = other DNA
tacgacagccattttcagcgacgacccacgacccgagccgaacggagggccgccaattggcggcgacagatgcggcggtt

SEQ ID NO: 181880 - DNA, 80 bp, synthetic construct
  source 1..80: mol_type = other DNA
atggtgagttgcttgctttcgactacaccaattatgatggtagtttacaccccatatggttccaggccttaggtaaggta

SEQ ID NO: 181881 - DNA, 80 bp, synthetic construct
  source 1..80: mol_type = other DNA
atggcctccagctcggccagcaggccggcgttgcgcactaccgcagccacgtccagactccgtgggtccagccgggcgca

SEQ ID NO: 181882 - DNA, 80 bp, synthetic construct
  source 1..80: mol_type = other DNA
tttcaaactatatagacacgagaaatgcgactttttcttcacatacagtagaaaaccaccttttaaagacagccagttaa

SEQ ID NO: 181883 - DNA, 80 bp, synthetic construct
  source 1..80: mol_type = other DNA
accctgttgaacaattcacagaagcagttcttgaacaggtactggtggttccaaacactcgacccagtgatggattgatt

SEQ ID NO: 181884 - DNA, 80 bp, synthetic construct
  source 1..80: mol_type = other DNA
tttaataaataacaaaacaaaagacatatccaggcttaaagatgctttggataaatatggagtggacttgcctatgatta

SEQ ID NO: 181885 - DNA, 80 bp, synthetic construct
  source 1..80: mol_type = other DNA
actatcatatcttggtacaggtaatgtgacagttggatacagacatacgcacccaggagagaatggtagggaaattgctg

SEQ ID NO: 181886 - DNA, 80 bp, synthetic construct
  source 1..80: mol_type = other DNA
aacaaaacatcactggtatgagattcaggaatcagactattatcctaaacacatccaatataacatcttgttgggtgtag

SEQ ID NO: 181887 - DNA, 80 bp, synthetic construct
  source 1..80: mol_type = other DNA
ttcatcaaataaattcttacccctttacgcactggagaataaacgaattaaagaattgctaaaaaggggtcaaatgatac

SEQ ID NO: 181888 - DNA, 80 bp, synthetic construct
  source 1..80: mol_type = other DNA
ataggtattccatatgcaataaagcagggtgactcttggatgaagaagttctcagatgcgtgtaacgcggccaagggcct

SEQ ID NO: 181889 - DNA, 80 bp, synthetic construct
  source 1..80: mol_type = other DNA
tctcactgaaatagtccaattcacattcttccgttttactaatgattgggtcatagaagaagaatgtgaatttgactatt

SEQ ID NO: 181890 - DNA, 80 bp, synthetic construct
  source 1..80: mol_type = other DNA
tgctgatcttcaggttgatagtgttactacacctggcagtgattgcataccagtgtgtgattgcactgttgggtgttact

SEQ ID NO: 181891 - DNA, 80 bp, synthetic construct
  source 1..80: mol_type = other DNA
acgtgggcttctgcctcctcagtaataccttcatgaacggagacatgcccgtgctggccccctatatcccaattacctgg

SEQ ID NO: 181892 - DNA, 80 bp, synthetic construct
  source 1..80: mol_type = other DNA
tcactcgcttgtaggtgcccatcagaaatttagaagtcatggcccccgtgtactgaaacttgtccccgttgatggacagg

SEQ ID NO: 181893 - DNA, 80 bp, synthetic construct
  source 1..80: mol_type = other DNA
acaaggtgttcccaattgaaaatccatctgtgacgcaggtgacgttgaatggtaagccaatggatttagccatcctaaaa

SEQ ID NO: 181894 - DNA, 80 bp, synthetic construct
  source 1..80: mol_type = other DNA
tgggaacccaggtgatggccgctgccgacacccgccctcctcctcttaccctgggtggcaaaaagtatgccaggagtaga

SEQ ID NO: 181895 - DNA, 80 bp, synthetic construct
  source 1..80: mol_type = other DNA
acacacgtagtaacatgatcaaccacgtctgaatgacacgaaaacacaatcgtataacgctctattcatggaacgaactt

SEQ ID NO: 181896 - DNA, 80 bp, synthetic construct
  source 1..80: mol_type = other DNA
accccaactactacacaaaagtatcaagcttatggggagaccacgtatataagtcagaggtgttagatggtttaaaacaa

SEQ ID NO: 181897 - DNA, 80 bp, synthetic construct
  source 1..80: mol_type = other DNA
cacctttgtgataactgagcggtttgccaccgggggggacgctgcggcacgccattacgtgtaccaaattatgtacatac

SEQ ID NO: 181898 - DNA, 80 bp, synthetic construct
  source 1..80: mol_type = other DNA
ttgataaacctacacaacctgacacttcttcaaataggttctatactcttgaaagcaaagtctggacaagcacatctcaa

SEQ ID NO: 181899 - DNA, 80 bp, synthetic construct
  source 1..80: mol_type = other DNA
ttgtccaagggcgaatcccctattgaatttgaaagaacgagcacaacatcagagattggggtggtgcaaaaggcggtgta

SEQ ID NO: 181900 - DNA, 80 bp, synthetic construct
  source 1..80: mol_type = other DNA
agacacccagctcacgggacccagcatccacccgggactcatggcaccaaacaagagagccaggtggacacccagcctta

SEQ ID NO: 181901 - DNA, 80 bp, synthetic construct
  source 1..80: mol_type = other DNA
gcctagcaactctactagcattcctgcccttactgcggtcgaaaccgggcacacgtcgcaggtggagccgagcgacacag

SEQ ID NO: 181902 - DNA, 80 bp, synthetic construct
  source 1..80: mol_type = other DNA
atttgcctttaaagcccgtctcgctggaccgtctcagagaggtattgcaggcggtgcgcggccgcttctcggggcgcgag

SEQ ID NO: 181903 - DNA, 80 bp, synthetic construct
  source 1..80: mol_type = other DNA
tcagggaaatttatcgaacgccgtcgaaccaaccaaaaaacccctaaagctcgccaactaccgtgccacctgcgaggacc

SEQ ID NO: 181904 - DNA, 80 bp, synthetic construct
  source 1..80: mol_type = other DNA
cacagccaaacaggatgttaaggtttttgtaaaacctaaacacatcacagcgtggtgtcctaggccaccacgagctgtgg

SEQ ID NO: 181905 - DNA, 80 bp, synthetic construct
  source 1..80: mol_type = other DNA
gcagtatctgggagagttcgtacatgcccgcgaaggtgtgcttaaaccacgcgccctctacgatttcatccacgtaatcg

SEQ ID NO: 181906 - DNA, 80 bp, synthetic construct
  source 1..80: mol_type = other DNA
ttaggtcaaaagctgtaattaagcaaggtttacccaccttgaccacccctgggtctggtcaatttctcactacagatgat

SEQ ID NO: 181907 - DNA, 80 bp, synthetic construct
  source 1..80: mol_type = other DNA
tgacgaatttgtgcgtggtatccgcagcacagatatagggaaagtcttgatgattccaccttattcagttcttaggcata

SEQ ID NO: 181908 - DNA, 80 bp, synthetic construct
  source 1..80: mol_type = other DNA
aaattttgtccgctttacgctatggaagcgcgtcgcatttttaagatggaagctaccattaacaactacatacaattcaa

SEQ ID NO: 181909 - DNA, 80 bp, synthetic construct
  source 1..80: mol_type = other DNA
ggtttggtgtgactcctgatatatctgttaagtcaacaaggtggttagatgccaaatatccagtgatgtacataagatcc

SEQ ID NO: 181910 - DNA, 80 bp, synthetic construct
  source 1..80: mol_type = other DNA
aaagccactatgacaacaatttatttaacaaaactgaactgtacaacacattccagaccatagctcaacttaaagaaaca

SEQ ID NO: 181911 - DNA, 80 bp, synthetic construct
  source 1..80: mol_type = other DNA
gtgttgccaacacatgctgaatgtgggagtgagttacttatagatggagttcccaccaaagtcctcaaacaacagatcat

SEQ ID NO: 181912 - DNA, 80 bp, synthetic construct
  source 1..80: mol_type = other DNA
atggaaaagacaataggaccatcataagcttaaatacatactataatttgtcaatacactgtaagaggccaggaaacaag

SEQ ID NO: 181913 - DNA, 80 bp, synthetic construct
  source 1..80: mol_type = other DNA
aaatatcacaaaggtaacattagtatcagaacatgcgacaggttctgatccagaagcaatgtacatgtggaccaactgta

SEQ ID NO: 181914 - DNA, 80 bp, synthetic construct
  source 1..80: mol_type = other DNA
ccagtccccgtgtgcaataccaaactttgatgtaacgccaccaattcacatcccgggagaggtcagaaatatgatggaac

SEQ ID NO: 181915 - DNA, 80 bp, synthetic construct
  source 1..80: mol_type = other DNA
ggcagtctcaaatttacgttcatgttctgtggctcagcgatggctacggggaagttgttgctcgcctattcccctccggg

SEQ ID NO: 181916 - DNA, 80 bp, synthetic construct
  source 1..80: mol_type = other DNA
gtgactggtgcttgtggtgtgggagactaatgtggtgggggctatggtagtggctgggataacagtaagatgcatacgct

SEQ ID NO: 181917 - DNA, 80 bp, synthetic construct
  source 1..80: mol_type = other DNA
tagcgcgcttgaaattggtgcatcttcaacagcaactccagagacaaccatagaaaccagatatgtgattaataatcatg

SEQ ID NO: 181918 - DNA, 80 bp, synthetic construct
  source 1..80: mol_type = other DNA
aatcaggcagtgtacgtagctggttacaaaataatcaattatcacttagccacctcagaagactacaggagatgtgtgag

SEQ ID NO: 181919 - DNA, 80 bp, synthetic construct
  source 1..80: mol_type = other DNA
tttggagggggcataagcactatgcaattcaatctaagcatcctgtttgacgagtatatgaaacatagatgcacctggag

SEQ ID NO: 181920 - DNA, 80 bp, synthetic construct
  source 1..80: mol_type = other DNA
tcttgagtaaggctgatactaggctagaagaaccaattgattgtctaatcaagaaatcagcttccaagtacagagtgaat

SEQ ID NO: 181921 - DNA, 80 bp, synthetic construct
  source 1..80: mol_type = other DNA
gatatgagctggagacccccggtacacaaccctaatgggatcgagagaaacctgtgggaggcattctttcgcatgcatgc

SEQ ID NO: 181922 - DNA, 80 bp, synthetic construct
  source 1..80: mol_type = other DNA
gggagggacttttgcgggtaatgcatgctaaaataaacgggtgcgctggggtgtgcttggtaactcactgtttgaatacg

SEQ ID NO: 181923 - DNA, 80 bp, synthetic construct
  source 1..80: mol_type = other DNA
tctgggacaccgccacaaggacaaggtgggctagcaagttctcgagtctacgaagactccggtggcagtcttttgagttt

SEQ ID NO: 181924 - DNA, 80 bp, synthetic construct
  source 1..80: mol_type = other DNA
ttgcgtgatactccaatgatcacgcaagcacatgacatccagcagaacccagtagagcagtttgtagacaatgttttaga

SEQ ID NO: 181925 - DNA, 80 bp, synthetic construct
  source 1..80: mol_type = other DNA
agtgatagtggctaggaactatgaagattccataactgtgctggccaccctcagcttgctggggtgtgacgcctctccat

SEQ ID NO: 181926 - DNA, 80 bp, synthetic construct
  source 1..80: mol_type = other DNA
ccaccccacaaaggagatctcaatacccggtgaagtcaagaatttaattgagttgtgtcaagttgacagcatgattccaa

SEQ ID NO: 181927 - DNA, 80 bp, synthetic construct
  source 1..80: mol_type = other DNA
ggcagattttgtcgcgcacgctgagaatgacgcgtggcggcggcgacaggggcaacgcgggcaggtcgtgcggcgtgtgg

SEQ ID NO: 181928 - DNA, 80 bp, synthetic construct
  source 1..80: mol_type = other DNA
caatggcagccaaacaacataagaaaatgtagaataaggggcctactgcctatgcttatatgcgggcacggtaacagcgc

SEQ ID NO: 181929 - DNA, 80 bp, synthetic construct
  source 1..80: mol_type = other DNA
tgaaagttagcaagctggagaaaggacttcaggaccttgccccactgtatgcatgtgaagccaaacaagtgcgtgagatg

SEQ ID NO: 181930 - DNA, 80 bp, synthetic construct
  source 1..80: mol_type = other DNA
tggaggttcaattcaatgagtatatgcaaatagctatagaccactattctgctcaattatacactctagatgttgatcca

SEQ ID NO: 181931 - DNA, 80 bp, synthetic construct
  source 1..80: mol_type = other DNA
cccgagtcaccataatatgtccatacacccaaccaccactaacagacagagacaacactgacatgggatggatcccatac

SEQ ID NO: 181932 - DNA, 80 bp, synthetic construct
  source 1..80: mol_type = other DNA
tgggggcgacttactatatccacagatcattaaaaacccctgtggagactccggagtgccttccagtcccggtagacagc

SEQ ID NO: 181933 - DNA, 80 bp, synthetic construct
  source 1..80: mol_type = other DNA
tgtctaatttccaggggcgagcctacgtagcattcgaggagccttgcggtgaactctaccgtgaggtctccctgacgtgc

SEQ ID NO: 181934 - DNA, 80 bp, synthetic construct
  source 1..80: mol_type = other DNA
aagtttgaagactggctgtacgggtcctgcacccactaccaaacatttgccacagagagcagattaagaccacctacagg

SEQ ID NO: 181935 - DNA, 80 bp, synthetic construct
  source 1..80: mol_type = other DNA
tcaaagaaacacctgctccagattacattaatgacctcttacagtcagtggacaaccaggaactcagagactactgcgag

SEQ ID NO: 181936 - DNA, 80 bp, synthetic construct
  source 1..80: mol_type = other DNA
tttggagacagtggcagcctcagaatatcagaaaatgcagaatcaggggcataatccccatcctgatatgcggacacggg

SEQ ID NO: 181937 - DNA, 80 bp, synthetic construct
  source 1..80: mol_type = other DNA
ctcgactatgatgagtatcctaaaaagccaaaaagacctagaatctttccttcaacagagggagagtcccgcttccagca

SEQ ID NO: 181938 - DNA, 80 bp, synthetic construct
  source 1..80: mol_type = other DNA
gtgtcacttttataccaccaatggctgatttaccagacaagggcaaggcctttgactctaggtttgtgctatgcagcaca

SEQ ID NO: 181939 - DNA, 80 bp, synthetic construct
  source 1..80: mol_type = other DNA
gcgccaggcccctggcagcctccaccacgatcttgagctggcgcgggtcggtgtggcccctggcctgggtgaccaggtcc

SEQ ID NO: 181940 - DNA, 80 bp, synthetic construct
  source 1..80: mol_type = other DNA
ggtgatgtatgtgccaccaggagggccaattcctagaagttatgaagatttcgcctggcaaacatccactaacccaagcg

SEQ ID NO: 181941 - DNA, 80 bp, synthetic construct
  source 1..80: mol_type = other DNA
gaggctctggcagcaccggccacagcacacaaggcaaaggagcttgtgatggccctcccaggtcctgatagactctggta

SEQ ID NO: 181942 - DNA, 80 bp, synthetic construct
  source 1..80: mol_type = other DNA
tcttctacacatatggttgtgcaccaccaagaatgtccgtgccatttgttgggattgctaatgcttacagccactttcac

SEQ ID NO: 181943 - DNA, 80 bp, synthetic construct
  source 1..80: mol_type = other DNA
ggtcaaccataccccagatttacaattccttttgtaagtattgcctcagcatattacatgttttatgatggttatgaggg

SEQ ID NO: 181944 - DNA, 80 bp, synthetic construct
  source 1..80: mol_type = other DNA
caccacaaactgacaacacttgcgtcagtttccaggtgctgaaatcctgttacaacaactacctcagcattaacaaattt

SEQ ID NO: 181945 - DNA, 80 bp, synthetic construct
  source 1..80: mol_type = other DNA
ggctcatcagattcatcaccagaagacctgttgaagagtgcctgtgctctagatgtctctgtgagaaggacagcaggggc

SEQ ID NO: 181946 - DNA, 80 bp, synthetic construct
  source 1..80: mol_type = other DNA
tggagtaacagagacttagaactggccaggtacctacgagtgacgtggactttttacagacaccaagatgttgactttat

SEQ ID NO: 181947 - DNA, 80 bp, synthetic construct
  source 1..80: mol_type = other DNA
gattgattgaagcatctagtttgaatgattcagtaaatatgagagtgaagttgggcaacttgtataaagcatttcacaaa

SEQ ID NO: 181948 - DNA, 80 bp, synthetic construct
  source 1..80: mol_type = other DNA
ttcacacataatataaaagagcatttttctaatctgtcttcaaacattactgataaaattacaggcaaagtagttaaatg

SEQ ID NO: 181949 - DNA, 80 bp, synthetic construct
  source 1..80: mol_type = other DNA
tcccccagagggtcccaagcccatcctgggcaaagaggcctggcaggacgagtacgagacctgcatggtctggaacagac

SEQ ID NO: 181950 - DNA, 80 bp, synthetic construct
  source 1..80: mol_type = other DNA
ttttaccaaactagaatcgtggtgccagcaagtacaccaacaaaaatgtcgatgcttgccttcgtaagtgcctgtccaga

SEQ ID NO: 181951 - DNA, 80 bp, synthetic construct
  source 1..80: mol_type = other DNA
cagaaaaaggggagtttacaggcctaggtatctatgaccgtgtgtgtgttataccaacccacgcacagccagacaataag

SEQ ID NO: 181952 - DNA, 80 bp, synthetic construct
  source 1..80: mol_type = other DNA
agatcttattttacagaagcacaaggccaaataaccaccaccaagactactgccgagtgcagcttgcctagtattcatac

SEQ ID NO: 181953 - DNA, 80 bp, synthetic construct
  source 1..80: mol_type = other DNA
caggtttctaggcaacaaactgggacacacgaaaatgccaacattgccacaggtggttccaacataacctataatcagat

SEQ ID NO: 181954 - DNA, 80 bp, synthetic construct
  source 1..80: mol_type = other DNA
ctatggtatcatagttggtgattctgtgtatcagctagactcagatgatatatttaaaacagctctaactgggaaagcta

SEQ ID NO: 181955 - DNA, 80 bp, synthetic construct
  source 1..80: mol_type = other DNA
ggtcttatagcaatgaacagctagacctctgcagatacagaggctgcacattaagaatatacagagatccaaaaacagac

SEQ ID NO: 181956 - DNA, 80 bp, synthetic construct
  source 1..80: mol_type = other DNA
tttaaaacaccaagagactttaatgctgtaaatacatttagaacccaagctaatttctcacacccacaacttacactccc

SEQ ID NO: 181957 - DNA, 80 bp, synthetic construct
  source 1..80: mol_type = other DNA
ccttcagtaccactacatggaatttaaatgtactgtatgacgaacatttgaaattccacaacaggtggtcttatccaaac

SEQ ID NO: 181958 - DNA, 80 bp, synthetic construct
  source 1..80: mol_type = other DNA
ggttggcgttacacccgagagaaggagaaaaaggatcccaggaaggagcacccgggtgcggcgctacgggttacaaaagt

SEQ ID NO: 181959 - DNA, 80 bp, synthetic construct
  source 1..80: mol_type = other DNA
gccaggacgctgctgtccaccctggtcaagtaccacgacctggaggagagggctgccacccccgggccgtggaatgaggg

SEQ ID NO: 181960 - DNA, 80 bp, synthetic construct
  source 1..80: mol_type = other DNA
ctagaaccaaaattgatatagcagaaggtccagtagtactaagaacattagccatgttcttagtactactggtgctcaat

SEQ ID NO: 181961 - DNA, 80 bp, synthetic construct
  source 1..80: mol_type = other DNA
tttggacatcagaaccaagcagtgtatgttgctggatttaaaataatgaattaccacctcctcactgcacaagatttcag

SEQ ID NO: 181962 - DNA, 80 bp, synthetic construct
  source 1..80: mol_type = other DNA
gctcattttaatcatcttgcttctgtgcttcgcgccccgcaaaatccacccccgcccggtccccagcgaaacctgcccct

SEQ ID NO: 181963 - DNA, 80 bp, synthetic construct
  source 1..80: mol_type = other DNA
ctatgtatctaagggaattaagaaaaaagatatattaaataaaaccaccaaagacacaaccaaattagctaaactaatgg

SEQ ID NO: 181964 - DNA, 80 bp, synthetic construct
  source 1..80: mol_type = other DNA
gacaaaaaattgacattgctgagggaccaggttctatgaatatggcgaacgtgttgagtaccactgcagcgcaatcaatt

SEQ ID NO: 181965 - DNA, 80 bp, synthetic construct
  source 1..80: mol_type = other DNA
agaacttctaccagggggatgtgcatgatgccgttgtcggagcaatgactcgcgtggcagacactgtagctagtggacct

SEQ ID NO: 181966 - DNA, 80 bp, synthetic construct
  source 1..80: mol_type = other DNA
agagcagcacatcagaagaagaacaagcaccccaaaaagaagcgcagcaaaaagaaaagctactacagcagctcagagtc

SEQ ID NO: 181967 - DNA, 80 bp, synthetic construct
  source 1..80: mol_type = other DNA
ttagcatacttcctgaaaattttaataacggaggcaagggcaaagctttacatgaaaaaataacccaatatcttccaaat

SEQ ID NO: 181968 - DNA, 80 bp, synthetic construct
  source 1..80: mol_type = other DNA
aatatttaactacactacacactctgaagactttacttttaacaacgacagctttggaggggggctctgtaccgctcagt

SEQ ID NO: 181969 - DNA, 80 bp, synthetic construct
  source 1..80: mol_type = other DNA
gggttagtgcaagtcatttcagatttaccacccctgatacatactccaaagctgggtatataacatgctggtaccaaacc

SEQ ID NO: 181970 - DNA, 80 bp, synthetic construct
  source 1..80: mol_type = other DNA
caagtcacgtggtgagggttggcgtataacccggaagtcaatcctcccacgtggcctgtcacgtgacgcatacgtcacgg

SEQ ID NO: 181971 - DNA, 80 bp, synthetic construct
  source 1..80: mol_type = other DNA
ccagaaacatcaggaactgtctacctgttagcttttgttagtgcatgtccagattttaaattgagattaatgaaagacac

SEQ ID NO: 181972 - DNA, 80 bp, synthetic construct
  source 1..80: mol_type = other DNA
caaatcatgtatgtgccaccagggggcccaatccctgtatcttatgaagattattcttggcagacctctacaaatcctag

SEQ ID NO: 181973 - DNA, 80 bp, synthetic construct
  source 1..80: mol_type = other DNA
cggctctgccagcggcaccctccacccccactactagccaaccatggcgtggtgtggcagatggagaaggcggccgcggc

SEQ ID NO: 181974 - DNA, 80 bp, synthetic construct
  source 1..80: mol_type = other DNA
ttgtacagagcggaccgtttgcttacaagggcgacgttaaatcagctgtactgggcatgaaatacaccttcaaatggaag

SEQ ID NO: 181975 - DNA, 80 bp, synthetic construct
  source 1..80: mol_type = other DNA
tgacggcttttccctggtgccacacactcaatttgacgcaggggccaccaacaaatatgggtacaatagtattaatgact

SEQ ID NO: 181976 - DNA, 80 bp, synthetic construct
  source 1..80: mol_type = other DNA
ctggcaactatatacaataaaattgtagaggaaagcaaaaacagaaaagagttaaatacatcactacaggcaatattcca

SEQ ID NO: 181977 - DNA, 80 bp, synthetic construct
  source 1..80: mol_type = other DNA
caccaatgtgtacagagttcaatggattgaggaatgtaactgtaccagtacaccagggccttccagtcatgaacacccca

SEQ ID NO: 181978 - DNA, 80 bp, synthetic construct
  source 1..80: mol_type = other DNA
atttgggggaaatcccatatttcagcagacaattaaagacccatgcaaacaaccaacattccaacttcccgaacccggtg

SEQ ID NO: 181979 - DNA, 80 bp, synthetic construct
  source 1..80: mol_type = other DNA
tggttcaggctttaccaatcagataggggagaaaatttcagagttgacgagcatggtcactagttcgattactgaaaaat

SEQ ID NO: 181980 - DNA, 80 bp, synthetic construct
  source 1..80: mol_type = other DNA
cgccgcgtgcgtgagagtcagggaatactcgattggacagggactggaagccgacaaaacatacgatagctgggatatct

SEQ ID NO: 181981 - DNA, 80 bp, synthetic construct
  source 1..80: mol_type = other DNA
ggaggcgacggcactggtggtggcggtggcggcggcgggagcggcggtcagcactcctcggactccgccaacggactgct

SEQ ID NO: 181982 - DNA, 80 bp, synthetic construct
  source 1..80: mol_type = other DNA
cttgcaatgacttcagtgtgcgcttactgcgagatacaacacacattagtcaagaggctatgccacaaggaattggtgac

SEQ ID NO: 181983 - DNA, 80 bp, synthetic construct
  source 1..80: mol_type = other DNA
accaatactactctcctaaagatgcacagtggggagacccaattcacataattaatcaaaatgaaactgttacaaaccaa

SEQ ID NO: 181984 - DNA, 80 bp, synthetic construct
  source 1..80: mol_type = other DNA
tttattgcagaaccctgtggaacagtttgtggataatgttttagaggaagttttagttgtacccaatactcagccaagtg

SEQ ID NO: 181985 - DNA, 80 bp, synthetic construct
  source 1..80: mol_type = other DNA
aatttctcaccctcggacgtcacagacaagagagaaagcataacctacatacccgagacggtcaaaccagcatgtcaaat

SEQ ID NO: 181986 - DNA, 80 bp, synthetic construct
  source 1..80: mol_type = other DNA
gagtgacagcacgatagcaccgggctcttatgtaggcgacagcttatttttcctgacgtcggcaaaaagtacctaaattc

SEQ ID NO: 181987 - DNA, 80 bp, synthetic construct
  source 1..80: mol_type = other DNA
cctactcctacacattcggagcaggtcagatgccagacagaacacaatacatacccatacaatggagaggcaagtggtat

SEQ ID NO: 181988 - DNA, 80 bp, synthetic construct
  source 1..80: mol_type = other DNA
ttgcaccgaaaaaacctcctgctatgagctggcgtcctccggcacacaatgccgaaggacaggagggactctggtacaga

SEQ ID NO: 181989 - DNA, 80 bp, synthetic construct
  source 1..80: mol_type = other DNA
tgggaagctccatacctgggacagcattcacttcagatgagatcgccaagggtgagacggcgcttaaattcacacccact

SEQ ID NO: 181990 - DNA, 80 bp, synthetic construct
  source 1..80: mol_type = other DNA
ccagggagagttgtggttacggattcccaagaggcagaccgagcaattatctcggatttaaaacgccagtggtccggcct

SEQ ID NO: 181991 - DNA, 80 bp, synthetic construct
  source 1..80: mol_type = other DNA
ccagtggtttgtgagaaaccaacatgtgtgtggattgaaggcaataactattatcctagcagataccaacaaggagtcat

SEQ ID NO: 181992 - DNA, 80 bp, synthetic construct
  source 1..80: mol_type = other DNA
aacactattccgctcagttgtttatgttagatatcaatccagagcccatatccttagagcaagctgtgtatggtatgcaa

SEQ ID NO: 181993 - DNA, 80 bp, synthetic construct
  source 1..80: mol_type = other DNA
gatgcaatatcttatggaaacattttactaagtggaaccaacacagcacgaatgatcaaatatcattatccaacaaaagc

SEQ ID NO: 181994 - DNA, 80 bp, synthetic construct
  source 1..80: mol_type = other DNA
ggggctctcctctgcccactcaggcaatcgacgacccctgccagcagggaacccacccgcttcccgagcccggtacgttg

SEQ ID NO: 181995 - DNA, 80 bp, synthetic construct
  source 1..80: mol_type = other DNA
tacaccacttacaagaatgccaacccgggggaagctggaggcgagtttgttgacaagtttgcagctgctactgaagcctc

SEQ ID NO: 181996 - DNA, 80 bp, synthetic construct
  source 1..80: mol_type = other DNA
cccctacgtaaccatggggaaaaggaagagagaaatactgaacaaagagacgcgcgatactaaggagatgcagcgcatgt

SEQ ID NO: 181997 - DNA, 80 bp, synthetic construct
  source 1..80: mol_type = other DNA
tttcttttacaacagtacagctactacaacacaaagcaaacactagcacagcttaaatttgacttctttcctaaacaaaa

SEQ ID NO: 181998 - DNA, 80 bp, synthetic construct
  source 1..80: mol_type = other DNA
tacgtcactaaccacgtgcgtttcacagaccaaccgtgtgctatgtcgtccacttcctgggctgtgtctacgtactaata

SEQ ID NO: 181999 - DNA, 80 bp, synthetic construct
  source 1..80: mol_type = other DNA
taactgggtacatgcccatagtatggtgcggacacggcagggctggctacaactacgcttggcactcagacgacctagta

SEQ ID NO: 182000 - DNA, 80 bp, synthetic construct
  source 1..80: mol_type = other DNA
aagcacattactccaaggagatgtggtggaggcaattgagagcgcagtcgccagggtagcagacacaatcagtagtggcc

SEQ ID NO: 182001 - DNA, 80 bp, synthetic construct
  source 1..80: mol_type = other DNA
gaacttcactctcaaattgtgcaaggatacggatgaaattacccagcaagcaacactgcagggcgatggtatagaagatg

SEQ ID NO: 182002 - DNA, 80 bp, synthetic construct
  source 1..80: mol_type = other DNA
cccgagttcatccgggacgatgaggcgaaccctgtagaccaaccaacagaaccggacgtagcaacttgcaggttctacac

SEQ ID NO: 182003 - DNA, 80 bp, synthetic construct
  source 1..80: mol_type = other DNA
ccatatataccaataagctacagattcaactggtatatatgcatgtttcaccaacaaaactttatgaatgacatggcaca

SEQ ID NO: 182004 - DNA, 80 bp, synthetic construct
  source 1..80: mol_type = other DNA
aatttggagcattcaccaaccttccacatgttctgatgaatttggctgagtccacacaggcagacttatgtatcccctat

SEQ ID NO: 182005 - DNA, 80 bp, synthetic construct
  source 1..80: mol_type = other DNA
tcatttatcaacaggaacaacaatgaggagctatcgctatcacaggtctacaaccagattgtgcacgaacacaaccgccg

SEQ ID NO: 182006 - DNA, 80 bp, synthetic construct
  source 1..80: mol_type = other DNA
gaagtcacatttgtcatcaccagtaggcaactaccagggactagtattgctcaggacatgccaccgctgacacaccaaat

SEQ ID NO: 182007 - DNA, 80 bp, synthetic construct
  source 1..80: mol_type = other DNA
taaagatgcagctagttcttcctctgctggccaatcactgtcaatggatccgtctaagtttactgaaccagttaaagacc

SEQ ID NO: 182008 - DNA, 80 bp, synthetic construct
  source 1..80: mol_type = other DNA
taactctgtcaccgatgctaacagcacttcagctatcgcaaatggaaccacgcacaaaccctctaccgcttcttcagtcg

SEQ ID NO: 182009 - DNA, 80 bp, synthetic construct
  source 1..80: mol_type = other DNA
ttcagttgataaaaactgtgagaccatcgctaaagatatctttggcacacataccctcagccaacaccaagccattgggt

SEQ ID NO: 182010 - DNA, 80 bp, synthetic construct
  source 1..80: mol_type = other DNA
aacacaaggaccatactctggattggacaccaaaaccaaattaaaggcaccagtgctgcgtgcagtcgtcacgcaaggtc

SEQ ID NO: 182011 - DNA, 80 bp, synthetic construct
  source 1..80: mol_type = other DNA
ggaaattctccagtattatacacattggtctggatctcttaagatatcattgatgtacactggcccagcactctctagcg

SEQ ID NO: 182012 - DNA, 80 bp, synthetic construct
  source 1..80: mol_type = other DNA
tccttaaagataaatactacccagttataggcattttatctacttattcagaccaaacagcaggcaacaacaacacgtat

SEQ ID NO: 182013 - DNA, 80 bp, synthetic construct
  source 1..80: mol_type = other DNA
atttcgcaagtgaatcatctccagaaattcccatcactttaacaattgcaccaatgtgctgtgagtttaatggtctgagg

SEQ ID NO: 182014 - DNA, 80 bp, synthetic construct
  source 1..80: mol_type = other DNA
ctggagacctgctatgtggctagacgtatggcctacccaagacgttgggggtctcgggtaggccatgattcttccaggca

SEQ ID NO: 182015 - DNA, 80 bp, synthetic construct
  source 1..80: mol_type = other DNA
gtgttggacaggttaggattccctggttgtgcagttagaaagttgtcacactccacccatatttacaaaggaatgtacta

SEQ ID NO: 182016 - DNA, 80 bp, synthetic construct
  source 1..80: mol_type = other DNA
tgaggtgcttaactactttgctaattggtcagggagcattactataacctttatgtgtgtgtgtgatgcatttagtactg

SEQ ID NO: 182017 - DNA, 80 bp, synthetic construct
  source 1..80: mol_type = other DNA
cgcgcggacagtcgcgcaactcggtgtggcatctgttgcgtatggacacggtctcggccaccaagttctacgaggccttc

SEQ ID NO: 182018 - DNA, 80 bp, synthetic construct
  source 1..80: mol_type = other DNA
tactaatgatgatgtaaaagtttttattaagccaaaacacacatccgcatggtgtcccagaccacccagagcggttgact

SEQ ID NO: 182019 - DNA, 80 bp, synthetic construct
  source 1..80: mol_type = other DNA
taaatgtggacctttcagctacagagacgacctaccctctactaccttgactgctcagtacaaattctactttaactggg

SEQ ID NO: 182020 - DNA, 80 bp, synthetic construct
  source 1..80: mol_type = other DNA
agacttaataatatctgactttcctttttggattatgctatggggatgggaagacatgacaaaaagaataggcaaatgta

SEQ ID NO: 182021 - DNA, 80 bp, synthetic construct
  source 1..80: mol_type = other DNA
tgagggtgaataactgggcttctgtgaaggcaccaaccctggaatctggatggtatgtttcttctgtgaccccgaggcag

SEQ ID NO: 182022 - DNA, 80 bp, synthetic construct
  source 1..80: mol_type = other DNA
aatggaatgaagaaaaatcaaaaagactagaaaaaattaaagcagaataccaggctgtgtacccacagctagtcacacaa

SEQ ID NO: 182023 - DNA, 80 bp, synthetic construct
  source 1..80: mol_type = other DNA
gagctcaagtatcgtcccaaaaagtgggtgctcatgagaattccaatcgggcttacggaggctctacaattaactacacc

SEQ ID NO: 182024 - DNA, 80 bp, synthetic construct
  source 1..80: mol_type = other DNA
tcgaagtgacatttgtaataaccagctgccaggatcctggcactacactggaccaagacatgcccgtcctcacacaccaa

SEQ ID NO: 182025 - DNA, 80 bp, synthetic construct
  source 1..80: mol_type = other DNA
gagactaatgtggtgggggctatggtagtggctgggataacagtaagatgcatacgctgagtgagcgtccggttggcatg

SEQ ID NO: 182026 - DNA, 80 bp, synthetic construct
  source 1..80: mol_type = other DNA
aggactagtaacaaaactttcaggaacaaatagtttatggcaagaagtacaaaacaacactacactatcagcagacggta

SEQ ID NO: 182027 - DNA, 80 bp, synthetic construct
  source 1..80: mol_type = other DNA
tcacatacttaagatttgacttggaagtgacgtttgtcatcacaagtgctcaggttacatctacaaaccaaagccaagat

SEQ ID NO: 182028 - DNA, 80 bp, synthetic construct
  source 1..80: mol_type = other DNA
aaagccaaacacattaaggcttggtgtcctagagcacctagagcagttccttaccagcatatatataaccctaactttaa

SEQ ID NO: 182029 - DNA, 80 bp, synthetic construct
  source 1..80: mol_type = other DNA
acgtcatggccactaatactgagtctaaaacatcgtatgtctcatatgctaatgctaatcccggggagaaaggtggtata

SEQ ID NO: 182030 - DNA, 80 bp, synthetic construct
  source 1..80: mol_type = other DNA
agcgtcatcctacattattcaggtactgcagcggaagagaatttgatcaagaaatccccaaaccacctgatcgttggact

SEQ ID NO: 182031 - DNA, 80 bp, synthetic construct
  source 1..80: mol_type = other DNA
aggggggactggaagggatttattacagtgaaagaagacatagaatcctagacatatacatggaaaaggagcaaggtata

SEQ ID NO: 182032 - DNA, 80 bp, synthetic construct
  source 1..80: mol_type = other DNA
tggagcagtatatgtgggaaactatagggtgatcaacagacacctggccacacacgcagattggactaattgtgtatggg

SEQ ID NO: 182033 - DNA, 80 bp, synthetic construct
  source 1..80: mol_type = other DNA
atatagacaacaaaataactgaatttttaaaacaagcctttccaatgtctggcacaaaacccacatcactaaatgcccta

SEQ ID NO: 182034 - DNA, 80 bp, synthetic construct
  source 1..80: mol_type = other DNA
acacacacacatgtcacaaactacagaccacaagtaggtgaggcaaccacagtcattccaactagagataatgttagagc

SEQ ID NO: 182035 - DNA, 80 bp, synthetic construct
  source 1..80: mol_type = other DNA
ctcacaggaagtcccagctcttacagcagtagaaactggagcaactagccaagtgaccccagaagacttaattgagacaa

SEQ ID NO: 182036 - DNA, 80 bp, synthetic construct
  source 1..80: mol_type = other DNA
gtttgtgccacctggaatcactggcccaaagactgctggggatattcggtgggactctgcttcaaaccccagtgtgtttt

SEQ ID NO: 182037 - DNA, 80 bp, synthetic construct
  source 1..80: mol_type = other DNA
caaggcgttgtcaagcgtgcggctctaaacaaattaagcgatacaaaattacagtaatacgaataataagttaccccctc

SEQ ID NO: 182038 - DNA, 80 bp, synthetic construct
  source 1..80: mol_type = other DNA
aacctgacggagagttgcatcaaccgcggtgagtcctatgtgactaccatctggcttctggactgcactaaaaacgatac

SEQ ID NO: 182039 - DNA, 80 bp, synthetic construct
  source 1..80: mol_type = other DNA
tttgactacttatggatttggccaccagttgaaagccgtatacgtggctggatacaaaattgtgaactaccatttagcaa

SEQ ID NO: 182040 - DNA, 80 bp, synthetic construct
  source 1..80: mol_type = other DNA
cagaaccactgtgttagattcacttcatatttaagtaatcaatcaaaaacagtacgaagataaaacaatagtactgcaat

SEQ ID NO: 182041 - DNA, 80 bp, synthetic construct
  source 1..80: mol_type = other DNA
aaagtcacttccagcactgaattcaccaagtgctgaagagtgtggatacagtgatagggtgagatcgatgacgctaggca

SEQ ID NO: 182042 - DNA, 80 bp, synthetic construct
  source 1..80: mol_type = other DNA
ccactagcgacgcccttgccgctagttcccggtttcttgatgggcgtaaagatgtttttctcgtcatcgtcatcgtcgtc

SEQ ID NO: 182043 - DNA, 80 bp, synthetic construct
  source 1..80: mol_type = other DNA
caaagtatagatatttcaaaaccaataagactaatggaaggacaaactcatgctcaagcagattatcttttggctttgaa

SEQ ID NO: 182044 - DNA, 80 bp, synthetic construct
  source 1..80: mol_type = other DNA
actattgctaggtgttcttgcaaatgtggtgtgtattactgtgaatctatgcgcaaatactacccagtaactgtggaggg

SEQ ID NO: 182045 - DNA, 80 bp, synthetic construct
  source 1..80: mol_type = other DNA
gtgatcaacgcgcaaacatcactggagcacatcctagtgatgataactggctcaattttgacggcacaatgctaggtaat

SEQ ID NO: 182046 - DNA, 80 bp, synthetic construct
  source 1..80: mol_type = other DNA
aaccgataccgccacaattttggctaccttagcacttcttgggtgtcatgggtccccgtgggcttttcttaaagataaaa

SEQ ID NO: 182047 - DNA, 80 bp, synthetic construct
  source 1..80: mol_type = other DNA
caacagtaacagatggaaatgcatttgaaaaatggtcatctaaaaacccacacaataatacactatatggaggcagtaca

SEQ ID NO: 182048 - DNA, 80 bp, synthetic construct
  source 1..80: mol_type = other DNA
aaacacgaggggacaagcgcaggcgtccagacagctgtttgtaacgctggaatgggagtgggcgtaggtaatctaacgat

SEQ ID NO: 182049 - DNA, 80 bp, synthetic construct
  source 1..80: mol_type = other DNA
gtgcgtgtttttcctagagtacaagaccggcacgagggctgattccaacgcttttaacaactgggttatcactacacgca

SEQ ID NO: 182050 - DNA, 80 bp, synthetic construct
  source 1..80: mol_type = other DNA
cccggccgccgatcgcgttcgacgttacgtgtgcattatctcgcgtctcatgtacgctcggtacggggagagatggcgta

SEQ ID NO: 182051 - DNA, 80 bp, synthetic construct
  source 1..80: mol_type = other DNA
agtcaaggggcaattcgggctcgggactggccgggctatgggcaaggctctgaaagcgatgcatttctctcgtatttccc

SEQ ID NO: 182052 - DNA, 80 bp, synthetic construct
  source 1..80: mol_type = other DNA
atccactgtcagacaaaggcctaggcaactgcatctatgcacagtggtgctctgagagctccaacgcagtacaccagcaa

SEQ ID NO: 182053 - DNA, 80 bp, synthetic construct
  source 1..80: mol_type = other DNA
ttaagtgcaatggaaataggagcctccagcacagccactcctgaatccacactagagactagatacgtggtaaatgataa

SEQ ID NO: 182054 - DNA, 80 bp, synthetic construct
  source 1..80: mol_type = other DNA
tatgcagagtggcctagttacctgacagataatgatgcaagtgatgtaaacaagacttcacaacctgacacgtcagtgtg

SEQ ID NO: 182055 - DNA, 80 bp, synthetic construct
  source 1..80: mol_type = other DNA
agtggccgcaatttcttaattcggccgatgcaaacccagtagatgcccccaccttacctgattcttcgagcaaccgtttt

SEQ ID NO: 182056 - DNA, 80 bp, synthetic construct
  source 1..80: mol_type = other DNA
tgcagtgccataccgtggtgaaggagtagattttaattcaagttcaatcacaccactaacagcagtcgcaaacatcaaca

SEQ ID NO: 182057 - DNA, 80 bp, synthetic construct
  source 1..80: mol_type = other DNA
ctggatgaatgacattgcacagtgcggcccctttgcctacgatgggggagaaaagtctgcagtgctgacagctaaataca

SEQ ID NO: 182058 - DNA, 80 bp, synthetic construct
  source 1..80: mol_type = other DNA
gttttataaccccttcccctttgcaacttagaagaaagtaaacactggccaataggaaatagcaaaccacgctatttacg

SEQ ID NO: 182059 - DNA, 80 bp, synthetic construct
  source 1..80: mol_type = other DNA
tactatatgccattcccctcatcaaaaccctacatcatatcacgacttatgtcgttcatgcaataacacagaactgtatc

SEQ ID NO: 182060 - DNA, 80 bp, synthetic construct
  source 1..80: mol_type = other DNA
tctgctagctgcggttgtggcgatcctgtacgccactttacttatcttgctgagaggtatggctttgccccaacttcccg

SEQ ID NO: 182061 - DNA, 80 bp, synthetic construct
  source 1..80: mol_type = other DNA
ctggcaaaactttaaaaagaacacagacagcaactatggctactgcacctattgcccctcaaatggcagtaatggtacag

SEQ ID NO: 182062 - DNA, 80 bp, synthetic construct
  source 1..80: mol_type = other DNA
ggtatgggcactgggggccaaaactatgccgtccgctcagatgactttgtggtagacaagggtttcggtggctccttcgc

SEQ ID NO: 182063 - DNA, 80 bp, synthetic construct
  source 1..80: mol_type = other DNA
cctacaaagtttacgagccccgtcttggacgcgattcgtgaggctgctgccccgctgcaatccccgtctgttgaggcatg

SEQ ID NO: 182064 - DNA, 80 bp, synthetic construct
  source 1..80: mol_type = other DNA
atgatccaacaccgatcaaacccaaagtgagagtgtatctgaaacccaagcacgttagggtttggtgcccccggcccccg

SEQ ID NO: 182065 - DNA, 80 bp, synthetic construct
  source 1..80: mol_type = other DNA
atccactaacaggcccatcagagcctacgtcgtcaatttcctgggagtgtcctacatcctgatataagtaagtgcacttc

SEQ ID NO: 182066 - DNA, 80 bp, synthetic construct
  source 1..80: mol_type = other DNA
tctcgttttgatatagagtttacatttgtcaccactgagagatactacaccagcaattcgggccatgcccgcaaccaagt

SEQ ID NO: 182067 - DNA, 80 bp, synthetic construct
  source 1..80: mol_type = other DNA
ggggaaaacataaccgccgccatcccatggggagggtagaggcggttgacatgtaggtgagtagtgtaagaagcatggcg

SEQ ID NO: 182068 - DNA, 80 bp, synthetic construct
  source 1..80: mol_type = other DNA
ttttacaggatctgaaacagatgtggagtgctttttgggtagagcagcatgtgtacatataacagaaattgaaaataaag

SEQ ID NO: 182069 - DNA, 80 bp, synthetic construct
  source 1..80: mol_type = other DNA
acaagtatgtgctggagcgcgacgacgaggccgtcctggcacgcctctttgaggtgcgcgaggtgtgttttttgcgcacc

SEQ ID NO: 182070 - DNA, 80 bp, synthetic construct
  source 1..80: mol_type = other DNA
tggtattcaacacaccatgattttgaaaatgaaaatttgtggcgtactgacctaaccttcccaaaacaaggacacggtgc

SEQ ID NO: 182071 - DNA, 80 bp, synthetic construct
  source 1..80: mol_type = other DNA
tgacaggattagagagagataagacaaaacaatatagtgaaacatggtactcaaaagatgtagtttgtgagtcaaataac

SEQ ID NO: 182072 - DNA, 80 bp, synthetic construct
  source 1..80: mol_type = other DNA
gccattttaagtaagcatggcgggcggtggtgtcaaatgtcaaaggtcacagcctgtcatgcttgcacaaaatggcggac

SEQ ID NO: 182073 - DNA, 80 bp, synthetic construct
  source 1..80: mol_type = other DNA
gctgcttacccttttggtgtaggaacatcagatgcatctccggaagatttgctcaaaagtgcttgctcattggatgtgtc

SEQ ID NO: 182074 - DNA, 80 bp, synthetic construct
  source 1..80: mol_type = other DNA
agcagagtgcctcttggttgaagaagtttaacgatgcggcgagtgccgctaaggggcttgagtggatctccaacaaaatc

SEQ ID NO: 182075 - DNA, 80 bp, synthetic construct
  source 1..80: mol_type = other DNA
acaacattatcattaggactttggtcattcaaacctacaaacacattgatctggataagttgagaatagtggcttatggt

SEQ ID NO: 182076 - DNA, 80 bp, synthetic construct
  source 1..80: mol_type = other DNA
gttagcatggcattcaggacagaaggaatatgaacacttcattgaaaggataagatcagtgaacatcggaagatgtttga

SEQ ID NO: 182077 - DNA, 80 bp, synthetic construct
  source 1..80: mol_type = other DNA
ggagaaataacaaacatgcttcacattgcccaggttgagtcctttatacctttaaataacacagaggggcacttgggtaa

SEQ ID NO: 182078 - DNA, 80 bp, synthetic construct
  source 1..80: mol_type = other DNA
gttagcccacttaaaagtgatgcatcagcaacatcaaaagtcccaattactatctcaataagcccaatgttcgctgagtt

SEQ ID NO: 182079 - DNA, 80 bp, synthetic construct
  source 1..80: mol_type = other DNA
ctgtaagtgtgctgttggctaggtcatctttgtagctaaaggggcctgttagtacaaggtcgtgcataacttgtacctgg

SEQ ID NO: 182080 - DNA, 80 bp, synthetic construct
  source 1..80: mol_type = other DNA
gagcttggataccacggcctccacggctatgccaatacaagaaagcattcagtgtggacttcacgccaactcccgtcaca

SEQ ID NO: 182081 - DNA, 80 bp, synthetic construct
  source 1..80: mol_type = other DNA
cttggactggcacacagttttccaccacgttagatacaaccccctggcagacagaggcctgggaaacatgatctgggtag

SEQ ID NO: 182082 - DNA, 80 bp, synthetic construct
  source 1..80: mol_type = other DNA
tctaaatgatactgtgcagttcagaatggcatttggtaacctcttttctaaatttcacaaaaacccaggcattgtaactg

SEQ ID NO: 182083 - DNA, 80 bp, synthetic construct
  source 1..80: mol_type = other DNA
actgcccctggtataaagtggtcctgcagctatttctggtcgcatcagagcgccaggagtccacacaaatgtaagagggg

SEQ ID NO: 182084 - DNA, 80 bp, synthetic construct
  source 1..80: mol_type = other DNA
gtgaggaattacaagctcgcaagtgtgttaagatgaaccttaacgccatctttcaggggttgggtgatgatgaaacacca

SEQ ID NO: 182085 - DNA, 80 bp, synthetic construct
  source 1..80: mol_type = other DNA
actggcgcgcgacgagtcgccgcgaccgacgttttttgacgccgtcagtctgttgttgcagcaactgccacccgactcgc

SEQ ID NO: 182086 - DNA, 80 bp, synthetic construct
  source 1..80: mol_type = other DNA
tacgtcacggaacaactggaaccacgactctgccaataactgtcacaattgctccagacaaatcagagttctccgggccc

SEQ ID NO: 182087 - DNA, 80 bp, synthetic construct
  source 1..80: mol_type = other DNA
gatttcgcggacgctagtagcgttcagatcccaattacagttacaatagctccaatgtacactgaattcaatggacttag

SEQ ID NO: 182088 - DNA, 80 bp, synthetic construct
  source 1..80: mol_type = other DNA
ggtctcgccccaaaagaaaggcgcacatgagactagtttgtgtgccagttcaagcacattgtttccccggaccgagtatc

SEQ ID NO: 182089 - DNA, 80 bp, synthetic construct
  source 1..80: mol_type = other DNA
ccaaggaccgtggaacgcaccggcagcgcgcggaaacaccgtcccgcagcccggtgccgccaacaaagaccgtgggacga

SEQ ID NO: 182090 - DNA, 80 bp, synthetic construct
  source 1..80: mol_type = other DNA
gggttgctactgggagcgccgttggatgcgatccggacatattttggtctaaaatcccagtaatgttagatggaaaagta

SEQ ID NO: 182091 - DNA, 80 bp, synthetic construct
  source 1..80: mol_type = other DNA
atgttagtaccatattaaacacatactgtaatattttgttttaacgaacttgtctgtttgaaaacatacattaaatatta

SEQ ID NO: 182092 - DNA, 80 bp, synthetic construct
  source 1..80: mol_type = other DNA
ataattaaaagcttcctcactagacccaggggcagagccacaaaaagagttagattcaagccccccactctgtatacaga

SEQ ID NO: 182093 - DNA, 80 bp, synthetic construct
  source 1..80: mol_type = other DNA
cccagaccacagatgagacgccagttggcccttcccgcgccccccgccgaccctcaacaggctatcccagaatggcctgg

SEQ ID NO: 182094 - DNA, 80 bp, synthetic construct
  source 1..80: mol_type = other DNA
aatacagtgtgcttagaaggcgctggctggacctcttttagattaataatatagacacttaatttgagtagaagtaggag

SEQ ID NO: 182095 - DNA, 80 bp, synthetic construct
  source 1..80: mol_type = other DNA
gtactgtttatgctttatatagactaatgtgcattgctcagggtccatacactggcctccctcaacccaaaataaccaaa

SEQ ID NO: 182096 - DNA, 80 bp, synthetic construct
  source 1..80: mol_type = other DNA
ctttctatgccaacggggataacgacacaggtggatgtgactgtcctgggtagcttgctacaattggatttccagaaccc

SEQ ID NO: 182097 - DNA, 80 bp, synthetic construct
  source 1..80: mol_type = other DNA
agaactcagggcatgctaggtcccaagtgtaccagattatgtacgtccctccaggagcaccaacacccaatgctcgggat

SEQ ID NO: 182098 - DNA, 80 bp, synthetic construct
  source 1..80: mol_type = other DNA
cttgactggatctgctataggatgtgaccctgatgttttctggtcccagatatactcatgcatggaaaacaaccttctag

SEQ ID NO: 182099 - DNA, 80 bp, synthetic construct
  source 1..80: mol_type = other DNA
caggtggcagaggggtaggaggagtaggccttggtggcatcgtgagcaccagcacagccacctccaggggtcatcaacga

SEQ ID NO: 182100 - DNA, 80 bp, synthetic construct
  source 1..80: mol_type = other DNA
ttggcttcaggcctgcgagcagtcccacagttctttttgtggctgtggtgattttattctgcatcttactaatctggctg

SEQ ID NO: 182101 - DNA, 80 bp, synthetic construct
  source 1..80: mol_type = other DNA
cgcggcaccatattaacacaacattgaggtgtcctcaggacgtaacccttttgcccattattaaagcagcttaccccggc

SEQ ID NO: 182102 - DNA, 80 bp, synthetic construct
  source 1..80: mol_type = other DNA
ttaagcagtggcagaagcaacccagaagtaaaaggcagttacactgatatatcttacaacccactaacagacaaaggagt

SEQ ID NO: 182103 - DNA, 80 bp, synthetic construct
  source 1..80: mol_type = other DNA
ttgatggtgatcccatttgctcctttagattacgctgcgcaagcgtccgagtatgtccctgtgactgtcacaattgctcc

SEQ ID NO: 182104 - DNA, 80 bp, synthetic construct
  source 1..80: mol_type = other DNA
gccactgccatcaagcctccccccccccccacggtgttttcatgtttcattatcgtttatataacgttaattatatgaga

SEQ ID NO: 182105 - DNA, 80 bp, synthetic construct
  source 1..80: mol_type = other DNA
ttggatacacacacacacatgtaacaaattataaaccatctataggggactatacactacctattccaacaagaaccaac

SEQ ID NO: 182106 - DNA, 80 bp, synthetic construct
  source 1..80: mol_type = other DNA
aaccccggagcggaatcagtaatgaaccgcacattaatgggtgaaatcctaaattactacgcacactggtcaggaagcat

SEQ ID NO: 182107 - DNA, 80 bp, synthetic construct
  source 1..80: mol_type = other DNA
aactgcgaagaaaaaaccacctatgagtctgtggaggcctcctctgcacaatgtcccggggatcgagcacctctggtacg

SEQ ID NO: 182108 - DNA, 80 bp, synthetic construct
  source 1..80: mol_type = other DNA
atatttgcgcaaaaaggaggacccctttgtgcagaacgtgctgcggaggcacgacgcggcggccgtggcctcgctgttgc

SEQ ID NO: 182109 - DNA, 80 bp, synthetic construct
  source 1..80: mol_type = other DNA
ttagaagctgccataatagcataagtaacacagtctacagactcttccaagaactagccagaatacctagtaggattagt

SEQ ID NO: 182110 - DNA, 80 bp, synthetic construct
  source 1..80: mol_type = other DNA
agtcacgggcgggcaccgactgcgtcctcggcaccagtccctgaatcaggctgatgtagaactgggtctggccgcacgcc

SEQ ID NO: 182111 - DNA, 80 bp, synthetic construct
  source 1..80: mol_type = other DNA
cccagcaccggtttctggctcgtggatgtcgtcgtcattggagacgataacttagctttacgtattctggacggcgtcga

SEQ ID NO: 182112 - DNA, 80 bp, synthetic construct
  source 1..80: mol_type = other DNA
acagaaacacaagggatgttacaaagcttcaacacatgattgacacctatggacttgacctaccatatgtgacctatcta

SEQ ID NO: 182113 - DNA, 80 bp, synthetic construct
  source 1..80: mol_type = other DNA
cccaaacgaccaggaatatcttccataaggctgtgttacaattctttgaagatttcgaccgcgtcgacacactgcgtgat

SEQ ID NO: 182114 - DNA, 80 bp, synthetic construct
  source 1..80: mol_type = other DNA
gcacagtctattgcattagttggtgaaagggcattctatgatcctagaactgcagggagtaagtccaggtttgatgacat

SEQ ID NO: 182115 - DNA, 80 bp, synthetic construct
  source 1..80: mol_type = other DNA
acgtcatcgatgacgtggggaggcgtactatgaaacgcggaagtaggccccgctacgtcatcatcacgtgggtgctgcgt

SEQ ID NO: 182116 - DNA, 80 bp, synthetic construct
  source 1..80: mol_type = other DNA
atcgggacagattgtcttccacaccatccacagccccactcttgcctcggcgctgggactgcctggggaaaatgtaccca

SEQ ID NO: 182117 - DNA, 80 bp, synthetic construct
  source 1..80: mol_type = other DNA
aactcaacagtgaccagcataattgctaacattgacgagagggataatcagacaacaaatattacctttagtgcagatgt

SEQ ID NO: 182118 - DNA, 80 bp, synthetic construct
  source 1..80: mol_type = other DNA
ttgccccatggatatccaacgtcaattacaggcgttgtgttaaggatgacttcacagagggtggatatatctgctgtttc

SEQ ID NO: 182119 - DNA, 80 bp, synthetic construct
  source 1..80: mol_type = other DNA
aaagtctatatgtttgagccccagggtcctaaacccatacagggctacaacgattggctagaagaatacactgcttgcaa

SEQ ID NO: 182120 - DNA, 80 bp, synthetic construct
  source 1..80: mol_type = other DNA
ccaaagtagttggtcccgtcccgcatgcaacttagaagctttgcacaaagaccaatagccagtaatcatccagattactt

SEQ ID NO: 182121 - DNA, 80 bp, synthetic construct
  source 1..80: mol_type = other DNA
ggtgacttattaactaaggtcgccgacgatgcatcaaatgttcttggccccaattgttacgcaactacttcagaaccaga

SEQ ID NO: 182122 - DNA, 80 bp, synthetic construct
  source 1..80: mol_type = other DNA
gacggcgcgttgcggggccggggggggttggcggcggagactggaggtcgcgacggagacacggagtgtcgtcggagaca

SEQ ID NO: 182123 - DNA, 80 bp, synthetic construct
  source 1..80: mol_type = other DNA
cgccgggcagacaactcggccgtgatggaggctatgacggcggcgagtgactacgcgcgtggcctgggcgtgaagctgac

SEQ ID NO: 182124 - DNA, 80 bp, synthetic construct
  source 1..80: mol_type = other DNA
gttcaatgcggaccctttgcctaccacggagatgaaaagaactgttctctcactatgaaatacaagtttaaatttctatt

SEQ ID NO: 182125 - DNA, 80 bp, synthetic construct
  source 1..80: mol_type = other DNA
gcgtgtgctgtggaggacggtgacggtggtaagagggtgctgccgtgcggttgggacggcggcggcgaataaaagcggcg

SEQ ID NO: 182126 - DNA, 80 bp, synthetic construct
  source 1..80: mol_type = other DNA
accgacgtgcccgcgtctgtctcaccgccgctcgcccgatgtcgcacggcttgttatacgctagcccgtcgccgcctcgg

SEQ ID NO: 182127 - DNA, 80 bp, synthetic construct
  source 1..80: mol_type = other DNA
caagacatgccactatacataatgctaaacggctatatagactgggcaaaaaaagaaagagacaactggggcctagccac

SEQ ID NO: 182128 - DNA, 80 bp, synthetic construct
  source 1..80: mol_type = other DNA
tgtgcaatggtgatgtagcaatgaactttaccaaagggaatgccaacagtagcaatggagtccagacagcagtgcacaat

SEQ ID NO: 182129 - DNA, 80 bp, synthetic construct
  source 1..80: mol_type = other DNA
agcaccaccgccaccactacaccaccaagcaccactaacaacacaaccacaacagagcccacaacaggagggccagagat

SEQ ID NO: 182130 - DNA, 80 bp, synthetic construct
  source 1..80: mol_type = other DNA
caatatctttctgacattgacgcaacatctgttgacaaacccacccatcccgaaacctcggcagatagattctacactct

SEQ ID NO: 182131 - DNA, 80 bp, synthetic construct
  source 1..80: mol_type = other DNA
gatggggggggggggtagtaactgtattaattatacgtcttgcagtacacggtattgtgtgctggtgcgcgtattacgac

SEQ ID NO: 182132 - DNA, 80 bp, synthetic construct
  source 1..80: mol_type = other DNA
attggaaatgcaaaatgttgccccctgatatgtggaaaagctgtagtgtttaaagacagagatacaggagatcacttatc

SEQ ID NO: 182133 - DNA, 80 bp, synthetic construct
  source 1..80: mol_type = other DNA
gtaataatcttagatgtttgttacagttgaggcttttattgaccagccgcctcagggctgggaaagggactcaactgtaa

SEQ ID NO: 182134 - DNA, 80 bp, synthetic construct
  source 1..80: mol_type = other DNA
gatctgggtgtatacatatttcaactattactgtcaataaagacataaaatatgatgatggacactttcttaaatggcct

SEQ ID NO: 182135 - DNA, 80 bp, synthetic construct
  source 1..80: mol_type = other DNA
tattggtttaaaagcaggttaaaagacaggttagcggtggccgaaaaacgggcggaaacccttgcaaatgctggattttc

SEQ ID NO: 182136 - DNA, 80 bp, synthetic construct
  source 1..80: mol_type = other DNA
tcctcttttccgcgtgttttccgcgtctggccgccgtccctcaccccccgagagctgatcttcgcgtcctcagggactcg

SEQ ID NO: 182137 - DNA, 80 bp, synthetic construct
  source 1..80: mol_type = other DNA
gagctgttgcagcatgagtggtatgaaaaattttaattattacatatagaaataacaaataattagtttgttagttttat

SEQ ID NO: 182138 - DNA, 80 bp, synthetic construct
  source 1..80: mol_type = other DNA
tttgtggaaaagcgcttattctacaaaacaagaggacaaaggccagctactccataaacactgtggtgcagcaattgcgc

SEQ ID NO: 182139 - DNA, 80 bp, synthetic construct
  source 1..80: mol_type = other DNA
tgccgttattgcctgtgtccgacgactgcggacacaggccaccgtctacccggaggaggacatgtgcatggcctgggccc

SEQ ID NO: 182140 - DNA, 80 bp, synthetic construct
  source 1..80: mol_type = other DNA
aaatagaggagaattcaatttactaggaatacatgataactgtgctgtggtgccaacacatgcagagtgtggggacatag

SEQ ID NO: 182141 - DNA, 80 bp, synthetic construct
  source 1..80: mol_type = other DNA
ccagttaaagacgtactggagaaaggcataccaacactacaatcaccaacagtagaggcttgtgggtattcagacaggat

SEQ ID NO: 182142 - DNA, 80 bp, synthetic construct
  source 1..80: mol_type = other DNA
aacacaacaattggggaattgtggtcctaccctttgtgccacttaaatacgaggctggtgcatcaactgcaatccccata

SEQ ID NO: 182143 - DNA, 80 bp, synthetic construct
  source 1..80: mol_type = other DNA
tgggggcacaagtctcgacgcagaaaactggtgcacacgagacaggactaaatgccagcggcaattccgttattcactat

SEQ ID NO: 182144 - DNA, 80 bp, synthetic construct
  source 1..80: mol_type = other DNA
caacactacacacatctataaagatgagatatacacagttaggggtgggatgccatcagggatatcaggcacctcaattt

SEQ ID NO: 182145 - DNA, 80 bp, synthetic construct
  source 1..80: mol_type = other DNA
acgcaaagcttagtatttccttgaaagctcgccggttggtcactccgttaataccccattaacagacctggcagatgagg

SEQ ID NO: 182146 - DNA, 80 bp, synthetic construct
  source 1..80: mol_type = other DNA
acctgaagacatgattgaaacacgatatgtccaaacatcacaaactagagatgagatgagccttgagagtttcctaggga

SEQ ID NO: 182147 - DNA, 80 bp, synthetic construct
  source 1..80: mol_type = other DNA
cccttcctaacacacccagtatatgcaatggatgatgtatatgaatccatcagatggactaaggaccctagaaacacaca

SEQ ID NO: 182148 - DNA, 80 bp, synthetic construct
  source 1..80: mol_type = other DNA
gtgttgaaagacttctactaccccattataggctactctagtgaccctcaaaaagttaaaaatgtttttgataacacatt

SEQ ID NO: 182149 - DNA, 80 bp, synthetic construct
  source 1..80: mol_type = other DNA
aaactgatttgtgtttcttgttgcactggctgaaccccaaaaagataaacttggcagatagaatgttgggtttgtcaggg

SEQ ID NO: 182150 - DNA, 80 bp, synthetic construct
  source 1..80: mol_type = other DNA
aatactatatgaccagtacacaaggggacaaaacttttggacaaagagcaacgaggacctagacttagctagattcctag

SEQ ID NO: 182151 - DNA, 80 bp, synthetic construct
  source 1..80: mol_type = other DNA
ttggtatgtatacagtacgggttgaggtacaaacagattttaaaaaagaaatttttgccatccctgttgatgtggcatca

SEQ ID NO: 182152 - DNA, 80 bp, synthetic construct
  source 1..80: mol_type = other DNA
caatggagatgtacagggttaagctatctgattcagctaatagaagcaatccaatattgtgcttgtcactgtcacctgcc

SEQ ID NO: 182153 - DNA, 80 bp, synthetic construct
  source 1..80: mol_type = other DNA
tcaggcccaaaaaagcctcgggtcgacatcccaaaacaagaaacccaagaagaaagctcacattcactccaaagagaatc

SEQ ID NO: 182154 - DNA, 80 bp, synthetic construct
  source 1..80: mol_type = other DNA
tcccttgtaccaagtgtctctgctggcagttgcattagcacctgtgtgatctagtagttttgtgttttgtacttcactcc

SEQ ID NO: 182155 - DNA, 80 bp, synthetic construct
  source 1..80: mol_type = other DNA
tctatgggctaatgtgagtatgacaagtggttatgcaacttggtcaataacctaccaaggaaatgcacaaataagaaaga

SEQ ID NO: 182156 - DNA, 80 bp, synthetic construct
  source 1..80: mol_type = other DNA
tgccataaacttcgacctcaattttaggccttccggactacaaaaatcgccattttagtgacgtcacagcagccatttta

SEQ ID NO: 182157 - DNA, 80 bp, synthetic construct
  source 1..80: mol_type = other DNA
tacttgagggtgtgttaaatgaacttggatttcagggggacctagttagaaaactgtgctactctaagcatgtgtataag

SEQ ID NO: 182158 - DNA, 80 bp, synthetic construct
  source 1..80: mol_type = other DNA
taaaatacaccaaaagtattttatcaaatcagggacctttcaagggtttcaatgaagtgtcaacagcattcagacacatt

SEQ ID NO: 182159 - DNA, 80 bp, synthetic construct
  source 1..80: mol_type = other DNA
cagacagtggcaaccggacgtggtccggttctgcaagataaatggatggctacctctaattgtctgtggctcagggagca

SEQ ID NO: 182160 - DNA, 80 bp, synthetic construct
  source 1..80: mol_type = other DNA
tcaccactaactgacactccttgtgtgcaattccaagtgctgggggacctctacaacaaagtccttaatattgacctgcc

SEQ ID NO: 182161 - DNA, 80 bp, synthetic construct
  source 1..80: mol_type = other DNA
ccaggttatcccatacaatgttgggggaaatcttgaattattacacacattgggcaggatccttaaagttcacattcctg

SEQ ID NO: 182162 - DNA, 80 bp, synthetic construct
  source 1..80: mol_type = other DNA
ccctggggtaaatgtctgcggtgggtcttcttggcccacttctcagtacttttcaggatggagggctctaacggattctc

SEQ ID NO: 182163 - DNA, 80 bp, synthetic construct
  source 1..80: mol_type = other DNA
taagcgcccttacaattatgattagaaacaactcagacttacctaccatacttgctactctgtcattgttggggtgcagt

SEQ ID NO: 182164 - DNA, 80 bp, synthetic construct
  source 1..80: mol_type = other DNA
aatcaatttatgaccactgaagatgaacaatctccaaacatattaccaaattttcaccctacgaaaaagatacacatccc

SEQ ID NO: 182165 - DNA, 80 bp, synthetic construct
  source 1..80: mol_type = other DNA
atgacctacatggcacctatggaaaagccacactagaagaatttgagtaccacataggcttttacagctctgtattctta

SEQ ID NO: 182166 - DNA, 80 bp, synthetic construct
  source 1..80: mol_type = other DNA
attataaagattttagttagaatcttgtgttacatggtactttattgccacaaacctaatattctaacaacagcttgttt

SEQ ID NO: 182167 - DNA, 80 bp, synthetic construct
  source 1..80: mol_type = other DNA
taaacccgacaagttacacctggaaaacatgttcgcgctcacaggtgttcctggtggggccaaaaccggcactgtcattt

SEQ ID NO: 182168 - DNA, 80 bp, synthetic construct
  source 1..80: mol_type = other DNA
tctccatctacaacctgaccacctttgtcaagcacatcgacgccgcggtttttaagacggtacgcgattgcgtcttcgac

SEQ ID NO: 182169 - DNA, 80 bp, synthetic construct
  source 1..80: mol_type = other DNA
tctaggaccaaggtttgggggtgttttcaccagcaatgttaaaataatgaactaccacctcatgactccagaagatcatt

SEQ ID NO: 182170 - DNA, 80 bp, synthetic construct
  source 1..80: mol_type = other DNA
agaggcctacactaatgttaataagccttctgaatccaaagtttttaatgcatactcacatgaactagagcaaataatat

SEQ ID NO: 182171 - DNA, 80 bp, synthetic construct
  source 1..80: mol_type = other DNA
attatcgttacccgcatgtgaactacgcgaaacctagtactaccttgaaagtacattgtctggtcgctcagccaatcccc

SEQ ID NO: 182172 - DNA, 80 bp, synthetic construct
  source 1..80: mol_type = other DNA
tagtgtcaaaccagtacaatgcactcatggaatgataccagcggtaccaccacaactacagttaattgttagactagcag

SEQ ID NO: 182173 - DNA, 80 bp, synthetic construct
  source 1..80: mol_type = other DNA
tggagtggatcagcaacaagatctcaaaattcatcgattggcttaagactaaagtattacctgaagctagagacaaagtg

SEQ ID NO: 182174 - DNA, 80 bp, synthetic construct
  source 1..80: mol_type = other DNA
tctctactaaagttaaggattcttatgatctatacaacaaacagggcattaaattagaaattacagttgtagtgctagat

SEQ ID NO: 182175 - DNA, 80 bp, synthetic construct
  source 1..80: mol_type = other DNA
tgagaaatacaagtttttaatacaccctgtttatagtatgactgatgtccacgaatcaatacggtggactaaagacccaa

SEQ ID NO: 182176 - DNA, 80 bp, synthetic construct
  source 1..80: mol_type = other DNA
tcaggtgacaacggcatttataataaaaaaacagacagtaactatggataccactcttttcaagttaaaggcaaaaaatc

SEQ ID NO: 182177 - DNA, 80 bp, synthetic construct
  source 1..80: mol_type = other DNA
tacgggcttgatctgccgtatgtcacttatctgaaggatgagttacgtaatccagataaaattagagctggtaaaactag

SEQ ID NO: 182178 - DNA, 80 bp, synthetic construct
  source 1..80: mol_type = other DNA
ggaaaagggtaggagaattggtggctttgtagataatgaaagtagacaacccagtgatgaaaattggttaaattgtgatg

SEQ ID NO: 182179 - DNA, 80 bp, synthetic construct
  source 1..80: mol_type = other DNA
ccagggagccccctcaatgtcatgtaacctttaagcttggctggaaataaaactgcaaggccgtgggactttcacttgtc

SEQ ID NO: 182180 - DNA, 80 bp, synthetic construct
  source 1..80: mol_type = other DNA
agaaatgaaaagtttagggatattaggaaatacataccagaaggagaagatgattacccagaatgcaacctagctctggt

SEQ ID NO: 182181 - DNA, 80 bp, synthetic construct
  source 1..80: mol_type = other DNA
tcacaagcaccatgtttagtcacgtgacttgctacgtcacggccgccattttagttcacaaaatggcggccgtgacgtag

SEQ ID NO: 182182 - DNA, 80 bp, synthetic construct
  source 1..80: mol_type = other DNA
gcttgcaagatctttaacagaccccctagaacccacctcactgaccctcctttctacccctactgcaaaaacaattacaa

SEQ ID NO: 182183 - DNA, 80 bp, synthetic construct
  source 1..80: mol_type = other DNA
cgcatggaagtccccgcgttcgaagaggggcaagaaaaaagcttacttttcagacagagaaaacatcgcccctgggaaga

SEQ ID NO: 182184 - DNA, 80 bp, synthetic construct
  source 1..80: mol_type = other DNA
atccacactggaacactctggcaggtgggcttgcatatggcaacgccagtggctcaagcacagcaactaaaacagactta

SEQ ID NO: 182185 - DNA, 80 bp, synthetic construct
  source 1..80: mol_type = other DNA
cacaaagaggaactagctaacactgcatagagaaggaaactagctgatactgcaggactttccagaaggggctgtaacag

SEQ ID NO: 182186 - DNA, 80 bp, synthetic construct
  source 1..80: mol_type = other DNA
gtgttgtatgggatttagggttgcaatcttcatgtaccatggttgtaccatggatgagttccacattctaccgcagtaca

SEQ ID NO: 182187 - DNA, 80 bp, synthetic construct
  source 1..80: mol_type = other DNA
ggtgcaacagacaaaattgcacccaatcaaatgaaagaagcaaacaaagcatacataaaagcagccaaagttaatttacc

SEQ ID NO: 182188 - DNA, 80 bp, synthetic construct
  source 1..80: mol_type = other DNA
caactggcatgtacactgttcgagttagtcagcagactcaaccagctcaagaaattttctctatcttggtggatgtagct

SEQ ID NO: 182189 - DNA, 80 bp, synthetic construct
  source 1..80: mol_type = other DNA
gtagcttgttacaattggactttcagaatccaaggacttatgacactgatgttgacatttatgacaataatcctgatgtc

SEQ ID NO: 182190 - DNA, 80 bp, synthetic construct
  source 1..80: mol_type = other DNA
gaagagccgctccgtggccccgggagccacggcatcaaacaggtgagtcagccttgcccccgccagcgcctcctcgcagg

SEQ ID NO: 182191 - DNA, 80 bp, synthetic construct
  source 1..80: mol_type = other DNA
agtcatgacaattttagatgaggtagacattttgcatattttcagacccaccatggaatcatttgaaggagagggggact

SEQ ID NO: 182192 - DNA, 80 bp, synthetic construct
  source 1..80: mol_type = other DNA
caaggatactggaacctgaccccagaaaggggattcttgagttcctatgctgtaagactaacatggtatgagaggagctt

SEQ ID NO: 182193 - DNA, 80 bp, synthetic construct
  source 1..80: mol_type = other DNA
cgtgctggaagaccacttgcatacgccgcgacgcgtgcagcggctactggatctgacgcagatggtaacgcgactggtgg

SEQ ID NO: 182194 - DNA, 80 bp, synthetic construct
  source 1..80: mol_type = other DNA
agagcacacatagatgcagacaaagctaaagaagcacaaagagcatccaccacaccctcatacaacaatgaccccttccc

SEQ ID NO: 182195 - DNA, 80 bp, synthetic construct
  source 1..80: mol_type = other DNA
tgcagacaggtatgctagctgggacattaatatcagagaaatggtacagttacgacgcaagtgtgagctgtttacctatc

SEQ ID NO: 182196 - DNA, 80 bp, synthetic construct
  source 1..80: mol_type = other DNA
tttcagagggtcacttatcattagattatctgtttatgctagcactttcaaccgtggtagacttaggatgggtttctttc

SEQ ID NO: 182197 - DNA, 80 bp, synthetic construct
  source 1..80: mol_type = other DNA
gatttcaatcccagggcaggttacaaatttagtagagttatgtcaggttgacacactaataccagtgaacaatacagaag

SEQ ID NO: 182198 - DNA, 80 bp, synthetic construct
  source 1..80: mol_type = other DNA
tgaagattttacaagtcgtataatcaacatcatgtctcttccagatattcatcttgtagctgagtttttctccttcttca

SEQ ID NO: 182199 - DNA, 80 bp, synthetic construct
  source 1..80: mol_type = other DNA
ctcgccctgacgtgtcagtgaatagattctatacactctcaaccaagagctggaagacagagtctactggctgggtggtg

SEQ ID NO: 182200 - DNA, 80 bp, synthetic construct
  source 1..80: mol_type = other DNA
caattagacaactagaacatctgagacaatgtcccacgaggaaaagctccgtcagatcaaaaatggccttgaagtggttg

SEQ ID NO: 182201 - DNA, 80 bp, synthetic construct
  source 1..80: mol_type = other DNA
tagttgtgcccagccttagaacaaagcctaaaggcaggcgctccataaaaattagaataaagccccccaaacttatgcta

SEQ ID NO: 182202 - DNA, 80 bp, synthetic construct
  source 1..80: mol_type = other DNA
taccaggcgtcaccgtgataacggtcaagaagaaaattactacgtaacggtgttaattggagacacaacgttattcactc

SEQ ID NO: 182203 - DNA, 80 bp, synthetic construct
  source 1..80: mol_type = other DNA
tcacaaagccaaacatgttaaagcctggtgcccaagacctcctagggcagttgagtatatacatacacatgtcacaaatt

SEQ ID NO: 182204 - DNA, 80 bp, synthetic construct
  source 1..80: mol_type = other DNA
ggtacaatctgacgacatctggcggcgagcgtacaccatcgaatgtggcgatcgccggctctacgtcacaatgacgcaaa

SEQ ID NO: 182205 - DNA, 80 bp, synthetic construct
  source 1..80: mol_type = other DNA
tttggatattcccaccaaagaactttcattaaaagaagctttgtatggcacagatggcttggaacccattgaccttaata

SEQ ID NO: 182206 - DNA, 80 bp, synthetic construct
  source 1..80: mol_type = other DNA
gcaaggctcttagggttttcattgttaaaaatgtttctcggcaggccttacaggagaaagaaaagggcgctgtcactgcc

SEQ ID NO: 182207 - DNA, 80 bp, synthetic construct
  source 1..80: mol_type = other DNA
gctaaaaacatccgggtcaaaggtcaccgctacgtcacaagtcacgtgactggagggtcgctcaatgcggaagcaatcct

SEQ ID NO: 182208 - DNA, 80 bp, synthetic construct
  source 1..80: mol_type = other DNA
aatggcatcaactatataccagatactgttaaacctgatgtgtcaaattacggggcttttggccaacaatcaggtgccgt

SEQ ID NO: 182209 - DNA, 80 bp, synthetic construct
  source 1..80: mol_type = other DNA
cgacgtcccccgtcgacgttgttttctccgagcggtgatcgttcccgtccctatcctccctccgcggcccccacggcggc

SEQ ID NO: 182210 - DNA, 80 bp, synthetic construct
  source 1..80: mol_type = other DNA
gttaagtttaggagaaagtgtacaagaccaaatttctagtagggtagttaagtggttagttagaattataagtgccttga

SEQ ID NO: 182211 - DNA, 80 bp, synthetic construct
  source 1..80: mol_type = other DNA
tgtctctaaagcactacaaccttgcactacatgtcccaagcctccgcattacaaacattgctgtcccattttgtgcggta

SEQ ID NO: 182212 - DNA, 80 bp, synthetic construct
  source 1..80: mol_type = other DNA
ccacttgggagatccaggtggagtggtacactattatcccggtaattttgtacgccagttttataacccctccccccttg

SEQ ID NO: 182213 - DNA, 80 bp, synthetic construct
  source 1..80: mol_type = other DNA
tttggtaagcaaaatacgtacatcaggctcgaaccctttaagatcaacgttcttgagcagatcacgaagcatatcgaaaa

SEQ ID NO: 182214 - DNA, 80 bp, synthetic construct
  source 1..80: mol_type = other DNA
gctgctacagtccgcgcctggatctccctcggcaacttccaaggatactgccctcgggcttgcccccctcttgggccact

SEQ ID NO: 182215 - DNA, 80 bp, synthetic construct
  source 1..80: mol_type = other DNA
ccctagaagagtacaagttatcgacccgcgggtcgttgggcccaactacacattcaaaagctgggacatcaggcgtggga

SEQ ID NO: 182216 - DNA, 80 bp, synthetic construct
  source 1..80: mol_type = other DNA
agacttgtactgactcagtggcaccccgcagttaggagaaaatgcaccatcacggggtacatgcccgtggtgtggtgcgg

SEQ ID NO: 182217 - DNA, 80 bp, synthetic construct
  source 1..80: mol_type = other DNA
ggtgatgtttgtgaagaggtggagagagccataaccagggttgctgatacagtagggcgcggtcccgctaacacagagag

SEQ ID NO: 182218 - DNA, 80 bp, synthetic construct
  source 1..80: mol_type = other DNA
ttgggaggggaatcctcgcagtcccaagaaggatcaggcagggagcagaaatcgccctcctgtgagggacagcgatacca

SEQ ID NO: 182219 - DNA, 80 bp, synthetic construct
  source 1..80: mol_type = other DNA
ttggatatgtacagagttccactcacacaaaacaaacagggagaacaggtatttgggtttaaactctacttaggtgatgg

SEQ ID NO: 182220 - DNA, 80 bp, synthetic construct
  source 1..80: mol_type = other DNA
tggtgccgactccacagaaaaaactacatataatgagcgatcgctggattcctcccacaagaaatgtacctgccagaggc

SEQ ID NO: 182221 - DNA, 80 bp, synthetic construct
  source 1..80: mol_type = other DNA
caggcttggtgctggtttgagggagactggataggggccataagggaggtgaaggagaccattataaaccatcccagata

SEQ ID NO: 182222 - DNA, 80 bp, synthetic construct
  source 1..80: mol_type = other DNA
gtggtgggtcctcgagggagtgttgagggccgtaagcgtgttgtgtccgacgctgcctgcgcactgccggtgcgtgtcgt

SEQ ID NO: 182223 - DNA, 80 bp, synthetic construct
  source 1..80: mol_type = other DNA
cggtgatgcccatcaacaatgataatgccaaggtgagcagcatggacgcgtatcggattgagttgaacactaacaccaac

SEQ ID NO: 182224 - DNA, 80 bp, synthetic construct
  source 1..80: mol_type = other DNA
aacttcagaagggtgtttggtaatctctatgctggtttccatgcaaacccaggaatccttactggttcagctataggatg

SEQ ID NO: 182225 - DNA, 80 bp, synthetic construct
  source 1..80: mol_type = other DNA
tggtatggagcccgggaggccggcggctcctggtatccctggtatggagccataccagggataccaggagccgccggccc

SEQ ID NO: 182226 - DNA, 80 bp, synthetic construct
  source 1..80: mol_type = other DNA
gttaatgctaaccctggagagacaggtggaacatttaagtcacagtacacacctggagcctccaccgacactgcaagaga

SEQ ID NO: 182227 - DNA, 80 bp, synthetic construct
  source 1..80: mol_type = other DNA
aagtgcatttttactacagctgggccgtgggagtttcacttgtcggtgtctacctcttaaggtcactaagcactccgagc

SEQ ID NO: 182228 - DNA, 80 bp, synthetic construct
  source 1..80: mol_type = other DNA
cgaactttgagaacttgaggagaaattggctcgaattattttaaatttgcagcttaaagctgaaccccaccggaaatctg

SEQ ID NO: 182229 - DNA, 80 bp, synthetic construct
  source 1..80: mol_type = other DNA
tacaatgcctttccctcagccacacaagatggtactgaaagatttgccaactggaccattagtattaaagatatggtgca

SEQ ID NO: 182230 - DNA, 80 bp, synthetic construct
  source 1..80: mol_type = other DNA
aagtcacgtgccttggggaggtactcaacccggaagtatcctcaacacgtggcctgtcacgtgggcgctacgtcatcgcc

SEQ ID NO: 182231 - DNA, 80 bp, synthetic construct
  source 1..80: mol_type = other DNA
ggacaaagttaaaccattagagcagacaacaaatcaacaagcagaacttgaagcatttgcactagcactacaggattcag

SEQ ID NO: 182232 - DNA, 80 bp, synthetic construct
  source 1..80: mol_type = other DNA
tgtacttagaaggtaaaccaaatacaggctatgtattttatgacagcttatttggagatggcaaaatgccctctggcaca

SEQ ID NO: 182233 - DNA, 80 bp, synthetic construct
  source 1..80: mol_type = other DNA
agttcattagcataaccgcacaaccgttacttacagccggaggctgggaagactactttagaaggtttttagacgcagcg

SEQ ID NO: 182234 - DNA, 80 bp, synthetic construct
  source 1..80: mol_type = other DNA
ttgaccctaactttaaagaccataaaaacacaaatccaaccacaactagtagtactaacaaatacaaaaactacagcagt

SEQ ID NO: 182235 - DNA, 80 bp, synthetic construct
  source 1..80: mol_type = other DNA
ggcagtaccctgttcacctgtcggtgtctacctctataagtcactaagcactccgagcgtcagcgaggagtgcgacccta

SEQ ID NO: 182236 - DNA, 80 bp, synthetic construct
  source 1..80: mol_type = other DNA
catcaggttgttctgggacaagtatatttaacacaatgatcaacaatatcatcattagaacactggtcttagatgcatac

SEQ ID NO: 182237 - DNA, 80 bp, synthetic construct
  source 1..80: mol_type = other DNA
gtcttgacaccaccaactgtttcatcacctgaggctattgacagaagattttttctagattgtgatgtcaaaatcatgcc

SEQ ID NO: 182238 - DNA, 80 bp, synthetic construct
  source 1..80: mol_type = other DNA
aggtggattcactagtaccagtaaataatacttcaagattgacgagatctatagaagcctatggtatcccagtaagaaca

SEQ ID NO: 182239 - DNA, 80 bp, synthetic construct
  source 1..80: mol_type = other DNA
taaattgtagaaaatgggagcacaagtctcgacacaaaggacagggtcacacgagactagcaacatcgccacagaaggtt

SEQ ID NO: 182240 - DNA, 80 bp, synthetic construct
  source 1..80: mol_type = other DNA
cttaaatgattcagtgaatatgagaatgaaactaggacaattatataaagcattccataaaaaccccggtgtcataacag

SEQ ID NO: 182241 - DNA, 80 bp, synthetic construct
  source 1..80: mol_type = other DNA
gggtggtggccccgctgggcaccgctgcgccgccgccaggtccaggggcagccggtgttcctggcgctccggtgacaccc

SEQ ID NO: 182242 - DNA, 80 bp, synthetic construct
  source 1..80: mol_type = other DNA
tcaattagaaagttgagcggacacggttatcgttcctggcggatataagtatataaacgcgagttagcctttcccgtccg

SEQ ID NO: 182243 - DNA, 80 bp, synthetic construct
  source 1..80: mol_type = other DNA
cccatgttgtggttccagcaacaagtactgaatgacatctcaaagagcggaccgtacgcatacagagacgaactgaaaaa

SEQ ID NO: 182244 - DNA, 80 bp, synthetic construct
  source 1..80: mol_type = other DNA
tctgaccttcccacagtactagcaacactggcattacttggatgcagtggttctccatggtccttcctgaaggataagat

SEQ ID NO: 182245 - DNA, 80 bp, synthetic construct
  source 1..80: mol_type = other DNA
acaaacccagatgggctatggggagacgcagtatttgatatttctgatagtactaaaataaccaaaaacatggaaagtta

SEQ ID NO: 182246 - DNA, 80 bp, synthetic construct
  source 1..80: mol_type = other DNA
tcacatggttactcagcgtctgccagcctaagtgacggtgagatccaggctgtccgtgcaccacggtgaacacggtgttg

SEQ ID NO: 182247 - DNA, 80 bp, synthetic construct
  source 1..80: mol_type = other DNA
gtaaaatcatcccgaacagcctccctcagggtcccgttctcgttttgtgtccaacaggggctcttgccgataaatatcgc

SEQ ID NO: 182248 - DNA, 80 bp, synthetic construct
  source 1..80: mol_type = other DNA
ggaaccacaagaggtaaaatagaggtatacataagtctaaggtgccctaatttctttttccccgtcccagccccacgaac

SEQ ID NO: 182249 - DNA, 80 bp, synthetic construct
  source 1..80: mol_type = other DNA
agactatgaagatagacaaaagaactatgattgttggaaacaacaacttgaaaaccaaactctagatgacctggatgatg

SEQ ID NO: 182250 - DNA, 80 bp, synthetic construct
  source 1..80: mol_type = other DNA
acattagtgtcagatgggaactactggaacagcttccatgtattggaggtgttcaattctaacttgggtgctgtagatgg

SEQ ID NO: 182251 - DNA, 80 bp, synthetic construct
  source 1..80: mol_type = other DNA
accagtttggggcgggacaaatgccagacggctcctcgtacgtccccataaaatggagaggcaaatggtaccctaacatg

SEQ ID NO: 182252 - DNA, 80 bp, synthetic construct
  source 1..80: mol_type = other DNA
ctccattcattgagcagaaaacagatttgcaaggagatgaagcacgcaccaccaaggatacagtggccaatacaacacca

SEQ ID NO: 182253 - DNA, 80 bp, synthetic construct
  source 1..80: mol_type = other DNA
aaattttattattttgttcagtcctgtttggagaaagagatgatagaatacagatttaaatcttatgatgggtggagatc

SEQ ID NO: 182254 - DNA, 80 bp, synthetic construct
  source 1..80: mol_type = other DNA
aacactaactttcaaactggcaacagcacccagtttggctacaactcctacaaacctacagcagacaaaataaataaagc

SEQ ID NO: 182255 - DNA, 80 bp, synthetic construct
  source 1..80: mol_type = other DNA
actaaagtcttgtctaaaataattaaaatagtttctgctttggtcatcatttgtaggaatcatgatgatttaattactgt

SEQ ID NO: 182256 - DNA, 80 bp, synthetic construct
  source 1..80: mol_type = other DNA
tggacgggcacctgatggcgttcgattactcaaattttgacgcctctctctctccagtctggtttgaatgtttagagaaa

SEQ ID NO: 182257 - DNA, 80 bp, synthetic construct
  source 1..80: mol_type = other DNA
ggttctggggctcctctggaggtcgctgcatccgccggtagggttcgaatgggcgtggtccgcttgctctgctggcccgg

SEQ ID NO: 182258 - DNA, 80 bp, synthetic construct
  source 1..80: mol_type = other DNA
ttgtggcgatgttattggtcaccttaatgatctggcggctcgttttggacgtcctgggaaccccagacccccgggcgctc

SEQ ID NO: 182259 - DNA, 80 bp, synthetic construct
  source 1..80: mol_type = other DNA
tatatacatgcaacaagcagtactagaagatctagccagatcaggcccctttgcacttaaacagcaggtgcccagcgcca

SEQ ID NO: 182260 - DNA, 80 bp, synthetic construct
  source 1..80: mol_type = other DNA
tttgcaaatacatcccaccttaagcgacgagtccataaagcaccgttgtccgggtacggtgaaagtgacccggattgtag

SEQ ID NO: 182261 - DNA, 80 bp, synthetic construct
  source 1..80: mol_type = other DNA
gcaacgcccacttttggcgcgacctgcagggcgaggccatgaacgctgccaacctgtgcgccgaggtgctgcagccctcg

SEQ ID NO: 182262 - DNA, 80 bp, synthetic construct
  source 1..80: mol_type = other DNA
tggaaaaaccagggctatagaagcagccagcatgaatgatacagcaaactttagaagagtttttggcaacttgtatgcca

SEQ ID NO: 182263 - DNA, 80 bp, synthetic construct
  source 1..80: mol_type = other DNA
ccgggtcccacctgtcgtgttcaagagagcgcgcccggcgtgctgttggtttggggcgacgagcggttggttggtccctt

SEQ ID NO: 182264 - DNA, 80 bp, synthetic construct
  source 1..80: mol_type = other DNA
caacacagtcaacataacaagtaggatttatcacaaagccaaacatgtcagagcatggtgtcctagaccccccagagcag

SEQ ID NO: 182265 - DNA, 80 bp, synthetic construct
  source 1..80: mol_type = other DNA
aatggcaccttattaggcaacttgttgatctttcctcaccagttcattaatctcaggacaaataatacagctacaatagt

SEQ ID NO: 182266 - DNA, 80 bp, synthetic construct
  source 1..80: mol_type = other DNA
cttttccaaattgaggttttgaacagattgacttataacagtacaagtcctagtgaggtgcattgcatagttcagggtaa

SEQ ID NO: 182267 - DNA, 80 bp, synthetic construct
  source 1..80: mol_type = other DNA
cagacctccgcatgggatgacccccacgaagagacccttgtctggcagtttgactccctcctagcatatgactatgtggc

SEQ ID NO: 182268 - DNA, 80 bp, synthetic construct
  source 1..80: mol_type = other DNA
cactggcctcccaacccagaaaccaaaagtgccaactattaggacagcaaaggtgcagggtccagtatttgactacgccg

SEQ ID NO: 182269 - DNA, 80 bp, synthetic construct
  source 1..80: mol_type = other DNA
ggcccagctagcagggatattcaagcgtcctatgcgcttctatccctcagacacccctcactacccgtggttacccccca

SEQ ID NO: 182270 - DNA, 80 bp, synthetic construct
  source 1..80: mol_type = other DNA
tgctgatctatcgaagccaatcctgtgtttgtcactgtctccagcgtccgacccgcgcttgtcgcacaccatgcttgggg

SEQ ID NO: 182271 - DNA, 80 bp, synthetic construct
  source 1..80: mol_type = other DNA
gtggttccctggatcagtaacactcactacagggctgtagaaactgggggtgtgtttgattactacaccactggtgttgt

SEQ ID NO: 182272 - DNA, 80 bp, synthetic construct
  source 1..80: mol_type = other DNA
tctgcaaaaagaaatttgatgcaaaggatattcaaaactatatcatcacagatggcatgaaggtccgcaagcttttagat

SEQ ID NO: 182273 - DNA, 80 bp, synthetic construct
  source 1..80: mol_type = other DNA
ctattccgatcatgggtgctaatagattcttcacttaatggtatgcgggttttaattgaattaatcaaatcagaagacgc

SEQ ID NO: 182274 - DNA, 80 bp, synthetic construct
  source 1..80: mol_type = other DNA
ggatggattgtgcctgacactcctaccaacgttgaacgccacttgaatagagctgtcttgattatgcagtccgtagccac

SEQ ID NO: 182275 - DNA, 80 bp, synthetic construct
  source 1..80: mol_type = other DNA
gtatcaaatttgcactactattatatataaggatgctgcttatataggtataactatagtttatttttatggacatttta

SEQ ID NO: 182276 - DNA, 80 bp, synthetic construct
  source 1..80: mol_type = other DNA
caaatgtcaaaggtcacagcctgtcatgcttgcacaaaatggcggacttccgcttccgggttagccgccatatttggtca

SEQ ID NO: 182277 - DNA, 80 bp, synthetic construct
  source 1..80: mol_type = other DNA
caacctgggttggattcagtgttcaaaagaacgttgctaggtgaggtgctcaattactacgcccattggtcagggagcat

SEQ ID NO: 182278 - DNA, 80 bp, synthetic construct
  source 1..80: mol_type = other DNA
gttcagagtcatctatagaaaactttctctgtcgctcggcatgtgtgtactatactacatacgacacacacggggacgat

SEQ ID NO: 182279 - DNA, 80 bp, synthetic construct
  source 1..80: mol_type = other DNA
agagagaccatacaaggaggtgacggaggatttgctgcacctcaattctctctttggaaacgaccaatagtcactgcata

SEQ ID NO: 182280 - DNA, 80 bp, synthetic construct
  source 1..80: mol_type = other DNA
atttggctatacagcggctgcagaaccttattatcaaagaccttccaaaccctccaaccagtactccaaccgctcaggct

SEQ ID NO: 182281 - DNA, 80 bp, synthetic construct
  source 1..80: mol_type = other DNA
ggcaaaacaattagaggtaccataatgacaggagacaccccaatcaatatttttggtaggaatcttttgacagaactggg

SEQ ID NO: 182282 - DNA, 80 bp, synthetic construct
  source 1..80: mol_type = other DNA
gcgcgtgtcagaccacttcgggctcgcggtggtcggatgctttattaaacagactccgaggttgtcttggacactgaggg

SEQ ID NO: 182283 - DNA, 80 bp, synthetic construct
  source 1..80: mol_type = other DNA
aaagaggatacaggtctggttaaagtgtggtcggtgtagtcctgaggtggtatgtgattctgtccagccgtgtggagtgg

SEQ ID NO: 182284 - DNA, 80 bp, synthetic construct
  source 1..80: mol_type = other DNA
ctatgcagcatcaaacacaaggattgcccacacgtatccctagtggaggtcagcagtttatgactacagaagatgaacaa

SEQ ID NO: 182285 - DNA, 80 bp, synthetic construct
  source 1..80: mol_type = other DNA
gtcagaactgtataaattggaactgggggactacaaattagtagagataacaccaattggctttgcacctacaagtataa

SEQ ID NO: 182286 - DNA, 80 bp, synthetic construct
  source 1..80: mol_type = other DNA
gacaaaaacagacctaactggggatacgtagtctatgacacaaactttggcaatggaaaaatgccctcaggaagtggcca

SEQ ID NO: 182287 - DNA, 80 bp, synthetic construct
  source 1..80: mol_type = other DNA
attacaaactagaaacagatgttcacactagtgtagccataagacctagaacaagtttaacaaatgttggtcccagtgac

SEQ ID NO: 182288 - DNA, 80 bp, synthetic construct
  source 1..80: mol_type = other DNA
taagaataggaccacctagactatttacagatcactggtactttcaaagagacttctgtggtgtgccccttctaactgtc

SEQ ID NO: 182289 - DNA, 80 bp, synthetic construct
  source 1..80: mol_type = other DNA
agggcgtagacccggacgaggacagcaaaacggcgcagccacataaggccgtggtgcagctgcaggagagaagcccattg

SEQ ID NO: 182290 - DNA, 80 bp, synthetic construct
  source 1..80: mol_type = other DNA
ccagacccaaaaatccatactctgtgtgctttcgcttaggtcggagtccggcgctacgccttcggctgcgccggacacct

SEQ ID NO: 182291 - DNA, 80 bp, synthetic construct
  source 1..80: mol_type = other DNA
cgtacaccacctacaaaaatgcaaacccaggagaagctggtggagagttcgtggacaaatttgccgctgcgacggaggca

SEQ ID NO: 182292 - DNA, 80 bp, synthetic construct
  source 1..80: mol_type = other DNA
acaacgaaatgagaaaaacagtatttaacaaaatatatcccccaactgactccacaaaatcagcatggcagctaacatat

SEQ ID NO: 182293 - DNA, 80 bp, synthetic construct
  source 1..80: mol_type = other DNA
tcgtgtaaccttcaaacttggcttctaataaaatttgctaggccgtgcaactttcacttgtcggtgtctacctctaaagg

SEQ ID NO: 182294 - DNA, 80 bp, synthetic construct
  source 1..80: mol_type = other DNA
tccatcaaaaccctggtgtgattactggttcagcagtcggttgtgatcctgatgtgttctggtcagtcataccgtgttta

SEQ ID NO: 182295 - DNA, 80 bp, synthetic construct
  source 1..80: mol_type = other DNA
acactctggattcagtacaatggagaaagaactcagcaggatggtggtggaaattcccggacgccctgcgcgatatgggt

SEQ ID NO: 182296 - DNA, 80 bp, synthetic construct
  source 1..80: mol_type = other DNA
cgttatggcaaccaacacagaaaccaaaacatcgtacgtctcatatgttaatgcaaacccaggagaggcgggtggtgtgt

SEQ ID NO: 182297 - DNA, 80 bp, synthetic construct
  source 1..80: mol_type = other DNA
ttaccgacaagtatactccaagtacagacgctgatcagggtagaggttttgcagcagtcgattatttgctagggtgtggt

SEQ ID NO: 182298 - DNA, 80 bp, synthetic construct
  source 1..80: mol_type = other DNA
attttaaaagaaggggaggaataggggatatgactcctgcagaaagaatcattaacatgatatccacagaacaagaaata

SEQ ID NO: 182299 - DNA, 80 bp, synthetic construct
  source 1..80: mol_type = other DNA
ctggacgaagagctgcggcatcgcggcacgcccgaatcgccgcggctcaccgaggtctaccagacgctacgcgattacaa

SEQ ID NO: 182300 - DNA, 80 bp, synthetic construct
  source 1..80: mol_type = other DNA
ctcctccttctcgtcctcgtccctgcacaggggtgagcgatgcaatgtgactgtcttgtcctgtaggtcccacttctttc

SEQ ID NO: 182301 - DNA, 80 bp, synthetic construct
  source 1..80: mol_type = other DNA
gaattttccggagctatgcaacaccagacacaagggctacctaccagattaccaagtggatcacaacaattcatgacaac

SEQ ID NO: 182302 - DNA, 80 bp, synthetic construct
  source 1..80: mol_type = other DNA
gctcacgggcattttggtggcgatgtagcgcacgtcttggaaaagaacggccaggatgcagcccacgaacacggtataga

SEQ ID NO: 182303 - DNA, 80 bp, synthetic construct
  source 1..80: mol_type = other DNA
tgacgcgcgaaggctgaaagaaaagaggccaggtgcgttttgtgtagttttagggcaaagtcggcgatctgtcgtagtgc

SEQ ID NO: 182304 - DNA, 80 bp, synthetic construct
  source 1..80: mol_type = other DNA
cttcaactcctggccttggcaaatagaatatcttcatttcctgatccgccagctgattcgcctcttgacttggctataca

SEQ ID NO: 182305 - DNA, 80 bp, synthetic construct
  source 1..80: mol_type = other DNA
taaattctccacctctaataataccctaggtgaccaaagtgagatatcattatatttaaaccaaccaacaacaactaaca

SEQ ID NO: 182306 - DNA, 80 bp, synthetic construct
  source 1..80: mol_type = other DNA
actgtacgatgactttctactacacagaaactactggacagcctcaaacaaagacttagacctgagcagatacttaggat

SEQ ID NO: 182307 - DNA, 80 bp, synthetic construct
  source 1..80: mol_type = other DNA
tttgcatgtaacttagaagtatcacaaacagctcaacaggagtggctcaaccagagccatcacgagcaagcacttctgtc

SEQ ID NO: 182308 - DNA, 80 bp, synthetic construct
  source 1..80: mol_type = other DNA
gccacgtgaacgggccatcaccattacctatgactagtacagtgagggtatactttaaaccaaagcacgtaaaggcatgg

SEQ ID NO: 182309 - DNA, 80 bp, synthetic construct
  source 1..80: mol_type = other DNA
actcccatccaaccacagggactggaagacataatcgagactgtggcacaaaacgccctccaactgtctcagcccagacc

SEQ ID NO: 182310 - DNA, 80 bp, synthetic construct
  source 1..80: mol_type = other DNA
cagaaggttttacgagaagcggcgaaaatgaaacgtttctgtggtataatttgaccgtgaaacccaaacctttggaaact

SEQ ID NO: 182311 - DNA, 80 bp, synthetic construct
  source 1..80: mol_type = other DNA
cacagaaaaggaaagtgccactgtacctactgccagcaactcagaaaaaacagcctgctatgagccagtggcgtcctcca

SEQ ID NO: 182312 - DNA, 80 bp, synthetic construct
  source 1..80: mol_type = other DNA
agacacccaatttctcccacgctcgttaactgagagtatcgcttaaaggttccctcgttgaagcactgtgcgtgggccaa

SEQ ID NO: 182313 - DNA, 80 bp, synthetic construct
  source 1..80: mol_type = other DNA
gtgttggtggttcccaacatacaacctagcagtgggcacacatctaatgctgcaccagctctagatgctgctgagacagg

SEQ ID NO: 182314 - DNA, 80 bp, synthetic construct
  source 1..80: mol_type = other DNA
aggatgggcttggtggacttgcagcagggtaatatttcctctaaaaaaaggatcacatttggaggtgcaagcctattgga

SEQ ID NO: 182315 - DNA, 80 bp, synthetic construct
  source 1..80: mol_type = other DNA
aacccccacagatgacaccatcctagttgcctacactgctgacttgcaagttgaccctgctacccacccaggcactgatt

SEQ ID NO: 182316 - DNA, 80 bp, synthetic construct
  source 1..80: mol_type = other DNA
cttaacagatggacgtaccccaacgatcagctagacctcggccgctacaagggctgcaaactaacattctacagaaccaa

SEQ ID NO: 182317 - DNA, 80 bp, synthetic construct
  source 1..80: mol_type = other DNA
cacccgtccccgccgccgtcccgcgggcatcccgcacggcgacaaacccccgcgacggcccgaaaagcggagcgccgcgc

SEQ ID NO: 182318 - DNA, 80 bp, synthetic construct
  source 1..80: mol_type = other DNA
aattaacaaagagtaccactaccactatcctacatacgtaaccaaagactttaaaacaaactcaacactcacacatgact

SEQ ID NO: 182319 - DNA, 80 bp, synthetic construct
  source 1..80: mol_type = other DNA
acgctggaggaggcgaccgtggcgccgccgatggaggacccgtcgccgccgacgacgaagacctcgacgcgcttttcgcc

SEQ ID NO: 182320 - DNA, 80 bp, synthetic construct
  source 1..80: mol_type = other DNA
tcagacgtggactgtttagcaagacaggtattaaaagaatgtcagaacaaccagcttatgatgaattttctgcagacagg

SEQ ID NO: 182321 - DNA, 80 bp, synthetic construct
  source 1..80: mol_type = other DNA
gcgccagcccggtgtacagcgcctcgtgcatgcagcggctgaggtccgagttgtaaaactggcggagctggggcacgccc

SEQ ID NO: 182322 - DNA, 80 bp, synthetic construct
  source 1..80: mol_type = other DNA
cggctgtgggatgtgatccagatacattttggtccgtgataccttgcctcatggatggacaattgatggcttttgattat

SEQ ID NO: 182323 - DNA, 80 bp, synthetic construct
  source 1..80: mol_type = other DNA
gaggacaagctcgatgccttggtggatgggatggtcaacatgtccctggacacagtccagaacacgatggccagtgggtc

SEQ ID NO: 182324 - DNA, 80 bp, synthetic construct
  source 1..80: mol_type = other DNA
acccgctgcttgcattgtacttcagtcgctctgcggagaggctggcagattgagccctgggaggttctctccagcactag

SEQ ID NO: 182325 - DNA, 80 bp, synthetic construct
  source 1..80: mol_type = other DNA
tgaggcctggcttgaggctcaggatgcaaattttgaggatgttcagcgagagttttccgggctgcgagtaattggtgatg

SEQ ID NO: 182326 - DNA, 80 bp, synthetic construct
  source 1..80: mol_type = other DNA
ataggggattcctgtccatgaccacgcaattagagtgccgggcccgggacagcgccacatacacatggccgggtttgatg

SEQ ID NO: 182327 - DNA, 80 bp, synthetic construct
  source 1..80: mol_type = other DNA
gcgcctggggagacactatatggaaccaaaacaccatagccaactttaaaaagaacacagacaacttgtggaatgcagga

SEQ ID NO: 182328 - DNA, 80 bp, synthetic construct
  source 1..80: mol_type = other DNA
acccacactgggacactaaatatgggggtctggcgtatggctacacaccaaccaataataggccacaagggtctacagca

SEQ ID NO: 182329 - DNA, 80 bp, synthetic construct
  source 1..80: mol_type = other DNA
tgatggttatctgcccgtacacaaaacccatgctatacaacaaagacaagccaaactggggatacgtggcctatgactat

SEQ ID NO: 182330 - DNA, 80 bp, synthetic construct
  source 1..80: mol_type = other DNA
tggtaatattagtacagaagacaaaaaaatatttgaagactggctatataaagatccaaacttatatcaaacagtacaca

SEQ ID NO: 182331 - DNA, 80 bp, synthetic construct
  source 1..80: mol_type = other DNA
ctttcccgagtgtgattcttcactattccggagcagctgctgaggaaaaccttatcaagaaatcaccgaaccatctgatt

SEQ ID NO: 182332 - DNA, 80 bp, synthetic construct
  source 1..80: mol_type = other DNA
agtctgcacaatgtggctcccactacccaaaatgctgatgacctctttgccacatggaagattagctactaccacgcata

SEQ ID NO: 182333 - DNA, 80 bp, synthetic construct
  source 1..80: mol_type = other DNA
gactgagacccccaacagggcaacaaccagacggtacttcatatccgtcagatttcctagataagtggaagagagcctgg

SEQ ID NO: 182334 - DNA, 80 bp, synthetic construct
  source 1..80: mol_type = other DNA
tgagggacagccctgatattgggcaatcacagcaattggaaggggccactgccgctttccagatagaagaagtcatgaaa

SEQ ID NO: 182335 - DNA, 80 bp, synthetic construct
  source 1..80: mol_type = other DNA
cattatcactaccaccagaggtgaatttaacttgctgggcatccatgataactgtgctgttgttcccactcatgctgaat

SEQ ID NO: 182336 - DNA, 80 bp, synthetic construct
  source 1..80: mol_type = other DNA
attgacaccatgattcccctcaatttagagagaactaagagaaacacaatggacatgtatagagtcaccctgagcgacag

SEQ ID NO: 182337 - DNA, 80 bp, synthetic construct
  source 1..80: mol_type = other DNA
aaggtagatgtagcttcccaacctctttcaagtactcttttaggtgaaatatgtagttactacacacattggacaggtag

SEQ ID NO: 182338 - DNA, 80 bp, synthetic construct
  source 1..80: mol_type = other DNA
ctcccacccggttccctcccccagggcgtgccccgcttgcctggtcctggagctcatccggggatgctgcatccgctagt

SEQ ID NO: 182339 - DNA, 80 bp, synthetic construct
  source 1..80: mol_type = other DNA
tcaggagcaagagcaagaagccagggtattccaaccatgcttacacctgggtcagggcaattcatgactactgatgactt

SEQ ID NO: 182340 - DNA, 80 bp, synthetic construct
  source 1..80: mol_type = other DNA
accgggtgaggtgcacaatctcatggagatagcggaagtggattcggtagtacctgtgcacaacgtggagggcaagatga

SEQ ID NO: 182341 - DNA, 80 bp, synthetic construct
  source 1..80: mol_type = other DNA
gagcttcaaagaagaaaccacctcctgacatgacctggagacccccggtgcacaacgcccatgggatcgaaagaaatctc

SEQ ID NO: 182342 - DNA, 80 bp, synthetic construct
  source 1..80: mol_type = other DNA
gcagagtcctggagctccattaacattagtcatacctgccaggtatgtcctggggtcccgaagcagcgtcccattgcgct

SEQ ID NO: 182343 - DNA, 80 bp, synthetic construct
  source 1..80: mol_type = other DNA
gttatcgtttttttatgataaaaaaacaacgtgtcattttcacggtgatttattcttgctattatttttccccatgggct

SEQ ID NO: 182344 - DNA, 80 bp, synthetic construct
  source 1..80: mol_type = other DNA
caattagattcagatgatatattcaaaacagcactaacaggaaaagccaagtttactaaaacaaagctcacgaatgactg

SEQ ID NO: 182345 - DNA, 80 bp, synthetic construct
  source 1..80: mol_type = other DNA
gggccagacttcgccataaggcctttatcttcttgccatttgtcagtgtcggagggttgccaagacgcgggcctccattt

SEQ ID NO: 182346 - DNA, 80 bp, synthetic construct
  source 1..80: mol_type = other DNA
gcctccgccagggataggaggcgcttccagctctcgtcgtccaggaccaaggggacgtccacgtgcgggcccctgtagat

SEQ ID NO: 182347 - DNA, 80 bp, synthetic construct
  source 1..80: mol_type = other DNA
tcacaaacatttaacaaaaataattttatctataaatatctaataggtaacatggaatcctattggcaaaaatttcaaac

SEQ ID NO: 182348 - DNA, 80 bp, synthetic construct
  source 1..80: mol_type = other DNA
tttcaaggcttaggggatactcatccaccagggttcatagtagatctcctttcagcttcaaaggatcccaaggttgtgga

SEQ ID NO: 182349 - DNA, 80 bp, synthetic construct
  source 1..80: mol_type = other DNA
tctcgccttgtttctcagatagcatttcaggccggttttgcagtcgctgctgcagctatggggtccctagaaatggtgcc

SEQ ID NO: 182350 - DNA, 80 bp, synthetic construct
  source 1..80: mol_type = other DNA
aattacggtatatctgaaactaatgacatggggactttgtgcttccgtgcactggatggagccgagaatagtgaaataaa

SEQ ID NO: 182351 - DNA, 80 bp, synthetic construct
  source 1..80: mol_type = other DNA
accgcagagcaggaggcttctgattatgtggcagcccccagtgcataatgtacccggcatcgagagaaactggtacgaga

SEQ ID NO: 182352 - DNA, 80 bp, synthetic construct
  source 1..80: mol_type = other DNA
agctgagacgagattgaatcctgatctacaacctactgaagagtattggctaaactttgatgggacactccttggaaata

SEQ ID NO: 182353 - DNA, 80 bp, synthetic construct
  source 1..80: mol_type = other DNA
cccctggctccctcgccccgaacccgaaattgcgcgcggcacctcggacccccgctcgtgctgacgcgctcgcgcgcgtc

SEQ ID NO: 182354 - DNA, 80 bp, synthetic construct
  source 1..80: mol_type = other DNA
cttctgccgcctgtgccagctgcaccgccgacaccttccatgagccgctggcgtcctccgctccaccatggccagggggt

SEQ ID NO: 182355 - DNA, 80 bp, synthetic construct
  source 1..80: mol_type = other DNA
agctccggctactcctccaagagatgttcaaaacccaagcgaacctccacataaacccatatatgtccatccagcagtga

SEQ ID NO: 182356 - DNA, 80 bp, synthetic construct
  source 1..80: mol_type = other DNA
aggcaggttgcccaattacgtagaaagctggagtttttcacgtacgttagatttgatgtggaggtcacatttgttatcac

SEQ ID NO: 182357 - DNA, 80 bp, synthetic construct
  source 1..80: mol_type = other DNA
gcctttgccacagaagcccaccttagacccagaaccactactcctacaggacaagcaattactaatgacacagtcagtaa

SEQ ID NO: 182358 - DNA, 80 bp, synthetic construct
  source 1..80: mol_type = other DNA
tgtgcaatgcagcttttagccatgccatgctctataaatcacttccctatctcaggtaggcctgcacaccttaggtatgg

SEQ ID NO: 182359 - DNA, 80 bp, synthetic construct
  source 1..80: mol_type = other DNA
caaaaaaaagagtggccacttgtctttgtttatgggccccattggcgtggagccccgtttaattttcggtggtgttagag

SEQ ID NO: 182360 - DNA, 80 bp, synthetic construct
  source 1..80: mol_type = other DNA
cataccaaaagaaccaccgcactgaaccagtatgtgttctgatccacggcagtcctggttgtggcaagtccttggttaca

SEQ ID NO: 182361 - DNA, 80 bp, synthetic construct
  source 1..80: mol_type = other DNA
caacttgcaataagataagtggaataaggatgcttaaagcatggtgtaaataatcttttctaacccatgatattcatggg

SEQ ID NO: 182362 - DNA, 80 bp, synthetic construct
  source 1..80: mol_type = other DNA
gactcccccaccaatgttgagcgccacttaagtagagctgtcttgattatgcaatctgtggccaccgtggtagcagttgt

SEQ ID NO: 182363 - DNA, 80 bp, synthetic construct
  source 1..80: mol_type = other DNA
tgggacttcagacgtggcttctttggcccgaaagctattcaaagaatgcaacaacaaccaactgctactgaatttttttc

SEQ ID NO: 182364 - DNA, 80 bp, synthetic construct
  source 1..80: mol_type = other DNA
gtactaaagaaattagggtttaaatctgctgatctgattaaacaaatttctactacacaccatattttcaaaaatcaaat

SEQ ID NO: 182365 - DNA, 80 bp, synthetic construct
  source 1..80: mol_type = other DNA
ttggccaccactttaattggagagatatcaagctattatacccactggactggcagtctcagattcagtttcctattttg

SEQ ID NO: 182366 - DNA, 80 bp, synthetic construct
  source 1..80: mol_type = other DNA
ccaaggctattatcgccacacaaaatccaaccactacactgaagctggttatatcacactgtggtaccagacagattttg

SEQ ID NO: 182367 - DNA, 80 bp, synthetic construct
  source 1..80: mol_type = other DNA
tgcttagtaaatcagacactagattagaagagccaattgaatgcctaattaagaaatccgccgcaaagtatagagtgaac

SEQ ID NO: 182368 - DNA, 80 bp, synthetic construct
  source 1..80: mol_type = other DNA
ttaaggactatttaaatgtcaaaatactctccaaagttgtcaaaatgatatctgcattagtgatcatatgcaggaatcat

SEQ ID NO: 182369 - DNA, 80 bp, synthetic construct
  source 1..80: mol_type = other DNA
cggccttcagcgtctcatttgtctttactctcgagtgcggtcggtgtctcgtcggtgagacgaggccgccgcccgacaag

SEQ ID NO: 182370 - DNA, 80 bp, synthetic construct
  source 1..80: mol_type = other DNA
tgacggcagtaggcaaagggattgggattcagatcggtggcaacggcaggcaaggcttttgtgctgccctcaagagagga

SEQ ID NO: 182371 - DNA, 80 bp, synthetic construct
  source 1..80: mol_type = other DNA
agataccgcagccacaacaaccataaaagttcacagtacatcttcaagctatggaaactcatttaattactggtcaacaa

SEQ ID NO: 182372 - DNA, 80 bp, synthetic construct
  source 1..80: mol_type = other DNA
tctaatagagatgtgtcaggtagattctctaattccaatcaacaatacaactgcaaatttaaagaaggtgaatatgtata

SEQ ID NO: 182373 - DNA, 80 bp, synthetic construct
  source 1..80: mol_type = other DNA
ggcaggaacaaaccacgacggagtgctcctagaaaggcgcgggccggtaccaggcggcgtgaggagcgggagtgaagagg

SEQ ID NO: 182374 - DNA, 80 bp, synthetic construct
  source 1..80: mol_type = other DNA
ccttatgtatcaataggacgcaccaactatgaaaggcaaaacataaaaccagtcattgaaaagagaaccagtatcaaaca

SEQ ID NO: 182375 - DNA, 80 bp, synthetic construct
  source 1..80: mol_type = other DNA
gccgtggcacaggtgatgtagaagagttgcttcacaaagttgtagtctcgcgtgttaggaaggaagcagggtgccagctc

SEQ ID NO: 182376 - DNA, 80 bp, synthetic construct
  source 1..80: mol_type = other DNA
gaagaagagagacatcgtgaacaaaactactagagatgtggtcaaattacaggaaatgctagatcggtatggtgttgact

SEQ ID NO: 182377 - DNA, 80 bp, synthetic construct
  source 1..80: mol_type = other DNA
cgcaacctctctgacgacgtgctggttgcgctagtcatggctcattttctcgcaacaacacagaagcacacgttcaagaa

SEQ ID NO: 182378 - DNA, 80 bp, synthetic construct
  source 1..80: mol_type = other DNA
atatgatggaggcctaacaaacctagcagacaacactcacaacgacatgagaaaaacagtatttaacaaaatatatccca

SEQ ID NO: 182379 - DNA, 80 bp, synthetic construct
  source 1..80: mol_type = other DNA
aggaatagaagatacaacattggtaactgtttggaagccttgtttcaaggtccactggaatttaaggagcctaggattga

SEQ ID NO: 182380 - DNA, 80 bp, synthetic construct
  source 1..80: mol_type = other DNA
attgcgggtgtagatgatctggatgcccttgttgttcacctgcatggttttgcaagctttgatggcctcatctaacacct

SEQ ID NO: 182381 - DNA, 80 bp, synthetic construct
  source 1..80: mol_type = other DNA
catagaggtgaacgcaggcaaccaccaaggagagaagattttcgctttccaaatacaacctggtctagactcagtgttta

SEQ ID NO: 182382 - DNA, 80 bp, synthetic construct
  source 1..80: mol_type = other DNA
aattttaataacggaggcaaggccaaagctttacatgaaaaaataaccccatatcttccaaattataacactacaccaac

SEQ ID NO: 182383 - DNA, 80 bp, synthetic construct
  source 1..80: mol_type = other DNA
gaacattgcagacatggccacaggtatcaccaatactattgatgactcagtcaataccctaagtgaaagcttttctaaaa

SEQ ID NO: 182384 - DNA, 80 bp, synthetic construct
  source 1..80: mol_type = other DNA
agtcagtgagaattataaagatgcaaatggtagaattcagttagattgtgcactcaaaccatgtaatgataatattaaga

SEQ ID NO: 182385 - DNA, 80 bp, synthetic construct
  source 1..80: mol_type = other DNA
cctggaccccggcctcagcaaccctgctgctcccctcctgccaccccagcctccccccctccccgtccgccttcgctcct

SEQ ID NO: 182386 - DNA, 80 bp, synthetic construct
  source 1..80: mol_type = other DNA
tgcgacctgcgaactccacagaagaaaccacatcttgatatgagccgctggaccgagtctgtacactatgggacgggccg

SEQ ID NO: 182387 - DNA, 80 bp, synthetic construct
  source 1..80: mol_type = other DNA
gagcccatgaaacatcgctgaacgcatctgggagttccgtcatacattacaccaacataaacttttacaaagatgccgca

SEQ ID NO: 182388 - DNA, 80 bp, synthetic construct
  source 1..80: mol_type = other DNA
actcaagtcaaattcaatggttcctctttaaacagggtttcaaggtatgtcacaataagcaatgataggttagaattcat

SEQ ID NO: 182389 - DNA, 80 bp, synthetic construct
  source 1..80: mol_type = other DNA
ttcttccatattcctaccttcaacttcgctggcttaattttgctggcagcttagatagtatagggaacacagtgctttgg

SEQ ID NO: 182390 - DNA, 80 bp, synthetic construct
  source 1..80: mol_type = other DNA
taggaaacagcatcatccaggtcgtctagagtctgattctcacaggcgcctctggggccaaaagccaaggtttaacagac

SEQ ID NO: 182391 - DNA, 80 bp, synthetic construct
  source 1..80: mol_type = other DNA
gacaaagttgagaacataggggcttatgggattcccgtgagtgcaagtaatagcacacacacgactgcaatcttcacatt

SEQ ID NO: 182392 - DNA, 80 bp, synthetic construct
  source 1..80: mol_type = other DNA
acttctcaggaaacacaggctatgaatatgtatcaacaattagacagttttactggacacaactaacatcctggacacaa

SEQ ID NO: 182393 - DNA, 80 bp, synthetic construct
  source 1..80: mol_type = other DNA
ctcaaatcacgattggacattacaaatgtgggacctagtgacatgtttgtgcacacaaaggaggcaatttacaagtgtgc

SEQ ID NO: 182394 - DNA, 80 bp, synthetic construct
  source 1..80: mol_type = other DNA
caaagacggtgtgtcgcgccagaccggagacgccgtcgcgcagtcgtaaatcaaagtcggccacaaaattgaagacgggc

SEQ ID NO: 182395 - DNA, 80 bp, synthetic construct
  source 1..80: mol_type = other DNA
cagcactgttttcaaaatataagggtaatgtgaaatgtgacctgaatgaccacatgcaagttgctgtagcccattattca

SEQ ID NO: 182396 - DNA, 80 bp, synthetic construct
  source 1..80: mol_type = other DNA
tgaaccttactaaaggggaaacggcgcacaaatttgagccaaccaagaccacaggagagcacacggtacaatcaatagtt

SEQ ID NO: 182397 - DNA, 80 bp, synthetic construct
  source 1..80: mol_type = other DNA
atgagctgggattaacatcagctcaggacgatgggcctttgggtgacaacaagccaaattatttcctaaacttcaagtct

SEQ ID NO: 182398 - DNA, 80 bp, synthetic construct
  source 1..80: mol_type = other DNA
cccttttatctatccaagcatagaaaaggcctatctgtttccagagagaatgccaaaacctgctccttctagaggagact

SEQ ID NO: 182399 - DNA, 80 bp, synthetic construct
  source 1..80: mol_type = other DNA
caagtcgttccgagtgacaccatacaaacccgatgtgtgaaaaacttccactcacggtcggagtcgtccatagaaaattt

SEQ ID NO: 182400 - DNA, 80 bp, synthetic construct
  source 1..80: mol_type = other DNA
gagcaaacattggaaactgtatggaggcgctcttccaaggacctatacagtataaagatttgaaaatagacatcaagacc

SEQ ID NO: 182401 - DNA, 80 bp, synthetic construct
  source 1..80: mol_type = other DNA
tgcaagacaagttccacaatctcctcaagggcaaccaaatcaccacgattttcaatacttgtctaaaagatgaacttaga

SEQ ID NO: 182402 - DNA, 80 bp, synthetic construct
  source 1..80: mol_type = other DNA
atgccacaagttgcaaatacacccgcatccggtcccgtgaactctaaagaagtccccgcattgactgcagttgagacggg

SEQ ID NO: 182403 - DNA, 80 bp, synthetic construct
  source 1..80: mol_type = other DNA
tacaatcttctaattggagagggacaatcagccccgggtgattgtggaggcaagttactatgcaagcatggtgtgattgg

SEQ ID NO: 182404 - DNA, 80 bp, synthetic construct
  source 1..80: mol_type = other DNA
atgctgcctatatacatatttagtatccaagactcttaccacgtagacgaaaagaagtgatacaatgatcttgacgtgta

SEQ ID NO: 182405 - DNA, 80 bp, synthetic construct
  source 1..80: mol_type = other DNA
gtatcagggaaacacacacatgctagactactacctgggcttttacagccccattttcctctcagatggcagatctaata

SEQ ID NO: 182406 - DNA, 80 bp, synthetic construct
  source 1..80: mol_type = other DNA
cgagtccttctttggtagatcagcctgtgtggcaatcttgtccgtcaccaacaaacaacccacagcaactaatggtaatg

SEQ ID NO: 182407 - DNA, 80 bp, synthetic construct
  source 1..80: mol_type = other DNA
ttaaacaaaagaaaagatgtgaacctgttgctgttgtaatacatggtgaaccaggtacaggaaaatctatgaccacaaac

SEQ ID NO: 182408 - DNA, 80 bp, synthetic construct
  source 1..80: mol_type = other DNA
cggttaccagcactataagggtctacttcaagccgaagcacattagagcatgggtccccaggcccccacgattgtgccct

SEQ ID NO: 182409 - DNA, 80 bp, synthetic construct
  source 1..80: mol_type = other DNA
cctccaggccggcctccggcgccaggatcccgtacacgtagttcattttgcacaggaagcgctcgatgtcgttgagtgtg

SEQ ID NO: 182410 - DNA, 80 bp, synthetic construct
  source 1..80: mol_type = other DNA
gatgcggaagactgctggacaccccattgggttacttcaaattgaagtattgaatagattgacatataatagttccagtc

SEQ ID NO: 182411 - DNA, 80 bp, synthetic construct
  source 1..80: mol_type = other DNA
gcaaaaaaagaattaaattcagaatagggccccccactctctttactgacaagtggtactttcaaaaggatattgcagac

SEQ ID NO: 182412 - DNA, 80 bp, synthetic construct
  source 1..80: mol_type = other DNA
acccacccaggagaacagggccgtgtgataggcacacgtgagaatagaaacacaaatcaacccactgatgagagttggct

SEQ ID NO: 182413 - DNA, 80 bp, synthetic construct
  source 1..80: mol_type = other DNA
tgatactttttgcgggtgcactgacattgctgggcatattgctggcctcctggcttgcatacaaccagctccacctcgag

SEQ ID NO: 182414 - DNA, 80 bp, synthetic construct
  source 1..80: mol_type = other DNA
ctattatgattagaaatagtgcagatacacccactgttcttgcaaccctcgctctcctgggatgccagagttcaccttgg

SEQ ID NO: 182415 - DNA, 80 bp, synthetic construct
  source 1..80: mol_type = other DNA
agaggaaaatttcaccatgctggtcatctggataattgtgcagattgcacaaccctctgtcacccaagtgacgcttggtg

SEQ ID NO: 182416 - DNA, 80 bp, synthetic construct
  source 1..80: mol_type = other DNA
acaataccgtgactttgcaaacaactatatcaaccaacactactatcataataaatacaactgaaaacagtacgccgttc

SEQ ID NO: 182417 - DNA, 80 bp, synthetic construct
  source 1..80: mol_type = other DNA
ccatcaccatttctattagtccaatgtgtgctgagttctcaggggccagagcgagaaatcagggcttaccagttatgtta

SEQ ID NO: 182418 - DNA, 80 bp, synthetic construct
  source 1..80: mol_type = other DNA
actatacaaacatcaattactataaagactccgcctccaattcattgaaccggcaagatttcacccaagatcccagtaaa

SEQ ID NO: 182419 - DNA, 80 bp, synthetic construct
  source 1..80: mol_type = other DNA
ggaagaagaaacgcagacccaggatgcacccaagctcctgccacagtctgagctggccccacaggtacccaagagtgtcc

SEQ ID NO: 182420 - DNA, 80 bp, synthetic construct
  source 1..80: mol_type = other DNA
ctgggctagagtaattattaagtgtccctacacctttccaaaactaataaacagcgcagacgagacagagggctttgtgc

SEQ ID NO: 182421 - DNA, 80 bp, synthetic construct
  source 1..80: mol_type = other DNA
acttagcttcatctgtgtgtgcgatagctttagtacaggcaagttcctcatagcgtacaccccacctgggggtgcactcc

SEQ ID NO: 182422 - DNA, 80 bp, synthetic construct
  source 1..80: mol_type = other DNA
agttcctcgccagccaagtcctcaaagtccaagcagggcaacacatacaccccctttatcttcccaagcacaaacaaggt

SEQ ID NO: 182423 - DNA, 80 bp, synthetic construct
  source 1..80: mol_type = other DNA
tgttggactgtggtgttccggtgagtcaacttctaatctgcccgcatcagtggatcaacctgaggactaacaactgtgcc

SEQ ID NO: 182424 - DNA, 80 bp, synthetic construct
  source 1..80: mol_type = other DNA
actcaatggcaacccgcctttataagacgctgctatatagtgggcttcctgccccttttaatatgcggggagaatacctc

SEQ ID NO: 182425 - DNA, 80 bp, synthetic construct
  source 1..80: mol_type = other DNA
aggaggtgatggagatgagggtgaggaagggcaggagtgatgtaacttgttaggagacgccctcaatcgtattaaaagcc

SEQ ID NO: 182426 - DNA, 80 bp, synthetic construct
  source 1..80: mol_type = other DNA
ccttgaacaatatgggcaagctgtatgcgcgacatgtgaacaaagacacaccgtaccaaatgtccagcacaattcgagtg

SEQ ID NO: 182427 - DNA, 80 bp, synthetic construct
  source 1..80: mol_type = other DNA
atttgtacggtggccaatctcatacagacaagtagctcagctccgcagaaaaatggagatgttcacatacctgcggtatg

SEQ ID NO: 182428 - DNA, 80 bp, synthetic construct
  source 1..80: mol_type = other DNA
atgtgctcccgacccacggtctgcgtgtctcttttttatgtccatgtctccaagtctggtgcgggtggcggcgtggtcaa

SEQ ID NO: 182429 - DNA, 80 bp, synthetic construct
  source 1..80: mol_type = other DNA
aaacatcacctaaagattgtgagccgcatttaccacaaagctaaacacataaaagcatggtgcccacgtccaccacgagc

SEQ ID NO: 182430 - DNA, 80 bp, synthetic construct
  source 1..80: mol_type = other DNA
tggtagtatacaccccatttggtttgaagcccttaaacgagtattgatggacttgtcttttgatcccatgttaatagata

SEQ ID NO: 182431 - DNA, 80 bp, synthetic construct
  source 1..80: mol_type = other DNA
acaagactcattgaagctgctagtttaaatgatacagttcactacaggatggtgtttggtaagttattttccacatttca

SEQ ID NO: 182432 - DNA, 80 bp, synthetic construct
  source 1..80: mol_type = other DNA
caattaaccctgtaaatagcatcagcaagaaagtgattaaatggttactgaggattgtctctgctatggtaataataatc

SEQ ID NO: 182433 - DNA, 80 bp, synthetic construct
  source 1..80: mol_type = other DNA
tcaaacaaaagaaaagaagtgaacctgttgcagtaatgatacatggttcacctgggactggcaagtctattacaacaagt

SEQ ID NO: 182434 - DNA, 80 bp, synthetic construct
  source 1..80: mol_type = other DNA
cagaaccagcaggaggtgattcagaggtaaaatttatgtggactaactgcagaggagaattcctctactgtaagatgaca

SEQ ID NO: 182435 - DNA, 80 bp, synthetic construct
  source 1..80: mol_type = other DNA
acccagaaggcggcccgcgtggacaaagtaccggagacgccgctggagacgatttcgaccccgcagacctagaagatcta

SEQ ID NO: 182436 - DNA, 80 bp, synthetic construct
  source 1..80: mol_type = other DNA
gtccatacaatcaacaaccacagagccaatccttgatttcatcatatctagataggggtttttacaagcattatggcatc

SEQ ID NO: 182437 - DNA, 80 bp, synthetic construct
  source 1..80: mol_type = other DNA
agaccaaaaagagacacggacccgtacgactcgcagcaagaagaaagctcactttcaagacacctccagctccagccgtg

SEQ ID NO: 182438 - DNA, 80 bp, synthetic construct
  source 1..80: mol_type = other DNA
ttggagagggcccctgtgaaccaggtgactgtggtggaaaactactttgtaaacatggtgttattggattattaactgct

SEQ ID NO: 182439 - DNA, 80 bp, synthetic construct
  source 1..80: mol_type = other DNA
taggccttacaataaacaagtcaacatttatgataatgggcctacaaagacaattagtaaaaagaaaatcttaacaatga

SEQ ID NO: 182440 - DNA, 80 bp, synthetic construct
  source 1..80: mol_type = other DNA
cagaccaatcaatgcaccctcttactcatcaaagcaccccaaatgatccagatagtccagaaccacggtccccgactgta

SEQ ID NO: 182441 - DNA, 80 bp, synthetic construct
  source 1..80: mol_type = other DNA
aacaacagcaaagatgttatgttttgtttctgggtgtaaagatttctgtttacgaatggctagggatacagacttacaca

SEQ ID NO: 182442 - DNA, 80 bp, synthetic construct
  source 1..80: mol_type = other DNA
tttccctttatttttattgtgtgtctcttatggttacaatttaattgtaatcatgggtgcacaagtgagtaagcaaaata

SEQ ID NO: 182443 - DNA, 80 bp, synthetic construct
  source 1..80: mol_type = other DNA
aagaggacaagctgacacagcagggactttccagtatgggctgtaacaggggaggtactatgggatggactggttgggaa

SEQ ID NO: 182444 - DNA, 80 bp, synthetic construct
  source 1..80: mol_type = other DNA
cctggggttcacagatggatttgacagacccattggaaattgaagactgtactgaagattgtaaacaatccatatcacca

SEQ ID NO: 182445 - DNA, 80 bp, synthetic construct
  source 1..80: mol_type = other DNA
gaagccagagctcaggagggcagttgctcaaggtccagatcacgagtttggcgtggctctcttgaagaggaactgccaca

SEQ ID NO: 182446 - DNA, 80 bp, synthetic construct
  source 1..80: mol_type = other DNA
gcagttccttttgactctgctataaatcacaacaactgtgggctagtggtggtacctgtagcgcctcttaaatacagtgc

SEQ ID NO: 182447 - DNA, 80 bp, synthetic construct
  source 1..80: mol_type = other DNA
agaagctgcccgccggcgggcggctgccggtctaccgactgggcgacgaagtgccgcgccgcctggagtcgcggttcggc

SEQ ID NO: 182448 - DNA, 80 bp, synthetic construct
  source 1..80: mol_type = other DNA
gccgtggttcctctccgcggcaggggatccgaacgtcccgagggcgggtgccggaggtgagtttacacaccggagtcaag

SEQ ID NO: 182449 - DNA, 80 bp, synthetic construct
  source 1..80: mol_type = other DNA
ttgtcaactagaggtttcaggaagtgtctcaaacacagtaccaataactatttcaattagccccatgtttgcggaatttt

SEQ ID NO: 182450 - DNA, 80 bp, synthetic construct
  source 1..80: mol_type = other DNA
acccttgcgtcaacttccaggtgctaggttccgcttacaaacggcaccttagtattctctccacaaacgactctaaaaat

SEQ ID NO: 182451 - DNA, 80 bp, synthetic construct
  source 1..80: mol_type = other DNA
aatcttaacacaacaaaatggtggcgcaggtgtcaacacaaaaaaccggggcccacgagactagtttgaatgctagtggg

SEQ ID NO: 182452 - DNA, 80 bp, synthetic construct
  source 1..80: mol_type = other DNA
tgagcatggatctgctgtcggttgcaatcctgatgtggactggactcgcttcttctgggacttcgcatcgtacgaagaag

SEQ ID NO: 182453 - DNA, 80 bp, synthetic construct
  source 1..80: mol_type = other DNA
cagagttaattcagcagatatgtaccacccaccatatcttcagagatcagatttatgtagtggaaggtggtatgccctct

SEQ ID NO: 182454 - DNA, 80 bp, synthetic construct
  source 1..80: mol_type = other DNA
taaacacatgtgcccaatgccaacagaaaggagaggccatacatgggcaagtaaatgcagaaataggcgtttggcaaatg

SEQ ID NO: 182455 - DNA, 80 bp, synthetic construct
  source 1..80: mol_type = other DNA
ttcagattccagaggcacttaacaggagattctccttagatatggatattaaaataatgccagggtataccactactgga

SEQ ID NO: 182456 - DNA, 80 bp, synthetic construct
  source 1..80: mol_type = other DNA
acacctcaaatgatagacaccaacgaccctctaagaggcttcatagtatacagcttcaactttggaaaaggcaaaatgcc

SEQ ID NO: 182457 - DNA, 80 bp, synthetic construct
  source 1..80: mol_type = other DNA
cttagacaacctggagagttgcctgctattggtcttatatttaaaactgggtgtgggttgtccccactcacaccacccaa

SEQ ID NO: 182458 - DNA, 80 bp, synthetic construct
  source 1..80: mol_type = other DNA
aaatatacccacccaggtgagacgggaataaacctgagcgacgcagtcgcgacagggggtgcatcacatgatccagtgta

SEQ ID NO: 182459 - DNA, 80 bp, synthetic construct
  source 1..80: mol_type = other DNA
actctagtaagtttcatcagggattgttaattgttgctgccatacctgaacaccaattagcatcagcagtttcaggaaat

SEQ ID NO: 182460 - DNA, 80 bp, synthetic construct
  source 1..80: mol_type = other DNA
aaactaagatcccagagcgaagagtagttgctcagggtccagaagaagaatttggaagatctttgattaaacataattca

SEQ ID NO: 182461 - DNA, 80 bp, synthetic construct
  source 1..80: mol_type = other DNA
gcccgcgccgccgcctggtggtccaggcccgcggccgctactaccagtgaggccccggcacccggccggagacggtgagc

SEQ ID NO: 182462 - DNA, 80 bp, synthetic construct
  source 1..80: mol_type = other DNA
ccgagaccaacagcagctccgacagcacctgcagtccctcgcctcacaagtcctcaaaatcagggcgggatacgccatac

SEQ ID NO: 182463 - DNA, 80 bp, synthetic construct
  source 1..80: mol_type = other DNA
aattacaaagacaatcaagggaaattggatgtgtctagatcttttaaaccatgtgatgtggacgcaaaaataggtaatgc

SEQ ID NO: 182464 - DNA, 80 bp, synthetic construct
  source 1..80: mol_type = other DNA
tttcaacactatcattaacaatataataattagaactctagtactagatacttataagtttataaacctggataagctta

SEQ ID NO: 182465 - DNA, 80 bp, synthetic construct
  source 1..80: mol_type = other DNA
tttgtagcactagtagtttgtggacacactcgcgcatcacacaactatgccatacacagcgaagactacatacctcaact

SEQ ID NO: 182466 - DNA, 80 bp, synthetic construct
  source 1..80: mol_type = other DNA
ggaactggagacacggtagccggacacgtccccaaacccgcgagggtactggggcagacggacggacttgctatttgaca

SEQ ID NO: 182467 - DNA, 80 bp, synthetic construct
  source 1..80: mol_type = other DNA
agtggagggtggcatgccatctggtatctgtggtactagcatttttaacacaatgattaacaacattataatcagagtct

SEQ ID NO: 182468 - DNA, 80 bp, synthetic construct
  source 1..80: mol_type = other DNA
ccctctgagagtaaattgtttagcaagtactcagaagaactagaaaaaatattatattcaacgggctcctactggaactc

SEQ ID NO: 182469 - DNA, 80 bp, synthetic construct
  source 1..80: mol_type = other DNA
cccaggtatcaagacagaatgttggcacacactcaactcaaaatgtggtttctagtggttctagtttaaactatttcaac

SEQ ID NO: 182470 - DNA, 80 bp, synthetic construct
  source 1..80: mol_type = other DNA
aatcatagtctattaacaccccccaccatcacatcattacctgctatgaataggagatttttcatggatttggatattgt

SEQ ID NO: 182471 - DNA, 80 bp, synthetic construct
  source 1..80: mol_type = other DNA
ttagaattaagccccctcctctctttgaggacaagtggtacactcaacaagacttgtgtccagtaaacctgttgtcactt

SEQ ID NO: 182472 - DNA, 80 bp, synthetic construct
  source 1..80: mol_type = other DNA
gagtagcaccccaaccaacagaatgattcgttatgaatatgcaacaaaaacaggtcagtgtggaggggtattgtgtgcca

SEQ ID NO: 182473 - DNA, 80 bp, synthetic construct
  source 1..80: mol_type = other DNA
cttgtgggtagagtgatagtgttaggcagatcacactgggaaagtcctcaatcaccacccaagatgcggccaatgctgtt

SEQ ID NO: 182474 - DNA, 80 bp, synthetic construct
  source 1..80: mol_type = other DNA
ctaaaaagcctaggctgatacagggtagagaggccttagaggatgagtactgcacagcagcagcctggaacaggccagtg

SEQ ID NO: 182475 - DNA, 80 bp, synthetic construct
  source 1..80: mol_type = other DNA
acgcggtgggtcggtttctcttacgccggcgtcactcagccaccacacccgtagccgacattcccagaatcggtgaatgc

SEQ ID NO: 182476 - DNA, 80 bp, synthetic construct
  source 1..80: mol_type = other DNA
cccgtaggcagtatgggtgtagtactcttgtattctggtacatttgtacgccagtttttcttcccacccccaagtaacct

SEQ ID NO: 182477 - DNA, 80 bp, synthetic construct
  source 1..80: mol_type = other DNA
gaactgggttcacagaacacatcagtgaaaaagtcacagaattacaaaatatatcaatgggttatttgaataccaaagta

SEQ ID NO: 182478 - DNA, 80 bp, synthetic construct
  source 1..80: mol_type = other DNA
gaataatatcagcaatggtcataataattaggaattcttctgacccgcaaactatattagcaacacttacattgattggg

SEQ ID NO: 182479 - DNA, 80 bp, synthetic construct
  source 1..80: mol_type = other DNA
ataatccaagagcctactttttcacctctgaaatgttaaccgaacattggacatttaaactgaacttatcaaatatggac

SEQ ID NO: 182480 - DNA, 80 bp, synthetic construct
  source 1..80: mol_type = other DNA
tgctttctatcaaacagctatagttgttccccctcagactccgacagatatgtcaattttggctttcatcagtgcatgta

SEQ ID NO: 182481 - DNA, 80 bp, synthetic construct
  source 1..80: mol_type = other DNA
tacttacctgagattcgacatggaagtaaccattgtcacaaacaaccatggtttaatgcaaacaatgtatgttccgccag

SEQ ID NO: 182482 - DNA, 80 bp, synthetic construct
  source 1..80: mol_type = other DNA
agatttctctcaagatccaagcaaattcactgacccagttaaagatgtcttagaaaaggggatcccaacactacaatcac

SEQ ID NO: 182483 - DNA, 80 bp, synthetic construct
  source 1..80: mol_type = other DNA
agaagagtttggtagtaagtcaggactgccagagaaagaggttaagagaaggctagccgcaagaggccttttgaacatgg

SEQ ID NO: 182484 - DNA, 80 bp, synthetic construct
  source 1..80: mol_type = other DNA
ttgcacggggcaaatctccattgaaatagagtgggaagctgaagaatacgaaacaaagaactggagaccagagctcagaa

SEQ ID NO: 182485 - DNA, 80 bp, synthetic construct
  source 1..80: mol_type = other DNA
ggcagcaaatggaggttctatagacacaaagatgtggactttatagtgacttacgagacctcagccccctttacagactc

SEQ ID NO: 182486 - DNA, 80 bp, synthetic construct
  source 1..80: mol_type = other DNA
gtagaaattttcatcttcgtgatgtcctgtgaagtaattttctttaaaacaacgtctgctgtacctgccggaattggtga

SEQ ID NO: 182487 - DNA, 80 bp, synthetic construct
  source 1..80: mol_type = other DNA
gttcgagggtgtgaaggaaccagctgtcttacactcaaaggataagagattaaaggtagattttgaagaggctatcttct

SEQ ID NO: 182488 - DNA, 80 bp, synthetic construct
  source 1..80: mol_type = other DNA
gagaatttaagaatgaagctccttatgatggtcaattagagcatatcatctcacaaatggcatacattactggttcaacc

SEQ ID NO: 182489 - DNA, 80 bp, synthetic construct
  source 1..80: mol_type = other DNA
tcaagccgccgcagcttcccagagcccgcccaaagacatggtagatctgaatcggcggatttttgtggctgcgctcaata

SEQ ID NO: 182490 - DNA, 80 bp, synthetic construct
  source 1..80: mol_type = other DNA
ctcgacttatttaactctttagtcgagatatatggacacagatagttatatgataaccaactacagaagacaaacgctat

SEQ ID NO: 182491 - DNA, 80 bp, synthetic construct
  source 1..80: mol_type = other DNA
tattggtcacgccaggttcgagccaatatctcacctcagatgatttccagtcaccgtgtgcgctgccaaatttcgacgtc

SEQ ID NO: 182492 - DNA, 80 bp, synthetic construct
  source 1..80: mol_type = other DNA
ctcggactttgactacctggtgcacgtcaccaggacccctcctttcaaggaggacctcctcaccatcgtcagccaccagc

SEQ ID NO: 182493 - DNA, 80 bp, synthetic construct
  source 1..80: mol_type = other DNA
gaacatatatctattggcatgctaagtctaataggactatcattagcttaaacaaatattataatctcactctgcattgt

SEQ ID NO: 182494 - DNA, 80 bp, synthetic construct
  source 1..80: mol_type = other DNA
tgaattagaaaaggttaggttacggcccggcggaaagaaaagatacatgctaaaacatatagtatgggcagtgaatgaat

SEQ ID NO: 182495 - DNA, 80 bp, synthetic construct
  source 1..80: mol_type = other DNA
cccatgacccagatccctcaggggttgacaccaacagcgcccccagcagacccagcagtggatctgctgaagaactacat

SEQ ID NO: 182496 - DNA, 80 bp, synthetic construct
  source 1..80: mol_type = other DNA
ctcacccaacatttctactaccaaacaaacacagggttaaaatccccagctttaaatccaagccttttgggagaaaaaaa

SEQ ID NO: 182497 - DNA, 80 bp, synthetic construct
  source 1..80: mol_type = other DNA
atatgtgaggcacgtgagcgggagtagcccacaccccatcactagcactattagggtgtatttcaagccaaagcacacca

SEQ ID NO: 182498 - DNA, 80 bp, synthetic construct
  source 1..80: mol_type = other DNA
aatttctctacatggaaaattacactcaaagaaatggctcaaattagaagaaagtgtgaacttttcacatacttaagatt

SEQ ID NO: 182499 - DNA, 80 bp, synthetic construct
  source 1..80: mol_type = other DNA
gggcattgtcattctgccactggcacccttggcctttgctgcaacatcatcaccacaggtgcctattacagtgaccattg

SEQ ID NO: 182500 - DNA, 80 bp, synthetic construct
  source 1..80: mol_type = other DNA
acaaaaataaccttagtattagttccacatatgacgactctaacaaaagccactatgacaacaatttatttaacaaaact

SEQ ID NO: 182501 - DNA, 80 bp, synthetic construct
  source 1..80: mol_type = other DNA
tcctgggagacaaaaccaaagggcagaaaatataaaaaagttaaaatacaccccccaaaaatgtttgaagacaagtggta

SEQ ID NO: 182502 - DNA, 80 bp, synthetic construct
  source 1..80: mol_type = other DNA
agctttgaaatcacaattccttattcattctccacttggatgaggaaaacaaatgaccacccaattggtttattccaaat

SEQ ID NO: 182503 - DNA, 80 bp, synthetic construct
  source 1..80: mol_type = other DNA
caagaatcggtcagctcaggggacgaaatcctttggcagctataccgacccctagaggcatgcactaacaaatgttattg

SEQ ID NO: 182504 - DNA, 80 bp, synthetic construct
  source 1..80: mol_type = other DNA
cccagcattaatgtctccctcaattgaggcttgtggattttccgataggctcaagcaaatcactattggaaactccacta

SEQ ID NO: 182505 - DNA, 80 bp, synthetic construct
  source 1..80: mol_type = other DNA
tgctcggaactcatatcatctgggacataggtttgcaatctagttgtgtgctatgcatcccatggattagccaaacgcat

SEQ ID NO: 182506 - DNA, 80 bp, synthetic construct
  source 1..80: mol_type = other DNA
aaaacgcaagcaggtctccacctaaacccccaattatttcaaaagctgtaaacaaggtttacatgtttgagccccccagg

SEQ ID NO: 182507 - DNA, 80 bp, synthetic construct
  source 1..80: mol_type = other DNA
ccaatacaatcagaggaagcggctttgtgaaccaaaatgtcagcgtccactacaactactgccagtataatcctaaccat

SEQ ID NO: 182508 - DNA, 80 bp, synthetic construct
  source 1..80: mol_type = other DNA
ttcactgttcctctttgatggcacctcataccaacctacccctgaattggctgaagaagttgctaaggtcgaggacaact

SEQ ID NO: 182509 - DNA, 80 bp, synthetic construct
  source 1..80: mol_type = other DNA
agttgtgataccagagcaccagctagcatcacatgaaggtggcaatgtgtcggttaaatataaactcacacacccgggtg

SEQ ID NO: 182510 - DNA, 80 bp, synthetic construct
  source 1..80: mol_type = other DNA
gatggcgccgacgaccgtggggcagacgccgacggtggaggagactacgcgcccgaagacctagacgccctgttcgccgc

SEQ ID NO: 182511 - DNA, 80 bp, synthetic construct
  source 1..80: mol_type = other DNA
tggagccactgtgttagctttacttctcatctaaccaattaatcaaaaacaatacgaggataaaacaacaacactacaat

SEQ ID NO: 182512 - DNA, 80 bp, synthetic construct
  source 1..80: mol_type = other DNA
aaattcaaggccgtgggagtttcacttgtcggtgtctaccccccctccacccgaaacgcttgcgcgtttcggaccttcgg

SEQ ID NO: 182513 - DNA, 80 bp, synthetic construct
  source 1..80: mol_type = other DNA
ggagatcttcccctaatgcaataaaaacttaaaacactgaggttactttcccgtcattctttcgggggaacgaggtgagg

SEQ ID NO: 182514 - DNA, 80 bp, synthetic construct
  source 1..80: mol_type = other DNA
caacaccagtgactagtacaataagggtttattttaagccaaaacacattagagcctgggttcctcgcccaccaagactg

SEQ ID NO: 182515 - DNA, 80 bp, synthetic construct
  source 1..80: mol_type = other DNA
agtgtacaacagaaagagccccctgggaggaaacatatacacagcaccgtcactacatccaggcaacgccatgctggcaa

SEQ ID NO: 182516 - DNA, 80 bp, synthetic construct
  source 1..80: mol_type = other DNA
cccaaccacaaggaaagatgccatgcttggaacccatttaatatgggacatcggccttcaatccagtgcaacactggtgg

SEQ ID NO: 182517 - DNA, 80 bp, synthetic construct
  source 1..80: mol_type = other DNA
caaacgaacaaccccaactgtaccttccaggtactgcgcaagaattaccacaaagtcataggcacttcctcaaaaaactc

SEQ ID NO: 182518 - DNA, 80 bp, synthetic construct
  source 1..80: mol_type = other DNA
ggacaacttcttcggagtcgcgcgctacgccttcggctgcgcgcgacacctcagaccccccctccacccgaaacgcttgc

SEQ ID NO: 182519 - DNA, 80 bp, synthetic construct
  source 1..80: mol_type = other DNA
aaaagagagacttaattaacaacacaacaaaagatttaagtaaattaaaggctgcaatggataaatatggagttgatcta

SEQ ID NO: 182520 - DNA, 80 bp, synthetic construct
  source 1..80: mol_type = other DNA
ggcgtggtcgaggcggcccggctggtgccggacaggcgacccggcgcgctaccgctcacggggaccgaaggcggtcgacc

SEQ ID NO: 182521 - DNA, 80 bp, synthetic construct
  source 1..80: mol_type = other DNA
ggcaaacctgacaaataaggccccccaggaaagaccccggggggcatcggggtgtcgggcccgcgcattcctggaaaaag

SEQ ID NO: 182522 - DNA, 80 bp, synthetic construct
  source 1..80: mol_type = other DNA
gttggtgtaaggcggagccgccgtggatgcatcagacgacggtggtcccgatcctttgcgaccagaattataaacacttt

SEQ ID NO: 182523 - DNA, 80 bp, synthetic construct
  source 1..80: mol_type = other DNA
ccagatagcaccactagcactcgcaacaatagctcctcaggccagcacatgcgcacgtggtacatgagagattcatgtga

SEQ ID NO: 182524 - DNA, 80 bp, synthetic construct
  source 1..80: mol_type = other DNA
ctttggtaggtctgcgtgtgtgaccattttatcgctcaccaattcgtcaggaagtggtgacgagaaaaagcactacacta

SEQ ID NO: 182525 - DNA, 80 bp, synthetic construct
  source 1..80: mol_type = other DNA
gagtatataagcagaggcggtgacgaatggtagagtttttcctggcccgtccgcggcgagagcgcgagcggagcgagcga

SEQ ID NO: 182526 - DNA, 80 bp, synthetic construct
  source 1..80: mol_type = other DNA
aggataaaaacccacaaagagaaccgtgggaacagtgggtagtggacgtcctggaggaaataaaacaagaagccttaaag

SEQ ID NO: 182527 - DNA, 80 bp, synthetic construct
  source 1..80: mol_type = other DNA
agagttaatagcttttgactattcaaattttgatgcaagcttatctccagtgtggtttaattgtttagaaattgtgttgg

SEQ ID NO: 182528 - DNA, 80 bp, synthetic construct
  source 1..80: mol_type = other DNA
gttgccgaacacaaatgcatctctgtgcttacctaatgacacttggaaaatgcttacggcgagaacaagacatacaaata

SEQ ID NO: 182529 - DNA, 80 bp, synthetic construct
  source 1..80: mol_type = other DNA
ctgcggacgggcgtggaaaactcagccattcggaaataaaacaaatgagagacaataacttcagtctagagactggcaaa

SEQ ID NO: 182530 - DNA, 80 bp, synthetic construct
  source 1..80: mol_type = other DNA
ttactgtgtttacctactcattacatccactcaaccataatgggagctcaagtgtctactcagaaatctgggtcacacga

SEQ ID NO: 182531 - DNA, 80 bp, synthetic construct
  source 1..80: mol_type = other DNA
gtatctaactgaaaacattgtggagtttcgctcagcagaaccccactgtagatcggggtaatggggctacacaaccccca

SEQ ID NO: 182532 - DNA, 80 bp, synthetic construct
  source 1..80: mol_type = other DNA
ttttatacacgattacttcacaggacatcatgaagatgaaaatttttacttattcattaaacctagagctgaatataact

SEQ ID NO: 182533 - DNA, 80 bp, synthetic construct
  source 1..80: mol_type = other DNA
ttacttggagagattgcaagttactacacccactggactggcagtctacggtttagttttatgttctgtggaactgcaaa

SEQ ID NO: 182534 - DNA, 80 bp, synthetic construct
  source 1..80: mol_type = other DNA
agcgtggaaaatttcctggcgcgatcggcgtgtgtgttttatacaacgtacacaaacagtaaaaacgccgcaaaagagaa

SEQ ID NO: 182535 - DNA, 80 bp, synthetic construct
  source 1..80: mol_type = other DNA
cagtcaggcatgccagaagaagaatggaaggcaagactgaaagcaagagggataccatttagttaaaaacaggaacagct

SEQ ID NO: 182536 - DNA, 80 bp, synthetic construct
  source 1..80: mol_type = other DNA
aagagattgggaaacactgaagttaaaagaattagttgataaaattacaattgattataatgagagggtaaagaattata

SEQ ID NO: 182537 - DNA, 80 bp, synthetic construct
  source 1..80: mol_type = other DNA
cgtatgcaccagaggcctccacaatgattccgatcacaattacaatagcaccaatgttcacagagttcaacgggttgcgc

SEQ ID NO: 182538 - DNA, 80 bp, synthetic construct
  source 1..80: mol_type = other DNA
ccaattacgggtctgggatcaggctttttagagctctgataaccattccagagatctacagcacctttaactaaaggcat

SEQ ID NO: 182539 - DNA, 80 bp, synthetic construct
  source 1..80: mol_type = other DNA
acgtaggcactagcctcttcatgtgaggtaagagatcgctaaaaatgggatcagggtatgtaaaccgagttttgcggtgg

SEQ ID NO: 182540 - DNA, 80 bp, synthetic construct
  source 1..80: mol_type = other DNA
aaattatacaagtagacaccttaatcccaatgaataatgtgcactccagtgataaagttgacagttatcttataccattg

SEQ ID NO: 182541 - DNA, 80 bp, synthetic construct
  source 1..80: mol_type = other DNA
cgccgcatgtgtgagatgttcacatatatgcggtacgatgtagaggtcacttttgtgatcactagttatcaagagcaaag

SEQ ID NO: 182542 - DNA, 80 bp, synthetic construct
  source 1..80: mol_type = other DNA
cactccacaaggagaaacagacgatgtggtagacagcggagtgggacgatcaggaggggcaggaggtgagagcggaggag

SEQ ID NO: 182543 - DNA, 80 bp, synthetic construct
  source 1..80: mol_type = other DNA
cggccagtgagcgcgcgtaatacgactcactatagggcgaattggagctccaccgcggtggcggccgctctagaactagt

SEQ ID NO: 182544 - DNA, 80 bp, synthetic construct
  source 1..80: mol_type = other DNA
tctaagcaaaatactggatctcatgagagtgtaattaatgccaacaacgggggtgtaattaagtacttcaacatcaatta

SEQ ID NO: 182545 - DNA, 80 bp, synthetic construct
  source 1..80: mol_type = other DNA
cgacccgatgaatactggatctcccaccacagtctttggtccaacaccgagagggcacaagagattctaagtctccctgg

SEQ ID NO: 182546 - DNA, 80 bp, synthetic construct
  source 1..80: mol_type = other DNA
tgcattgtaactacagaaaatggcaaatttacaggattagggatatatgataggacactaataataccaacacatgcaga

SEQ ID NO: 182547 - DNA, 80 bp, synthetic construct
  source 1..80: mol_type = other DNA
accgactggggtcaaaagcctgggtacttatggggagcgcgcacaaaggaccgtcaggcgccggcatggagcgtcgccga

SEQ ID NO: 182548 - DNA, 80 bp, synthetic construct
  source 1..80: mol_type = other DNA
tatgttgcgtaaagtgtgttaaaacaatgtaacatgaaacgttataagtatgaaacggatgtcgatgaagaacatgtaaa

SEQ ID NO: 182549 - DNA, 80 bp, synthetic construct
  source 1..80: mol_type = other DNA
gctatgcgccgaggcctttgaggccgtgtagtttctgtggtgcggatgcattaggcggcgcaatgcgggatctgccggtc

SEQ ID NO: 182550 - DNA, 80 bp, synthetic construct
  source 1..80: mol_type = other DNA
cacaaccagatacttcatccaatcggttctacactctagagagcaaaaattggcaaagtgattcaaaaggctggtggtgg

SEQ ID NO: 182551 - DNA, 80 bp, synthetic construct
  source 1..80: mol_type = other DNA
ggccgggtgtttggtggctagggtgaggacctcagcctcgccgcggcccggacgtagcaaaaaagctaactgcccgtgcg

SEQ ID NO: 182552 - DNA, 80 bp, synthetic construct
  source 1..80: mol_type = other DNA
ctcacaaccgatttgacattcttctttcgtttcttcttagatttggcaggaaggaaatcaacttcaacgaacttacccaa

SEQ ID NO: 182553 - DNA, 80 bp, synthetic construct
  source 1..80: mol_type = other DNA
aggactaaaaagagatgaagaaaaagaatacaatgaaacttggtactcccaggatttagtatgtgaccaaaactataata

SEQ ID NO: 182554 - DNA, 80 bp, synthetic construct
  source 1..80: mol_type = other DNA
tttgagggaccaggaatccagtggattggagagaatgaatactatcccgcacgctaccaaactaataccctactagcaaa

SEQ ID NO: 182555 - DNA, 80 bp, synthetic construct
  source 1..80: mol_type = other DNA
gtaacaaagtgtggctagaccccttaacaaaagaagacgctatattaaacagaaaacaagcaaaagtactaatagaagac

SEQ ID NO: 182556 - DNA, 80 bp, synthetic construct
  source 1..80: mol_type = other DNA
caagctggaggtggaaccctgcgcgctctcgctcggcgtgcccgaggatgagtggcaggtcttcggcaccgaggccggcg

SEQ ID NO: 182557 - DNA, 80 bp, synthetic construct
  source 1..80: mol_type = other DNA
ccatactttgtagtaggcttaaaaaatccatatccaagcaacaaaacaaacggcacttgtactacaggggaaccacatag

SEQ ID NO: 182558 - DNA, 80 bp, synthetic construct
  source 1..80: mol_type = other DNA
tacgcacatcaaagagaacagagccagtcggtgtacttttccacggtgacccagggactggaaaatcgatagctacttct

SEQ ID NO: 182559 - DNA, 80 bp, synthetic construct
  source 1..80: mol_type = other DNA
aactttactagtcatattaacgaccgcatcatgaagggaccctttggaggggggcacagtacaatgcgcttttctttatt

SEQ ID NO: 182560 - DNA, 80 bp, synthetic construct
  source 1..80: mol_type = other DNA
atagtgccaatatacatttctaacctgtggattcccatggggtggcagatggcgtgccataattctattagtgggatacc

SEQ ID NO: 182561 - DNA, 80 bp, synthetic construct
  source 1..80: mol_type = other DNA
actgcaacaatttataactacaaatgttacagacacatccaatgtaggtaacacattagctacaccatacatgctaaaat

SEQ ID NO: 182562 - DNA, 80 bp, synthetic construct
  source 1..80: mol_type = other DNA
taccctacagaggggaaggagtggatatcaagaccggtaccataacaccactaaccccagtgaacaagatcacgacttac

SEQ ID NO: 182563 - DNA, 80 bp, synthetic construct
  source 1..80: mol_type = other DNA
tacatacacccagctataaacagggtgttcatgtttgaaccccagggtcccaggcctataactaccagagaggtgtggga

SEQ ID NO: 182564 - DNA, 80 bp, synthetic construct
  source 1..80: mol_type = other DNA
acaaatatctagaataccacctagggctatacagtgctatctttttaagcccactaagaagcaacctacaattccctaca

SEQ ID NO: 182565 - DNA, 80 bp, synthetic construct
  source 1..80: mol_type = other DNA
gtttttttttactttcgtgcagggttggtaggagttgtggaggtgaaggattcgggcactagcctggatgggtacacagt

SEQ ID NO: 182566 - DNA, 80 bp, synthetic construct
  source 1..80: mol_type = other DNA
tttgattatacaaattatgatggtagtttacacccagtttggtttaaaatgttagaggtagtattggataggttaggatt

SEQ ID NO: 182567 - DNA, 80 bp, synthetic construct
  source 1..80: mol_type = other DNA
agcattaggcattaacacatttggtaccaaagacacaccagaaagtcagcaaatgggaagatattaaaaactggcttacc

SEQ ID NO: 182568 - DNA, 80 bp, synthetic construct
  source 1..80: mol_type = other DNA
gccacacatcgcagacggtaccgagtgatgtggtgcagactagatgtgttcgaaatcaccataagcgctccgaatcatcc

SEQ ID NO: 182569 - DNA, 80 bp, synthetic construct
  source 1..80: mol_type = other DNA
gtaattcttgatgtagtggcccaggaattcaacttcatcgtgtctccgtctgcagttggcgttaatgtaggctggggcta

SEQ ID NO: 182570 - DNA, 80 bp, synthetic construct
  source 1..80: mol_type = other DNA
tacgaggactactgcataaaatattatcatgacaaaggcctgccaaaagaagtcagggtcaccatacagtgtccctacac

SEQ ID NO: 182571 - DNA, 80 bp, synthetic construct
  source 1..80: mol_type = other DNA
tggggaccaggcgtagggtcactgcaatcatcttagatgtttgttacaggttgaggcttttattgaccagccgcctcaag

SEQ ID NO: 182572 - DNA, 80 bp, synthetic construct
  source 1..80: mol_type = other DNA
tatggactttataattagaacactaagataattcccagagtctatgatacagcatttaatgtggatgaagaatttcggca

SEQ ID NO: 182573 - DNA, 80 bp, synthetic construct
  source 1..80: mol_type = other DNA
acaggctcctaatgatatcaccatacacatacccagcactagcacaaccagacaacaaagactacggctttgtatgcttt

SEQ ID NO: 182574 - DNA, 80 bp, synthetic construct
  source 1..80: mol_type = other DNA
catggttgttcccaccatgattacctacgggtgtagtacacttgtatcccggtacatttgtgcgccagttttatatcccc

SEQ ID NO: 182575 - DNA, 80 bp, synthetic construct
  source 1..80: mol_type = other DNA
agcggcccagcagatccagggcccgttccaggctctccagccccatggtgtgagacatgcaataaaacacgctattgatt

SEQ ID NO: 182576 - DNA, 80 bp, synthetic construct
  source 1..80: mol_type = other DNA
tgatcaggctggtactaacttagagatcacaattgtcaaactacaacgcaatgagaaattcagagacattagaccacaca

SEQ ID NO: 182577 - DNA, 80 bp, synthetic construct
  source 1..80: mol_type = other DNA
aaaccttcatcactaactccatgatgaaggcccacatagatgctgacaaagctcagtcagccagtacaaactatcccacc

SEQ ID NO: 182578 - DNA, 80 bp, synthetic construct
  source 1..80: mol_type = other DNA
cacccagtttactcaatggcagatattcatgaatcaattagatggacaaaagaccccaaaaacacacaagatcatgtgcg

SEQ ID NO: 182579 - DNA, 80 bp, synthetic construct
  source 1..80: mol_type = other DNA
ccgagacaaaaacatcatatgtatcatatgtgaatgcaaaccctggagaggctggtggtacatttactagcagttacaac

SEQ ID NO: 182580 - DNA, 80 bp, synthetic construct
  source 1..80: mol_type = other DNA
tcaaacctaagagacccaaactttctacagcagccacagaaatcctccagctcgaagaagactcgtcttcaggggaagga

SEQ ID NO: 182581 - DNA, 80 bp, synthetic construct
  source 1..80: mol_type = other DNA
cgtgtcaaagaaaccaccggcgcggtaggagcccacggcgcctagcaggtaccagcggcaacgcagttgcagcgtgacgt

SEQ ID NO: 182582 - DNA, 80 bp, synthetic construct
  source 1..80: mol_type = other DNA
gctcacgcagaacgtcctcagtgctctagaaatactgcggctagtgcgattggacctgcgacaactggcgcaatctgtgc

SEQ ID NO: 182583 - DNA, 80 bp, synthetic construct
  source 1..80: mol_type = other DNA
ctataccaaagaagagagatgattatacttggcagtcgggcactaatgcatctgtgttttggcagcaaggtcaaacatac

SEQ ID NO: 182584 - DNA, 80 bp, synthetic construct
  source 1..80: mol_type = other DNA
caaattatgatggtagtttacacccagtttggttcaagtgcctgagcatgcttttagaagatataggattttcttctcaa

SEQ ID NO: 182585 - DNA, 80 bp, synthetic construct
  source 1..80: mol_type = other DNA
aaaaggtcacagcccgaaatggaggccgcgttggtggccccggtggcgcgtgacgataaccaggtcatccaagtgatgag

SEQ ID NO: 182586 - DNA, 80 bp, synthetic construct
  source 1..80: mol_type = other DNA
attgcagggtgatgacaagactccaccaagcacagtcgcagacacaatgccgagcggggcccggaacactgaacaagtac

SEQ ID NO: 182587 - DNA, 80 bp, synthetic construct
  source 1..80: mol_type = other DNA
ggtcggtgtctgcttattaaggtcgccaagcactccgagcgatagcgaggagtgcgaccctcggggtgggtgcaacgccc

SEQ ID NO: 182588 - DNA, 80 bp, synthetic construct
  source 1..80: mol_type = other DNA
gtttgccctcccccccccttcctgtaacgtagaagttatataaacagaccaataggggatggcgaaccacgccgttcaag

SEQ ID NO: 182589 - DNA, 80 bp, synthetic construct
  source 1..80: mol_type = other DNA
aaagatttgacaaattccttgcaagcaatcttccagggacctatagatgtagtgaacaaaccacctccaccagctataat

SEQ ID NO: 182590 - DNA, 80 bp, synthetic construct
  source 1..80: mol_type = other DNA
ggtttcaccgctgcggacgggcgtagaaaactcagcctacgtcgtcaacttcctggggaggagctacatcctaatataag

SEQ ID NO: 182591 - DNA, 80 bp, synthetic construct
  source 1..80: mol_type = other DNA
ccgaactggcagctgtcatgagtgatcctgaccttgagcaggacaccatttgcttgcatgacgacgagtcatgccgtttt

SEQ ID NO: 182592 - DNA, 80 bp, synthetic construct
  source 1..80: mol_type = other DNA
agtaggaaagaggccatgcttggtgtacatataatatgggatttagggctacaatcaacatgcactatagttgtaccatg

SEQ ID NO: 182593 - DNA, 80 bp, synthetic construct
  source 1..80: mol_type = other DNA
cgtacaccttcatgaggccggcgcgaaaaagttcctctaggctgtcggccagacggtagatttcaccggctagacgctgc

SEQ ID NO: 182594 - DNA, 80 bp, synthetic construct
  source 1..80: mol_type = other DNA
agtcaggataaacacacagcctccatttctagacactaacctaaccgcagcacatatccacccgggcatcatgatgctca

SEQ ID NO: 182595 - DNA, 80 bp, synthetic construct
  source 1..80: mol_type = other DNA
aaacaaagtgggaaaacgtatgtaaagaagcctatgagttagtagcagaagaatacagacaaatatacaccacaactgtt

SEQ ID NO: 182596 - DNA, 80 bp, synthetic construct
  source 1..80: mol_type = other DNA
ggctagacttatggcctacccaagacgttgggggtctcgggtaggccgattcttccaggcataggttacaaccagtcact

SEQ ID NO: 182597 - DNA, 80 bp, synthetic construct
  source 1..80: mol_type = other DNA
taaatagtgtagagggaaatactgataatacaagcatatacactgtcacattaaccagagagaccaatttagcacaagag

SEQ ID NO: 182598 - DNA, 80 bp, synthetic construct
  source 1..80: mol_type = other DNA
ttcgtatcaacgtacactcccgatacaagcgcaagccccaagagagagttccaaccagttgattacttgtttgggtgtgg

SEQ ID NO: 182599 - DNA, 80 bp, synthetic construct
  source 1..80: mol_type = other DNA
ttacaagtgcataggcatctcttcagactatacaactgaatataatgaattagaaacaaaattataccaaaacaactgca

SEQ ID NO: 182600 - DNA, 80 bp, synthetic construct
  source 1..80: mol_type = other DNA
atttgattcagaaattaccctagtgccttgcatagcctctcaaagtaatgacattggacatgtagtgatgcaatacatgt

SEQ ID NO: 182601 - DNA, 80 bp, synthetic construct
  source 1..80: mol_type = other DNA
atgatttttcagctagattgctgaaagacactccttttattagacaggaggcttatgccaattcacagggtatagaggac

SEQ ID NO: 182602 - DNA, 80 bp, synthetic construct
  source 1..80: mol_type = other DNA
gattagacagtaacgcatctaatccgaatagtccaattttctgtctctctctctctcctgccagcgatcaaagattgcaa

SEQ ID NO: 182603 - DNA, 80 bp, synthetic construct
  source 1..80: mol_type = other DNA
atcgaaactcttgacccactccggagacaaatccgtattcagattgatgcgtcgcgcttccacttcggcttccgaaacct

SEQ ID NO: 182604 - DNA, 80 bp, synthetic construct
  source 1..80: mol_type = other DNA
caatatttatgatagtggcccccgcattgacaaaactaaaatcaagagaattcttacaaagaataccaaatataagtgga

SEQ ID NO: 182605 - DNA, 80 bp, synthetic construct
  source 1..80: mol_type = other DNA
tgttgatagtgtgaaagagcatgtgaaggcaattaatccagtaggtaatattagtaagaaaattattaaatggatgttga

SEQ ID NO: 182606 - DNA, 80 bp, synthetic construct
  source 1..80: mol_type = other DNA
ctggacatgtacagggtcccactcacacaaaacaaacagggagaacaagtgtttgggttcagactttgcttgggtgatgg

SEQ ID NO: 182607 - DNA, 80 bp, synthetic construct
  source 1..80: mol_type = other DNA
actggtaaattcttaatagcatacacccctccaggtgctgacatcccagagacgcgtcgtgacgcaatgcttggtacaca

SEQ ID NO: 182608 - DNA, 80 bp, synthetic construct
  source 1..80: mol_type = other DNA
attcaaaatatggtgcagttgtaacaaatgacatgggaacattgtgtgtgcgtattgtaactgagcaacaagcaaatact

SEQ ID NO: 182609 - DNA, 80 bp, synthetic construct
  source 1..80: mol_type = other DNA
tagtagaggcaatgaaccatcacctaaaaaaccaaatagatagaatcagggatcaggcagtatcaatagagacagttgta

SEQ ID NO: 182610 - DNA, 80 bp, synthetic construct
  source 1..80: mol_type = other DNA
tggcacattgaaaaacatggggttgaacgtggtgaaattgccgcagccttgttcgccagtatcattacgtttggaaacgt

SEQ ID NO: 182611 - DNA, 80 bp, synthetic construct
  source 1..80: mol_type = other DNA
cacgacccaacaccgattgaggctaaagtaagggtgtacctgaagcctaagcatattagggtttggtgtccccgtccccc

SEQ ID NO: 182612 - DNA, 80 bp, synthetic construct
  source 1..80: mol_type = other DNA
aagattggtaggtttatagattggcttaaagaaaaattagtacctacagtgcaaaggaaaagagagatactagaaaagtg

SEQ ID NO: 182613 - DNA, 80 bp, synthetic construct
  source 1..80: mol_type = other DNA
cttccagtgcgttctcgctgcggacgggcgtggaaaactcagccattcggaagtgagtttacacaccgcagtcaaggggc

SEQ ID NO: 182614 - DNA, 80 bp, synthetic construct
  source 1..80: mol_type = other DNA
cacccggcagggctagcagaaaaaagaagaataacagtactagatgtaggagatgcctacttcagtgtcccactagaccc

SEQ ID NO: 182615 - DNA, 80 bp, synthetic construct
  source 1..80: mol_type = other DNA
agtgacgtcgggagaacacggtgttttagggtgcgggggacaaaggacagtacgacagattaggtgatagaaacgttttt

SEQ ID NO: 182616 - DNA, 80 bp, synthetic construct
  source 1..80: mol_type = other DNA
ttataatcagcagcatgtagttataatggatgatgtagggcaaaatcctgatggtagagatttaagtttgttttgtcaaa

SEQ ID NO: 182617 - DNA, 80 bp, synthetic construct
  source 1..80: mol_type = other DNA
ggctgccgataaacagggtctctctcatcacggtatgcaggggctggaaaagggtgtggcggttgtaggccgagagaagc

SEQ ID NO: 182618 - DNA, 80 bp, synthetic construct
  source 1..80: mol_type = other DNA
aatgccctgttctcctgcaaggcgttcgatcagacagatttcccctctgttagtctggtcgatgaggctagaagtacccc

SEQ ID NO: 182619 - DNA, 80 bp, synthetic construct
  source 1..80: mol_type = other DNA
atccaatcagaagttttatactggcaataacccagtatttggaatgtgcacctacgcacccactaaagacataatggaaa

SEQ ID NO: 182620 - DNA, 80 bp, synthetic construct
  source 1..80: mol_type = other DNA
aatggccgcgtttcatcagtgacaaagaagcaaaccctgttgacgcccctactgaaccagatgcttcggcaaatcgattc

SEQ ID NO: 182621 - DNA, 80 bp, synthetic construct
  source 1..80: mol_type = other DNA
ctaaactcgaatgcgatatgaatacatccgatctattatgcgtactcgaattaattgatagtagctattggaaatctatg

SEQ ID NO: 182622 - DNA, 80 bp, synthetic construct
  source 1..80: mol_type = other DNA
tctttcgggggaacgaggggaggcgggaattgagttaagataggggcgaagagtgaggtgtgtgcaataattggtgctgg

SEQ ID NO: 182623 - DNA, 80 bp, synthetic construct
  source 1..80: mol_type = other DNA
tgatctagaactagtaagatacctcagcaccaccataaagctatacagacacgaaactgtagactacatagtaagctaca

SEQ ID NO: 182624 - DNA, 80 bp, synthetic construct
  source 1..80: mol_type = other DNA
ggcaacctcaatgatacccccttctacccctggatgccctcctacagagtcagcttcagactcggttttaaaccctaaat

SEQ ID NO: 182625 - DNA, 80 bp, synthetic construct
  source 1..80: mol_type = other DNA
atgaatcagatacccccgctttgacccaccagataatgtatgttccaccaggtggtcccgaaccacgcgactatgaggat

SEQ ID NO: 182626 - DNA, 80 bp, synthetic construct
  source 1..80: mol_type = other DNA
ttttgaattagagcactatttgatataattcaaaaggagtccagccatttcctacgtaaggttgaacaacggtgtggtag

SEQ ID NO: 182627 - DNA, 80 bp, synthetic construct
  source 1..80: mol_type = other DNA
tggaacccccaaactgttagaaagtgtatgatcaggggcatgatgcccatgctctgggccggtatgggcaccggaggcca

SEQ ID NO: 182628 - DNA, 80 bp, synthetic construct
  source 1..80: mol_type = other DNA
tacgcgcgcgaccccgcggtcacgctgtcgcagctctttcccggcctggctctgttggccgtgaccgaaagcgtgcgcag

SEQ ID NO: 182629 - DNA, 80 bp, synthetic construct
  source 1..80: mol_type = other DNA
gcggtggcggttatgtgggaccgcgatctcctggttgctgagagcagggcgcagggtattgacaccattgcccgatgtaa

SEQ ID NO: 182630 - DNA, 80 bp, synthetic construct
  source 1..80: mol_type = other DNA
gcgttgaacgaacgacagataacaacccctctgccgcaactaccgccgcggcaacgacgaccgttcactcctccgcctcc

SEQ ID NO: 182631 - DNA, 80 bp, synthetic construct
  source 1..80: mol_type = other DNA
gattgaaaactttctggcacgggccgcttgtgtgtattacctcaattatcaaacaggatcagggcctggtactcaatact

SEQ ID NO: 182632 - DNA, 80 bp, synthetic construct
  source 1..80: mol_type = other DNA
actagaagtggagaatttcaatgccactgaagccgcagataaaaagaaacaattcaccgtgtggcccatcacttatacaa

SEQ ID NO: 182633 - DNA, 80 bp, synthetic construct
  source 1..80: mol_type = other DNA
caaaaccttaagcagcttacagcctacctcaagacccacaggcacgagccagtgtgtattctactacatggaagtcctgg

SEQ ID NO: 182634 - DNA, 80 bp, synthetic construct
  source 1..80: mol_type = other DNA
cggttcgtagtgggccatccaactcggagcagattccagcgctgacagccgtagagacaggccacacatcccaagtagtc

SEQ ID NO: 182635 - DNA, 80 bp, synthetic construct
  source 1..80: mol_type = other DNA
aacagtatttaatacttttaaaacacaagaacacatacaatatccagcatacacacagtataaagtacaagaccaaacaa

SEQ ID NO: 182636 - DNA, 80 bp, synthetic construct
  source 1..80: mol_type = other DNA
cccagcaaacgacaaaggagtgggcaacaaagtatgggtagactggtgcagcaaaaatgactccagttggactggaagag

SEQ ID NO: 182637 - DNA, 80 bp, synthetic construct
  source 1..80: mol_type = other DNA
gcttcatgcagacaaacctaattgcaccagtgggggctgcatcagagtgctatctcattggatttgtagcagctaaagat

SEQ ID NO: 182638 - DNA, 80 bp, synthetic construct
  source 1..80: mol_type = other DNA
gattggatacgatggacattttccgcattcccgtccagagtgggaatcatcagagcacacaggtttttggctttcaagtt

SEQ ID NO: 182639 - DNA, 80 bp, synthetic construct
  source 1..80: mol_type = other DNA
gggatattggactgcaatctagtgcaactatggtagccccatggatctcaaacagtgtatatcgcaggtgtgtcaaggac

SEQ ID NO: 182640 - DNA, 80 bp, synthetic construct
  source 1..80: mol_type = other DNA
caccaatggcaacgtaaacataacaggaaccacactgataaatgaaacttctccatgcatacgaaatgacagctgcacag

SEQ ID NO: 182641 - DNA, 80 bp, synthetic construct
  source 1..80: mol_type = other DNA
gctcaagtatcttctcagaaagttggagcccacgaaaacaccaatgtagcaactggtgggtcaactgtcaactacactac

SEQ ID NO: 182642 - DNA, 80 bp, synthetic construct
  source 1..80: mol_type = other DNA
agaatcctctacgacgagtttaccaggtttatgaactattggactgttagtaacgaagacctagacctgtgtagatacgt

SEQ ID NO: 182643 - DNA, 80 bp, synthetic construct
  source 1..80: mol_type = other DNA
tcaggagttgtcataatagtattagcaacacagtatataggcttttccaagaattggctagaattcccaataggatcagc

SEQ ID NO: 182644 - DNA, 80 bp, synthetic construct
  source 1..80: mol_type = other DNA
ggtggaccgctgctatccaaggctgttcaggttcctccgcgttggaaggacatggagtttgaccacggttgggcctggat

SEQ ID NO: 182645 - DNA, 80 bp, synthetic construct
  source 1..80: mol_type = other DNA
ctgccaataccaccgcctaaacggactagcatgagctgggcccaacctacatctctcgcccatgtccgagaacaacaatg

SEQ ID NO: 182646 - DNA, 80 bp, synthetic construct
  source 1..80: mol_type = other DNA
tcagaacaatttcttaccacagatgacagacaatcccctagtgcaatgcccaattatgagccaacccctctgatccatat

SEQ ID NO: 182647 - DNA, 80 bp, synthetic construct
  source 1..80: mol_type = other DNA
tttataacatgataatggaagaggacaagcgccgtaggaatgtggtagatgtaatgactgccatattccaagggcctatt

SEQ ID NO: 182648 - DNA, 80 bp, synthetic construct
  source 1..80: mol_type = other DNA
catttttggcagaaacattctgacagccttaggcatgtcattaaatttaccagtcgccaagatagaaccaataaaaataa

SEQ ID NO: 182649 - DNA, 80 bp, synthetic construct
  source 1..80: mol_type = other DNA
tcatctaggaaatttctaccattgtatgcatctgaaaacaaacgcataaatgacctcctcagaaggagtgaaatggtaat

SEQ ID NO: 182650 - DNA, 80 bp, synthetic construct
  source 1..80: mol_type = other DNA
cagtcacatcaactccattgaagcctatcaaatcccagttagtgcacaaaccacagctaaagctgacgcgatattctcaa

SEQ ID NO: 182651 - DNA, 80 bp, synthetic construct
  source 1..80: mol_type = other DNA
cagaacaccaactggcttcacatgagggtggcaatgtttcagttaaatacacattcacgcatccaggtgaacgtggtata

SEQ ID NO: 182652 - DNA, 80 bp, synthetic construct
  source 1..80: mol_type = other DNA
tgaacaaacatgtacggtcggagtccacaatagagaatttccttgcacggtcggcatgtgtgtactttctcgagtacaag

SEQ ID NO: 182653 - DNA, 80 bp, synthetic construct
  source 1..80: mol_type = other DNA
gaaaatgtgctggaggaaaaacactacatgaaacacaggacggacattaagactgctggaccaagtgatttgtatgtgca

SEQ ID NO: 182654 - DNA, 80 bp, synthetic construct
  source 1..80: mol_type = other DNA
acaaaaccttacaaatacaagacataaaaatagcaggagataccaattacaactggtatccttataacatgactaaccaa

SEQ ID NO: 182655 - DNA, 80 bp, synthetic construct
  source 1..80: mol_type = other DNA
acaactttccaagttctgcaaaacttctacaaccccattataggccactccatacttctaactgatgaaaaagttgagaa

SEQ ID NO: 182656 - DNA, 80 bp, synthetic construct
  source 1..80: mol_type = other DNA
atgtactcccaggatttcaccccaccaaacagatccatatacctggtgaaatcaagacaattatggatatagctcgggtg

SEQ ID NO: 182657 - DNA, 80 bp, synthetic construct
  source 1..80: mol_type = other DNA
acagtagcttagcacacacacagggaccaattagtgattacataacacagttaggtaacgcatttggcacaggctttaca

SEQ ID NO: 182658 - DNA, 80 bp, synthetic construct
  source 1..80: mol_type = other DNA
caggactaaaaacactgactggatagcacagtatgacatctcagctccctttaaactagacaaatacagctgccctagct

SEQ ID NO: 182659 - DNA, 80 bp, synthetic construct
  source 1..80: mol_type = other DNA
ttgggcatcatccagattcagaacattcatcacactcccacttagccgcttcagctgggcagcatgcttggataacttac

SEQ ID NO: 182660 - DNA, 80 bp, synthetic construct
  source 1..80: mol_type = other DNA
agggagatgacataggacacatagtactccagtacatgtatgttccacctggtggcccaattccaaaaaccagggatgct

SEQ ID NO: 182661 - DNA, 80 bp, synthetic construct
  source 1..80: mol_type = other DNA
gacacatgaagataccctaaacttacagaacccaatgccagaaagggacttggctattataaatgccaatggacatggat

SEQ ID NO: 182662 - DNA, 80 bp, synthetic construct
  source 1..80: mol_type = other DNA
agaggtgaaaacgacacgaaagaccaaaacattagagagcgacacaaaagaaactatgtaccttgtcacattagacaggt

SEQ ID NO: 182663 - DNA, 80 bp, synthetic construct
  source 1..80: mol_type = other DNA
cctttaactataatccacaagattccagtcaaacagaaaaactaacaacatttgaaaaatggctatactcaaccagcaca

SEQ ID NO: 182664 - DNA, 80 bp, synthetic construct
  source 1..80: mol_type = other DNA
ataaaaaaccaatacaatgtatactttgatgtaaagcgaggagtgcgacccttccccctgactcaacttcttcggagccg

SEQ ID NO: 182665 - DNA, 80 bp, synthetic construct
  source 1..80: mol_type = other DNA
gccgatcgcccatccttttatcgggctttccgctcaggccgttttaacctgtgtaccgattctgtcctggactatctagg

SEQ ID NO: 182666 - DNA, 80 bp, synthetic construct
  source 1..80: mol_type = other DNA
ccagaggaactgcttccttcacgacattcaacagaccttgcattcctttggcgagaggggaaagacccctaggaatgctc

SEQ ID NO: 182667 - DNA, 80 bp, synthetic construct
  source 1..80: mol_type = other DNA
catacattcacagatcatcagaaacccatgcaaagacgaccagcttgcccaccccagtcgacagcctagggatgtacaag

SEQ ID NO: 182668 - DNA, 80 bp, synthetic construct
  source 1..80: mol_type = other DNA
tacaaagaaaccagaactcaggagagcagttgctcaaggtccagaccacgagtttggtgtggctctcctgaagaggaatt

SEQ ID NO: 182669 - DNA, 80 bp, synthetic construct
  source 1..80: mol_type = other DNA
tcaggaattgacttacaacaatgtaacatttctaaagagaggattcaggactgatgaaagacactcattcctcatacatc

SEQ ID NO: 182670 - DNA, 80 bp, synthetic construct
  source 1..80: mol_type = other DNA
ttacaaagtacccacgttagttcattcaggataaatttgtgctacgttgtgtagctcttagaaattgtaaagcctcgctt

SEQ ID NO: 182671 - DNA, 80 bp, synthetic construct
  source 1..80: mol_type = other DNA
gtcaatgaccacttatggatacgggcaccagaacaaggctgtttatgttgccgggtacaagatttgcaactatcatcttg

SEQ ID NO: 182672 - DNA, 80 bp, synthetic construct
  source 1..80: mol_type = other DNA
cacagaagcacacgttcaagaaagttcattaaactttattgactacaccagtcccttgtaaagcgacgggtctcgcgtga

SEQ ID NO: 182673 - DNA, 80 bp, synthetic construct
  source 1..80: mol_type = other DNA
tccgcgaacaggccgtggaggacccctgtaaaaaatccacgtttgccattcccggagccggtggactcgctcgcattcta

SEQ ID NO: 182674 - DNA, 80 bp, synthetic construct
  source 1..80: mol_type = other DNA
actgatgatctacaatcaccatccgcactgccatggtatcatccaactaaagaaattctgataccaggagaggttaaaaa

SEQ ID NO: 182675 - DNA, 80 bp, synthetic construct
  source 1..80: mol_type = other DNA
atgaatatgtccaaacaaggaattttccagactgttgggagtggccttgaccacatcctgtccttggcagatattgagga

SEQ ID NO: 182676 - DNA, 80 bp, synthetic construct
  source 1..80: mol_type = other DNA
cgagcactccagttccaactccagcagttcgcgctccaactcgccaagacccaggcgaatctccacgtaaaccccctatt

SEQ ID NO: 182677 - DNA, 80 bp, synthetic construct
  source 1..80: mol_type = other DNA
atggactattagcccaagaaggatggtgcagatgcgcaggaaatttgagctcttcacatacctacgcttcgatgtggaag

SEQ ID NO: 182678 - DNA, 80 bp, synthetic construct
  source 1..80: mol_type = other DNA
aatcaattcttaaccacagatgacgacacagccgcacccatactcccaggatttacccccacgcccgtaattcacatacc

SEQ ID NO: 182679 - DNA, 80 bp, synthetic construct
  source 1..80: mol_type = other DNA
tttgaatccccggagaaaagaggaggaagaagaggtcccaaggggacggcagcgcgagtccctggggacgcgcggagcaa

SEQ ID NO: 182680 - DNA, 80 bp, synthetic construct
  source 1..80: mol_type = other DNA
aggtttgcgggctgagggagtttgcgagccgccgtcctcggggcactcagtgccactgcgtgccgcgtccggcgctttgt

SEQ ID NO: 182681 - DNA, 80 bp, synthetic construct
  source 1..80: mol_type = other DNA
cccgcgccggtgcggggggggggatcgcgggccccggagcacactgcttccatctggccgcacgcacaccctgccgacac

SEQ ID NO: 182682 - DNA, 80 bp, synthetic construct
  source 1..80: mol_type = other DNA
gtgcctaattaaggggtacactcccctcatcctgtgcggagcccagagatctgggtttaactatgccatgcacatggagg

SEQ ID NO: 182683 - DNA, 80 bp, synthetic construct
  source 1..80: mol_type = other DNA
gagtcatagtagaaaaccagggccacgcactggtccacaaacacgctcaggttcacggccgccatttccacgtcgttttg

SEQ ID NO: 182684 - DNA, 80 bp, synthetic construct
  source 1..80: mol_type = other DNA
ccacaacaggtcatacataggaatcttatataccttaagttattcccaaatttgaatttatttgcacaatcttactcata

SEQ ID NO: 182685 - DNA, 80 bp, synthetic construct
  source 1..80: mol_type = other DNA
gtaccgttcgcagagctattaacagtgctacgagcgttggatctgcagccaacactgccccgagttcacatcgattagag

SEQ ID NO: 182686 - DNA, 80 bp, synthetic construct
  source 1..80: mol_type = other DNA
ctgatgctatcagtgacctattagctagtgttgatagtgaggaggttcgccaatactgtagagatcaaggatggattgta

SEQ ID NO: 182687 - DNA, 80 bp, synthetic construct
  source 1..80: mol_type = other DNA
ggttctgagtgttttcaaaccaagcattgaaagcaaagccattcagtggttagaaagaaataaggaacatgtctgtagta

SEQ ID NO: 182688 - DNA, 80 bp, synthetic construct
  source 1..80: mol_type = other DNA
aaccaggtcagtgtggtggtgtacttggaaatacagggcacatagtaggaatacatgttggaggaaatggccgtgttggt

SEQ ID NO: 182689 - DNA, 80 bp, synthetic construct
  source 1..80: mol_type = other DNA
cctccaagactacaaattgcagacccgaaaatcctcggaccgtcgacagtcttccacacatgggacatcagacgtggcct

SEQ ID NO: 182690 - DNA, 80 bp, synthetic construct
  source 1..80: mol_type = other DNA
cttcagagttgtcaatgaaaatgatcaacatgctactaaagttaaaattagaatttatcatagagccaaacatgtaatgg

SEQ ID NO: 182691 - DNA, 80 bp, synthetic construct
  source 1..80: mol_type = other DNA
tccagcgcgtgggattgttgccggccaggtaggtgagaccgctgcagagaacgaaaaagaccatcaccagggcaaacgac

SEQ ID NO: 182692 - DNA, 80 bp, synthetic construct
  source 1..80: mol_type = other DNA
ctggcccagcaacttcataccgttgaagttgtggtttaagtggtttcctatgatgtttaaccaaaaacaggcagttgaga

SEQ ID NO: 182693 - DNA, 80 bp, synthetic construct
  source 1..80: mol_type = other DNA
agctttaaacgcaatggaagtgggagttactccagatgtgcggcctgaaaacttgattgaaaccagatatgtcataaaca

SEQ ID NO: 182694 - DNA, 80 bp, synthetic construct
  source 1..80: mol_type = other DNA
caccaacgaggacctagaccttgcccgttacaggggatgcaaatggaccttttacagacacccagacactgactttatag

SEQ ID NO: 182695 - DNA, 80 bp, synthetic construct
  source 1..80: mol_type = other DNA
aaggcgccggtggaggcgaaggagacgacgtgcgagacctgctcgccgctatcgaaggagacgtgggcgcagacgggtaa

SEQ ID NO: 182696 - DNA, 80 bp, synthetic construct
  source 1..80: mol_type = other DNA
atatacatctaacatagtcgaggcattctttaagaatgcagagaatatgtacaatgccagaaaaaatgtaagttaccaag

SEQ ID NO: 182697 - DNA, 80 bp, synthetic construct
  source 1..80: mol_type = other DNA
gggcggggccggggacggtggtggagacagagacggggcgttgcgaagacgggggcgtttgcgtcggggccggggacagg

SEQ ID NO: 182698 - DNA, 80 bp, synthetic construct
  source 1..80: mol_type = other DNA
gattacccagattgtaatttggctttagtagctaatcaacctgaacccacaatattaaatgtaggagatgttgtatcata

SEQ ID NO: 182699 - DNA, 80 bp, synthetic construct
  source 1..80: mol_type = other DNA
cattacagacttgtgcagcaggatgagtacactagtgcaggtaatgtgacttgttggtaccagaccgggatagttgttcc

SEQ ID NO: 182700 - DNA, 80 bp, synthetic construct
  source 1..80: mol_type = other DNA
acaagtcgttagcccgctttccatgggaccggcctacatcttccactacttcgactccagacgcgggttctttagtgaaa

SEQ ID NO: 182701 - DNA, 80 bp, synthetic construct
  source 1..80: mol_type = other DNA
aaaaacagcaacaggattacattgacactcttaagattatgcttgactcatcaaataagtttttaccactctatgcttgt

SEQ ID NO: 182702 - DNA, 80 bp, synthetic construct
  source 1..80: mol_type = other DNA
ccttagacctgagtgaaaacaagaagaacacaatggacatgtacagagtacaattatctgacactctggataagaaaccc

SEQ ID NO: 182703 - DNA, 80 bp, synthetic construct
  source 1..80: mol_type = other DNA
atcaaccaacacaacctgatgttgccacctgcaggttctatacactagaatcagttgagtggcagggaagttctgctggg

SEQ ID NO: 182704 - DNA, 80 bp, synthetic construct
  source 1..80: mol_type = other DNA
caccaataacgacttaatcaggattgagcccattggaatctggattcaaggtgagccaggacaagggaaatcttttctaa

SEQ ID NO: 182705 - DNA, 80 bp, synthetic construct
  source 1..80: mol_type = other DNA
ttggattatactgcacaagcgtctgaatacgtgcctgtaactgtcacaattgctcctatgtgcgcagaatacaacggatt

SEQ ID NO: 182706 - DNA, 80 bp, synthetic construct
  source 1..80: mol_type = other DNA
tttcacttttttcatatattttccttatggttacaagcttatggttataggtttgtaatcatgggagcacaggtttcaag

SEQ ID NO: 182707 - DNA, 80 bp, synthetic construct
  source 1..80: mol_type = other DNA
ggtggaaatcagttcatgacaactgaggatgagcaatcagcaaatatactacccaacttccatccaacgaagatgataca

SEQ ID NO: 182708 - DNA, 80 bp, synthetic construct
  source 1..80: mol_type = other DNA
tgctcccctgcgcaactatgtatatcagatcatgtacattccacccggcgctccagaaccacagtcctgggacgattaca

SEQ ID NO: 182709 - DNA, 80 bp, synthetic construct
  source 1..80: mol_type = other DNA
tgatcgccagggactcctcaccgtccatcgtccgaacaagctcccgccaccgatgctgccaccatcaccgagagaaagaa

SEQ ID NO: 182710 - DNA, 80 bp, synthetic construct
  source 1..80: mol_type = other DNA
gcactcttagggtgtcatggttcaccatggggctttttgaaagacaaaatatgccagtggttaaacataccaaaaccacc

SEQ ID NO: 182711 - DNA, 80 bp, synthetic construct
  source 1..80: mol_type = other DNA
gaggaaactcgaactcttcacgtattctagatttgatttggaattaacgtttgtcattacagaaagatacttttcaggga

SEQ ID NO: 182712 - DNA, 80 bp, synthetic construct
  source 1..80: mol_type = other DNA
acagttctggctacgcttgcattgcttggctgccatggttcaccttgggccttcttaaaagacaaggtttgcaaatggct

SEQ ID NO: 182713 - DNA, 80 bp, synthetic construct
  source 1..80: mol_type = other DNA
ccggccgtgtccactcacatattccactcttatttttaaattaatgtgtcccaattagaaacccaaacgcagaaattagt

SEQ ID NO: 182714 - DNA, 80 bp, synthetic construct
  source 1..80: mol_type = other DNA
accccagtggggtgaacttggaaatcactatagtggaacttgacagaaatgagaaattcagagacattaggactcattta

SEQ ID NO: 182715 - DNA, 80 bp, synthetic construct
  source 1..80: mol_type = other DNA
ccggttgttcccaccggcgagcatactgtgcgttgtacactggaattacggttcctttgtatgcctgttttataatccct

SEQ ID NO: 182716 - DNA, 80 bp, synthetic construct
  source 1..80: mol_type = other DNA
cctttcgtgactcaaactgctttctaccaaaacgacgttcagaacgcggtggaacggtcaattgttcgtgtagcggacac

SEQ ID NO: 182717 - DNA, 80 bp, synthetic construct
  source 1..80: mol_type = other DNA
actaatgcagaggttgttaatcccagtggaggctaaatcatcaccagacactttatgtgctagctttaaggttgacccag

SEQ ID NO: 182718 - DNA, 80 bp, synthetic construct
  source 1..80: mol_type = other DNA
gctatggttttgctgggtggccggcgccgcctggtggtcctggggcgctccccccactgagacgcgcgctgccggcgccc

SEQ ID NO: 182719 - DNA, 80 bp, synthetic construct
  source 1..80: mol_type = other DNA
cgacgtgacgcgagtattacgtgtcaggggaaaaccccgtcatgacgaacgtgattcgtaagtgacgcggggtgctgacg

SEQ ID NO: 182720 - DNA, 80 bp, synthetic construct
  source 1..80: mol_type = other DNA
ttagtgacctggaaccgtctatcgccgcccagattgagaatgacgccaatgccgcaaagcgtgaatccggatgcccggaa

SEQ ID NO: 182721 - DNA, 80 bp, synthetic construct
  source 1..80: mol_type = other DNA
cactttcctaaaaagaggttttaaagttgatgagagatacactttccttattcatccaacattccccgaaagtgagattt

SEQ ID NO: 182722 - DNA, 80 bp, synthetic construct
  source 1..80: mol_type = other DNA
caggtgaagacgggcacaccttcaaagcaccaacagagcgaggacaatggaatccagatgagaacccgttttacctgtgc

SEQ ID NO: 182723 - DNA, 80 bp, synthetic construct
  source 1..80: mol_type = other DNA
gtacacagctctcaataggatgggcaagatttatgtaaggcatgtaaacaaagagacccccacacaagtaattagtacgg

SEQ ID NO: 182724 - DNA, 80 bp, synthetic construct
  source 1..80: mol_type = other DNA
accagtcagatccaacctaaatgatactcctttttacccatgggtccccagaaaccctaaatattgtgtgtcttttaaac

SEQ ID NO: 182725 - DNA, 80 bp, synthetic construct
  source 1..80: mol_type = other DNA
tgtaatcactttccgcgtatttctttagagttaacatcacggtggtagtgttttcccaataagtgacgttgtcagtgacg

SEQ ID NO: 182726 - DNA, 80 bp, synthetic construct
  source 1..80: mol_type = other DNA
gagaagcagatagagcatctaagagtagcagacactcaaactcaagaaaaaatcaagcatgaaattgacacacttcatga

SEQ ID NO: 182727 - DNA, 80 bp, synthetic construct
  source 1..80: mol_type = other DNA
attcacgagctgaaacgcgatctgtttgccgcgcggcagagttctacgttactttcggcggctctccccgctgcggcctc

SEQ ID NO: 182728 - DNA, 80 bp, synthetic construct
  source 1..80: mol_type = other DNA
cttctgcccagggtgaaatagtcaacaagtgcaaggtacaggatgtaggtctcaaacccatcaacacaccagaacactct

SEQ ID NO: 182729 - DNA, 80 bp, synthetic construct
  source 1..80: mol_type = other DNA
agattacaatgagagagttaggaactacagtgcttggaaacagcaactagataaccagtcacttgatgatttggacgatg

SEQ ID NO: 182730 - DNA, 80 bp, synthetic construct
  source 1..80: mol_type = other DNA
gtgtctgtgtgattccccggggaaaagaggaagttcccaggggacggccagagacgcggaaaagacgcggaaaagaggaa

SEQ ID NO: 182731 - DNA, 80 bp, synthetic construct
  source 1..80: mol_type = other DNA
ggttcgtcctccctatagtaatagtagtcgtcgtcctcataggggttgccggcgtgagccagcgttacccaacagcagcc

SEQ ID NO: 182732 - DNA, 80 bp, synthetic construct
  source 1..80: mol_type = other DNA
cagctcttctcagaggatgatctgttggagactgacggttttactgaacgagcctgtgaatcttgccaataaacgtttat

SEQ ID NO: 182733 - DNA, 80 bp, synthetic construct
  source 1..80: mol_type = other DNA
catatacacctccaggtgcagaagggccaacaagacgcaaggatgccatgttggggacacatgtagtgtgggatataggg

SEQ ID NO: 182734 - DNA, 80 bp, synthetic construct
  source 1..80: mol_type = other DNA
cggacgccctctccaatcttgggctctttgggcaaaacatgcaatatcactacttaggccgaactgggtatactatccat

SEQ ID NO: 182735 - DNA, 80 bp, synthetic construct
  source 1..80: mol_type = other DNA
cctgtaattcctataatgggcagagaggcctgggaagatgagtacaccacttgcaaatattgggataggccagctagaac

SEQ ID NO: 182736 - DNA, 80 bp, synthetic construct
  source 1..80: mol_type = other DNA
tttacacccccccgcgagtctcaaaatggcgcattccgtgacgtcatggccgccattttaagtaaggcggaagagctgct

SEQ ID NO: 182737 - DNA, 80 bp, synthetic construct
  source 1..80: mol_type = other DNA
gacagcccaatgatggaacaagacaatgagttgcagaacaatgatgacccagttgagaactttgtggaatccaccttaaa

SEQ ID NO: 182738 - DNA, 80 bp, synthetic construct
  source 1..80: mol_type = other DNA
gacgagctcttgcgaggctttgatgtagcccgagttgaaacgcgagatgaactgttccacggccagcgccttgtcgcggc

SEQ ID NO: 182739 - DNA, 80 bp, synthetic construct
  source 1..80: mol_type = other DNA
cctccgcccgcaggtaggccgcccgggccacacgggcgaagcggctcgtggggctcgcggtgggcagcagtcggaaaaag

SEQ ID NO: 182740 - DNA, 80 bp, synthetic construct
  source 1..80: mol_type = other DNA
cgtgcgtatattatacaacctacaagaaccatggtaccgatggggataatttcgcctactgggtaattaacacaaggcaa

SEQ ID NO: 182741 - DNA, 80 bp, synthetic construct
  source 1..80: mol_type = other DNA
tcttggggactcacacgttaggtggcgcggtggttgggacttggataacttttcagaagctgagaccgaagacgaggcga

SEQ ID NO: 182742 - DNA, 80 bp, synthetic construct
  source 1..80: mol_type = other DNA
acgcggtgatctccctccgtggcttcaccgctgcggacgggcgtggaaaactcagcctgtacgtgcacttcctgggctgg

SEQ ID NO: 182743 - DNA, 80 bp, synthetic construct
  source 1..80: mol_type = other DNA
tgcgtcagaacgtggtcttttacctcctaagccacgccacggtacagacggcgcgcgacccgctgtacgccgccgagcag

SEQ ID NO: 182744 - DNA, 80 bp, synthetic construct
  source 1..80: mol_type = other DNA
ttctttgtcccctccaaccattacaataccagaagcaatcagcaggaggtttttcctggataccgatttacaagtgctta

SEQ ID NO: 182745 - DNA, 80 bp, synthetic construct
  source 1..80: mol_type = other DNA
taatacacccaacatttccagttgaagaaatccaagagtccattcggtggacaaagaaaccatctcaaatgcaggaacat

SEQ ID NO: 182746 - DNA, 80 bp, synthetic construct
  source 1..80: mol_type = other DNA
tggaagggactttagtaataaattccaataattttagagataccatactggaggtaggacaattgacctttgctggcctc

SEQ ID NO: 182747 - DNA, 80 bp, synthetic construct
  source 1..80: mol_type = other DNA
gaagatttagtaacagtaacagctaccttggcattactggggtgtgatggttctccctggagatttttaaaaatgtatgt

SEQ ID NO: 182748 - DNA, 80 bp, synthetic construct
  source 1..80: mol_type = other DNA
atacagaaggggagggggaagtagcgttcgtaccgatggttgtggtattattattccctgtgtttcttgttccagaaacc

SEQ ID NO: 182749 - DNA, 80 bp, synthetic construct
  source 1..80: mol_type = other DNA
acatgaatactattcaccgaaagacgcacagtggggagaccccattcatataatctcatcatcagaaactacagtcaatc

SEQ ID NO: 182750 - DNA, 80 bp, synthetic construct
  source 1..80: mol_type = other DNA
taaaggtcactaagcactccgagcgttagcgaggagtgcgacccccccccctggtgcaacgccctcggagtccggcgcta

SEQ ID NO: 182751 - DNA, 80 bp, synthetic construct
  source 1..80: mol_type = other DNA
atcttctcatgatggtgctgatagaggggtctccggcgtagatgaaaaaggcctgggccatgctctggccggtcacgatc

SEQ ID NO: 182752 - DNA, 80 bp, synthetic construct
  source 1..80: mol_type = other DNA
acttctcggtgcgcttattgagagacacgccccatgttagacaggatctatacatcaacacacaagggatagaagataca

SEQ ID NO: 182753 - DNA, 80 bp, synthetic construct
  source 1..80: mol_type = other DNA
ctatccatcacaacaattttacattgtttgttataccaatagcacccttgaactacgacacaggagccacgacagccatt

SEQ ID NO: 182754 - DNA, 80 bp, synthetic construct
  source 1..80: mol_type = other DNA
acgcaattagagtgccgggcccgggacagcgccacatacacatggccgggtttgatgtttctgtggctgccgaagcagat

SEQ ID NO: 182755 - DNA, 80 bp, synthetic construct
  source 1..80: mol_type = other DNA
aaacacctctagacttcttaggctctaaccaacaaaattgcaatgacacctggtactatggcaaagcttacaacaagtcc

SEQ ID NO: 182756 - DNA, 80 bp, synthetic construct
  source 1..80: mol_type = other DNA
ataagggatgttagggaagaaggaatcaaaccagttaataccccaacacatactaagctcagacccagtgtgttttatga

SEQ ID NO: 182757 - DNA, 80 bp, synthetic construct
  source 1..80: mol_type = other DNA
tgacaaaataagatcaaccagtatcggtaagtgtctactaatacctgaatacagtgtcttacggtggcgctggttggatt

SEQ ID NO: 182758 - DNA, 80 bp, synthetic construct
  source 1..80: mol_type = other DNA
ccaacgtggtggttgcatatggtgtgtggcctgattatctggatgacgaccaggccactgccgaggatcaacccacccaa

SEQ ID NO: 182759 - DNA, 80 bp, synthetic construct
  source 1..80: mol_type = other DNA
gcaaagaatgttaacttcgacatacaaggtgtcactgattcccggtctaaaattaccctggatcgtacaaatcatagtgc

SEQ ID NO: 182760 - DNA, 80 bp, synthetic construct
  source 1..80: mol_type = other DNA
tccattgatgtagacggtcacataggtgggcttcttcttgggcttcagcacaatgagggtaacattcatgtaggttttag

SEQ ID NO: 182761 - DNA, 80 bp, synthetic construct
  source 1..80: mol_type = other DNA
ctgcctactcatgccacaccaggcgacacactagtgattgatggaaaggaaatcaaaatattggatgcacaagcactagt

SEQ ID NO: 182762 - DNA, 80 bp, synthetic construct
  source 1..80: mol_type = other DNA
ttcatgtgtgtttgtgatgcattcagcactggcaaatttctgttagcatacaccccccctggaggtgccctaccagccaa

SEQ ID NO: 182763 - DNA, 80 bp, synthetic construct
  source 1..80: mol_type = other DNA
aggacctatagacattgtcaacaaaccaccacccccagcaatcatggacttactcaagtcagtgagaaatcctgaagtta

SEQ ID NO: 182764 - DNA, 80 bp, synthetic construct
  source 1..80: mol_type = other DNA
acttatactaactcagtggcagccccagacccgtagaaagtgcaccatcaccgggtacctcccggtggtctggtgcgggt

SEQ ID NO: 182765 - DNA, 80 bp, synthetic construct
  source 1..80: mol_type = other DNA
tcaaactctgtcggaggatcttgatgcccctcaggataccgccaacatcgagaatggtgcgtcggacaacacacctcagc

SEQ ID NO: 182766 - DNA, 80 bp, synthetic construct
  source 1..80: mol_type = other DNA
cccttaaattagtacttgagaatttgcagtttgaacctaaattagtagatagattatgcaattccaaacatatctataga

SEQ ID NO: 182767 - DNA, 80 bp, synthetic construct
  source 1..80: mol_type = other DNA
tggatttacatctttgacatcacatactccgaatctcattaagatagtgctcttgatacgacatcatcgtcattatgggt

SEQ ID NO: 182768 - DNA, 80 bp, synthetic construct
  source 1..80: mol_type = other DNA
ggcagtagccgacggactcgttgacaggtcagcctaccctcaaggttcctatcgttcggacgggatttgtgcgttttagg

SEQ ID NO: 182769 - DNA, 80 bp, synthetic construct
  source 1..80: mol_type = other DNA
acataccagaaagtgaagatgattatccggattgcaacttagctttatctgctaaccaaccagagactactataattaat

SEQ ID NO: 182770 - DNA, 80 bp, synthetic construct
  source 1..80: mol_type = other DNA
ttaatttaacaagtcactatagcgggatttactacttcgattctctatacacatatggttgggtattacggacacctcta

SEQ ID NO: 182771 - DNA, 80 bp, synthetic construct
  source 1..80: mol_type = other DNA
ctacacacacacacattcaacgaattataaacctcaggatggtgaggtccaaattttcctcaaagaaagagccagcttga

SEQ ID NO: 182772 - DNA, 80 bp, synthetic construct
  source 1..80: mol_type = other DNA
accagcatgatgaaataatactccatggacactcaataaaatacctggaacaagaagatgaactgacactacactataaa

SEQ ID NO: 182773 - DNA, 80 bp, synthetic construct
  source 1..80: mol_type = other DNA
gaattcatggatggttatgataaccaggatatccacctcatagatgatttgggccagacaaggaaagagaaggatattga

SEQ ID NO: 182774 - DNA, 80 bp, synthetic construct
  source 1..80: mol_type = other DNA
aggcgaagagacaaaagaccaccgcacagcacgaaggccatggcggcggcggcaagaacgagacggagcagcagtccggt

SEQ ID NO: 182775 - DNA, 80 bp, synthetic construct
  source 1..80: mol_type = other DNA
ggactaataattcagccacaattgttgtgccatatataaattgtttaccgatggataacatgctaagacacaataatctg

SEQ ID NO: 182776 - DNA, 80 bp, synthetic construct
  source 1..80: mol_type = other DNA
ctctatccagtcgctcggctcgatgcctggccatatcagggaagtcaggaacgccttctggtgaggcagcgtacctgcgg

SEQ ID NO: 182777 - DNA, 80 bp, synthetic construct
  source 1..80: mol_type = other DNA
acattagcacaagtatacaaccacatacttgatgaagacaagaggcgcagacaagttgtggatgtcatgtctgcaatttt

SEQ ID NO: 182778 - DNA, 80 bp, synthetic construct
  source 1..80: mol_type = other DNA
aaactttagttttaggatttatgcatccattatcccgcagttccacctaaacggggcttaacgttgcatcccagaagatg

SEQ ID NO: 182779 - DNA, 80 bp, synthetic construct
  source 1..80: mol_type = other DNA
accgtgcctcagagacaggcctttggaggagccctcagtacagtctccttctcgctaaaagtactgtacgaccaacacct

SEQ ID NO: 182780 - DNA, 80 bp, synthetic construct
  source 1..80: mol_type = other DNA
cagactcagggtattgatgatgttattgataaggtgattaacaatgcactacaactctcacaacccacacagcctatcac

SEQ ID NO: 182781 - DNA, 80 bp, synthetic construct
  source 1..80: mol_type = other DNA
tcacaagttgaccccagcgacacaatacaaaccaggcatgtggtaaattttcactcccgatccgaatccactgtggagaa

SEQ ID NO: 182782 - DNA, 80 bp, synthetic construct
  source 1..80: mol_type = other DNA
agtacgaaaaatcaggcaatgtaaacttcaaacccaagggcgtgacagagagccggacgtctatcaaattagaaaaacca

SEQ ID NO: 182783 - DNA, 80 bp, synthetic construct
  source 1..80: mol_type = other DNA
tgatcaacgtgtctacgaacgtcattgtgaaagtgacgtctcaggctttccgaaaccgcgtcagattcaacgtgggtttc

SEQ ID NO: 182784 - DNA, 80 bp, synthetic construct
  source 1..80: mol_type = other DNA
atcaaaacacgcacagatattaaaacatttggtccaagtgatcaatttgtacacacacaacatgccaagtacaccaacgc

SEQ ID NO: 182785 - DNA, 80 bp, synthetic construct
  source 1..80: mol_type = other DNA
tattggaagtcaacaatctgaccagtaacaatagcgctgctaacgttatgcagcgattactgataccagtccaagctcaa

SEQ ID NO: 182786 - DNA, 80 bp, synthetic construct
  source 1..80: mol_type = other DNA
acaaaacgttgactttttatttaaatataatagaagacagccattttcagacagccaactaacaggacccagcttacacc

SEQ ID NO: 182787 - DNA, 80 bp, synthetic construct
  source 1..80: mol_type = other DNA
ggaccagccaaagatgcagtgtatagtatggatggaactttgttaggaaatttgaccatcttcccacaccagttcatcaa

SEQ ID NO: 182788 - DNA, 80 bp, synthetic construct
  source 1..80: mol_type = other DNA
ttattctgattcttggtacaatctatgctatttacaagcttatgtgtatgactcaaggaccttacactggcttaccaaac

SEQ ID NO: 182789 - DNA, 80 bp, synthetic construct
  source 1..80: mol_type = other DNA
actttaagcccaaacacattagggtgtgggtaccgcggccaccacgcctatgtccctacatcaagtccagtaatgtcaac

SEQ ID NO: 182790 - DNA, 80 bp, synthetic construct
  source 1..80: mol_type = other DNA
cccaacacgcttgccacaggtgtggtctaagcaagactgggaaacagagtatgaaacatgcgccgcctttgacaggcctc

SEQ ID NO: 182791 - DNA, 80 bp, synthetic construct
  source 1..80: mol_type = other DNA
tgtcacgtggcatgtgcgtcacggcggccattttgaatcacaaaatggcggacttccttccgcttttttgaaaataacgg

SEQ ID NO: 182792 - DNA, 80 bp, synthetic construct
  source 1..80: mol_type = other DNA
agggcttatctgttcgagcccgagggtcccaagcccatccagggccgcgaggcctggatggacgagttccagacctgcaa

SEQ ID NO: 182793 - DNA, 80 bp, synthetic construct
  source 1..80: mol_type = other DNA
tctcgggccaaacgccgtcgtagacgacgcgctccgaaaaacgacgccgccacgccgtcttttctacgtcgacacgacgt

SEQ ID NO: 182794 - DNA, 80 bp, synthetic construct
  source 1..80: mol_type = other DNA
tccaacttaaaagaccaagcaatacaaggtgaaagaaagactgtacaaaatagattacacccagaaaacctacatggcac

SEQ ID NO: 182795 - DNA, 80 bp, synthetic construct
  source 1..80: mol_type = other DNA
atcataaccaatacgatttctcattccatctcgaccgcttctaccacctctaccgccacgtcctccacgagcatcaagaa

SEQ ID NO: 182796 - DNA, 80 bp, synthetic construct
  source 1..80: mol_type = other DNA
ggtcgggagctttattaaacggactccgaggtgccattggacactgagtgggcgtacagcaacgaaagtgagtgaggcca

SEQ ID NO: 182797 - DNA, 80 bp, synthetic construct
  source 1..80: mol_type = other DNA
ctcgaagccgatcccacggcgcgcgagggcgagctttttttcttctccaagaacctgtacggcaacggtgaggttttccg

SEQ ID NO: 182798 - DNA, 80 bp, synthetic construct
  source 1..80: mol_type = other DNA
atgtcctagacctgtacgtggaggaagaggccatggaacagggtatcactagttacatggaaacattgggatcaccattc

SEQ ID NO: 182799 - DNA, 80 bp, synthetic construct
  source 1..80: mol_type = other DNA
agatggaggacgcggcgccgccgaaggagactacggccccgaagagctagacgaacttttcgccgccctcgacgaagagt

SEQ ID NO: 182800 - DNA, 80 bp, synthetic construct
  source 1..80: mol_type = other DNA
ggatgttttcgtggcgatcgtaagccgcaatgttctctcgtgtctgctgaacgtgcctgccgcgggtccctgggcctaca

SEQ ID NO: 182801 - DNA, 80 bp, synthetic construct
  source 1..80: mol_type = other DNA
gactcagagtacagagtatgcatgagatgcccgtacacacaccctatgatgactaaggcctcagacccactgtggggctt

SEQ ID NO: 182802 - DNA, 80 bp, synthetic construct
  source 1..80: mol_type = other DNA
gagattgtccgtggtgtatctagtcgctatttttgttgttactagtagttttgcacacagtttattcagtataatttttc

SEQ ID NO: 182803 - DNA, 80 bp, synthetic construct
  source 1..80: mol_type = other DNA
ctggccgggccatgggcaaggctcttaaaaaatgcactttcgcagagtctcagcgaaaaggaaactgctactgctatctc

SEQ ID NO: 182804 - DNA, 80 bp, synthetic construct
  source 1..80: mol_type = other DNA
cccatgaaaatgaacgaactgacggctcccaacaaccacccgggcatgcttatgctccagaaacagaaaatactaattcc

SEQ ID NO: 182805 - DNA, 80 bp, synthetic construct
  source 1..80: mol_type = other DNA
aaacacaaactaggtattattagccgtatatatcacaaggctaaacacataaaggcgtggtgtccacgcccaccaagagc

SEQ ID NO: 182806 - DNA, 80 bp, synthetic construct
  source 1..80: mol_type = other DNA
tggtgaacgtgctttttatgacccaaggtcagctggaagtaggtcacgatttgatgacttggtcaaaataacacaattat

SEQ ID NO: 182807 - DNA, 80 bp, synthetic construct
  source 1..80: mol_type = other DNA
agatttgatcttgagatcaccattgtgaccaacaacagaggattaatgcaggttatgtttgtacctccaggaattgatgc

SEQ ID NO: 182808 - DNA, 80 bp, synthetic construct
  source 1..80: mol_type = other DNA
ccgactcatgctaacccaggcgagaccattgtgattgctggtaaggaggtcagaattactgatgccaaaaggttagtgga

SEQ ID NO: 182809 - DNA, 80 bp, synthetic construct
  source 1..80: mol_type = other DNA
cagactgcacctgatgcaacaccttacgccttctccaaatccgaggcgggcgctgtggagcatgtcctacagaagtattt

SEQ ID NO: 182810 - DNA, 80 bp, synthetic construct
  source 1..80: mol_type = other DNA
tggctatacgagtcctgcacccactatcaaacatttgccacagaaagcagactaagaccccctactgggccacaaccaga

SEQ ID NO: 182811 - DNA, 80 bp, synthetic construct
  source 1..80: mol_type = other DNA
ttctaccagacctattcaaacatctacaaccaacgcaactgtaataacaacctcaccaaacagcgacattaattcatcga

SEQ ID NO: 182812 - DNA, 80 bp, synthetic construct
  source 1..80: mol_type = other DNA
catggaagaatgcaacagttcccctcttttgtgccaccaaaaatagagatatttggggaactgtgcaatgcctcccagac

SEQ ID NO: 182813 - DNA, 80 bp, synthetic construct
  source 1..80: mol_type = other DNA
ataaagattttgttgacaaaataagatcaaccagtatcggtaagtgcctgctgataccagaatatagtgtcctacgtcga

SEQ ID NO: 182814 - DNA, 80 bp, synthetic construct
  source 1..80: mol_type = other DNA
aagccctgcagccgcttgttcagcgagcggccctgattcgggatgatggtcagctcctcgtagcattgggcgcatgtcgt

SEQ ID NO: 182815 - DNA, 80 bp, synthetic construct
  source 1..80: mol_type = other DNA
cagaatggagtttacgggttcaacacgctaaacaacatgggaaagctatacgtacgacacgtcaatggagctagccccgg

SEQ ID NO: 182816 - DNA, 80 bp, synthetic construct
  source 1..80: mol_type = other DNA
ggggttccggccctggagctcggggtgcggccgggtggcccaccgggtccgctgggtccgctgccccgctccggctggtg

SEQ ID NO: 182817 - DNA, 80 bp, synthetic construct
  source 1..80: mol_type = other DNA
ctatcactcacaaagacctgttatccacagggaactctgatacttttaatgaaaacactttttataaaaactttttaaat

SEQ ID NO: 182818 - DNA, 80 bp, synthetic construct
  source 1..80: mol_type = other DNA
ccgacacgctgtccgacgaggtgtgtcgcgtctcacaaattataccgtaataaaaaagcgctacctcggccttttcatac

SEQ ID NO: 182819 - DNA, 80 bp, synthetic construct
  source 1..80: mol_type = other DNA
cctccgtgtgagacccgaccagatggcaacaacacgctgaaatgccccaccgactgctttaggaaccatccagaagcctc

SEQ ID NO: 182820 - DNA, 80 bp, synthetic construct
  source 1..80: mol_type = other DNA
ctagccagatacctctacacaaaaattaaactatacagacaccccactgtagactacatagtcacctacaacagaacagg

SEQ ID NO: 182821 - DNA, 80 bp, synthetic construct
  source 1..80: mol_type = other DNA
gcgggagacggtacagacgaaaacggaagagggctaagataactataagacaatggcagccagccatgacgagacgctgt

SEQ ID NO: 182822 - DNA, 80 bp, synthetic construct
  source 1..80: mol_type = other DNA
gcagatgaggcgtacgattttgagttcttccaaacgcagcgagctcagcggctgtccgcgcgacatcttctcgctaatct

SEQ ID NO: 182823 - DNA, 80 bp, synthetic construct
  source 1..80: mol_type = other DNA
ccctaaaagtgttgtatgaccagcaccagaggggactaaacaagtggtcttttcccaacgaccaactagacctcgccaga

SEQ ID NO: 182824 - DNA, 80 bp, synthetic construct
  source 1..80: mol_type = other DNA
tacttcaaacctaaacatattagagcatgggtgcccagaccacctagattgtgtcagtatgagaaacaagggagcgttga

SEQ ID NO: 182825 - DNA, 80 bp, synthetic construct
  source 1..80: mol_type = other DNA
atgaaactgcaaatgcaaactttaaaaacaagccatataactggaaaaattataaagaaaacttttcagctgtacaaact

SEQ ID NO: 182826 - DNA, 80 bp, synthetic construct
  source 1..80: mol_type = other DNA
cagagtgcattagtgatttgttgcagtcagtggatagtcaggaagtgagggattactgtgagaagaaggggtggattgtt

SEQ ID NO: 182827 - DNA, 80 bp, synthetic construct
  source 1..80: mol_type = other DNA
caagacatgctgcaatgtctgtggctagaactgaaaccccagtacgccgagacctacgcctcggtgtccgaattggtaca

SEQ ID NO: 182828 - DNA, 80 bp, synthetic construct
  source 1..80: mol_type = other DNA
acgagctgttccgcgccgtcgccgccgacgaagagtaaggaggcgccggtgagggaggcgaagacgtaggagacgggttt

SEQ ID NO: 182829 - DNA, 80 bp, synthetic construct
  source 1..80: mol_type = other DNA
agacaaacatccagctccagctgcagcaccagctcaaagagcagctgcaactcagacggggaatccagtgcctcttcgag

SEQ ID NO: 182830 - DNA, 80 bp, synthetic construct
  source 1..80: mol_type = other DNA
gtggcacgcagtgccatagcgccgcgcgtcaaggcgcttacacccccctcagcccggtcccgcaccggcgtcggtctggg

SEQ ID NO: 182831 - DNA, 80 bp, synthetic construct
  source 1..80: mol_type = other DNA
ttcgttagcgggccgacgccggggacggggtgttgcggccgctcggggttggcggctggtgtttccacggtgtttgtgcg

SEQ ID NO: 182832 - DNA, 80 bp, synthetic construct
  source 1..80: mol_type = other DNA
gcaccgctattccttacggggaaataaacctcagtggcaatccaacatgcaggctactcaagtatgactatcctactaaa

SEQ ID NO: 182833 - DNA, 80 bp, synthetic construct
  source 1..80: mol_type = other DNA
cacaacatacacgtacaaccttactaactcttccaacgcttgtcacacagagacaacaatcatacgtttcaaggaaacca

SEQ ID NO: 182834 - DNA, 80 bp, synthetic construct
  source 1..80: mol_type = other DNA
caataccaggcctagatcaattaggaatttagagaatgagagcccatacactgagcctgatacaagaaaaatgaaactgg

SEQ ID NO: 182835 - DNA, 80 bp, synthetic construct
  source 1..80: mol_type = other DNA
agagctcacgttaaggctgcgttccacaccgttgcccgaaaagtagccgatctgcccaaactgatagatctccttgctgt

SEQ ID NO: 182836 - DNA, 80 bp, synthetic construct
  source 1..80: mol_type = other DNA
catcgcttaggagttagttcctctatgttctcggcccaccttttcgactacagtagcaaacccttgtactaccaccccga

SEQ ID NO: 182837 - DNA, 80 bp, synthetic construct
  source 1..80: mol_type = other DNA
taccaagagttgcagtatatggtggaagaacaacggcggcgaaatcagtcgcgtaatgcgattccgagaccctcgttccc

SEQ ID NO: 182838 - DNA, 80 bp, synthetic construct
  source 1..80: mol_type = other DNA
tttattatatatttattaataattaattacccccccctcggggtggctccgcccccccggccccccccccgggctaaata

SEQ ID NO: 182839 - DNA, 80 bp, synthetic construct
  source 1..80: mol_type = other DNA
ggtggaaattacctgattgccttagagagatgggtctttttggccagaatatgtattaccattcaatgggtagaacaggt

SEQ ID NO: 182840 - DNA, 80 bp, synthetic construct
  source 1..80: mol_type = other DNA
gactctgtttcaagactttctactacaccacaattactggacctcctctaacaaagacctagacctgggaaggtacctgg

SEQ ID NO: 182841 - DNA, 80 bp, synthetic construct
  source 1..80: mol_type = other DNA
agcgacacgatgcagacacgtcacgtcaaaaactaccactcgagatctgagtctaccatcgaaaatttcctgtgcagatc

SEQ ID NO: 182842 - DNA, 80 bp, synthetic construct
  source 1..80: mol_type = other DNA
taggtgccctaacctatttttcccactaccagctccaaagacagttagtagagcccttacagatgagagtccatatgatg

SEQ ID NO: 182843 - DNA, 80 bp, synthetic construct
  source 1..80: mol_type = other DNA
cgggaacaacaacaccagcttccacagcatccacaaccaccacatcaaccgcaaagagcacaacagccctaaacgaaaat

SEQ ID NO: 182844 - DNA, 80 bp, synthetic construct
  source 1..80: mol_type = other DNA
ctcacgaggctaaagccccgacagtcgttatccgcacaactactggacaaagcctagtaacaccctacgatgtagtatgg

SEQ ID NO: 182845 - DNA, 80 bp, synthetic construct
  source 1..80: mol_type = other DNA
acaggtatgtggagcccacccaccgaggatgaacgtgtccgtgagcgtaaatggctcctctcagtttttcaatctcactc

SEQ ID NO: 182846 - DNA, 80 bp, synthetic construct
  source 1..80: mol_type = other DNA
actgcactacaggcacttactactgtaaaagtagagatagatacttcccaataaacctcacacatcacagctggtatata

SEQ ID NO: 182847 - DNA, 80 bp, synthetic construct
  source 1..80: mol_type = other DNA
tcaaagtcactcctgttacaaaagtgagatcaagcatcaatgacaccacccacgtcagtacacacggggcctttggtcaa

SEQ ID NO: 182848 - DNA, 80 bp, synthetic construct
  source 1..80: mol_type = other DNA
gggggcaacaccgacaatccctataaccgtcaccgtagctcccatgaattcagaattctccggattgagacaagccgtaa

SEQ ID NO: 182849 - DNA, 80 bp, synthetic construct
  source 1..80: mol_type = other DNA
taacatggggcatctgtatttcaggcatgttaataagtccacagcatatccagtgagtagtgtcgctcgtgtttacttta

SEQ ID NO: 182850 - DNA, 80 bp, synthetic construct
  source 1..80: mol_type = other DNA
aagcaagggaccattacaccattgaccccggtgaccagtataacaacatatggattcggacaccgaaaccaagcagttta

SEQ ID NO: 182851 - DNA, 80 bp, synthetic construct
  source 1..80: mol_type = other DNA
tacaggtttgtgcacaccgatgaatacacaagtgcaggctacattacagcttggtaccagacaagcatcgtggtgccacc

SEQ ID NO: 182852 - DNA, 80 bp, synthetic construct
  source 1..80: mol_type = other DNA
taatattctgtggcgaaaacacaaccgcccagaactatgccactcactcagacgacatgataagcaaaggaccgtacggg

SEQ ID NO: 182853 - DNA, 80 bp, synthetic construct
  source 1..80: mol_type = other DNA
aaaccctaccacaacaacactaggaaactatgaaccagaactaaaaaccacaggtaagttttactcaggtaacaatccag

SEQ ID NO: 182854 - DNA, 80 bp, synthetic construct
  source 1..80: mol_type = other DNA
tggcggacgagagaaaatggcgtcgagagcataggagcgttttcgctccaggcgggtaaaagaatagcacgataactttt

SEQ ID NO: 182855 - DNA, 80 bp, synthetic construct
  source 1..80: mol_type = other DNA
gtggacttctcaatgaccaatataactgaacaacgcaacaacattagatggacactgtcaaccggtccgtcaatgatatc

SEQ ID NO: 182856 - DNA, 80 bp, synthetic construct
  source 1..80: mol_type = other DNA
cactactggcgtatacttttgtgcatcgaagaacaagcactatccagtttcatttgaaggcccggggttggtcgaagtcc

SEQ ID NO: 182857 - DNA, 80 bp, synthetic construct
  source 1..80: mol_type = other DNA
gatgaaattagcctatttggacaggggtttctacaagcactatggcattgtggtgggggacagtatttatcaattggatt

SEQ ID NO: 182858 - DNA, 80 bp, synthetic construct
  source 1..80: mol_type = other DNA
ggtaggaaaatatgcaaaggtaaaaaatacccacaccaatggagtcagactcttagcacatgtagttcaaaagataggaa

SEQ ID NO: 182859 - DNA, 80 bp, synthetic construct
  source 1..80: mol_type = other DNA
acatggtgctagtcgttatttatgcaacagcatgtgacctgcggtttccgttcggctcaccactaactgacaacccttgc

SEQ ID NO: 182860 - DNA, 80 bp, synthetic construct
  source 1..80: mol_type = other DNA
agctggtgtgtactcactccccccagatccaaagcattttgatggctatgatcaacaaaaagttgtcataatggatgatt

SEQ ID NO: 182861 - DNA, 80 bp, synthetic construct
  source 1..80: mol_type = other DNA
tggtagtatacacccaatctggtttcaagctctgaaagaagtgttgtctaatcttaactttgaacccaacttaatagata

SEQ ID NO: 182862 - DNA, 80 bp, synthetic construct
  source 1..80: mol_type = other DNA
gagaaatgaaacttatgaaaaaatacttaattttattacagtatataacaccacagaaacagcagcacaactaaacaagt

SEQ ID NO: 182863 - DNA, 80 bp, synthetic construct
  source 1..80: mol_type = other DNA
atggtaaggatggattttctgcaatgttgctacgctcatactttaatgaccaccaagggcaaatagtaagtaaagtcact

SEQ ID NO: 182864 - DNA, 80 bp, synthetic construct
  source 1..80: mol_type = other DNA
cttgagagatactgatgctagtgctgtggacaaacctacccatcctgaaacttccaccgatcggttttatacactcacta

SEQ ID NO: 182865 - DNA, 80 bp, synthetic construct
  source 1..80: mol_type = other DNA
actcaggcagaattagcccagaagtatttggcctttacactgaaattatttacaacccatacacagacaaaggcaaaggc

SEQ ID NO: 182866 - DNA, 80 bp, synthetic construct
  source 1..80: mol_type = other DNA
atttgcttactgatctactttaacgttccagcaaccctaagacgcagactacgaactagaaacaacgttaaccgcataac

SEQ ID NO: 182867 - DNA, 80 bp, synthetic construct
  source 1..80: mol_type = other DNA
taatttatgtgattctccttccctctaggactgaagaaacagcctcctgcacgtgagcatgtatctgaaataattattat

SEQ ID NO: 182868 - DNA, 80 bp, synthetic construct
  source 1..80: mol_type = other DNA
gagatatttggtggagagatataccttttccaaaggaagggcatggtatgttgtctcagttctttgcttatttcacaggt

SEQ ID NO: 182869 - DNA, 80 bp, synthetic construct
  source 1..80: mol_type = other DNA
ccaatgcatattctcatttctatgacggctttgccacagtacccatagagggagaaaccactgaccctggtgcggcatac

SEQ ID NO: 182870 - DNA, 80 bp, synthetic construct
  source 1..80: mol_type = other DNA
gggatataccatacatgtgcagtgcaacgcgtccaagttccaccaaggctgcctgttagtagtttgcgtaccagaggcgg

SEQ ID NO: 182871 - DNA, 80 bp, synthetic construct
  source 1..80: mol_type = other DNA
agctcagaccctgccacagtgatagctacactagctttactaggttgttcaggttcaccgtggcgctacttgaaggacaa

SEQ ID NO: 182872 - DNA, 80 bp, synthetic construct
  source 1..80: mol_type = other DNA
gaaaacgtcagcacaccgcttccaatttgctcgtcatctaataacacattcaacgatacatcaaataaccatacttgtta

SEQ ID NO: 182873 - DNA, 80 bp, synthetic construct
  source 1..80: mol_type = other DNA
accatcatgccagtggccataatcctggagactgcatctgaactggggcataaacagggcgtggcaggacgtgcaggccg

SEQ ID NO: 182874 - DNA, 80 bp, synthetic construct
  source 1..80: mol_type = other DNA
cacggagctttctcccacaaaacaggcatatactcatccagctttttaacctacaacagaataagtccagaggtgccagg

SEQ ID NO: 182875 - DNA, 80 bp, synthetic construct
  source 1..80: mol_type = other DNA
cgatttgtacttccaaatgtacgggatatcaaggaatcgagcttctttcactgctctgtgtgaccatggttcatgcccag

SEQ ID NO: 182876 - DNA, 80 bp, synthetic construct
  source 1..80: mol_type = other DNA
tgatctgcctctagttacatatattaaggatgagctcagggggaaagataaggtcagactagggaaaagtagattaatag

SEQ ID NO: 182877 - DNA, 80 bp, synthetic construct
  source 1..80: mol_type = other DNA
acaccattgattcacatccctggggagttcacttctctactagatctatgccggatagagactatactggaagtcaacaa

SEQ ID NO: 182878 - DNA, 80 bp, synthetic construct
  source 1..80: mol_type = other DNA
tcctctttttttccgcgtgtggccgccgtccctcacccccgggagttgctctgcgcgtccccagggactcgcgctgccgt

SEQ ID NO: 182879 - DNA, 80 bp, synthetic construct
  source 1..80: mol_type = other DNA
tctgcggctcaatgatggccactggtaaattgctagtgtcctatgcacctcctggtgcggaagcccctaaaagccgcaaa

SEQ ID NO: 182880 - DNA, 80 bp, synthetic construct
  source 1..80: mol_type = other DNA
cgaaaaagaaaactacactttactccaagccctccaagactcggggcaagagagcagctcagaaaaccaagaacaagcac

SEQ ID NO: 182881 - DNA, 80 bp, synthetic construct
  source 1..80: mol_type = other DNA
ttttccacgatgtgtttaagggcaccaaagaacctgcagttttatcagataaagatccacgtttagagactgactttaga

SEQ ID NO: 182882 - DNA, 80 bp, synthetic construct
  source 1..80: mol_type = other DNA
gaagtgatgtcataccggattgtgactgcgtggaagggtgttactactgcaaatctcaggacaggtacttccctgtcaag

SEQ ID NO: 182883 - DNA, 80 bp, synthetic construct
  source 1..80: mol_type = other DNA
cccacacagccaacgaaagaagactttaatacctggaaaaagaaattcactgacacaagagacagcctgtttctcttcgc

SEQ ID NO: 182884 - DNA, 80 bp, synthetic construct
  source 1..80: mol_type = other DNA
gttaaacccaaacggtaaacctggcagatgaggctggaaaatccccaccagcgatggtgttccagcctgcgtggctgcct

SEQ ID NO: 182885 - DNA, 80 bp, synthetic construct
  source 1..80: mol_type = other DNA
ctgaagaaaaaaaatggcaagattggtggtctaaaaagtcagaaacatggcaaggagacccctaccctcaacctaccaca

SEQ ID NO: 182886 - DNA, 80 bp, synthetic construct
  source 1..80: mol_type = other DNA
catgccccacatggtgtctgtgaaatccaccaggatgttgctggggctaatgtccgaatggaagaggccgcagtgccgat

SEQ ID NO: 182887 - DNA, 80 bp, synthetic construct
  source 1..80: mol_type = other DNA
gaatatatgtaccactaccccaacaatgtaactacagaccttattgaaaaaaacacactcacacatgactggggcatata

SEQ ID NO: 182888 - DNA, 80 bp, synthetic construct
  source 1..80: mol_type = other DNA
ctttctcggtgcgaactgtggggtcatcgaaatccaagtatcccttagttatcagaatatatatgaggatgaaacatgtc

SEQ ID NO: 182889 - DNA, 80 bp, synthetic construct
  source 1..80: mol_type = other DNA
ttcaaacaccacccacatggagacgcgcggggcgtttggccagcagtcaggcgctgcttacgtgggaaactacaggctgg

SEQ ID NO: 182890 - DNA, 80 bp, synthetic construct
  source 1..80: mol_type = other DNA
gaaatcagtacaagtcaaccatcctaacctcacatacaatatgtcattcccatcaccaatatcctacatcatatcatgat

SEQ ID NO: 182891 - DNA, 80 bp, synthetic construct
  source 1..80: mol_type = other DNA
ccggtaccggcaccgccacggcgtggtacagaagaagaaggtggagaccgtggagaagacgccgcagaccgtggacccta

SEQ ID NO: 182892 - DNA, 80 bp, synthetic construct
  source 1..80: mol_type = other DNA
aatccctcgatgggtacccgctctcgaacaccaagggcaagaaagcaacttcgattcggagacagagatctccgagtcct

SEQ ID NO: 182893 - DNA, 80 bp, synthetic construct
  source 1..80: mol_type = other DNA
cggcgcttttgcggctggcacttcgtgccacggaggtttttgggcgacgttggggacggagggccgcgggttgcgctgtg

SEQ ID NO: 182894 - DNA, 80 bp, synthetic construct
  source 1..80: mol_type = other DNA
agctcaagcgagtccccccgtgggagacctcgcaagagagccaaagcgaggaagaaaactcgcaaaaacaggagaccctc

SEQ ID NO: 182895 - DNA, 80 bp, synthetic construct
  source 1..80: mol_type = other DNA
gcaaagactggcaggaggagtttgaggcctgcaaacactgggacagacccgccagagctagcttagatagtactcccttc

SEQ ID NO: 182896 - DNA, 80 bp, synthetic construct
  source 1..80: mol_type = other DNA
gtaccatgggtaaatgaatcccttaagccagactggaataacatgacatggcaacaatgggagaggcaagtccgcttctt

SEQ ID NO: 182897 - DNA, 80 bp, synthetic construct
  source 1..80: mol_type = other DNA
ctgggactggcgacgtggctaccttagtgagggagctctcaagcgcctgcgagaaaaaccgcttgactatgaggcatata

SEQ ID NO: 182898 - DNA, 80 bp, synthetic construct
  source 1..80: mol_type = other DNA
atgtgctaacgtaagcttagacgaacgatcaaaactagcatacgatgtgacaacaccatgcgaaatcaaagcatgttcat

SEQ ID NO: 182899 - DNA, 80 bp, synthetic construct
  source 1..80: mol_type = other DNA
atttgacattcttgaaaagatattttagaccagatgaacagttcccattcttaatccacccagtcatgcctatgcaagac

SEQ ID NO: 182900 - DNA, 80 bp, synthetic construct
  source 1..80: mol_type = other DNA
tactaacaatccccccatgaagaccaaccagttcacagctcccctgaccactcctggcatgctcatgaggagcaagtaca

SEQ ID NO: 182901 - DNA, 80 bp, synthetic construct
  source 1..80: mol_type = other DNA
attttgtgtccaaaatccgcaccgtggcagtgggtagaacattgagtattccaccctacagttacctgcgccaccggtgg

SEQ ID NO: 182902 - DNA, 80 bp, synthetic construct
  source 1..80: mol_type = other DNA
caccagggtccccacagtggacccggaggccatggtggagagcatcttgctggtcagagccagactgggtggtgtctgca

SEQ ID NO: 182903 - DNA, 80 bp, synthetic construct
  source 1..80: mol_type = other DNA
tccacaacacttgcctactcaatacatttacaaaccataatgggggctcaagtgtctacacaaaagtctggatcacatga

SEQ ID NO: 182904 - DNA, 80 bp, synthetic construct
  source 1..80: mol_type = other DNA
tggtttcaaagtagctcctgccagctgatagatatatgctggagtatattcctgagtggtattcatataagtctgtggac

SEQ ID NO: 182905 - DNA, 80 bp, synthetic construct
  source 1..80: mol_type = other DNA
cctggagctggtgggcacgatctctcacatccctatgtactggactgtggtgtccccattagccagttattggtctgccc

SEQ ID NO: 182906 - DNA, 80 bp, synthetic construct
  source 1..80: mol_type = other DNA
cacatgtcatatgggattttggattgcaatcatcagtttccctggtgataccatggattagtaacacccattttcgcaca

SEQ ID NO: 182907 - DNA, 80 bp, synthetic construct
  source 1..80: mol_type = other DNA
gcggagttaacactcaggaagtaccagctttaaccgcggtggagactggtgcgtccggacaagcagtgcccagtgatgta

SEQ ID NO: 182908 - DNA, 80 bp, synthetic construct
  source 1..80: mol_type = other DNA
tgtgctaggacccgatgccgacggtgatggtgtagtcacagccgttgtgcctgtcacgttccccgccgaggccgtcgaac

SEQ ID NO: 182909 - DNA, 80 bp, synthetic construct
  source 1..80: mol_type = other DNA
actgttgacaaaaccattgactatgacactggacattttaataaatggcaaataacattacaagagatggcacaaattag

SEQ ID NO: 182910 - DNA, 80 bp, synthetic construct
  source 1..80: mol_type = other DNA
ttaaacccaagggagtgacaaccactagggatagcataacgttagtgaaatctagcactgaacatatgcgagtgaaaaca

SEQ ID NO: 182911 - DNA, 80 bp, synthetic construct
  source 1..80: mol_type = other DNA
ctgcccatacctgcgggcgagcatcgggtcatcgggcatatcggccttgaccgcgttgaacatgctgtatgcctcgcagc

SEQ ID NO: 182912 - DNA, 80 bp, synthetic construct
  source 1..80: mol_type = other DNA
gttctgctgttggatgtgatcctgaagttttctggtcaaaaatacctcttatgcttgatggtgattgtttgatggctttt

SEQ ID NO: 182913 - DNA, 80 bp, synthetic construct
  source 1..80: mol_type = other DNA
cgttgaacgccatggggaaattatacatcagacatgtaaacgccagcagcccgacacaaattactagtacggtacgtgtg

SEQ ID NO: 182914 - DNA, 80 bp, synthetic construct
  source 1..80: mol_type = other DNA
accttgctcagaatccagttgaaaattatatagataaggttgtagatactgttctacaagtcccaaatacccaacctagt

SEQ ID NO: 182915 - DNA, 80 bp, synthetic construct
  source 1..80: mol_type = other DNA
cacaaaataataataatttaactaccttaatttgatcttttgatcaactcacttacaagattgtatgttacacatgtggt

SEQ ID NO: 182916 - DNA, 80 bp, synthetic construct
  source 1..80: mol_type = other DNA
tccgggtcaaaggtcgcagacgccatttttagtcacgtgacctgctacgtcacggccgccattttagttcacaaaatggc

SEQ ID NO: 182917 - DNA, 80 bp, synthetic construct
  source 1..80: mol_type = other DNA
ctcgatagtgattttggggacgacggaggtgagtactgcattaaaaaaataaattatacataaatatatatattatatta

SEQ ID NO: 182918 - DNA, 80 bp, synthetic construct
  source 1..80: mol_type = other DNA
tttacactttggaatcagtgcagtggagaaaggacagtaaagggtggtggtggaaattgccagattgtcttaaggatatg

SEQ ID NO: 182919 - DNA, 80 bp, synthetic construct
  source 1..80: mol_type = other DNA
aagtacagtgacgggtatccgtgagatgtaagtcatcacccttctcactgttatcatgaaagaccaggactcgggtaaga

SEQ ID NO: 182920 - DNA, 80 bp, synthetic construct
  source 1..80: mol_type = other DNA
tttgtaactaccacctggccactcaagaagacatggaacgtgcagtagctgtgatgtgggaccgagaccttatggtggtg

SEQ ID NO: 182921 - DNA, 80 bp, synthetic construct
  source 1..80: mol_type = other DNA
agaacaatttacaaatgtctgtccaaacagaataattttaataccaaaactaaatgaaattcatttgatgaagcctccaa

SEQ ID NO: 182922 - DNA, 80 bp, synthetic construct
  source 1..80: mol_type = other DNA
ctccgagactatcgttccactcgtgggactttagacgaggactctttggcgtccagagtattaaaagaatgtcagaagaa

SEQ ID NO: 182923 - DNA, 80 bp, synthetic construct
  source 1..80: mol_type = other DNA
ccccgaccaacgggtcactctactatgctccggccccagtgggcacccaccaccatgcagccaccaccaagggcgcccac

SEQ ID NO: 182924 - DNA, 80 bp, synthetic construct
  source 1..80: mol_type = other DNA
gagaagcggaacaggtcgccgtggctggagagctcgcagactcggaaaggaaagctggtttgctgacgcgtggcggtagg

SEQ ID NO: 182925 - DNA, 80 bp, synthetic construct
  source 1..80: mol_type = other DNA
cgacacgcccgagagaaccgcagccctgggactcggaccaagagatggagagcagccagcaaagcgaagaagagacgaca

SEQ ID NO: 182926 - DNA, 80 bp, synthetic construct
  source 1..80: mol_type = other DNA
aactagctgagattgacactataatacccatgaatgcaatacaaggtaaagttaataccatggaggcctacccaatcccc

SEQ ID NO: 182927 - DNA, 80 bp, synthetic construct
  source 1..80: mol_type = other DNA
cgacacagctgtgtcggaactgtccacagcctgcaaacttcaagaaatgctgccctttagtgtgtggaaaagccatccaa

SEQ ID NO: 182928 - DNA, 80 bp, synthetic construct
  source 1..80: mol_type = other DNA
atgcagatatgtattaaaagacattcccctgtgggccatggcccacgggtactctgactacatagactcacaactaggcc

SEQ ID NO: 182929 - DNA, 80 bp, synthetic construct
  source 1..80: mol_type = other DNA
taacatacgaaaaagctaagaaattgttcccacaatatctatcagtgaattatctacatagattgacagtgagtagtaga

SEQ ID NO: 182930 - DNA, 80 bp, synthetic construct
  source 1..80: mol_type = other DNA
ttccttgcccgaatgataacaagtgaaagtgacatatactcacttccccctgacccaaagtactttgatggatatgacca

SEQ ID NO: 182931 - DNA, 80 bp, synthetic construct
  source 1..80: mol_type = other DNA
ggccagggaaaatcctcccaaaactatgctatacactcagacgactacctactacaggtgctgtcttttggaggaggaat

SEQ ID NO: 182932 - DNA, 80 bp, synthetic construct
  source 1..80: mol_type = other DNA
ggcagaaaggccataaaagtgaggataaggcccccaaaactcatgaacaacaagtggtacttcaccagagacttctgtaa

SEQ ID NO: 182933 - DNA, 80 bp, synthetic construct
  source 1..80: mol_type = other DNA
tcaacgatgtaggcacccttcgaccaacagagtacactaaccatggcgcattcgggcagcagtctggtgcagtatacgtg

SEQ ID NO: 182934 - DNA, 80 bp, synthetic construct
  source 1..80: mol_type = other DNA
caaagaagacagtgactgagaggatccttgttttgcccctagaaatgagcaatacactatttgctacaactcttttaggt

SEQ ID NO: 182935 - DNA, 80 bp, synthetic construct
  source 1..80: mol_type = other DNA
gcgtgtgctgtggaacggcggcggcgaataaaagcggcgtgcgtgtgtctgtgtggagttgattccccgacgtgtgtctg

SEQ ID NO: 182936 - DNA, 80 bp, synthetic construct
  source 1..80: mol_type = other DNA
agggttttcgggtcacgcgaagaccgctcaccgggggtcggcaacgcacacatcaacagaaaaccgagacgaatcaagag

SEQ ID NO: 182937 - DNA, 80 bp, synthetic construct
  source 1..80: mol_type = other DNA
ggggccatctaaggcccacgtgtgacccatgtttccattaattttagcactcgcacctgcaagcgctatcaaacctgata

SEQ ID NO: 182938 - DNA, 80 bp, synthetic construct
  source 1..80: mol_type = other DNA
cacacaaataacagcaagcaaattcctaaaccacaaaacaggcatattctcacccatcttcttaagcagacagagactag

SEQ ID NO: 182939 - DNA, 80 bp, synthetic construct
  source 1..80: mol_type = other DNA
ctactgatgatctccaatctccatcagcgttaccttggtaccacccaacaaaggaaatctttatacctggtgaagtcaag

SEQ ID NO: 182940 - DNA, 80 bp, synthetic construct
  source 1..80: mol_type = other DNA
caacccctatcaaccacactcataggtgagattgctaattattatactcattggacaggttctcttagattctcttttat

SEQ ID NO: 182941 - DNA, 80 bp, synthetic construct
  source 1..80: mol_type = other DNA
gttataaccagaatagcaaattgctgataaataccactctagtgtatactccctgccaccagacccagaccattttgatg

SEQ ID NO: 182942 - DNA, 80 bp, synthetic construct
  source 1..80: mol_type = other DNA
caaattatcatacacgaactggggagaacaatggcacactagaagaaaagcactacatcaaaacacgcacagatattaaa

SEQ ID NO: 182943 - DNA, 80 bp, synthetic construct
  source 1..80: mol_type = other DNA
aaactccgacagattgcaagctgatgtgtttcgtgtcggcctgcaatgacttctcggtgcgtatgttgagagacacccct

SEQ ID NO: 182944 - DNA, 80 bp, synthetic construct
  source 1..80: mol_type = other DNA
taattgtacaggtatacagtcagaatccatggttggctgcaaatttaacatgacagggctaaaaagggatcagagaaagg

SEQ ID NO: 182945 - DNA, 80 bp, synthetic construct
  source 1..80: mol_type = other DNA
atacttaaaagcaacacaaaaagcctttccagcttatgccactctaaactcacctctatacgaataccatgggggctgct

SEQ ID NO: 182946 - DNA, 80 bp, synthetic construct
  source 1..80: mol_type = other DNA
acaggcactgcaggggtaaacggttaacatcacgtaagagagtcgagcgtccacctgtgggagctcagtttcgtaacgta

SEQ ID NO: 182947 - DNA, 80 bp, synthetic construct
  source 1..80: mol_type = other DNA
gaaggatcataatataaatcctattaacacacctgagaaatcaaagctgcaaccaagcatcttttatgacatctttccgg

SEQ ID NO: 182948 - DNA, 80 bp, synthetic construct
  source 1..80: mol_type = other DNA
cacctccagtcctagcatgcctgaactaagtccagtcctcggtcttcatcagggacaaggggctggggactcaccaactc

SEQ ID NO: 182949 - DNA, 80 bp, synthetic construct
  source 1..80: mol_type = other DNA
cacggggtgacgtcggggacgggggcctttcgcggcgaggacagtggtgaggacgagagactcttgcggcgaggacggtg

SEQ ID NO: 182950 - DNA, 80 bp, synthetic construct
  source 1..80: mol_type = other DNA
ttctattaccccaacatgagcatctcaccacaaaatgacacacaagatgaccccacatttgataccttatactccaaatg

SEQ ID NO: 182951 - DNA, 80 bp, synthetic construct
  source 1..80: mol_type = other DNA
acacgaagattaagacacatttccgggtaagcaccccatgaagctacacaataaagtataacacactgaaaaacggtgtt

SEQ ID NO: 182952 - DNA, 80 bp, synthetic construct
  source 1..80: mol_type = other DNA
tacgacctcttaaaacatgaatggtatgaaaaattttagatatagaaataatgaatgaatgattctttagttctataaaa

SEQ ID NO: 182953 - DNA, 80 bp, synthetic construct
  source 1..80: mol_type = other DNA
agatttgtaattatcacctggccactcaagaagatatggaacacgcagtagccgtgatgtgggaccgggacctcatggta

SEQ ID NO: 182954 - DNA, 80 bp, synthetic construct
  source 1..80: mol_type = other DNA
aacaattggttctgggaaaatgtcacgcataacaatgacttacattccacatatggcaaggcaacccttaaatgcatgga

SEQ ID NO: 182955 - DNA, 80 bp, synthetic construct
  source 1..80: mol_type = other DNA
gtctccatgctggttcttggggcactcttctcttcctcccctccctcccctctcagggtgccgccctccttgacctttcc

SEQ ID NO: 182956 - DNA, 80 bp, synthetic construct
  source 1..80: mol_type = other DNA
aagcacatcaacatttaataaaaacacatttatagagaaatatttaatagcaaacatgtcaagttaccataaaaaattta

SEQ ID NO: 182957 - DNA, 80 bp, synthetic construct
  source 1..80: mol_type = other DNA
ttaagagatcctcgtgtaaaacatctggtgtccgggggataatggagtcaacatccaggcttgggcacatctgcttcaac

SEQ ID NO: 182958 - DNA, 80 bp, synthetic construct
  source 1..80: mol_type = other DNA
ctgcccccacccaatcttgaagactccgaggccttgacggaattcaagaccagcgtgtcctctgcccgtgccatccttga

SEQ ID NO: 182959 - DNA, 80 bp, synthetic construct
  source 1..80: mol_type = other DNA
cgggtgccggtcggggtgcgtgtagccaaagaggctcgcccatacggtcatccagacgcgtcgtagtccgcgacataatt

SEQ ID NO: 182960 - DNA, 80 bp, synthetic construct
  source 1..80: mol_type = other DNA
tagaaaaattgttaaaggcattaattaaaattatctcagccatggttatagtaatcagaaattcggacgatttggttaca

SEQ ID NO: 182961 - DNA, 80 bp, synthetic construct
  source 1..80: mol_type = other DNA
gtagacttggctggcctcatggtctcgtcaggccagctcacgggcttcaggcttatatgataaaatgggcgtggcagaat

SEQ ID NO: 182962 - DNA, 80 bp, synthetic construct
  source 1..80: mol_type = other DNA
ccacaacccaacagcagtccacagcccccaatcctgatacaccactactaacacaccagatcatgtacgtaccaccgggg

SEQ ID NO: 182963 - DNA, 80 bp, synthetic construct
  source 1..80: mol_type = other DNA
agtcaccaaaaaccgcatggcaaacaaaagccaaaacaacgccaaactaaacaaaaatcattaaaaagcgtattgttgca

SEQ ID NO: 182964 - DNA, 80 bp, synthetic construct
  source 1..80: mol_type = other DNA
ataaatcagaaaagttcacaaaaatgacatgggataatttaacatttttgaaaagatattttagaccagatgaacagttc

SEQ ID NO: 182965 - DNA, 80 bp, synthetic construct
  source 1..80: mol_type = other DNA
ttccctgttgtacaaatcatcttttgatacacaatgatgacctgatatccctccatatatatgatcggatattattccgt

SEQ ID NO: 182966 - DNA, 80 bp, synthetic construct
  source 1..80: mol_type = other DNA
actcaaaatgatttgattagggttgaaccaattggtgtttggatacaaggtgagccagggcaaggtaagtctttcctcac

SEQ ID NO: 182967 - DNA, 80 bp, synthetic construct
  source 1..80: mol_type = other DNA
tatggtgacaattgtacagtatacatttgttaccatgggtgcccaagtttctaaacaaagtgttggagcgcatgaaacca

SEQ ID NO: 182968 - DNA, 80 bp, synthetic construct
  source 1..80: mol_type = other DNA
atatacaacctagcaatggtaatacatctaattcagcaccagctcttgatgcagctgaaactggacatactagtagtgtt

SEQ ID NO: 182969 - DNA, 80 bp, synthetic construct
  source 1..80: mol_type = other DNA
tactaatgccatgggtaccttgtgtgtgcgcgtggtcacagaacaacaaaagaacacagtcaatataacaagcagaatat

SEQ ID NO: 182970 - DNA, 80 bp, synthetic construct
  source 1..80: mol_type = other DNA
tacccacctgcgactgcaccacaggcacttattactgcaagagcagggacagatactacccaatcaacctaacacaccat

SEQ ID NO: 182971 - DNA, 80 bp, synthetic construct
  source 1..80: mol_type = other DNA
acctgtttaaagccaatccaaactatgccggtaactccattaaaccgaccggcactagtcgtactgccatcactactctt

SEQ ID NO: 182972 - DNA, 80 bp, synthetic construct
  source 1..80: mol_type = other DNA
ccaaggtgtgatttccgattatttcacacaactaggaaatgccttcggggaaggattcactacaaacattcaaaaccact

SEQ ID NO: 182973 - DNA, 80 bp, synthetic construct
  source 1..80: mol_type = other DNA
gattccgtgacgtcacgaccgccattttaagtaagcgccacccaggactgacgtcagtgtcaaaggtcatcctcgggcgg

SEQ ID NO: 182974 - DNA, 80 bp, synthetic construct
  source 1..80: mol_type = other DNA
cctccctcccgtcccgggcgaccccgccgatccgcctaacccaggcccgcaatggcctggggctggtggcgacgccggcg

SEQ ID NO: 182975 - DNA, 80 bp, synthetic construct
  source 1..80: mol_type = other DNA
tcatccctcattcatgctacaggccaaacgcagagtcaaaatatacagctggaaaaccagaccctggggtcccaaaaaag

SEQ ID NO: 182976 - DNA, 80 bp, synthetic construct
  source 1..80: mol_type = other DNA
caaacaaaatgttggctctcatgagagtggcatttcagcatcatcaggatcggttattaagtattttaatatcaactact

SEQ ID NO: 182977 - DNA, 80 bp, synthetic construct
  source 1..80: mol_type = other DNA
tcatcctctccgcggtttgtaatacgagattgcaaacgtaaataaatgacataacttcactaacacgcatactacaaagt

SEQ ID NO: 182978 - DNA, 80 bp, synthetic construct
  source 1..80: mol_type = other DNA
cagtgtcaggcccctttgcccctaaacagaacgtccctagcgcccaacttagcctaaaatacaaattcagatttaactgg

SEQ ID NO: 182979 - DNA, 80 bp, synthetic construct
  source 1..80: mol_type = other DNA
tccacgttggcaacttgatttatagaaaccttcatctctttaactcagaaatacatgatacagtgctggtgtcatattcc

SEQ ID NO: 182980 - DNA, 80 bp, synthetic construct
  source 1..80: mol_type = other DNA
ccccaacagaggctttgtaccatactcttttaactttggagagggcaagatgcccggaggctcctccaaagtacccataa

SEQ ID NO: 182981 - DNA, 80 bp, synthetic construct
  source 1..80: mol_type = other DNA
ttaaactgacgttcacgtactgcggtgcagctatgaccactgggaaatttctgatcgcgtattccccccctggtgctggc

SEQ ID NO: 182982 - DNA, 80 bp, synthetic construct
  source 1..80: mol_type = other DNA
cacaaagagagaaactacttactagcatatcaaactacattcccttttataataccacacaaactatagcccaattgaag

SEQ ID NO: 182983 - DNA, 80 bp, synthetic construct
  source 1..80: mol_type = other DNA
ccctagccgtcctgtccaagtgctatgaccatgcccagactcatctcaagggaggagtgctgcaggtaaaccttctgtct

SEQ ID NO: 182984 - DNA, 80 bp, synthetic construct
  source 1..80: mol_type = other DNA
ctgtttctcagtcgtcaggtgaccaagctcctccatcttgaccgtggccatcagcatggcggccaagcgctccagcccgt

SEQ ID NO: 182985 - DNA, 80 bp, synthetic construct
  source 1..80: mol_type = other DNA
tctacaccccaccttactcattgttgtacaggcagtggatagatcaattcatataaacaagcaatataatacaatgtttg

SEQ ID NO: 182986 - DNA, 80 bp, synthetic construct
  source 1..80: mol_type = other DNA
ttctgtttccccggttgcgccctatatgctgtgtgaacggcagaaaggggcaaaatcgttatccgcttgattactgcggg

SEQ ID NO: 182987 - DNA, 80 bp, synthetic construct
  source 1..80: mol_type = other DNA
gaaagccacagactttatagctgtctatgacatctctgccccgtacaaactagacaaatacagctctccaagctaccacc

SEQ ID NO: 182988 - DNA, 80 bp, synthetic construct
  source 1..80: mol_type = other DNA
gcggcgccgtgcgtctcaatgccacggcttttcgcgagcgaccggccggcggcgatcgtcgctggctgttgccgccgctg

SEQ ID NO: 182989 - DNA, 80 bp, synthetic construct
  source 1..80: mol_type = other DNA
gaccttgtccttccccaaagtgatgcaccacctccagttaccccgtccacttccttcactgctccaactcctgagggccc

SEQ ID NO: 182990 - DNA, 80 bp, synthetic construct
  source 1..80: mol_type = other DNA
gaattttaagccgactgcagtcacgactgaccggaaggacatcaatgacgtgggcaccttgagaccatcaggatactcga

SEQ ID NO: 182991 - DNA, 80 bp, synthetic construct
  source 1..80: mol_type = other DNA
tctatgtgaccatgaaaatttaaatgactcagttctaatacgttattcaagtgatttagtcatataccgaacaaacacgg

SEQ ID NO: 182992 - DNA, 80 bp, synthetic construct
  source 1..80: mol_type = other DNA
acctaggtatggtggaatttatacatcaaacatcaaaataatgaactatcacttgatgacaccagaggaccatcacaatc

SEQ ID NO: 182993 - DNA, 80 bp, synthetic construct
  source 1..80: mol_type = other DNA
ttgctgccaccacaccagtctcattaaaccgtactgtacataacaccgtatccacactgtttccgttagaatctcccccg

SEQ ID NO: 182994 - DNA, 80 bp, synthetic construct
  source 1..80: mol_type = other DNA
ggaaggagctaggagatgattgtgtaaataaaagaagaagcctaaaggcattttgatccccgcttgctaattgctcttga

SEQ ID NO: 182995 - DNA, 80 bp, synthetic construct
  source 1..80: mol_type = other DNA
taataattgggctgaaaaccaattcaaaacaggacagttagttaagtacaactttccccaatatgctcctaacatagaca

SEQ ID NO: 182996 - DNA, 80 bp, synthetic construct
  source 1..80: mol_type = other DNA
aagtgtacgtgatgaacatgcagacgatgggcacgagcacggtgagaaagaagctgtagttctcgacgcaaaagttgcgg

SEQ ID NO: 182997 - DNA, 80 bp, synthetic construct
  source 1..80: mol_type = other DNA
tgtatttaatgccacacaatgcaagtgccacatacaagacttacccctctgggcagcatttcatgggtacattgactttg

SEQ ID NO: 182998 - DNA, 80 bp, synthetic construct
  source 1..80: mol_type = other DNA
cagggaacgcaaccacaaccgcaccaacaaccacaccagagattaatgagacaactgagataagtgagaacacttcatgc

SEQ ID NO: 182999 - DNA, 80 bp, synthetic construct
  source 1..80: mol_type = other DNA
agattctagaggagtgcaaaaagatcagcttgtaccaagagcaagtaaacggttacccgcaagcaagtgaggacgcccaa

SEQ ID NO: 183000 - DNA, 80 bp, synthetic construct
  source 1..80: mol_type = other DNA
aaaaagaagagacaacggtccaggagcagctcaaacagcagctgcagcagcagcgactcctgggagacaaactcagagtc

SEQ ID NO: 183001 - DNA, 80 bp, synthetic construct
  source 1..80: mol_type = other DNA
tcccagcaactcagagaccagctgcacaagcagcggctcatgggagagcaactccgatcgctcctctaccaaatgcagag

SEQ ID NO: 183002 - DNA, 80 bp, synthetic construct
  source 1..80: mol_type = other DNA
caaccaacatgtatactgttcaggtagggcaacaaacaaaagtggctcaggaggttttttccatattagtggatgtggca

SEQ ID NO: 183003 - DNA, 80 bp, synthetic construct
  source 1..80: mol_type = other DNA
ctaaatacgaccccaggaccaagctcagctcgcagcatgacaagatcctggaactctacaccgactctgttactgcctct

SEQ ID NO: 183004 - DNA, 80 bp, synthetic construct
  source 1..80: mol_type = other DNA
tcagatggatggttgaaaaaatttactgagatgtgcaatgcagccagaggactcgaatggattggaaacaaaatctcaaa

SEQ ID NO: 183005 - DNA, 80 bp, synthetic construct
  source 1..80: mol_type = other DNA
caaggtgataaacaatgctttgcagctctcgcaacctactcgaccagttacagcatcagacacacccagctcaagtggag

SEQ ID NO: 183006 - DNA, 80 bp, synthetic construct
  source 1..80: mol_type = other DNA
gactgcctcacaaaataatgcctcagagtccattttctctataagcttgagcccagcagctgacaggaggctggcatata

SEQ ID NO: 183007 - DNA, 80 bp, synthetic construct
  source 1..80: mol_type = other DNA
gagatggaggcgccgcggacgccgcagacgagtaccgagaagaagatatcgacgacctcttcgccgctatcgaaagagat

SEQ ID NO: 183008 - DNA, 80 bp, synthetic construct
  source 1..80: mol_type = other DNA
atggcgtgtggtaggaatcaactgcttgttgccattttaatagctagtgctggcttagtatattgtgcctcagttagtca

SEQ ID NO: 183009 - DNA, 80 bp, synthetic construct
  source 1..80: mol_type = other DNA
aggtttggttttgatttggatatttgtttacacagtacttacacaaagaatggaaagttaaatgctgcaatggcaacaag

SEQ ID NO: 183010 - DNA, 80 bp, synthetic construct
  source 1..80: mol_type = other DNA
tgtcaagagaggttgaagctttaaagaaccatttgatcggctcagaaagcgctgtggagaagatcctcaagaacttagtg

SEQ ID NO: 183011 - DNA, 80 bp, synthetic construct
  source 1..80: mol_type = other DNA
tggaagaggccacagtgccgattcagaaagtaaacggcatctttgaggccctgaaagccccgcaccaggggctcaatact

SEQ ID NO: 183012 - DNA, 80 bp, synthetic construct
  source 1..80: mol_type = other DNA
tatatgataaaatataccaaacaccctgctattattcaggtctggctgtgggcatcaacccatacaaagattggcatttc

SEQ ID NO: 183013 - DNA, 80 bp, synthetic construct
  source 1..80: mol_type = other DNA
atcttacaactgctatcatggagacaattaagggtattgcagatatggcgactggaatcaccaagactattgattcaaca

SEQ ID NO: 183014 - DNA, 80 bp, synthetic construct
  source 1..80: mol_type = other DNA
agtattgtgaagacaacaaatggatattacctgcagattgcaagatagagagagacctaaatcttgctaacagtataata

SEQ ID NO: 183015 - DNA, 80 bp, synthetic construct
  source 1..80: mol_type = other DNA
ggaggcttcccggtaatttcccacagcgtccaccatatatctttctgcctctcccgttagaattaggcaaggatcatacg

SEQ ID NO: 183016 - DNA, 80 bp, synthetic construct
  source 1..80: mol_type = other DNA
agctgtaattaaacaaggtttgcccaccttgaccacccctgggtctggccaatttctcactacagatgacaggcaatcac

SEQ ID NO: 183017 - DNA, 80 bp, synthetic construct
  source 1..80: mol_type = other DNA
gacctcgcagcatacaagcggttgacccgaaacacgtcacgccagccatcacgtggcacagctgggacatccggagaggc

SEQ ID NO: 183018 - DNA, 80 bp, synthetic construct
  source 1..80: mol_type = other DNA
ggccctcgcgggcctacgtaggcgcgtttttatgacgtcacggcagccatattggttgtgacgttactctcacgtgatgg

SEQ ID NO: 183019 - DNA, 80 bp, synthetic construct
  source 1..80: mol_type = other DNA
aaacactggtgaaaataagggtgtttcacagagctaagcatataagagcctggataccaagaccacccagagcactgcca

SEQ ID NO: 183020 - DNA, 80 bp, synthetic construct
  source 1..80: mol_type = other DNA
aagaagaagcgacgatacaagagcagctacaaaaacaactcctccagcagcgactcatgggagacaaactccgagtcgtc

SEQ ID NO: 183021 - DNA, 80 bp, synthetic construct
  source 1..80: mol_type = other DNA
ccggagaaaagaggaagaagaagtccctggggacgcgcagacccactcccggtggtgagggacggcggccagacgcggaa

SEQ ID NO: 183022 - DNA, 80 bp, synthetic construct
  source 1..80: mol_type = other DNA
gggaataggagctgcatattcgcacttctatgatggtttctctcaggtcccatttgatgcaattagcgctggtgccacaa

SEQ ID NO: 183023 - DNA, 80 bp, synthetic construct
  source 1..80: mol_type = other DNA
aaaagctagttctcacccagtggaaccctcagactattagagcatgttctataagaggcacagtatgcctagtaatgtgt

SEQ ID NO: 183024 - DNA, 80 bp, synthetic construct
  source 1..80: mol_type = other DNA
cttgtccagctcgtccggcgttttcaggaggaggctgtcgtcgtcggtactggcgacgcccatcatggtcgtggtggtag

SEQ ID NO: 183025 - DNA, 80 bp, synthetic construct
  source 1..80: mol_type = other DNA
cgaaagaaaataagactgactcagtggaacccagctaaagtcaggagatgtactattaagggggtactgcccatgatatt

SEQ ID NO: 183026 - DNA, 80 bp, synthetic construct
  source 1..80: mol_type = other DNA
gggggggggtcggggtccgcgggctccggaggctgcgggcggtggacgccggcgagcgttcagggggtggggaggtcggg

SEQ ID NO: 183027 - DNA, 80 bp, synthetic construct
  source 1..80: mol_type = other DNA
caagtatcatcccaaaaagtaggcgctcacgagaattctaaccgagcctacggtggttctacgatcaactacaccacaat

SEQ ID NO: 183028 - DNA, 80 bp, synthetic construct
  source 1..80: mol_type = other DNA
ctgatgaaaggttgtcctataccatgttaggagagattctaaattattacactcactgggccggatccataaaatacacg

SEQ ID NO: 183029 - DNA, 80 bp, synthetic construct
  source 1..80: mol_type = other DNA
gaacctaacaaaaggtgaagccgcacacaagtttgaaccaactaagaccacgggagagcatacagtgcaatcgatagttt

SEQ ID NO: 183030 - DNA, 80 bp, synthetic construct
  source 1..80: mol_type = other DNA
gtagtactcttgtactccggtacacttgtacgccagttttccctccctacccccccttgggtaacttttagaagcatttg

SEQ ID NO: 183031 - DNA, 80 bp, synthetic construct
  source 1..80: mol_type = other DNA
gacagtccaggtattttgctgccgttagatgtggatttcacttccaagttcaaattaacgtcaaccaaggaactgcagga

SEQ ID NO: 183032 - DNA, 80 bp, synthetic construct
  source 1..80: mol_type = other DNA
ggcaattcgggctcgggactggccgggctatgggcaaggctcttaaaaaatttccccgttctgttcttaaacaggatata

SEQ ID NO: 183033 - DNA, 80 bp, synthetic construct
  source 1..80: mol_type = other DNA
tctgttctatgaccctgggtttttcagatgccgttgaacgtgtcactgagctgaatttggacgcagctacttgacctttg

SEQ ID NO: 183034 - DNA, 80 bp, synthetic construct
  source 1..80: mol_type = other DNA
acagaacccgcgtcgccgggcacggcagcggtagagatgatagcggcgttaggtgacacggcaacgctattcgtttcggg

SEQ ID NO: 183035 - DNA, 80 bp, synthetic construct
  source 1..80: mol_type = other DNA
acaccaccagacaagtcacccaaatttacaaaaatggactggaatactgtaactttcttaaaaagacactttaaaccaga

SEQ ID NO: 183036 - DNA, 80 bp, synthetic construct
  source 1..80: mol_type = other DNA
tccactacccaagaagcgtgatgattacacgtggcaatctggtactaatgcctcagtcttttggcaggagggccaacctt

SEQ ID NO: 183037 - DNA, 80 bp, synthetic construct
  source 1..80: mol_type = other DNA
gcggcggcccgctaacgaacaccgcgggacgacacgcaccggcagtgcgcacaaagcgccggacacagcacgccaaaaac

SEQ ID NO: 183038 - DNA, 80 bp, synthetic construct
  source 1..80: mol_type = other DNA
ccctccgtatccctggagaagtttccaacttgatggaaatagcagaggtggactcagttgttccagtgaataacctagca

SEQ ID NO: 183039 - DNA, 80 bp, synthetic construct
  source 1..80: mol_type = other DNA
aaggtctccaacacggtggtcaagtgtctgactgatcagataaacgagcaatttgaccagattaatggcctagagaagga

SEQ ID NO: 183040 - DNA, 80 bp, synthetic construct
  source 1..80: mol_type = other DNA
acaataaatggtacaattggcaatacacatacaataaacttatgaaaccaatttactatgcagcctcaaatgaaactggt

SEQ ID NO: 183041 - DNA, 80 bp, synthetic construct
  source 1..80: mol_type = other DNA
cagggtgttcatgtttgaaccccagggtcccaggcctataactaccagagaggtgtgggaggacgagtacagcactgccg

SEQ ID NO: 183042 - DNA, 80 bp, synthetic construct
  source 1..80: mol_type = other DNA
tgatatcagtgctccctacaaactagacaaagacagcagtcccagctaccatccaggcatgctcatgcaaaccagacaca

SEQ ID NO: 183043 - DNA, 80 bp, synthetic construct
  source 1..80: mol_type = other DNA
agatgacctcgtcttgccacgcgtcgaagcgatcgcagcagcgctggatccaagcgcagcgaagcagcttacggaacacg

SEQ ID NO: 183044 - DNA, 80 bp, synthetic construct
  source 1..80: mol_type = other DNA
acatagacagtgccatatcatcgcttgaagcctaccggatccctgtgaacacgggcagtcactctggtgatggcgcgata

SEQ ID NO: 183045 - DNA, 80 bp, synthetic construct
  source 1..80: mol_type = other DNA
tctctggcatggtgcgcactgacgtcacacgccaaggtgggaacgctgatgcccccgctccttctgcagctcctctcccc

SEQ ID NO: 183046 - DNA, 80 bp, synthetic construct
  source 1..80: mol_type = other DNA
agcatgagctcgttgaacagcaccgtacgccggtgcaggcgtttttcgccacattttttcaggatcttggggtgtgcctc

SEQ ID NO: 183047 - DNA, 80 bp, synthetic construct
  source 1..80: mol_type = other DNA
tcctgaaggcacagctattgaaaatgattcaaatacctcaggtaaaactacttggaaccctaattctacacagtgggacg

SEQ ID NO: 183048 - DNA, 80 bp, synthetic construct
  source 1..80: mol_type = other DNA
tcctaggccacccagggctgtagactacacacatagattctccccaaattatcatgtcccaacacaagctaatgatggaa

SEQ ID NO: 183049 - DNA, 80 bp, synthetic construct
  source 1..80: mol_type = other DNA
tagatttctgtagcaaattaaaacagcttgatatgttggaacgacaaataaccacaatgcatgtgtccaaccccacacag

SEQ ID NO: 183050 - DNA, 80 bp, synthetic construct
  source 1..80: mol_type = other DNA
aggcatcaacccacccgcaaagaaacaaggggatagttggttgaaaaagtttaccgaatggtgcaatgcagccaagggcc

SEQ ID NO: 183051 - DNA, 80 bp, synthetic construct
  source 1..80: mol_type = other DNA
aagagtagattgattgaagcctctagtttgaatgattcagtaaacatgaggatgaaattaggacacttgtacaaaacttt

SEQ ID NO: 183052 - DNA, 80 bp, synthetic construct
  source 1..80: mol_type = other DNA
agatttacctttctcttctgtggtagtatgatggcaactggcaaattactccttagctactctccacctggagcaaaagc

SEQ ID NO: 183053 - DNA, 80 bp, synthetic construct
  source 1..80: mol_type = other DNA
gtgggtgccacggccaccacggttgtgtccgtacatcaagtccagtaatgtaaactttaacccgaccaacttgacggact

SEQ ID NO: 183054 - DNA, 80 bp, synthetic construct
  source 1..80: mol_type = other DNA
cagtgtcaattagccccatgttttcagaattctcaggaccaagaaataaagtcacatttggtactactgaaggcttacca

SEQ ID NO: 183055 - DNA, 80 bp, synthetic construct
  source 1..80: mol_type = other DNA
aaaaagaaagatattctgaataaagtcaccaaagatgttacaaaacttgaggcatgtttagaaaagtatgggttagattt

SEQ ID NO: 183056 - DNA, 80 bp, synthetic construct
  source 1..80: mol_type = other DNA
cattgaagccaggaaaggatggaccaaaactgaggcaatggcccttaaccaaagaaaagatagaggcactaaaagaaatc

SEQ ID NO: 183057 - DNA, 80 bp, synthetic construct
  source 1..80: mol_type = other DNA
gctttgtcgggactggtggcctttgcggagccgggctgcgggacggggctgttggcgcgcccaggacggagctgttagcg

SEQ ID NO: 183058 - DNA, 80 bp, synthetic construct
  source 1..80: mol_type = other DNA
gcaccagtatcaaccacgtgccgaccccaccgcacagtaacagtgtgcacttgcgcctgagcaaccacggcgcgtttgga

SEQ ID NO: 183059 - DNA, 80 bp, synthetic construct
  source 1..80: mol_type = other DNA
ctatatggcaaatgcacacactatcaaacatttgcaacggacacacgtttagcccctcaaacaacctctaaatataaacc

SEQ ID NO: 183060 - DNA, 80 bp, synthetic construct
  source 1..80: mol_type = other DNA
taaagattttgttgacaaaataagatcaaccagcattggtaagtgtctactgatacctgaatacagtgtcttacgccggc

SEQ ID NO: 183061 - DNA, 80 bp, synthetic construct
  source 1..80: mol_type = other DNA
tacacaggtggggcggcagcctctaactttggctgtggcctctatttcctccctttcctagccagggccatgtgttcctg

SEQ ID NO: 183062 - DNA, 80 bp, synthetic construct
  source 1..80: mol_type = other DNA
actgactcagtggaacccggcagtagttaagaggtgcaacattaagggcggacttccaataatcatatgcggagagccca

SEQ ID NO: 183063 - DNA, 80 bp, synthetic construct
  source 1..80: mol_type = other DNA
cctgttacagaaccctgtagaacagtttgtagataatgttctagaagaagttctagttgtgcccaatacccagccaagtg

SEQ ID NO: 183064 - DNA, 80 bp, synthetic construct
  source 1..80: mol_type = other DNA
cctagaagccctggatctcactaccagtgccggctacccgtatgtgaccatggggaagagaaagagggagatcttgaaca

SEQ ID NO: 183065 - DNA, 80 bp, synthetic construct
  source 1..80: mol_type = other DNA
aagggccctatgggaggccctcaggagagcagcgagagcaatcatcgcgatccccacaaggatcagacaaggtgctgaac

SEQ ID NO: 183066 - DNA, 80 bp, synthetic construct
  source 1..80: mol_type = other DNA
aattccccgaggctttaaaaaatatgggattgtttggacagaacatgtattatcactatctcggaagggctggatacaca

SEQ ID NO: 183067 - DNA, 80 bp, synthetic construct
  source 1..80: mol_type = other DNA
ctccatcaagtccctgatgttctctatcgtcaactgcgccgtcaaggccggcagccccttcatccttttgaaggaggcct

SEQ ID NO: 183068 - DNA, 80 bp, synthetic construct
  source 1..80: mol_type = other DNA
aacaccagtaccattaaaccgtacagtacataacaccgtatcgccactgtcgtcactagaaccacctccgatctttttcc

SEQ ID NO: 183069 - DNA, 80 bp, synthetic construct
  source 1..80: mol_type = other DNA
ttgatttggacaagttgaaaattgtggcttatggtgatgatgttattgcatcgtatcccgaagcacttgatccagctgaa

SEQ ID NO: 183070 - DNA, 80 bp, synthetic construct
  source 1..80: mol_type = other DNA
tttgaaacaacacaagtactagcccaatcagagtctacgtcgtccatttcctgggcatggtccacatcctgatataaagc

SEQ ID NO: 183071 - DNA, 80 bp, synthetic construct
  source 1..80: mol_type = other DNA
gagttccgggtcgggcacatccatggctcgccgtctccttctttgccgctcgtggtgccgacggcacttctcgggataat

SEQ ID NO: 183072 - DNA, 80 bp, synthetic construct
  source 1..80: mol_type = other DNA
tactccagcatttttctagcaagcggcagatcaaactgggaggtaaaaggcagctacacagacattacatacaatcccct

SEQ ID NO: 183073 - DNA, 80 bp, synthetic construct
  source 1..80: mol_type = other DNA
ccgcgcacagaagcaggcagtgaaagtagtgacgaagcagaagccgcagcatattatttcccgtgacgcaggctagttgg

SEQ ID NO: 183074 - DNA, 80 bp, synthetic construct
  source 1..80: mol_type = other DNA
agcaacaaggttggatagttgaggcaccctctaattccatcacaatagagaggcacatttcaaaagctgcgactattctg

SEQ ID NO: 183075 - DNA, 80 bp, synthetic construct
  source 1..80: mol_type = other DNA
aagcccaaacacatcaaggcttgggttcccagaccacctcgcactatgccatacatgtccatagcaaacacaaactacac

SEQ ID NO: 183076 - DNA, 80 bp, synthetic construct
  source 1..80: mol_type = other DNA
acttaagttagtcctggcaaacctttcatttagaactgatttgatagacagattgtgtaagtcaaagcacatattcaaag

SEQ ID NO: 183077 - DNA, 80 bp, synthetic construct
  source 1..80: mol_type = other DNA
agatgtccctaaccgggagagagcttggttcaacagcatttggcagtctcacagatctttttgtggttgcgctgatccta

SEQ ID NO: 183078 - DNA, 80 bp, synthetic construct
  source 1..80: mol_type = other DNA
aaatgtggatttggacaaacttaagataatagcctatggagatgatgtagttatttcataccctgatcctctagatccag

SEQ ID NO: 183079 - DNA, 80 bp, synthetic construct
  source 1..80: mol_type = other DNA
gtgacagcgcgtcacagccgccattttgtttaacaaaatggcggctgtgacgcgctgtcacgtgataaatgacgtagcgg

SEQ ID NO: 183080 - DNA, 80 bp, synthetic construct
  source 1..80: mol_type = other DNA
ctccggctcctccagagccacctcctcaaaacgcaagcgggtctccacctaaaccccttattatttatccagcagtaaac

SEQ ID NO: 183081 - DNA, 80 bp, synthetic construct
  source 1..80: mol_type = other DNA
tcaactacgccgcaagtgtgaaatgtttacatatctacgctttgatgtagaggttacgtttgtaataaccagttatcagc

SEQ ID NO: 183082 - DNA, 80 bp, synthetic construct
  source 1..80: mol_type = other DNA
agtagactttatagtaaagtttaacaggaaccctccattcacagactctgtactaacaggtcctatgttacatcccgggg

SEQ ID NO: 183083 - DNA, 80 bp, synthetic construct
  source 1..80: mol_type = other DNA
cccttgaatccttctttggtaggtcagcctgtgtcactattttacaagttgaaaactttaatgccacgactagtgatgag

SEQ ID NO: 183084 - DNA, 80 bp, synthetic construct
  source 1..80: mol_type = other DNA
cacagaatcctgtcgaggagtacattgatgagaccctcaaggaggtgcttgttgtgccaaataccaaaccaacaggtccc

SEQ ID NO: 183085 - DNA, 80 bp, synthetic construct
  source 1..80: mol_type = other DNA
gtggacgctcttaccaacccagctctgatgtcaccatctgttgaggcatgtggatactctgataggctcaagcaaatcac

SEQ ID NO: 183086 - DNA, 80 bp, synthetic construct
  source 1..80: mol_type = other DNA
gccagggtttgctttgctaagatgtaatgatactaactattcaggatttgcacctaattgctctaaagtagtggtctcta

SEQ ID NO: 183087 - DNA, 80 bp, synthetic construct
  source 1..80: mol_type = other DNA
ctcaaggccaagtcacccggcggaaattttatgattttaacaagcggaaacaaggaagcgcgccagtcaatagcccctct

SEQ ID NO: 183088 - DNA, 80 bp, synthetic construct
  source 1..80: mol_type = other DNA
atgacaaagcactgagtatacttaacacagctaacgtagtaacagaagaaatacatactaaaagacaagcatgctacagt

SEQ ID NO: 183089 - DNA, 80 bp, synthetic construct
  source 1..80: mol_type = other DNA
atgttctatgatggatggtctgagttcagacatgatggcgtttatggtttgaacactctcaacaacatgggtacaatata

SEQ ID NO: 183090 - DNA, 80 bp, synthetic construct
  source 1..80: mol_type = other DNA
acgaggacactaccacggttctggcgacattggctctcctcggctgtgactgctccccctggcagtggatcaagaagaag

SEQ ID NO: 183091 - DNA, 80 bp, synthetic construct
  source 1..80: mol_type = other DNA
attagactacaacaacacatggtacaaaggcaatgtatatacagaatcaattaaaaagattccacctaaagttagagcca

SEQ ID NO: 183092 - DNA, 80 bp, synthetic construct
  source 1..80: mol_type = other DNA
ggaagtcacttatgctgttagatccagaaaaacaattttcacagttggacccagtgacatgtatgtgcatgttgggaatc

SEQ ID NO: 183093 - DNA, 80 bp, synthetic construct
  source 1..80: mol_type = other DNA
ttacagaagcccagacacagactttatagtaacataccagagaaaatccccccttggaggcaacatactaacagctcctt

SEQ ID NO: 183094 - DNA, 80 bp, synthetic construct
  source 1..80: mol_type = other DNA
cattttcagaggaagaaagcgagccgtcctcgcaagaagagacgaggccggagaggctccagctcaagctccgacagcag

SEQ ID NO: 183095 - DNA, 80 bp, synthetic construct
  source 1..80: mol_type = other DNA
tattccatatgcaatgaaacagggcgactcctggatgaagaagttttcagatgcgtgtaacgcggccaagggccttgaat

SEQ ID NO: 183096 - DNA, 80 bp, synthetic construct
  source 1..80: mol_type = other DNA
ttttaatatgcggggagaatacctccggcagaaactttgccacccactcagacgacctcatatccaacggaccttacggg

SEQ ID NO: 183097 - DNA, 80 bp, synthetic construct
  source 1..80: mol_type = other DNA
caccacaacttctggggctacccaaacacccagctagacctggccagatacaggggctgcagcttcaccttctacagaca

SEQ ID NO: 183098 - DNA, 80 bp, synthetic construct
  source 1..80: mol_type = other DNA
tgcaaaacaaataacatttccccttaataacaacgaccctaaacacagagacaccctatacggaggcagtccatacacca

SEQ ID NO: 183099 - DNA, 80 bp, synthetic construct
  source 1..80: mol_type = other DNA
accagtcttaaactgctgattgcatacacaccaccaggggttggtaaaccacaaaatagaacacaagccatgctgggaac

SEQ ID NO: 183100 - DNA, 80 bp, synthetic construct
  source 1..80: mol_type = other DNA
tccactatgtgctcaattgtctaggtagtcttatcttgatattaggtactatctatgtcttatataaattaatgtgtttc

SEQ ID NO: 183101 - DNA, 80 bp, synthetic construct
  source 1..80: mol_type = other DNA
ctatggaggaagacaagaactggatagtggttccaacttggagggtgccagggaggatggagaaatggcatagccttgtc

SEQ ID NO: 183102 - DNA, 80 bp, synthetic construct
  source 1..80: mol_type = other DNA
tacgaaccacaccttgctacatcctccaactataacatgcactacagcaatgaacagaagatttttcctagatttagaca

SEQ ID NO: 183103 - DNA, 80 bp, synthetic construct
  source 1..80: mol_type = other DNA
caaagacaagtggcagcactgagttggaaccaaaacacttctttaagtacagacaagacatcacaagtatcactaacctg

SEQ ID NO: 183104 - DNA, 80 bp, synthetic construct
  source 1..80: mol_type = other DNA
caagtgaatttaaacaattggattacagtaatgtgactttcctaaaaagaggattcagacaagatgaaaaacaccatttc

SEQ ID NO: 183105 - DNA, 80 bp, synthetic construct
  source 1..80: mol_type = other DNA
ctaaacccaaacacacaaccgcctggattccccgtccacctagggccactcaatacttacacaaatttagcaccaattac

SEQ ID NO: 183106 - DNA, 80 bp, synthetic construct
  source 1..80: mol_type = other DNA
tcccatgataatctgtggacaaggacggtggtcagaaaactacagcagtcacttagaggaccgcgtagttaaacaagcct

SEQ ID NO: 183107 - DNA, 80 bp, synthetic construct
  source 1..80: mol_type = other DNA
actgtttgtagataagtggtactcccaagaggacctctgttccgttaatcttgtgtcacttgcggtttctgcggctgact

SEQ ID NO: 183108 - DNA, 80 bp, synthetic construct
  source 1..80: mol_type = other DNA
ttaagagcgtcgaatggggttcagagtcactagggtggtggtggaaattacctgactgccttaaggatatgggactattt

SEQ ID NO: 183109 - DNA, 80 bp, synthetic construct
  source 1..80: mol_type = other DNA
atatatggaatacatcaaaaatacatgccttatatacgtgggtagcagagacaaactacaaaagactgcaggcctactac

SEQ ID NO: 183110 - DNA, 80 bp, synthetic construct
  source 1..80: mol_type = other DNA
accaatggcactgaagatatacaattacagagcatctcaatatccttttcgtttatttacaaccaataaatctgattttt

SEQ ID NO: 183111 - DNA, 80 bp, synthetic construct
  source 1..80: mol_type = other DNA
gacacttttaagcaaccgaacccaactaacgcaactgctaataagtaccttaacgtctccagcctatggggagaccatgt

SEQ ID NO: 183112 - DNA, 80 bp, synthetic construct
  source 1..80: mol_type = other DNA
ctgtagactatgtatttacttactttgatgaacaacctaaaaatgtaagcaaatattactatgctacttttcatcctaca

SEQ ID NO: 183113 - DNA, 80 bp, synthetic construct
  source 1..80: mol_type = other DNA
aggcttagtatacatgcttcttgcttttcacaggaacctgggggctagtctgggtgggtttaggctgcctcaagttgcat

SEQ ID NO: 183114 - DNA, 80 bp, synthetic construct
  source 1..80: mol_type = other DNA
gtgccaggcacgaactgcgagaagaagctgttggccaccaggcggttgtcttccaccgccagcggacggaagggcgccgc

SEQ ID NO: 183115 - DNA, 80 bp, synthetic construct
  source 1..80: mol_type = other DNA
cagcgcaactggttcgagggggtcattcgcacccacgctgcttgctgtggttgtggcaatgcttgtgctcatctggctgc

SEQ ID NO: 183116 - DNA, 80 bp, synthetic construct
  source 1..80: mol_type = other DNA
aaacaccattcattcccaggttatcagaaacccgtgccccgacacccaagtttccggaccccgtcgacagcctagagaag

SEQ ID NO: 183117 - DNA, 80 bp, synthetic construct
  source 1..80: mol_type = other DNA
gggcaccctcagtagggagcggcggtaaccctcccatccgtcgagcccgccacccggcggccgctccggatcccccggca

SEQ ID NO: 183118 - DNA, 80 bp, synthetic construct
  source 1..80: mol_type = other DNA
cacaggaacatacttctgcaaaagcatggacaggtactacccagtagaattcagacaccatagctggtatgagatacagg

SEQ ID NO: 183119 - DNA, 80 bp, synthetic construct
  source 1..80: mol_type = other DNA
tggctgcgacgtttctaccgccgcttcctccggctgcagcgcaccgcggccgatcaccagctgcacatggaaatggtcct

SEQ ID NO: 183120 - DNA, 80 bp, synthetic construct
  source 1..80: mol_type = other DNA
aactgacgatatgcaatctccatctgcatttccatatttccacccaacaaaagagatatttatacctggagaagtaaaga

SEQ ID NO: 183121 - DNA, 80 bp, synthetic construct
  source 1..80: mol_type = other DNA
acaacagtaaaaacaaagaacacaacaacaacacaaactcagcccagcaagcccaccaccaagcagaggcaaaataaacc

SEQ ID NO: 183122 - DNA, 80 bp, synthetic construct
  source 1..80: mol_type = other DNA
atgaagcatctaatgcatcctttaaaggacaaacatacaattggaaaaactacaaaactaacttccaagcagtaaaaaca

SEQ ID NO: 183123 - DNA, 80 bp, synthetic construct
  source 1..80: mol_type = other DNA
tgctagcacaactctctcccaattttgctccagcttacaaaccacagacaagcggtaatgacacacaaaagaccttagga

SEQ ID NO: 183124 - DNA, 80 bp, synthetic construct
  source 1..80: mol_type = other DNA
tgacaaataaggcccccaggaaagacccccggggtggtgtcgggcccgcgcattcctggaaaaagtggaggtggcgtggc

SEQ ID NO: 183125 - DNA, 80 bp, synthetic construct
  source 1..80: mol_type = other DNA
ctcctggtgttgccaaacccaagtccaggaaagaagccatgcttggcactcatttggtgtgggatgttggtctacagtct

SEQ ID NO: 183126 - DNA, 80 bp, synthetic construct
  source 1..80: mol_type = other DNA
accttgtccctgatgtccgccgtacacctgcgcacgtgcagggccgcattcttggaccggacgggcacgttgtggacaaa

SEQ ID NO: 183127 - DNA, 80 bp, synthetic construct
  source 1..80: mol_type = other DNA
ataatactgatgcaaacttgcgaaacatcaataaatacactgttcaattaagtagtcaaactgatttagctaaagaaata

SEQ ID NO: 183128 - DNA, 80 bp, synthetic construct
  source 1..80: mol_type = other DNA
tgaagacgtaggcaggggaattcccatatttttatggcttcttttaaaagtctgtatccgactccatccggcgcttttcc

SEQ ID NO: 183129 - DNA, 80 bp, synthetic construct
  source 1..80: mol_type = other DNA
aatgcgttgtcacagaccttccactgtgggccctcctatacaactaccacgagttcgtgcaggaagagatgaatatagac

SEQ ID NO: 183130 - DNA, 80 bp, synthetic construct
  source 1..80: mol_type = other DNA
caaatactgtgcctattacagtatctattagtccaatgtgtgctgaattctctggagctcgggcaaaaagccagggatta

SEQ ID NO: 183131 - DNA, 80 bp, synthetic construct
  source 1..80: mol_type = other DNA
aaacttccaatctaaagaagtgcagatggtaaactggtgggcgggggtagaacactcattcggagtgccctacaacccac

SEQ ID NO: 183132 - DNA, 80 bp, synthetic construct
  source 1..80: mol_type = other DNA
aggaaaggcacatacgcagctccttgaccagcagcttgcagcgctcctgaatgcgcgccagacatttgcgctccagctcc

SEQ ID NO: 183133 - DNA, 80 bp, synthetic construct
  source 1..80: mol_type = other DNA
gcacgagctcaatgtttcgccttatcatccgctacttgtctcatcaccaatttgagcgctgcttcgagcagttctgccgc

SEQ ID NO: 183134 - DNA, 80 bp, synthetic construct
  source 1..80: mol_type = other DNA
cagtcggcttgtaaccccagtgtattctttaaaattgatgaccctccagctaggatgaccattccattcatgtgcataaa

SEQ ID NO: 183135 - DNA, 80 bp, synthetic construct
  source 1..80: mol_type = other DNA
gcgttggttgtctacaaacctaaaccagttgtggacaatgatagcaaattggaatttggttcttatactaacctaccaca

SEQ ID NO: 183136 - DNA, 80 bp, synthetic construct
  source 1..80: mol_type = other DNA
cgaactgattcctaccgtaatgttataccgcacacccagggtgccgtttacaaacacggaaatgtttccgttacaaacca

SEQ ID NO: 183137 - DNA, 80 bp, synthetic construct
  source 1..80: mol_type = other DNA
tactttgcattacttacagaagattgatttgtccccagatgtttatgacatccatttgagttccatatataatttgagtc

SEQ ID NO: 183138 - DNA, 80 bp, synthetic construct
  source 1..80: mol_type = other DNA
agtagcagcgtcctggcgaatccttcacgttcatatcacgcagcaccttgacgctggtttggttgatggtcacgcagctg

SEQ ID NO: 183139 - DNA, 80 bp, synthetic construct
  source 1..80: mol_type = other DNA
cctgtaacattagaagttttggaattttacggtacaataggaagcgccacatccagtggtgttgtgtacaagcacttctg

SEQ ID NO: 183140 - DNA, 80 bp, synthetic construct
  source 1..80: mol_type = other DNA
tttgttgatagtgtcaaggatcagataaatgccataaatccaattaataatataagtagaaagattgtaaaatggatcct

SEQ ID NO: 183141 - DNA, 80 bp, synthetic construct
  source 1..80: mol_type = other DNA
cccccactgcacgaccctgaccatccaaatacaggctttgtagtatatgacagtttatttggaaatggcaaatggctgga

SEQ ID NO: 183142 - DNA, 80 bp, synthetic construct
  source 1..80: mol_type = other DNA
ggcgacgaaaaaagctgtgtgttagctataaagtacattttcagatggaaatggggaggtaaccctgtgtctcaccagat

SEQ ID NO: 183143 - DNA, 80 bp, synthetic construct
  source 1..80: mol_type = other DNA
ctgggtgtggtaaatcacttgcatcaaagatcatagcaagaggcttgacttcagagagtaatgtgtactcacttccaccc

SEQ ID NO: 183144 - DNA, 80 bp, synthetic construct
  source 1..80: mol_type = other DNA
tgaccaaagtgagatatcattatatttaaaccaaccaacaacaactaacataggaaacacgttatccacaggccataact

SEQ ID NO: 183145 - DNA, 80 bp, synthetic construct
  source 1..80: mol_type = other DNA
ctattataaagccacagaacttgctataccagaagcagtaaaacccaccacagacttatttgagtaccacgcaggcatat

SEQ ID NO: 183146 - DNA, 80 bp, synthetic construct
  source 1..80: mol_type = other DNA
agcgactggttctttgagaagatcatgactcacatcaagaatcttctcgagtggcttggggtcctcgttaaagatgaccc

SEQ ID NO: 183147 - DNA, 80 bp, synthetic construct
  source 1..80: mol_type = other DNA
atacctggtgaagttcgcaatatgatggaaattgctgaggttgatagcatcatacccatgaatgccactagtattaatgt

SEQ ID NO: 183148 - DNA, 80 bp, synthetic construct
  source 1..80: mol_type = other DNA
agatagcagagaatggccacgatcagcacgagcatcacgccgatgatgggtaacccgacgttcagcggcagatcgtccat

SEQ ID NO: 183149 - DNA, 80 bp, synthetic construct
  source 1..80: mol_type = other DNA
ccaaatatcagagaaagtcacccaagcacctctaattctgccccaattcttgatgcagctgagactggtcataccagtgg

SEQ ID NO: 183150 - DNA, 80 bp, synthetic construct
  source 1..80: mol_type = other DNA
atacgggctatgctggtgatgctggattactactggatacagttgataacgaacaatggcactcgaagcaacaataccga

SEQ ID NO: 183151 - DNA, 80 bp, synthetic construct
  source 1..80: mol_type = other DNA
acaagtataggcgtgtcgggattaactcaacatctggttataaagccctagaactgtactctataatagaaagatactac

SEQ ID NO: 183152 - DNA, 80 bp, synthetic construct
  source 1..80: mol_type = other DNA
tgggatacagtcactttcctgaaaaggaagtttaaagttgatgatgaatttaaatttctgatacacccagtctacagtat

SEQ ID NO: 183153 - DNA, 80 bp, synthetic construct
  source 1..80: mol_type = other DNA
ccatgagccgctggaggcatgggagcagggctcggatgtagaagctccaccgctaccggagaagagcccatgtccggaac

SEQ ID NO: 183154 - DNA, 80 bp, synthetic construct
  source 1..80: mol_type = other DNA
gggcttagaatggttaggcaataagatatcaaaattcattgactggctcaagtcaatgttacctcaggcaaggttgaaaa

SEQ ID NO: 183155 - DNA, 80 bp, synthetic construct
  source 1..80: mol_type = other DNA
cgcgtcccgagagcgggtgccgtaggtgagtttacacaccgcagtcaaggagcaattcgggctcgggactggccgggccc

SEQ ID NO: 183156 - DNA, 80 bp, synthetic construct
  source 1..80: mol_type = other DNA
tgtacgacctgtacacaaagcacatgaacagatggacgttctcaaacgaccagctagacctggccagatacaggggctgc

SEQ ID NO: 183157 - DNA, 80 bp, synthetic construct
  source 1..80: mol_type = other DNA
gtttgctacttggaaaaaagctttcactgatactagagacagctccttcctatttgccacctatcacccagacaaaatta

SEQ ID NO: 183158 - DNA, 80 bp, synthetic construct
  source 1..80: mol_type = other DNA
ttcacgggtacctttacaccagataataatcaaacaacgcccgcccgtaaattctgccctgtggattacctctttggaaa

SEQ ID NO: 183159 - DNA, 80 bp, synthetic construct
  source 1..80: mol_type = other DNA
tccagctccagcagcagcgacaacagcagcgactcctcgcaaagggaatcaagcacctcctcggagatgtcctccgactc

SEQ ID NO: 183160 - DNA, 80 bp, synthetic construct
  source 1..80: mol_type = other DNA
gtatggggcaatatccagttgaacaacactggttactacaaatggaaaataaattttcaagaacaggcacacatacgcaa

SEQ ID NO: 183161 - DNA, 80 bp, synthetic construct
  source 1..80: mol_type = other DNA
tccctataacaatcaccatagcacccatggatgctgaatacaacgggctacgcctaggtgggtaccaaggccttcccacc

SEQ ID NO: 183162 - DNA, 80 bp, synthetic construct
  source 1..80: mol_type = other DNA
tccttaccttacaagaagagagcccgccgaaccaagagatacaagtccacctccgaaagcagctcctcgagcagcgagca

SEQ ID NO: 183163 - DNA, 80 bp, synthetic construct
  source 1..80: mol_type = other DNA
ttactggtactgtgtccggaaatacaggccacgagaacactcacccaccctatgctgccactcagcccggcgctgcggga

SEQ ID NO: 183164 - DNA, 80 bp, synthetic construct
  source 1..80: mol_type = other DNA
atccagacacgcagccggtccgagtccaccgtggagtcgtttttcgcacgtggtgcgtgtgtcaccattatgtcagtgga

SEQ ID NO: 183165 - DNA, 80 bp, synthetic construct
  source 1..80: mol_type = other DNA
cacctcgacttacaacggttttgcagtcctcaaagcagaaaatggacatcaacacctctccatttcctttgaaaccgata

SEQ ID NO: 183166 - DNA, 80 bp, synthetic construct
  source 1..80: mol_type = other DNA
gtcgtcgtcctcggacgaagacttgagtttccccggcgaggccgagcacggccgggcgcgaaagcgtctaaaaagtcacg

SEQ ID NO: 183167 - DNA, 80 bp, synthetic construct
  source 1..80: mol_type = other DNA
gcatattacatgttttatgatgggtacgatgagaccaaccctaattcagtgtcctatggaaccaccatattcaatgacat

SEQ ID NO: 183168 - DNA, 80 bp, synthetic construct
  source 1..80: mol_type = other DNA
tataaacagcaagatcctacagcagctactaacaatgcttatctcaaagtaaacagtctctggggagatcacgtgtataa

SEQ ID NO: 183169 - DNA, 80 bp, synthetic construct
  source 1..80: mol_type = other DNA
cccagacgacggagaccttggcccagaagacgtagacgaactgctcgagctcatcgacgacgcagagtaaggagacgaaa

SEQ ID NO: 183170 - DNA, 80 bp, synthetic construct
  source 1..80: mol_type = other DNA
atgggagcacaagtgtccacacagcgatccgggtctcatgagaccagcactgtagcaagagaaggctcaacaataaattt

SEQ ID NO: 183171 - DNA, 80 bp, synthetic construct
  source 1..80: mol_type = other DNA
cctaagattcctaaacaggtggtcatctagcaacgacgtactagaccttgccagatatctagggtgcagattcacctttt

SEQ ID NO: 183172 - DNA, 80 bp, synthetic construct
  source 1..80: mol_type = other DNA
ggtgagcgttatggcttccgaccgggccctagggctcctggagcacctggggtaggtggcccgccgccacccctccgtag

SEQ ID NO: 183173 - DNA, 80 bp, synthetic construct
  source 1..80: mol_type = other DNA
aagccattcatggacaggtaaatgcagaattgggtacttggcaaatggactgcacccatttagaaggaaaagtaatcata

SEQ ID NO: 183174 - DNA, 80 bp, synthetic construct
  source 1..80: mol_type = other DNA
gtcagatcttgatgcgacctctgttgacaaacctacacaccctgagacttcctcagatagattttacaccttatcgagtg

SEQ ID NO: 183175 - DNA, 80 bp, synthetic construct
  source 1..80: mol_type = other DNA
tacccaataacctcctccaacaaccttcgttacagagtccaacaacacccttcgaatactatttgtacaacttcgatgaa

SEQ ID NO: 183176 - DNA, 80 bp, synthetic construct
  source 1..80: mol_type = other DNA
ctcgggacgccatgatgaagacagggtgtgaaggttcgagtgcgctacaagtgagtcctccggcccctgaatgcggctaa

SEQ ID NO: 183177 - DNA, 80 bp, synthetic construct
  source 1..80: mol_type = other DNA
gaggaccgatggggagaagtattggcatggaagtttgatgcaacgctggcttatgactataaagcgttcatactgtatcc

SEQ ID NO: 183178 - DNA, 80 bp, synthetic construct
  source 1..80: mol_type = other DNA
acatcagacatgtgaacgaacagagcccccacgcaattacaagcaccgtgagagtgtactttaagcccaaacacgtaaga

SEQ ID NO: 183179 - DNA, 80 bp, synthetic construct
  source 1..80: mol_type = other DNA
atcaataagatatgcaattcccccagggagagactttcaacaattgaatttacaaaaacaaaattacatcaggagaaaga

SEQ ID NO: 183180 - DNA, 80 bp, synthetic construct
  source 1..80: mol_type = other DNA
tcacttacataaaagatgaattgagaagcactgataaggtgcgtctaggcaaaagcagactcattgaagcttcaagttta

SEQ ID NO: 183181 - DNA, 80 bp, synthetic construct
  source 1..80: mol_type = other DNA
acatacaacccactaaatgaccatggcaagggaaatatgatgtggttccaatacttaactaaagctaacacctactatga

SEQ ID NO: 183182 - DNA, 80 bp, synthetic construct
  source 1..80: mol_type = other DNA
taaactcacaatttccaggattctataacactattaaatacaacccactaacagacaaaggagagggaaatagaatctgg

SEQ ID NO: 183183 - DNA, 80 bp, synthetic construct
  source 1..80: mol_type = other DNA
cagtgccatttatcccacccatggcagaccttcctgacaaaggtaagcccttttcgtccagatatgttttatgttctaca

SEQ ID NO: 183184 - DNA, 80 bp, synthetic construct
  source 1..80: mol_type = other DNA
tctacttgcatacacacctcctggtggtagactaccacagaataggaaagaagctatgcttggtacccatgtagtgtggg

SEQ ID NO: 183185 - DNA, 80 bp, synthetic construct
  source 1..80: mol_type = other DNA
cgggccgagttatatggaagacgattagcttggagcggagttttgcgtccctagctgacctgcggatcagcgacgtacca

SEQ ID NO: 183186 - DNA, 80 bp, synthetic construct
  source 1..80: mol_type = other DNA
ttttaagtaaatctgacactagactggaagaaccagtagagtgcttgattaagaaatctgcttccaagtacagggttaat

SEQ ID NO: 183187 - DNA, 80 bp, synthetic construct
  source 1..80: mol_type = other DNA
catgttagcatttgttagtgcttgtcctgattttagcgtgcgcttgttgagggatactacacacatctcccaggagtctc

SEQ ID NO: 183188 - DNA, 80 bp, synthetic construct
  source 1..80: mol_type = other DNA
caggagagacagtggtttgaggcctgttacagatcccactgtgctttttgtggctgcggtagttttattcttcatcttac

SEQ ID NO: 183189 - DNA, 80 bp, synthetic construct
  source 1..80: mol_type = other DNA
gtgttacattcataccgcccatggcagatctgccagacaagggcaaaccatttgattctagatttgtgttatgtagtacc

SEQ ID NO: 183190 - DNA, 80 bp, synthetic construct
  source 1..80: mol_type = other DNA
ggatcacaaccaggtaatcagaatgggtgctcaggtttctagacaacaaactggaacacacgagaatgccaacattgcca

SEQ ID NO: 183191 - DNA, 80 bp, synthetic construct
  source 1..80: mol_type = other DNA
gcctatggggagaccacgtatataaaccagagatagtagacgcattctttaccaatgcagacaacatgtacaccgctaga

SEQ ID NO: 183192 - DNA, 80 bp, synthetic construct
  source 1..80: mol_type = other DNA
aagacgcaaaccctgtggatcaacctactgagccagatgtgtcagcatgtaggttttacactctagatacagtggattgg

SEQ ID NO: 183193 - DNA, 80 bp, synthetic construct
  source 1..80: mol_type = other DNA
aattactagttacacgtttgtctatgtgcgagtttaaggacgcttgtataatgcgtatgacggcaaacggccgcggaaac

SEQ ID NO: 183194 - DNA, 80 bp, synthetic construct
  source 1..80: mol_type = other DNA
agaaaccagacgatgatgaaccatattatccgcttccaaaaaaacctagattcttccctccaacagacaaaggccaagag

SEQ ID NO: 183195 - DNA, 80 bp, synthetic construct
  source 1..80: mol_type = other DNA
ggcagagaatttcaatacttcctgaattatgtactagagaaaagcttagggagtttattaaacaagtagtaaaaccaaat

SEQ ID NO: 183196 - DNA, 80 bp, synthetic construct
  source 1..80: mol_type = other DNA
gatgcaaccacttttgccttcggatggcaagagacacagacctgcacaagcaaacaggaccaataacacaaaatccagtg

SEQ ID NO: 183197 - DNA, 80 bp, synthetic construct
  source 1..80: mol_type = other DNA
tagacagcaaagaacccaaggcagggtgggtaccctacaacagaaactttggcatgggcaagtggatagacggaaatgga

SEQ ID NO: 183198 - DNA, 80 bp, synthetic construct
  source 1..80: mol_type = other DNA
actagcccggtagagaactggcctatggcctacagagatatctcatacaatcccctaaatgacaaagctgtaggaaacaa

SEQ ID NO: 183199 - DNA, 80 bp, synthetic construct
  source 1..80: mol_type = other DNA
taacttagaagcattatgtacaaagcccaatagggaacaccttctccagaggtgtagagggcaagcacttctgttacccc

SEQ ID NO: 183200 - DNA, 80 bp, synthetic construct
  source 1..80: mol_type = other DNA
aaaaggctgggaatacagctacacaaaactaatggctccaatatactactcagccaacagaaacagcacatataattggc

SEQ ID NO: 183201 - DNA, 80 bp, synthetic construct
  source 1..80: mol_type = other DNA
tttgaaagtcacattgagaagagaaaaccctataaggaattgagattggaggttggcaaacaaagattaaagtatgctca

SEQ ID NO: 183202 - DNA, 80 bp, synthetic construct
  source 1..80: mol_type = other DNA
gcggagtcaattcacaagaagtgccagcattgactgctgtggagacgggagcttctggtcaagccatacccagcgacgtg

SEQ ID NO: 183203 - DNA, 80 bp, synthetic construct
  source 1..80: mol_type = other DNA
gggctcccgattgggccaagacatgccacccctgactcaccagatcatgtatatcccaccagggaggcccattccaaagt

SEQ ID NO: 183204 - DNA, 80 bp, synthetic construct
  source 1..80: mol_type = other DNA
aggcccaatagatgtagtgaataaaccaccacctccagctatactagatttattaaagtctgtcagaaatcctgaagtca

SEQ ID NO: 183205 - DNA, 80 bp, synthetic construct
  source 1..80: mol_type = other DNA
tatgggtacgtgccctacagctaccaattcgggtcaggacagatgccagacggtagtaactacgtacccataaaatggag

SEQ ID NO: 183206 - DNA, 80 bp, synthetic construct
  source 1..80: mol_type = other DNA
gtactatccagtgactgtggaaggtcccacttttagatacatggatgcaaatgagtactatcccgcccggtaccagtctc

SEQ ID NO: 183207 - DNA, 80 bp, synthetic construct
  source 1..80: mol_type = other DNA
agaacggaccgtggagaccacaacccagacgaaaacccgttttatttatgtaatggaactttgtttggcaatatccaaat

SEQ ID NO: 183208 - DNA, 80 bp, synthetic construct
  source 1..80: mol_type = other DNA
tggccaattggaacacataatttcacaaatggccatcatatggtgctccgtccatggagtattatttcatcatgctggta

SEQ ID NO: 183209 - DNA, 80 bp, synthetic construct
  source 1..80: mol_type = other DNA
aggatcccagattacaagttaacttggaggaagcaatcttctctaagtataaaggtaatgaaaagattgagattacccaa

SEQ ID NO: 183210 - DNA, 80 bp, synthetic construct
  source 1..80: mol_type = other DNA
gtgagtggccacgctacctttcagacattgatgctacatcagtagacaaacctacgcatccagaaacatcagctgacagg

SEQ ID NO: 183211 - DNA, 80 bp, synthetic construct
  source 1..80: mol_type = other DNA
tatgtgatgtaacattactaactgtacaggcaaccgcagccgacttgcaatatccgttcggctcaccactaacgaactca

SEQ ID NO: 183212 - DNA, 80 bp, synthetic construct
  source 1..80: mol_type = other DNA
gatgtggaagcaggaggagcaaatggtggagcaggaggagcagatgcagaagcaggaggagcaggtgcgaaagcaggagg

SEQ ID NO: 183213 - DNA, 80 bp, synthetic construct
  source 1..80: mol_type = other DNA
ccagacgccgctggacccggcgccggtggagaagactacgcaccaggagacctagaagacctgtacgccgccgtagacgc

SEQ ID NO: 183214 - DNA, 80 bp, synthetic construct
  source 1..80: mol_type = other DNA
acacctgaagctattgacagacggtttttcttagactgtgatgtcaagatcatgccagcatacaacacaaacaacctttt

SEQ ID NO: 183215 - DNA, 80 bp, synthetic construct
  source 1..80: mol_type = other DNA
tcattaagattcaggtattgtgccccacctggctttgctttacttaggtgtaatgatactagctattcaggctttcaacc

SEQ ID NO: 183216 - DNA, 80 bp, synthetic construct
  source 1..80: mol_type = other DNA
tacatgaagctcaaacacgtgagagcatgggttccaaggccagttaggtcacaaccgtatttgcttaaaaatttccccaa

SEQ ID NO: 183217 - DNA, 80 bp, synthetic construct
  source 1..80: mol_type = other DNA
gctgaattttgatggaacactacttggaaatattaccatttacccccatcaatttattaacctgagaagtaataactctg

SEQ ID NO: 183218 - DNA, 80 bp, synthetic construct
  source 1..80: mol_type = other DNA
acaaaccatagtatgttaacaccaccaactatcacatccttaccagcaatgaatagaaggttttatttagatttagatat

SEQ ID NO: 183219 - DNA, 80 bp, synthetic construct
  source 1..80: mol_type = other DNA
cttaagaccaagttatgtgcttggcttggggttcacagaccagcacaaaaacagtctgattcttggcttaaaaagtttac

SEQ ID NO: 183220 - DNA, 80 bp, synthetic construct
  source 1..80: mol_type = other DNA
gcagcttctaactcatccaatagacaaaccctagaacaggatcctagcaaatttacggagccagtgctcgatgttatggt

SEQ ID NO: 183221 - DNA, 80 bp, synthetic construct
  source 1..80: mol_type = other DNA
atgcaagaaatgtcaatttcaatgtgcaaggggtgaccgagtcccggaacaaaatcactctagatcggtcaactcataat

SEQ ID NO: 183222 - DNA, 80 bp, synthetic construct
  source 1..80: mol_type = other DNA
attccactgaatcacattatggtacagtggtcactaatgacatggggacactgtgttctagaatagtaactgaagagcat

SEQ ID NO: 183223 - DNA, 80 bp, synthetic construct
  source 1..80: mol_type = other DNA
aaactaggattgtggttccatccggtactccaacatccatgttcatgctcgcatttgtaagtgcttgtcccgacttcagt

SEQ ID NO: 183224 - DNA, 80 bp, synthetic construct
  source 1..80: mol_type = other DNA
gaaggtaacaaatatggtctgacaatcacacctgcagataaatcagacaaatttgaaaaattaaactatgaaaatgcaac

SEQ ID NO: 183225 - DNA, 80 bp, synthetic construct
  source 1..80: mol_type = other DNA
aaatcagcaagcagagcttgaagcatttgcactagcactacaggactcaggaccacaggtcaatatcatagtagattcac

SEQ ID NO: 183226 - DNA, 80 bp, synthetic construct
  source 1..80: mol_type = other DNA
tctctaaagcactacagccctgtgctacatgtcctaagccacctcactataaacactgttgtcccatactctgtggcaaa

SEQ ID NO: 183227 - DNA, 80 bp, synthetic construct
  source 1..80: mol_type = other DNA
gtgtatatgaagctcaagcatgtgagagcatgggttcctaggccaattaggtctcaaccttacctacttaaaaattttcc

SEQ ID NO: 183228 - DNA, 80 bp, synthetic construct
  source 1..80: mol_type = other DNA
ctgcccagatccttgtgatctgggacaccatatcattgacagggtgtgaagattctagtgtgctacgtgtgagtcctccg

SEQ ID NO: 183229 - DNA, 80 bp, synthetic construct
  source 1..80: mol_type = other DNA
caaacatcaagccctgctacaccaacagtaaatatagaaaacattgctcaaaaaatccagaaaaatgcattcaactacat

SEQ ID NO: 183230 - DNA, 80 bp, synthetic construct
  source 1..80: mol_type = other DNA
ttcttggctcaagaaattcaccgagatgtgtaatgcagctagagggttggaatggataggaaacaaaatttctaaattca

SEQ ID NO: 183231 - DNA, 80 bp, synthetic construct
  source 1..80: mol_type = other DNA
gaatcaagaaacctgaaaatagaaaagatgcaatgttaggaactcatgtagtatgggatgttggattgcaatccacaatc

SEQ ID NO: 183232 - DNA, 80 bp, synthetic construct
  source 1..80: mol_type = other DNA
attgatcgggccacactgccaaccctttccattcttcccagctctgagcgagattttccacacctggacaccgacttcac

SEQ ID NO: 183233 - DNA, 80 bp, synthetic construct
  source 1..80: mol_type = other DNA
ggattgcacgttagttcgatccgctacaatgtttcctttccagcgaaccatgtttcctatgcagccaatgccctttagaa

SEQ ID NO: 183234 - DNA, 80 bp, synthetic construct
  source 1..80: mol_type = other DNA
ctatagtacccacaatagctggacaagggaatgacattggacatgtggtgctccaatatatgtttgttccaccaggggct

SEQ ID NO: 183235 - DNA, 80 bp, synthetic construct
  source 1..80: mol_type = other DNA
ctaactttgtccccaaaggtggtcttatgaacttggaaacccagattaaaactagggataacatcaagattgtaaacgtc

SEQ ID NO: 183236 - DNA, 80 bp, synthetic construct
  source 1..80: mol_type = other DNA
gcgttgcctcgcctaccagcgctcctttcccgtgcttacagccttcccctgaaacccgcgtcaatcgactgtcccgaaaa

SEQ ID NO: 183237 - DNA, 80 bp, synthetic construct
  source 1..80: mol_type = other DNA
cttttcaaaacgagctcaccaccaagctacaaattctaaagaagaacttagatgatatgtgtcctctttatgctgcagaa

SEQ ID NO: 183238 - DNA, 80 bp, synthetic construct
  source 1..80: mol_type = other DNA
tgatgctcagtaagaaagtaattaaaataccgagcttaaaaaccagaccctctagaaaacactatgtaaagatcaggttt

SEQ ID NO: 183239 - DNA, 80 bp, synthetic construct
  source 1..80: mol_type = other DNA
tccacaagaggaggagggcgacgataccaactgcttactgcacccagcacaaacaagcaggcatgatgacccacatggtg

SEQ ID NO: 183240 - DNA, 80 bp, synthetic construct
  source 1..80: mol_type = other DNA
gtccccgtggttcggggggcctagacgtttttttaacctcgactaaacacatgtaaagcatgtgcaccgaggccccagat

SEQ ID NO: 183241 - DNA, 80 bp, synthetic construct
  source 1..80: mol_type = other DNA
cgcggcgtctgcggcgtgttgcggccgacgccacgcggtgtcccacggtctctgttcgcgggacaaccggcgctggggac

SEQ ID NO: 183242 - DNA, 80 bp, synthetic construct
  source 1..80: mol_type = other DNA
tattcttggcactgtatatgccctatacagattaatgtgtctaacccaaggcccatattctggagctccccagcctatcc

SEQ ID NO: 183243 - DNA, 80 bp, synthetic construct
  source 1..80: mol_type = other DNA
gccacctaaacagagtgtggttccagtacagcacaaaacccaccacagactttgtagaaaagcaggccaagtgcctgcta

SEQ ID NO: 183244 - DNA, 80 bp, synthetic construct
  source 1..80: mol_type = other DNA
gcagtgttgcccaatgttatgtggaaaggctgtggtcttacaaaacagaaggacccaggcaaacttctcagtgaacacaa

SEQ ID NO: 183245 - DNA, 80 bp, synthetic construct
  source 1..80: mol_type = other DNA
ccagggacaaggtggagtatgtcactaaactgaagcaattaggcatgctcgagaatcagattaatacaatccaccagtct

SEQ ID NO: 183246 - DNA, 80 bp, synthetic construct
  source 1..80: mol_type = other DNA
tcatgatgggaagcaatatcacagatggaaagggaaccatagtctacaagaatgctaatccaggtgagacaggaggcacg

SEQ ID NO: 183247 - DNA, 80 bp, synthetic construct
  source 1..80: mol_type = other DNA
taattgtttcctacccctttgagctggatccagaggtcctagcaacatttggtaaaaattatggacttgtgattacccca

SEQ ID NO: 183248 - DNA, 80 bp, synthetic construct
  source 1..80: mol_type = other DNA
tcgagcagtacatgctccacagaaacaggtggtcccgctccaaccatgacctagaactagcaaggtacatcagaactacc

SEQ ID NO: 183249 - DNA, 80 bp, synthetic construct
  source 1..80: mol_type = other DNA
cacacaaaaattctactaactaccacattccaactggggctagtgatggtacactcaaggaaaaacattacctgaaatac

SEQ ID NO: 183250 - DNA, 80 bp, synthetic construct
  source 1..80: mol_type = other DNA
agaggtactaaataggttgacttacaacagttcctgccccaacaaggtacattgcatagttcaaggaaggctgggtaatg

SEQ ID NO: 183251 - DNA, 80 bp, synthetic construct
  source 1..80: mol_type = other DNA
actttcaaactaaaaaatccagcttgtttgggtttaacacatacaacccaaattcagacaaattaaaaagcgctagaaag

SEQ ID NO: 183252 - DNA, 80 bp, synthetic construct
  source 1..80: mol_type = other DNA
tccaccagctgttcgtacaagtcctcaaaacccaagccggtctccacataaacccattatttttaaatcatgcataaata

SEQ ID NO: 183253 - DNA, 80 bp, synthetic construct
  source 1..80: mol_type = other DNA
ccaaggctttgtaccctactctaaaaactttggcaacggaaaaatgccaggaggcagtgccaacgtcccactgactatga

SEQ ID NO: 183254 - DNA, 80 bp, synthetic construct
  source 1..80: mol_type = other DNA
taggccaccatgtcctggtggggatggcgccgccggtggtggcgaaggccgcggagacggtggagatggagacggacgcg

SEQ ID NO: 183255 - DNA, 80 bp, synthetic construct
  source 1..80: mol_type = other DNA
atattaattactatagggactcggctagttcaggattgaccaaacaagatttctcccaggacccatcaaagtttacccaa

SEQ ID NO: 183256 - DNA, 80 bp, synthetic construct
  source 1..80: mol_type = other DNA
agggcgacgctactctcgcagacggtacagacgtagatatgtgaggcgaaagagaaagactctagtttggagacagtggc

SEQ ID NO: 183257 - DNA, 80 bp, synthetic construct
  source 1..80: mol_type = other DNA
ccatgtttatttcagacaataacaaatttaaaggaacaaatggcacaactgcgttaaccaaaacaaacgcacaagaaata

SEQ ID NO: 183258 - DNA, 80 bp, synthetic construct
  source 1..80: mol_type = other DNA
tcagggtggtcaacaaacccagacagtcaagatggagaccccatatacaaatcagagaatgtagtttctaaatggttaaa

SEQ ID NO: 183259 - DNA, 80 bp, synthetic construct
  source 1..80: mol_type = other DNA
ccaccggcggggttgttccacaattactccagtatatgtttgttccccctggtgctcccaaaccagaatctagagaatca

SEQ ID NO: 183260 - DNA, 80 bp, synthetic construct
  source 1..80: mol_type = other DNA
acatcaaggaaagccatccaagcacatcaaatgctgccccaatactagatgcagctgaaacaggtcacactagtaaagta

SEQ ID NO: 183261 - DNA, 80 bp, synthetic construct
  source 1..80: mol_type = other DNA
ccttcggcgtcgggggggtcgggagctttactaaacagactccgaggtgccattggacactgaggtggtgaacagcaacg

SEQ ID NO: 183262 - DNA, 80 bp, synthetic construct
  source 1..80: mol_type = other DNA
aggcatactacctgcgaccggggcccagagggctaggataagcattacaagattcattctgtcttacaagggaaggctgt

SEQ ID NO: 183263 - DNA, 80 bp, synthetic construct
  source 1..80: mol_type = other DNA
ggagaaaaaccctacaaagagtttgtagataggattaggatgacagaagttggccgtaggttatacctcccaccatatag

SEQ ID NO: 183264 - DNA, 80 bp, synthetic construct
  source 1..80: mol_type = other DNA
gtcaccgtggttgtgttggtgctcaggatagcagttgtggttataggggcgctggtcgtggtcaaggtcgtagactggtt

SEQ ID NO: 183265 - DNA, 80 bp, synthetic construct
  source 1..80: mol_type = other DNA
tgctcgcccgtccccgttcccgccgcaaacatccccgtccccgcacaccctcgccacctccgtcccttagcgcggtcccg

SEQ ID NO: 183266 - DNA, 80 bp, synthetic construct
  source 1..80: mol_type = other DNA
ccggtggcaacggaattgtggcttttgcagacatcagggacttgtatgtggaagaggaggctatggagcaaggaatctcc

SEQ ID NO: 183267 - DNA, 80 bp, synthetic construct
  source 1..80: mol_type = other DNA
agaggatgtgatagaaaccagatatgtcatcacagatcaaaccagagatgagatgagcgtggagagtttcctgggtaggt

SEQ ID NO: 183268 - DNA, 80 bp, synthetic construct
  source 1..80: mol_type = other DNA
tggccgagacgttggaggcgcgaatgcctaacaggtagaggctaatgtagaggtgtcgcggcgagtcgcaacccgtctcc

SEQ ID NO: 183269 - DNA, 80 bp, synthetic construct
  source 1..80: mol_type = other DNA
ggggctccgcccccttaaacccccaagggggctccgcccccttacacccccaaggaggctccgcccgctaacaccgccta

SEQ ID NO: 183270 - DNA, 80 bp, synthetic construct
  source 1..80: mol_type = other DNA
cattttataaaagaaaaagggggactggatgggatattttattctcagagaagacatagaatcttagatatctacttaga

SEQ ID NO: 183271 - DNA, 80 bp, synthetic construct
  source 1..80: mol_type = other DNA
tggaaaatttcaacgagacagcgagttcaggaaagtccaagttattcgctaaatggaacatcacctacaccgacacagtc

SEQ ID NO: 183272 - DNA, 80 bp, synthetic construct
  source 1..80: mol_type = other DNA
cgtttctggcctcaaatatggattgacaataacacctgctgacaagtctgaccaatttgtgaaagtcaattgggacaatg

SEQ ID NO: 183273 - DNA, 80 bp, synthetic construct
  source 1..80: mol_type = other DNA
ccgaacagaaccagtttgcttattgttacatggcaacccaggatgtggaaaatcactagttacaaccataatcgctagag

SEQ ID NO: 183274 - DNA, 80 bp, synthetic construct
  source 1..80: mol_type = other DNA
gcactctcgtcgggtgaagtagctaaatactttgcaaagactggtgcaacaggaaccaacacagtgcaaaacattgtaac

SEQ ID NO: 183275 - DNA, 80 bp, synthetic construct
  source 1..80: mol_type = other DNA
tcagatcttacttcaatcaaactcagggagaaataacagtgacaaaaaaagtaactgaatgtggacttccaacaatacac

SEQ ID NO: 183276 - DNA, 80 bp, synthetic construct
  source 1..80: mol_type = other DNA
tacctgtacccacaaagaataaacctagactggacaacaccttacacctatgtaaggtacaacccactgtcagacaaggg

SEQ ID NO: 183277 - DNA, 80 bp, synthetic construct
  source 1..80: mol_type = other DNA
tcgtgtaggtactgacccccttgagcacgctctccccggacacggccgctaccatctcagagagacggcttcgcacgtac

SEQ ID NO: 183278 - DNA, 80 bp, synthetic construct
  source 1..80: mol_type = other DNA
caacaggaagatatttattaatattccactagtaaacgaggcgtgaagcaggcgtggtttcaataacaggagttagaaat

SEQ ID NO: 183279 - DNA, 80 bp, synthetic construct
  source 1..80: mol_type = other DNA
caatacgcagtggaccgtccaactcagaggctgtaccagccttaaccgctgtggagactgggcacacgtcgcaagtggtc

SEQ ID NO: 183280 - DNA, 80 bp, synthetic construct
  source 1..80: mol_type = other DNA
ttgcacccatgtacttagaattgtctggtattagatcaagaacagtaatacaagggcttcccactgttttgacacctggt

SEQ ID NO: 183281 - DNA, 80 bp, synthetic construct
  source 1..80: mol_type = other DNA
actcggccaccctcgtgggcacaccgaactccacacgggcgcccatagcctccgagccctccacatcagttcccacccag

SEQ ID NO: 183282 - DNA, 80 bp, synthetic construct
  source 1..80: mol_type = other DNA
tcatgaaggcatcaaattagagattacagtcattaaattagcccgtaatgaaaaatttaaagatatcagaaaatatctac

SEQ ID NO: 183283 - DNA, 80 bp, synthetic construct
  source 1..80: mol_type = other DNA
gctacaacgcatgactgcataccacaaaacacatcgacatgaaccagtctgttgtctaatacgtggacaacctggatgtg

SEQ ID NO: 183284 - DNA, 80 bp, synthetic construct
  source 1..80: mol_type = other DNA
ctaccgcgaggaccagcctcaatgatgtgccaactccaagccacagcaacagcgtgcacataagtttgaagtcgcacggt

SEQ ID NO: 183285 - DNA, 80 bp, synthetic construct
  source 1..80: mol_type = other DNA
acgtagttccacactttccaccttatagcacaacgcgatcaaaagaccaaacagactaaaaataaatcgcattataattt

SEQ ID NO: 183286 - DNA, 80 bp, synthetic construct
  source 1..80: mol_type = other DNA
gttcggctcaccactaacgaactccccctgttgcaacttccaggttcttaacagtaactatgacaatgcacattccatac

SEQ ID NO: 183287 - DNA, 80 bp, synthetic construct
  source 1..80: mol_type = other DNA
atacagaattttgtgtggagtgagttccaacaatttgtttggaccaactctttgggtgtccgtgtttcactttttccttt

SEQ ID NO: 183288 - DNA, 80 bp, synthetic construct
  source 1..80: mol_type = other DNA
acttcgacgcaaccgcagtcactgatacgcgggacactataaacactgttcccgtgtcgacccatggtagcagtcgccgt

SEQ ID NO: 183289 - DNA, 80 bp, synthetic construct
  source 1..80: mol_type = other DNA
gaacaaaatttacatctgcaaacattttaaacacatttagatcagagggatgctttagtcaccctcaaataaaaaaagcc

SEQ ID NO: 183290 - DNA, 80 bp, synthetic construct
  source 1..80: mol_type = other DNA
gatgatgtcactatagtccagtacatggatgacatccttatagcaagtaacagaagtgatctagagcatgacagggtagt

SEQ ID NO: 183291 - DNA, 80 bp, synthetic construct
  source 1..80: mol_type = other DNA
cagagagcctgttggaatcaaaagaaggttgccaaagaattcttaaagttttagatccattagtaccgacaggttcagaa

SEQ ID NO: 183292 - DNA, 80 bp, synthetic construct
  source 1..80: mol_type = other DNA
aaaaacaaccactgaatttgaagaaaaacaatgcaaatgccacataaaagacatacccctatgggcagccttttatggct

SEQ ID NO: 183293 - DNA, 80 bp, synthetic construct
  source 1..80: mol_type = other DNA
gtgtaggtcggcttgcgtgcacatagccaaatataaagcaaaaggtgacgcaggagacattaaccggtatgacagctggg

SEQ ID NO: 183294 - DNA, 80 bp, synthetic construct
  source 1..80: mol_type = other DNA
aatttctgcaacaaatgatatggggacactctgcttcagagcactggaagacactaccaatgatgatgtaaaagtcttca

SEQ ID NO: 183295 - DNA, 80 bp, synthetic construct
  source 1..80: mol_type = other DNA
gcaacatctttaataaacacaatacttatgttcattactacaatgggcattgtatatatgatatataaaatgtttgctca

SEQ ID NO: 183296 - DNA, 80 bp, synthetic construct
  source 1..80: mol_type = other DNA
cagttccctattttggtcctggcgtggattataaaggagatgcgctcacccccctttcaacaaaggctctgaccacatat

SEQ ID NO: 183297 - DNA, 80 bp, synthetic construct
  source 1..80: mol_type = other DNA
tcctgcatcagacaaaaggctgcagtacaccatgctgggtgaaattttgaactactacacccactggactggatccttga

SEQ ID NO: 183298 - DNA, 80 bp, synthetic construct
  source 1..80: mol_type = other DNA
attttcaaatatcgatttttccaatatcgccatctctatcggcgataaacaccactatcgcgcgacatgaatttagtcgg

SEQ ID NO: 183299 - DNA, 80 bp, synthetic construct
  source 1..80: mol_type = other DNA
gcacaacagaaagagtatttaacgtattaaacacatacaaaactgagggtaactactcacacccacaactaaaaaaattt

SEQ ID NO: 183300 - DNA, 80 bp, synthetic construct
  source 1..80: mol_type = other DNA
gctgacttacaggtacttagcaaatatagaacctcaaacggtttgttagatgtggctaaagccttgcaaccatgtacaaa

SEQ ID NO: 183301 - DNA, 80 bp, synthetic construct
  source 1..80: mol_type = other DNA
tcttgccatttgtccgtctcggaggttgccgtaggcttcgggcccggtcacagggccttccggactacaaaaatggccgt

SEQ ID NO: 183302 - DNA, 80 bp, synthetic construct
  source 1..80: mol_type = other DNA
gggcacggatttgccaatccaggtgattgcggtggcatcttgcgctgcaaccatggagtaatggggatcattacagctgg

SEQ ID NO: 183303 - DNA, 80 bp, synthetic construct
  source 1..80: mol_type = other DNA
atgttaatcaaggtacagctggtagtgcactggtggtatatgaacctaaacctgttgtgacatatgactcaaagttagaa

SEQ ID NO: 183304 - DNA, 80 bp, synthetic construct
  source 1..80: mol_type = other DNA
ctgagattgactccctcatccccatgaacgctgttcccggtaaagttaacaccatgcaagcctaccctatcccactggct

SEQ ID NO: 183305 - DNA, 80 bp, synthetic construct
  source 1..80: mol_type = other DNA
accgtcactgtggcccccatgtgctgtgagttcaacggtcttcgatcactgacaacccccgtcctacagggactgccagt

SEQ ID NO: 183306 - DNA, 80 bp, synthetic construct
  source 1..80: mol_type = other DNA
acctatgtgtcaacttccaggtcctaggttccgcttacaagaagcaccttagtatagtaccgagtaacttagaaagttat

SEQ ID NO: 183307 - DNA, 80 bp, synthetic construct
  source 1..80: mol_type = other DNA
tacaactccaaagcagacacccagtatgtaaaacaaggctgctactgtgtactagaagacaaacccctgtgggcctgctt

SEQ ID NO: 183308 - DNA, 80 bp, synthetic construct
  source 1..80: mol_type = other DNA
tggggcacggcggtcgcggaggacggcgacggcgaataaaagcgacgtgcggcgcgcctgtcttgcgtgtctgtctttgc

SEQ ID NO: 183309 - DNA, 80 bp, synthetic construct
  source 1..80: mol_type = other DNA
attcccgtccagagtgggaaccatcagagcacacaggtttttggttttcaagttcaaccgggactagatagtgtatttaa

SEQ ID NO: 183310 - DNA, 80 bp, synthetic construct
  source 1..80: mol_type = other DNA
tcactggactaggtatttatgataagcttatgattctacctactcatgctgatcctggaaaagagatttatattaatggg

SEQ ID NO: 183311 - DNA, 80 bp, synthetic construct
  source 1..80: mol_type = other DNA
tcaaagcattgggcaaggtcttgaccttactgggtttccctggtaatctcatggacagattatgcaacacaacacacata

SEQ ID NO: 183312 - DNA, 80 bp, synthetic construct
  source 1..80: mol_type = other DNA
tgaccgtctgggggacgaaaaacctccagactagagtcactgccatcgagaaatatctaaaggaccaggcacggctaaat

SEQ ID NO: 183313 - DNA, 80 bp, synthetic construct
  source 1..80: mol_type = other DNA
gccatttgtccgtatcgggggtcgccataggcttcgggctccgttttaggccttccggactacaaaatgcgccattttag

SEQ ID NO: 183314 - DNA, 80 bp, synthetic construct
  source 1..80: mol_type = other DNA
ttgcctgggtggaggacatgggccgtgaggatggagaccaggaccgccccctcctccccctccaggtctagtctaatgat

SEQ ID NO: 183315 - DNA, 80 bp, synthetic construct
  source 1..80: mol_type = other DNA
cagtcactaatgacatgggcacactctgctttagaatagtaactgaggaacatactaacaaggtcaaagttacaactaga

SEQ ID NO: 183316 - DNA, 80 bp, synthetic construct
  source 1..80: mol_type = other DNA
tttgagagccatattgaaaagaggaagccttataaagagctaagattagaggttggcaagcaaagactaaagtatgctca

SEQ ID NO: 183317 - DNA, 80 bp, synthetic construct
  source 1..80: mol_type = other DNA
tttgaatcacaaaatggcggacttccttcctctttttcaaaattaacggcccagcggcggcgcgcgcactacgtcataag

SEQ ID NO: 183318 - DNA, 80 bp, synthetic construct
  source 1..80: mol_type = other DNA
aagaacaatccaccccagcaaaagaggtgttcgccataccagtggacatagcttcacaacctttagctacgacactgata

SEQ ID NO: 183319 - DNA, 80 bp, synthetic construct
  source 1..80: mol_type = other DNA
aacccttctggcagacagaactctgtcagcagcttgtgtagctatgcctctttgattctttgcacttttaaaaagttttg

SEQ ID NO: 183320 - DNA, 80 bp, synthetic construct
  source 1..80: mol_type = other DNA
gtggtatacgcaacaggatttgtgtgatgtaaatcttttgtcacttgcggtttctgcggcgagcttctcgcatccgttca

SEQ ID NO: 183321 - DNA, 80 bp, synthetic construct
  source 1..80: mol_type = other DNA
acgacctgttccgacaccacgttctcacggtcttcgatttccacctgcactttttcataaatcgttgctttgaaaaacaa

SEQ ID NO: 183322 - DNA, 80 bp, synthetic construct
  source 1..80: mol_type = other DNA
tcaaccaggaaatggtttcccacgttttactataccctttactggcttaggatcagcttactatatgttctacgatggct

SEQ ID NO: 183323 - DNA, 80 bp, synthetic construct
  source 1..80: mol_type = other DNA
catcgccaaagtggttgatgctgctttgagtacttcaatgcccacagtccagaataccgccagtagtggcccggttcatt

SEQ ID NO: 183324 - DNA, 80 bp, synthetic construct
  source 1..80: mol_type = other DNA
tgggagggtccgttataggagaggcaataaataggacctacctgagcgagggcgacgttgccaagacttttgaggctgca

SEQ ID NO: 183325 - DNA, 80 bp, synthetic construct
  source 1..80: mol_type = other DNA
ggccgatgccatctttgttaatacagcacaaagtttaaatgacttaaaaaccaaaattgaaaacaatattaagaactaca

SEQ ID NO: 183326 - DNA, 80 bp, synthetic construct
  source 1..80: mol_type = other DNA
aataacaatcctccgctcgttataaaatatgtaatggcttcctggcccttcgtgtaacgatcctggacggcctcgtactt

SEQ ID NO: 183327 - DNA, 80 bp, synthetic construct
  source 1..80: mol_type = other DNA
ttgtgccaaatactcaaccctctggaacaacacacaccactaaaccaacagtattaaatgccatggaaattggtgcaact

SEQ ID NO: 183328 - DNA, 80 bp, synthetic construct
  source 1..80: mol_type = other DNA
ggtcattcggtgctccactagaaaccctggtctgttaggaccccttctgctttgggaaaccaaggcaggaaaatccctag

SEQ ID NO: 183329 - DNA, 80 bp, synthetic construct
  source 1..80: mol_type = other DNA
agagtgggttcgtcacattgtggcaccagacagcattcgtgtccaatggaacttcaggatctataatggtcacttgctct

SEQ ID NO: 183330 - DNA, 80 bp, synthetic construct
  source 1..80: mol_type = other DNA
acgttactgttccagtactgttcagacgtatcgtaacttccgtaaatccataaataccgtggttccacgtcaaaattatg

SEQ ID NO: 183331 - DNA, 80 bp, synthetic construct
  source 1..80: mol_type = other DNA
tctactattcccagtattatggtaagtactatccaataatatgtgaaaagtccacaaacatctggattgaaggagggaac

SEQ ID NO: 183332 - DNA, 80 bp, synthetic construct
  source 1..80: mol_type = other DNA
ggatcacctacgagaaggccaatcctggagaggctggcggcaagttccaagcctcatttaccccatccgcagaggacggg

SEQ ID NO: 183333 - DNA, 80 bp, synthetic construct
  source 1..80: mol_type = other DNA
acaccgtaccacaagtagaccactcatttcatacacgcggtgcatttggacagcaatctggcgctgtgtatgtgggcaac

SEQ ID NO: 183334 - DNA, 80 bp, synthetic construct
  source 1..80: mol_type = other DNA
gatgccaggtttcggaggccacggcgcagaagacgtgctggtcattgggcaggtgtacgcggtagacgggcagcggtcgc

SEQ ID NO: 183335 - DNA, 80 bp, synthetic construct
  source 1..80: mol_type = other DNA
caaggaatcatgtgataaacattattgggattctatgaagtttagatactgcacaccaccgggttatgccttactaagat

SEQ ID NO: 183336 - DNA, 80 bp, synthetic construct
  source 1..80: mol_type = other DNA
atttgattcagagattaccttagtcccttctatagctgctcaaggagatgatgttggtcatgttgtcatgcagtatatgt

SEQ ID NO: 183337 - DNA, 80 bp, synthetic construct
  source 1..80: mol_type = other DNA
aactggagtatagtcatcatcccagtctgtccattgcaaagtgaggcaggtgctactgggcttgtaccaatcacagtgtc

SEQ ID NO: 183338 - DNA, 80 bp, synthetic construct
  source 1..80: mol_type = other DNA
gaaaagatggagcaggagggacaattagaggaagcgccccctaccaatccttataatacacctacctttgctataaagaa

SEQ ID NO: 183339 - DNA, 80 bp, synthetic construct
  source 1..80: mol_type = other DNA
gtacttcagctggctacagttttgtgaaatatgggtataaaaagaaagattttatatgtttggagccattttttgtgtca

SEQ ID NO: 183340 - DNA, 80 bp, synthetic construct
  source 1..80: mol_type = other DNA
ctggactgtcgcgttgctttgtattgcctgtatactcctattttttttccgacgtttttttaacaaaaaataccgtacgc

SEQ ID NO: 183341 - DNA, 80 bp, synthetic construct
  source 1..80: mol_type = other DNA
gctggagcgtttcgcggccgcggctgagcctttgccgtcgctttgtgtgcgtgattatgtgttacgcaatgctgaccgtg

SEQ ID NO: 183342 - DNA, 80 bp, synthetic construct
  source 1..80: mol_type = other DNA
ctcacactatcaagcttttgccactgaagcccacctgagacccagagagtatgacccacagggacaaaaaattgagaatg

SEQ ID NO: 183343 - DNA, 80 bp, synthetic construct
  source 1..80: mol_type = other DNA
cataactaaattggaccacagctacgacgaaaccaagtccagtgaccgatacccacgtccaaccctcacgtatgtaccac

SEQ ID NO: 183344 - DNA, 80 bp, synthetic construct
  source 1..80: mol_type = other DNA
agtggtcagcgaattcagatccgcaggctatcgtacatagaaatttggtgtacttagatcttttcccaaatctcaaagtg

SEQ ID NO: 183345 - DNA, 80 bp, synthetic construct
  source 1..80: mol_type = other DNA
cagtagactatctcttcggctgtggtgtcatggcaggcaatgcatttgttttcccccaccaaatcataaatctgcgcaca

SEQ ID NO: 183346 - DNA, 80 bp, synthetic construct
  source 1..80: mol_type = other DNA
gaagatttggtttcgacttagacatttgtttacacagtacatacaccaaaaatggaaagttaaatgccactatggcaacc

SEQ ID NO: 183347 - DNA, 80 bp, synthetic construct
  source 1..80: mol_type = other DNA
gctatcacagttttttgcatactttactggggaaattaatatccatgtactttacatggctgataaaggtttcttgagag

SEQ ID NO: 183348 - DNA, 80 bp, synthetic construct
  source 1..80: mol_type = other DNA
ggtaactaaatcaataggctcagaaacagcctggagagacatgagattaatggtggtctgcccttatacagaaccccaac

SEQ ID NO: 183349 - DNA, 80 bp, synthetic construct
  source 1..80: mol_type = other DNA
cccccccgaagatcgtcactaaccacgtgactccaacaggccaatccaagtgtatgtcgtgcacttcctgggcatggtct

SEQ ID NO: 183350 - DNA, 80 bp, synthetic construct
  source 1..80: mol_type = other DNA
ccaggtggagcagtacctagcgacgcagagagctttgcatggcaatcatcaacaaaccctagcgtgttttggacagaggg

SEQ ID NO: 183351 - DNA, 80 bp, synthetic construct
  source 1..80: mol_type = other DNA
gacctcgaagtgacttttgtaataaccagctgccaggaccctggcacaacactggatcaagacatgcctgttctcacaca

SEQ ID NO: 183352 - DNA, 80 bp, synthetic construct
  source 1..80: mol_type = other DNA
ggagcagcgaaggagaatcccccgcgtcccgagggcgggtgccgaaggtgagtttacacaccggagtcaaggagcaattc

SEQ ID NO: 183353 - DNA, 80 bp, synthetic construct
  source 1..80: mol_type = other DNA
agacgccagaatagctctaagatgcccctacacagatccacctctaacaggatccacagataaaacaggctttataccat

SEQ ID NO: 183354 - DNA, 80 bp, synthetic construct
  source 1..80: mol_type = other DNA
cttcagctgatgtcacacctgaaactatgttggagactagatatgttgtcaattctagaaccaatgaggaggcaacaatt

SEQ ID NO: 183355 - DNA, 80 bp, synthetic construct
  source 1..80: mol_type = other DNA
cagccttcaaatgattcagcatagtagtctttcccacaccaggggcaccttccaaaaatagggaacaggcaggtttgatt

SEQ ID NO: 183356 - DNA, 80 bp, synthetic construct
  source 1..80: mol_type = other DNA
caaggttatagtgcccagctttctcaccaggccggggggcaaacccacagttaaaattagaataaagccccccaccacat

SEQ ID NO: 183357 - DNA, 80 bp, synthetic construct
  source 1..80: mol_type = other DNA
ccagatcacacatgttgaattgccaagagtattttggaacaatcaagacaaacctgcatatggacaatcacgatattttg

SEQ ID NO: 183358 - DNA, 80 bp, synthetic construct
  source 1..80: mol_type = other DNA
ggattgcctgtgttgtgcacccctggtagcaaccaattcctgacctcagacgattaccaatcgccctcagccatgcctca

SEQ ID NO: 183359 - DNA, 80 bp, synthetic construct
  source 1..80: mol_type = other DNA
ttttacaaagattgtgccctcttttgtaaggtagtctatccagattatgttgcctgtgcctttgtctgtcaaagggttgt

SEQ ID NO: 183360 - DNA, 80 bp, synthetic construct
  source 1..80: mol_type = other DNA
catagtgatgcactctcaagaagatttgcctttgacatggaagtgtacacaatgtcaaaacactccattaggggcgagct

SEQ ID NO: 183361 - DNA, 80 bp, synthetic construct
  source 1..80: mol_type = other DNA
caagcaatttcagcatttgccgtaacagcaggaatggtgtatgtggtgtacaaactcttcgcggggttccaaggtgcata

SEQ ID NO: 183362 - DNA, 80 bp, synthetic construct
  source 1..80: mol_type = other DNA
aagatttttgtttgcgcatggcgcgagacaccaatttacatctgcaaagtggtccaatagtacaaaaccctgttgagaaa

SEQ ID NO: 183363 - DNA, 80 bp, synthetic construct
  source 1..80: mol_type = other DNA
gtggaaaaagctatggattgaccatcactccaccagacaagggtgaaacattcacagatgtaagttggtcaaatgtcact

SEQ ID NO: 183364 - DNA, 80 bp, synthetic construct
  source 1..80: mol_type = other DNA
aaattccaggtcaataatgaactgtggcagggcgttaaggcctgtgtcaagtcgaaatttagagagatttttgggatcaa

SEQ ID NO: 183365 - DNA, 80 bp, synthetic construct
  source 1..80: mol_type = other DNA
gtgacacaatgcagacacgacacgtgaaaaactaccacactcggtcggaatcgagtattgagaacttcctcagcagatca

SEQ ID NO: 183366 - DNA, 80 bp, synthetic construct
  source 1..80: mol_type = other DNA
acacacacccaggtgaaatgggccatactattcaaagttcagtaaaccgcagtgacaacaacccagatgaggatcccttt

SEQ ID NO: 183367 - DNA, 80 bp, synthetic construct
  source 1..80: mol_type = other DNA
tttgcaatgagggtcgatattgcatctcagcctttggcaactacattaattggtgagatagctagttattacacacactg

SEQ ID NO: 183368 - DNA, 80 bp, synthetic construct
  source 1..80: mol_type = other DNA
ctagcttggctgcacgttttaattttcaggccgggccaccgcctcccgggggtccccgggcggagagtccgccgattctg

SEQ ID NO: 183369 - DNA, 80 bp, synthetic construct
  source 1..80: mol_type = other DNA
tgacctcagacgtgacatgtttagcggctcgagtcttaaaagagtctcagaacaacaagagacttctgagtttttattct

SEQ ID NO: 183370 - DNA, 80 bp, synthetic construct
  source 1..80: mol_type = other DNA
gctgcgagatcgcatcaggaaattgatggagcgcaagaaacagccgccgcccctgacaacaccggaggacgtacaagagg

SEQ ID NO: 183371 - DNA, 80 bp, synthetic construct
  source 1..80: mol_type = other DNA
caaatattgtagacgcatcatcgaacaggaccaatataaccaccactggaagatttgggcagcagtcgggagctatatac

SEQ ID NO: 183372 - DNA, 80 bp, synthetic construct
  source 1..80: mol_type = other DNA
cagtgtctttggtacagaaggtttagaagctcttgacctcaataccagtgcagggttcccatatgtgtctatgggcatta

SEQ ID NO: 183373 - DNA, 80 bp, synthetic construct
  source 1..80: mol_type = other DNA
aaaggtgagactacggactcaggtgatacctactatggtctagtttccatcaatgattttggggttttggctatcagagc

SEQ ID NO: 183374 - DNA, 80 bp, synthetic construct
  source 1..80: mol_type = other DNA
gggattacgttggggacggaggtggcgggggtgtttgcggcgaggacggagagtttagaggacaggggtggcgccggcgg

SEQ ID NO: 183375 - DNA, 80 bp, synthetic construct
  source 1..80: mol_type = other DNA
gaaaaaagggaacaactctttaacaacatattgtggttagaacaaatgtcccagaaatttgcgccactatatgctactga

SEQ ID NO: 183376 - DNA, 80 bp, synthetic construct
  source 1..80: mol_type = other DNA
gaaaccacctcctgacatgacctggagacccccggtacataacgcccatgggatcgagagaaatctctacgagtgcatgt

SEQ ID NO: 183377 - DNA, 80 bp, synthetic construct
  source 1..80: mol_type = other DNA
cctcaaaaaagtacaagaagaatacaagggacaggaaaacttaaaaaacctaatacatccagttttctgtcagtacgtag

SEQ ID NO: 183378 - DNA, 80 bp, synthetic construct
  source 1..80: mol_type = other DNA
aacggcctaaggttggcataccagcagggactaccagtattaaacacaccagggagtaatcagttcatgacatcggacga

SEQ ID NO: 183379 - DNA, 80 bp, synthetic construct
  source 1..80: mol_type = other DNA
cgctggaagcagcgggccatgtgctattgctaacatcattaccggaagatgaatattcagcagagcaagtggctgattgt

SEQ ID NO: 183380 - DNA, 80 bp, synthetic construct
  source 1..80: mol_type = other DNA
gaggtcaacaattcatgaccactgaagatgaacagtctgcaaatatactccctgggtttcatcccaccaaaaagattcac

SEQ ID NO: 183381 - DNA, 80 bp, synthetic construct
  source 1..80: mol_type = other DNA
aaagagagagctgctgagataggtggtgctggcctcgtatagcgccgagcctcggacctcacggtcactagagattatga

SEQ ID NO: 183382 - DNA, 80 bp, synthetic construct
  source 1..80: mol_type = other DNA
gagcacttagtggaggttacaaccagagtttatcataaagccaagcatgttaaagcatggtgccctagagctcccagagc

SEQ ID NO: 183383 - DNA, 80 bp, synthetic construct
  source 1..80: mol_type = other DNA
tacatcagcaacacagcatggccccgtgtatggtagctcagaacccacgtgcacccttaggggaccaactcccaggtgtt

SEQ ID NO: 183384 - DNA, 80 bp, synthetic construct
  source 1..80: mol_type = other DNA
aaccctacccgaaccgccccgtctctttcttatctaagctctggcttcgtcaaggctgtgaacgagaaccgccccgtctc

SEQ ID NO: 183385 - DNA, 80 bp, synthetic construct
  source 1..80: mol_type = other DNA
ggaaaaatttgaacaatatcagagaggagttgatttgatacagaaattgagaactgttcattctatggctcaagttgatt

SEQ ID NO: 183386 - DNA, 80 bp, synthetic construct
  source 1..80: mol_type = other DNA
agaaaacgcacaagttagaaagaaactggagatgttcacatacattagatttgatttggaggttaccatagtgaccaata

SEQ ID NO: 183387 - DNA, 80 bp, synthetic construct
  source 1..80: mol_type = other DNA
ctaaaaaactctacctatgactggcaaaactatagcacaaaaacaaactatgaacactgctaccaaaattttaatacaaa

SEQ ID NO: 183388 - DNA, 80 bp, synthetic construct
  source 1..80: mol_type = other DNA
taatgaccataccatggacatcaggggtgcaattcagatacactgacccagacacatacaccagtgctggttacttatct

SEQ ID NO: 183389 - DNA, 80 bp, synthetic construct
  source 1..80: mol_type = other DNA
gggctagtattactaccaacacaggcgctttcggacaacaatcaggcgctatatatgtagggaattataggattgtcaac

SEQ ID NO: 183390 - DNA, 80 bp, synthetic construct
  source 1..80: mol_type = other DNA
gcttgtagttgatttttggaaattgagtcttggtcgcggtgaccaccctctgataggtagaaattagctgtttggactca

SEQ ID NO: 183391 - DNA, 80 bp, synthetic construct
  source 1..80: mol_type = other DNA
acacatatacatcctcatccaaagacatacacaacaacacactgtatggaggagcagcatactataaaaaaggcgctagc

SEQ ID NO: 183392 - DNA, 80 bp, synthetic construct
  source 1..80: mol_type = other DNA
agcaactatggctactgtacctactgccccacaagtactttagttaacaaaattaaacaatacagaaaaaaaagatttac

SEQ ID NO: 183393 - DNA, 80 bp, synthetic construct
  source 1..80: mol_type = other DNA
ctatatacaaaatggcggaggagcacttccggcttgcccaaaatggcgggcaagctcctccgggttaaagttcatgccta

SEQ ID NO: 183394 - DNA, 80 bp, synthetic construct
  source 1..80: mol_type = other DNA
agtgcagaagtgtcagaactgtatagattggaactgggggactacaaactagtagaaataacaccaattggctttgcacc

SEQ ID NO: 183395 - DNA, 80 bp, synthetic construct
  source 1..80: mol_type = other DNA
caaattctgggacagaccccccagaaagctacacacagacacacctttctacccctgggcaccaaaacccctagaccaag

SEQ ID NO: 183396 - DNA, 80 bp, synthetic construct
  source 1..80: mol_type = other DNA
ctgtgggcccctcagatatgtatgtacatatggataatctcatatacagaaacctacatttgtgtaacccagaagactta

SEQ ID NO: 183397 - DNA, 80 bp, synthetic construct
  source 1..80: mol_type = other DNA
catggagagtggtttggacaaggaaagtataactatacttaatgagcatagtcatctactctctcttgcaatcaacctgt

SEQ ID NO: 183398 - DNA, 80 bp, synthetic construct
  source 1..80: mol_type = other DNA
acgcctagtatcactatggattgacttgagggttgcgctcagcacatccccagtgtagcttgggccgatgaggctccgaa

SEQ ID NO: 183399 - DNA, 80 bp, synthetic construct
  source 1..80: mol_type = other DNA
gtcctcactccaccaaccgtctcttctccagaagccatagacagaagattctttctagattgtgatgtgaagataatgcc

SEQ ID NO: 183400 - DNA, 80 bp, synthetic construct
  source 1..80: mol_type = other DNA
agaaagatagtataataagcgtaaactcaattgatatcgaggtgacaaaggaatcacctataacatctaatagtacaata

SEQ ID NO: 183401 - DNA, 80 bp, synthetic construct
  source 1..80: mol_type = other DNA
gtgtacttgccccccagagaaggtgatctgacgtgtaattcaacagtcaccagcctaatagcgaatatagaagagaatag

SEQ ID NO: 183402 - DNA, 80 bp, synthetic construct
  source 1..80: mol_type = other DNA
tcaattgtacacccatggacagcatgctgaaacacaacaacgtgtccctggttattatccccatagtcccactgagagtg

SEQ ID NO: 183403 - DNA, 80 bp, synthetic construct
  source 1..80: mol_type = other DNA
tttggaagtggaaaattttaacgcaacagaagcaactgataagaggaagcaattcactgtatggccgatcacatatacta

SEQ ID NO: 183404 - DNA, 80 bp, synthetic construct
  source 1..80: mol_type = other DNA
gttgcattgctgagatccataccaatttagaccatactggatacaatgagcctgggaaaaaccactcagaatggaagatt

SEQ ID NO: 183405 - DNA, 80 bp, synthetic construct
  source 1..80: mol_type = other DNA
catgcactgggtgccctaaacctaagtattacagtaaatgttgtcccctcctgtgtggtaaagctgttgtattatacaac

SEQ ID NO: 183406 - DNA, 80 bp, synthetic construct
  source 1..80: mol_type = other DNA
gccgcgcttaagtcgccgaaacctccgtgagccctgaagcagtgtgccccggggcccgcgacccccctcccttgcgcccg

SEQ ID NO: 183407 - DNA, 80 bp, synthetic construct
  source 1..80: mol_type = other DNA
caacaaacgccaaaggtcagagtgcacggttgaatccttcctagggagatctgcgtgtgtagctataattggactaaaaa

SEQ ID NO: 183408 - DNA, 80 bp, synthetic construct
  source 1..80: mol_type = other DNA
tgcaaataataactacacaaacttacaatccacatggacaactactatatatggtaaaaaaacagatagcaactttggct

SEQ ID NO: 183409 - DNA, 80 bp, synthetic construct
  source 1..80: mol_type = other DNA
tgaaggttaaggtttctgattcctatgatttgcacaaccatgagggagtcaagctagaaatcacagtagtaaaattagtt

SEQ ID NO: 183410 - DNA, 80 bp, synthetic construct
  source 1..80: mol_type = other DNA
attttgatgcaactgcagttaccgaaacacgggcaactataaacaccgtccctgtgtcgaaccatggtagagatcgccgt

SEQ ID NO: 183411 - DNA, 80 bp, synthetic construct
  source 1..80: mol_type = other DNA
gtgtcaagtagacacactcataccaataaacagcacacaggcaaatattggcaatgtcaatatgtatacagtaactttat

SEQ ID NO: 183412 - DNA, 80 bp, synthetic construct
  source 1..80: mol_type = other DNA
ttatcataaagccaaacatgttaaagtctggtgccctagaccccccagagcagtggagtatactaatgtacatctcacca

SEQ ID NO: 183413 - DNA, 80 bp, synthetic construct
  source 1..80: mol_type = other DNA
ataacacaaatgtacaaaataccatatgacagtaactatggctttcctacatataaacccataaaagattatatgctaaa

SEQ ID NO: 183414 - DNA, 80 bp, synthetic construct
  source 1..80: mol_type = other DNA
attcctacgactgggcaaccctccagtgccaggagttcggcgaactcatggccatccacacctccacttcacgccaatac

SEQ ID NO: 183415 - DNA, 80 bp, synthetic construct
  source 1..80: mol_type = other DNA
ggaaaactaaatacagtcatactagaatggctaagaaaatcttgacaatgtcaacaaaatataagtggactaggaacaaa

SEQ ID NO: 183416 - DNA, 80 bp, synthetic construct
  source 1..80: mol_type = other DNA
gcagcccaacagaaaaagacaatcaagtgctggaattgcaggaaggaaggacactcggcaaggcaatgccgagcacctag

SEQ ID NO: 183417 - DNA, 80 bp, synthetic construct
  source 1..80: mol_type = other DNA
tctctgtactggtgtctgtccggcgtttgtgcggagctttggcgccgcgaggacgggggtttttgagcgtgctggtgacg

SEQ ID NO: 183418 - DNA, 80 bp, synthetic construct
  source 1..80: mol_type = other DNA
ctacccgtgaggatgattaccctgcatgtagccttgctttattggccaatcaagatgaaccaacaatcctaagtgtaggg

SEQ ID NO: 183419 - DNA, 80 bp, synthetic construct
  source 1..80: mol_type = other DNA
ggtagccgtttttgcgatgtcgcagtcggtctagcaggttgggcttctgtcccttgtcctgcgtgccagtctgtccgtcc

SEQ ID NO: 183420 - DNA, 80 bp, synthetic construct
  source 1..80: mol_type = other DNA
atctgaggatgtggaggggttagaagctacactggtaattcattcaaaccacttcaccaatacaatcttagatgtagggc

SEQ ID NO: 183421 - DNA, 80 bp, synthetic construct
  source 1..80: mol_type = other DNA
ttgcaactacaagcccatctggacctgatatgataaatgatactgatccatgcatacaattgaacaattgctcaggactg

SEQ ID NO: 183422 - DNA, 80 bp, synthetic construct
  source 1..80: mol_type = other DNA
aaatttgtaattctaaacacatatacaaatctaagtattatgaggttgaaggaggtatgccatctgggtgtgctggtact

SEQ ID NO: 183423 - DNA, 80 bp, synthetic construct
  source 1..80: mol_type = other DNA
gcgctcaggtatccagacaaaatgttggtacacactccacacaaaatgctgtttcaaatggatcaagtctcaattatttc

SEQ ID NO: 183424 - DNA, 80 bp, synthetic construct
  source 1..80: mol_type = other DNA
tgtgccgttggattatgctgagggcgcctcaccgtacgtgcccataaccgtgacggtggcaccaatgagtgcagagtaca

SEQ ID NO: 183425 - DNA, 80 bp, synthetic construct
  source 1..80: mol_type = other DNA
tgtgttcccaggtgtcaaggaacctgcagtcctgaccaaatcagaccctagacttgaagttaactttgaagaggctatct

SEQ ID NO: 183426 - DNA, 80 bp, synthetic construct
  source 1..80: mol_type = other DNA
agtctaaatgcataatgagagacctgccattatgggccatattctatggctatgtagactggttagtaaaatccacagga

SEQ ID NO: 183427 - DNA, 80 bp, synthetic construct
  source 1..80: mol_type = other DNA
atcaacccagttctaggtatggcaacatagtcaccaatgatatgggcaccttatgttctaggatagtaactgatgaccac

SEQ ID NO: 183428 - DNA, 80 bp, synthetic construct
  source 1..80: mol_type = other DNA
aatgtgctaaaccacatgggctcaatggcttttagagtagttaatgagcatgataatcataccacccatgttaaaatcag

SEQ ID NO: 183429 - DNA, 80 bp, synthetic construct
  source 1..80: mol_type = other DNA
actataaaattacaggacaggagactgaaattttcttaaaacctagagcaactatcaagacagcaggacccagtgatatg

SEQ ID NO: 183430 - DNA, 80 bp, synthetic construct
  source 1..80: mol_type = other DNA
tttcaggggctcactgatcataaggttatctgtttatgctagtacttttaaccgtggtagactcagaatgggtttctttc

SEQ ID NO: 183431 - DNA, 80 bp, synthetic construct
  source 1..80: mol_type = other DNA
tcaagaagagagatttgatcaacaaacaaaccaaagatataacaaggttaaaggcagccttggacaaatatggtgttgac

SEQ ID NO: 183432 - DNA, 80 bp, synthetic construct
  source 1..80: mol_type = other DNA
ccctctctgccctcctgacgaggccatggtgtcatccatctccgcagtccgttcttcagctttggcattggtccgggccc

SEQ ID NO: 183433 - DNA, 80 bp, synthetic construct
  source 1..80: mol_type = other DNA
cgccccctccccaatttgcaacttagaagcaattcgcaacaccgatcaatagcaggcatggcgcaccagctatgtcttga

SEQ ID NO: 183434 - DNA, 80 bp, synthetic construct
  source 1..80: mol_type = other DNA
ccagctcctccaagtagcggcacatccacagacaaccagggagcacaatggcctggagatggtggtggagaaggcgccga

SEQ ID NO: 183435 - DNA, 80 bp, synthetic construct
  source 1..80: mol_type = other DNA
tggttgtggcttcactaaccaaataagtgagaaagttgcagaaatcacttcaatggtaagtagtgtcataacagaaaagt

SEQ ID NO: 183436 - DNA, 80 bp, synthetic construct
  source 1..80: mol_type = other DNA
accgcgttataccagacttcctaaatacgacccggatgagttttggactaaaacctgatatgcacatcaataaacttttt

SEQ ID NO: 183437 - DNA, 80 bp, synthetic construct
  source 1..80: mol_type = other DNA
aaccatggaaaacgtctacgacccaatgtctcaacccatcactccctcacccaataacctcatcagcacaaatgaaatta

SEQ ID NO: 183438 - DNA, 80 bp, synthetic construct
  source 1..80: mol_type = other DNA
tcaaaagaccagacaaaaatgaagtctcaggaattttaccagaaatatactgattgtttgtctaaatttaaacccatcat

SEQ ID NO: 183439 - DNA, 80 bp, synthetic construct
  source 1..80: mol_type = other DNA
tcgtcacctgttgcaactgcaccctgcccaatatctccatccagcagtgcaaggccggggacagaccggtggacctggag

SEQ ID NO: 183440 - DNA, 80 bp, synthetic construct
  source 1..80: mol_type = other DNA
agagaggaatagacctggatgaggcggaaaaagaaggaggagcaacacataacccagtatattcaatgaatggaacccta

SEQ ID NO: 183441 - DNA, 80 bp, synthetic construct
  source 1..80: mol_type = other DNA
cccactagcagacaaaggcataggcaatgttgtatacgcacagtggtgctcagaacagagctgcaaattagaccaaaaga

SEQ ID NO: 183442 - DNA, 80 bp, synthetic construct
  source 1..80: mol_type = other DNA
aaagtcgtgggacgattacacctggcaaacttcttcaaacccatccatattctacacctacggtgctgccccggcccgga

SEQ ID NO: 183443 - DNA, 80 bp, synthetic construct
  source 1..80: mol_type = other DNA
ataggttacaacttctcacaaggactaatgccagacggcagcaaatacattcctatgcaaatgagagctaaatggtaccc

SEQ ID NO: 183444 - DNA, 80 bp, synthetic construct
  source 1..80: mol_type = other DNA
cttccggaactgtaaaagggagaactatgcgatactacttgcatggaaaaattgaggaaattccactacatgaagttaca

SEQ ID NO: 183445 - DNA, 80 bp, synthetic construct
  source 1..80: mol_type = other DNA
taggcatacaaaatccacatgtagacaaagcctatgaatatctaatgactacaatagaaagacactaccaagacatacac

SEQ ID NO: 183446 - DNA, 80 bp, synthetic construct
  source 1..80: mol_type = other DNA
acaaagaaattgaaccagagaaactgcaaagtatcatggcctctgatgagcctccatcattaaaacccagactggaggtg

SEQ ID NO: 183447 - DNA, 80 bp, synthetic construct
  source 1..80: mol_type = other DNA
ggtacttcactcatgacttttgtaaagtcccactattcagcatgtgggcctcagcctgtgatctaagaaatccctggcta

SEQ ID NO: 183448 - DNA, 80 bp, synthetic construct
  source 1..80: mol_type = other DNA
ggaagagaaactcacataaaaaggtgacaaaaagagcggttgaaaaaagaaaacgagattcgaccagacagaagaggagg

SEQ ID NO: 183449 - DNA, 80 bp, synthetic construct
  source 1..80: mol_type = other DNA
tcgacccaagccagactgcgggtcgccagccgggtctcttggatcccggtgggcacgtagatgaccgtgccatcggtgtg

SEQ ID NO: 183450 - DNA, 80 bp, synthetic construct
  source 1..80: mol_type = other DNA
gtacaataataacaaaaggagacaaactactctgtcacctaacaggaatattttcacctccatggctaaacataggcaga

SEQ ID NO: 183451 - DNA, 80 bp, synthetic construct
  source 1..80: mol_type = other DNA
gaactgaatccagtatcgaaaatttcttcgggcgttccgcatgtgtagtggtcaaaacatataaaatgggtcaaaaagtt

SEQ ID NO: 183452 - DNA, 80 bp, synthetic construct
  source 1..80: mol_type = other DNA
cacagacaaaggcaccggaaacatggtctggatagactatctaacaaaatcagactccatatacacaaaaaacaaaagca

SEQ ID NO: 183453 - DNA, 80 bp, synthetic construct
  source 1..80: mol_type = other DNA
catgctctcaggtaacgggagatggaactccagcttactatacgagcacaggtggcgaggattgggctcatccgtgcccc

SEQ ID NO: 183454 - DNA, 80 bp, synthetic construct
  source 1..80: mol_type = other DNA
acacttgtgtaactttccaagttctgcaatctgtctataacgaataccttagtattaacagctttaatggcacagccaca

SEQ ID NO: 183455 - DNA, 80 bp, synthetic construct
  source 1..80: mol_type = other DNA
caggagagttgcaatcccaacagctcgaagaagactcgtgttcagaggaagaaaagtcgtcgccctgcatcgaagaaacc

SEQ ID NO: 183456 - DNA, 80 bp, synthetic construct
  source 1..80: mol_type = other DNA
ctctgagttcgggggcttgcggcaggctgttgctcagggactaccagctgaacttaaacctggtactaaccagttcttga

SEQ ID NO: 183457 - DNA, 80 bp, synthetic construct
  source 1..80: mol_type = other DNA
aataccaaacttcaaccgagtgtctttcatgacatattccctggaaagaaggaacctgctgccttacacccaaaggaccc

SEQ ID NO: 183458 - DNA, 80 bp, synthetic construct
  source 1..80: mol_type = other DNA
cagcacagttgataacattggatattgattcaagtccaatttcattagaagatagtgtttttggtacagagggtttggag

SEQ ID NO: 183459 - DNA, 80 bp, synthetic construct
  source 1..80: mol_type = other DNA
acattttaaacacatttagaacagaaggatgcttttcacatccacaactaccaaaattcaaaccaccttcaacaggccca

SEQ ID NO: 183460 - DNA, 80 bp, synthetic construct
  source 1..80: mol_type = other DNA
gagccgccgcggctcacgacgcggtttgagcacgtccgggcgatcggtgaaaaaagaccccgcgggccttcgcgactctc

SEQ ID NO: 183461 - DNA, 80 bp, synthetic construct
  source 1..80: mol_type = other DNA
gtgcgtaaccataatgactgtagacaattccgcctccactacatcaaaagacaaattgttctcagtgtggaaaatcacgt

SEQ ID NO: 183462 - DNA, 80 bp, synthetic construct
  source 1..80: mol_type = other DNA
ggaaaacctgtatattatccagctagctatcacttaggtaaatacaatcccatatttctaagcccatacagaactaacct

SEQ ID NO: 183463 - DNA, 80 bp, synthetic construct
  source 1..80: mol_type = other DNA
tatcaaggcttttgataccagtatcctcgcagaacaaggctgacgaactgtgcgcagcattcatggtggacccgggccgg

SEQ ID NO: 183464 - DNA, 80 bp, synthetic construct
  source 1..80: mol_type = other DNA
agggttgtgcacctcaatatcagataaaataactaccagggtcataaaatggctaattagaatcattagtgccttgacca

SEQ ID NO: 183465 - DNA, 80 bp, synthetic construct
  source 1..80: mol_type = other DNA
tggatttacgcctttgacttcacgcaccttgcgtctcatcaaaattgtgttactgatacggtgtcactatcaaaatggga

SEQ ID NO: 183466 - DNA, 80 bp, synthetic construct
  source 1..80: mol_type = other DNA
tctgtaagttatgaaatgttcaatacgacaattaataatacacaagactgtaatgaatgtcaaccaataaaagtaaataa

SEQ ID NO: 183467 - DNA, 80 bp, synthetic construct
  source 1..80: mol_type = other DNA
tagcatacattggaggcgacaacacccgagtcaaatataagcacacacatccaggtgaactaggccataaaattggtagt

SEQ ID NO: 183468 - DNA, 80 bp, synthetic construct
  source 1..80: mol_type = other DNA
aattccaattttcaaactggcaacagcacccaatttggctacaactcctataaaccaacaaaagagaatataaaatcagc

SEQ ID NO: 183469 - DNA, 80 bp, synthetic construct
  source 1..80: mol_type = other DNA
cctgggcccctaaacccagaccgtccttctctgtcagcttcaagctcggtttcaaaggctgaataaaatttgcaaggccg

SEQ ID NO: 183470 - DNA, 80 bp, synthetic construct
  source 1..80: mol_type = other DNA
ttgacagtaagggtgcctatggatttaacaccttgaacaaaatgggacatatctactgcaggcatgttaacaaagagaca

SEQ ID NO: 183471 - DNA, 80 bp, synthetic construct
  source 1..80: mol_type = other DNA
gattggtggattcacaccttgctaaagatcaaagatatggttctcagtgtattcaaaccaagtctagagagcaaggctat

SEQ ID NO: 183472 - DNA, 80 bp, synthetic construct
  source 1..80: mol_type = other DNA
accacaactggtgagttagaacaaaagcactttttggttgctagaccagatataaagaatgtgggccccagtgatatgtt

SEQ ID NO: 183473 - DNA, 80 bp, synthetic construct
  source 1..80: mol_type = other DNA
tgttgagggataccacacacatttcacaacaggccatgccacaggggatagaggacttgattgaaaaggttgccagtaac

SEQ ID NO: 183474 - DNA, 80 bp, synthetic construct
  source 1..80: mol_type = other DNA
aagtgtttatggtatagaaggattagaagccctggatttgcatactagtgcaggatacccttacacagcacttggtgtta

SEQ ID NO: 183475 - DNA, 80 bp, synthetic construct
  source 1..80: mol_type = other DNA
tgaacgcaagacaaacttccaacaacaccgcgtcggctcggaaaggctgtatgacttccttaagtacactaaagatgctg

SEQ ID NO: 183476 - DNA, 80 bp, synthetic construct
  source 1..80: mol_type = other DNA
cccttttgccaagcttgagtacaatattggttcctctagtatggtacctataacagtgacagttgcgcctatgtgtgcgg

SEQ ID NO: 183477 - DNA, 80 bp, synthetic construct
  source 1..80: mol_type = other DNA
tcattcacttcctgcatcagaccagtaagtatggcgtctcctggtcttcatctgcttataggcatcttgcttttaagtgt

SEQ ID NO: 183478 - DNA, 80 bp, synthetic construct
  source 1..80: mol_type = other DNA
tagtagagcagctgaggcatgagaatgctaccaggaaaaaggttaaacacaaccttgatgcaatattccagggtcttggt

SEQ ID NO: 183479 - DNA, 80 bp, synthetic construct
  source 1..80: mol_type = other DNA
tcaccctgtgtcaaaggtcaagggacagccttccggcttgcacaaaatggccgccaatctcttccgggtgaaaggtcact

SEQ ID NO: 183480 - DNA, 80 bp, synthetic construct
  source 1..80: mol_type = other DNA
gacctaaaaacacaaatgcttacaggcaacgaattttatacaacagcaggcaaaaagttaatagatacatttcacccaat

SEQ ID NO: 183481 - DNA, 80 bp, synthetic construct
  source 1..80: mol_type = other DNA
aaacagataacaaatacattccaggaaaatgcaaatatctggtagaaaacatgcccctgtggagtctactacacggatac

SEQ ID NO: 183482 - DNA, 80 bp, synthetic construct
  source 1..80: mol_type = other DNA
aaaagggcagtaataccacagaacctttaactactgatatgccaacacgagaggaatttgtagccaaaaaaaacactaat

SEQ ID NO: 183483 - DNA, 80 bp, synthetic construct
  source 1..80: mol_type = other DNA
gtgtaacttttattcctccaatggctgatctgcctgataagggtaagccttttgattctaggtttgtgttctgcagtact

SEQ ID NO: 183484 - DNA, 80 bp, synthetic construct
  source 1..80: mol_type = other DNA
tttatcaggctagcctttcaacttcaagtaatgcacgactttgttctatgcggcccttttagctacaaagatgaccttgc

SEQ ID NO: 183485 - DNA, 80 bp, synthetic construct
  source 1..80: mol_type = other DNA
agaacgctgtgagtatcatgtggaacagggacctcttaatcgccaaatccaatgctcaaggtactgactcaatagcaagg

SEQ ID NO: 183486 - DNA, 80 bp, synthetic construct
  source 1..80: mol_type = other DNA
tcctgtggttagaacaaatgtcacaaaagtttgcacctctttatgccactgaagcaaagagaatcagggatttgaaaaac

SEQ ID NO: 183487 - DNA, 80 bp, synthetic construct
  source 1..80: mol_type = other DNA
aacacaccagagacttctggtgttaactcccaagaggtgcctgcactaactgcagtcgagacaggagctagcggacaagc

SEQ ID NO: 183488 - DNA, 80 bp, synthetic construct
  source 1..80: mol_type = other DNA
ccagcggcgtctcgtagcgtacagccagggccgcttcgtggaaatgcgagacggctagacaggtaatgagcacgctgaag

SEQ ID NO: 183489 - DNA, 80 bp, synthetic construct
  source 1..80: mol_type = other DNA
cttttcggatccggcacttctgggggggaaatccagcgatggctggattatgtcgtcaattaaaaatgcggcgagtagat

SEQ ID NO: 183490 - DNA, 80 bp, synthetic construct
  source 1..80: mol_type = other DNA
gcaaagtgtagtcataatggatgatattatgcaaaacccagctggagatgacatgactttgttttgccaaatggtgtcta

SEQ ID NO: 183491 - DNA, 80 bp, synthetic construct
  source 1..80: mol_type = other DNA
acacaacgacagcagcttcggcttcgtaccctacagcgaaaactttggactggggcgactaccgggaggcaacccaaatc

SEQ ID NO: 183492 - DNA, 80 bp, synthetic construct
  source 1..80: mol_type = other DNA
ttatttgatgattggaagattaatttatccagcttagttcaactcagaagaaaattagaatttttcacgtatgtcagatt

SEQ ID NO: 183493 - DNA, 80 bp, synthetic construct
  source 1..80: mol_type = other DNA
tgaaaattgatatcagaaccacccccccccctgaatgcatcaacgatttacttcaggctgtggactcccaagaagtgagg

SEQ ID NO: 183494 - DNA, 80 bp, synthetic construct
  source 1..80: mol_type = other DNA
aagctaatcctatcgttatccgcaaggtgcctacgggaagcctattaacaccttggaagagatttggctggtcgctcagt

SEQ ID NO: 183495 - DNA, 80 bp, synthetic construct
  source 1..80: mol_type = other DNA
tgcgcacgtcacagccgccattttgtttgacaaaatggccgacttccttccgcttttttaaaaataacggcccagcggcg

SEQ ID NO: 183496 - DNA, 80 bp, synthetic construct
  source 1..80: mol_type = other DNA
gtgaacccaaacccaaaaccaaagtgccagaaagaagggtggtagcacaaggtcctgaagaggaatttggtagatcactt

SEQ ID NO: 183497 - DNA, 80 bp, synthetic construct
  source 1..80: mol_type = other DNA
tattattttgagttatttgatttgttgtccacagctctttacagtatcacttaactattattgtttgtattttgctcctt

SEQ ID NO: 183498 - DNA, 80 bp, synthetic construct
  source 1..80: mol_type = other DNA
tagtgtgtggtaaagcaattagtctagtggatagagcaacaaatatcagatatagtgtagaccagttagtttcagctata

SEQ ID NO: 183499 - DNA, 80 bp, synthetic construct
  source 1..80: mol_type = other DNA
ttccaccaatgggactggcgacgtgggtggcttagtgacaaagctctcaaaagaatgctccagaaaccgcttgattttga

SEQ ID NO: 183500 - DNA, 80 bp, synthetic construct
  source 1..80: mol_type = other DNA
tgttcaggttcaccatggaggttccttaaagagaaactctgcacatggcttcagctcagttatgtacataaacaatctga

SEQ ID NO: 183501 - DNA, 80 bp, synthetic construct
  source 1..80: mol_type = other DNA
aatgtattaaacacactggctactccatattgctttaaatttccagaactagaaaaattaccaggagtaaataatcaaac

SEQ ID NO: 183502 - DNA, 80 bp, synthetic construct
  source 1..80: mol_type = other DNA
ctaaagaccctacggctccgcctgcgcaggtgccacaggttcctgccgtgtgagaacaagagtaaagctgtggaacagat

SEQ ID NO: 183503 - DNA, 80 bp, synthetic construct
  source 1..80: mol_type = other DNA
gacgagcgaagcagaagccccatcggaagaagagacgtcgaccaccgtccgagagcagctgcagctccagttccaagagc

SEQ ID NO: 183504 - DNA, 80 bp, synthetic construct
  source 1..80: mol_type = other DNA
gatgacgcgcaactgaccctgggtcaccaccagcagcttccagtattctacgtcgcgcggggtgaggatggtctcctcca

SEQ ID NO: 183505 - DNA, 80 bp, synthetic construct
  source 1..80: mol_type = other DNA
ttcaaatgggtcgggtcccctttgcctccacagcccattgacgacccctgccaaaaacccacacacgaacttcccgaccc

SEQ ID NO: 183506 - DNA, 80 bp, synthetic construct
  source 1..80: mol_type = other DNA
ttcgcggctggtactacgcgatgcgctcgggttcctctttgtgctcgacgttaacgtctcgcgcttcgtcgagtcggcgc

SEQ ID NO: 183507 - DNA, 80 bp, synthetic construct
  source 1..80: mol_type = other DNA
aagtaagctccacccaggtctgacgtcagtgtgaaaggtcatcctcggcgggaacttacatgaaatggcgaccaattgct

SEQ ID NO: 183508 - DNA, 80 bp, synthetic construct
  source 1..80: mol_type = other DNA
ccgtagcccccatgttcgcagaatacaacggtctgagattggccgggccacagggactacctgttatgaacactccagga

SEQ ID NO: 183509 - DNA, 80 bp, synthetic construct
  source 1..80: mol_type = other DNA
ggataactttgtgaaaaaacagcttcttctgagggcaatttgtcacagggttaagggcaatttgtcacagacaggactgt

SEQ ID NO: 183510 - DNA, 80 bp, synthetic construct
  source 1..80: mol_type = other DNA
ggaccgccgcagctgtctccacagccggcgttggccccccagcagccgcatgtccgccactcgtcaccaccggtgttgta

SEQ ID NO: 183511 - DNA, 80 bp, synthetic construct
  source 1..80: mol_type = other DNA
gcggcaattttatcactcatcttactatactggctgctcgctatggttttactggggggccgacgccgccaggtggtcct

SEQ ID NO: 183512 - DNA, 80 bp, synthetic construct
  source 1..80: mol_type = other DNA
accttataccactcatacagggtcagaagaatgaacagatctttggaacaaatttgtatataggggatggagtttttaaa

SEQ ID NO: 183513 - DNA, 80 bp, synthetic construct
  source 1..80: mol_type = other DNA
atccaaccctaccagtggttaagtctaagggggcctttccagtatctcaaagagagttcaagaatgaggcaccttatgat

SEQ ID NO: 183514 - DNA, 80 bp, synthetic construct
  source 1..80: mol_type = other DNA
tggcggtaaccctattccacagcagactctcaaagacccgtgcgagcagcccacctacttactgcccggtaccggtggcg

SEQ ID NO: 183515 - DNA, 80 bp, synthetic construct
  source 1..80: mol_type = other DNA
gataccggcatgattgacagcctgggcgaggatgtcacctgatggtgataagaagacacgggagacttagtacggtttca

SEQ ID NO: 183516 - DNA, 80 bp, synthetic construct
  source 1..80: mol_type = other DNA
caggactcttttccccagtactactaacaccaaacagactaaacccacaatttccaggactatacaacacaattacctac

SEQ ID NO: 183517 - DNA, 80 bp, synthetic construct
  source 1..80: mol_type = other DNA
acaaatagagccctttgggggcagctttagcaccactacatggagcctaaaagtgctctttgatgagcaccaaaaattcc

SEQ ID NO: 183518 - DNA, 80 bp, synthetic construct
  source 1..80: mol_type = other DNA
ccaaggtcaccaacaaggaggaggcccttaggccaaaccggtctttttggcgtcatgtgcgtctggatgacagggaagct

SEQ ID NO: 183519 - DNA, 80 bp, synthetic construct
  source 1..80: mol_type = other DNA
ggacattatagaaagaagaaacacacaatttcaatgggaaacaaaatttactgagaacgcaacacacataaaccctacat

SEQ ID NO: 183520 - DNA, 80 bp, synthetic construct
  source 1..80: mol_type = other DNA
ctggatcagcagtcgggtgtgacccagagactttctggtcaaaaataccggcaatgttggatgacaagtgtataatggcc

SEQ ID NO: 183521 - DNA, 80 bp, synthetic construct
  source 1..80: mol_type = other DNA
gcagaaggcgacgctggagacgactacgcaccaggagacctggacgccctgttcgccgccgtcgccgaagacgcagagta

SEQ ID NO: 183522 - DNA, 80 bp, synthetic construct
  source 1..80: mol_type = other DNA
gtgtcacattcattccaccaatggctgacttgccagacaagggtaaaccatttgactctcgttttgtcttctgcagcaca

SEQ ID NO: 183523 - DNA, 80 bp, synthetic construct
  source 1..80: mol_type = other DNA
aaggagaccctgcattttgccaccttacaggcatatactcacctccctggctaacaccaggtagaatatccccggagact

SEQ ID NO: 183524 - DNA, 80 bp, synthetic construct
  source 1..80: mol_type = other DNA
tgtgcatatggatttaacaccacacatggaagttgctatttcacattacactgctcaactttctagcttagatatttcca

SEQ ID NO: 183525 - DNA, 80 bp, synthetic construct
  source 1..80: mol_type = other DNA
gtccatacactaagcccccaatgaaaagcaaaactaaccccatgatggggtacgtattctatgacactaactttggcaac

SEQ ID NO: 183526 - DNA, 80 bp, synthetic construct
  source 1..80: mol_type = other DNA
atccacattgggacaccctatatggtggtttagcatatggacacagcactgtaacacctggcactacctcatcaccaaca

SEQ ID NO: 183527 - DNA, 80 bp, synthetic construct
  source 1..80: mol_type = other DNA
catgggctcacaggtatccacacaacgctccggctcgcatgaaaattctaactcagccactgaggggtccaccataaact

SEQ ID NO: 183528 - DNA, 80 bp, synthetic construct
  source 1..80: mol_type = other DNA
tggatatgtacagggtgccagtgaccaccagtgcagatctggacaaacctattctgtgtttgtctttatcaccagcatca

SEQ ID NO: 183529 - DNA, 80 bp, synthetic construct
  source 1..80: mol_type = other DNA
gcccacgattggtatcctgtggaagaaacccagtactatccaaaacacatacaatataatcttttaattggagagggacc

SEQ ID NO: 183530 - DNA, 80 bp, synthetic construct
  source 1..80: mol_type = other DNA
ggatcaacgtcttcaatacaccatgttgggggaaatcctgaactactacactcactggactggttcacttaggttcacat

SEQ ID NO: 183531 - DNA, 80 bp, synthetic construct
  source 1..80: mol_type = other DNA
cttccgggtcaaaggtcacagctacgtcacaagtcacgtggggagggcctgctgcgcatgcacggaagtaggccccgcca

SEQ ID NO: 183532 - DNA, 80 bp, synthetic construct
  source 1..80: mol_type = other DNA
aataggggatatgaccccagcagaaagactaatcaatatgatcacagcagaacaagagatacagttcctccaagccaaaa

SEQ ID NO: 183533 - DNA, 80 bp, synthetic construct
  source 1..80: mol_type = other DNA
tagcacctcaaacttgatgcccgcctctctggcatccttgcccaccagcaggtcaaagctatgaaacagcccctcggccg

SEQ ID NO: 183534 - DNA, 80 bp, synthetic construct
  source 1..80: mol_type = other DNA
tccaaagtgtgaatgtgtataatgtgcaagttgtgtccaagacaactgagaaaattttggcaattccactagacatgagc

SEQ ID NO: 183535 - DNA, 80 bp, synthetic construct
  source 1..80: mol_type = other DNA
cgctgcagtactacgacggcatctccataggtatgaggaaggtaatcgcggatgtctgccgcagtggctatgcctccatg

SEQ ID NO: 183536 - DNA, 80 bp, synthetic construct
  source 1..80: mol_type = other DNA
tacgttaaactaaagctgcccccccccagactgtttgaagacaagtggtacacccagcacgacttatgcaaggttccgct

SEQ ID NO: 183537 - DNA, 80 bp, synthetic construct
  source 1..80: mol_type = other DNA
actttgacgcaaccgcagtcactgaaacacgggacactataaacaccgttcctgtgtcgaaccatggcggcaatcgccgt

SEQ ID NO: 183538 - DNA, 80 bp, synthetic construct
  source 1..80: mol_type = other DNA
aagatgcttacaagagggagatgaaaataaggtaagcagtcctggtaggctaaggtgaagccttctcttaagttgctagt

SEQ ID NO: 183539 - DNA, 80 bp, synthetic construct
  source 1..80: mol_type = other DNA
cgtagagttccaggtgctgggtgacttgtacaatacatgtctcaatattgaccttccgcaatttgaggccaacggatcag

SEQ ID NO: 183540 - DNA, 80 bp, synthetic construct
  source 1..80: mol_type = other DNA
tgaggctgccctgggttatatcctgtgtaaaccgatgctgaccgggacagcccggggcaggattgaagtgtacattagtt

SEQ ID NO: 183541 - DNA, 80 bp, synthetic construct
  source 1..80: mol_type = other DNA
gcaaacctttatcacaggtccctttgtcaaagatgtcctacagtcagaaaaatataacaaatacaaagaagatttaaaaa

SEQ ID NO: 183542 - DNA, 80 bp, synthetic construct
  source 1..80: mol_type = other DNA
ctaacaggcatatacagtccagccttcctaaacccaggccgcattagtccagaaatatttggcctatacacagaaatact

SEQ ID NO: 183543 - DNA, 80 bp, synthetic construct
  source 1..80: mol_type = other DNA
tggaagagacggcggcgcggctggttccgacggcggtggacccgtggcagaattcgcagaagatggcctagacggactta

SEQ ID NO: 183544 - DNA, 80 bp, synthetic construct
  source 1..80: mol_type = other DNA
cccaatttggccacaacagctacaagcccactactgaaaacattaaaaccgctaggtcagcctattggactgccctaaac

SEQ ID NO: 183545 - DNA, 80 bp, synthetic construct
  source 1..80: mol_type = other DNA
cttttgtgagccaaactgccttttatcaaaatgatgtgcagaacgcaattgatcgggcagtggtacgcgtggccgacaca

SEQ ID NO: 183546 - DNA, 80 bp, synthetic construct
  source 1..80: mol_type = other DNA
aagagtagactaattgaggcatccagcttgaacgactctgttaacatgagagttaaattaggaaatttgtacaaagcttt

SEQ ID NO: 183547 - DNA, 80 bp, synthetic construct
  source 1..80: mol_type = other DNA
atgtatgttcacacacgggatgccatctacaaaaatgcacacttggctgaagccaatgataacaccatacttatagctct

SEQ ID NO: 183548 - DNA, 80 bp, synthetic construct
  source 1..80: mol_type = other DNA
ataagatctaaaactattgtaccaaatgctaaaccccaaggattgccagttaccacattaccaggatctggtcagtttct

SEQ ID NO: 183549 - DNA, 80 bp, synthetic construct
  source 1..80: mol_type = other DNA
taaactaacctttgtgttttgtggttcagccatggctactggcaaatttttgcttgcttacgcccccccaggagcgaatg

SEQ ID NO: 183550 - DNA, 80 bp, synthetic construct
  source 1..80: mol_type = other DNA
attctcgtcacctgttctgcctgttcagacatggcagtgcgcatgcttcgtgacaccccaatgatcaagcaaattgcaaa

SEQ ID NO: 183551 - DNA, 80 bp, synthetic construct
  source 1..80: mol_type = other DNA
atgtatacagtgcaattgcagagacaggctgaacttatgcaagaaatctttgccatcaatgtagatatagcctcacaccc

SEQ ID NO: 183552 - DNA, 80 bp, synthetic construct
  source 1..80: mol_type = other DNA
taaattgcttaggtagtttagtgttgatattaggtacaatctatgctatttacaaattactatgtgtaacacaaggtgct

SEQ ID NO: 183553 - DNA, 80 bp, synthetic construct
  source 1..80: mol_type = other DNA
atagcaaacttagcaatgcagaaaatgctaacctctttacaaaagagaaaaacaacacagaacacgaggtgcagaccatt

SEQ ID NO: 183554 - DNA, 80 bp, synthetic construct
  source 1..80: mol_type = other DNA
gattaccctgcttgcaatcttgctttattagccaaccaagacgaaccaacaataataaatgttggagatgcagaatctta

SEQ ID NO: 183555 - DNA, 80 bp, synthetic construct
  source 1..80: mol_type = other DNA
gatcacattagagtggcaatctcccattattcagcacaattagcaacactggatattgacccaagcccaatttctttaga

SEQ ID NO: 183556 - DNA, 80 bp, synthetic construct
  source 1..80: mol_type = other DNA
gggctgcaaactaacattctacagaaccaaaaataccaactacccaggaccctttggggggggtatgactacagacaaat

SEQ ID NO: 183557 - DNA, 80 bp, synthetic construct
  source 1..80: mol_type = other DNA
aacattactgtaccagcaacacaagggttgcctgtgttggttactccagggtccagtcaatatttgacatctgacgattt

SEQ ID NO: 183558 - DNA, 80 bp, synthetic construct
  source 1..80: mol_type = other DNA
tgtataagtcactaagcactccgagcgttagcgaggagtgcgaccctaccccctgagcccacttcttcggagccgcgcgc

SEQ ID NO: 183559 - DNA, 80 bp, synthetic construct
  source 1..80: mol_type = other DNA
tatatcatggtaaattcagaatcctatggtgtcttattatctctaaagtagtcaacattatggtctaacttgtatttccc

SEQ ID NO: 183560 - DNA, 80 bp, synthetic construct
  source 1..80: mol_type = other DNA
tcaagtatagtaaaactatcctatcaaatcaggggccctttaagggtttcaatgaggtttccaccgcttttaggcatatt

SEQ ID NO: 183561 - DNA, 80 bp, synthetic construct
  source 1..80: mol_type = other DNA
aggttggaagctgatctcaacacagcaatattcagcaagtacaagggaaatctacaggtagaatgcaaccaatacataga

SEQ ID NO: 183562 - DNA, 80 bp, synthetic construct
  source 1..80: mol_type = other DNA
cacgtgaaggcgtgggtaccaagaccaccaaggctatgtgattatgaaagtaaggcaagcgtggacttcaagacagagcc

SEQ ID NO: 183563 - DNA, 80 bp, synthetic construct
  source 1..80: mol_type = other DNA
agaaaccagtgctgcgcacggcaactgtgcaggggccgagtttggatttcgctctatctctgcttaggagaaacattagg

SEQ ID NO: 183564 - DNA, 80 bp, synthetic construct
  source 1..80: mol_type = other DNA
cggggggcgggcgacggtgcggccccaatacaactctccgctcgttagctggtagaatatccgcccggcgtctaggttgt

SEQ ID NO: 183565 - DNA, 80 bp, synthetic construct
  source 1..80: mol_type = other DNA
aggtcccggtagcacgccatggcctactggtggggccggagacgccggtggcgccgctggaggaggcgccggcgtcctct

SEQ ID NO: 183566 - DNA, 80 bp, synthetic construct
  source 1..80: mol_type = other DNA
tcaacaccatggttaataatattatcatcaagaccctgacaattgaaacttacagaaatatagatttagacaaactcaag

SEQ ID NO: 183567 - DNA, 80 bp, synthetic construct
  source 1..80: mol_type = other DNA
ccagaaacaccctcacattcttggagctggccctgtgggtatgcctcaggcacgcaaagttcctgccccgggcatggcac

SEQ ID NO: 183568 - DNA, 80 bp, synthetic construct
  source 1..80: mol_type = other DNA
gctcttcgtgctcttcatgtccactgagcaaggttcttctggcacgactgttcctatatgctctagcactcttgttgcta

SEQ ID NO: 183569 - DNA, 80 bp, synthetic construct
  source 1..80: mol_type = other DNA
catcaggtggacaaagaaaccttcacagatgcatgagcacgtactatccctatgtcacttaatgtggcataatgggcgtg

SEQ ID NO: 183570 - DNA, 80 bp, synthetic construct
  source 1..80: mol_type = other DNA
taaaatgacgtaaaaggaacccgtgcaagtataaaagccaaaagtatacatacaaaggttgctagacacagggttgtgtt

SEQ ID NO: 183571 - DNA, 80 bp, synthetic construct
  source 1..80: mol_type = other DNA
ttaataacctacaacagaaagacacccctagggggcaacatactaacagcaccagcactacacccaggcaacctaatgct

SEQ ID NO: 183572 - DNA, 80 bp, synthetic construct
  source 1..80: mol_type = other DNA
atcatctccgtttgtgtgtttagtgtggccagtacggccactcctgtgccacgccctggcatgctgctgacatctgggcg

SEQ ID NO: 183573 - DNA, 80 bp, synthetic construct
  source 1..80: mol_type = other DNA
gggataccaggagccgccggccccccggccccccgggctccataccagggataccaggagccgccggccccccgggctcc

SEQ ID NO: 183574 - DNA, 80 bp, synthetic construct
  source 1..80: mol_type = other DNA
actatccgtgggccccaaaagataatcccttcaaagtgtcttttaagcttggcttcaaataaacaaggccgtgggaaact

SEQ ID NO: 183575 - DNA, 80 bp, synthetic construct
  source 1..80: mol_type = other DNA
atgttcggagacccacagccctacaaaccttccagcaacgactggaaggaagagtacgaggctgccaaatactgggatag

SEQ ID NO: 183576 - DNA, 80 bp, synthetic construct
  source 1..80: mol_type = other DNA
cagtaaagaattgctgacagaaaggaaacaagctgagacagcagggactttccaccagagggaggtaaccagggaggagc

SEQ ID NO: 183577 - DNA, 80 bp, synthetic construct
  source 1..80: mol_type = other DNA
gctggcaggcctgcaccacgatcagagtctcaacgtcctcccttttgatgggcacgatgcccacgacccaaatcgcccac

SEQ ID NO: 183578 - DNA, 80 bp, synthetic construct
  source 1..80: mol_type = other DNA
agatacacacctctcctcctttcctagacactccactaacagggcccagcatacacccaggcatgatgatgctgtcaaag

SEQ ID NO: 183579 - DNA, 80 bp, synthetic construct
  source 1..80: mol_type = other DNA
cagagccacagagtacacacataaatacagcacaaactaccattacaaaccagatggagagggacacgcactaacagaca

SEQ ID NO: 183580 - DNA, 80 bp, synthetic construct
  source 1..80: mol_type = other DNA
acatatcttaggtttgattctgaaatcaccatagtggtatcagttgcaagtaagggtgatgacaatggacatgtggttat

SEQ ID NO: 183581 - DNA, 80 bp, synthetic construct
  source 1..80: mol_type = other DNA
ctggccgggcctgggcaaggctcttaaagcgaaaccatgttcctcggcaggccctacagacaccgaaagctccgcaaaac

SEQ ID NO: 183582 - DNA, 80 bp, synthetic construct
  source 1..80: mol_type = other DNA
atgacaaaggcaaaggaaaccaaatatggtttcaatactgcactaaacccaccacagaatttgatgaaaaacaatgcaaa

SEQ ID NO: 183583 - DNA, 80 bp, synthetic construct
  source 1..80: mol_type = other DNA
caggaagtgccagcactaacagcggtagaaacaggagccacgagcagtgtggtacctgcagatttggtacagacgcgcca

SEQ ID NO: 183584 - DNA, 80 bp, synthetic construct
  source 1..80: mol_type = other DNA
acgtccaaaggacatagtggaatggaaatccaaaagaaataataacatgagcttgtgaacaacaaagcctactcctttct

SEQ ID NO: 183585 - DNA, 80 bp, synthetic construct
  source 1..80: mol_type = other DNA
acaaaccagctactgacgaatattttaacaaactagatggctactggggagatcccatatatgtacatacaggaattgta

SEQ ID NO: 183586 - DNA, 80 bp, synthetic construct
  source 1..80: mol_type = other DNA
ctcatcccgctttgctgctacagagcaagaaaaaagttaaaatatatagctggaaaaccagaccctggggcaaaaagaaa

SEQ ID NO: 183587 - DNA, 80 bp, synthetic construct
  source 1..80: mol_type = other DNA
aggggcttccggtcttaaacgtgcccggcagtaatcagttcttgacatcggatgattaccagtccccgtgtgcgatgcct

SEQ ID NO: 183588 - DNA, 80 bp, synthetic construct
  source 1..80: mol_type = other DNA
ataatacaagactcatcctcaactggatcattgatttgtgaactacgaactgctactatataacaaccatccttagcttc

SEQ ID NO: 183589 - DNA, 80 bp, synthetic construct
  source 1..80: mol_type = other DNA
aatattgtgaagataataaatggattgtgccagctgaaaataccatcgaacgagacttgaatgtagcaaactcagtaata

SEQ ID NO: 183590 - DNA, 80 bp, synthetic construct
  source 1..80: mol_type = other DNA
accacactaagcttagcaatacagagcatgctagtacttttagatccacgagttccaatgaagcaggagcagttcaaaat

SEQ ID NO: 183591 - DNA, 80 bp, synthetic construct
  source 1..80: mol_type = other DNA
aagaaaaactttgaggcactcacctcatgggacactaacaatccaaaccacttaaactccacctatgccaacggcaacat

SEQ ID NO: 183592 - DNA, 80 bp, synthetic construct
  source 1..80: mol_type = other DNA
acctgacctctccagggctcacataaagggaggcttagtatacatgcttcttgcttttcacaggaacctggtggctagtc

SEQ ID NO: 183593 - DNA, 80 bp, synthetic construct
  source 1..80: mol_type = other DNA
catggtcggtggaaacccctccggctgtgttgggacgtcgattctcaataccatgatcaacaacatcatcatcatttcct

SEQ ID NO: 183594 - DNA, 80 bp, synthetic construct
  source 1..80: mol_type = other DNA
tgaacccaggtgctgaatctgtgatgaacagaaccctattgggggagattctcaattactacactcattggtccggaagc

SEQ ID NO: 183595 - DNA, 80 bp, synthetic construct
  source 1..80: mol_type = other DNA
cgtcttatcgttgtgtcacttaatgtggcataatggtagggacacatacaagcagtttgagcaaaggatacgcagtgtta

SEQ ID NO: 183596 - DNA, 80 bp, synthetic construct
  source 1..80: mol_type = other DNA
gaggctaaagtcagagtgtacatgaaacccaaacatgtcagggtgtggtgtccaagaccacctcgtgcagtaccatatca

SEQ ID NO: 183597 - DNA, 80 bp, synthetic construct
  source 1..80: mol_type = other DNA
gtgtggaaaatctttagcaaccacagtgatagctagagggctaactgatagtggaaacatatactctctacccccaaacc

SEQ ID NO: 183598 - DNA, 80 bp, synthetic construct
  source 1..80: mol_type = other DNA
gtgtcgtcaggacatcacaactgggtgaagaagaacagtttgaaagcaaaccccataaagtctatcgctttaaggcacca

SEQ ID NO: 183599 - DNA, 80 bp, synthetic construct
  source 1..80: mol_type = other DNA
ggtccgtcattacgtagagcatagactccacccccctgttggcagctaggctgtctgccaccaggtcatgaccggggccc

SEQ ID NO: 183600 - DNA, 80 bp, synthetic construct
  source 1..80: mol_type = other DNA
ctgtcccttacttcgggccaggagttgactacaagggagatgcgcttacaccactatcgcgcaaggatttgacaacttat

SEQ ID NO: 183601 - DNA, 80 bp, synthetic construct
  source 1..80: mol_type = other DNA
ggtgagggaccgtgctctccaggggattgtggtggcaagttactgtgtgtacatggaaccataggaatggtgacagcagg

SEQ ID NO: 183602 - DNA, 80 bp, synthetic construct
  source 1..80: mol_type = other DNA
ctgggttttagcggtcgtaatcgttattatcatcattatcattttctactttcgaataccgcaaaagctgtggctgctct

SEQ ID NO: 183603 - DNA, 80 bp, synthetic construct
  source 1..80: mol_type = other DNA
tactggcaaatttttgcttgcttacgcccccccaggtgcgaatgcccccaaaactcgtaaagatgcaatgttaggtacac

SEQ ID NO: 183604 - DNA, 80 bp, synthetic construct
  source 1..80: mol_type = other DNA
ggtctctggagagttccggagtccctcttggaggtccatggtgaggggacctgatacctcaccgccgtttgcctaggcta

SEQ ID NO: 183605 - DNA, 80 bp, synthetic construct
  source 1..80: mol_type = other DNA
aagatgtaccacgactccataccagggtacgggtacgtgcctttctcctaccagttcggagcagggcagatgccagacgg

SEQ ID NO: 183606 - DNA, 80 bp, synthetic construct
  source 1..80: mol_type = other DNA
aagtagactacattgtcacttactacacagtacctccatttaaattaaacaaattaagcagcccttttcttcatccaggt

SEQ ID NO: 183607 - DNA, 80 bp, synthetic construct
  source 1..80: mol_type = other DNA
gttgcgagaaccctattacaaagcaataggctttagttcccaaaaacactttgaagtaattacatggctatatagtaatg

SEQ ID NO: 183608 - DNA, 80 bp, synthetic construct
  source 1..80: mol_type = other DNA
gaatgtgcatgtactgtatcttagtgacaatgggttcctccgggtaactcatgcctatgaccatgatgataatagatcta

SEQ ID NO: 183609 - DNA, 80 bp, synthetic construct
  source 1..80: mol_type = other DNA
tccactgccaggcgacctgattctaacggttccacgatccgggagagcgtttctagatatagagcaaagcgtaccacgtc

SEQ ID NO: 183610 - DNA, 80 bp, synthetic construct
  source 1..80: mol_type = other DNA
aggagacgagcccgcctacgaacccggagacctagacgccctgtacgccgccgtcgaagaagagtaaggaggaaaagaag

SEQ ID NO: 183611 - DNA, 80 bp, synthetic construct
  source 1..80: mol_type = other DNA
cccttcagctacaaagatgactctgtaatgacaggcattaccgcgggctacaagtttagattctcatggggcggtgatat

SEQ ID NO: 183612 - DNA, 80 bp, synthetic construct
  source 1..80: mol_type = other DNA
gccatgacacaaggtaagagggagatggggggaggtctcgagggcttctcttcacagctgggtctcttttacgccctggc

SEQ ID NO: 183613 - DNA, 80 bp, synthetic construct
  source 1..80: mol_type = other DNA
gcattgcagctatcacagccaacaaggccggccctaccccccgcagaacagagcgttccaaacacactgcaaagcactcc

SEQ ID NO: 183614 - DNA, 80 bp, synthetic construct
  source 1..80: mol_type = other DNA
gtatgcatgctgttgcacggaagtccgggaagtgggaaatcattggtcacatctgtaatttcgcgtgggctcaccacaga

SEQ ID NO: 183615 - DNA, 80 bp, synthetic construct
  source 1..80: mol_type = other DNA
cctcaatatctttcagacgtcgatgccacctctgtggataagcccactcacccagaaacatcagcagatagattctacac

SEQ ID NO: 183616 - DNA, 80 bp, synthetic construct
  source 1..80: mol_type = other DNA
aatgcccccacgccaaaaagtcctcgagtagaagaaagttctcacggacccgcccggtgttcccaagctacttctgaagc

SEQ ID NO: 183617 - DNA, 80 bp, synthetic construct
  source 1..80: mol_type = other DNA
ggtgcctcaaaccccagtgtgttttaccaacccaagagtggatttccccgtttcaccatcccctttacaggtcttggatc

SEQ ID NO: 183618 - DNA, 80 bp, synthetic construct
  source 1..80: mol_type = other DNA
agtgtcaactcaaaaatctggatctcacgaaactggtaacgtggccactggaggatcaacaataaattttacaaacatca

SEQ ID NO: 183619 - DNA, 80 bp, synthetic construct
  source 1..80: mol_type = other DNA
ggcctatggtccactatgagatatttaaacaccacctacataaacacactgtttccaggcacagacagtctagtggccgc

SEQ ID NO: 183620 - DNA, 80 bp, synthetic construct
  source 1..80: mol_type = other DNA
tgtgaaatttgtaggataaaaagtgtcgttgtatgatgcacaacgatcgtgaaactggagactgtagctctctaccgaat

SEQ ID NO: 183621 - DNA, 80 bp, synthetic construct
  source 1..80: mol_type = other DNA
cggcacggaagtccgtgacacagctaattatcaacctagtgatgatgcatggctcaattttgatggcaccctattaggaa

SEQ ID NO: 183622 - DNA, 80 bp, synthetic construct
  source 1..80: mol_type = other DNA
cagtttacaagtcccaacacacacccaggactactcatgctcactaaacacaagataataatacccagcttcttaacaag

SEQ ID NO: 183623 - DNA, 80 bp, synthetic construct
  source 1..80: mol_type = other DNA
aggtcactaagcactccgagcgtaagcgaggagtgcgaccctctaccaaggggcaactccctcgaagtccggcgctacgc

SEQ ID NO: 183624 - DNA, 80 bp, synthetic construct
  source 1..80: mol_type = other DNA
cttcaacgagagatggttaatacatggcggtatgccatcggggtcaccatgcactactgtgttgaattcattatgcaatc

SEQ ID NO: 183625 - DNA, 80 bp, synthetic construct
  source 1..80: mol_type = other DNA
ggtgaaattgcaagttattacacacactggacagggagcctacgatttagtttcatgttttgtggaacagctaatacaac

SEQ ID NO: 183626 - DNA, 80 bp, synthetic construct
  source 1..80: mol_type = other DNA
cgccatcgaaagagataccgagtaaggaggcgtcggtgggggaggcgctatactcgcaggtggcgactcagactccgtag

SEQ ID NO: 183627 - DNA, 80 bp, synthetic construct
  source 1..80: mol_type = other DNA
cagtgatcacgcatcagttcatgtatgtgccgcctgggggtccggttcctgagagtgtaaatagctacgcttggcaaacg

SEQ ID NO: 183628 - DNA, 80 bp, synthetic construct
  source 1..80: mol_type = other DNA
gacgcctactatttactcaaagcactccaaaaagagcaagagagcagccagtcagaagaagagacagcccaagaagagga

SEQ ID NO: 183629 - DNA, 80 bp, synthetic construct
  source 1..80: mol_type = other DNA
gcccgcagttctaacagaaaaagacccccggttggaagtagacttgaactcttctcttttctcaaaatatgctggaaatg

SEQ ID NO: 183630 - DNA, 80 bp, synthetic construct
  source 1..80: mol_type = other DNA
catccaccattcgcgcctgtaacattagaggctttgtagcacttgtagtctgtggacacactcgtgcaggctctaactat

SEQ ID NO: 183631 - DNA, 80 bp, synthetic construct
  source 1..80: mol_type = other DNA
ccaggaatttctaaacctacaagtaggaaagaggcaatgctaggtacacatgtggtctgggatgtaggattgcaatctac

SEQ ID NO: 183632 - DNA, 80 bp, synthetic construct
  source 1..80: mol_type = other DNA
gactacccagattgcaacttggctttagttgcaaaccaacctgaaccaaccataatcaatgtgggtgatgtggtgtccta

SEQ ID NO: 183633 - DNA, 80 bp, synthetic construct
  source 1..80: mol_type = other DNA
ggcccaacattgcctcgatgtcgtccaggatggtgcggaggcgcttttcgttttctctggtggtctcgagctccttctgt

SEQ ID NO: 183634 - DNA, 80 bp, synthetic construct
  source 1..80: mol_type = other DNA
gccaaggctttgttaccatgtactgattgcccaaaaccagaattctacaagcagtgttgtcctctgacctgcggcaaggc

SEQ ID NO: 183635 - DNA, 80 bp, synthetic construct
  source 1..80: mol_type = other DNA
ggcgcgtgaggatgtacttcaagtcaaaagagttgatgttgtaaccggtcacaaaggccggcgcgtaccgttgaaagaaa

SEQ ID NO: 183636 - DNA, 80 bp, synthetic construct
  source 1..80: mol_type = other DNA
cagccaagttgatggcacagtgaatgaacacagcttgagtgaaggggaaacagcgaagaaatttgcagcaaccaccacta

SEQ ID NO: 183637 - DNA, 80 bp, synthetic construct
  source 1..80: mol_type = other DNA
tacttaaggacaccactcacattgcccaatctgcactaccacagggtatcgaagatataatccaacaagtagcctctaat

SEQ ID NO: 183638 - DNA, 80 bp, synthetic construct
  source 1..80: mol_type = other DNA
aaacagactactaacagtatttaacacatttaaaactgaagaacacttatacgacccatcagccaaagagactaaaaaca

SEQ ID NO: 183639 - DNA, 80 bp, synthetic construct
  source 1..80: mol_type = other DNA
ggaaacggagtttggatagactacttaagcaaaaaagacacaaaatacagccccacacagagcaaatgtgcaatatttga

SEQ ID NO: 183640 - DNA, 80 bp, synthetic construct
  source 1..80: mol_type = other DNA
cgcggcccttccgtattcttgtcgcgacgcgcttccagcacctgcttttcgtagtccagctggtggaagaccatcaccag

SEQ ID NO: 183641 - DNA, 80 bp, synthetic construct
  source 1..80: mol_type = other DNA
ggctccaccacaggacatctcacacactgtgcaggctaccagcatgatgagatcattctacatggacactcaattaagta

SEQ ID NO: 183642 - DNA, 80 bp, synthetic construct
  source 1..80: mol_type = other DNA
gcttggagcccttagatatcagcactgaacccatccctctcgaaaatgccatgtatgggatggaaggattggaagccctc

SEQ ID NO: 183643 - DNA, 80 bp, synthetic construct
  source 1..80: mol_type = other DNA
tttggagcatttaccaatcttccgcatgtgctaatgaacttggcagagaccacacaggctgatttatgtatcccctatgt

SEQ ID NO: 183644 - DNA, 80 bp, synthetic construct
  source 1..80: mol_type = other DNA
caaatgcacttaacagcaaagacacttggtacaagggaaacacatacaatgacaacattaaatcgttagcagaaaaaacc

SEQ ID NO: 183645 - DNA, 80 bp, synthetic construct
  source 1..80: mol_type = other DNA
tatgaagtcaccttcctaaagcgctggtttgttccagatgacaggcgtccgttctacatccaccctgtgatggaccctga

SEQ ID NO: 183646 - DNA, 80 bp, synthetic construct
  source 1..80: mol_type = other DNA
tccgggtcaaaggtcacggacgccatgttgggtcacgtgacctactacgtcacggcggccattttgttttacaaaatggt

SEQ ID NO: 183647 - DNA, 80 bp, synthetic construct
  source 1..80: mol_type = other DNA
ctcaaatgaaaccagtaacagcgacatgaaaggaaagacatacaattggaaacattacaaacaatttttcaataaagtac

SEQ ID NO: 183648 - DNA, 80 bp, synthetic construct
  source 1..80: mol_type = other DNA
cctcatgcagagcctctttctgacctcggggaagatggggtgcctggccaggtcacccaaggattactgcgcggatctaa

SEQ ID NO: 183649 - DNA, 80 bp, synthetic construct
  source 1..80: mol_type = other DNA
tgcacccagcacaaacaagcaggcatgatgacccacatggggaaacattagtctggaggtatgaccccatgctggcttat

SEQ ID NO: 183650 - DNA, 80 bp, synthetic construct
  source 1..80: mol_type = other DNA
gaaatcctgttacaacaactacctcagcattaacaaatttaacacagacacagacacccaaataactaactttttaaaag

SEQ ID NO: 183651 - DNA, 80 bp, synthetic construct
  source 1..80: mol_type = other DNA
gtagaaaatagagatgcacgcaagtgtactgggcccctggtgcccccacgtactgcaggatgtcgtgcgcataggtgctg

SEQ ID NO: 183652 - DNA, 80 bp, synthetic construct
  source 1..80: mol_type = other DNA
accaaattccatagtggatgtctcttggtagttgtcgttcctgaacatcaactagcatcacatacacaagggaatgtgtc

SEQ ID NO: 183653 - DNA, 80 bp, synthetic construct
  source 1..80: mol_type = other DNA
ataaacaatcttgagcacaataccactaacattaacatgtattcagttgtcttgagcaatgaaacagagatggcaaagga

SEQ ID NO: 183654 - DNA, 80 bp, synthetic construct
  source 1..80: mol_type = other DNA
ttagtgtggggaacgcatacagttgtttttacgacgggtggtcgcacttcacgcaaaagggagtgtatggatacaataca

SEQ ID NO: 183655 - DNA, 80 bp, synthetic construct
  source 1..80: mol_type = other DNA
agcccgaaactagctgcggacacgtgccacacaccaacgccaaatgctgcggcccatagcgttcgtccttgagcggcgcg

SEQ ID NO: 183656 - DNA, 80 bp, synthetic construct
  source 1..80: mol_type = other DNA
aacaacaagaggtgctattcaacaatgtacgctggttggcaattcagtcccggcgcttcgcaccactatacgctgtagag

SEQ ID NO: 183657 - DNA, 80 bp, synthetic construct
  source 1..80: mol_type = other DNA
ggcatgagaggaccatcaggagtatcgggacggaattatatgaggcaacgagggaaataatagagtcgctcaactccacg

SEQ ID NO: 183658 - DNA, 80 bp, synthetic construct
  source 1..80: mol_type = other DNA
aggtattaaaagaatgcaacaagaatcagatgctctttacgttcctgcaggaccactcaagaggcctcgcagagacacca

SEQ ID NO: 183659 - DNA, 80 bp, synthetic construct
  source 1..80: mol_type = other DNA
cagaaggtggctttgtcacattatggtaccaaacagcatttgtatccaatggggctacaggggctataatggtcacatgc

SEQ ID NO: 183660 - DNA, 80 bp, synthetic construct
  source 1..80: mol_type = other DNA
accaaacacggaaagcagctaaagatgttgttgattggttcagcagtaagatcaaatcaatgttgagttttgtagaaaga

SEQ ID NO: 183661 - DNA, 80 bp, synthetic construct
  source 1..80: mol_type = other DNA
tcctgcctgtagaggctatttatcccgcggccgtgtcaaactggaactcgactctagatctccatgggctggaaaatcag

SEQ ID NO: 183662 - DNA, 80 bp, synthetic construct
  source 1..80: mol_type = other DNA
cccctagtgcagcccccccgaaaacacgaaaggatgccatgttaggaacgcacgtaatttgggacatcggtctgcaatcc

SEQ ID NO: 183663 - DNA, 80 bp, synthetic construct
  source 1..80: mol_type = other DNA
gcttcatgtgtgtttgtgacagctttagcactgggaagttcttaatagcttacacaccaccaggtggaggactcccaacc

SEQ ID NO: 183664 - DNA, 80 bp, synthetic construct
  source 1..80: mol_type = other DNA
aaccagccaaacacaacacagacccaattactggggtgaacaacctatctacatacctcacaggagaaggggaaggaaaa

SEQ ID NO: 183665 - DNA, 80 bp, synthetic construct
  source 1..80: mol_type = other DNA
cagggagtaggtctcgcgcctgtctcgcggggccggggccgcgttgaggctgtttagggtatgggcgtgtgtgtggagtc

SEQ ID NO: 183666 - DNA, 80 bp, synthetic construct
  source 1..80: mol_type = other DNA
gcagcatactacaaacaaaacggaagcaataccaacactttaccaccacataaaatgaaagaagcaaacaagacatacac

SEQ ID NO: 183667 - DNA, 80 bp, synthetic construct
  source 1..80: mol_type = other DNA
ggaacctcttgatttggctatacaacggctgcagaaccttactgttgaagaccttccaaatcctccaaccaatactccaa

SEQ ID NO: 183668 - DNA, 80 bp, synthetic construct
  source 1..80: mol_type = other DNA
acactcactcataagaagaaattgtcatgttgctacaacactcagaggagattttaacttattagggattcatgacaatt

SEQ ID NO: 183669 - DNA, 80 bp, synthetic construct
  source 1..80: mol_type = other DNA
gtcccgcacaccccccgtctccgcaacaccccggccccgccggcggccagaacgctcgaaaacccccgagaagcgcagcg

SEQ ID NO: 183670 - DNA, 80 bp, synthetic construct
  source 1..80: mol_type = other DNA
gaagtaaggaaccagcagccttacatccgaaagaccccagattagaagtggaccttgacacagctgtattttctaagtac

SEQ ID NO: 183671 - DNA, 80 bp, synthetic construct
  source 1..80: mol_type = other DNA
gataagtcgactgaattcagggaggtcacttgggatacagtcactttcctgaagaggaagtttaaagttgatgatgaatt

SEQ ID NO: 183672 - DNA, 80 bp, synthetic construct
  source 1..80: mol_type = other DNA
tggggaggtgcattccctactagagttgtgtagggtagaaaccattctggaggtgaacaatactacagaggccacgggtc

SEQ ID NO: 183673 - DNA, 80 bp, synthetic construct
  source 1..80: mol_type = other DNA
ggccaatatttgcaaggcctgacctataacctcatctttgttccaggccagcgcaattcgcataaggtccccatcaaaca

SEQ ID NO: 183674 - DNA, 80 bp, synthetic construct
  source 1..80: mol_type = other DNA
gatttaaccgatatagatagagctaccgaaatgatgcgtaaaaatataacattactgatacgtatactaccattagattg

SEQ ID NO: 183675 - DNA, 80 bp, synthetic construct
  source 1..80: mol_type = other DNA
accaaagagaagacggcgctgccgaaagcgactcaggttcaccggccaaaagaccccggtactcgttcgaagagagccag

SEQ ID NO: 183676 - DNA, 80 bp, synthetic construct
  source 1..80: mol_type = other DNA
ccaatatgccaaatccttggcaatcaatatatgtaaatacaactccattcactgaagcagtaacagtaaccgcagatacg

SEQ ID NO: 183677 - DNA, 80 bp, synthetic construct
  source 1..80: mol_type = other DNA
aaaaaaaccaacagcacaaagcaaccctcccagcacagtacaatctgaaaaatactttgcagagttagatggtctctggg

SEQ ID NO: 183678 - DNA, 80 bp, synthetic construct
  source 1..80: mol_type = other DNA
acatccacccacgtaaagatccccctgaaagatggccatcagtaggcacccgggcccgcgtcgagccttcacccgaatgt

SEQ ID NO: 183679 - DNA, 80 bp, synthetic construct
  source 1..80: mol_type = other DNA
gattacccagattgtaatttggcactttctgctaatcaaccagaaactactattatcaatgttggagatgtggtgtcata

SEQ ID NO: 183680 - DNA, 80 bp, synthetic construct
  source 1..80: mol_type = other DNA
taaactacagtagccacttagaggacagagtaatgaagggacccttcggagggggccacagtaccctaagatactctctg

SEQ ID NO: 183681 - DNA, 80 bp, synthetic construct
  source 1..80: mol_type = other DNA
tgtagactacacggtaacaaacatcaccgagaaacgcgagagcattagatggacaccgtcaaccggcccgtcaatgatgt

SEQ ID NO: 183682 - DNA, 80 bp, synthetic construct
  source 1..80: mol_type = other DNA
gttgttgacgctgcgacacttgcagctgcgacacgcgctggagctacaaatgatgcaggactgggtagtggaacgctgca

SEQ ID NO: 183683 - DNA, 80 bp, synthetic construct
  source 1..80: mol_type = other DNA
aagaagagggatatcgtcaacaagactaccagggatgtggttaagttacaacaaatgcttgaccgctatggtgttgattt

SEQ ID NO: 183684 - DNA, 80 bp, synthetic construct
  source 1..80: mol_type = other DNA
atctgctgcagggaaagaaaaagagagatattttcaacaggcagactagggacaccactgaaatgactaagatgcttgat

SEQ ID NO: 183685 - DNA, 80 bp, synthetic construct
  source 1..80: mol_type = other DNA
ctgaaaagttgctaaaaaacctggttaaaatagtgtccgcactagtgatagtggcaaggaactatgaagattccataact

SEQ ID NO: 183686 - DNA, 80 bp, synthetic construct
  source 1..80: mol_type = other DNA
acaggtgtacaatcaaatactagaagaggacaagcggcgtaggcaggtgattgatgtcatggccgcaatttttcaaggac

SEQ ID NO: 183687 - DNA, 80 bp, synthetic construct
  source 1..80: mol_type = other DNA
catcattgattcgtaggaactgccatgtggtgactacggataagggcgattttaacttgttgggtgtgtacaacaattgt

SEQ ID NO: 183688 - DNA, 80 bp, synthetic construct
  source 1..80: mol_type = other DNA
atactcatctgggggttacataactttgtggagacaaactgattttgtaccaggctcaactaatggagtcgggtacatct

SEQ ID NO: 183689 - DNA, 80 bp, synthetic construct
  source 1..80: mol_type = other DNA
gtctggtgcctctgcccgcgctacccccggccgataaccagccatggcctggtggggatggcgccgccggtggtgctggc

SEQ ID NO: 183690 - DNA, 80 bp, synthetic construct
  source 1..80: mol_type = other DNA
ttacttaaattataagtataataaatatatataaatacccccccctcggggtggctccgcccccccggccccccccccgg

SEQ ID NO: 183691 - DNA, 80 bp, synthetic construct
  source 1..80: mol_type = other DNA
atttattggtgggcttgaggagaaaatcattcctcaggccagaggccaaattaaatttgtcaccaaatttgaaacatttg

SEQ ID NO: 183692 - DNA, 80 bp, synthetic construct
  source 1..80: mol_type = other DNA
cagaatacgcagacgctaatgactatttttcaacaggcgtcgggtacaaaagaccccggctggaaacccagtacaaaggg

SEQ ID NO: 183693 - DNA, 80 bp, synthetic construct
  source 1..80: mol_type = other DNA
ggtggaagtggacatgtagctttcattgatcttagggactttcatgttgcagacacacagggaattacagactatgtcca

SEQ ID NO: 183694 - DNA, 80 bp, synthetic construct
  source 1..80: mol_type = other DNA
cagtgaaactggtgcaaccctaccaacagtaccttcagataatgttgagactagaactacatacatgcactacgacggta

SEQ ID NO: 183695 - DNA, 80 bp, synthetic construct
  source 1..80: mol_type = other DNA
gcatttgaggaaaacgccacaaagatgtatgagacacgcaaacacactacattccaagagagcaaatacctgtcccacaa

SEQ ID NO: 183696 - DNA, 80 bp, synthetic construct
  source 1..80: mol_type = other DNA
tttcctttatttcttttatgattgcttatggtgacaatatcaagtaatattgttaccatgggcgcacaagtgagcaagca

SEQ ID NO: 183697 - DNA, 80 bp, synthetic construct
  source 1..80: mol_type = other DNA
tccgtgcgcatgctgcgcgacactccattcatcggtcagacagcacttttgcaaggtgacacagaggtagctgttaacaa

SEQ ID NO: 183698 - DNA, 80 bp, synthetic construct
  source 1..80: mol_type = other DNA
cacttactgccaaatacaaattcaaattcttatttggcggtaaccctacttctgaacaggttgttagagacccctgcact

SEQ ID NO: 183699 - DNA, 80 bp, synthetic construct
  source 1..80: mol_type = other DNA
ccatggacatgtatcgggttccagtcaccaccagcgccgataccaatacccctattttgtgcttaagtctctctccagct

SEQ ID NO: 183700 - DNA, 80 bp, synthetic construct
  source 1..80: mol_type = other DNA
taaatctgagaacaaacaactcagccacactggtcctcccttacgtgaatagccttgcaattgattgcatggcaaaacac

SEQ ID NO: 183701 - DNA, 80 bp, synthetic construct
  source 1..80: mol_type = other DNA
aaaagtacagagaccagagatttaaatggcttacagaaatgccagtaactaacacctgtcacataaatgccaccttcgcc

SEQ ID NO: 183702 - DNA, 80 bp, synthetic construct
  source 1..80: mol_type = other DNA
gggtcaaaggttgtgcgtacgtcacaagtcacgtggaggggacccgctgtaacccggaagtaggccccgtcacgtgactt

SEQ ID NO: 183703 - DNA, 80 bp, synthetic construct
  source 1..80: mol_type = other DNA
cacaactttactcaacaatgggtggacatttattggcttttgattatacaaactatgatggtagtatacacccaatctgg

SEQ ID NO: 183704 - DNA, 80 bp, synthetic construct
  source 1..80: mol_type = other DNA
ctacacatgcaagaaggtgtgctcacacaaaatccagtagaaaactatgtagatagcttgctaaacgaagtgctagtggt

SEQ ID NO: 183705 - DNA, 80 bp, synthetic construct
  source 1..80: mol_type = other DNA
tccactattggtccatacaccagtgcagtgagaatttacttcaaacccaaacatgtgaaggcgtgggtaccgaggccgcc

SEQ ID NO: 183706 - DNA, 80 bp, synthetic construct
  source 1..80: mol_type = other DNA
gcctcggcgccaacgcgccatagacaagaggcagagagccagtgtggctggggctggtgctcatgcacaccttggcgggt

SEQ ID NO: 183707 - DNA, 80 bp, synthetic construct
  source 1..80: mol_type = other DNA
gacacggccctgggcagggaggccaccttttacgcgtgtcgggctatgcgtcgtcttctactcggcgttatccgaataaa

SEQ ID NO: 183708 - DNA, 80 bp, synthetic construct
  source 1..80: mol_type = other DNA
tgttggtcacgaagctagaggtgccctcgtcagtcacaaaatgtattgacttccctgtttctgtggcgatggtcgagtca

SEQ ID NO: 183709 - DNA, 80 bp, synthetic construct
  source 1..80: mol_type = other DNA
gctgcaccgaaggcacctgccatgagcttcagcactccctcaattaatggaggactcagagatcaacaatggttcgaggc

SEQ ID NO: 183710 - DNA, 80 bp, synthetic construct
  source 1..80: mol_type = other DNA
gcccacagtcttcccatattccaccgctcagtcacacctctggctcagcgatctcactggagtccctctccgctcctgcc

SEQ ID NO: 183711 - DNA, 80 bp, synthetic construct
  source 1..80: mol_type = other DNA
caaattacaaacaaaatccagaaaatcccattaagactagagaaaccatcagcacatacgggttgggacccaggtttggt

SEQ ID NO: 183712 - DNA, 80 bp, synthetic construct
  source 1..80: mol_type = other DNA
ccgcaaacacccgcagcccggtccgtccctcaaaactcccgctggtcccgccaacagataccgtgggacggcgcgctcac

SEQ ID NO: 183713 - DNA, 80 bp, synthetic construct
  source 1..80: mol_type = other DNA
gtgtccaccaagacgtactggcgtacgaggaactctttgcgttctggcacctcgtggcccagcgcgcccaacaactggtg

SEQ ID NO: 183714 - DNA, 80 bp, synthetic construct
  source 1..80: mol_type = other DNA
tagcaataatccctgtaattattccagcttttggtaccacggtaattacgaactttgtggatggaacggatatctacgca

SEQ ID NO: 183715 - DNA, 80 bp, synthetic construct
  source 1..80: mol_type = other DNA
tcctcacaccgctgataaggctggtcaaggtatttccgcctgggataagaccctcaacatcctcatgtcaccctggactc

SEQ ID NO: 183716 - DNA, 80 bp, synthetic construct
  source 1..80: mol_type = other DNA
aaatatacaacataatgcttgaagaggataaacgcaggagacaagtgatagatgttatgtctgccatatttcaaggacca

SEQ ID NO: 183717 - DNA, 80 bp, synthetic construct
  source 1..80: mol_type = other DNA
taaagacatgggaatctttggagagaatatgttttatcatttccttggtagaagcggttatacagtgcatgttcagtgta

SEQ ID NO: 183718 - DNA, 80 bp, synthetic construct
  source 1..80: mol_type = other DNA
actttgaagtgacacctattaccgacaagcgggacaatatataccgggttcctcaatccaaccaccaagtatacaatcat

SEQ ID NO: 183719 - DNA, 80 bp, synthetic construct
  source 1..80: mol_type = other DNA
tttcctggaaccaaggaaccagcagcactaagttcaaaggactctagattggaagtggacttggatacagctgtattctc

SEQ ID NO: 183720 - DNA, 80 bp, synthetic construct
  source 1..80: mol_type = other DNA
acgcactcgaaatcggagcgtcttccacagccacaccagaaacaaccatagaaactagatatgtgattaataaccatgtg

SEQ ID NO: 183721 - DNA, 80 bp, synthetic construct
  source 1..80: mol_type = other DNA
catagtaacggttattataatttccgtcctaatttgctttaaccttccagcaaccctaaggcacaggctgcgaactttaa

SEQ ID NO: 183722 - DNA, 80 bp, synthetic construct
  source 1..80: mol_type = other DNA
cgcaagaaagcgactcaggttcactggcaaaaagaccccgcatctggcaagaagaagagatccagagccagacggggtcg

SEQ ID NO: 183723 - DNA, 80 bp, synthetic construct
  source 1..80: mol_type = other DNA
tccatgacccttgggaactccacgatcactacgcaagaaagcgccaacgtggtggttgggtatggcgagtggccgtcata

SEQ ID NO: 183724 - DNA, 80 bp, synthetic construct
  source 1..80: mol_type = other DNA
cttctacagagacaaagacacagactttatagtgcagtatgatgtctctgcccccttcaagctagacaaaaacagcagtc

SEQ ID NO: 183725 - DNA, 80 bp, synthetic construct
  source 1..80: mol_type = other DNA
gtgctaatgtggtggtggggtacggaaggtggcccacgtaccttagagatgatgaggcgaccgcagaagatcaacccact

SEQ ID NO: 183726 - DNA, 80 bp, synthetic construct
  source 1..80: mol_type = other DNA
gtgccagtatgaaaaacagggtagcgtagactttaaagtgcaaggtgtcacggacgcacggaattcgctgaccacgacgg

SEQ ID NO: 183727 - DNA, 80 bp, synthetic construct
  source 1..80: mol_type = other DNA
catataaataccaattggacatggaagcaattgccaaagaaggtgtcaaatatggtctcaccataactccagctgataaa

SEQ ID NO: 183728 - DNA, 80 bp, synthetic construct
  source 1..80: mol_type = other DNA
tccaacaccgttgatgtcacagtaatgggcagtttactccaattggattttcagaacccgcgggcatatggtgtggatgt

SEQ ID NO: 183729 - DNA, 80 bp, synthetic construct
  source 1..80: mol_type = other DNA
taacaaatatgaaatactaaattattttgataactgtacctacaccataaatagcaccaagcatattatcaccgtggtgt

SEQ ID NO: 183730 - DNA, 80 bp, synthetic construct
  source 1..80: mol_type = other DNA
gaacaaattcagtggacacacaggcagcaaaaccctataccagtaggaaatatctatagaagatggatccagttaggact

SEQ ID NO: 183731 - DNA, 80 bp, synthetic construct
  source 1..80: mol_type = other DNA
gatgaaatctctccatctgtggagtgttcttcgctgccgtccatagggtccatatcgcagtctgtgttggtgtctgagac

SEQ ID NO: 183732 - DNA, 80 bp, synthetic construct
  source 1..80: mol_type = other DNA
agctgcggcctgggacaggccagccagaaacaacctacacagcccaccattttacccctggatgcccagggaacccccaa

SEQ ID NO: 183733 - DNA, 80 bp, synthetic construct
  source 1..80: mol_type = other DNA
gggcaagctgaggaagcggatccagtcggcgctcagacaaaacacgcgagcctgctcgtcgggggttaacagagagcctt

SEQ ID NO: 183734 - DNA, 80 bp, synthetic construct
  source 1..80: mol_type = other DNA
acaaaccaatggttacaagttatgtctttatcaaagtaatgaacgcacaaaatccaatctagactctccaaatattgtgt

SEQ ID NO: 183735 - DNA, 80 bp, synthetic construct
  source 1..80: mol_type = other DNA
acagctaaattttcaacctcaaataataccctaggaagtgacacgaatataacgccatacctagaacaaccaacagcaac

SEQ ID NO: 183736 - DNA, 80 bp, synthetic construct
  source 1..80: mol_type = other DNA
ggtaacgccactaacattggtaccatagtagccacatgctcaggatgtccagatatttctgtacgcatgttgcgtgatac

SEQ ID NO: 183737 - DNA, 80 bp, synthetic construct
  source 1..80: mol_type = other DNA
gccctccaaaaagatcaaaattcgaggttcccgccattgccgcagacgactgcggtttccagggaagaaagcaaaagttc

SEQ ID NO: 183738 - DNA, 80 bp, synthetic construct
  source 1..80: mol_type = other DNA
acgggcacgacgaggctgagatgagaaagcggcggtgggtcgtcgtcccgtccccgctcgcatagctcggccaccggtgg

SEQ ID NO: 183739 - DNA, 80 bp, synthetic construct
  source 1..80: mol_type = other DNA
gtttccccggatgtgtgaatagacttctcacgaggttgaagctgaagcattcgttatccgcacttgtactgcacggaaat

SEQ ID NO: 183740 - DNA, 80 bp, synthetic construct
  source 1..80: mol_type = other DNA
aatttctgttcaaacaggccaatcagaatctaccacgtacacttcctggggcgtgtcttcgaggtctatataagcagaga

SEQ ID NO: 183741 - DNA, 80 bp, synthetic construct
  source 1..80: mol_type = other DNA
agtaaatatggtaaagccaatgcagaacaattcgagtaccaccttggatggtattctcccatattcctcagcagacacag

SEQ ID NO: 183742 - DNA, 80 bp, synthetic construct
  source 1..80: mol_type = other DNA
ctgaagtagattctgtggtgcccgtgaacaacacagacgacaatgtgaacagccttaaagcatatcagataccagtgcag

SEQ ID NO: 183743 - DNA, 80 bp, synthetic construct
  source 1..80: mol_type = other DNA
catctagatcgaatcgcagtgctcggactagtcgtagctctcgggcaagttccaggaccagtgccggcaccagaagctca

SEQ ID NO: 183744 - DNA, 80 bp, synthetic construct
  source 1..80: mol_type = other DNA
tgccgacacagacacggtgtggagaaaccttttctacgtttattacgaactagctcgggatctggggtcccatgggacag

SEQ ID NO: 183745 - DNA, 80 bp, synthetic construct
  source 1..80: mol_type = other DNA
ctactgttgctagcaatgcccttgcccttagccagcccaagccaatagacaactcagtgcagaatactcaacagagtgct

SEQ ID NO: 183746 - DNA, 80 bp, synthetic construct
  source 1..80: mol_type = other DNA
ttgcaaacgccttactctacttttatgatgggtattcggtagtgccgctcaaggactccacacaagattcaggtgctgca

SEQ ID NO: 183747 - DNA, 80 bp, synthetic construct
  source 1..80: mol_type = other DNA
tactttcaaaaggacatttgcaaaatgcccctcattaacatatctgcaaccgcatgcaacttgcggtttccgttcggctc

SEQ ID NO: 183748 - DNA, 80 bp, synthetic construct
  source 1..80: mol_type = other DNA
aagtctccagtctatggggagaccacgtatataccgaaaaaatagttaatgcattctttacaaatgcagacaacatgtac

SEQ ID NO: 183749 - DNA, 80 bp, synthetic construct
  source 1..80: mol_type = other DNA
atttacaacagcacaagacacaacaaacacaaaaccatacactacatttgcagacacttggtacaaaggcacagcataca

SEQ ID NO: 183750 - DNA, 80 bp, synthetic construct
  source 1..80: mol_type = other DNA
actgggggaagtgcttaactactatgcacattggtcagggagtatcaaactaacattcaccttttgcggttcagcgatgg

SEQ ID NO: 183751 - DNA, 80 bp, synthetic construct
  source 1..80: mol_type = other DNA
attgaagatactgcagaggagtgtaaacaaacattgtcccctaatgagttgggactgtcttcagcacaagatgatggtcc

SEQ ID NO: 183752 - DNA, 80 bp, synthetic construct
  source 1..80: mol_type = other DNA
gcgatgccgcaaggcattgaagacttgatccaacaggttgcatcgaatgcgctgcaaatctcacagccgacgcgtccggc

SEQ ID NO: 183753 - DNA, 80 bp, synthetic construct
  source 1..80: mol_type = other DNA
gctggaggtggaggttatgtatgctttgctgacatcagaaacttagaaatgtttcaagcagaatatcagggaatctcaga

SEQ ID NO: 183754 - DNA, 80 bp, synthetic construct
  source 1..80: mol_type = other DNA
tatcataaagcaaaacatgttaaagcttggtgtcctagaccacctagggctgtgccgtacacatctgtagacaccaccaa

SEQ ID NO: 183755 - DNA, 80 bp, synthetic construct
  source 1..80: mol_type = other DNA
ggtgttttgaagacaacaatgctaggagaaatttgtcagtacttcacccattgggctggttcattacgtctgtcattcat

SEQ ID NO: 183756 - DNA, 80 bp, synthetic construct
  source 1..80: mol_type = other DNA
cataaaataccgttttaagtggatctggggtggaaaccccgttcgccaacaggttgttagaaatccctgcaaggaacccc

SEQ ID NO: 183757 - DNA, 80 bp, synthetic construct
  source 1..80: mol_type = other DNA
gtgcttttgggcagcaatctggggctgtgtacgtaggaaactacagagtggtcaatagacacttagccacccacaacgat

SEQ ID NO: 183758 - DNA, 80 bp, synthetic construct
  source 1..80: mol_type = other DNA
gtgagtcgtttccgagcgactcgagatgcactccgcttcagtctatatatcaccactggtccgaaaacatccagggaaaa

SEQ ID NO: 183759 - DNA, 80 bp, synthetic construct
  source 1..80: mol_type = other DNA
acatagctttttcagagccttgcccatagccaggccaaccagagtctatgtcgtgcacttcctgggcatggtctacgtga

SEQ ID NO: 183760 - DNA, 80 bp, synthetic construct
  source 1..80: mol_type = other DNA
ataagatcagcattctgagcattaacaaaacgctcaattatccacatgacattaacagtcaacttcgatccagcgggcaa

SEQ ID NO: 183761 - DNA, 80 bp, synthetic construct
  source 1..80: mol_type = other DNA
gttttatctcccccctccccacaatgtaatttagaagccaatcacatgaccaataggaagtggtaagccataccacttaa

SEQ ID NO: 183762 - DNA, 80 bp, synthetic construct
  source 1..80: mol_type = other DNA
gccgattctacacactgcttgagaaaattggctttggtgacagagtagactacattgactacttaaatcactctcatcat

SEQ ID NO: 183763 - DNA, 80 bp, synthetic construct
  source 1..80: mol_type = other DNA
acagaaaagcttaaaactacaactcacatttataaagatgaagtatataccgtaaagggtggcatgccatcaggtatatc

SEQ ID NO: 183764 - DNA, 80 bp, synthetic construct
  source 1..80: mol_type = other DNA
tcaattgcaacggaacattattagggaacataacaatttacccacatcaaattataaatttgaggaccaacaactccagc

SEQ ID NO: 183765 - DNA, 80 bp, synthetic construct
  source 1..80: mol_type = other DNA
gaagaaagtactacccaataacgatcacgccacccacattccagtacatggaggctaatgactattacccagcacgatac

SEQ ID NO: 183766 - DNA, 80 bp, synthetic construct
  source 1..80: mol_type = other DNA
ctaatggcagttcactgcatgaattttaaaagaaggggaggaataggggatatgacccctgcagagagactagttaacat

SEQ ID NO: 183767 - DNA, 80 bp, synthetic construct
  source 1..80: mol_type = other DNA
tgctctcgagacaggccctaatgacctatatggagacagcacagctcagtatagaggcaacactcacatgctagactact

SEQ ID NO: 183768 - DNA, 80 bp, synthetic construct
  source 1..80: mol_type = other DNA
atttcaaacccaccgatgtgacaacatcacgcacttcgatcacagaagtccccagtttaaggccatcagtggtaaataca

SEQ ID NO: 183769 - DNA, 80 bp, synthetic construct
  source 1..80: mol_type = other DNA
atgacaaagcacttagtatacttaacactactcagataacagaagatctacacactaaaagacaagactgttacactttt

SEQ ID NO: 183770 - DNA, 80 bp, synthetic construct
  source 1..80: mol_type = other DNA
taatccgggtagtagcactggcggtggtggaggacctggttgtgacattgctagtcacacccgtggaggttcctgttccg

SEQ ID NO: 183771 - DNA, 80 bp, synthetic construct
  source 1..80: mol_type = other DNA
gggcgaacttccccaaccttgtttcctccgccccctacatcctccccatggcatctctggaagaaaagggcacgcactat

SEQ ID NO: 183772 - DNA, 80 bp, synthetic construct
  source 1..80: mol_type = other DNA
ggagtgcgaccctcctgccctgggcccacttcttcggagccgcgcgctacgccttcggctgcgcgcggcacctcagaact

SEQ ID NO: 183773 - DNA, 80 bp, synthetic construct
  source 1..80: mol_type = other DNA
taagaacagtaagccagcttacggtcaatcaagatactttgcagcagtacggtgtggtttccattttcaggtacaagtga

SEQ ID NO: 183774 - DNA, 80 bp, synthetic construct
  source 1..80: mol_type = other DNA
gcactgactgagggattggaggatgaattgatggaagtcattgttgacaaaacgcagcaaacattggcttcagttaaaag

SEQ ID NO: 183775 - DNA, 80 bp, synthetic construct
  source 1..80: mol_type = other DNA
tatgaaaaatcgggtaatgtgaactttaaaccgaaaggagtcactgaagcccggacatcgattaaactagagaaaccaag

SEQ ID NO: 183776 - DNA, 80 bp, synthetic construct
  source 1..80: mol_type = other DNA
atagtcataactagttgccaagtgcccgggaccattagtagtcaagatatgccggtgctgactcaccagattatgttcat

SEQ ID NO: 183777 - DNA, 80 bp, synthetic construct
  source 1..80: mol_type = other DNA
gaaaatatgtaaagattaaaatacctccacctaagttatttgaggaccactggtacactcagcctgacttatgcaaagta

SEQ ID NO: 183778 - DNA, 80 bp, synthetic construct
  source 1..80: mol_type = other DNA
taggcctcttccaaatctatgccacaggcctagaactcaccaacccatggctcagatcaggcaccaagagccccatcata

SEQ ID NO: 183779 - DNA, 80 bp, synthetic construct
  source 1..80: mol_type = other DNA
tgtcaaaaacccatgtgactcaggaggactggtgccttccgactccagtagattcaagcgggacgtacaagttgttagcc

SEQ ID NO: 183780 - DNA, 80 bp, synthetic construct
  source 1..80: mol_type = other DNA
aggagcataggtaatcagtttccagccacagtacagcgagcccaggaaaccgcacacggtccctgccgggaacacgtacc

SEQ ID NO: 183781 - DNA, 80 bp, synthetic construct
  source 1..80: mol_type = other DNA
gcttcagaacaatgatccagtggaatctttcattaacacaaccctagaagaagtgctagttgttccagacactaaaccat

SEQ ID NO: 183782 - DNA, 80 bp, synthetic construct
  source 1..80: mol_type = other DNA
atgggcgctcaggtttctagacaacaaactgggactcacgaaaatgccaacattgccacaggcggttccaacataactta

SEQ ID NO: 183783 - DNA, 80 bp, synthetic construct
  source 1..80: mol_type = other DNA
agcaagaatataacaaatttgtggaaggaattagaagcacagatattggtaaggttttagtgataccatcttactctgtc

SEQ ID NO: 183784 - DNA, 80 bp, synthetic construct
  source 1..80: mol_type = other DNA
caggccacacgtcacaagtcacccccggtgacacgatgcagacgcgtcatgtgaagaattaccacacgcgctccgagtcc

SEQ ID NO: 183785 - DNA, 80 bp, synthetic construct
  source 1..80: mol_type = other DNA
taggtatggcgtatacccacggtgatgttgtgttattcgttttttgtgataaaacgtagcttatgtttaacgtgtgttcc

SEQ ID NO: 183786 - DNA, 80 bp, synthetic construct
  source 1..80: mol_type = other DNA
actatcatgatcagaaataattcagatctccccaccattttggcaacacttgctttactaggatgcagtggctcaccatg

SEQ ID NO: 183787 - DNA, 80 bp, synthetic construct
  source 1..80: mol_type = other DNA
ctctgacgcaggacatgcctgtgttaacacaccaaattatgtacgtaccaccgggcggagcggtacccagcgatgcagag

SEQ ID NO: 183788 - DNA, 80 bp, synthetic construct
  source 1..80: mol_type = other DNA
tccagcactgacagcagttgaaattgggcacacatctcaagtggtaccaggagacacaatgcaaacccgctatgtgaaga

SEQ ID NO: 183789 - DNA, 80 bp, synthetic construct
  source 1..80: mol_type = other DNA
ccttattatttatccagcagtaaacagagtgcttatgtttgagcccagcggtcccaggcctctcactacccccgaggact

SEQ ID NO: 183790 - DNA, 80 bp, synthetic construct
  source 1..80: mol_type = other DNA
actttagtttggttagatcgcaatgaaaaattcagagacatccgccgctttatccctgagagtattgaagagtggcacca

SEQ ID NO: 183791 - DNA, 80 bp, synthetic construct
  source 1..80: mol_type = other DNA
ccatgtccacattgtgagagaggggatagcgatcggtacagtgtgtgaagaggggcccgttacacaactcgtagatctgc

SEQ ID NO: 183792 - DNA, 80 bp, synthetic construct
  source 1..80: mol_type = other DNA
cgtgtccttagtagtggtgcccatctgccctttgaggacatctggcaacgcaccacggacacttccaatcaccatctcta

SEQ ID NO: 183793 - DNA, 80 bp, synthetic construct
  source 1..80: mol_type = other DNA
aatataatagtgccaccatcaactccaacccagtgttacttgctgggctttgtttcagcctgtaatgacttctcagtgcg

SEQ ID NO: 183794 - DNA, 80 bp, synthetic construct
  source 1..80: mol_type = other DNA
accaggaaatgactatataccagaatgtgattgcacagatggatgctactattgtaggagtcaggataggtacttcccaa

SEQ ID NO: 183795 - DNA, 80 bp, synthetic construct
  source 1..80: mol_type = other DNA
gacgagcgagcccaccaattctcccacggcctcgcccgccaagtcagacggtggtgttgcctgcggcggggacggtggtt

SEQ ID NO: 183796 - DNA, 80 bp, synthetic construct
  source 1..80: mol_type = other DNA
aaaggccggcaggcgcgcaggccctcgatggagcccagcatgagcaacggctccacctcggtgcgacccggcgtgcggat

SEQ ID NO: 183797 - DNA, 80 bp, synthetic construct
  source 1..80: mol_type = other DNA
agaattactcacaaccctgatgggtctgcagtatcaggaaacaacaatggagcaggtgacctcactacatacaatcaatg

SEQ ID NO: 183798 - DNA, 80 bp, synthetic construct
  source 1..80: mol_type = other DNA
ggtttgcgtctccatgattgtgccacgttcgaatcctgctgttacgacatcaccgaggcggagagtaacaaggctatatc

SEQ ID NO: 183799 - DNA, 80 bp, synthetic construct
  source 1..80: mol_type = other DNA
tatgatgtaaccccccccttgcgcataccaggtgaagtgcgcaatatcatggaaatagcggaaatagattccgttgtgcc

SEQ ID NO: 183800 - DNA, 80 bp, synthetic construct
  source 1..80: mol_type = other DNA
ttcagcctatggtatgttttatgacgggtttgctggatttgagaagacagccaatggcctttatggtatcaaccctgcaa

SEQ ID NO: 183801 - DNA, 80 bp, synthetic construct
  source 1..80: mol_type = other DNA
cccctcaaggtgaattcagataccctctggaagtaccgcaaacccatttttgttactaccacctttcttgctgtaatcgg

SEQ ID NO: 183802 - DNA, 80 bp, synthetic construct
  source 1..80: mol_type = other DNA
ctgtctacgctagtaccttcaatcgtggtaggttgaggatgggcttcttcccgaattttactacaaacaccacctcagag

SEQ ID NO: 183803 - DNA, 80 bp, synthetic construct
  source 1..80: mol_type = other DNA
gctttacccaaggcaaaaaccttaaagatcgttatccgcacattaactacgcaaagcctagtattgcctttgatatatta

SEQ ID NO: 183804 - DNA, 80 bp, synthetic construct
  source 1..80: mol_type = other DNA
atcacccagtgctgaggcttgtggttatagtgatagagttctacaactaaaattggggaattcatccattgtgacacaag

SEQ ID NO: 183805 - DNA, 80 bp, synthetic construct
  source 1..80: mol_type = other DNA
tggcgactcgcagcaagatccagaactccacactcccgtgatccgtagagccttggcactccctgccgctccggagtcat

SEQ ID NO: 183806 - DNA, 80 bp, synthetic construct
  source 1..80: mol_type = other DNA
aaatttatgtagatatttgggatgtgaaataactttgtttagacaagaatctgtagactatgtatttacttactttgatg

SEQ ID NO: 183807 - DNA, 80 bp, synthetic construct
  source 1..80: mol_type = other DNA
tgcagttgtgattcatggtgaaccaggcacagggaaatcaatgactaccaattttttagcaaggatgataacaaatgata

SEQ ID NO: 183808 - DNA, 80 bp, synthetic construct
  source 1..80: mol_type = other DNA
ccaccggagaggttgtcccacaactgcttcagtatatgtttgtccccccgggagcacctaagcctgactctagggaatct

SEQ ID NO: 183809 - DNA, 80 bp, synthetic construct
  source 1..80: mol_type = other DNA
acctgaggatatgatcgagactaggtacgtgcaaacatcacaaacaagagatgaaatgagtatagagagtttcctaggta

SEQ ID NO: 183810 - DNA, 80 bp, synthetic construct
  source 1..80: mol_type = other DNA
agatgttggaactgtggcaaggaaggacacactgcaaggcagtgtaaagcccctagaagacagggatgctggaaatgtga

SEQ ID NO: 183811 - DNA, 80 bp, synthetic construct
  source 1..80: mol_type = other DNA
agcggcgccaagcacccaaggtaacgtacaaacggctgtttgtaatgctgctatgggtgtgggtgttggcaacttaacga

SEQ ID NO: 183812 - DNA, 80 bp, synthetic construct
  source 1..80: mol_type = other DNA
tcatgtgatattatgtgtttcgtgtcagcatgtaacgacttctctgtccgtatgttaagggatactccattcattgaaca

SEQ ID NO: 183813 - DNA, 80 bp, synthetic construct
  source 1..80: mol_type = other DNA
tgatccgcctgctgatcctcctcttgaccaggctatacagcatctgcagggacttactatccaggatcttccagaccctc

SEQ ID NO: 183814 - DNA, 80 bp, synthetic construct
  source 1..80: mol_type = other DNA
catacaaacacaaggcttggaggatctcattgagtcagtggcccagaatgctctccagatttcccagccgagaccacccc

SEQ ID NO: 183815 - DNA, 80 bp, synthetic construct
  source 1..80: mol_type = other DNA
tgagttttccacgcccgtccgcagcggtagcaccacggaaggtgatccccgcgtcccgagggcgggtgccggaggtgagt

SEQ ID NO: 183816 - DNA, 80 bp, synthetic construct
  source 1..80: mol_type = other DNA
aatctttgcctgacagctctacgctacccaggctctaaattgtacccttctgtctacactttgttccccgatgtttcacc

SEQ ID NO: 183817 - DNA, 80 bp, synthetic construct
  source 1..80: mol_type = other DNA
aatagacaaacttcataaaattagagaacaatactttaaatgggaaacagatgaaggcccccaagccacatctgattatg

SEQ ID NO: 183818 - DNA, 80 bp, synthetic construct
  source 1..80: mol_type = other DNA
agaagaacccctctaggaggcaacatctacacagcaccctctctacacccaggcaatgccattttagcaaaacacaaaat

SEQ ID NO: 183819 - DNA, 80 bp, synthetic construct
  source 1..80: mol_type = other DNA
ttcagtgacgtcacggcggccattttaagtgagcaggaagcgtctccactatacacaaaatggcggcggagcacttccgg

SEQ ID NO: 183820 - DNA, 80 bp, synthetic construct
  source 1..80: mol_type = other DNA
attgcaattggcttaaccctaccgtatgaaccgaacttgacaaaagtgcggtagggacagattctccgcattcggtgcgg

SEQ ID NO: 183821 - DNA, 80 bp, synthetic construct
  source 1..80: mol_type = other DNA
ccaaaatttctaaagcctctcgggaggtggttgattggttctcagacaaaattaaatctatgttaaattttgtggaaaga

SEQ ID NO: 183822 - DNA, 80 bp, synthetic construct
  source 1..80: mol_type = other DNA
tatatgaagctcaagcatgtgagggcatgggttcctaggccaattagatcacaaccatatttactaaagaatttccccaa

SEQ ID NO: 183823 - DNA, 80 bp, synthetic construct
  source 1..80: mol_type = other DNA
taccacaaggctaaacatgtaaaagcatggtgtcctcgaccacctagggcagtcccatacagatttgttggatcaacaaa

SEQ ID NO: 183824 - DNA, 80 bp, synthetic construct
  source 1..80: mol_type = other DNA
actgtaagaagaagaaatggattataccacaaatacctactaacatagaaagggctatgaatcaggctagcatgatcatt

SEQ ID NO: 183825 - DNA, 80 bp, synthetic construct
  source 1..80: mol_type = other DNA
atgatgagtgatttcaaccacgtaacaagaactgggatgaaccctcgggcagtatcagactgcggggaggggcagtgata

SEQ ID NO: 183826 - DNA, 80 bp, synthetic construct
  source 1..80: mol_type = other DNA
gatcagcatactacatgttctatgatgggtatgatcactcaggtgatggatacacctatggtattaccactactaatgat

SEQ ID NO: 183827 - DNA, 80 bp, synthetic construct
  source 1..80: mol_type = other DNA
taactacgtaacggctagtaacatcttgtcgtgcttagggtgttcgatcaggtgaagaaaaacccccttcactagtctgg

SEQ ID NO: 183828 - DNA, 80 bp, synthetic construct
  source 1..80: mol_type = other DNA
gcccatatgatcggcaacctgaaactagaaaaatgaagttggcatacttggacaggggtttctacaaacattatggtatc

SEQ ID NO: 183829 - DNA, 80 bp, synthetic construct
  source 1..80: mol_type = other DNA
aaacgttgtaaccatgtacaacacaacacagaccatagcacagctaggaaaattcatgccaacacttaacaagactgaac

SEQ ID NO: 183830 - DNA, 80 bp, synthetic construct
  source 1..80: mol_type = other DNA
acaacctcatggagatagcggaggtcgactcagttgtcccagtcaataacacacaaaacaatttacagagtatggatgca

SEQ ID NO: 183831 - DNA, 80 bp, synthetic construct
  source 1..80: mol_type = other DNA
tgcggcacgcggtctccgtcgctgttgacggggtttcgccgcgctccgggatctctgtacgggtgtctgtccggcgtttg

SEQ ID NO: 183832 - DNA, 80 bp, synthetic construct
  source 1..80: mol_type = other DNA
aacccagagtcgatctggacgcagtgcaacctgtcgaaaaagactctttgccccagcaaagagaacagagaccctgggag

SEQ ID NO: 183833 - DNA, 80 bp, synthetic construct
  source 1..80: mol_type = other DNA
caaaaggagtatggtatcctattgaagcaagtggcaggggacattacatcttaccagcatatcccatatccagaatgcaa

SEQ ID NO: 183834 - DNA, 80 bp, synthetic construct
  source 1..80: mol_type = other DNA
cggctgcaagcgctgccttaaaggcctggaagctgggtgggtaaatctgaccaaacagcacgctcggattcgtgatgctg

SEQ ID NO: 183835 - DNA, 80 bp, synthetic construct
  source 1..80: mol_type = other DNA
caaccaagttaatgaagttatttctggtaatagtaatgcttcaggtggtgaaattattacaaaagtggccgatgatgctt

SEQ ID NO: 183836 - DNA, 80 bp, synthetic construct
  source 1..80: mol_type = other DNA
ttatgaaccggtggtcgtactccaacgaccagctagacctcgccaggtactttggctgcaccttctacttctacagacac

SEQ ID NO: 183837 - DNA, 80 bp, synthetic construct
  source 1..80: mol_type = other DNA
acaacatctttggtagagcttggtttgcatatgatcatacatatagagatgaagggacttggaggcagcctttagacttt

SEQ ID NO: 183838 - DNA, 80 bp, synthetic construct
  source 1..80: mol_type = other DNA
cctaaaaaggaactagctgacagtgcataagaaagaactagctgacaccgcagggactttccagaaggggcagtaacagg

SEQ ID NO: 183839 - DNA, 80 bp, synthetic construct
  source 1..80: mol_type = other DNA
gctctttaggagggacccttaagccaggcaatgtagtgccccttttttttgcaaattggccttattattaaattcttgtt

SEQ ID NO: 183840 - DNA, 80 bp, synthetic construct
  source 1..80: mol_type = other DNA
tgccagcgcgcgagctccaccagctcccgggccacgtccacactgagcccggcccaagcccgcatgagtccgtcatcggg

SEQ ID NO: 183841 - DNA, 80 bp, synthetic construct
  source 1..80: mol_type = other DNA
gattcgcggaataggactgagggctggacagggctgcgggagttttgtccacggagctttctgcgcgctggcggtgcgtg

SEQ ID NO: 183842 - DNA, 80 bp, synthetic construct
  source 1..80: mol_type = other DNA
gtaagccccagcagacatgctctcagttaacgagcagaggaaatgaaagctcacggcgaaacttgggccagcccggggtg

SEQ ID NO: 183843 - DNA, 80 bp, synthetic construct
  source 1..80: mol_type = other DNA
cgtccatccgcgggagaagcccaagctcgaggcctattgccacgcatccggatcacccccctctccacatctccacgccc

SEQ ID NO: 183844 - DNA, 80 bp, synthetic construct
  source 1..80: mol_type = other DNA
ctgaccacttacggttttgggcatcaaaacaaagctgtgtatgtagcggggtacaaaataatcaactatcatttagccac

SEQ ID NO: 183845 - DNA, 80 bp, synthetic construct
  source 1..80: mol_type = other DNA
gtggtcaatttcttccgggtcagaggtcaccgctacgtcataagccacgtggggacggctgctgtgtatgcggaagtagc

SEQ ID NO: 183846 - DNA, 80 bp, synthetic construct
  source 1..80: mol_type = other DNA
gcgcagataacctgacaaacggggaggacacttgcaaactaacccaggacgccgcacccgctgaaaaaggcaaggtgcag

SEQ ID NO: 183847 - DNA, 80 bp, synthetic construct
  source 1..80: mol_type = other DNA
ccaatgctagtaggtttaataagagaaaatttttgactgcttcaactaaatacaagtggacacgaaccaaagtcgacata

SEQ ID NO: 183848 - DNA, 80 bp, synthetic construct
  source 1..80: mol_type = other DNA
gagcagcagcagcgagtcctcagactgcagctcagacagcagcagcacctcggggaccagctgcgactcctatatcagca

SEQ ID NO: 183849 - DNA, 80 bp, synthetic construct
  source 1..80: mol_type = other DNA
gacgctatacaaaacacagttacatccactatccaaagggttgcaaccagcgctgttggacaggacgcaacagctgccaa

SEQ ID NO: 183850 - DNA, 80 bp, synthetic construct
  source 1..80: mol_type = other DNA
gtgcagaaacacaaggcccaatcacaaactaccttaaccaacttggtaatgcttttggggaagggttcacacaaaatatc

SEQ ID NO: 183851 - DNA, 80 bp, synthetic construct
  source 1..80: mol_type = other DNA
gtagacttcttagtcagagtccgcaccagtcctcccttcgaggacacagacatgacagccatgacactacacccaggcat

SEQ ID NO: 183852 - DNA, 80 bp, synthetic construct
  source 1..80: mol_type = other DNA
aaagtgacccccccagcaggtatgagcgtgttcgtggactgcaaatgcagcagcgggcagatcacagagacggtcaacag

SEQ ID NO: 183853 - DNA, 80 bp, synthetic construct
  source 1..80: mol_type = other DNA
agaggcagttattaaaagaatgctccaacaacctacacctaatgaactttatccgtcagcacccaagaggcccaagaaag

SEQ ID NO: 183854 - DNA, 80 bp, synthetic construct
  source 1..80: mol_type = other DNA
ccaaatgttcaaaaatagaacgtgatttcaactatgcccaatactgtataaactgtgtaggtagtattgtccttattctt

SEQ ID NO: 183855 - DNA, 80 bp, synthetic construct
  source 1..80: mol_type = other DNA
gcaactcaggacagaaaatgagacgaggagtaaagtcaaaaccaacctcagggctatatttcaaggactaggggacacca

SEQ ID NO: 183856 - DNA, 80 bp, synthetic construct
  source 1..80: mol_type = other DNA
atcaaaaagtgcaggaactgttgcagcgcttgggtcagacgctaggcgacctagaactgcaggaaacgttggcgacggaa

SEQ ID NO: 183857 - DNA, 80 bp, synthetic construct
  source 1..80: mol_type = other DNA
actagggtgttaaacttccccagaggttgaagcccgatgtatcgttatccgcatgattactaagcagagcctagtaacat

SEQ ID NO: 183858 - DNA, 80 bp, synthetic construct
  source 1..80: mol_type = other DNA
ctggttacacacaaccagtagccaagaaacctgaactgagaagagccacggtgcagggtccagaacatgaattcctttat

SEQ ID NO: 183859 - DNA, 80 bp, synthetic construct
  source 1..80: mol_type = other DNA
ttacacccaaccttatgtaacttagaagcagtacactggaccaataggtggtaacaatccatgttaccaaaggtcaagca

SEQ ID NO: 183860 - DNA, 80 bp, synthetic construct
  source 1..80: mol_type = other DNA
tttcatctgcatgcttgtttttgtgggtgcaataatttcatggctcacctacttcgtttacaagagcgttacggcggctc

SEQ ID NO: 183861 - DNA, 80 bp, synthetic construct
  source 1..80: mol_type = other DNA
agtcacgtgactggggaggagtcacgtgacttatgacgtagctgctgacctttgactcggaagagcttgcccgccatttt

SEQ ID NO: 183862 - DNA, 80 bp, synthetic construct
  source 1..80: mol_type = other DNA
gtgttttttgatgtatttgaaggttcaaaggagccagcagtgcttacagataaggacccccgcttaacaactgattttaa

SEQ ID NO: 183863 - DNA, 80 bp, synthetic construct
  source 1..80: mol_type = other DNA
gggttccctggtgaattgatggataagttatgccataccacacacatctacaaagacacaatttacacagtggagggtgg

SEQ ID NO: 183864 - DNA, 80 bp, synthetic construct
  source 1..80: mol_type = other DNA
gacgaacagtaaggaggcgccgcgttagacgactaaggaggagggggtggactaggagacggtacataagacgcagacgc

SEQ ID NO: 183865 - DNA, 80 bp, synthetic construct
  source 1..80: mol_type = other DNA
gacggactcctctaccttcgctcgccgacgctgcgcttctccagccaccgctgcggtcgacagactccttcgtccgcctt

SEQ ID NO: 183866 - DNA, 80 bp, synthetic construct
  source 1..80: mol_type = other DNA
actgctaccttggtgatgccatatataaattcagtacccatggattccatgactaggcataacaacttatcacttctagt

SEQ ID NO: 183867 - DNA, 80 bp, synthetic construct
  source 1..80: mol_type = other DNA
cgtagtagaccccagctacagccagtataaaaaacaatcaacaggtactaagtggtcaaacacctatgtagactctttat

SEQ ID NO: 183868 - DNA, 80 bp, synthetic construct
  source 1..80: mol_type = other DNA
caatggaaatgtacagggtgcaattgagtgatagtgctaatcgtaacaagcccatcctttgcctgtcactctctccagct

SEQ ID NO: 183869 - DNA, 80 bp, synthetic construct
  source 1..80: mol_type = other DNA
agtgatttgttgccgttggtttcagcaccccgacacgcgagccatagaccagtttttcggatcccagatttcaaataccg

SEQ ID NO: 183870 - DNA, 80 bp, synthetic construct
  source 1..80: mol_type = other DNA
tgtataatgtgcaagtctttaagagatcagacacagacctaattttagcactaccattacaaatggacaatacacttttt

SEQ ID NO: 183871 - DNA, 80 bp, synthetic construct
  source 1..80: mol_type = other DNA
taatagagttgtgtcaagtagataccatgataccaatcaataacactaatacaaatattagagataaaagcatgtataca

SEQ ID NO: 183872 - DNA, 80 bp, synthetic construct
  source 1..80: mol_type = other DNA
ggggcggggacggggcgttgcgtggacggggggctttagcgccgagaactcgtgggaccgagctcagagacggggacggg

SEQ ID NO: 183873 - DNA, 80 bp, synthetic construct
  source 1..80: mol_type = other DNA
gaccccggcgacctgggtatcctcggtatccatgtcgctggggtagctggttacaacggcttctccgcgcgcttcactcc

SEQ ID NO: 183874 - DNA, 80 bp, synthetic construct
  source 1..80: mol_type = other DNA
gaactgagaagcactgataaggtgcgtttaggtaaaagcagactcattgaagcttcaagtttaaatgattcagtaaacat

SEQ ID NO: 183875 - DNA, 80 bp, synthetic construct
  source 1..80: mol_type = other DNA
atggtcggatgtacactataggtgataaatatggtctgtatcttgctccgtcatcctggaacagatatcttagatttggg

SEQ ID NO: 183876 - DNA, 80 bp, synthetic construct
  source 1..80: mol_type = other DNA
cctactgtccccgacaaatctgaatttgcagactggaaaaagaaattcactgacactagagacagctcctttctttttgc

SEQ ID NO: 183877 - DNA, 80 bp, synthetic construct
  source 1..80: mol_type = other DNA
attaattatttcaaagatgctgcatccaatggtgcttcccgtctggacttttctcaagaccctagcaagtttactgaccc

SEQ ID NO: 183878 - DNA, 80 bp, synthetic construct
  source 1..80: mol_type = other DNA
agggggaggcgcagatacaggcggggatggcgacgcaggacttatcttagagccaggcgacgcaggagacgaaagagact

SEQ ID NO: 183879 - DNA, 80 bp, synthetic construct
  source 1..80: mol_type = other DNA
gtggaagttacatttgtcataactagctcgcaggacccgtccacaaatgtcagtcaggatgccccagtgttgacccacca

SEQ ID NO: 183880 - DNA, 80 bp, synthetic construct
  source 1..80: mol_type = other DNA
gggactgtggtggcattttgagatgccaacacggtgtcatgggcttgatcactgccggtgggaatggtgttgtggcattt

SEQ ID NO: 183881 - DNA, 80 bp, synthetic construct
  source 1..80: mol_type = other DNA
ggccattttaagtaagcatggcgggcggtgacgtataagttcaaaggtcaccgcacttccgtgtttacacaaaatggtgg

SEQ ID NO: 183882 - DNA, 80 bp, synthetic construct
  source 1..80: mol_type = other DNA
tgggtttacaactttaacaccacacactttgagccttattaggattgtgttgctgatacgatattatcaccataatgggt

SEQ ID NO: 183883 - DNA, 80 bp, synthetic construct
  source 1..80: mol_type = other DNA
acatcttccatgagtctgtggcggcccccgatgagacatgtccccgccagggagagagattgggttgaagcaacgttcag

SEQ ID NO: 183884 - DNA, 80 bp, synthetic construct
  source 1..80: mol_type = other DNA
tggtgatcctaggccgccgcgaccgccactgagacgcctgccagcgcttcccgctccccagaactcccctaacaacagca

SEQ ID NO: 183885 - DNA, 80 bp, synthetic construct
  source 1..80: mol_type = other DNA
ggtagagtacggtagttccagtggaggcttcccggtaatttcccacagcgtccaccatatatctttctgcctctcccgtt

SEQ ID NO: 183886 - DNA, 80 bp, synthetic construct
  source 1..80: mol_type = other DNA
cccacatcagacaggtacgagtaccacgtaggcatgttcagccccatattcctcactccgttcaggtccgcggggctgga

SEQ ID NO: 183887 - DNA, 80 bp, synthetic construct
  source 1..80: mol_type = other DNA
cgcggaattgagaggcagtggtatgagtgtgtttggcgcagtcacgctgcttgctgtggctgtggtgattttattagtca

SEQ ID NO: 183888 - DNA, 80 bp, synthetic construct
  source 1..80: mol_type = other DNA
cttctccagttgttgcccacttgtttgcggcaaggccatccagtttgtggacaaggcaacacgcaccaggtacacagtag

SEQ ID NO: 183889 - DNA, 80 bp, synthetic construct
  source 1..80: mol_type = other DNA
aaattctttcagtattagctccattagtaccaacaggttcagaaaatttaaagagcctttataatactgtctgcgtcatt

SEQ ID NO: 183890 - DNA, 80 bp, synthetic construct
  source 1..80: mol_type = other DNA
ataatcgtttttttctgcggtctcccgctggcactgacccagcaccacggcgcacagacaaacagacagccacacccgat

SEQ ID NO: 183891 - DNA, 80 bp, synthetic construct
  source 1..80: mol_type = other DNA
tgtccatatgtgaataagaccaacgtgaatttcaataccacggaggtgacaaaaccaagaaacgacctaaatgatgtgcc

SEQ ID NO: 183892 - DNA, 80 bp, synthetic construct
  source 1..80: mol_type = other DNA
ccagcgtgcaagatgactccacaaaacggaacaccgacaccccagtgctaactcatcaaattatgtatgtgccgccagga

SEQ ID NO: 183893 - DNA, 80 bp, synthetic construct
  source 1..80: mol_type = other DNA
tcactcagatgacattacttaccctggacccttaggagggggcatatcctccatgagatttaaccttagaatactatatg

SEQ ID NO: 183894 - DNA, 80 bp, synthetic construct
  source 1..80: mol_type = other DNA
tatcctgggaccacactattccttcaaaagctgggacatgcgcagacacctccttagcaaagcaagtattaaaagagtgt

SEQ ID NO: 183895 - DNA, 80 bp, synthetic construct
  source 1..80: mol_type = other DNA
aggtagactcagtggtgccagttaataacgtcaatgagaacgtgaacagcctggaggcataccgtatccctgtccattca

SEQ ID NO: 183896 - DNA, 80 bp, synthetic construct
  source 1..80: mol_type = other DNA
aaattgaatgaaaacagcatagatgctgacagctttaaagtcctaattaataatcaaagagcaactttagctaagcttga

SEQ ID NO: 183897 - DNA, 80 bp, synthetic construct
  source 1..80: mol_type = other DNA
tacttcaaacccaagcacattagggtctgggtaccccggccaccacgcttgtgtccctatattaaatctagcaatgttaa

SEQ ID NO: 183898 - DNA, 80 bp, synthetic construct
  source 1..80: mol_type = other DNA
gaagcctcgcgcgccgagatcgccgaggccctggagcgcgtggccgagcggtgcgacgaccggcacggcggctcggacga

SEQ ID NO: 183899 - DNA, 80 bp, synthetic construct
  source 1..80: mol_type = other DNA
cgttgaggtcacatttgtgatcactagtaagcaggaccaggggacccgactaggtcaagacatgccccccctaacccatc

SEQ ID NO: 183900 - DNA, 80 bp, synthetic construct
  source 1..80: mol_type = other DNA
gaagactggagtttccaggtcgaaagcgaggggtcgtcgtcagaagagagcgatcaagaagcccaagaagaggaggtact

SEQ ID NO: 183901 - DNA, 80 bp, synthetic construct
  source 1..80: mol_type = other DNA
gtctttggactactcatcagatgcctctacatatgtacccattacagtcacggtcgcaccaatgtgtgcagagtacaatg

SEQ ID NO: 183902 - DNA, 80 bp, synthetic construct
  source 1..80: mol_type = other DNA
agacgggaccgtttgcatacagagacgaacgcccctcagctgtactgaccagcacctacaagttcagatttaactgggtg

SEQ ID NO: 183903 - DNA, 80 bp, synthetic construct
  source 1..80: mol_type = other DNA
gatccacccagtgtataaaatggaggatgtgtacgaatcaattaggtggacaaaagatccgaaaaacacccaggaccatg

SEQ ID NO: 183904 - DNA, 80 bp, synthetic construct
  source 1..80: mol_type = other DNA
tctgagggcagtgatagcgacccctcgtggcatccttcagattcagacgagtctgactacagcgagagcgacgaggatga

SEQ ID NO: 183905 - DNA, 80 bp, synthetic construct
  source 1..80: mol_type = other DNA
gtgccctcacaatagtaatcaggaatagcacagatctacctactgttatggcaactctagcactgttaggttgttatggc

SEQ ID NO: 183906 - DNA, 80 bp, synthetic construct
  source 1..80: mol_type = other DNA
gcagcatgcttggataacttactaaactcacgcccatgggcggccaggtgttcgaagagaccagaaggcttacccttgcc

SEQ ID NO: 183907 - DNA, 80 bp, synthetic construct
  source 1..80: mol_type = other DNA
cacccccgacctcagctccgagtgggacgtgacccaggccctctataggcacctggggcgctacctctttcagcgagccg

SEQ ID NO: 183908 - DNA, 80 bp, synthetic construct
  source 1..80: mol_type = other DNA
gtcatcgctctttaaaacatgtttctcggcaggccaaccagagtctacgtcgtgcacttcctgggcatggtctatgtgat

SEQ ID NO: 183909 - DNA, 80 bp, synthetic construct
  source 1..80: mol_type = other DNA
agtgcgacccttggcgtgggtgcaacgccctcggcggccgcgcgctacgccttcggctgcgcgcggcacctcggaccccc

SEQ ID NO: 183910 - DNA, 80 bp, synthetic construct
  source 1..80: mol_type = other DNA
acgtgacaagtacaatacgtgtgtattttaagccaaaacatgttagggcgtgggtaccaaggcctcctagattatgccct

SEQ ID NO: 183911 - DNA, 80 bp, synthetic construct
  source 1..80: mol_type = other DNA
acacacacatggaacgctaagagtactgagacaactatgaatggttataacaagtggagagaatggtggactaaagactt

SEQ ID NO: 183912 - DNA, 80 bp, synthetic construct
  source 1..80: mol_type = other DNA
tcacgtgggtgctgcgtcacagccgccattttgttttacaaaatggccgacttccttcctcttttttaaaaattaaccgt

SEQ ID NO: 183913 - DNA, 80 bp, synthetic construct
  source 1..80: mol_type = other DNA
ttatgaacataccctggacttctggtgtacagtttagatatactgatccagacacatatacaagtgctggtcacttgtca

SEQ ID NO: 183914 - DNA, 80 bp, synthetic construct
  source 1..80: mol_type = other DNA
ctggaaaattcggccaccagtccggtgctgtttacgtgggtaattacagaatagtgaacaggcacctcgccacgcacaac

SEQ ID NO: 183915 - DNA, 80 bp, synthetic construct
  source 1..80: mol_type = other DNA
acttccgaatggctgagttttccacgcccgtccgcagcgagtagccacggcaggggatccgcgcgtcccgtgggcgtgtg

SEQ ID NO: 183916 - DNA, 80 bp, synthetic construct
  source 1..80: mol_type = other DNA
caatggagaggccgttggaaccagagcagcagatgttccctggttccccctttagccaggtcgctgatgttgcccgggaa

SEQ ID NO: 183917 - DNA, 80 bp, synthetic construct
  source 1..80: mol_type = other DNA
ggagatttgggtttaacttcagcacaggatgatggacctcttggtggtgaaaagccaaattattttctaaatttccgctc

SEQ ID NO: 183918 - DNA, 80 bp, synthetic construct
  source 1..80: mol_type = other DNA
caactactatgcaaattggtcaggcagcataaagctcacgttcatgtactgtggatcggcaatggcaactgggaaatttc

SEQ ID NO: 183919 - DNA, 80 bp, synthetic construct
  source 1..80: mol_type = other DNA
tttgttctgcatgttattactgattgtcgctggcatactctttattcttgctatcctgaccgaatggggaagtggaaata

SEQ ID NO: 183920 - DNA, 80 bp, synthetic construct
  source 1..80: mol_type = other DNA
agacaaaaaccccagagagaagggtagttgcacaaggaccagaagaagaatttggccggtcgctcattaaacacaactct

SEQ ID NO: 183921 - DNA, 80 bp, synthetic construct
  source 1..80: mol_type = other DNA
ttgatacatccaacatttccaattgaggagatacatgaatccattcgatggactaaaaatccatctcagatgcaggagca

SEQ ID NO: 183922 - DNA, 80 bp, synthetic construct
  source 1..80: mol_type = other DNA
cccaccagctcgccgtgcctagcattactacgcgccaagcgcttcgacgcccgcgctgatttggccgtataccaccgtaa

SEQ ID NO: 183923 - DNA, 80 bp, synthetic construct
  source 1..80: mol_type = other DNA
acacccaggagaaaatgggcgcacaattgacgatacaagagtgaacaccatgtccaatcagccaactgatgagagctggt

SEQ ID NO: 183924 - DNA, 80 bp, synthetic construct
  source 1..80: mol_type = other DNA
tgtcttatttggtaatgctttcatataccctcatcaaacgatcaacttaaggactaacaatagtgcaacactggtgttac

SEQ ID NO: 183925 - DNA, 80 bp, synthetic construct
  source 1..80: mol_type = other DNA
tacacgacaggacatataaaaactggagaagctggtggactgtagacttttatgcctctaaatcagacagcctatatggc

SEQ ID NO: 183926 - DNA, 80 bp, synthetic construct
  source 1..80: mol_type = other DNA
taccccctggaggaccagttccacttactaggaaagatgatgagtggcaatcaggaactaatgcttcagtattctggcaa

SEQ ID NO: 183927 - DNA, 80 bp, synthetic construct
  source 1..80: mol_type = other DNA
tcgtccccagacagcagcaactgacgcgtcacgcgggcgagccccccgtccacctctgccaggtgcggctgggcgtctgc

SEQ ID NO: 183928 - DNA, 80 bp, synthetic construct
  source 1..80: mol_type = other DNA
ccacctgtgattgcactacaggcacctactattgcaagagcagggacagatactacccagtaaacctaacacaccacagt

SEQ ID NO: 183929 - DNA, 80 bp, synthetic construct
  source 1..80: mol_type = other DNA
atcagaagaggcacagaatgagctcatcatcaacatcaacaagttggaaaagggacttcaagagcttgcaccactttatg

SEQ ID NO: 183930 - DNA, 80 bp, synthetic construct
  source 1..80: mol_type = other DNA
aaacctgtaacacatcaattatccaagagtcatgtgacaaacattattgggaccaattaagatttaggtattgtgccccc

SEQ ID NO: 183931 - DNA, 80 bp, synthetic construct
  source 1..80: mol_type = other DNA
ctgagaacatgtggaaatcacctgtggtagaatgctgctcaggtacattacctttcatcgcgaaaaggtactttacctaa

SEQ ID NO: 183932 - DNA, 80 bp, synthetic construct
  source 1..80: mol_type = other DNA
tctgccatctctctcgtgggtacgcccggtacgcggccagagccactggtcgtgtacctgtacggaccccccgggactgg

SEQ ID NO: 183933 - DNA, 80 bp, synthetic construct
  source 1..80: mol_type = other DNA
atacacttatcccaataaataacttagaacaaaatattaggaatgtaaatatgtattcagtagtcctgaaccaagaaacc

SEQ ID NO: 183934 - DNA, 80 bp, synthetic construct
  source 1..80: mol_type = other DNA
ggcatggatgcttatcgcatcccagttcaggttagtaaagtgggggagcaggtgtttgggttccagctcgagccaggtag

SEQ ID NO: 183935 - DNA, 80 bp, synthetic construct
  source 1..80: mol_type = other DNA
ttacaatcacagctagagtctaccacaaggcaaaacatatcagtgcatggggcccaagaccccccagagcggtaccttat

SEQ ID NO: 183936 - DNA, 80 bp, synthetic construct
  source 1..80: mol_type = other DNA
aacatcacggtgccagcaacccaaggtttaccagttctagttacaccagggtccagtcagtatttgacatctgatgactt

SEQ ID NO: 183937 - DNA, 80 bp, synthetic construct
  source 1..80: mol_type = other DNA
aatgcatttggtgagggttttacccaaaatattaaagacagtttctctaacatcagcacttccattactgacaagttaac

SEQ ID NO: 183938 - DNA, 80 bp, synthetic construct
  source 1..80: mol_type = other DNA
cgtgtcctggtttaaggccgcaactgccaccatatctcgagtgcacgggcggacattggagcagcacctgatccgtgaaa

SEQ ID NO: 183939 - DNA, 80 bp, synthetic construct
  source 1..80: mol_type = other DNA
tgccaagtggatcccagcaattcatgactactgaggatgaacaatcacccaacatgctacctggctaccactccagcaag

SEQ ID NO: 183940 - DNA, 80 bp, synthetic construct
  source 1..80: mol_type = other DNA
cgccgccgcggcttcatgtggcgtgacctccgacctcgtgaggccgaaaacggcgtacatgaagacgctcaaacttttga

SEQ ID NO: 183941 - DNA, 80 bp, synthetic construct
  source 1..80: mol_type = other DNA
ctatgaaaacggtacaaaaaaaacaaacaccaacatatttgactactacacgggtatgttcagcagcatatttttaagca

SEQ ID NO: 183942 - DNA, 80 bp, synthetic construct
  source 1..80: mol_type = other DNA
cagggcctgggacctcagacgtggactctttggcgaaaaagctattaagagaatgtcagcagaatcgctcacttctgact

SEQ ID NO: 183943 - DNA, 80 bp, synthetic construct
  source 1..80: mol_type = other DNA
tggtcgcaggggggggggagtcgcgggccccggagcacactgcacaacccgcgtcgaggacacacgcagataccgcccgc

SEQ ID NO: 183944 - DNA, 80 bp, synthetic construct
  source 1..80: mol_type = other DNA
agctcctccacccgctctagctgcttgtagttgatttttggaaattgagtcttggtcgcggtgaccaccctctgataggt

SEQ ID NO: 183945 - DNA, 80 bp, synthetic construct
  source 1..80: mol_type = other DNA
gatgccacgaatcaccatgggctttccttaaaagtaaggtgtgcaaatggcttggtatcaatccaccagcaaaaagacag

SEQ ID NO: 183946 - DNA, 80 bp, synthetic construct
  source 1..80: mol_type = other DNA
ataataactcttgacagaaatgaaaaatttagggatattaggggatttatatcagaggacttagaagggtttgatgcttc

SEQ ID NO: 183947 - DNA, 80 bp, synthetic construct
  source 1..80: mol_type = other DNA
tgaacccaaaccaaaagctagagccccagagagaagagttgtcacccaaggtccagaggaggaatttggccgctcattac

SEQ ID NO: 183948 - DNA, 80 bp, synthetic construct
  source 1..80: mol_type = other DNA
acgaggagtattacaatgtcctaggaacttccgtattagaccaacggacaacttactcaacacaaataaataaatttgaa

SEQ ID NO: 183949 - DNA, 80 bp, synthetic construct
  source 1..80: mol_type = other DNA
gtcaagataataattggattgttccagctgaatgtactatagaaagggatttaggattagcaaatttaaccataagcata

SEQ ID NO: 183950 - DNA, 80 bp, synthetic construct
  source 1..80: mol_type = other DNA
gtattttatataagattggtcaagttctaggcattcatgttggtggaaatgggaaagatggatttgctgctatgttatta

SEQ ID NO: 183951 - DNA, 80 bp, synthetic construct
  source 1..80: mol_type = other DNA
gagagatcttgaacaaggaaacacgtgacaccaaggagatgcagcgtatgctagacaagtacgggattaatttgccactg

SEQ ID NO: 183952 - DNA, 80 bp, synthetic construct
  source 1..80: mol_type = other DNA
aaagccaggacacaacatggctagctgcccagaaaccaaggtgggttttttagggcttggcccttgggaaaaaaagcctc

SEQ ID NO: 183953 - DNA, 80 bp, synthetic construct
  source 1..80: mol_type = other DNA
ggttatatcacttgctggtatcagacaaattttgtagtaccaccacaaactcccagacatgctgatatcatttgctttgt

SEQ ID NO: 183954 - DNA, 80 bp, synthetic construct
  source 1..80: mol_type = other DNA
agggctgtgccttacttgaacacatcggttgactttgctcataacgccagggcaatggaacaagtggcaacaattagaac

SEQ ID NO: 183955 - DNA, 80 bp, synthetic construct
  source 1..80: mol_type = other DNA
atctatgttgggtgcaaaaggccaacccagccctggtgagggaacacgaccacgagaatcaaacgaccctaacgccaccc

SEQ ID NO: 183956 - DNA, 80 bp, synthetic construct
  source 1..80: mol_type = other DNA
cacagtaaccttctacagacaccccactcaggactttatagccaggtacaacagaaagacccccctggggggcaacatac

SEQ ID NO: 183957 - DNA, 80 bp, synthetic construct
  source 1..80: mol_type = other DNA
cctacagcaggggagattgggagacagagtatcaggcttgcaaagcttttaacagaccccctagaagcaacctcacagac

SEQ ID NO: 183958 - DNA, 80 bp, synthetic construct
  source 1..80: mol_type = other DNA
gttagcgaagggtcctactggaactccttccatgtcctagaggtgttctcttcctcagtaggcggagtagacggtaacaa

SEQ ID NO: 183959 - DNA, 80 bp, synthetic construct
  source 1..80: mol_type = other DNA
gtgcagagccccgcgttctggatcgcctgcatgcgtgcatccagccatgtgtccttgttggttgacttggtgaaaaactc

SEQ ID NO: 183960 - DNA, 80 bp, synthetic construct
  source 1..80: mol_type = other DNA
gtgcagatcacagaccggtgtttcttggtggccaacttgccacacgaggacgccttttacacggggctcagcgtgtggcg

SEQ ID NO: 183961 - DNA, 80 bp, synthetic construct
  source 1..80: mol_type = other DNA
ggcggagaccagaggcttttgcgagagcaggacggagggacttttgcaggaccgggctgagggacggaggtgtttgcggc

SEQ ID NO: 183962 - DNA, 80 bp, synthetic construct
  source 1..80: mol_type = other DNA
gaagtacacttagttatattatgacgtagactcctgggaggagtctacgtcataatataactaagtgtacttccgaatgg

SEQ ID NO: 183963 - DNA, 80 bp, synthetic construct
  source 1..80: mol_type = other DNA
gataccagcggtctcagctgctgagactggggaccattttcatttggtacccattgccacaatgcagacacgccacgtct

SEQ ID NO: 183964 - DNA, 80 bp, synthetic construct
  source 1..80: mol_type = other DNA
ctattaagtaaatttcttaaattgattaagcttgcaggtgacaacaatctcaataacttgagtgagctatattttctctt

SEQ ID NO: 183965 - DNA, 80 bp, synthetic construct
  source 1..80: mol_type = other DNA
cacgtcttaattttcaaggcggtcctcccccgccgggtggtcctcgggcggagagaccgccactgagagcgctcctcccg

SEQ ID NO: 183966 - DNA, 80 bp, synthetic construct
  source 1..80: mol_type = other DNA
taaacttgttgacccagacaatattaatttggagctcactatactaactttagataggaacgagaagttcagagacatta

SEQ ID NO: 183967 - DNA, 80 bp, synthetic construct
  source 1..80: mol_type = other DNA
tgtttgtaccgcctggcatagagggtccaaaagatcatgaagatatgcgatgggactctgcttctaaccccagtgtgttt

SEQ ID NO: 183968 - DNA, 80 bp, synthetic construct
  source 1..80: mol_type = other DNA
tatgcgtacaacgacgaaaaagtgcgaaagcgacgtggaggggggtagcagcaatgatacgtgttgtaatacaggttacc

SEQ ID NO: 183969 - DNA, 80 bp, synthetic construct
  source 1..80: mol_type = other DNA
ggcgcgcttacgtttctcaacactctctgagctctgtccccagcgtaactcccgttaccggcgccgccgcgctcacggcc

SEQ ID NO: 183970 - DNA, 80 bp, synthetic construct
  source 1..80: mol_type = other DNA
ttagggtatccgcccccttcctctgttttggcctagtaaacttaacgccgccgcttctcacgtgacccctggcaagccta

SEQ ID NO: 183971 - DNA, 80 bp, synthetic construct
  source 1..80: mol_type = other DNA
tttaccacaaagccaagcatataaaagcatggtgtccacgcccaccaagggctgttccttatcaattcacacattctact

SEQ ID NO: 183972 - DNA, 80 bp, synthetic construct
  source 1..80: mol_type = other DNA
tcccctgatccacggcggtgtttccccccgtctcgtagcacacgcacgagatctgaatgacaatgtcatcggacttctcg

SEQ ID NO: 183973 - DNA, 80 bp, synthetic construct
  source 1..80: mol_type = other DNA
ggaaattcccagaagctctagaagacatgggcttgtttggtcagaacatgtactaccattacttagggcgctcagggtac

SEQ ID NO: 183974 - DNA, 80 bp, synthetic construct
  source 1..80: mol_type = other DNA
ggactacggaggtcatgaccaccacgacgcacacgggaatccaaggatcgagattgtcgctggaactcatggctatcgcc

SEQ ID NO: 183975 - DNA, 80 bp, synthetic construct
  source 1..80: mol_type = other DNA
gccgcccctcccccttttattaccacatttgtggtcgctgcaacgttagaagattttaaagtagtgcaataggaagcatc

SEQ ID NO: 183976 - DNA, 80 bp, synthetic construct
  source 1..80: mol_type = other DNA
catctggaccaaagaagtcgtctgccaagagttcagctaccagacctggaagatgagggtgctcaaaccgtgggcgacag

SEQ ID NO: 183977 - DNA, 80 bp, synthetic construct
  source 1..80: mol_type = other DNA
atcgccttcgatggtgcccggaaagatggactgaaaagtgtcgttgaggttgacgacatccaactgcgggacttgcagcc

SEQ ID NO: 183978 - DNA, 80 bp, synthetic construct
  source 1..80: mol_type = other DNA
ggacccgagggaggtttcgaagacgacggactggacgccctcgtcgccgccctcgacgacgaagagtaaggagaaaaaga

SEQ ID NO: 183979 - DNA, 80 bp, synthetic construct
  source 1..80: mol_type = other DNA
agaaaggactcgacgctgtcctcgatgccgatgcgcgatttgctgtccgagacgttaagcaaaaacttcataatggactt

SEQ ID NO: 183980 - DNA, 80 bp, synthetic construct
  source 1..80: mol_type = other DNA
aacacactaagagcacaaacctggtaccaaggacaggtgaaatcacaactcacatcagattcaggaacactgttaaagat

SEQ ID NO: 183981 - DNA, 80 bp, synthetic construct
  source 1..80: mol_type = other DNA
ataacaccagatatttctgtaagatcaacaacctggttgaaaagtcaagatccgataatgaagattttgtcaacatgcac

SEQ ID NO: 183982 - DNA, 80 bp, synthetic construct
  source 1..80: mol_type = other DNA
tacaacacaaactttggacaaggcaagtggatcgacggcaagggctacatacccctaagacacaggagcaagtggtatgt

SEQ ID NO: 183983 - DNA, 80 bp, synthetic construct
  source 1..80: mol_type = other DNA
acacaaaattcagtttcaaacggatctagtctaaattattttaacataaattatttcaaagacgctgcttcaagtggcgc

SEQ ID NO: 183984 - DNA, 80 bp, synthetic construct
  source 1..80: mol_type = other DNA
acacaaacaccccaaaactactttttaacacaagaatatggcatttacagcccatactacttaacacccacaagaatcag

SEQ ID NO: 183985 - DNA, 80 bp, synthetic construct
  source 1..80: mol_type = other DNA
agaaaagctaacccagatgtgattctggtacagtacatggatgacctgctgatagcaagtgataggaacacagcagaaca

SEQ ID NO: 183986 - DNA, 80 bp, synthetic construct
  source 1..80: mol_type = other DNA
cagccaaacagacaaggagagatggtgtttggaaccaaattgttcataggagatggtgttttcaaaaccacccttcttgg

SEQ ID NO: 183987 - DNA, 80 bp, synthetic construct
  source 1..80: mol_type = other DNA
ctaggtgaggtgttaaattacttttctacttgggcagggagcatcacattgagttttttgtgtgtctgtgatagttttag

SEQ ID NO: 183988 - DNA, 80 bp, synthetic construct
  source 1..80: mol_type = other DNA
gatctcacgcgtcggataatcacgcacgcggtgatcatcaactattactacgtggcgcaaaagaaagcgcgccacatggt

SEQ ID NO: 183989 - DNA, 80 bp, synthetic construct
  source 1..80: mol_type = other DNA
gtcatctcccccggtagtatcagcgacggcctctgccgacgattcctccgtctcggtttccgcgccgcggctcggaatcc

SEQ ID NO: 183990 - DNA, 80 bp, synthetic construct
  source 1..80: mol_type = other DNA
actgtaactaacacctaagcttacatcacagataccctatgcctggtccccaccagtcgaaggcatctagcaataagatg

SEQ ID NO: 183991 - DNA, 80 bp, synthetic construct
  source 1..80: mol_type = other DNA
aatcattactaaacaaaaaaacatgggcatgcaatgcaacactaaattgttattgccagtcgcactaataccggttgtaa

SEQ ID NO: 183992 - DNA, 80 bp, synthetic construct
  source 1..80: mol_type = other DNA
tataagtccatttgctcgttcttcccacaactccctggtgattctaatgagcagcattacagatatgaagtaaccaacct

SEQ ID NO: 183993 - DNA, 80 bp, synthetic construct
  source 1..80: mol_type = other DNA
accaaggaccaagataatgccaacagatacatgtcgtggaccataaacgctaggagaatggttcagttgaggcggaagtt

SEQ ID NO: 183994 - DNA, 80 bp, synthetic construct
  source 1..80: mol_type = other DNA
tccatatgttagtttgggaataaagaaaagagatattctaaacagagagacccaagacacaacaaaaatgcaggcttatt

SEQ ID NO: 183995 - DNA, 80 bp, synthetic construct
  source 1..80: mol_type = other DNA
tacacatcctataacttttcaggtgacacaggctataaatatgtaacatcaataagacagtggtactggacacaactaac

SEQ ID NO: 183996 - DNA, 80 bp, synthetic construct
  source 1..80: mol_type = other DNA
tcacacggttttttttttttggaacgcttgtattcatcttaaccctcaataaggcaaaatgggagcgcaagtatcaacac

SEQ ID NO: 183997 - DNA, 80 bp, synthetic construct
  source 1..80: mol_type = other DNA
cgtcaaggtgcagcgtacttggtacgtccattgggctatccaactgcgccgtgacgatgagcctcttgctcagatctctc

SEQ ID NO: 183998 - DNA, 80 bp, synthetic construct
  source 1..80: mol_type = other DNA
attggctgaactaccaaacaaactatgagacaacctttaaaaaatttagtgaaaaacaaacagagaaattaaagttaata

SEQ ID NO: 183999 - DNA, 80 bp, synthetic construct
  source 1..80: mol_type = other DNA
ttgagtaggtgccgtccaggactgccgttccgggtcaaagggcatcctcggcggaacctacactaaatggtggacaatct

SEQ ID NO: 184000 - DNA, 80 bp, synthetic construct
  source 1..80: mol_type = other DNA
accttctgaatgttgctaaagctttgctgccatgcactgattgcccaaaaccagaattttataagcaatgttgccctttg

SEQ ID NO: 184001 - DNA, 80 bp, synthetic construct
  source 1..80: mol_type = other DNA
tggatttactccactcacacaccccacccccaatataacatctattgttttgttaacaagaaattactttcgaaatgggt

SEQ ID NO: 184002 - DNA, 80 bp, synthetic construct
  source 1..80: mol_type = other DNA
catctacctcgggtgttcaggaacgggcgtctgagggagattgggaaaatgtcctcatagagatatcagatagcagctca

SEQ ID NO: 184003 - DNA, 80 bp, synthetic construct
  source 1..80: mol_type = other DNA
ggactattccaaattgaagtcttgaatagactaacatacaacagctccagtccatcagaggtgtactgtattgtccaagg

SEQ ID NO: 184004 - DNA, 80 bp, synthetic construct
  source 1..80: mol_type = other DNA
gtatgtgtcaacttccagatattggggcaaccctattaccaacacctcaagacggccttaggcttaactgaaaaaaccac

SEQ ID NO: 184005 - DNA, 80 bp, synthetic construct
  source 1..80: mol_type = other DNA
gccgctccggaccccccagcaggtaaccagcctccggccctgccatggcatggggatggtggaagcggagacggcgcggc

SEQ ID NO: 184006 - DNA, 80 bp, synthetic construct
  source 1..80: mol_type = other DNA
ccccggtcaatgttgatatgctcctccagggcaaaaacaatagcgatcgttatccgcaagatgcctacgcaaagcctagt

SEQ ID NO: 184007 - DNA, 80 bp, synthetic construct
  source 1..80: mol_type = other DNA
ccacaacaggtggtctaggtccaatgtagatctagaactcattagatacaagggctgcaaattcaccctgtacagacacc

SEQ ID NO: 184008 - DNA, 80 bp, synthetic construct
  source 1..80: mol_type = other DNA
gataaatttggattagatctcccatacatcacttacctaaaagatgaactcagagcaccagaaaagatcaaggctggtaa

SEQ ID NO: 184009 - DNA, 80 bp, synthetic construct
  source 1..80: mol_type = other DNA
gagaatggtcatagatgagcccctcggcaacctcctgattgtagttttcacaggagaccacacaggcggcccgtcccctt

SEQ ID NO: 184010 - DNA, 80 bp, synthetic construct
  source 1..80: mol_type = other DNA
tggatgctctgcgagaggccgtgccgcctttacagtcacctagtgctgaagcatgcggatatagtgacagagtggcacag

SEQ ID NO: 184011 - DNA, 80 bp, synthetic construct
  source 1..80: mol_type = other DNA
tcacgcgccacagtggcggccatgggcgccggcacgcctgcggtcttcaagcccttgacatgcaacgcaaattcggcgtg

SEQ ID NO: 184012 - DNA, 80 bp, synthetic construct
  source 1..80: mol_type = other DNA
gaggctttgttttcaaaatacaaaggaaatgcacactgcacaatgagtgaccatatgagaattgcatcatcacattatgc

SEQ ID NO: 184013 - DNA, 80 bp, synthetic construct
  source 1..80: mol_type = other DNA
aggaagtgagacaatactgcagagaaaagaaatggcttataccagaaacacccactaatattgatagggcagtcaaccag

SEQ ID NO: 184014 - DNA, 80 bp, synthetic construct
  source 1..80: mol_type = other DNA
ttactgcaaagcaacaacaaaatcgcaaagtcatcaaaaaaccgcaaagttgtttaaaataagagcaacactacaaaagg

SEQ ID NO: 184015 - DNA, 80 bp, synthetic construct
  source 1..80: mol_type = other DNA
gggctatgacctggagaccaccagtccacaatgccccggggatcgatagaaactggtatgagtcagtttcacgctcccac

SEQ ID NO: 184016 - DNA, 80 bp, synthetic construct
  source 1..80: mol_type = other DNA
gcagttttatgaagcctgcctgcatgctcacgatgctttttgtggttgtggcgattttgttgctcatattaacagtgtgg

SEQ ID NO: 184017 - DNA, 80 bp, synthetic construct
  source 1..80: mol_type = other DNA
cacgtgtgggtagactactgcagtaaacaagacaatatatactcagaaacacaaagcaaatgtcacatagcagacctgcc

SEQ ID NO: 184018 - DNA, 80 bp, synthetic construct
  source 1..80: mol_type = other DNA
gcatgctgaaggacactccattcatttcacaggatgctcaactacaaaacgacccgcccaaacgcccagacgcagacacc

SEQ ID NO: 184019 - DNA, 80 bp, synthetic construct
  source 1..80: mol_type = other DNA
cagccctccgtggtgctgcccgcgtcccgagggcgggtgccggaggtgagtttacacaccggagtcaagtggcaattcgg

SEQ ID NO: 184020 - DNA, 80 bp, synthetic construct
  source 1..80: mol_type = other DNA
aagaggttccagctttgactgctgttgaaacgggggcgactgcggcggcgtcctcgacagatttggtgcaaactcgacat

SEQ ID NO: 184021 - DNA, 80 bp, synthetic construct
  source 1..80: mol_type = other DNA
ttaaccatctgtgttgctttttgcagcgtccagaaaagcgacgcgactttggggatggcctcgtgctcaccttcgcggag

SEQ ID NO: 184022 - DNA, 80 bp, synthetic construct
  source 1..80: mol_type = other DNA
atataacccagtggttcttagtaggtgttaaaaacccaaaaaatatgtcacagcaaatgttcgaagacataaacacaaaa

SEQ ID NO: 184023 - DNA, 80 bp, synthetic construct
  source 1..80: mol_type = other DNA
gactctttcaggacaagtggtacccccagtcagacctgtgcgacacagttctgctttccatattcgcaaccgcctgtgac

SEQ ID NO: 184024 - DNA, 80 bp, synthetic construct
  source 1..80: mol_type = other DNA
ccccgggcaaggctcttaaaaacgccatgtttctcggtaggccttggcgaaagaaaagggcactgtcactgtctggcctg

SEQ ID NO: 184025 - DNA, 80 bp, synthetic construct
  source 1..80: mol_type = other DNA
gttaacataagcaaactggagaaaggcctccaagaacttgcacccctttatgcctgtgaggccaaacaagtgcgtgacat

SEQ ID NO: 184026 - DNA, 80 bp, synthetic construct
  source 1..80: mol_type = other DNA
ttcttgtggcatacacaccaccgggtggtaaacctccaactgaccggaaagatgcgatgctgggcgtccacattgtatgg

SEQ ID NO: 184027 - DNA, 80 bp, synthetic construct
  source 1..80: mol_type = other DNA
acgccgacctgactaacccgaatgagcacaccctcctgttagccttgacagcagagttgcaagtggatgctaccacagaa

SEQ ID NO: 184028 - DNA, 80 bp, synthetic construct
  source 1..80: mol_type = other DNA
taacggtagtgagggagaagctgatagactaaaattctggcacagtttgtggaatacaggcagattcctaaacaccactc

SEQ ID NO: 184029 - DNA, 80 bp, synthetic construct
  source 1..80: mol_type = other DNA
agttatggtctgaccataacacctgccaataaaacagaaaaatttgaggaccttacttgggatacaataacatttcttaa

SEQ ID NO: 184030 - DNA, 80 bp, synthetic construct
  source 1..80: mol_type = other DNA
actaacccacagctgctagaccacaacaacgcacttagagggtacgtcccctactccctaaactttggcaacggaaaaat

SEQ ID NO: 184031 - DNA, 80 bp, synthetic construct
  source 1..80: mol_type = other DNA
ggacatgccattgttaacccatcaaattatgtacgtaccgccaggtggtgctgtaccaagtgatgcaaatagctttgcat

SEQ ID NO: 184032 - DNA, 80 bp, synthetic construct
  source 1..80: mol_type = other DNA
ggcgaaaacaagtatttttttacaccagacggactctggggagacccaatatataactatacaggcaacggaacacaaac

SEQ ID NO: 184033 - DNA, 80 bp, synthetic construct
  source 1..80: mol_type = other DNA
ggctgatcgctatggctttcctggtgggccgccgccgcctggtggtcctcggccgggtggtgcgctaagagccctgcccg

SEQ ID NO: 184034 - DNA, 80 bp, synthetic construct
  source 1..80: mol_type = other DNA
gggagaccacatatatgaaaacaccagcagtaaatcaatactaactgctatgaaagacaatgcaactaaaatgtatgaca

SEQ ID NO: 184035 - DNA, 80 bp, synthetic construct
  source 1..80: mol_type = other DNA
gccccgcaggagatggcgccgctggagacgccgcaggagactaccgcgcagaagatatagacgccctgttcgacgctatc

SEQ ID NO: 184036 - DNA, 80 bp, synthetic construct
  source 1..80: mol_type = other DNA
gcctactgggtgattaatacaagacaggttgcacaattacgtcgcaaattagaaatgttcacatatgccagatttgatct

SEQ ID NO: 184037 - DNA, 80 bp, synthetic construct
  source 1..80: mol_type = other DNA
ccgatgacccactccgtacaacgactcagtctgcttcgtcatattgcaaagcacaagcgacgtatgtgaacaacttgaaa

SEQ ID NO: 184038 - DNA, 80 bp, synthetic construct
  source 1..80: mol_type = other DNA
ctacggccctatgcttgtctcacaatacaccaggggatagtaactgattatgttaaccaactgggtactgcatttggtga

SEQ ID NO: 184039 - DNA, 80 bp, synthetic construct
  source 1..80: mol_type = other DNA
cttatcaaccaaatttgcaactctaagcatatatacaaatctaaatattatgaagtggaaggaggtatgccatctgggtg

SEQ ID NO: 184040 - DNA, 80 bp, synthetic construct
  source 1..80: mol_type = other DNA
caacttcttccgggtcaaaggtcactgctacgtcataggtgacgtgggggtggacctacttaaacacggaagtaggcccc

SEQ ID NO: 184041 - DNA, 80 bp, synthetic construct
  source 1..80: mol_type = other DNA
tccgggtgaatggtcacgcctacgtcattcgtcacgtggggaggcatactgcgcaaacgcggaagtaagccccgtcacgt

SEQ ID NO: 184042 - DNA, 80 bp, synthetic construct
  source 1..80: mol_type = other DNA
ttactttgcaggtggcgtttagagacacttggtcgtagctgtagctggcttcgcaattcacagtatacaggtgcccctct

SEQ ID NO: 184043 - DNA, 80 bp, synthetic construct
  source 1..80: mol_type = other DNA
ggaggggggttgattgcgggaccgcgctgacggacagagagaagacgggttgttgcgggggtgtgcggggacgagggtgt

SEQ ID NO: 184044 - DNA, 80 bp, synthetic construct
  source 1..80: mol_type = other DNA
ctcaaatccgtaaattcgcgcaaatcaaccaaacacccgaattccgttttatatccctagaaccagtttctgagattttc

SEQ ID NO: 184045 - DNA, 80 bp, synthetic construct
  source 1..80: mol_type = other DNA
cagaacaaccagaaacttctgagtttctattcccagaaaagagacccagaatcgatttaccaaagtacgaaccaccagaa

SEQ ID NO: 184046 - DNA, 80 bp, synthetic construct
  source 1..80: mol_type = other DNA
cattgaacaaagtgcactactccagggtgatgtagtagaggcaattgagggcgcagttgctagagtggcggacacaatta

SEQ ID NO: 184047 - DNA, 80 bp, synthetic construct
  source 1..80: mol_type = other DNA
cgtgccacctggagggccagtaccaacgtcagccacagattatagctggcaaacctctacaaaccccagtgtgttttgga

SEQ ID NO: 184048 - DNA, 80 bp, synthetic construct
  source 1..80: mol_type = other DNA
tgtggcccgtatatacttcaaaccaaagcatgttagagcttgggtgcctagaccaccgcggttatgcccttatatcaaca

SEQ ID NO: 184049 - DNA, 80 bp, synthetic construct
  source 1..80: mol_type = other DNA
gtgaaatatccagctattacactcactggacaggaagccttcgctttagttttatgttctgtggtacagccaacactact

SEQ ID NO: 184050 - DNA, 80 bp, synthetic construct
  source 1..80: mol_type = other DNA
agataatatggacatattcaggatcccagtcaagagtggcaaccatcaaagtgagcaagtgttcggattccaaatgcaac

SEQ ID NO: 184051 - DNA, 80 bp, synthetic construct
  source 1..80: mol_type = other DNA
ggagtggcccaaatacttgagtgacctggacgcttcctcagtggataaacctacccacccagaaacatcatctgatagat

SEQ ID NO: 184052 - DNA, 80 bp, synthetic construct
  source 1..80: mol_type = other DNA
gtaaatagccaggaagtcccagctttgacagctgttgagactggagcctcaggacaagcagtaccatcagatgttatgga

SEQ ID NO: 184053 - DNA, 80 bp, synthetic construct
  source 1..80: mol_type = other DNA
atcgaaaaataccgaggcaaaactgaaggccaactcgcaaaccaccgcgtcactcagcatcagatgatccttttccagac

SEQ ID NO: 184054 - DNA, 80 bp, synthetic construct
  source 1..80: mol_type = other DNA
aacacaataacaccacctacggtcgctcatgcagatgccttggcaagaaggtttgcattcgacatggatgtgtacactat

SEQ ID NO: 184055 - DNA, 80 bp, synthetic construct
  source 1..80: mol_type = other DNA
actaacagcaaaatacaagtttaaattcttattcgggggcaatcccgcttccgaacaggttgttagagacccctgcactc

SEQ ID NO: 184056 - DNA, 80 bp, synthetic construct
  source 1..80: mol_type = other DNA
accactccggtgggatcaaaaccagggaaggtactgaaagcactaagaccatcagctacactgtgaaatcttgcaaggga

SEQ ID NO: 184057 - DNA, 80 bp, synthetic construct
  source 1..80: mol_type = other DNA
tacgatcatggtcaggaacagtgccgacacccctacaattcttgccacccttgcgttattgggctgcagtaaatccccat

SEQ ID NO: 184058 - DNA, 80 bp, synthetic construct
  source 1..80: mol_type = other DNA
agattttctagtcagagtgcgcaccagtcctccctttgaagacacagacatgacagcactgtcactacacccaggcatga

SEQ ID NO: 184059 - DNA, 80 bp, synthetic construct
  source 1..80: mol_type = other DNA
ccataaatcactccaacttttcgttagcagtaatacctgtgtgccctctaaagtataacaccggcgccaccccttccata

SEQ ID NO: 184060 - DNA, 80 bp, synthetic construct
  source 1..80: mol_type = other DNA
atgggaaaatgtaacctttctaaaaagatatttcagacctgacgcacaatacccctttctcatacacccagtgatgccaa

SEQ ID NO: 184061 - DNA, 80 bp, synthetic construct
  source 1..80: mol_type = other DNA
tgtgatggcgggtaatatcactgtttacccacatcagataatcaatcttagaacaaataattgtgccacactagtattgc

SEQ ID NO: 184062 - DNA, 80 bp, synthetic construct
  source 1..80: mol_type = other DNA
aagcatacatgacaattaaagccaggtgataattccataccctggaagcaggagatgggtgcatttcaccccaacccccc

SEQ ID NO: 184063 - DNA, 80 bp, synthetic construct
  source 1..80: mol_type = other DNA
ggggctattcccgggggaggatgccaccctctaccgcaaggacatagcgggcctctccaagagcgtgaatgagttacagc

SEQ ID NO: 184064 - DNA, 80 bp, synthetic construct
  source 1..80: mol_type = other DNA
gacggtcacgtgggtgctgcgtcacagccgccattttagttaacaaaatggccgacttccttccgcttttttaaaaatta

SEQ ID NO: 184065 - DNA, 80 bp, synthetic construct
  source 1..80: mol_type = other DNA
tctataagtcaccaagcactccgagcgtaagcgaggagtgcgaccctcccccctggggcaactccctcgaagtccggcgc

SEQ ID NO: 184066 - DNA, 80 bp, synthetic construct
  source 1..80: mol_type = other DNA
accgaaatttagcagcccaccaaggccccataacagattaccttacacaattaggcaacgcatttggggaaggctttacc

SEQ ID NO: 184067 - DNA, 80 bp, synthetic construct
  source 1..80: mol_type = other DNA
gtcataagtgtaatgattagaaagtcataaacccacttccctttacatgaatctgggcactgaattttggggtacttcta

SEQ ID NO: 184068 - DNA, 80 bp, synthetic construct
  source 1..80: mol_type = other DNA
tcggcgtacgagtcccggtgctggaggcgggggatggcgcggcggcagctgtaccagccaaaggtgacaaagtcattgtc

SEQ ID NO: 184069 - DNA, 80 bp, synthetic construct
  source 1..80: mol_type = other DNA
cgccgcccaccagagggcgctgcgcgccccccccgcgcatgcgcgggtccccccccgcggaggtggacccgcgcatgcgc

SEQ ID NO: 184070 - DNA, 80 bp, synthetic construct
  source 1..80: mol_type = other DNA
aggcctttatcttcttgccatttgtctgtctagggggtcgccataggcttcgggctcggttttaggccttccggactaca

SEQ ID NO: 184071 - DNA, 80 bp, synthetic construct
  source 1..80: mol_type = other DNA
ggatctggtggcacgacggcgggggtgcaaacagctgtgtgtaacgctggcatgggtgtcgctgttggaaatctcactat

SEQ ID NO: 184072 - DNA, 80 bp, synthetic construct
  source 1..80: mol_type = other DNA
cggcctccgtccggtaggcgttaacaatacgctgacccaggtgccaacgctctttctctgccaaacgccgttgctcaaac

SEQ ID NO: 184073 - DNA, 80 bp, synthetic construct
  source 1..80: mol_type = other DNA
agccacggagggagatcagcgcgtcccgagtgcgggtgccggaggtgagtttacacaccgcagtcaaggcgcaattcggg

SEQ ID NO: 184074 - DNA, 80 bp, synthetic construct
  source 1..80: mol_type = other DNA
ttacgcaaattagccaatcaatatctgacaaattgacaggaaaagtgattaagtggttagtgcgtatcatcagtgcactc

SEQ ID NO: 184075 - DNA, 80 bp, synthetic construct
  source 1..80: mol_type = other DNA
acagcagccagccactcagtctacaccgccttgccaatcatgggtcccatctgtctatgtcctcccggcagtggatgctg

SEQ ID NO: 184076 - DNA, 80 bp, synthetic construct
  source 1..80: mol_type = other DNA
tgggtctactccaaccaatctctttacttacaatcttaccactacagttttgctggttagaagtgtgtttcacgatgggc

SEQ ID NO: 184077 - DNA, 80 bp, synthetic construct
  source 1..80: mol_type = other DNA
agagagggtttaaaccagattccagatatcaatttctcatccacccagtctacccaatgcaggatatctatgaatccatc

SEQ ID NO: 184078 - DNA, 80 bp, synthetic construct
  source 1..80: mol_type = other DNA
cctcgtctcaggtccagttttacccttccccactccctctctctctccctctgtcctgcatggtgatataaagacccttt

SEQ ID NO: 184079 - DNA, 80 bp, synthetic construct
  source 1..80: mol_type = other DNA
tgatccgtagagccctgccagcaccggcggctccggagccatggcgtggagctggtggtggtcccgccgccgacgcagac

SEQ ID NO: 184080 - DNA, 80 bp, synthetic construct
  source 1..80: mol_type = other DNA
agcttcaacaattgggtgattacaaccaggcgagtggctcaactacgtagaaaactggaaatgtttacttacctacggtt

SEQ ID NO: 184081 - DNA, 80 bp, synthetic construct
  source 1..80: mol_type = other DNA
ggtaggtgcagtaggcttttggtgtgcgggtgctggtggctgggctcccctgggtagggtaaaggggcacgatgtgtgcc

SEQ ID NO: 184082 - DNA, 80 bp, synthetic construct
  source 1..80: mol_type = other DNA
acttgtggacaccaacgatgtgaacctagaaataaccattgttgaacttgacaggaatgaaaaatttagggacatcaggg

SEQ ID NO: 184083 - DNA, 80 bp, synthetic construct
  source 1..80: mol_type = other DNA
ggagctagagctagaaatgttgcccagggattaccaacatttacaacacctgggtctggccaattcttaaccacagatga

SEQ ID NO: 184084 - DNA, 80 bp, synthetic construct
  source 1..80: mol_type = other DNA
tgtaatggctactaacactgaggcgaaaacatcatacgtctcatatgtgaatgcaaacccaggagagacaggtggtacgt

SEQ ID NO: 184085 - DNA, 80 bp, synthetic construct
  source 1..80: mol_type = other DNA
gagatacaagaatcacaatactacccaaaacatatacagtacaacatcttgataggtgagggaccttgtaaaccaggaga

SEQ ID NO: 184086 - DNA, 80 bp, synthetic construct
  source 1..80: mol_type = other DNA
tgcaggtatgggcgttggtgtaggcaaccttaccatatacccccatcaatgggtcaacttgcgtaccaataactgcgcaa

SEQ ID NO: 184087 - DNA, 80 bp, synthetic construct
  source 1..80: mol_type = other DNA
cggtcaagcacttctgtctccccggttcgaattgatacgctccaacagggcgaaaacaatttgaatcgttacccgcaaag

SEQ ID NO: 184088 - DNA, 80 bp, synthetic construct
  source 1..80: mol_type = other DNA
aagctacatgcaactagggaagcagcagagagagaagcaggggaggccctacaaggaggtgacagaggacttgctgcacc

SEQ ID NO: 184089 - DNA, 80 bp, synthetic construct
  source 1..80: mol_type = other DNA
acagacaagacgcggaaagaacagacacacgcagaagctcgagaggaagtccccagggggacggccgcgcgcgaacaaga

SEQ ID NO: 184090 - DNA, 80 bp, synthetic construct
  source 1..80: mol_type = other DNA
aattattgttttggttttcttttgctatggactgtgtaattagaatactaattaattaggacactaattcggaacatagg

SEQ ID NO: 184091 - DNA, 80 bp, synthetic construct
  source 1..80: mol_type = other DNA
ctcaggtgagtagacagaacaatggcacacatgaaaatggcatcacagccactcagggttcagttattaaatacttcaac

SEQ ID NO: 184092 - DNA, 80 bp, synthetic construct
  source 1..80: mol_type = other DNA
cataatatacaatccactactagacaaaggcacaggtaatatgatttggttccaataccacacaaagactgacaacatat

SEQ ID NO: 184093 - DNA, 80 bp, synthetic construct
  source 1..80: mol_type = other DNA
tcggtggcccgctgcacggccgcgcgtacaaattgcgcccgctcggccgcctcgctcggcttggttttcacgtccagcag

SEQ ID NO: 184094 - DNA, 80 bp, synthetic construct
  source 1..80: mol_type = other DNA
caaccggagatggacccgcagacgctggaggagactacgcacccggagacctagacgacctgttcgccgccgccgccgcc

SEQ ID NO: 184095 - DNA, 80 bp, synthetic construct
  source 1..80: mol_type = other DNA
aggtgatttagtacaaaaattatgctactccaaacacatttttaaaactaaatattatgaagtggaaggaggaatgccat

SEQ ID NO: 184096 - DNA, 80 bp, synthetic construct
  source 1..80: mol_type = other DNA
accagaagacaaacaagatttgaaaaaattaaaaaagaatatcaaaaagtataccctactttaacaacacaaacacccca

SEQ ID NO: 184097 - DNA, 80 bp, synthetic construct
  source 1..80: mol_type = other DNA
gcccagacacctcctcaaatagattctacaccctagagagtaagcaatggatgtcaacctctaaaggctggtggtggaaa

SEQ ID NO: 184098 - DNA, 80 bp, synthetic construct
  source 1..80: mol_type = other DNA
aggtccagttaaagcctggaaaggatggaccaaaaatcagacaatggcctctatctaaagaaaagatactggcccttaga

SEQ ID NO: 184099 - DNA, 80 bp, synthetic construct
  source 1..80: mol_type = other DNA
ataacacactgttctccaccaccttgctaggagaggtgttgaattactacaccaactggtcaggtagcataaccattaca

SEQ ID NO: 184100 - DNA, 80 bp, synthetic construct
  source 1..80: mol_type = other DNA
caaaagtcatcaaacaacaagtgattacggatgggaatgacattgacactgagatcacaatcatttggctagatagaaat

SEQ ID NO: 184101 - DNA, 80 bp, synthetic construct
  source 1..80: mol_type = other DNA
ctagataacttcgtataatgtatgctatacgaagttatgcggccacggatgcatgtttaaactcgacagcgacacacttg

SEQ ID NO: 184102 - DNA, 80 bp, synthetic construct
  source 1..80: mol_type = other DNA
ccgtggttccacgtcaaaattatgcacgctataagtacccccccataatggaatgttgccaaaccggttctttcccgtta

SEQ ID NO: 184103 - DNA, 80 bp, synthetic construct
  source 1..80: mol_type = other DNA
ctacgtgtggcttagccggttgctggatttggcgcccaactatcggcaggtcgagctcttccagttgctggaaaaggaat

SEQ ID NO: 184104 - DNA, 80 bp, synthetic construct
  source 1..80: mol_type = other DNA
gttgttcccacctgtgtcacccaagtggtgtggtgctcttgtgtttcggtacatttgcacgccagtttgccacccccttc

SEQ ID NO: 184105 - DNA, 80 bp, synthetic construct
  source 1..80: mol_type = other DNA
ggagataccggagggcccggtacaagaacaacttctccagcagctccagcagcagcgactcctcagagtccagctcgagt

SEQ ID NO: 184106 - DNA, 80 bp, synthetic construct
  source 1..80: mol_type = other DNA
catccaaacagcagtggatcattatgcagctcagttgtttgtacttgaaataaacccagaaccaataactattgaacaag

SEQ ID NO: 184107 - DNA, 80 bp, synthetic construct
  source 1..80: mol_type = other DNA
actcccaacccgggaccagtggcattcccactcgccaagctgaccccaaaaagtacaatgattggatgaatgctgccaaa

SEQ ID NO: 184108 - DNA, 80 bp, synthetic construct
  source 1..80: mol_type = other DNA
gtacagctagccttaaagtacaaatttgcatttaactggggtggcaatcctattgttgaacagattgttagagaccccag

SEQ ID NO: 184109 - DNA, 80 bp, synthetic construct
  source 1..80: mol_type = other DNA
ttaccactggactcaaaattccatttccaaatagtacagaccctacaaatgctggaaatggtacacctattacactaact

SEQ ID NO: 184110 - DNA, 80 bp, synthetic construct
  source 1..80: mol_type = other DNA
cctaccaaagagccacagagcttgctctaccaggagcagtaaaacccaccacagacttatttgaatatcacgcaggaata

SEQ ID NO: 184111 - DNA, 80 bp, synthetic construct
  source 1..80: mol_type = other DNA
ggggctgcccacgatgaacacaccagggagcactcaatttctcacttcagacgatttccaatcgccttccgccatgcctc

SEQ ID NO: 184112 - DNA, 80 bp, synthetic construct
  source 1..80: mol_type = other DNA
ttctagcattcataccactccctggttgaataccagtaacgtgacttgcgacggcagtttgtacaccatctataagcagt

SEQ ID NO: 184113 - DNA, 80 bp, synthetic construct
  source 1..80: mol_type = other DNA
aatacaacacattggacctgtcattagtcaatcaacatatttcaaacctgaaaaggagatatttgatatttgatttcaac

SEQ ID NO: 184114 - DNA, 80 bp, synthetic construct
  source 1..80: mol_type = other DNA
cacaacctgggaagaagggcaaaacctttaggcacccttacgttcttgattgtggtgtgccgttgagtcaagcgctcgtg

SEQ ID NO: 184115 - DNA, 80 bp, synthetic construct
  source 1..80: mol_type = other DNA
gaccgtttatgcccagagaccaggaagccaactcttgggacataaccgcaggttacaaagcagtttttaagtggagtggg

SEQ ID NO: 184116 - DNA, 80 bp, synthetic construct
  source 1..80: mol_type = other DNA
caaaggtgcctatttttgacccctttggacaaaaaacagagcttgagctgtgcggctgctttgacagaccgcccagaaac

SEQ ID NO: 184117 - DNA, 80 bp, synthetic construct
  source 1..80: mol_type = other DNA
ccatacgcgtctgacgctgacgctcgcgttcgaagcgccggtgtcgaaagaccattttcagcaaccccatgcggaaaaac

SEQ ID NO: 184118 - DNA, 80 bp, synthetic construct
  source 1..80: mol_type = other DNA
catacggtgaaaatactccaaaatcccaaaaatgccgcgattccccgagtggcccagggagacatcccggtgtctatgtc

SEQ ID NO: 184119 - DNA, 80 bp, synthetic construct
  source 1..80: mol_type = other DNA
acgcccccccggcccccccccgggctacatccactgcgcatgcgcggccacgcccccgccgccattttgtgcagcccgcc

SEQ ID NO: 184120 - DNA, 80 bp, synthetic construct
  source 1..80: mol_type = other DNA
ctactgggtgatcaacacaagacaggtcgcgcagttacgccgcaaattagaaatgttcacgtatgccagatttgacttag

SEQ ID NO: 184121 - DNA, 80 bp, synthetic construct
  source 1..80: mol_type = other DNA
tagaggctatgcgggatgctgcggcggcgcgaccttccctctccacccagccccgtcaaaacacacgcgactcgagcggt

SEQ ID NO: 184122 - DNA, 80 bp, synthetic construct
  source 1..80: mol_type = other DNA
aaggtgcaacatcagctataccgatcaccataaccattgcgccaatgtgctctgaattctcaggtctcagacaagccgtt

SEQ ID NO: 184123 - DNA, 80 bp, synthetic construct
  source 1..80: mol_type = other DNA
gtaaacggggagagccatgaagcggatgattcgcagtcacggcaggaaaacggaatgtcagatgacgggcgccggcgagc

SEQ ID NO: 184124 - DNA, 80 bp, synthetic construct
  source 1..80: mol_type = other DNA
cacagcaaaagggtgggaatactcatacactaagctaatgtcacctatatactattcagcagtcagaaacagcacataca

SEQ ID NO: 184125 - DNA, 80 bp, synthetic construct
  source 1..80: mol_type = other DNA
ggtcacagacatgctcaagcaacttaaacaaatgagtgcttacaaaagggatcaccgtcaggaaccagtgtgtctgctaa

SEQ ID NO: 184126 - DNA, 80 bp, synthetic construct
  source 1..80: mol_type = other DNA
ccagattatcttgatccaaaggagatagcacaaacagggagtaggtatggtctaacaataacacctgctgataaatcaga

SEQ ID NO: 184127 - DNA, 80 bp, synthetic construct
  source 1..80: mol_type = other DNA
ctcaatatgacatatcagaaccttaccaattagacaaatacagctgtgccaattaccatcctgcaaaaatgatgtttgca

SEQ ID NO: 184128 - DNA, 80 bp, synthetic construct
  source 1..80: mol_type = other DNA
aagggaccctcgggagggggctttggcagcatggtctggaatctagaattcctgtaccaagagtttaaaaagcagcacaa

SEQ ID NO: 184129 - DNA, 80 bp, synthetic construct
  source 1..80: mol_type = other DNA
cttcaacaactgggtgataaccacaaggagggtggcacaacttcgcaggaagttggaaatgttcacctacctaaggtttg

SEQ ID NO: 184130 - DNA, 80 bp, synthetic construct
  source 1..80: mol_type = other DNA
ctcaccataaggtaggatgggcttggtggacttgcagtagagtaatatttcccctgaaagaaggagcacatctagaagtc

SEQ ID NO: 184131 - DNA, 80 bp, synthetic construct
  source 1..80: mol_type = other DNA
agcatgatattcctaagcccatacagaaccaacacccagtttgaaacagcatacacagacatcacatacaaccccaacac

SEQ ID NO: 184132 - DNA, 80 bp, synthetic construct
  source 1..80: mol_type = other DNA
tcaggaccacttttcccagatcaccaagtcaatctctgataaatttacatcaaaggctattaaatggctggtgcgcatca

SEQ ID NO: 184133 - DNA, 80 bp, synthetic construct
  source 1..80: mol_type = other DNA
ccctcctggtctccgctcccctcttagccccgttaaacccaaagaatgtctgagtggagccaccctcggggcccaggccc

SEQ ID NO: 184134 - DNA, 80 bp, synthetic construct
  source 1..80: mol_type = other DNA
aaagccgagggtcgacctcgacagggtccaaacaccagaagaaagctcaatttcaccactccaaagagaacagaaaccgt

SEQ ID NO: 184135 - DNA, 80 bp, synthetic construct
  source 1..80: mol_type = other DNA
agcgcccagctctcgacaccagacccgagggcctggccggagagcaaagaagcgcctacgcttttctccgggctctccaa

SEQ ID NO: 184136 - DNA, 80 bp, synthetic construct
  source 1..80: mol_type = other DNA
acgcctatgtccagggacagaccatctacgccaacctccgtaaccccggagtcttctcgaggcaggtgtttacccatttg

SEQ ID NO: 184137 - DNA, 80 bp, synthetic construct
  source 1..80: mol_type = other DNA
actacccaggaccctttggggggggtatgactacagacaagtttactttgagaatcctgtatgatgagtacaaaaggttt

SEQ ID NO: 184138 - DNA, 80 bp, synthetic construct
  source 1..80: mol_type = other DNA
ccaataggtggtgaccatccaggtcactgacggtcgagcacttctgtttccccggtacccttgtatacgcttcgcccgag

SEQ ID NO: 184139 - DNA, 80 bp, synthetic construct
  source 1..80: mol_type = other DNA
aacctctgcctggcggctttgcgctacccaggccacaaaatgtatccctctgtctacactctattccctgatgtctcgcc

SEQ ID NO: 184140 - DNA, 80 bp, synthetic construct
  source 1..80: mol_type = other DNA
atgcgggcccagatccagccactgcagcgcggcgcgcgcggccgaggccgtgtacacgctttcgagcaggcagcgcgtgc

SEQ ID NO: 184141 - DNA, 80 bp, synthetic construct
  source 1..80: mol_type = other DNA
ttcccttccccagaaataacttagaagctttgagccaacgatcaacagtgggtgcgacataccagtcgcatctccatcaa

SEQ ID NO: 184142 - DNA, 80 bp, synthetic construct
  source 1..80: mol_type = other DNA
tctcacggaggatctctccgtgactgcaggtcgcgcagtcgccgtgcacgtacttgaggaaggcggcgtacttctgaccc

SEQ ID NO: 184143 - DNA, 80 bp, synthetic construct
  source 1..80: mol_type = other DNA
gattaccacgctcataattaatgaaaagaacaggagggcgaatattggtaattgcatggaggccctgttccaaggaccat

SEQ ID NO: 184144 - DNA, 80 bp, synthetic construct
  source 1..80: mol_type = other DNA
catggtggtagatgcctgtgtctaggctgctctcgggatgcgagatggggtccagcagcgtgtgcagttcggcgtcgaga

SEQ ID NO: 184145 - DNA, 80 bp, synthetic construct
  source 1..80: mol_type = other DNA
aaaagccttactgttcccagaacgcttaccacaagtgtggaccaagcaagactgggaaacagagtggcaagcagcaaagg

SEQ ID NO: 184146 - DNA, 80 bp, synthetic construct
  source 1..80: mol_type = other DNA
acagccgccattttgaatcacaaaatggcggacttccttcctcaaatttaaaaataacggccctgcggcggcgcgcgcgc

SEQ ID NO: 184147 - DNA, 80 bp, synthetic construct
  source 1..80: mol_type = other DNA
ggagaacagagagagaccctacaaggaggtgacagaggatttgctgcacctcaattctctctttggagaagaccagtagt

SEQ ID NO: 184148 - DNA, 80 bp, synthetic construct
  source 1..80: mol_type = other DNA
cgcataccggattggggtgaaccctaacacgggtgcaggcacacaagtttttggttttcctttacaaccggggttcagct

SEQ ID NO: 184149 - DNA, 80 bp, synthetic construct
  source 1..80: mol_type = other DNA
tattagagttatggcacgccatctgccaccccacacaaatgtgggttagaaaagaaaactgtccctatgcctggtctcca

SEQ ID NO: 184150 - DNA, 80 bp, synthetic construct
  source 1..80: mol_type = other DNA
tggaaatttattaaatcaaaagtgtgccactggttgggagtgcagccaccaccgagtcgccaaggggactcttggctgaa

SEQ ID NO: 184151 - DNA, 80 bp, synthetic construct
  source 1..80: mol_type = other DNA
cacgagaggacaaagtggtacgtgatgctcagataccagacggacgtgttccatgacatagtgacctgtgggccctggca

SEQ ID NO: 184152 - DNA, 80 bp, synthetic construct
  source 1..80: mol_type = other DNA
gtccaactgaacgtgaccgcagctgatttcacacatccgttcggctcaccactaactgaaactccttgcgtagagttcca

SEQ ID NO: 184153 - DNA, 80 bp, synthetic construct
  source 1..80: mol_type = other DNA
catgtttgtgcacacaaaggatgcaatttacaagtgtgcacatctaaccaatccaactgatgaaactatactcctggcat

SEQ ID NO: 184154 - DNA, 80 bp, synthetic construct
  source 1..80: mol_type = other DNA
cgacgcaagatcctaacgtcacatcctatatgttattctgatcgctcatcacctaccgcgtatcatgatctatgccgttc

SEQ ID NO: 184155 - DNA, 80 bp, synthetic construct
  source 1..80: mol_type = other DNA
accattatagcaaacatcattagtatatctggtataatttatgtaatatataaattgttttgtacattgcaaggcccata

SEQ ID NO: 184156 - DNA, 80 bp, synthetic construct
  source 1..80: mol_type = other DNA
acacatatgatttaacaaataaagacatacacaacaacacactatatggaggagcagcatactacaaacaaaacggaacc

SEQ ID NO: 184157 - DNA, 80 bp, synthetic construct
  source 1..80: mol_type = other DNA
gactgggaaacggaggcggagatcgggcgctggctcaggcggcccatgcgcttctatccctcagacccccctcactaccc

SEQ ID NO: 184158 - DNA, 80 bp, synthetic construct
  source 1..80: mol_type = other DNA
aacgattcacggagcaccagccgaacgtggtgatccgccgatcgatgaccaaacgcgtcagcggatccacacggacctcg

SEQ ID NO: 184159 - DNA, 80 bp, synthetic construct
  source 1..80: mol_type = other DNA
gaactgacggctcccaacaaccacccaggcatgcttatgcttcagaaacaaaaaatactaattcccagctgggaaactag

SEQ ID NO: 184160 - DNA, 80 bp, synthetic construct
  source 1..80: mol_type = other DNA
aaccgcgactgatgcaccagggcggtaatcacccgctctgcgccctcgcgcgtcgacgaacgcgtcgtcaccaggcagtg

SEQ ID NO: 184161 - DNA, 80 bp, synthetic construct
  source 1..80: mol_type = other DNA
tagcagtgtgctccagaagggcagtgtatcgcgcaggtagggggtcgtcacgcgccacggtatgagcatgaaaaggatgg

SEQ ID NO: 184162 - DNA, 80 bp, synthetic construct
  source 1..80: mol_type = other DNA
cacccgagttgcaaaagtaccgtcgccgtcttttcatcgaagtacgattaagtcggcggattcccgactgcgtgttggtg

SEQ ID NO: 184163 - DNA, 80 bp, synthetic construct
  source 1..80: mol_type = other DNA
tggagtctttcctaggtagggcggcattggtaaccatacttaaactgcaaaatgcagctcccaccactagcaacgccaag

SEQ ID NO: 184164 - DNA, 80 bp, synthetic construct
  source 1..80: mol_type = other DNA
cgatgctgggtacgcatgtcgtatgggacgtgggtctgcagtcctcatgcgtgctatgcatcccatggattagccagact

SEQ ID NO: 184165 - DNA, 80 bp, synthetic construct
  source 1..80: mol_type = other DNA
cagtgcaatagcccgtgtcgtgcaaaatcgtccagactgtgcgccaggtagtaaagcaccccgcgatcgcggtctagaca

SEQ ID NO: 184166 - DNA, 80 bp, synthetic construct
  source 1..80: mol_type = other DNA
aaagtgtctttggaacagaaggtttagaagctcttgatcttaacactagtgcaggatttccatatgtgtcaatgggtatt

SEQ ID NO: 184167 - DNA, 80 bp, synthetic construct
  source 1..80: mol_type = other DNA
atcactctggtggtatcaagactagggaaggcactgaaagtactaagaccatcagctatactgttaagtcatgcaaaggc

SEQ ID NO: 184168 - DNA, 80 bp, synthetic construct
  source 1..80: mol_type = other DNA
gtagcgcgtgtggcaatagaggaattcatcgtttcgcgtgaacgtgggagctccgtcttcccaacgtgtacgccacatgt

SEQ ID NO: 184169 - DNA, 80 bp, synthetic construct
  source 1..80: mol_type = other DNA
atcaactatttcaaagatgcagcatctagcggcgcttcaaaattagaattttcacaggatcctagcaaatttacagaccc

SEQ ID NO: 184170 - DNA, 80 bp, synthetic construct
  source 1..80: mol_type = other DNA
acacagaaagtgcagttggtatggagcgtctcaaggttgacatatcagcattgacagatgttgaccaactattattcaac

SEQ ID NO: 184171 - DNA, 80 bp, synthetic construct
  source 1..80: mol_type = other DNA
cagaggctcagtttagagtaccttcacaccaaccagatggtgtcaccaattcaaacaaagacaagtggacaaaaatgtgg

SEQ ID NO: 184172 - DNA, 80 bp, synthetic construct
  source 1..80: mol_type = other DNA
tgaaccgtttaacttacaacagttcaagtccaaataaggtgcattgtatagtacagggaaggcttggggatgatgcaaaa

SEQ ID NO: 184173 - DNA, 80 bp, synthetic construct
  source 1..80: mol_type = other DNA
tcaagactaaaccactcacagacaccagatcaaccatcactctggcacgggacgaacacataccggagctgcacaacatg

SEQ ID NO: 184174 - DNA, 80 bp, synthetic construct
  source 1..80: mol_type = other DNA
gccctgatgttctcaatctcatatgtggtcgcggcttgggtccggcgcttcacggtcaaccctagggtgcgggtggcaaa

SEQ ID NO: 184175 - DNA, 80 bp, synthetic construct
  source 1..80: mol_type = other DNA
ggagaatcaaccatcaccagaaggacctttagctgccgccacccccgaatgggcccttcactttaatctaccagtaaacc

SEQ ID NO: 184176 - DNA, 80 bp, synthetic construct
  source 1..80: mol_type = other DNA
gtaaccccccacgtagatcagggcaatgaggctgcatatgccccaccggcgacggtgatgcagcctgcgtggtgccccgc

SEQ ID NO: 184177 - DNA, 80 bp, synthetic construct
  source 1..80: mol_type = other DNA
ttgtgcaacaaacaaggagttaaattagaaataacagttattaaattggatcaaaatgaaaaattcagagacataagaaa

SEQ ID NO: 184178 - DNA, 80 bp, synthetic construct
  source 1..80: mol_type = other DNA
taaagtcattaacaatgcactacaactctctcaacccactcgaccaattacggcgtcagatacccccagttcaagcggtg

SEQ ID NO: 184179 - DNA, 80 bp, synthetic construct
  source 1..80: mol_type = other DNA
ttacggccgttggcctgagtatattagagatgatgaggcaaacccggtggatcaaccaactgagccagacgtggccacct

SEQ ID NO: 184180 - DNA, 80 bp, synthetic construct
  source 1..80: mol_type = other DNA
ctgggctgtgcgcagcgaggcgcatagacgtaacaagccggacagggagcgttccagtggcgagaagacagactcggaaa

SEQ ID NO: 184181 - DNA, 80 bp, synthetic construct
  source 1..80: mol_type = other DNA
aaacgcacaaaccagacaagaattaattactaaaattgtagaaaacgccaaaaatgttctaacaaaagtaaaccaagaac

SEQ ID NO: 184182 - DNA, 80 bp, synthetic construct
  source 1..80: mol_type = other DNA
acacggcgttgttgtttgaccccccggggcctaaacccatcaccggggcagaggcctggcgggacgagtacgaaaccgcc

SEQ ID NO: 184183 - DNA, 80 bp, synthetic construct
  source 1..80: mol_type = other DNA
atgtcacttttttaaagagaggatttaaacaggatgcaaaatattcctttttgatacacccaacttttccaattaatgag

SEQ ID NO: 184184 - DNA, 80 bp, synthetic construct
  source 1..80: mol_type = other DNA
caaagtggtccattcgcatatggaggagaggaaaaatctgcagtactaacttgtaaatacaaattcacattcttatttgg

SEQ ID NO: 184185 - DNA, 80 bp, synthetic construct
  source 1..80: mol_type = other DNA
tcttttactgaatcaaggaaccttcataggtcttgtgtgaaatcaagattgaaatccatttgaagccgcatctttaaaat

SEQ ID NO: 184186 - DNA, 80 bp, synthetic construct
  source 1..80: mol_type = other DNA
aaaggatttccatatgctgatgaaagatcccaaaatgaacttatagtttctattgataagcttaagaagaatttagataa

SEQ ID NO: 184187 - DNA, 80 bp, synthetic construct
  source 1..80: mol_type = other DNA
acaatccctgccaatcctgacgtggcttcgctctccaactacaccgtcatcgacactccgtttgacggtctggggattgc

SEQ ID NO: 184188 - DNA, 80 bp, synthetic construct
  source 1..80: mol_type = other DNA
aaagcccgctcctactaaaggagactgggaaacagagtacgcggcctgcaaagcctttgacaggcccgcaaggtcccatc

SEQ ID NO: 184189 - DNA, 80 bp, synthetic construct
  source 1..80: mol_type = other DNA
ccacgagcagtaccatactatggaccgggggtagactacaaggatggtttggcgcccttatcggagaagggactcaccac

SEQ ID NO: 184190 - DNA, 80 bp, synthetic construct
  source 1..80: mol_type = other DNA
gttggtgttgcagtgctgttgctactagtggatgaagacgaagtagattgactggaattagagctggtacctgtagtggt

SEQ ID NO: 184191 - DNA, 80 bp, synthetic construct
  source 1..80: mol_type = other DNA
aatccaactagggtcactgcaaaggtaagagtctacatgaaaccaaagcacattcgctgttggtgtccacgcccgccccg

SEQ ID NO: 184192 - DNA, 80 bp, synthetic construct
  source 1..80: mol_type = other DNA
cgcaaacgcagacgtagaaaaaagcttatactgtctatgtggaatcccccctatgtcagacgatgctacattaagggcat

SEQ ID NO: 184193 - DNA, 80 bp, synthetic construct
  source 1..80: mol_type = other DNA
acgcagacgctggcgccgctggagacgcaggccctggagacgccgatggaggacccgcagacgcagacctcgtcgccgct

SEQ ID NO: 184194 - DNA, 80 bp, synthetic construct
  source 1..80: mol_type = other DNA
acccgaccaatctgactgactcaagaacgagcatcacatacgtgcccgacactatccgcccagaagttcgcacggctggt

SEQ ID NO: 184195 - DNA, 80 bp, synthetic construct
  source 1..80: mol_type = other DNA
acatgtcgtggagaccgccggcgcataacgtccaggggcgcgaaggccagtggttcgcgtcggtttttcacagccacaat

SEQ ID NO: 184196 - DNA, 80 bp, synthetic construct
  source 1..80: mol_type = other DNA
ctgtacaaagaaatactttacaacccatacacagacaaaggaaagggcaacatgatctggtgcgaccctctaacaaaagg

SEQ ID NO: 184197 - DNA, 80 bp, synthetic construct
  source 1..80: mol_type = other DNA
cttttggcaatttattttcaaagtttcatcagaatccaggtatagtgactggttcagcagttggttgtgatcctgaaact

SEQ ID NO: 184198 - DNA, 80 bp, synthetic construct
  source 1..80: mol_type = other DNA
ggcattcgcatcagaagcctccactatgattccaatcacagtgaccatagcaccaatgtttgcagaatttaacggactga

SEQ ID NO: 184199 - DNA, 80 bp, synthetic construct
  source 1..80: mol_type = other DNA
atggtgttgagactaagatcattaaacaagaagtcatcacagatgaaaatgatgttgatactgagataactattctgtgg

SEQ ID NO: 184200 - DNA, 80 bp, synthetic construct
  source 1..80: mol_type = other DNA
aaatttacaggtttaggtatatttgataatgtgctggtaatacctacccatgctgacccaggtaaaagtgttaacataga

SEQ ID NO: 184201 - DNA, 80 bp, synthetic construct
  source 1..80: mol_type = other DNA
ataaaacccagtgcaacacaacaagactttacacctaactggcaaaccatacaaaacaagacagccctgtccgtgaatgg

SEQ ID NO: 184202 - DNA, 80 bp, synthetic construct
  source 1..80: mol_type = other DNA
tctatcatgtaagttcctcccactttatgccagtgaagcaaaaagaataaaagcactgcataataagtgtaacatcatca

SEQ ID NO: 184203 - DNA, 80 bp, synthetic construct
  source 1..80: mol_type = other DNA
actgtaacaaacatctaagattattgcattaaccccatgcctggtctccactagttgaaggcaacttgcaataaaatgag

SEQ ID NO: 184204 - DNA, 80 bp, synthetic construct
  source 1..80: mol_type = other DNA
tatatttcaaacccaagcacgtcagggcgtgggtaccgcgacccccgcgcctgtgccagtataaaaacaaggcaaacgtg

SEQ ID NO: 184205 - DNA, 80 bp, synthetic construct
  source 1..80: mol_type = other DNA
tccatgtatttctgcacttagtgaggacattggacatgttactatgcaatacatgtatgtaccaccaggtgcacctgtac

SEQ ID NO: 184206 - DNA, 80 bp, synthetic construct
  source 1..80: mol_type = other DNA
taaacaacatggggcaattgttcatgcgccatgtgaacaagtccactgcgcaatctatagacagcgtggtgcgcgtgtac

SEQ ID NO: 184207 - DNA, 80 bp, synthetic construct
  source 1..80: mol_type = other DNA
gtatgcgcaatctgacctatgtgccgttccccttgtgcaactaaacctaaccacagtcaaggggcaattcgggctcggga

SEQ ID NO: 184208 - DNA, 80 bp, synthetic construct
  source 1..80: mol_type = other DNA
atgctcgccacttcctgggtcatgacctggcctgtgccttgtcccgtggacaatgtccctccagcgtggtggctgccttt

SEQ ID NO: 184209 - DNA, 80 bp, synthetic construct
  source 1..80: mol_type = other DNA
ccagctaggcatatacagccccatattcctctcccgcaagcggagcaatattaactttgccaccgcttaccaggacgtca

SEQ ID NO: 184210 - DNA, 80 bp, synthetic construct
  source 1..80: mol_type = other DNA
tgtcgactgctgcgaaggtttggaccgtcttccagtaggtgttgggggtcccaaatcacgaggttaggcaggtgcactta

SEQ ID NO: 184211 - DNA, 80 bp, synthetic construct
  source 1..80: mol_type = other DNA
accacctacataaacacactgtttccaggcacagacagtctagtggccgccaaagatactgacaatagtgtaaataaata

SEQ ID NO: 184212 - DNA, 80 bp, synthetic construct
  source 1..80: mol_type = other DNA
ttcacaaacttaccacatgtattaatgaatttagctgagacaacccaggcagacctatgtatcccctatgtatctgatac

SEQ ID NO: 184213 - DNA, 80 bp, synthetic construct
  source 1..80: mol_type = other DNA
aggatgctgtatacacttgtgctcacttaacacagccaactgacaaaaccatcttattggcttacacagcagatttgcag

SEQ ID NO: 184214 - DNA, 80 bp, synthetic construct
  source 1..80: mol_type = other DNA
cttttggcaatctgttttcaaaattccatcagaatccaggcatagtgacaggttcagcagttgggtgcgaccctgaaact

SEQ ID NO: 184215 - DNA, 80 bp, synthetic construct
  source 1..80: mol_type = other DNA
cgataataatctgggtggcccggtcactaacggtgagaagatgggtgaaaatgtctgtgtaggccaccgggaggagcagg

SEQ ID NO: 184216 - DNA, 80 bp, synthetic construct
  source 1..80: mol_type = other DNA
gctccaatgcacctcaaagcaaagacacttggtacaagggaaacacatataatgacaacattaaagaattagcacggcaa

SEQ ID NO: 184217 - DNA, 80 bp, synthetic construct
  source 1..80: mol_type = other DNA
actgctagaggctgctcacggagcgacaataaactacactaacattaactactacaaagatgccgcatcgaattcagcaa

SEQ ID NO: 184218 - DNA, 80 bp, synthetic construct
  source 1..80: mol_type = other DNA
ttagcaatgtagaagtctacctgagtaggagtaggattttacaaaaaaaaaaaaatcaaacacaaagtagatcggaagag

SEQ ID NO: 184219 - DNA, 80 bp, synthetic construct
  source 1..80: mol_type = other DNA
gtaccaaatacccgtacggtctaatgaggggtctggtacacaagtcttcggattcccattacaaccaggctattctagtg

SEQ ID NO: 184220 - DNA, 80 bp, synthetic construct
  source 1..80: mol_type = other DNA
agatgaggctagagtttccccactggcgacagtgttctagcctgcgtggctgcctgctcccttatgggagaagccattct

SEQ ID NO: 184221 - DNA, 80 bp, synthetic construct
  source 1..80: mol_type = other DNA
acgagactgcaggatacgtagtttacaacagaaactttggcagaggaaagtggatagacggagggggctacatcccccta

SEQ ID NO: 184222 - DNA, 80 bp, synthetic construct
  source 1..80: mol_type = other DNA
ataaagtggtgagcaatgctctacagctttcacaacccatccgaccagtcacggcatcggacactcccagcactagtgga

SEQ ID NO: 184223 - DNA, 80 bp, synthetic construct
  source 1..80: mol_type = other DNA
cagcctccaagcgggatacgggatacacccccttcttcaatcccgtgtataaataaagtgtacatgtttaacccccccat

SEQ ID NO: 184224 - DNA, 80 bp, synthetic construct
  source 1..80: mol_type = other DNA
agccaagaaggactcgtgcacgtgcttcttcacaaagtggtagacgccccccgtgagcctgaaggactcatagtcttctc

SEQ ID NO: 184225 - DNA, 80 bp, synthetic construct
  source 1..80: mol_type = other DNA
tccctctcgctcgttaaacaaggaaatattcgaacatatgtactttacggccctctgcaccagtagtctgattggacttc

SEQ ID NO: 184226 - DNA, 80 bp, synthetic construct
  source 1..80: mol_type = other DNA
atgcagattactcgtggagattccacgataacatcacaagacatagctaatgctgtggtcggttatggtgtgtggccatc

SEQ ID NO: 184227 - DNA, 80 bp, synthetic construct
  source 1..80: mol_type = other DNA
gccaacgacgtcgacgcggctttcttggcgtacagctcgcgcagcagattctcgtactcgccctcgttttcgggtccgaa

SEQ ID NO: 184228 - DNA, 80 bp, synthetic construct
  source 1..80: mol_type = other DNA
cactacgtctaaaggttggtggtggaagttgcctgattgccttaaagatatgggcatcttcgggcaaaatctgtaccatc

SEQ ID NO: 184229 - DNA, 80 bp, synthetic construct
  source 1..80: mol_type = other DNA
acacaaatatcagcgacaacttcacaagttggaggatcaacacaagagaggttgcacaactcagacgcaaattggaaatg

SEQ ID NO: 184230 - DNA, 80 bp, synthetic construct
  source 1..80: mol_type = other DNA
tgtgcatactcatgatgccatcttcagatgtgcacacttgaccaacccaactgaagacacaatattgctagctatcagtt

SEQ ID NO: 184231 - DNA, 80 bp, synthetic construct
  source 1..80: mol_type = other DNA
tgcacgcctgtttcccctttgtacccgccctcaatttccaccctctgtaacgttagaagtttgtgaaattaaaagtacaa

SEQ ID NO: 184232 - DNA, 80 bp, synthetic construct
  source 1..80: mol_type = other DNA
atacattagatattaacccagaaccattgacaattgatcaagcggtctatggtattgataaccttgaaccactagatata

SEQ ID NO: 184233 - DNA, 80 bp, synthetic construct
  source 1..80: mol_type = other DNA
atgttatattttcttacaaatataatctggacatggaggcaattgcagctgaaggacttaagtatggactcactataaca

SEQ ID NO: 184234 - DNA, 80 bp, synthetic construct
  source 1..80: mol_type = other DNA
taatgcatatggccagagttgactcctttataccattaaacaacatacaaggggagataaccaaacccagtatgtattgc

SEQ ID NO: 184235 - DNA, 80 bp, synthetic construct
  source 1..80: mol_type = other DNA
ggtctgagccgagcgtgcaggtcgccgggtctagaggcgaccgttttcgaaagaaggccgtcacaatgttcacccggggt

SEQ ID NO: 184236 - DNA, 80 bp, synthetic construct
  source 1..80: mol_type = other DNA
tacggaacataaccataccagccacgcaaggtttgccaaccatgttggtacctggttcgaaccagtttttaacttctgac

SEQ ID NO: 184237 - DNA, 80 bp, synthetic construct
  source 1..80: mol_type = other DNA
gtcgctattggtacagaagtgtactaccttcttttcctcagctgctacagaaatccttgataatgacttggtcaaattta

SEQ ID NO: 184238 - DNA, 80 bp, synthetic construct
  source 1..80: mol_type = other DNA
caaaatggacaaggacaggccgggtctcccggccccggatgacaacatagaagaagtaccatctacctcgggtgttcagg

SEQ ID NO: 184239 - DNA, 80 bp, synthetic construct
  source 1..80: mol_type = other DNA
atgttaactaaggtggctgatgacgcttctaatgtgttaggtccaaactgttttgcaacaacatcaacaccagaaaataa

SEQ ID NO: 184240 - DNA, 80 bp, synthetic construct
  source 1..80: mol_type = other DNA
ctaaggtcagagtgtatttgaagcccaagcacattagggtgtggtgccctcgcccaccaagagcagtggcgtattatggt

SEQ ID NO: 184241 - DNA, 80 bp, synthetic construct
  source 1..80: mol_type = other DNA
tgatggcatgtaacaccgagagcaagacctcatatgtctcatatattaatgccaaccctggtgagaagggtggtgaattt

SEQ ID NO: 184242 - DNA, 80 bp, synthetic construct
  source 1..80: mol_type = other DNA
atgtgcacaaagagtctgattcatggcttaagaaattcactgaagcttgtaatgcagcacgcggtctagaatggattgga

SEQ ID NO: 184243 - DNA, 80 bp, synthetic construct
  source 1..80: mol_type = other DNA
atcggacggtcgccaacacacagcctagcggtccgtccaactccacggaaattccagccttaacagcggtggaaacgggg

SEQ ID NO: 184244 - DNA, 80 bp, synthetic construct
  source 1..80: mol_type = other DNA
atacactggaccttctgtggactacaagaaagatgaccaggtgatgacccacgtggcagacattagaacctttggatttg

SEQ ID NO: 184245 - DNA, 80 bp, synthetic construct
  source 1..80: mol_type = other DNA
tgggattgctcctttgaaatcctgtgcactcacacctattggaattacctcattgttaagatatcatcaccactatgggc

SEQ ID NO: 184246 - DNA, 80 bp, synthetic construct
  source 1..80: mol_type = other DNA
gaattgagactttatccatcagaagcttgtatcgttgatcataatttaggagaagaatatgggtttctgccatcaataat

SEQ ID NO: 184247 - DNA, 80 bp, synthetic construct
  source 1..80: mol_type = other DNA
aacatctgcccaggatgatggaccattaggttctgagaaaccaaattattttttaaatttcagagctatgaatgttgata

SEQ ID NO: 184248 - DNA, 80 bp, synthetic construct
  source 1..80: mol_type = other DNA
aattaatccaattaacagtataagcaagaaaataattaaatggttgcttagaataatatcagcaatggttataatcataa

SEQ ID NO: 184249 - DNA, 80 bp, synthetic construct
  source 1..80: mol_type = other DNA
cgccagcttcggatcctcgcctgtcatacaccatgctcggggaaatcttgaactattacacacattgggccggatcactg

SEQ ID NO: 184250 - DNA, 80 bp, synthetic construct
  source 1..80: mol_type = other DNA
cccctggtgccgacattccagccacccgcactgatgcaatgcttggaacacacatcatatgggatctgggtttgcagtcc

SEQ ID NO: 184251 - DNA, 80 bp, synthetic construct
  source 1..80: mol_type = other DNA
aacaagaaacttctgagtcttatttcccaggtccaaaaagacccagaatcgatctgccaaagtacgagccgccagaagaa

SEQ ID NO: 184252 - DNA, 80 bp, synthetic construct
  source 1..80: mol_type = other DNA
cctttggagactcaagtgtgaatttgttttggtgttcggcgccagggcatctcgacgttggaatgtcaactcaacttggg

SEQ ID NO: 184253 - DNA, 80 bp, synthetic construct
  source 1..80: mol_type = other DNA
ggggcagaagtagtgccaggatttcaggcactctcagaaggctgcacgccctatgatatcaatcaaatgcttaattgtgt

SEQ ID NO: 184254 - DNA, 80 bp, synthetic construct
  source 1..80: mol_type = other DNA
aagatgaatacaccagtgctggtaacgtgacgtgctggtatcagactgggatagtcgtgccagctggaacgcctacgtca

SEQ ID NO: 184255 - DNA, 80 bp, synthetic construct
  source 1..80: mol_type = other DNA
gatggatctatatggtattgacttaccttatatcacctatctaaaagatgaacttcgagcaccggagaaaatcaaatgtg

SEQ ID NO: 184256 - DNA, 80 bp, synthetic construct
  source 1..80: mol_type = other DNA
tgacctggaacaatcttggtgagtatcaaactgtccacgctaacctcatccagcacggccagggtgcaatcagacaggta

SEQ ID NO: 184257 - DNA, 80 bp, synthetic construct
  source 1..80: mol_type = other DNA
ttaaaaaacacacagacagcaactatggctactgctcctactgtccctcaacttcaggctccaatccattagttgacaaa

SEQ ID NO: 184258 - DNA, 80 bp, synthetic construct
  source 1..80: mol_type = other DNA
taggatgtccattcctttcgtaggaattggagctgcctactcgcacttctatgatggattcagtgttgtacccttcaact

SEQ ID NO: 184259 - DNA, 80 bp, synthetic construct
  source 1..80: mol_type = other DNA
agtgccatggagataggggcctcaagtacagccaccccagaatcaactatggagactagatatgtggtaaatgataacac

SEQ ID NO: 184260 - DNA, 80 bp, synthetic construct
  source 1..80: mol_type = other DNA
ccccacaatgccatctgttgacaatgcttcaacatccaaagaccctaacaatcttactaagcacaatgttagatcctcat

SEQ ID NO: 184261 - DNA, 80 bp, synthetic construct
  source 1..80: mol_type = other DNA
ttgaatggatgaagtctatgctccctcaagctcaacttaaagtgaaatatttgagtgaactcaagaagttgaattttctt

SEQ ID NO: 184262 - DNA, 80 bp, synthetic construct
  source 1..80: mol_type = other DNA
cgcctgttttaaaacccctccctaatcgaaacttagaagtcacacatgccgatcaatagaaaacatagcaacccagctat

SEQ ID NO: 184263 - DNA, 80 bp, synthetic construct
  source 1..80: mol_type = other DNA
tccccccggcgccccgagaccatcgtcatgggacgactacacgtggcaatcctcgtccaatccctccatcttctacatgt

SEQ ID NO: 184264 - DNA, 80 bp, synthetic construct
  source 1..80: mol_type = other DNA
ttctggcaccacctacaatcacctcactccctgctatgaatagaagattctttttagatttagacataatagtgcatgac

SEQ ID NO: 184265 - DNA, 80 bp, synthetic construct
  source 1..80: mol_type = other DNA
taacaattatgattagaaactctacagatactgctacagtactagcaactttagcgttgctagggtgccagagctctcca

SEQ ID NO: 184266 - DNA, 80 bp, synthetic construct
  source 1..80: mol_type = other DNA
aacacaatactgatgtttgtaagtactcttggtattctttatgtgatatacaaattgtttgcacaaacacaaggcccata

SEQ ID NO: 184267 - DNA, 80 bp, synthetic construct
  source 1..80: mol_type = other DNA
gcagccgcagaaatcctccagctcgaagaagactcgacttcaggggaaggaaaatcgccactacagcaagaagagaaaga

SEQ ID NO: 184268 - DNA, 80 bp, synthetic construct
  source 1..80: mol_type = other DNA
aagtatatcaaaaccgatacagcaacctaaacacacaggagttttacaatagtagaaaacaagcatatgatgaactaaca

SEQ ID NO: 184269 - DNA, 80 bp, synthetic construct
  source 1..80: mol_type = other DNA
gccccgtcgcagaaggctcccgtccccgtccgcgacgtcaccctgtgtctccgtccccacccttgtccctgccgcaaaag

SEQ ID NO: 184270 - DNA, 80 bp, synthetic construct
  source 1..80: mol_type = other DNA
gctaatattagaaaatgcaggatcaggggaatgctacccatgctcatttgcggatacggtcgcggtgccaataactatgc

SEQ ID NO: 184271 - DNA, 80 bp, synthetic construct
  source 1..80: mol_type = other DNA
agggatatggcctccatgggcctcggggtgcagggcctggccgatgtctttgcggacctgggctggcagtacactgaccc

SEQ ID NO: 184272 - DNA, 80 bp, synthetic construct
  source 1..80: mol_type = other DNA
acattgttattagaacactaattcaattagaacactgaaaatatgatacaacatttaatgtggatgaagaattttagcac

SEQ ID NO: 184273 - DNA, 80 bp, synthetic construct
  source 1..80: mol_type = other DNA
ccaactgatgaaagtgttagagtattaaacacctttaaaacagaaggcaactacagccaccctcaaatacctaaagccac

SEQ ID NO: 184274 - DNA, 80 bp, synthetic construct
  source 1..80: mol_type = other DNA
gccagttcagcagaggcccgtcatgtttgtgagccgtgtgcctgtaaggaaaccgaggacactgccgtggcctacaccca

SEQ ID NO: 184275 - DNA, 80 bp, synthetic construct
  source 1..80: mol_type = other DNA
ttggacaagataatggacatgtggtcttgcagtacatgtatgtaccaccaggggcacccataccaaaaactagagatgac

SEQ ID NO: 184276 - DNA, 80 bp, synthetic construct
  source 1..80: mol_type = other DNA
gtggtgaagcctctaacgctgtctgtccactccgaaaggtctcagttcccagacttctctgtccttactgtgacatgcac

SEQ ID NO: 184277 - DNA, 80 bp, synthetic construct
  source 1..80: mol_type = other DNA
ttaacaaaacagaatactacaacacttttcaaacaatagctcagctaaaggacacgggacaagctataacagaaggtaat

SEQ ID NO: 184278 - DNA, 80 bp, synthetic construct
  source 1..80: mol_type = other DNA
tatggtatgtgcgaaaaggcggacgaagaagaactccaaagagaactaagactcatccgccttctacaccagacaagtga

SEQ ID NO: 184279 - DNA, 80 bp, synthetic construct
  source 1..80: mol_type = other DNA
gttcctctcaatttctaacctcagacgattttcaatctccgtgtgctctccctaattttgatgtgacaccaccgatccac

SEQ ID NO: 184280 - DNA, 80 bp, synthetic construct
  source 1..80: mol_type = other DNA
aagggtggttagtcaacatatccagtcaagtccagttggaaagaaatataaacagagcaatgactatcctccaagcggtt

SEQ ID NO: 184281 - DNA, 80 bp, synthetic construct
  source 1..80: mol_type = other DNA
cccctccttccagcagagactggcaggaggagttcgaggcctgtaaagcctgggacaggcctgccagaaataacctcagc

SEQ ID NO: 184282 - DNA, 80 bp, synthetic construct
  source 1..80: mol_type = other DNA
tatatttaatgaaagacagtgcaaatgccacatagtagatattcctttgtgggcagcattccatggctatattgacttta

SEQ ID NO: 184283 - DNA, 80 bp, synthetic construct
  source 1..80: mol_type = other DNA
attatacaaccagcctgcaatcaggttctgatgttcccagagatggggcctaagcccgctcccacagcccaagactggca

SEQ ID NO: 184284 - DNA, 80 bp, synthetic construct
  source 1..80: mol_type = other DNA
cgtatgagaggaatggtgactgtgagtagcagaagttccacgagaagtagaagatgaggaaaccgcagcacccagacaga

SEQ ID NO: 184285 - DNA, 80 bp, synthetic construct
  source 1..80: mol_type = other DNA
ctcactctcaatagatagcatgacaaagcacaacaactgggggatcgctatcctccccctggcgccactagactttgcca

SEQ ID NO: 184286 - DNA, 80 bp, synthetic construct
  source 1..80: mol_type = other DNA
agtgctgctttcgtggaaagtgctgctgacgctggtatggggtgccgcacccgtgataatgatgacgtggttctacgcat

SEQ ID NO: 184287 - DNA, 80 bp, synthetic construct
  source 1..80: mol_type = other DNA
tcttcatctttctggtctggcttcacgttttaattttcaaggaggtccgccgggcccgggtgcgccccgccccgagaacc

SEQ ID NO: 184288 - DNA, 80 bp, synthetic construct
  source 1..80: mol_type = other DNA
catccagacacttcatcagacagattttacactttagacagcaaactatggtcaaatgagtctaagggctggtggtggaa

SEQ ID NO: 184289 - DNA, 80 bp, synthetic construct
  source 1..80: mol_type = other DNA
aaaaatagaggcactaaaagagatctgtgaaaaaatggaaaaagagggccagctggaggaagcgcctccaactaatcctt

SEQ ID NO: 184290 - DNA, 80 bp, synthetic construct
  source 1..80: mol_type = other DNA
ctgccatccagagtgccctagcacgccccactgctgctaataccacagctagcaaccactccatagggactggtagtgtg

SEQ ID NO: 184291 - DNA, 80 bp, synthetic construct
  source 1..80: mol_type = other DNA
gcatatgctatccatcgcaacattagcccaccgtgctctcaacgacctcgtgaatatgaggaccaacaaccctgtgcttg

SEQ ID NO: 184292 - DNA, 80 bp, synthetic construct
  source 1..80: mol_type = other DNA
ctatgctggggactcatgttgtttgggacgttggattgcaatctaccatctctatggttgtgccatgggttagtgctagt

SEQ ID NO: 184293 - DNA, 80 bp, synthetic construct
  source 1..80: mol_type = other DNA
aacttaccattgtcatcactagcagtcaaatccccagtactagtgtaaatcaagatatgccggtactaacacaccagatc

SEQ ID NO: 184294 - DNA, 80 bp, synthetic construct
  source 1..80: mol_type = other DNA
atagcctgagaactttgtttgatgacttcttaacacaccataacttttggactgctagtaacaaagacttagacctaggc

SEQ ID NO: 184295 - DNA, 80 bp, synthetic construct
  source 1..80: mol_type = other DNA
ctggagaggtgcgcaatatgatggaactggcagaaatagacagtgtggttccaatgaacgcagtagcaggcaaagtcaac

SEQ ID NO: 184296 - DNA, 80 bp, synthetic construct
  source 1..80: mol_type = other DNA
gttacaccgcaaggtactacacaaccaccaactgaagatgtagaaatattctctaagtacttatataaaaatgcaaactt

SEQ ID NO: 184297 - DNA, 80 bp, synthetic construct
  source 1..80: mol_type = other DNA
acctcacagacaactacaccagtgttaatactccaacagaaacatgtacatttacacagttttcagaaaaattagaaaac

SEQ ID NO: 184298 - DNA, 80 bp, synthetic construct
  source 1..80: mol_type = other DNA
gcaccaatgcacctcaaagcaaagacacttggtacaagggcaacacatacaaccaaaacatcaaagatttagcagaaaaa

SEQ ID NO: 184299 - DNA, 80 bp, synthetic construct
  source 1..80: mol_type = other DNA
taaccgtgctagccaccctcagcttattaggatgtgactcctctccatggcactggttaaaagagaaggtttgcaacata

SEQ ID NO: 184300 - DNA, 80 bp, synthetic construct
  source 1..80: mol_type = other DNA
gatccaccccggcatgatgatgcagcagaaaagaaaactggtggtccccagtttccagaccagacccaaaggaaaaaaga

SEQ ID NO: 184301 - DNA, 80 bp, synthetic construct
  source 1..80: mol_type = other DNA
cactatacaaaatggcggcggagcacttccggcttgcccaaaatggcggtcaacaacatccgggttaaaggtttcagcta

SEQ ID NO: 184302 - DNA, 80 bp, synthetic construct
  source 1..80: mol_type = other DNA
aggccatgaataggcgattcttccttgatttagatattgtagtccatgaaaattataaagatgcccagggtaaattagat

SEQ ID NO: 184303 - DNA, 80 bp, synthetic construct
  source 1..80: mol_type = other DNA
ctgaccccatgctcatagacaggtcagatgacaataagggctttgtaccctactctcaaaactttggcaaaggcaaaatg

SEQ ID NO: 184304 - DNA, 80 bp, synthetic construct
  source 1..80: mol_type = other DNA
gtccacaacagattttgtagtgcctatggctgctctagaagacaaaggtaagagttttaccagtgattatgtactagcta

SEQ ID NO: 184305 - DNA, 80 bp, synthetic construct
  source 1..80: mol_type = other DNA
gaccagtccgtgccccacccttggggggaaaccggagaacagctcctggacgttgcgtggattcggtggaagctggtatc

SEQ ID NO: 184306 - DNA, 80 bp, synthetic construct
  source 1..80: mol_type = other DNA
ccgcctccaggtcaaattttccatcgtcgctctcggccagctggggaatttcagccagcatcttagcaccggcatctaca

SEQ ID NO: 184307 - DNA, 80 bp, synthetic construct
  source 1..80: mol_type = other DNA
aaaaaagagacttaataaataacaacacaaaagatttatctagacttaaaagtgcacttgacaagtatggagtagatctg

SEQ ID NO: 184308 - DNA, 80 bp, synthetic construct
  source 1..80: mol_type = other DNA
taggaacttaattgagctgtgccaagtagatactttaatcccaataaacaacctgcaagcaaatgttactaatttagaca

SEQ ID NO: 184309 - DNA, 80 bp, synthetic construct
  source 1..80: mol_type = other DNA
cacgactactatctacctaaggatgcacaatggggagacccaattcacattattaacgacaatgacaaagccacaaatca

SEQ ID NO: 184310 - DNA, 80 bp, synthetic construct
  source 1..80: mol_type = other DNA
cctgtttgctgcactcctgcttataagtatctatggctttatgggcgaggatttcgtcactgtcttctatggcataccag

SEQ ID NO: 184311 - DNA, 80 bp, synthetic construct
  source 1..80: mol_type = other DNA
ggcccgaatatttgggtgacaacgaggcaactgcagaagatcaaccaactcaaccggacgttgccacatgccgcttttat

SEQ ID NO: 184312 - DNA, 80 bp, synthetic construct
  source 1..80: mol_type = other DNA
ccccccgaagtacgtcactaaccacgtgactcccgcaggccaatagtccgctactacgtgcacttcctggggtggagcta

SEQ ID NO: 184313 - DNA, 80 bp, synthetic construct
  source 1..80: mol_type = other DNA
agtaaggctggtaagctcaatgtaagtcaggccatggcaacaatggctacaggtgaatgctgggaggtatcaaagaatgg

SEQ ID NO: 184314 - DNA, 80 bp, synthetic construct
  source 1..80: mol_type = other DNA
cgctgacctaccgggcgccttcgagtccgtaccccgcggcctgggtgttagagtccgtaccttgcagcccaggtaggttt

SEQ ID NO: 184315 - DNA, 80 bp, synthetic construct
  source 1..80: mol_type = other DNA
tcaaggtgttacagattacatcacccagctaggtagtgcatttggtgatggattcacaagttccataaggcaaacactta

SEQ ID NO: 184316 - DNA, 80 bp, synthetic construct
  source 1..80: mol_type = other DNA
gctcgaaaatttcaaaagcttctagagaagttgtagattggttttcagatagaattaaatctatgcttagctttgttgag

SEQ ID NO: 184317 - DNA, 80 bp, synthetic construct
  source 1..80: mol_type = other DNA
agggaaaaggcctctgggttctccagcacggtgggcatgacatattccagaaagttgtggtagacggggatgtagttgag

SEQ ID NO: 184318 - DNA, 80 bp, synthetic construct
  source 1..80: mol_type = other DNA
atgcggtagatgtcgttggcgtcccagaagaactcctggtacttcagattctgaccctgaaccgtagccaccatgggcac

SEQ ID NO: 184319 - DNA, 80 bp, synthetic construct
  source 1..80: mol_type = other DNA
tgcacccttcccctgtaacttagaagttttaaacaaagaccaataggtggtagctttccaggttactaaaggtcaagcac

SEQ ID NO: 184320 - DNA, 80 bp, synthetic construct
  source 1..80: mol_type = other DNA
acctgaagatatgattgagactcgttatgtccagacatcacagactagagatgagatgagtgttgaaagctttcttggta

SEQ ID NO: 184321 - DNA, 80 bp, synthetic construct
  source 1..80: mol_type = other DNA
acaagaccacgagacagtgggcctagtgtgccttatatgtccttataccagacccagactatactcacaagaaaaaccaa

SEQ ID NO: 184322 - DNA, 80 bp, synthetic construct
  source 1..80: mol_type = other DNA
actcgcagacaaaggcataggcaacatgatatggctagatgtaattactaaaaacacacaagagtacgaagagggaaaat

SEQ ID NO: 184323 - DNA, 80 bp, synthetic construct
  source 1..80: mol_type = other DNA
aacagctgctcaggattggggaacgaagagatggtcgagtgtcagttcaatatgacagggttacagacagacaagaaaaa

SEQ ID NO: 184324 - DNA, 80 bp, synthetic construct
  source 1..80: mol_type = other DNA
accaaagatgccatatacacatgtgcgcatctcacccaacctaatgaaaacacaattttattggcattgacagcagacct

SEQ ID NO: 184325 - DNA, 80 bp, synthetic construct
  source 1..80: mol_type = other DNA
ttctctcctctcaaatttgctggcacagctacatacgtgcctatcacagtgacagttgcaccaatgtgtgcagagtacaa

SEQ ID NO: 184326 - DNA, 80 bp, synthetic construct
  source 1..80: mol_type = other DNA
ggcgggatcaccgtgtgccaaccgggctgcgacctgaaaaccggaaccaatccgccgacaccggcgccgcgtgacgcgcg

SEQ ID NO: 184327 - DNA, 80 bp, synthetic construct
  source 1..80: mol_type = other DNA
actactgcacaaaagccagcaaagacgaaagctttaaatataactacagagtactcatacagtgtccatatacagtgcca

SEQ ID NO: 184328 - DNA, 80 bp, synthetic construct
  source 1..80: mol_type = other DNA
caaaatccagtggagaattacatagatcaggtgcttaatgaggttttggtagtcccaaacattaaagagagcaaccctac

SEQ ID NO: 184329 - DNA, 80 bp, synthetic construct
  source 1..80: mol_type = other DNA
accaattggcctatataggtggtggtaatgtcactgttgggtataaccacacacaccctggtgaatcgggaagaagaatt

SEQ ID NO: 184330 - DNA, 80 bp, synthetic construct
  source 1..80: mol_type = other DNA
tatgtgtgtttgtgatagttttagtactggcaagttcctcgttgcctacacgcctccgggagcaggccttccaaccacac

SEQ ID NO: 184331 - DNA, 80 bp, synthetic construct
  source 1..80: mol_type = other DNA
aacaccccagcgacatcaggggtgaactcgcaggaagtaccagctttaacagctgttgaaaccggtgctagtggtcaggc

SEQ ID NO: 184332 - DNA, 80 bp, synthetic construct
  source 1..80: mol_type = other DNA
ctactacaccaaccttagtaaccttccacaacaccaaaccgaaagaaaaaacattcaactatcatttcatccagataaca

SEQ ID NO: 184333 - DNA, 80 bp, synthetic construct
  source 1..80: mol_type = other DNA
gacagcaggagctgcaatgggcgcggcgtccttgacgctgtcggctcagtctcggactttattggccgggatagtgcagc

SEQ ID NO: 184334 - DNA, 80 bp, synthetic construct
  source 1..80: mol_type = other DNA
atctaaatttattccaactactaacacaaatccacttacagaaacaaatgcaaacacagacactatagttatacacaaaa

SEQ ID NO: 184335 - DNA, 80 bp, synthetic construct
  source 1..80: mol_type = other DNA
gtgcgccggtgctgagggccctaccggccccgagcccgcgcagacgccacaccgccaccgaaaacccggggcctgagcca

SEQ ID NO: 184336 - DNA, 80 bp, synthetic construct
  source 1..80: mol_type = other DNA
tagtaaaagtatcagtaaggccaagggttccattgagaccaatgacttacaaatggccagtagacatgtcacatttttta

SEQ ID NO: 184337 - DNA, 80 bp, synthetic construct
  source 1..80: mol_type = other DNA
tctgctcaccacaaactgacaacacttgtgtaaacttccaggtgttgagcaaacgtttcaacactatgctaagtatctcc

SEQ ID NO: 184338 - DNA, 80 bp, synthetic construct
  source 1..80: mol_type = other DNA
aacaactaaccactgaggggccacaacaaacatccagtgagaagggctacgccagtcagtggaccacccctaccacagac

SEQ ID NO: 184339 - DNA, 80 bp, synthetic construct
  source 1..80: mol_type = other DNA
tttaaataaatggcaacttcactgtacaaagccgtgggagtttcactggtcggtgtctacctctaaaggtcactaagcac

SEQ ID NO: 184340 - DNA, 80 bp, synthetic construct
  source 1..80: mol_type = other DNA
cttttaaatgtagccaaggcactcctcccatgcacagattgtcctaaacctgaacactataagcagtgctgcccacttat

SEQ ID NO: 184341 - DNA, 80 bp, synthetic construct
  source 1..80: mol_type = other DNA
ttacgacatttccattgtgcggaggaacagggcattacagactacattcacatgctaggggaggcttttggcaatggatt

SEQ ID NO: 184342 - DNA, 80 bp, synthetic construct
  source 1..80: mol_type = other DNA
ctctcaattccccgtcagcagaagagtgcggttacagtgatcgtgtccgatctataacactaggcaactctacgattaca

SEQ ID NO: 184343 - DNA, 80 bp, synthetic construct
  source 1..80: mol_type = other DNA
tccagtttttaacatcagtagggtccacagccacacaaaaccagcatgtaaacaccacctttgcaaaaggcaagataaaa

SEQ ID NO: 184344 - DNA, 80 bp, synthetic construct
  source 1..80: mol_type = other DNA
tacgtcacgaatcacgtggggaggcgtgctgtgaacccggaagcacgctcaccacgtggtttgtcacgtgactgatacgt

SEQ ID NO: 184345 - DNA, 80 bp, synthetic construct
  source 1..80: mol_type = other DNA
tctcggtttgacattgaattcacatttgtcaccactgaaaggtattacagcagcaactcgggtcatgcccgcaaccaggt

SEQ ID NO: 184346 - DNA, 80 bp, synthetic construct
  source 1..80: mol_type = other DNA
actcacccaggagaagcagggagagaggttaaaagtgacaggaatataaacctagctgtgcaacccactgaagaatattg

SEQ ID NO: 184347 - DNA, 80 bp, synthetic construct
  source 1..80: mol_type = other DNA
ctgttgataataacagaccttacaatgagcatacttttgacaaatggcaaattactctacaagaaatggcccagatcagg

SEQ ID NO: 184348 - DNA, 80 bp, synthetic construct
  source 1..80: mol_type = other DNA
gggctttctagctgctgtaatatgcggacagggcaccttctccaacaactacagtagccacctggaggacagaatagcca

SEQ ID NO: 184349 - DNA, 80 bp, synthetic construct
  source 1..80: mol_type = other DNA
tggatttacacctctcactcactttacatttggtttaataaatattgtattgttagttagacaatattactacaatgggt

SEQ ID NO: 184350 - DNA, 80 bp, synthetic construct
  source 1..80: mol_type = other DNA
gatttgttatcaagctcaaaagacccaaaagtaatggagtactgtgtggaacagggttggatgggaaaggcacactccac

SEQ ID NO: 184351 - DNA, 80 bp, synthetic construct
  source 1..80: mol_type = other DNA
acctttcataattgccacttctaactggtccaatcctagccctaaaacagtctatgttaaagaagcaatagaccgcagat

SEQ ID NO: 184352 - DNA, 80 bp, synthetic construct
  source 1..80: mol_type = other DNA
tgtgtcaatatgtcaacgcctctacagtaaacttcacaccggagggggtcaccaaatcccgagcggacttgatgactaca

SEQ ID NO: 184353 - DNA, 80 bp, synthetic construct
  source 1..80: mol_type = other DNA
ggacgatatcaccccccggggagcctcctacggaggcaacctcactaacataacatggaccctagagggcctatgggaac

SEQ ID NO: 184354 - DNA, 80 bp, synthetic construct
  source 1..80: mol_type = other DNA
aaatcaacccccttttactatcccaggcctaggtaaatgcacctacaaccttacaacccccttcgacctctttggtgacc

SEQ ID NO: 184355 - DNA, 80 bp, synthetic construct
  source 1..80: mol_type = other DNA
ccgaggctcagtttagagttccctcgcacaaaccagatggtgaacaaaatcccaataaagaaaagtggactgaaatgtgg

SEQ ID NO: 184356 - DNA, 80 bp, synthetic construct
  source 1..80: mol_type = other DNA
tcacacttgtttttgtggttgtgatgattttattaatcatattattcgcctacaaaatcttcacgggaatttacaccaac

SEQ ID NO: 184357 - DNA, 80 bp, synthetic construct
  source 1..80: mol_type = other DNA
acctaataaacaacaagacaaaggacatatctagacttaaagaggctctggataaatacggagtcgatttacccatgatt

SEQ ID NO: 184358 - DNA, 80 bp, synthetic construct
  source 1..80: mol_type = other DNA
agtacattaaaaagagaagagacacaaactttaagtgggttaatgaaggcccaatatcaggcaaacactggcaaaaaccc

SEQ ID NO: 184359 - DNA, 80 bp, synthetic construct
  source 1..80: mol_type = other DNA
ccacatctcgtcagaagagatcgaagcagaagtcccgctcgagcagcagcagcagcaggtcctccgagtccagctccaag

SEQ ID NO: 184360 - DNA, 80 bp, synthetic construct
  source 1..80: mol_type = other DNA
cctacaatgctgccgctggcacaagaaaacccgaatctggtccaacaggcacagtatttgctagagaaaacaaaacattt

SEQ ID NO: 184361 - DNA, 80 bp, synthetic construct
  source 1..80: mol_type = other DNA
tatataaatgcttgcacttccgaatggctgagtttttgctgcccgtccgcggagaggagccacggcaggggatccgaacg

SEQ ID NO: 184362 - DNA, 80 bp, synthetic construct
  source 1..80: mol_type = other DNA
gcgcagggaaaaccaccctcgccgctcatgcactcgatatcgaaggacaggcatcgatagcgcggccacgagctgtcgtc

SEQ ID NO: 184363 - DNA, 80 bp, synthetic construct
  source 1..80: mol_type = other DNA
actcagtcacagaattgatagaccaaccaattggaaatgaaggtggaggtgaaatcataacaaaagtggcagatgatgct

SEQ ID NO: 184364 - DNA, 80 bp, synthetic construct
  source 1..80: mol_type = other DNA
cataatggtaaacaagaatatgaaaaatttgtgagtacgattagatctgtcccagtagggaaagcattggctattccaaa

SEQ ID NO: 184365 - DNA, 80 bp, synthetic construct
  source 1..80: mol_type = other DNA
atttaaatggctaacctctctaaacacatcatcaaacacagaccacatcaacagcacatttgctaaaggaaagtataaag

SEQ ID NO: 184366 - DNA, 80 bp, synthetic construct
  source 1..80: mol_type = other DNA
ggaatgcttacagcacattttacgatggttggtccgatttctcatcaaagggtgtatatggtttggacactctgaacaac

SEQ ID NO: 184367 - DNA, 80 bp, synthetic construct
  source 1..80: mol_type = other DNA
ggagatagggtagcggatgtgattgagagttctataggggatagtgtaagcagagctctcacccaagcttcaccagcacc

SEQ ID NO: 184368 - DNA, 80 bp, synthetic construct
  source 1..80: mol_type = other DNA
gcgggtgtttttgtgcgctgggtacggggggctgcggggacgagggtttttgcccgcctttggggacggagggccgtggg

SEQ ID NO: 184369 - DNA, 80 bp, synthetic construct
  source 1..80: mol_type = other DNA
ggaggtttcgggccgacgtcaaaaataacgtcactcgtgttgacagggctttctgcgtcggagctcttttcatcttcttc

SEQ ID NO: 184370 - DNA, 80 bp, synthetic construct
  source 1..80: mol_type = other DNA
atgaggttagggaagatgctattagctatgggatctcatccactaatggcatgggagtgctttgctttagggctctggaa

SEQ ID NO: 184371 - DNA, 80 bp, synthetic construct
  source 1..80: mol_type = other DNA
gttccatgtatagctgccaagggagatgacattgggcatgttgtaatgcaatacatgtacataccacccggagcaccagt

SEQ ID NO: 184372 - DNA, 80 bp, synthetic construct
  source 1..80: mol_type = other DNA
tcatggtcaggaacagtgccgatacgcctacaattcttgccactcttgcactattgggttgcagcaaatccccatggact

SEQ ID NO: 184373 - DNA, 80 bp, synthetic construct
  source 1..80: mol_type = other DNA
aaggacatgcgtcgctttattggcgcccatccctaccccacaggcctccttgtctcccagttcaaggctgctcccctcta

SEQ ID NO: 184374 - DNA, 80 bp, synthetic construct
  source 1..80: mol_type = other DNA
ttatagccaacattgacgtgtattatgatggcaatgataccaagaccaatattaccatgagtgcagaagtgggagaactg

SEQ ID NO: 184375 - DNA, 80 bp, synthetic construct
  source 1..80: mol_type = other DNA
ctgcccatgatcttgtgcggagccggccgctcggggtttaactatggactgcacagcgacgactacacggtgcagaaacc

SEQ ID NO: 184376 - DNA, 80 bp, synthetic construct
  source 1..80: mol_type = other DNA
tagcaaatatccacgctttcgcgagttcaggttcctttgcacgcaaagcatccaggtgcagcaaacttttgagccgctta

SEQ ID NO: 184377 - DNA, 80 bp, synthetic construct
  source 1..80: mol_type = other DNA
gccagcaccaatttggactctttgtctcccccaactatctcaataccagaagcaatagggaggagattctttcttgatgc

SEQ ID NO: 184378 - DNA, 80 bp, synthetic construct
  source 1..80: mol_type = other DNA
gagatggcgttatttcccaggtggcggcagatgaacttgatcatggaaaagctgttcacaaaggcaagcctccctgcccg

SEQ ID NO: 184379 - DNA, 80 bp, synthetic construct
  source 1..80: mol_type = other DNA
gtcatgaaaactgtggctaacacagtggagagtgagattagggctgaacttggtgtgatacctagtctaaatgctgctga

SEQ ID NO: 184380 - DNA, 80 bp, synthetic construct
  source 1..80: mol_type = other DNA
aaatggccgacttccttcctcttttttgaaaaaaggcgccaaaaaaccgtcggcggggtggcgccttttttcaaaaaaga

SEQ ID NO: 184381 - DNA, 80 bp, synthetic construct
  source 1..80: mol_type = other DNA
acaaagccaaggagtagtagaagcaatgaatcaccatctaaaaaatcagataagtagaattagagagcaggcaaacacaa

SEQ ID NO: 184382 - DNA, 80 bp, synthetic construct
  source 1..80: mol_type = other DNA
agaagagcatgaaaaatatcatggtaatgtaaaagaattagttcataaatttggaattccacaattagtggcaaaacaaa

SEQ ID NO: 184383 - DNA, 80 bp, synthetic construct
  source 1..80: mol_type = other DNA
tccttcagagacagcagggatatcgacaggctcggccagcgcaataccaagggtaccagacgtcttgtaaattaacttgt

SEQ ID NO: 184384 - DNA, 80 bp, synthetic construct
  source 1..80: mol_type = other DNA
gaactgtccattcaatggcacaggttgatcctggcttgactgttcatttagctcctctcagagattgtattgctagggtc

SEQ ID NO: 184385 - DNA, 80 bp, synthetic construct
  source 1..80: mol_type = other DNA
tatagggtctcaaacaataaccagagacatgagactcatggttatatgtccatacacagagccacaactagtagaccccc

SEQ ID NO: 184386 - DNA, 80 bp, synthetic construct
  source 1..80: mol_type = other DNA
ccctagcaagactaaacttcaacctagtgtgttttatgatgtttttccaggctccaaagaaccggctgttctcacagata

SEQ ID NO: 184387 - DNA, 80 bp, synthetic construct
  source 1..80: mol_type = other DNA
attacttactacaacaccagtcagactctagcacaactaaacaaatttttacctacctctaacacaacaaacctgtctca

SEQ ID NO: 184388 - DNA, 80 bp, synthetic construct
  source 1..80: mol_type = other DNA
ggtcaacaaaaaacccacatagcaacaccctatatggaggttcagcatacgctaccaaagtagataacacaagcaaaata

SEQ ID NO: 184389 - DNA, 80 bp, synthetic construct
  source 1..80: mol_type = other DNA
aaaatgactttaaaaatgtggaatccatccaccattcgcgcctgtaacattagaggctttgtagcacttgtagtctgtgg

SEQ ID NO: 184390 - DNA, 80 bp, synthetic construct
  source 1..80: mol_type = other DNA
ttaaaaattgtggcatatggtgatgatgtgatagcttcctacccagaagagcttgacccagcacaaattgcagtgtctgg

SEQ ID NO: 184391 - DNA, 80 bp, synthetic construct
  source 1..80: mol_type = other DNA
ggccccaatgtgtgcggagtacaatggtttgcgactggctggtcatcagggtcttccagtaatgtgtacaccagggagca

SEQ ID NO: 184392 - DNA, 80 bp, synthetic construct
  source 1..80: mol_type = other DNA
tgtggccattgaatctgctctaagcgaagggcatgatgggtacgtgcgcttgcaaacatcttcacagtacggcttggatc

SEQ ID NO: 184393 - DNA, 80 bp, synthetic construct
  source 1..80: mol_type = other DNA
gaaaatggccgattccgtgacgtcatggcggccatttttgattggcgcagaggatctgacgtcaaagttcaaaggtcagg

SEQ ID NO: 184394 - DNA, 80 bp, synthetic construct
  source 1..80: mol_type = other DNA
gggatgtatgcgcgtcagcgtaaaacttttgggaatcaacagctggaagccgttgtccggcaagcgtcgtaggtgcgggt

SEQ ID NO: 184395 - DNA, 80 bp, synthetic construct
  source 1..80: mol_type = other DNA
aggctgcaaatgcagtggtcgcatatggtaggtggccctcatatcttaaaccaactgaggccaatccagtggacgcccct

SEQ ID NO: 184396 - DNA, 80 bp, synthetic construct
  source 1..80: mol_type = other DNA
tacctaggcggcaccttctacgcgtacagacaccccactgtagactttataatacaaattcacaccagtccccccttcct

SEQ ID NO: 184397 - DNA, 80 bp, synthetic construct
  source 1..80: mol_type = other DNA
tggtgtgttggggtgttgtttcatgaagtgcgcggtgcggtgaacggtgcgggtgacgtagtagtgtggcggaagtgtga

SEQ ID NO: 184398 - DNA, 80 bp, synthetic construct
  source 1..80: mol_type = other DNA
agaggcaaaaatctcccggattaaaaaccggctctttaccctgctagagctacgcaatcggagtcagattcaagtgctgc

SEQ ID NO: 184399 - DNA, 80 bp, synthetic construct
  source 1..80: mol_type = other DNA
ctccttcggcaccgagaccttctcccttaaggtactctatgaccagtacgagaggggctttaacaggtggtcttttagca

SEQ ID NO: 184400 - DNA, 80 bp, synthetic construct
  source 1..80: mol_type = other DNA
ccagactacccaaagaaaaactatgacagttttgttaaaacctaccttaaaaatgcacaagagcactggaatcaaaacaa

SEQ ID NO: 184401 - DNA, 80 bp, synthetic construct
  source 1..80: mol_type = other DNA
ttaacgcaaatccaggagagaaggggggagagttcaccagcacatacaaccctagtagtaaggctgaagaaggacgcaag

SEQ ID NO: 184402 - DNA, 80 bp, synthetic construct
  source 1..80: mol_type = other DNA
agacacgacactgtagacttcatagttagcttcactaagaatccccccatgaaaaccaaccaatatacagcccccctgac

SEQ ID NO: 184403 - DNA, 80 bp, synthetic construct
  source 1..80: mol_type = other DNA
gcaaatagtgagtaaagttactacaaaagaaaagaacttatatagtatacatacaccaacaaaaaccaaattacagccga

SEQ ID NO: 184404 - DNA, 80 bp, synthetic construct
  source 1..80: mol_type = other DNA
tcccactaaaacaaaattgcaacctagtatttttcatgatgtttttcctggaaagaaggaacctgcagtcttatcttcaa

SEQ ID NO: 184405 - DNA, 80 bp, synthetic construct
  source 1..80: mol_type = other DNA
cccattcattgagcaagacaacgaattacaaggggacgtgaaggaggcagtggagaatgcaatgggtagagttgctgaca

SEQ ID NO: 184406 - DNA, 80 bp, synthetic construct
  source 1..80: mol_type = other DNA
ggtgagggtgtacttcaaacccaaacatgtgaaaacatgggtgccacgacccccaagattgtgccaatacaaaaacgcct

SEQ ID NO: 184407 - DNA, 80 bp, synthetic construct
  source 1..80: mol_type = other DNA
ctcttacatatctaaggcgtggtgttatcaaacagttgagaatcagacaagacataggtgaaatgtttgatattatagag

SEQ ID NO: 184408 - DNA, 80 bp, synthetic construct
  source 1..80: mol_type = other DNA
gtctacgcttagcgacatccttacagggtctgccggtaatgaacacacctggtagcaaccaattcctcacctctgatgac

SEQ ID NO: 184409 - DNA, 80 bp, synthetic construct
  source 1..80: mol_type = other DNA
tcttgaggttgaaaattttaatgccactgatgctgtagataagaagagacaatttactgtgtggcccatcacttacacaa

SEQ ID NO: 184410 - DNA, 80 bp, synthetic construct
  source 1..80: mol_type = other DNA
ctgcgtgtggcattgtttaacgatgaaactggaaggcatccacttgtagggaactttgagcggcgacggtaatggcgacg

SEQ ID NO: 184411 - DNA, 80 bp, synthetic construct
  source 1..80: mol_type = other DNA
gacggcggcgctatatataagagcccaagacccggctctctttactgcgaaatggggaaggtcctaagaaagccgtttgc

SEQ ID NO: 184412 - DNA, 80 bp, synthetic construct
  source 1..80: mol_type = other DNA
aaagcgaaccccggtgagaaaggaggaaaatttcaagcaagcttcaccccctcaagtgaggaaggcaagaagaacacatt

SEQ ID NO: 184413 - DNA, 80 bp, synthetic construct
  source 1..80: mol_type = other DNA
agcggatacattcgggacgcgaaccgaatccccggtcagcaatgcgtatctcgtctgccgtttgcgcaaatcggtccagc

SEQ ID NO: 184414 - DNA, 80 bp, synthetic construct
  source 1..80: mol_type = other DNA
tcacaagtctatacaacatccgagtacctgtcacaatctgtatctccattcaacacagcaaactaggggtcattaaaaaa

SEQ ID NO: 184415 - DNA, 80 bp, synthetic construct
  source 1..80: mol_type = other DNA
gcagtatctcaaaactaagttatgcacttggttaggaatacaaaaacctccatcaaaacagagtgatagttggctaaaga

SEQ ID NO: 184416 - DNA, 80 bp, synthetic construct
  source 1..80: mol_type = other DNA
ctggtccatggagaagaagaaacttacaataaagcaggaaacaacctatcacaatggcagataaccctgaaagaaatggc

SEQ ID NO: 184417 - DNA, 80 bp, synthetic construct
  source 1..80: mol_type = other DNA
tgggaggaggacatgggccaggaggatggagaccaggacctccccctcctcctcctccaggtctagtctaatgactgaag

SEQ ID NO: 184418 - DNA, 80 bp, synthetic construct
  source 1..80: mol_type = other DNA
acagagtatacctacagtggtgctcagagactagctgcaaatacagctccacaaagagcaagtgccctatagtagacatg

SEQ ID NO: 184419 - DNA, 80 bp, synthetic construct
  source 1..80: mol_type = other DNA
ggcggtagactaccacagaataggaaagaagctatgcttggcacccatgtagtatgggatctaggattgcaatcaagttg

SEQ ID NO: 184420 - DNA, 80 bp, synthetic construct
  source 1..80: mol_type = other DNA
acacctacggcatatccccaacaaatgacatggggacattgtgtttccgggcacttgatagctcagtcaatagtcatgtc

SEQ ID NO: 184421 - DNA, 80 bp, synthetic construct
  source 1..80: mol_type = other DNA
gcttgcgtggctatcattgaggtggacaatgatgcaccgacaaagcgcgccagcagattgttttcggtttggaaaataac

SEQ ID NO: 184422 - DNA, 80 bp, synthetic construct
  source 1..80: mol_type = other DNA
ggctcaacctcccccccccgcgcgcatgggaggtggggttcccccttcctccgggagtgtttgcccaccggcctcgcccg

SEQ ID NO: 184423 - DNA, 80 bp, synthetic construct
  source 1..80: mol_type = other DNA
cactatcaccagaccgacctttcaatggatggaagccaacgagtactatccggctaggtaccaatctcacatgaccatgg

SEQ ID NO: 184424 - DNA, 80 bp, synthetic construct
  source 1..80: mol_type = other DNA
aagatactggtgcccagctacgacacacaccctaaaggaaaggctaaaattaaagttagaattcagccccccaaaatgtt

SEQ ID NO: 184425 - DNA, 80 bp, synthetic construct
  source 1..80: mol_type = other DNA
attcaaaaatagaacgtgacttcaattatgtgcaatactgcttaaactgtgtgggtagtattatcttgatacttggtaca

SEQ ID NO: 184426 - DNA, 80 bp, synthetic construct
  source 1..80: mol_type = other DNA
cctctgtagaatgatcaggggaaaacagactctcacagaaaaggtagaatggacagagcaggcagaagcagaacatgcag

SEQ ID NO: 184427 - DNA, 80 bp, synthetic construct
  source 1..80: mol_type = other DNA
tcaaccagcaaggcccgtatggatataataccctgaatgatatgggccaactatacttcaggcacgtgaatgaggggagt

SEQ ID NO: 184428 - DNA, 80 bp, synthetic construct
  source 1..80: mol_type = other DNA
gcaacttgtgcatacgagtagtgaatgcataccagccagttcagtacacaataacaataagaatatatctgaagcccaaa

SEQ ID NO: 184429 - DNA, 80 bp, synthetic construct
  source 1..80: mol_type = other DNA
cagaagggtgcaccccttatgatattaatcagatgctaaattgtgtgggagaacaccaggcagccatgcaaattattagg

SEQ ID NO: 184430 - DNA, 80 bp, synthetic construct
  source 1..80: mol_type = other DNA
gaagaaccccaacccactaacgattacaaaaaccacctagacaacttattaaaacaactctacctaaatggacagtactg

SEQ ID NO: 184431 - DNA, 80 bp, synthetic construct
  source 1..80: mol_type = other DNA
caggaatctagactaattctacaatgacagctctgaatttctctcttgtctttcttgtcaggttctcatcatcagtcatc

SEQ ID NO: 184432 - DNA, 80 bp, synthetic construct
  source 1..80: mol_type = other DNA
ctgaacagctaaatagtaatagtgcaaaaattaaaacaaatatatatgaaaagcttcagttttataacacaaagcagaca

SEQ ID NO: 184433 - DNA, 80 bp, synthetic construct
  source 1..80: mol_type = other DNA
acctgtgcacatttgacaacacctaatgatagcacaatattactagcaataacagctgatttacaagtagactcatctga

SEQ ID NO: 184434 - DNA, 80 bp, synthetic construct
  source 1..80: mol_type = other DNA
gggcccggccagagggacggagggacttttgcgctagggacggaggtgtttgcggagtggacggaggtgtttgcggacac

SEQ ID NO: 184435 - DNA, 80 bp, synthetic construct
  source 1..80: mol_type = other DNA
taacagaccacggacacggcaaatgcatgcaaacttctcatttattgtgtctactactctgtgttgctacagggggtgaa

SEQ ID NO: 184436 - DNA, 80 bp, synthetic construct
  source 1..80: mol_type = other DNA
tacaaagtgaagaatgttacgttgtggtggaataataagactcgcgtgatcgatgagtgatcgagagcggctcgaacctt

SEQ ID NO: 184437 - DNA, 80 bp, synthetic construct
  source 1..80: mol_type = other DNA
agttatgcctccatggaaaagacatttaccagtactatatcaaaattttggacccataccttagggaatggaacattatt

SEQ ID NO: 184438 - DNA, 80 bp, synthetic construct
  source 1..80: mol_type = other DNA
tagaagacagggatgctggaaatgtggaaaaccaggacacaacatggcaaattgtccagaaagacaggctggttttttag

SEQ ID NO: 184439 - DNA, 80 bp, synthetic construct
  source 1..80: mol_type = other DNA
cgctgaacttcaacgagggtgcgacggcgtacgtgccagtcacagtgacaatagccccaatgtatgcagaatacaatggg

SEQ ID NO: 184440 - DNA, 80 bp, synthetic construct
  source 1..80: mol_type = other DNA
gaattatgaagattataatggattaaataagaatttcactcaatggccaatcaatttgcaagaaatggcacaaatcagaa

SEQ ID NO: 184441 - DNA, 80 bp, synthetic construct
  source 1..80: mol_type = other DNA
acagctacactgaagctggttacgtgacactatggtaccaaactgacttcatcccatcaattaacgcaggtactggcacc

SEQ ID NO: 184442 - DNA, 80 bp, synthetic construct
  source 1..80: mol_type = other DNA
caccagacacaccaaccatctctacattagggacacggatggggaaggccttaaaactttcatcaacgataaagctcctc

SEQ ID NO: 184443 - DNA, 80 bp, synthetic construct
  source 1..80: mol_type = other DNA
ttctcgtgcgtgtacaccgtctcgagtatgtcgtagacatggaagtccagagggcttccgtgggtgtctgcctccggcct

SEQ ID NO: 184444 - DNA, 80 bp, synthetic construct
  source 1..80: mol_type = other DNA
attagaagaagttattgttgagaaaacgaaacagacactagcttcaatatcatcaggaccaaagcatacccaaagtgtcc

SEQ ID NO: 184445 - DNA, 80 bp, synthetic construct
  source 1..80: mol_type = other DNA
tcaattgaggccaccattgatagtatcactcaaaatgcactaaccactgttcagaacacagtacaatcaggacccactca

SEQ ID NO: 184446 - DNA, 80 bp, synthetic construct
  source 1..80: mol_type = other DNA
ttaaggcaggtgcgcctgttctcaaatccccaagtgcagaggcgtgtggctacagtgacagggtgttgcaattgaaacta

SEQ ID NO: 184447 - DNA, 80 bp, synthetic construct
  source 1..80: mol_type = other DNA
cccggtcccgcacaactcctgttcccgtccccgcaacaccccgtccccgttcccagcagcgtgtcgcatgccacccgtcc

SEQ ID NO: 184448 - DNA, 80 bp, synthetic construct
  source 1..80: mol_type = other DNA
gattggtgggttcacaccttactaaaaattaaagacatggtccttagtgtatttaaaccaagtctagaaagtaaggctat

SEQ ID NO: 184449 - DNA, 80 bp, synthetic construct
  source 1..80: mol_type = other DNA
tcataccagagagtattgaggagtggcaccacatcaggctggctacaaatgtaagcaaattccccatgttctttgctgat

SEQ ID NO: 184450 - DNA, 80 bp, synthetic construct
  source 1..80: mol_type = other DNA
gtgtcgtagcgttcgaaacgcagaaaggccatcgtgcggacggccacggtgtgcagacagtccatgctgtagacgtaagc

SEQ ID NO: 184451 - DNA, 80 bp, synthetic construct
  source 1..80: mol_type = other DNA
gagatattaaactatttctccaactggtcaggcagtatcagagtcacctgcatgtgtgtgtgtgatagctttagtactgg

SEQ ID NO: 184452 - DNA, 80 bp, synthetic construct
  source 1..80: mol_type = other DNA
tggtgtcatttgtaaaacacgcgatttctccgcgaacttccgtgacgttggtttcacgggtctcgttgagaacacgcaga

SEQ ID NO: 184453 - DNA, 80 bp, synthetic construct
  source 1..80: mol_type = other DNA
atggctaacaggagaagcaggcgaaacaaaatttaaaacaggaaacaacagtatctatggcctgccaaactatgccccca

SEQ ID NO: 184454 - DNA, 80 bp, synthetic construct
  source 1..80: mol_type = other DNA
tttcaacagagggagattgcgtatgggattctttccaaatttcaccaccaatacaacatctgaaatggacaacgcaattt

SEQ ID NO: 184455 - DNA, 80 bp, synthetic construct
  source 1..80: mol_type = other DNA
gccctgtgcctggccctctccccggcatccctgccaatgtaaatatcataaagggggtgcagctccagccgcagcaggtc

SEQ ID NO: 184456 - DNA, 80 bp, synthetic construct
  source 1..80: mol_type = other DNA
gctgcaacacaggcagccctgccaaactaccccacaatcatgtccacagacttgtttgagtaccactcaggcatatactc

SEQ ID NO: 184457 - DNA, 80 bp, synthetic construct
  source 1..80: mol_type = other DNA
tcagtggctcttgtgggggagcgggctttttatgaccctcggaccgctggtagtaaatcaaggtttgatgacttagtcaa

SEQ ID NO: 184458 - DNA, 80 bp, synthetic construct
  source 1..80: mol_type = other DNA
cttgcgaacttcaaagaagaaaccacctgcaatgagccagtggtgcccgcctgtgcacagcgttcagggtcgcaaccacc

SEQ ID NO: 184459 - DNA, 80 bp, synthetic construct
  source 1..80: mol_type = other DNA
gcaccgtatacgccttatacaggttaatgtgtctaactcaaggtccatattctggagctccccaacctatcccgaagaag

SEQ ID NO: 184460 - DNA, 80 bp, synthetic construct
  source 1..80: mol_type = other DNA
ggccttattgggatgtgatggttcaccatggagatttttaaaaatgtacatctcaaaacactttcaagtgccttatatag

SEQ ID NO: 184461 - DNA, 80 bp, synthetic construct
  source 1..80: mol_type = other DNA
agccccccactctatttgaggacaaatggtacactcaaaatgacttgtgcgacgttaatcttttgtcatttgcggttact

SEQ ID NO: 184462 - DNA, 80 bp, synthetic construct
  source 1..80: mol_type = other DNA
cagaacaattttaaagataaccacctagagtaccacgcaggcatgtacagcagcatattcctagggccaggcaggagcaa

SEQ ID NO: 184463 - DNA, 80 bp, synthetic construct
  source 1..80: mol_type = other DNA
ccatatgtgacttacttgaaggatgaacttcgtgcacccactaaagtgagagcaggaaaaactagggctattgaagcagc

SEQ ID NO: 184464 - DNA, 80 bp, synthetic construct
  source 1..80: mol_type = other DNA
cattaagcacaaaaatcgaaactaccacgtgcatgaatacaactacaaacgttacatgtgatggtttgaattatacagtt

SEQ ID NO: 184465 - DNA, 80 bp, synthetic construct
  source 1..80: mol_type = other DNA
actggggctacaaatccactagtcccttctgacacagtgcaaaccagacatgttatacaacacaggtctaggtcagagtc

SEQ ID NO: 184466 - DNA, 80 bp, synthetic construct
  source 1..80: mol_type = other DNA
tccaacaaacaccaagttacaacccagtgtgttccatgatacctttcctggaaagaaggaacctgcggttctgtcaccaa

SEQ ID NO: 184467 - DNA, 80 bp, synthetic construct
  source 1..80: mol_type = other DNA
atcactagttcaagaaatgttaaggatcttggatacccaaccatacacactccaaataaaacaaaattacaccctagtgt

SEQ ID NO: 184468 - DNA, 80 bp, synthetic construct
  source 1..80: mol_type = other DNA
agtatgggatttcacagacaaatgatatgggatcactatgcatacgggcattggatgacaccgcaaagaatgatgtgaaa

SEQ ID NO: 184469 - DNA, 80 bp, synthetic construct
  source 1..80: mol_type = other DNA
attttgtaccgcaaacaggaacagttgaaactcacattaagttcagacctgatgttaaagatgtaacatcagtaatgaca

SEQ ID NO: 184470 - DNA, 80 bp, synthetic construct
  source 1..80: mol_type = other DNA
atcacagtctacaatacaactcaaacactagcacaactatcaaaatttttacccacaacaaacaaaacagacttaacatc

SEQ ID NO: 184471 - DNA, 80 bp, synthetic construct
  source 1..80: mol_type = other DNA
agacagattttacaccttggacagtaaattgtggtcaaatgagtcaaagggttggtggtggaaattgccagatgccctca

SEQ ID NO: 184472 - DNA, 80 bp, synthetic construct
  source 1..80: mol_type = other DNA
cacaaatgaagaagctgaaatagaaatattcctggggagatcagcaatatggaccaaaagggctttggatcaaggattct

SEQ ID NO: 184473 - DNA, 80 bp, synthetic construct
  source 1..80: mol_type = other DNA
ggcggagtggcctctcgctccatgaaccggcgcacgtcctgactgccgccggccattgtttcctaggggaagatggagga

SEQ ID NO: 184474 - DNA, 80 bp, synthetic construct
  source 1..80: mol_type = other DNA
ccggatctctacgtcaccacgtatacttctggggaggcctgcctcaccctagactacaagcctctgagtgtgaggccata

SEQ ID NO: 184475 - DNA, 80 bp, synthetic construct
  source 1..80: mol_type = other DNA
tgtgacttttctcaagagaggatttagacaagatgaaagatatagttttcttatacatcctacattcccagttgaagaaa

SEQ ID NO: 184476 - DNA, 80 bp, synthetic construct
  source 1..80: mol_type = other DNA
cacccaataaggccaacatccacaccactcccaacatcagggtttccaggcaccgtatttaacacctttaaaacacaaga

SEQ ID NO: 184477 - DNA, 80 bp, synthetic construct
  source 1..80: mol_type = other DNA
tgaatccccgtgcccttggccttgcataaataaagtgtacatgtttcccccggagaagcccctgcccatacacgggtacc

SEQ ID NO: 184478 - DNA, 80 bp, synthetic construct
  source 1..80: mol_type = other DNA
atcaccgccgccaccgtctgtcatcgaaggcgggccccggtcacctcctttgttttcaacctcttccgtcaaatttggtg

SEQ ID NO: 184479 - DNA, 80 bp, synthetic construct
  source 1..80: mol_type = other DNA
ttctctacattcatttacccagcatcaaaccaattgaactgttacaatgggtgctcaagtgtctgctcagaacaacggaa

SEQ ID NO: 184480 - DNA, 80 bp, synthetic construct
  source 1..80: mol_type = other DNA
tggagcacgtgccaaaaaccagggtctaccagttctcatcacaccaggatcaggtcaatttctgacaacagatgatttcc

SEQ ID NO: 184481 - DNA, 80 bp, synthetic construct
  source 1..80: mol_type = other DNA
ggcgcccggagtgaggccggtcggctgggctggccgagcccgggtctgggaggtctggagtggcgagcctgctgtctcag

SEQ ID NO: 184482 - DNA, 80 bp, synthetic construct
  source 1..80: mol_type = other DNA
ggacgagctatagaattgataaatctgataaatgacctcttgcatggcctcttgtaaagcgcagtgtaggatgggtagat

SEQ ID NO: 184483 - DNA, 80 bp, synthetic construct
  source 1..80: mol_type = other DNA
agtgtcacaaaaaccaactgatgatgaactctttatacaacttccaaaaagacctcgtttccttacagcaccagagtccc

SEQ ID NO: 184484 - DNA, 80 bp, synthetic construct
  source 1..80: mol_type = other DNA
tccataggccttgctctccttctcctgctcttggcgctactgttctggctgtatatcgttatgagtaactggactggagg

SEQ ID NO: 184485 - DNA, 80 bp, synthetic construct
  source 1..80: mol_type = other DNA
cattctacacacaagcagccaacacagcagcacataacataacagacaaaacatacaactggaaaaactacaaaactcac

SEQ ID NO: 184486 - DNA, 80 bp, synthetic construct
  source 1..80: mol_type = other DNA
actttggcagcacctggaggttttacagacacgaagacacagactacatagtgtactatagcagaaagagtcccctggga

SEQ ID NO: 184487 - DNA, 80 bp, synthetic construct
  source 1..80: mol_type = other DNA
cctcgtcgaagagtaaggaggcacggggtgcggtggcgcagacgctacagaaaatggcgacggggcagacgcagacggac

SEQ ID NO: 184488 - DNA, 80 bp, synthetic construct
  source 1..80: mol_type = other DNA
tcagaccaaaattgtcgtgccactgcaaacaccaacgaaaatggacatgttggcttttgtgagtgcatgccccgatttct

SEQ ID NO: 184489 - DNA, 80 bp, synthetic construct
  source 1..80: mol_type = other DNA
ctactagcaatttcctcagacctccagatagatagcgcagatgaacctggtcctgacatcatacctacatgtgactgcac

SEQ ID NO: 184490 - DNA, 80 bp, synthetic construct
  source 1..80: mol_type = other DNA
aaactcatataaagaccactatgacaataacctatataacaatattgaactttatcaaacatttcaaacaatagctcaga

SEQ ID NO: 184491 - DNA, 80 bp, synthetic construct
  source 1..80: mol_type = other DNA
atgccagaaatgaccaaacttttagcgaatccaaggccctaagtcacaaaactggcctgtacagctccatgttcttgtct

SEQ ID NO: 184492 - DNA, 80 bp, synthetic construct
  source 1..80: mol_type = other DNA
tcacacacattacatggtgcttagaggccatatacaatgaattcttaatgcacagaaacagatggagcagatccaaccat

SEQ ID NO: 184493 - DNA, 80 bp, synthetic construct
  source 1..80: mol_type = other DNA
agactttaatgctgtaaacacatttagaacaccagcaaacttctctcacccccaactgcaactgccaacatcagaatcaa

SEQ ID NO: 184494 - DNA, 80 bp, synthetic construct
  source 1..80: mol_type = other DNA
gtatatacccctcatactatgcggggcaggacggacttcatttaactatgccatgcacacagaagacaatagtatgcaaa

SEQ ID NO: 184495 - DNA, 80 bp, synthetic construct
  source 1..80: mol_type = other DNA
aatcaagataaaccagcatatggacaatcacgttattttgctgctgttaggtgtggtttccacttccaagtacaagttaa

SEQ ID NO: 184496 - DNA, 80 bp, synthetic construct
  source 1..80: mol_type = other DNA
ctacttctatagaaccaaacagactgactgggtgggccagtatgacatatcagaaccctacaagctagacaagtacagct

SEQ ID NO: 184497 - DNA, 80 bp, synthetic construct
  source 1..80: mol_type = other DNA
gatataattacacacatccaggtgagcgtggcagagttattaacgttgccatgcgtgaacaaaatgacaaacaacctagt

SEQ ID NO: 184498 - DNA, 80 bp, synthetic construct
  source 1..80: mol_type = other DNA
ttggtttcactgatcagatatcagccaaagtaacagaactgcaggatgtggccaaagattttctaactaccaaagtgttg

SEQ ID NO: 184499 - DNA, 80 bp, synthetic construct
  source 1..80: mol_type = other DNA
ggtcaatctacacagactagaacagagctaatagacaaaattgttaacaatgctaaaaactatctaaataaagtaacaca

SEQ ID NO: 184500 - DNA, 80 bp, synthetic construct
  source 1..80: mol_type = other DNA
gtaaatagcttttcctattttagaggttccctaatattgaggttgagtgtgtacgccagtacgttcaacaggggaaggtt

SEQ ID NO: 184501 - DNA, 80 bp, synthetic construct
  source 1..80: mol_type = other DNA
gtagcggctgccgtaggtggtcgtgttgaaggagaaagaaggtaacttgaagctgagtatctggcccaccgaggggcagg

SEQ ID NO: 184502 - DNA, 80 bp, synthetic construct
  source 1..80: mol_type = other DNA
gtaataggttactccatttttaacggcacaacccaccaaagtaaaatagacacctttgaaaagtggctatatggcaaatg

SEQ ID NO: 184503 - DNA, 80 bp, synthetic construct
  source 1..80: mol_type = other DNA
agtgactgcgtaccgtttgcaagataagcgacggcgtgggcaagaaggtaaccgtggtgttctccttgagcgcacggatc

SEQ ID NO: 184504 - DNA, 80 bp, synthetic construct
  source 1..80: mol_type = other DNA
cccggcggccgctccggagccccagcaggagaacaacaacaacaaccagcagcagcagagatggcctggcgatggtggag

SEQ ID NO: 184505 - DNA, 80 bp, synthetic construct
  source 1..80: mol_type = other DNA
tggcaacattctacttagtggcaaccaaacagcaaggatgctcaaatataattacccaacaaaatcaggatattgtggag

SEQ ID NO: 184506 - DNA, 80 bp, synthetic construct
  source 1..80: mol_type = other DNA
tagatgtccttgcctactgccatgacacaccagaccttgtcatacaacttcataaaccagtgattgattctgatcatgtt

SEQ ID NO: 184507 - DNA, 80 bp, synthetic construct
  source 1..80: mol_type = other DNA
cccctgtggtccatggcctacggctatgcagactttctcctctccattctaggagaacatgacgacgtagactttcatgg

SEQ ID NO: 184508 - DNA, 80 bp, synthetic construct
  source 1..80: mol_type = other DNA
caactcagggctcatgcagatcatgtatgtacccccaggtctagacaccccaaaccgggtagatgacaaattatgggacg

SEQ ID NO: 184509 - DNA, 80 bp, synthetic construct
  source 1..80: mol_type = other DNA
aacaagaatacatgtaccactatccaggcacacaaacatttgatattatatcaaagaacacactgtcacacgactttggc

SEQ ID NO: 184510 - DNA, 80 bp, synthetic construct
  source 1..80: mol_type = other DNA
aaacaaaagaggaatcagaccagcataatagcagaacgtgggacaatgtaataaaaactgtaaaaaacactaacattccc

SEQ ID NO: 184511 - DNA, 80 bp, synthetic construct
  source 1..80: mol_type = other DNA
acgcacatggaagggactgacgcgtttcaaatcaaagtcaccgctgggaatgtacaagataaaagtgccatattctcctt

SEQ ID NO: 184512 - DNA, 80 bp, synthetic construct
  source 1..80: mol_type = other DNA
atgtgtgccgaccagcagcgccatcatctcccgttgttccaatagaataacttcccggtctgtggccggggctggataag

SEQ ID NO: 184513 - DNA, 80 bp, synthetic construct
  source 1..80: mol_type = other DNA
atgaatgataatacaaatgctgaggcaacagtagaaaactttctgggaagatctgccttgtgggcaaacctaaagttgaa

SEQ ID NO: 184514 - DNA, 80 bp, synthetic construct
  source 1..80: mol_type = other DNA
acacaagcaaactcattttcaaactggaaagataaaaacccacatcaaaatacactatatgcaggcagtacatacataac

SEQ ID NO: 184515 - DNA, 80 bp, synthetic construct
  source 1..80: mol_type = other DNA
agagcttgagcaatggagagacagccaatacatttgattcgcaaaacacaactgggcagacagccgtacaggccaacgtc

SEQ ID NO: 184516 - DNA, 80 bp, synthetic construct
  source 1..80: mol_type = other DNA
ggcggtggccattagatgcattctgtgtgtgtattactgcgtttgcagaccgccaactgtggtgttataacatagcagtg

SEQ ID NO: 184517 - DNA, 80 bp, synthetic construct
  source 1..80: mol_type = other DNA
cagtggccagggtggcagacacaattgccagcggacctagtaactccactagcataccagctcttaccgcggtcgaaacc

SEQ ID NO: 184518 - DNA, 80 bp, synthetic construct
  source 1..80: mol_type = other DNA
gagtgtcagaacaacaagaaacttctgagtttttattctcaggcccgaaaaaacccagagtcgatctggacgcagcacag

SEQ ID NO: 184519 - DNA, 80 bp, synthetic construct
  source 1..80: mol_type = other DNA
atggatttacctgaccctttgtgtattgaagatggcactgaagattgcaaacaggatatttcacctaatgagctgggtct

SEQ ID NO: 184520 - DNA, 80 bp, synthetic construct
  source 1..80: mol_type = other DNA
atgcaaccaaatttcacagtgggtgtttgatggttgccgttgtgccagaacaccagctggcgttcattggtgcagatggt

SEQ ID NO: 184521 - DNA, 80 bp, synthetic construct
  source 1..80: mol_type = other DNA
aaagtgtggctctgttccaataaaactttatttacaggctgtgtgcagtggcatgtgcctgtaaacccagcactttggga

SEQ ID NO: 184522 - DNA, 80 bp, synthetic construct
  source 1..80: mol_type = other DNA
ttttgagtaagtcagatccaaggcttgaagagccggtagaatgcttgattaagaaatcagctacaaaatatagggttaat

SEQ ID NO: 184523 - DNA, 80 bp, synthetic construct
  source 1..80: mol_type = other DNA
cgttagcgaggagtgcgaccctctaccaaggggcaactccctcggagtccggcgctacgccttcggctgcgccggacacc

SEQ ID NO: 184524 - DNA, 80 bp, synthetic construct
  source 1..80: mol_type = other DNA
ggaagtgatctttgaggattcattattttcaaagtacaagggtaatgtcaaaatggaaatgacagaaaatatgaaagttg

SEQ ID NO: 184525 - DNA, 80 bp, synthetic construct
  source 1..80: mol_type = other DNA
gccaagttcaccttctacagacacaaaaagactgactttataatattctttaacagaaagcctccctttaagctaaacaa

SEQ ID NO: 184526 - DNA, 80 bp, synthetic construct
  source 1..80: mol_type = other DNA
gtgcgattgctaagggataccacccatatcagccaaacaactctgatagcccagacccagggtattgatgatgttattga

SEQ ID NO: 184527 - DNA, 80 bp, synthetic construct
  source 1..80: mol_type = other DNA
atagggtgcgatctatcacacttggaaactcaactattaccacacaagagtgtgcgaacgtggtggtaggttatggtacg

SEQ ID NO: 184528 - DNA, 80 bp, synthetic construct
  source 1..80: mol_type = other DNA
caagcatgctctgattgtgacaagcccctatattataaacagtgctgcccattgttatgtggcaaagcaatagttctgca

SEQ ID NO: 184529 - DNA, 80 bp, synthetic construct
  source 1..80: mol_type = other DNA
gttcgtaatctagacagaagcgccgtgcgcgacgggcgcggcgttcgcgctcgctcagggaagataacgacggagcgtcg

SEQ ID NO: 184530 - DNA, 80 bp, synthetic construct
  source 1..80: mol_type = other DNA
ggagaacacaccaaagaaaatgaaaagacccagtagcagcagcagatcccaagggttaaagaccatgttgactattttgt

SEQ ID NO: 184531 - DNA, 80 bp, synthetic construct
  source 1..80: mol_type = other DNA
gtatttggcaactatggcctatttgataacgacccagatggcactatgttagaaaaaataactaaatttgaaaaatggct

SEQ ID NO: 184532 - DNA, 80 bp, synthetic construct
  source 1..80: mol_type = other DNA
caggtgaacgtgggcatgaaataggtctcaacacaagcagaggtgacaaccggccagatgaggatcccttttttaattgc

SEQ ID NO: 184533 - DNA, 80 bp, synthetic construct
  source 1..80: mol_type = other DNA
cctggtacagaggaacagtatataacaatcaaattaaagacttaccaaaaaaagcagctgagttatactcaaaagcaaca

SEQ ID NO: 184534 - DNA, 80 bp, synthetic construct
  source 1..80: mol_type = other DNA
agagaagaattactgtactagatgtaggggatgcttatttttccataccattacatgaagactttagacagtacactgca

SEQ ID NO: 184535 - DNA, 80 bp, synthetic construct
  source 1..80: mol_type = other DNA
tgaaactgtacagacacccagaatgtgactttatattccagtacaatagaaagcagccatttgtagatagccaactcaca

SEQ ID NO: 184536 - DNA, 80 bp, synthetic construct
  source 1..80: mol_type = other DNA
aagacttttgcttaagattagctagggataccaatctacacatgcaagaaggggtgcttacacaaaacccagttgaaaat

SEQ ID NO: 184537 - DNA, 80 bp, synthetic construct
  source 1..80: mol_type = other DNA
aagaggacaaaagacgtacgcacgtcgtggacgtcatgtccgctatatttcaaggtcccatctccatggaagtcccacct

SEQ ID NO: 184538 - DNA, 80 bp, synthetic construct
  source 1..80: mol_type = other DNA
cacggccgccattttgttttacaaaatggccgacttccttcctgttttttaaaaattaaccgttagcggcggcgcgcgcg

SEQ ID NO: 184539 - DNA, 80 bp, synthetic construct
  source 1..80: mol_type = other DNA
gacaaggtaagagtattagaacaaactaccaatcagcaagcagaactagaggcctttgcgatggcactggcagactcagg

SEQ ID NO: 184540 - DNA, 80 bp, synthetic construct
  source 1..80: mol_type = other DNA
cgcagaaagcgccggccacaggacgtcagaaaagtcacgacccgcacacccgtggaaacatcccggaacgtgcggacagc

SEQ ID NO: 184541 - DNA, 80 bp, synthetic construct
  source 1..80: mol_type = other DNA
tcatattaaagtattttgtatagatatccttttctagttgtttcaaaatctctaatttgaacttgtctagtctttgcttg

SEQ ID NO: 184542 - DNA, 80 bp, synthetic construct
  source 1..80: mol_type = other DNA
gacaggatataagtaagcgcacttccgaatggctgagttttccacgcccgtccgcagcggcagcaccacggagggtgatc

SEQ ID NO: 184543 - DNA, 80 bp, synthetic construct
  source 1..80: mol_type = other DNA
cggggtcaagctccacaccagcgtcgctgagacccttccgagctctccctgcgccccccgcaacacctagaccacaacca

SEQ ID NO: 184544 - DNA, 80 bp, synthetic construct
  source 1..80: mol_type = other DNA
caggcaaagttgaaggttgaatatatcaagaacttaaaacaacttccacttttagaaaaacaaattgatggtctgagatt

SEQ ID NO: 184545 - DNA, 80 bp, synthetic construct
  source 1..80: mol_type = other DNA
agcgtcaaaaaataatgcaaatgagtctattttctcaatatcacttagtccggctgcagatgagaggttagcacatacca

SEQ ID NO: 184546 - DNA, 80 bp, synthetic construct
  source 1..80: mol_type = other DNA
ctgtgtgacacagttctgctttccgtgtttgcaacggcctgtgacttgcaatatccgttcggctcaccactaactgacaa

SEQ ID NO: 184547 - DNA, 80 bp, synthetic construct
  source 1..80: mol_type = other DNA
gctattaaagttgatattgcttcacaacctcttgcaactactttgattggtgaaatagctagttattatacacattggac

SEQ ID NO: 184548 - DNA, 80 bp, synthetic construct
  source 1..80: mol_type = other DNA
agagtttatgtctggacacccctttccatgccaacgggaataacaacacaggtggatgtgactgttctgggtagcttgct

SEQ ID NO: 184549 - DNA, 80 bp, synthetic construct
  source 1..80: mol_type = other DNA
tcggtgttcacctgaataacaagaccctggtctgttaggacccttcttgctttgggaaaccaaggcaggaaaatccctag

SEQ ID NO: 184550 - DNA, 80 bp, synthetic construct
  source 1..80: mol_type = other DNA
caaagctctcctcccatgtactgactgtcaaaaacctgaatactacaaacagtgttgcccactgatatgtggcaaagcct

SEQ ID NO: 184551 - DNA, 80 bp, synthetic construct
  source 1..80: mol_type = other DNA
cgcatccaggtgagcgtggtatagacttgtcatctgtaacagagataggagggcctgtcaaagatgtcatatacaatatg

SEQ ID NO: 184552 - DNA, 80 bp, synthetic construct
  source 1..80: mol_type = other DNA
atacagcaacacaaataatggatcaaatgcaaatgtttctaacacaccaataatagaaaaaataaaaatgaacatgacaa

SEQ ID NO: 184553 - DNA, 80 bp, synthetic construct
  source 1..80: mol_type = other DNA
tccagtagacattatgtgtatcaaattatgtacatacccccgggggccccagtgccgagtaagtgggatgacttcacatg

SEQ ID NO: 184554 - DNA, 80 bp, synthetic construct
  source 1..80: mol_type = other DNA
tggatgcagagatggagaccctatgtacagttccaaaaagacaccatgcacaagatatccaggacgggacccttcagcta

SEQ ID NO: 184555 - DNA, 80 bp, synthetic construct
  source 1..80: mol_type = other DNA
actaattactcaggatttatgcctaattgctctaaagtagtagtctctacatgcacaagaatgaggggaacacaaacctc

SEQ ID NO: 184556 - DNA, 80 bp, synthetic construct
  source 1..80: mol_type = other DNA
gttatctgggatgtggggttgcaatccagttgtgtgctatgtgtcccgtggattagtcagaccaattatcgctttgtgtc

SEQ ID NO: 184557 - DNA, 80 bp, synthetic construct
  source 1..80: mol_type = other DNA
cccaccccttactgtcttctccggacccaaggcccttacccctggtacctaccctcccactatagaacccaacactggtg

SEQ ID NO: 184558 - DNA, 80 bp, synthetic construct
  source 1..80: mol_type = other DNA
cttccccaaaactaacttccacatcttggcaagattactataaaagctttttagacaaagccatacctgaaaacaaagac

SEQ ID NO: 184559 - DNA, 80 bp, synthetic construct
  source 1..80: mol_type = other DNA
caacaccgatatcgaaaatgaagatagagagaaaggaagtcaacatactaacaatacacatcaccacaaacgtaatctct

SEQ ID NO: 184560 - DNA, 80 bp, synthetic construct
  source 1..80: mol_type = other DNA
gcaggaggagcagatgagggagcaggaggagcagatgcgggagcaggaggagcagatgctgaagcagaaggagcagacag

SEQ ID NO: 184561 - DNA, 80 bp, synthetic construct
  source 1..80: mol_type = other DNA
gtacagagacgataacaagaatgcccagctagtggccaaataccgcttcagcttcatatggggaggtaacactgtccact

SEQ ID NO: 184562 - DNA, 80 bp, synthetic construct
  source 1..80: mol_type = other DNA
gtgtgctagcgcccagtgggccctgtgggtgggaacaacccacagggcccactgggcgcaagcacactggtatcctgtcc

SEQ ID NO: 184563 - DNA, 80 bp, synthetic construct
  source 1..80: mol_type = other DNA
ggtgcaggatatcgggtgttctgcctatggtactgtgtggcgcgggcaggtcaggctttaactatggactgcacagcgac

SEQ ID NO: 184564 - DNA, 80 bp, synthetic construct
  source 1..80: mol_type = other DNA
caacgtcaccccctgtccccaacgtcaccccccgtccccggtgcaacccccggccttgccgccgtcccgcggacatctcg

SEQ ID NO: 184565 - DNA, 80 bp, synthetic construct
  source 1..80: mol_type = other DNA
acaattctactagcacttacagcagatctgcaagttgactatactgaagaaaggggcccagatgttgttccatcgtgtga

SEQ ID NO: 184566 - DNA, 80 bp, synthetic construct
  source 1..80: mol_type = other DNA
tgagatcatgcaaatacgattatcataatacttgagacaagagattctgtgaagacaaaataaggcgactcaatcagtgc

SEQ ID NO: 184567 - DNA, 80 bp, synthetic construct
  source 1..80: mol_type = other DNA
actggaactttactaacatgagcacatcctcatccgctgacctacaaggcctaaactactttgactactacacaggtatg

SEQ ID NO: 184568 - DNA, 80 bp, synthetic construct
  source 1..80: mol_type = other DNA
cgctcccgcgggtccgggcggtccccccggctaccttcccgctctcccggctccgcctgcggagccgcctaatccagaac

SEQ ID NO: 184569 - DNA, 80 bp, synthetic construct
  source 1..80: mol_type = other DNA
ctgagggcttggaggatgacttggtagaagtcattgttgacaaagcgcaacaaacattggcttcaattaagagtgattcc

SEQ ID NO: 184570 - DNA, 80 bp, synthetic construct
  source 1..80: mol_type = other DNA
tccagtgatgacctcgaaaacgaacgaacaggtttttgggtttcagctagatcctggccatggaagtgtgatgtgcagga

SEQ ID NO: 184571 - DNA, 80 bp, synthetic construct
  source 1..80: mol_type = other DNA
atgcatacggaaagtttgtggagaagatacgcagtgtgagcgctggtcgtgcactgtacatccctccatatgacttgctc

SEQ ID NO: 184572 - DNA, 80 bp, synthetic construct
  source 1..80: mol_type = other DNA
tcacctcagtcatcacagagaaattactgaagaacttgattaaattggtgagcagcctggtaatcattaccagaaactat

SEQ ID NO: 184573 - DNA, 80 bp, synthetic construct
  source 1..80: mol_type = other DNA
ccgctcgagcagcagcagcagcaggtcctccgagtccagctccaagagcagcagcagctcggagtccgactcagacacct

SEQ ID NO: 184574 - DNA, 80 bp, synthetic construct
  source 1..80: mol_type = other DNA
aggaacgtcttgttcctctggagtttaccaatacattacaatttatgagggaaaggagcaagaacgttatagagatcagg

SEQ ID NO: 184575 - DNA, 80 bp, synthetic construct
  source 1..80: mol_type = other DNA
tgctaactacaagttctactttaacttagggggcgactctatatttccacagatcattaaaaacccctgtccagacaccg

SEQ ID NO: 184576 - DNA, 80 bp, synthetic construct
  source 1..80: mol_type = other DNA
acgtgggtatagctaatgcctactcacatttctatgacggttttgcgcgcgtgccaataaaagatgagagcgcagactcg

SEQ ID NO: 184577 - DNA, 80 bp, synthetic construct
  source 1..80: mol_type = other DNA
tagcaatagcacatggcccgctgcttccagcgtttccgcctgaactactcgtccttttcgacgattctcgctgagcagtc

SEQ ID NO: 184578 - DNA, 80 bp, synthetic construct
  source 1..80: mol_type = other DNA
acccgagaaatgttcaaaacgcaagcgggtctccacataaaccctatgttattaagccagcgataaatcaggtgtacatg

SEQ ID NO: 184579 - DNA, 80 bp, synthetic construct
  source 1..80: mol_type = other DNA
ctgaggctttaaaagaagccttgacaccttccaccaatccgtttgccgccgctcaaccaagagcagggaagaggacagtg

SEQ ID NO: 184580 - DNA, 80 bp, synthetic construct
  source 1..80: mol_type = other DNA
ccccgcgggcggtgccgtactacgggccaggagtggactacaaggacgggttggcacctctgtcagagaagggactcaca

SEQ ID NO: 184581 - DNA, 80 bp, synthetic construct
  source 1..80: mol_type = other DNA
tgaagataaagatgatcaaaattataattataagtatgagagcaaaggaatagaggacaaggagggctcctccagtccag

SEQ ID NO: 184582 - DNA, 80 bp, synthetic construct
  source 1..80: mol_type = other DNA
ggaggtactcaacccggaagtatcctcaccacgtggcctaccacgtgggtgctacgtcatcgccaccattttgtgctaca

SEQ ID NO: 184583 - DNA, 80 bp, synthetic construct
  source 1..80: mol_type = other DNA
gcagcttcacctccacgtccctcctatccctcaataagccccaaagccttactgttcccagaacgcttaccacaaatgtg

SEQ ID NO: 184584 - DNA, 80 bp, synthetic construct
  source 1..80: mol_type = other DNA
atcctagaatggcatttcaacaacaagttatgcatgacttttcactaactggcccctactcatacaaagatgacttacag

SEQ ID NO: 184585 - DNA, 80 bp, synthetic construct
  source 1..80: mol_type = other DNA
ccagttcctgcaagtgctgacagttatgcatggcaaacgtcaaccaaccccagcatcttttggacagaaggtaatgctcc

SEQ ID NO: 184586 - DNA, 80 bp, synthetic construct
  source 1..80: mol_type = other DNA
ccaatggtattttcaacaacaactagcaccatatccactactacaatttgcagcaacagcagtaagcctaaacaaaatgt

SEQ ID NO: 184587 - DNA, 80 bp, synthetic construct
  source 1..80: mol_type = other DNA
gtaaggagacggaggggtcggtggaggagggcttataagaggtggcgcagacgcaggaggcgacgcagacacaaaaagag

SEQ ID NO: 184588 - DNA, 80 bp, synthetic construct
  source 1..80: mol_type = other DNA
aacattattgtaggctatggggagtggccagagtattgccctgacgtcgatgcgactgctgttgacaagcccacaagacc

SEQ ID NO: 184589 - DNA, 80 bp, synthetic construct
  source 1..80: mol_type = other DNA
ctaataagaagtccttttacagacccccagctaatagtacacacagaccccactaaaggctttgtaccctattctttaaa

SEQ ID NO: 184590 - DNA, 80 bp, synthetic construct
  source 1..80: mol_type = other DNA
acgtgctaatataaagcggtgcacttccgaatggctgagtttttcacgcccgtccgcagcggtggagctacagcggagca

SEQ ID NO: 184591 - DNA, 80 bp, synthetic construct
  source 1..80: mol_type = other DNA
tgccgcccctgtacgaccccaaagacccaagcaagggctgggtgccatacaacgacaccttcggtagaggcaagtggata

SEQ ID NO: 184592 - DNA, 80 bp, synthetic construct
  source 1..80: mol_type = other DNA
acgcctctccattcatcatgtaacccacaaatcatctaaaccgtaagtctaagggcctcctgaggttttctcaggaggcc

SEQ ID NO: 184593 - DNA, 80 bp, synthetic construct
  source 1..80: mol_type = other DNA
gcccgtgcgccatcaccttcattcaccccccttctacccccaatgcccctctcgcttctctgtaaaattcagcctgggct

SEQ ID NO: 184594 - DNA, 80 bp, synthetic construct
  source 1..80: mol_type = other DNA
attaaacacttttaaatcagaaggcaactacagtcacccttctattaaagtgtttaatggctcaaacaggccacagactg

SEQ ID NO: 184595 - DNA, 80 bp, synthetic construct
  source 1..80: mol_type = other DNA
gagttttcacgggtaacgtgaaaataatgaattaccaccttatgactccagaagatcatctgaacttgataaccccttac

SEQ ID NO: 184596 - DNA, 80 bp, synthetic construct
  source 1..80: mol_type = other DNA
acctgaactaagtttggcccggtttgctcaaacgtgacatggagaaactgggggaatttgtcttctggcacagctgttgc

SEQ ID NO: 184597 - DNA, 80 bp, synthetic construct
  source 1..80: mol_type = other DNA
atttccgcagattcagacagattgtcaaaaaaaaatacggcacagaaatagtgggtctgtggcttttggttcgtgtacat

SEQ ID NO: 184598 - DNA, 80 bp, synthetic construct
  source 1..80: mol_type = other DNA
aagagttgcaaaaatgttaaaggtgttgtgtgcttgtctcctagatccggagtgtcatatgatacaataattgcttgcgg

SEQ ID NO: 184599 - DNA, 80 bp, synthetic construct
  source 1..80: mol_type = other DNA
ctagcactatcctgtgttttgtctctgcgtgcaacgacttctctgtgcgcttattacgagatacacctttcgcaactcag

SEQ ID NO: 184600 - DNA, 80 bp, synthetic construct
  source 1..80: mol_type = other DNA
ttgctaacaatgatgtgtggcatacaaaagaccaaagagcacacaacaacatacatagccaatatggcatgccacaatca

SEQ ID NO: 184601 - DNA, 80 bp, synthetic construct
  source 1..80: mol_type = other DNA
aatcctgtggatgtgttgacgttgccattggaggatgtgaacatagtggtagacatttcggtggtttgtaacgtagatgt

SEQ ID NO: 184602 - DNA, 80 bp, synthetic construct
  source 1..80: mol_type = other DNA
ctggtattagaaaaccacaatctaggagagaagcaatgttaggtactcatattgtgtgggatgtgggattacaatcaaca

SEQ ID NO: 184603 - DNA, 80 bp, synthetic construct
  source 1..80: mol_type = other DNA
cacttgtggatacattaacaaatccggcattgatgtccccctcagtagaagcatgtggattttccgataggctcaagcaa

SEQ ID NO: 184604 - DNA, 80 bp, synthetic construct
  source 1..80: mol_type = other DNA
gtgacccgcgcttgaaaactgattttaaaacagcactattttcaaaatacaagggaaatcctgaatgtgaaatgaatgac

SEQ ID NO: 184605 - DNA, 80 bp, synthetic construct
  source 1..80: mol_type = other DNA
tcaactttatattaactctcaatacagtcaaacatgggctcagtgagcaagggcgaggagctgttcaccggggtggtgcc

SEQ ID NO: 184606 - DNA, 80 bp, synthetic construct
  source 1..80: mol_type = other DNA
tgtccaaatttcttcttccctctcccagctccaaaaccagctacttcccgctcagttacacttagtgatgaatgtccata

SEQ ID NO: 184607 - DNA, 80 bp, synthetic construct
  source 1..80: mol_type = other DNA
cccaaagcccacgccctccaggggcgactgggaaacagaatatgcagcatgcaaggcctttgacagaccccctcgcagcg

SEQ ID NO: 184608 - DNA, 80 bp, synthetic construct
  source 1..80: mol_type = other DNA
caactatgatgcactatacagggtcagaaacaacattggaaaatttcctgggtagggcagcctgtgtgcatgtggttgag

SEQ ID NO: 184609 - DNA, 80 bp, synthetic construct
  source 1..80: mol_type = other DNA
atactgccccgcaagcgcgaccgggggagatcatggcatccggcaagcaccatcagcccggtgggacgcggagcctgacc

SEQ ID NO: 184610 - DNA, 80 bp, synthetic construct
  source 1..80: mol_type = other DNA
aacctaagggaaaatccacagtaaaagtaactataacaccaccaaaactaatggtagataagtggtacccacaaactgaa

SEQ ID NO: 184611 - DNA, 80 bp, synthetic construct
  source 1..80: mol_type = other DNA
gtaatggaactttgtttggcaatatccaaatatacccccaccagatgataaacctaagaacaaataattcagccaccatt

SEQ ID NO: 184612 - DNA, 80 bp, synthetic construct
  source 1..80: mol_type = other DNA
ttactactcaaacaaaccactgaggactgtcagagatagcaatagtcttggttatctaatgtgcaaacccttcctaacgg

SEQ ID NO: 184613 - DNA, 80 bp, synthetic construct
  source 1..80: mol_type = other DNA
ctcctattaagctgattaacgaaacagacccatgcataaaaaatgacagctgcacaggactaggaaatgaaaatcttagg

SEQ ID NO: 184614 - DNA, 80 bp, synthetic construct
  source 1..80: mol_type = other DNA
cctgttttatacccccccccaatgaaacttagaagcagtaaaccacgatcaatagtaagcataacgcaccagttatgtct

SEQ ID NO: 184615 - DNA, 80 bp, synthetic construct
  source 1..80: mol_type = other DNA
aaaaacctgctttatcactggctggatgcccctcattatctgtgggaacggacatactcaatttaactttataacccacg

SEQ ID NO: 184616 - DNA, 80 bp, synthetic construct
  source 1..80: mol_type = other DNA
actgctacgtcatcggcgccatcttgtatcacaaaatggcggctaacttccgcttttttgaaaaaaggcgcgaaaaaacg

SEQ ID NO: 184617 - DNA, 80 bp, synthetic construct
  source 1..80: mol_type = other DNA
ggccaaacaccacaaaaataagccagaatatattaggtttgtttaccaaacatgttttcaaccctcaagaatgagacaga

SEQ ID NO: 184618 - DNA, 80 bp, synthetic construct
  source 1..80: mol_type = other DNA
tgcgtcacgggacaactggtactacgaccttaccgataactgttacaattgctccagataaatcagagttctctggaccc

SEQ ID NO: 184619 - DNA, 80 bp, synthetic construct
  source 1..80: mol_type = other DNA
agaatctatgcacagtggtgcagcgaagcatcctcctcttatagctccaccaaaagcaaatgcatgctacaagacatgcc

SEQ ID NO: 184620 - DNA, 80 bp, synthetic construct
  source 1..80: mol_type = other DNA
taatagtccccaatgaatcctctaacacatgttccttaatagggttcgtagcagcaaaagatgacttctccctcaggtta

SEQ ID NO: 184621 - DNA, 80 bp, synthetic construct
  source 1..80: mol_type = other DNA
ctgaagaagggtttggatggtctcgcaccactctatgccagggaaaacaaactagtgactgatatgcaaagacagttgaa

SEQ ID NO: 184622 - DNA, 80 bp, synthetic construct
  source 1..80: mol_type = other DNA
ttccttgtctaacggcgatactccaatgaagttctctaatcagaaagagacctccgccaacaaggtgcagaatgcagtgt

SEQ ID NO: 184623 - DNA, 80 bp, synthetic construct
  source 1..80: mol_type = other DNA
gctgtgcgaacaacaaagaaggcttgcaaactactaatagtaatgtggaccccacctcgcaatgatcaacactaccttaa

SEQ ID NO: 184624 - DNA, 80 bp, synthetic construct
  source 1..80: mol_type = other DNA
cataagccacaacggaaacacagacaccaacatttttgactactacacaggcatgtactgcagtatatttttatccagcg

SEQ ID NO: 184625 - DNA, 80 bp, synthetic construct
  source 1..80: mol_type = other DNA
tttgcacgacgagcctttaacaaaaagtatcatatgttacaagacaccgtcagtgaatcagaattcattgttcgatatca

SEQ ID NO: 184626 - DNA, 80 bp, synthetic construct
  source 1..80: mol_type = other DNA
acaacccaaactgtgacagaggcaagggcaacagagtgtggttccagtacggaaccaaaatggacactttttttaatgaa

SEQ ID NO: 184627 - DNA, 80 bp, synthetic construct
  source 1..80: mol_type = other DNA
aggatatccattaccttcataagtgtgggcaatgcatacagctgcttttacaatggatggtcgcacttttcgcagactgg

SEQ ID NO: 184628 - DNA, 80 bp, synthetic construct
  source 1..80: mol_type = other DNA
tacaagaacaactccagcagcagcagctcatgggaatccagctccgaaacgtctgtctccagctcgcaagagtccaagcg

SEQ ID NO: 184629 - DNA, 80 bp, synthetic construct
  source 1..80: mol_type = other DNA
acctggtcaagaaaatcagagcaggacccattgagaaaccaacatatgggagaagcgcaattggagcccccagcacaaaa

SEQ ID NO: 184630 - DNA, 80 bp, synthetic construct
  source 1..80: mol_type = other DNA
ccagatacatactcttcagcaggttacatcacatgttggtatcaaactaactttgttgttccaccaaacacacccaattc

SEQ ID NO: 184631 - DNA, 80 bp, synthetic construct
  source 1..80: mol_type = other DNA
tacgtcaaggcgagcgtttcgcctgaggcggcgtgcgatattaaagcggcgcccgccgagcgttcgggcgacagccgcag

SEQ ID NO: 184632 - DNA, 80 bp, synthetic construct
  source 1..80: mol_type = other DNA
gaaccagcagttagtgaaaccgcaacttcctcgttcattgacagattcttaaaaaaagccattccagatacccctactag

SEQ ID NO: 184633 - DNA, 80 bp, synthetic construct
  source 1..80: mol_type = other DNA
tggaactacagaaaaagtgcctgccacaagcagaccaatagcaccacctagtggcagaggaggaaactacccagtgcagc

SEQ ID NO: 184634 - DNA, 80 bp, synthetic construct
  source 1..80: mol_type = other DNA
cagcatcaagggctcaaagattatgtcaaccaattgggtggtgcatttggtgaaggattcacatctacaatcaaacaaac

SEQ ID NO: 184635 - DNA, 80 bp, synthetic construct
  source 1..80: mol_type = other DNA
taccatatggagaggtcaacctcagtggtaacccaacctgccgacttatgaaatatgactaccccaccaaaccaggacag

SEQ ID NO: 184636 - DNA, 80 bp, synthetic construct
  source 1..80: mol_type = other DNA
agaaacagtagagggcacgaaacatggtgtatgcactttattaataaacaattacagatacaaaaacttgagtctctcga

SEQ ID NO: 184637 - DNA, 80 bp, synthetic construct
  source 1..80: mol_type = other DNA
gctgtaaacacggaagtaggccccgctacgtcacttatcacgtgacaacacgtcacagccgccattttgttttacaaaat

SEQ ID NO: 184638 - DNA, 80 bp, synthetic construct
  source 1..80: mol_type = other DNA
atcaaatggaccatcagactgattagtgcattgtcaattatagtcagaaatagtacagacacccctacagtaattgcaac

SEQ ID NO: 184639 - DNA, 80 bp, synthetic construct
  source 1..80: mol_type = other DNA
cgctggcgagccgagatagatctgggcctgccccctggtgtgcaggtgggagatttgctaagaaatgagcagacgatggg

SEQ ID NO: 184640 - DNA, 80 bp, synthetic construct
  source 1..80: mol_type = other DNA
ccagaaggcggacattgggctgtggttcatgtttctgttttttggactgtgttcgtggttagcgatgcggtatcgcgcac

SEQ ID NO: 184641 - DNA, 80 bp, synthetic construct
  source 1..80: mol_type = other DNA
gttgaattttgatggcacactgttaggcaatataactatcttcccacatcagttcattaaccttaggagcaataactctg

SEQ ID NO: 184642 - DNA, 80 bp, synthetic construct
  source 1..80: mol_type = other DNA
taacccatccgaaattacctcacagattacaacgatactcgcaagtacaacccccggagtcaaatcgacactccaatcga

SEQ ID NO: 184643 - DNA, 80 bp, synthetic construct
  source 1..80: mol_type = other DNA
ttaccctctacctactgcactgtgtatggcccaccctgattccgtctttaccacttcctacaatacccattcttacttca

SEQ ID NO: 184644 - DNA, 80 bp, synthetic construct
  source 1..80: mol_type = other DNA
gcccccagaatgtatgaagacaaatggtacccccagtcagaactgtgtgacatgcccctactaacgatctatgcaaccgc

SEQ ID NO: 184645 - DNA, 80 bp, synthetic construct
  source 1..80: mol_type = other DNA
tgttgatacccgcatacttttccacgctcacgggcacggtcaccaaggaacgatgctcaaaaacgctccgtaccaacgat

SEQ ID NO: 184646 - DNA, 80 bp, synthetic construct
  source 1..80: mol_type = other DNA
catggatcccaaggccgccgcgactctgcgaatatgagaaatcagggaatgtaaacttcaaacctaagggagtcactgag

SEQ ID NO: 184647 - DNA, 80 bp, synthetic construct
  source 1..80: mol_type = other DNA
aaactttaaaaaaaacacagacagcaactatggctactgcacctattgcccctcaaatggcacaaacggtacagtacaga

SEQ ID NO: 184648 - DNA, 80 bp, synthetic construct
  source 1..80: mol_type = other DNA
tggcacacccaacaagtgtgtggtcttgtgtttcgtttcagcctgtaatgacttctccgtgcgcatgctgcgcgacactc

SEQ ID NO: 184649 - DNA, 80 bp, synthetic construct
  source 1..80: mol_type = other DNA
tctacacagacctaagcaacctgccggaccacacagcacaaagaactgcaatacaaaacaaactacacccagacagtctt

SEQ ID NO: 184650 - DNA, 80 bp, synthetic construct
  source 1..80: mol_type = other DNA
tggagcccaaaagtcgttaaagatgccgctgatggtgtgggagctatgcctcccgtcgactggccgggcttgtaggtggc

SEQ ID NO: 184651 - DNA, 80 bp, synthetic construct
  source 1..80: mol_type = other DNA
aggcctttaacaggccacctagaaccaacctaaaagacacccccttttacccctgggtccctaaacctaaacctcaattc

SEQ ID NO: 184652 - DNA, 80 bp, synthetic construct
  source 1..80: mol_type = other DNA
actgcaaactcatgctggcttttctccagaacccggaagcgtcgtcgccccggactgcgcccgcggtctgctattcgccc

SEQ ID NO: 184653 - DNA, 80 bp, synthetic construct
  source 1..80: mol_type = other DNA
gaaagatactgaggaagcaaaaaagatagcacagcgacatctagcagcggacacagaaaaaatgccagctatgagtaaac

SEQ ID NO: 184654 - DNA, 80 bp, synthetic construct
  source 1..80: mol_type = other DNA
aacaatattttcacctgaatcaggatattcttctaatacctggaatgctgtttttccggggatcgcagtggtgagtaacc

SEQ ID NO: 184655 - DNA, 80 bp, synthetic construct
  source 1..80: mol_type = other DNA
ggatttgtggagaaaatacgcagtgttagcgctggtcgcatgctgtacattcctccatatgatttgctcttgcatgaggt

SEQ ID NO: 184656 - DNA, 80 bp, synthetic construct
  source 1..80: mol_type = other DNA
cacgtgcaaaaacagttgtacagggtttaccagtgtatgtcacaccagggtcagggcagtttatgacaacagatgatatg

SEQ ID NO: 184657 - DNA, 80 bp, synthetic construct
  source 1..80: mol_type = other DNA
ccaggcgagaagaggaaaagacaatccgctccagccacggatttccagcctgagtggctgcctgcacacccaaggggtgc

SEQ ID NO: 184658 - DNA, 80 bp, synthetic construct
  source 1..80: mol_type = other DNA
tctctcgttctggcttggtgagggtggttaacctcacagatggggggacggacaccactgggtatgccacttgggacatt

SEQ ID NO: 184659 - DNA, 80 bp, synthetic construct
  source 1..80: mol_type = other DNA
ggccgacgagctgcagacggctgtgtcgcgcgtgtgcgcgctcttcaaccagctggttttcacggcccagctgcgccact

SEQ ID NO: 184660 - DNA, 80 bp, synthetic construct
  source 1..80: mol_type = other DNA
gtccattgactccacatatgagggtagctgtagcacactatgctgcccaactttcaactcttgacataaaccctcaaccc

SEQ ID NO: 184661 - DNA, 80 bp, synthetic construct
  source 1..80: mol_type = other DNA
acgaagactacgctttacaggagaaaagaggcccgctctcgccagaagaggggcagacgaggacgcaagtcctccagcag

SEQ ID NO: 184662 - DNA, 80 bp, synthetic construct
  source 1..80: mol_type = other DNA
gcagagtagcagacacaattgccagaggcccatcaaactctgagcagatccccgccctgacggcggtggagactgggcac

SEQ ID NO: 184663 - DNA, 80 bp, synthetic construct
  source 1..80: mol_type = other DNA
tctactcggccaccctcgagggcacaccgaactccacccggacacccatagcctccgagccctccacatcaaattccacc

SEQ ID NO: 184664 - DNA, 80 bp, synthetic construct
  source 1..80: mol_type = other DNA
ttgcggcacagcgccgccacattggtgaaggccgtggagatgcaggaggtggggtggctcttgcgcttctgcagctccgc

SEQ ID NO: 184665 - DNA, 80 bp, synthetic construct
  source 1..80: mol_type = other DNA
gtcaatactacaaatttaacacaacacccctgtgcaccaactataccattcacacctgatttttctaatgttgacacgtt

SEQ ID NO: 184666 - DNA, 80 bp, synthetic construct
  source 1..80: mol_type = other DNA
gaggaggtactcaaagaggtacttgttgtacctaatacccaacccagtggaccatcacacacagtacgcccaaccgctct

SEQ ID NO: 184667 - DNA, 80 bp, synthetic construct
  source 1..80: mol_type = other DNA
gtcctgaaacaacaaattctaactaacactgatgatgtggatacagagataacactattgtggctggaccagaatgagaa

SEQ ID NO: 184668 - DNA, 80 bp, synthetic construct
  source 1..80: mol_type = other DNA
ccactcaatggcatatgatgtcaccacaggagacaaaaaccctagtaaattaattagattgaagacagaattttgggaac

SEQ ID NO: 184669 - DNA, 80 bp, synthetic construct
  source 1..80: mol_type = other DNA
cctatttggccaagacgctatcgacagagtgtcaaaagaaccaagagatgctccagagtatcctaacccatacaaaaggc

SEQ ID NO: 184670 - DNA, 80 bp, synthetic construct
  source 1..80: mol_type = other DNA
gcataattgactcatttaaaacgaatgccacaaactattataatagcagaaaaggcacacaaataacagcaagcaaattc

SEQ ID NO: 184671 - DNA, 80 bp, synthetic construct
  source 1..80: mol_type = other DNA
aatataagaagctgcacttccgaatggctgagttttccacgcccgtccgcagcggtatcgccacggagggagatccccgc

SEQ ID NO: 184672 - DNA, 80 bp, synthetic construct
  source 1..80: mol_type = other DNA
ccactaattcaggcagtatagtaccaccaacagtttctagtgcagatgcattgagtagaaggtttgccttcgacatggac

SEQ ID NO: 184673 - DNA, 80 bp, synthetic construct
  source 1..80: mol_type = other DNA
gattcctttgaacaatttgggtactacagactctatgagtgagtatcggattccacttacggcaggtaaagtgaacgagc

SEQ ID NO: 184674 - DNA, 80 bp, synthetic construct
  source 1..80: mol_type = other DNA
acaacagcttcctctctataactatattccaaggcacctcagacacacaacaaattaaagaatttttaaacgctgcaatg

SEQ ID NO: 184675 - DNA, 80 bp, synthetic construct
  source 1..80: mol_type = other DNA
gtgatttaaaccaagaattaacttcgctccctttactagtatacaatttcgtaacaaaacgatcatgaatagcaagggtg

SEQ ID NO: 184676 - DNA, 80 bp, synthetic construct
  source 1..80: mol_type = other DNA
gggaccgtctctagagagtacacctgacccaagcccaatccctgcacattctgcgtcccgtgagtggaagccaggggtaa

SEQ ID NO: 184677 - DNA, 80 bp, synthetic construct
  source 1..80: mol_type = other DNA
aagctatagataggagattcttcttagattgtgatgttaaaatcatgccagcatacaatacaaacaacctactgaatgtt

SEQ ID NO: 184678 - DNA, 80 bp, synthetic construct
  source 1..80: mol_type = other DNA
gataaccatctccaagaacactactgagtgtaacctgcccagtatacacacaccaagcaaaacaaaattgcaacctagtg

SEQ ID NO: 184679 - DNA, 80 bp, synthetic construct
  source 1..80: mol_type = other DNA
ttttgttctgtggtagcatgatggcaaccgggaaactgatcttgacgtactcgccaccgggtgcgtctcctccaaagagc

SEQ ID NO: 184680 - DNA, 80 bp, synthetic construct
  source 1..80: mol_type = other DNA
cacccttcatatcgcagcaaaacttccttcaaggtccggtcgagaattcaataacagctgccattggcagggttgccgac

SEQ ID NO: 184681 - DNA, 80 bp, synthetic construct
  source 1..80: mol_type = other DNA
tacagctactaccaactgctttcttaaagtgagcagtctgtggggagaccacgtatatagcaaagaaaaattaatacaag

SEQ ID NO: 184682 - DNA, 80 bp, synthetic construct
  source 1..80: mol_type = other DNA
ttagtacggttgtacgtggtgtacgttgtggcgctgcaatttgtaagccatggcgtgcttataagtgcagtattagtgga

SEQ ID NO: 184683 - DNA, 80 bp, synthetic construct
  source 1..80: mol_type = other DNA
cctgacaactcagacattagcaagctaattgactgcatagttagcaatgcaaataactaccttacaaaagtaaagtcaga

SEQ ID NO: 184684 - DNA, 80 bp, synthetic construct
  source 1..80: mol_type = other DNA
ggccctagtgacatgtatgtgcatgttggcaatcttatatatagaaatttacacttatttaattcagagatgcatgactc

SEQ ID NO: 184685 - DNA, 80 bp, synthetic construct
  source 1..80: mol_type = other DNA
attattgccaaaacaacgtgtgctctttcttcatacaggcccgcaatttccatgacagtcccgttggtggtcagcagcag

SEQ ID NO: 184686 - DNA, 80 bp, synthetic construct
  source 1..80: mol_type = other DNA
gacgataacaaaaacagccagctagtagccaagtactccttcaggttcatgtggggaggtaacactgtccactctcagat

SEQ ID NO: 184687 - DNA, 80 bp, synthetic construct
  source 1..80: mol_type = other DNA
acaacgcccggcagtgccaggcgttgaaaagattagcgaccggagattggcgggacgaatacgacgcccatatcccacgg

SEQ ID NO: 184688 - DNA, 80 bp, synthetic construct
  source 1..80: mol_type = other DNA
gcgtcccgcgccactagcctcccctccgagtccagacaacagtaacccgagacccgctctaccatggcgtggggatggtg

SEQ ID NO: 184689 - DNA, 80 bp, synthetic construct
  source 1..80: mol_type = other DNA
ggtaaggagacgccggcgccgccgtcagaagctagtactgactcaatggaacccccagacccagagaaaatgcgtggtca

SEQ ID NO: 184690 - DNA, 80 bp, synthetic construct
  source 1..80: mol_type = other DNA
caaaattccattccaacccaggcatccttactggatcagcagtaggatgtgatcctgatatcttctggtcacaaatacga

SEQ ID NO: 184691 - DNA, 80 bp, synthetic construct
  source 1..80: mol_type = other DNA
atgcccttagagggttagattggttggctcagaagattgataagtttattgattggttgaaaaccaaaatagtgccagag

SEQ ID NO: 184692 - DNA, 80 bp, synthetic construct
  source 1..80: mol_type = other DNA
cggtagtccccgtgaacaacactattagagcagttaactctattgaggcataccagatcccggtttctacgggcgcacat

SEQ ID NO: 184693 - DNA, 80 bp, synthetic construct
  source 1..80: mol_type = other DNA
tccgtgggcgacaaaacggacgccgaagctgacggctgtcgagccgaagcggaagaggttcccgcgccagaagtcacgtt

SEQ ID NO: 184694 - DNA, 80 bp, synthetic construct
  source 1..80: mol_type = other DNA
ggaacatttgagtaacggtgaggtagcaaatacttttaccagcactaaatctagcaatacaaacgatgtacaacaggctg

SEQ ID NO: 184695 - DNA, 80 bp, synthetic construct
  source 1..80: mol_type = other DNA
gtgtattttaacttgcgtcagtgcaagttcatgcactcttacaatattacagaagatgaaaacgaggagtggtttgggat

SEQ ID NO: 184696 - DNA, 80 bp, synthetic construct
  source 1..80: mol_type = other DNA
aacattaattactataaagactcctacgctgcatcagccactcgacaagatttcacgcaggatccaaagaaattcacgca

SEQ ID NO: 184697 - DNA, 80 bp, synthetic construct
  source 1..80: mol_type = other DNA
attatgcacatcagagccgccaaggcttatagcaagtcaggaaaactgaatgttagccaagccatgtcaaccatggctac

SEQ ID NO: 184698 - DNA, 80 bp, synthetic construct
  source 1..80: mol_type = other DNA
ggtaattcagcaattgtcactcaagaagcagctaatatgtgttgtgcttacggagagtggccgaggtatctcccagacaa

SEQ ID NO: 184699 - DNA, 80 bp, synthetic construct
  source 1..80: mol_type = other DNA
actaccaaacatttcaaacagaacaaatgtttagaccaagacctaacaacgctgatggctctaacaacaataactatcaa

SEQ ID NO: 184700 - DNA, 80 bp, synthetic construct
  source 1..80: mol_type = other DNA
aaactctagcacaacttaacaaattcttacctacaactaacacaacccaattaagtcaaaataatgcgcaaaactccata

SEQ ID NO: 184701 - DNA, 80 bp, synthetic construct
  source 1..80: mol_type = other DNA
ttccagggctgccttagctggtatggtgcaactcttgacatcagaggagaacacacttggttttactaattgggaaattg

SEQ ID NO: 184702 - DNA, 80 bp, synthetic construct
  source 1..80: mol_type = other DNA
cgtcttttatgacgtgtttcctggtagcaaacagcccgcagtacttagcgacaatgatcccagacttgaggtaaaattga

SEQ ID NO: 184703 - DNA, 80 bp, synthetic construct
  source 1..80: mol_type = other DNA
cgcccccgagcttcctctggccgttgttttgcgtgtgtctgttctttcctctggccgttgttttgcgtgtgtctgttctt

SEQ ID NO: 184704 - DNA, 80 bp, synthetic construct
  source 1..80: mol_type = other DNA
tacaaaaacaataccatgagaacaaatcgtgttctccacgtttcacatgctttaacgacactaaaggtctcacagtacat

SEQ ID NO: 184705 - DNA, 80 bp, synthetic construct
  source 1..80: mol_type = other DNA
aggagacgacctgcaaccaggagacgtgcaagagctgctagacgtcctagacgacgcagagtaaggagatggaggaggag

SEQ ID NO: 184706 - DNA, 80 bp, synthetic construct
  source 1..80: mol_type = other DNA
gtggagggcacagcactatgaggttctctctatttgtcctgtatcaggaacacctcagacacatgaacttttggactcgc

SEQ ID NO: 184707 - DNA, 80 bp, synthetic construct
  source 1..80: mol_type = other DNA
aactacgataaaaagcaccgtcagaatatatttcaagccaaagcacgtgcaggcatgggtgcctagaccgcctaggttgt

SEQ ID NO: 184708 - DNA, 80 bp, synthetic construct
  source 1..80: mol_type = other DNA
gcagctcctacgtccctataaaatggagaggcaaatggtatcctaacatgatacaccaacaaaaagtcatggaggatcta

SEQ ID NO: 184709 - DNA, 80 bp, synthetic construct
  source 1..80: mol_type = other DNA
gctattgctactgcagacactaccagcttcaaagaaagctaggcaacttctgacaggtatgtggagcccacccacagagg

SEQ ID NO: 184710 - DNA, 80 bp, synthetic construct
  source 1..80: mol_type = other DNA
cacctggccacgacaacatttgatcaatgatgtagagttacccaaagcattctgggacaaaaatagtaaaccagcttatg

SEQ ID NO: 184711 - DNA, 80 bp, synthetic construct
  source 1..80: mol_type = other DNA
accagttagaatgccaagtggagccaatcaatttatgacaacagaagatgagcaatcacccaacatactccccagcttcc

SEQ ID NO: 184712 - DNA, 80 bp, synthetic construct
  source 1..80: mol_type = other DNA
agcatacccttatactggcttcagaggtggagacctgccatgctatttcaaactgacgttatgagagacatcatagaaac

SEQ ID NO: 184713 - DNA, 80 bp, synthetic construct
  source 1..80: mol_type = other DNA
tatcatttttcagtgcttaccaaataacagtcttcttttgattaacgtaaccgtaaactataccaacacttaccgcacca

SEQ ID NO: 184714 - DNA, 80 bp, synthetic construct
  source 1..80: mol_type = other DNA
gacaaggaacttcaggaataacagcacaaaacccttcacaaataagagagaaactatcacaaaacatgtccagttacttt

SEQ ID NO: 184715 - DNA, 80 bp, synthetic construct
  source 1..80: mol_type = other DNA
atcggtgccacaggtgctgtacccgcagccactggtctcatcctctgcaccatcgtggtcatctccccagccccgagccc

SEQ ID NO: 184716 - DNA, 80 bp, synthetic construct
  source 1..80: mol_type = other DNA
ctaattcacaaagtgcagaccaagtaaaagagataattaaacagaacatggacgcatactttaaaaaacttgaatcagaa

SEQ ID NO: 184717 - DNA, 80 bp, synthetic construct
  source 1..80: mol_type = other DNA
ttaaaggagggaaaagaaatgaaccagttgctgtgcttatacatgggtcccctggtactgggaaatcacttgcaacttct

SEQ ID NO: 184718 - DNA, 80 bp, synthetic construct
  source 1..80: mol_type = other DNA
cacaagactccatgagcttgaagcaggcccttagtggtcattggatgtctgccacgggcaaccccctgcctgcagcaccg

SEQ ID NO: 184719 - DNA, 80 bp, synthetic construct
  source 1..80: mol_type = other DNA
aattcaccttcgttgttacagaaaggtatttcaatggtaatgcaggttatgcctcaaaccaggtgtatcagattatgtat

SEQ ID NO: 184720 - DNA, 80 bp, synthetic construct
  source 1..80: mol_type = other DNA
aatagtgttgtggcatatggagaatggcctgaatacttatctgatatagatgcctcatcaatagacaagccgacacaccc

SEQ ID NO: 184721 - DNA, 80 bp, synthetic construct
  source 1..80: mol_type = other DNA
atcttcattaaacccaaacacaccagagcatggtgccctaggccaccaagggcagttgactacactcacaaattctctac

SEQ ID NO: 184722 - DNA, 80 bp, synthetic construct
  source 1..80: mol_type = other DNA
actgtaactaacatctaagctgattaaccagccacctcaaggctggtccccactcgtcgaaggcatctagcaataagata

SEQ ID NO: 184723 - DNA, 80 bp, synthetic construct
  source 1..80: mol_type = other DNA
ggcgatcctctgagaccctccgggcccggacggccgccctcggccccccagacagaccccagggtctccaggcagggtcc

SEQ ID NO: 184724 - DNA, 80 bp, synthetic construct
  source 1..80: mol_type = other DNA
agggcaagagtctgcacgtgtgcaccaccgtggactacggcctcacttcgcgcacggccatgaccatcgccaagagtcag

SEQ ID NO: 184725 - DNA, 80 bp, synthetic construct
  source 1..80: mol_type = other DNA
gtagcacatataaatcatttttctcttaagttcatccttcttagcacgggccttagccttcagtgcaccccctaacttgt

SEQ ID NO: 184726 - DNA, 80 bp, synthetic construct
  source 1..80: mol_type = other DNA
gagaatgtcaatttggagctcactataataactcttgatagaaatgaaaaatttagggacattagggggtttatatcaga

SEQ ID NO: 184727 - DNA, 80 bp, synthetic construct
  source 1..80: mol_type = other DNA
ggagcgcaattacttcgactgctgctaccgagcccactgtgctttttgtggctgtggtaattttattcttcatcttacta

SEQ ID NO: 184728 - DNA, 80 bp, synthetic construct
  source 1..80: mol_type = other DNA
atatcacctccacgcccccattatccactaacaggcccaaaagccactctgttccaggaacgcttaccacgcatgtggac

SEQ ID NO: 184729 - DNA, 80 bp, synthetic construct
  source 1..80: mol_type = other DNA
cctttacttttaccaatactttgtgccatgagttgtcttttttaccatccagccatttcgacaaatgatgatcgggagct

SEQ ID NO: 184730 - DNA, 80 bp, synthetic construct
  source 1..80: mol_type = other DNA
gtgattgtggtggtatcttgaggtgtgtgcatggcccaataggtctgttaacagcaggagggagtgggtatgtttgtttt

SEQ ID NO: 184731 - DNA, 80 bp, synthetic construct; identical to SEQ ID NO: 1
  source 1..80: mol_type = other DNA

SEQ ID NO: 184732 - DNA, 80 bp, synthetic construct; identical to SEQ ID NO: 2
  source 1..80: mol_type = other DNA

SEQ ID NO: 184733 - DNA, 80 bp, synthetic construct; identical to SEQ ID NO: 3
  source 1..80: mol_type = other DNA

SEQ ID NO: 184734 - DNA, 80 bp, synthetic construct; identical to SEQ ID NO: 4
  source 1..80: mol_type = other DNA

SEQ ID NO: 184735 - DNA, 80 bp, synthetic construct; identical to SEQ ID NO: 5
  source 1..80: mol_type = other DNA

SEQ ID NO: 184736 - DNA, 80 bp, synthetic construct; identical to SEQ ID NO: 6
  source 1..80: mol_type = other DNA

SEQ ID NO: 184737 - DNA, 80 bp, synthetic construct; identical to SEQ ID NO: 7
  source 1..80: mol_type = other DNA

SEQ ID NO: 184738 - DNA, 80 bp, synthetic construct; identical to SEQ ID NO: 8
  source 1..80: mol_type = other DNA

SEQ ID NO: 184739 - DNA, 80 bp, synthetic construct; identical to SEQ ID NO: 9
  source 1..80: mol_type = other DNA

SEQ ID NO: 184740 - DNA, 80 bp, synthetic construct; identical to SEQ ID NO: 10
  source 1..80: mol_type = other DNA

SEQ ID NO: 184741 - DNA, 80 bp, synthetic construct; identical to SEQ ID NO: 11
  source 1..80: mol_type = other DNA

SEQ ID NO: 184742 - DNA, 80 bp, synthetic construct; identical to SEQ ID NO: 12
  source 1..80: mol_type = other DNA

SEQ ID NO: 184743 - DNA, 80 bp, synthetic construct; identical to SEQ ID NO: 13
  source 1..80: mol_type = other DNA

SEQ ID NO: 184744 - DNA, 80 bp, synthetic construct; identical to SEQ ID NO: 14
  source 1..80: mol_type = other DNA

SEQ ID NO: 184745 - DNA, 80 bp, synthetic construct; identical to SEQ ID NO: 15
  source 1..80: mol_type = other DNA

SEQ ID NO: 184746 - DNA, 80 bp, synthetic construct; identical to SEQ ID NO: 16
  source 1..80: mol_type = other DNA

SEQ ID NO: 184747 - DNA, 80 bp, synthetic construct; identical to SEQ ID NO: 17
  source 1..80: mol_type = other DNA

SEQ ID NO: 184748 - DNA, 80 bp, synthetic construct; identical to SEQ ID NO: 18
  source 1..80: mol_type = other DNA

SEQ ID NO: 184749 - DNA, 80 bp, synthetic construct; identical to SEQ ID NO: 19
  source 1..80: mol_type = other DNA

SEQ ID NO: 184750 - DNA, 80 bp, synthetic construct; identical to SEQ ID NO: 20
  source 1..80: mol_type = other DNA

SEQ ID NO: 184751 - DNA, 80 bp, synthetic construct; identical to SEQ ID NO: 21
  source 1..80: mol_type = other DNA

SEQ ID NO: 184752 - DNA, 80 bp, synthetic construct; identical to SEQ ID NO: 22
  source 1..80: mol_type = other DNA

SEQ ID NO: 184753 - DNA, 80 bp, synthetic construct; identical to SEQ ID NO: 23
  source 1..80: mol_type = other DNA

SEQ ID NO: 184754 - DNA, 80 bp, synthetic construct; identical to SEQ ID NO: 24
  source 1..80: mol_type = other DNA

SEQ ID NO: 184755 - DNA, 80 bp, synthetic construct; identical to SEQ ID NO: 25
  source 1..80: mol_type = other DNA

SEQ ID NO: 184756 - DNA, 80 bp, synthetic construct; identical to SEQ ID NO: 26
  source 1..80: mol_type = other DNA

SEQ ID NO: 184757 - DNA, 80 bp, synthetic construct; identical to SEQ ID NO: 27
  source 1..80: mol_type = other DNA

SEQ ID NO: 184758 - DNA, 80 bp, synthetic construct; identical to SEQ ID NO: 28
  source 1..80: mol_type = other DNA

SEQ ID NO: 184759 - DNA, 80 bp, synthetic construct; identical to SEQ ID NO: 29
  source 1..80: mol_type = other DNA

SEQ ID NO: 184760 - DNA, 80 bp, synthetic construct; identical to SEQ ID NO: 30
  source 1..80: mol_type = other DNA

SEQ ID NO: 184761 - DNA, 80 bp, synthetic construct; identical to SEQ ID NO: 31
  source 1..80: mol_type = other DNA

SEQ ID NO: 184762 - DNA, 80 bp, synthetic construct; identical to SEQ ID NO: 32
  source 1..80: mol_type = other DNA

SEQ ID NO: 184763 - DNA, 80 bp, synthetic construct; identical to SEQ ID NO: 33
  source 1..80: mol_type = other DNA

SEQ ID NO: 184764 - DNA, 80 bp, synthetic construct; identical to SEQ ID NO: 34
  source 1..80: mol_type = other DNA

SEQ ID NO: 184765 - DNA, 80 bp, synthetic construct; identical to SEQ ID NO: 35
  source 1..80: mol_type = other DNA

SEQ ID NO: 184766 - DNA, 80 bp, synthetic construct; identical to SEQ ID NO: 36
  source 1..80: mol_type = other DNA

SEQ ID NO: 184767 - DNA, 80 bp, synthetic construct; identical to SEQ ID NO: 37
  source 1..80: mol_type = other DNA

SEQ ID NO: 184768 - DNA, 80 bp, synthetic construct; identical to SEQ ID NO: 38
  source 1..80: mol_type = other DNA

SEQ ID NO: 184769 - DNA, 80 bp, synthetic construct; identical to SEQ ID NO: 39
  source 1..80: mol_type = other DNA

SEQ ID NO: 184770 - DNA, 80 bp, synthetic construct; identical to SEQ ID NO: 40
  source 1..80: mol_type = other DNA

SEQ ID NO: 184771 - DNA, 80 bp, synthetic construct; identical to SEQ ID NO: 41
  source 1..80: mol_type = other DNA

SEQ ID NO: 184772 - DNA, 80 bp, synthetic construct; identical to SEQ ID NO: 42
  source 1..80: mol_type = other DNA

SEQ ID NO: 184773 - DNA, 80 bp, synthetic construct; identical to SEQ ID NO: 43
  source 1..80: mol_type = other DNA

SEQ ID NO: 184774 - DNA, 80 bp, synthetic construct; identical to SEQ ID NO: 44
  source 1..80: mol_type = other DNA

SEQ ID NO: 184775 - DNA, 80 bp, synthetic construct; identical to SEQ ID NO: 45
  source 1..80: mol_type = other DNA

SEQ ID NO: 184776 - DNA, 80 bp, synthetic construct; identical to SEQ ID NO: 46
  source 1..80: mol_type = other DNA

SEQ ID NO: 184777 - DNA, 80 bp, synthetic construct; identical to SEQ ID NO: 47
  source 1..80: mol_type = other DNA

SEQ ID NO: 184778 - DNA, 80 bp, synthetic construct; identical to SEQ ID NO: 48
  source 1..80: mol_type = other DNA

SEQ ID NO: 184779 - DNA, 80 bp, synthetic construct; identical to SEQ ID NO: 49
  source 1..80: mol_type = other DNA

SEQ ID NO: 184780 - DNA, 80 bp, synthetic construct; identical to SEQ ID NO: 50
  source 1..80: mol_type = other DNA

SEQ ID NO: 184781 - DNA, 80 bp, synthetic construct; identical to SEQ ID NO: 51
  source 1..80: mol_type = other DNA

SEQ ID NO: 184782 - DNA, 80 bp, synthetic construct; identical to SEQ ID NO: 52
  source 1..80: mol_type = other DNA

SEQ ID NO: 184783 - DNA, 80 bp, synthetic construct; identical to SEQ ID NO: 53
  source 1..80: mol_type = other DNA

SEQ ID NO: 184784 - DNA, 80 bp, synthetic construct; identical to SEQ ID NO: 54
  source 1..80: mol_type = other DNA

SEQ ID NO: 184785 - DNA, 80 bp, synthetic construct; identical to SEQ ID NO: 55
  source 1..80: mol_type = other DNA

SEQ ID NO: 184786 - DNA, 80 bp, synthetic construct; identical to SEQ ID NO: 56
  source 1..80: mol_type = other DNA

SEQ ID NO: 184787 - DNA, 80 bp, synthetic construct; identical to SEQ ID NO: 57
  source 1..80: mol_type = other DNA

SEQ ID NO: 184788 - DNA, 80 bp, synthetic construct; identical to SEQ ID NO: 58
  source 1..80: mol_type = other DNA

SEQ ID NO: 184789 - DNA, 80 bp, synthetic construct; identical to SEQ ID NO: 59
  source 1..80: mol_type = other DNA

SEQ ID NO: 184790 - DNA, 80 bp, synthetic construct; identical to SEQ ID NO: 60
  source 1..80: mol_type = other DNA

SEQ ID NO: 184791 - DNA, 80 bp, synthetic construct; identical to SEQ ID NO: 61
  source 1..80: mol_type = other DNA

SEQ ID NO: 184792 - DNA, 80 bp, synthetic construct; identical to SEQ ID NO: 62
  source 1..80: mol_type = other DNA

SEQ ID NO: 184793 - DNA, 80 bp, synthetic construct; identical to SEQ ID NO: 63
  source 1..80: mol_type = other DNA

SEQ ID NO: 184794 - DNA, 80 bp, synthetic construct; identical to SEQ ID NO: 64
  source 1..80: mol_type = other DNA

SEQ ID NO: 184795 - DNA, 80 bp, synthetic construct; identical to SEQ ID NO: 65
  source 1..80: mol_type = other DNA

SEQ ID NO: 184796 - DNA, 80 bp, synthetic construct; identical to SEQ ID NO: 66
  source 1..80: mol_type = other DNA

SEQ ID NO: 184797 - DNA, 80 bp, synthetic construct; identical to SEQ ID NO: 67
  source 1..80: mol_type = other DNA

SEQ ID NO: 184798 - DNA, 80 bp, synthetic construct; identical to SEQ ID NO: 68
  source 1..80: mol_type = other DNA

SEQ ID NO: 184799 - DNA, 80 bp, synthetic construct; identical to SEQ ID NO: 69
  source 1..80: mol_type = other DNA

SEQ ID NO: 184800 - DNA, 80 bp, synthetic construct; identical to SEQ ID NO: 70
  source 1..80: mol_type = other DNA

SEQ ID NO: 184801 - DNA, 80 bp, synthetic construct; identical to SEQ ID NO: 71
  source 1..80: mol_type = other DNA

SEQ ID NO: 184802 - DNA, 80 bp, synthetic construct; identical to SEQ ID NO: 72
  source 1..80: mol_type = other DNA

SEQ ID NO: 184803 - DNA, 80 bp, synthetic construct; identical to SEQ ID NO: 73
  source 1..80: mol_type = other DNA

SEQ ID NO: 184804 - DNA, 80 bp, synthetic construct; identical to SEQ ID NO: 74
  source 1..80: mol_type = other DNA

SEQ ID NO: 184805 - DNA, 80 bp, synthetic construct; identical to SEQ ID NO: 75
  source 1..80: mol_type = other DNA

SEQ ID NO: 184806 - DNA, 80 bp, synthetic construct; identical to SEQ ID NO: 76
  source 1..80: mol_type = other DNA

SEQ ID NO: 184807 - DNA, 80 bp, synthetic construct; identical to SEQ ID NO: 77
  source 1..80: mol_type = other DNA

SEQ ID NO: 184808 - DNA, 80 bp, synthetic construct; identical to SEQ ID NO: 78
  source 1..80: mol_type = other DNA

SEQ ID NO: 184809 - DNA, 80 bp, synthetic construct; identical to SEQ ID NO: 79
  source 1..80: mol_type = other DNA

SEQ ID NO: 184810 - DNA, 80 bp, synthetic construct; identical to SEQ ID NO: 80
  source 1..80: mol_type = other DNA

SEQ ID NO: 184811 - DNA, 80 bp, synthetic construct; identical to SEQ ID NO: 81
  source 1..80: mol_type = other DNA

SEQ ID NO: 184812 - DNA, 80 bp, synthetic construct; identical to SEQ ID NO: 82
  source 1..80: mol_type = other DNA

SEQ ID NO: 184813 - DNA, 80 bp, synthetic construct; identical to SEQ ID NO: 83
  source 1..80: mol_type = other DNA

SEQ ID NO: 184814 - DNA, 80 bp, synthetic construct; identical to SEQ ID NO: 84
  source 1..80: mol_type = other DNA

SEQ ID NO: 184815 - DNA, 80 bp, synthetic construct; identical to SEQ ID NO: 85
  source 1..80: mol_type = other DNA

SEQ ID NO: 184816 - DNA, 80 bp, synthetic construct; identical to SEQ ID NO: 86
  source 1..80: mol_type = other DNA

SEQ ID NO: 184817 - DNA, 80 bp, synthetic construct; identical to SEQ ID NO: 87
  source 1..80: mol_type = other DNA

SEQ ID NO: 184818 - DNA, 80 bp, synthetic construct; identical to SEQ ID NO: 88
  source 1..80: mol_type = other DNA

SEQ ID NO: 184819 - DNA, 80 bp, synthetic construct; identical to SEQ ID NO: 89
  source 1..80: mol_type = other DNA

SEQ ID NO: 184820 - DNA, 80 bp, synthetic construct; identical to SEQ ID NO: 90
  source 1..80: mol_type = other DNA

SEQ ID NO: 184821 - DNA, 80 bp, synthetic construct; identical to SEQ ID NO: 91
  source 1..80: mol_type = other DNA

SEQ ID NO: 184822 - DNA, 80 bp, synthetic construct; identical to SEQ ID NO: 92
  source 1..80: mol_type = other DNA

SEQ ID NO: 184823 - DNA, 80 bp, synthetic construct; identical to SEQ ID NO: 93
  source 1..80: mol_type = other DNA

SEQ ID NO: 184824 - DNA, 80 bp, synthetic construct; identical to SEQ ID NO: 94
  source 1..80: mol_type = other DNA

SEQ ID NO: 184825 - DNA, 80 bp, synthetic construct; identical to SEQ ID NO: 95
  source 1..80: mol_type = other DNA

SEQ ID NO: 184826 - DNA, 80 bp, synthetic construct; identical to SEQ ID NO: 96
  source 1..80: mol_type = other DNA

SEQ ID NO: 184827 - DNA, 80 bp, synthetic construct; identical to SEQ ID NO: 97
  source 1..80: mol_type = other DNA

SEQ ID NO: 184828 - DNA, 80 bp, synthetic construct; identical to SEQ ID NO: 98
  source 1..80: mol_type = other DNA

SEQ ID NO: 184829 - DNA, 80 bp, synthetic construct; identical to SEQ ID NO: 99
  source 1..80: mol_type = other DNA

SEQ ID NO: 184830 - DNA, 80 bp, synthetic construct; identical to SEQ ID NO: 100
  source 1..80: mol_type = other DNA

SEQ ID NO: 184831 - DNA, 80 bp, synthetic construct; identical to SEQ ID NO: 101
  source 1..80: mol_type = other DNA

SEQ ID NO: 184832 - DNA, 80 bp, synthetic construct; identical to SEQ ID NO: 102
  source 1..80: mol_type = other DNA

SEQ ID NO: 184833 - DNA, 80 bp, synthetic construct; identical to SEQ ID NO: 103
  source 1..80: mol_type = other DNA

SEQ ID NO: 184834 - DNA, 80 bp, synthetic construct; identical to SEQ ID NO: 104
  source 1..80: mol_type = other DNA

SEQ ID NO: 184835 - DNA, 80 bp, synthetic construct; identical to SEQ ID NO: 105
  source 1..80: mol_type = other DNA

SEQ ID NO: 184836 - DNA, 80 bp, synthetic construct; identical to SEQ ID NO: 106
  source 1..80: mol_type = other DNA

SEQ ID NO: 184837 - DNA, 80 bp, synthetic construct; identical to SEQ ID NO: 107
  source 1..80: mol_type = other DNA

SEQ ID NO: 184838 - DNA, 80 bp, synthetic construct; identical to SEQ ID NO: 108
  source 1..80: mol_type = other DNA

SEQ ID NO: 184839 - DNA, 80 bp, synthetic construct; identical to SEQ ID NO: 109
  source 1..80: mol_type = other DNA

SEQ ID NO: 184840 - DNA, 80 bp, synthetic construct; identical to SEQ ID NO: 110
  source 1..80: mol_type = other DNA

SEQ ID NO: 184841 - DNA, 80 bp, synthetic construct; identical to SEQ ID NO: 111
  source 1..80: mol_type = other DNA

SEQ ID NO: 184842 - DNA, 80 bp, synthetic construct; identical to SEQ ID NO: 112
  source 1..80: mol_type = other DNA

SEQ ID NO: 184843 - DNA, 80 bp, synthetic construct; identical to SEQ ID NO: 113
  source 1..80: mol_type = other DNA

SEQ ID NO: 184844 - DNA, 80 bp, synthetic construct; identical to SEQ ID NO: 114
  source 1..80: mol_type = other DNA

SEQ ID NO: 184845 - DNA, 80 bp, synthetic construct; identical to SEQ ID NO: 115
  source 1..80: mol_type = other DNA

SEQ ID NO: 184846 - DNA, 80 bp, synthetic construct; identical to SEQ ID NO: 116
  source 1..80: mol_type = other DNA

SEQ ID NO: 184847 - DNA, 80 bp, synthetic construct; identical to SEQ ID NO: 117
  source 1..80: mol_type = other DNA

SEQ ID NO: 184848 - DNA, 80 bp, synthetic construct; identical to SEQ ID NO: 118
  source 1..80: mol_type = other DNA

SEQ ID NO: 184849 - DNA, 80 bp, synthetic construct; identical to SEQ ID NO: 119
  source 1..80: mol_type = other DNA

SEQ ID NO: 184850 - DNA, 80 bp, synthetic construct; identical to SEQ ID NO: 120
  source 1..80: mol_type = other DNA

SEQ ID NO: 184851 - DNA, 80 bp, synthetic construct; identical to SEQ ID NO: 121
  source 1..80: mol_type = other DNA

SEQ ID NO: 184852 - DNA, 80 bp, synthetic construct; identical to SEQ ID NO: 122
  source 1..80: mol_type = other DNA

SEQ ID NO: 184853 - DNA, 80 bp, synthetic construct; identical to SEQ ID NO: 123
  source 1..80: mol_type = other DNA

SEQ ID NO: 184854 - DNA, 80 bp, synthetic construct; identical to SEQ ID NO: 124
  source 1..80: mol_type = other DNA

SEQ ID NO: 184855 - DNA, 80 bp, synthetic construct; identical to SEQ ID NO: 125
  source 1..80: mol_type = other DNA

SEQ ID NO: 184856 - DNA, 80 bp, synthetic construct; identical to SEQ ID NO: 126
  source 1..80: mol_type = other DNA

SEQ ID NO: 184857 - DNA, 80 bp, synthetic construct; identical to SEQ ID NO: 127
  source 1..80: mol_type = other DNA

SEQ ID NO: 184858 - DNA, 80 bp, synthetic construct; identical to SEQ ID NO: 128
  source 1..80: mol_type = other DNA

SEQ ID NO: 184859 - DNA, 80 bp, synthetic construct; identical to SEQ ID NO: 129
  source 1..80: mol_type = other DNA

SEQ ID NO: 184860 - DNA, 80 bp, synthetic construct; identical to SEQ ID NO: 130
  source 1..80: mol_type = other DNA

SEQ ID NO: 184861 - DNA, 80 bp, synthetic construct; identical to SEQ ID NO: 131
  source 1..80: mol_type = other DNA

SEQ ID NO: 184862 - DNA, 80 bp, synthetic construct; identical to SEQ ID NO: 132
  source 1..80: mol_type = other DNA

SEQ ID NO: 184863 - DNA, 80 bp, synthetic construct; identical to SEQ ID NO: 133
  source 1..80: mol_type = other DNA

SEQ ID NO: 184864 - DNA, 80 bp, synthetic construct; identical to SEQ ID NO: 134
  source 1..80: mol_type = other DNA

SEQ ID NO: 184865 - DNA, 80 bp, synthetic construct; identical to SEQ ID NO: 135
  source 1..80: mol_type = other DNA

SEQ ID NO: 184866 - DNA, 80 bp, synthetic construct; identical to SEQ ID NO: 136
  source 1..80: mol_type = other DNA

SEQ ID NO: 184867 - DNA, 80 bp, synthetic construct; identical to SEQ ID NO: 137
  source 1..80: mol_type = other DNA

SEQ ID NO: 184868 - DNA, 80 bp, synthetic construct; identical to SEQ ID NO: 138
  source 1..80: mol_type = other DNA

SEQ ID NO: 184869 - DNA, 80 bp, synthetic construct; identical to SEQ ID NO: 139
  source 1..80: mol_type = other DNA

SEQ ID NO: 184870 - DNA, 80 bp, synthetic construct; identical to SEQ ID NO: 140
  source 1..80: mol_type = other DNA

SEQ ID NO: 184871 - DNA, 80 bp, synthetic construct; identical to SEQ ID NO: 141
  source 1..80: mol_type = other DNA

SEQ ID NO: 184872 - DNA, 80 bp, synthetic construct; identical to SEQ ID NO: 142
  source 1..80: mol_type = other DNA

SEQ ID NO: 184873 - DNA, 80 bp, synthetic construct; identical to SEQ ID NO: 143
  source 1..80: mol_type = other DNA

SEQ ID NO: 184874 - DNA, 80 bp, synthetic construct; identical to SEQ ID NO: 144
  source 1..80: mol_type = other DNA

SEQ ID NO: 184875 - DNA, 80 bp, synthetic construct; identical to SEQ ID NO: 145
  source 1..80: mol_type = other DNA

SEQ ID NO: 184876 - DNA, 80 bp, synthetic construct; identical to SEQ ID NO: 146
  source 1..80: mol_type = other DNA

SEQ ID NO: 184877 - DNA, 80 bp, synthetic construct; identical to SEQ ID NO: 147
  source 1..80: mol_type = other DNA

SEQ ID NO: 184878 - DNA, 80 bp, synthetic construct; identical to SEQ ID NO: 148
  source 1..80: mol_type = other DNA

SEQ ID NO: 184879 - DNA, 80 bp, synthetic construct; identical to SEQ ID NO: 149
  source 1..80: mol_type = other DNA

SEQ ID NO: 184880 - DNA, 80 bp, synthetic construct; identical to SEQ ID NO: 150
  source 1..80: mol_type = other DNA

SEQ ID NO: 184881 - DNA, 80 bp, synthetic construct; identical to SEQ ID NO: 151
  source 1..80: mol_type = other DNA

SEQ ID NO: 184882 - DNA, 80 bp, synthetic construct; identical to SEQ ID NO: 152
  source 1..80: mol_type = other DNA

SEQ ID NO: 184883 - DNA, 80 bp, synthetic construct; identical to SEQ ID NO: 153
  source 1..80: mol_type = other DNA

SEQ ID NO: 184884 - DNA, 80 bp, synthetic construct; identical to SEQ ID NO: 154
  source 1..80: mol_type = other DNA

SEQ ID NO: 184885 - DNA, 80 bp, synthetic construct; identical to SEQ ID NO: 155
  source 1..80: mol_type = other DNA

SEQ ID NO: 184886 - DNA, 80 bp, synthetic construct; identical to SEQ ID NO: 156
  source 1..80: mol_type = other DNA

SEQ ID NO: 184887 - DNA, 80 bp, synthetic construct; identical to SEQ ID NO: 157
  source 1..80: mol_type = other DNA

SEQ ID NO: 184888 - DNA, 80 bp, synthetic construct; identical to SEQ ID NO: 158
  source 1..80: mol_type = other DNA

SEQ ID NO: 184889 - DNA, 80 bp, synthetic construct; identical to SEQ ID NO: 159
  source 1..80: mol_type = other DNA

SEQ ID NO: 184890 - DNA, 80 bp, synthetic construct; identical to SEQ ID NO: 160
  source 1..80: mol_type = other DNA

SEQ ID NO: 184891 - DNA, 80 bp, synthetic construct; identical to SEQ ID NO: 161
  source 1..80: mol_type = other DNA

SEQ ID NO: 184892 - DNA, 80 bp, synthetic construct; identical to SEQ ID NO: 162
  source 1..80: mol_type = other DNA

SEQ ID NO: 184893 - DNA, 80 bp, synthetic construct; identical to SEQ ID NO: 163
  source 1..80: mol_type = other DNA

SEQ ID NO: 184894 - DNA, 80 bp, synthetic construct; identical to SEQ ID NO: 164
  source 1..80: mol_type = other DNA

SEQ ID NO: 184895 - DNA, 80 bp, synthetic construct; identical to SEQ ID NO: 165
  source 1..80: mol_type = other DNA

SEQ ID NO: 184896 - DNA, 80 bp, synthetic construct; identical to SEQ ID NO: 166
  source 1..80: mol_type = other DNA

SEQ ID NO: 184897 - DNA, 80 bp, synthetic construct; identical to SEQ ID NO: 167
  source 1..80: mol_type = other DNA

SEQ ID NO: 184898 - DNA, 80 bp, synthetic construct; identical to SEQ ID NO: 168
  source 1..80: mol_type = other DNA

SEQ ID NO: 184899 - DNA, 80 bp, synthetic construct; identical to SEQ ID NO: 169
  source 1..80: mol_type = other DNA

SEQ ID NO: 184900 - DNA, 80 bp, synthetic construct; identical to SEQ ID NO: 170
  source 1..80: mol_type = other DNA

SEQ ID NO: 184901 - DNA, 80 bp, synthetic construct; identical to SEQ ID NO: 171
  source 1..80: mol_type = other DNA

SEQ ID NO: 184902 - DNA, 80 bp, synthetic construct; identical to SEQ ID NO: 172
  source 1..80: mol_type = other DNA

SEQ ID NO: 184903 - DNA, 80 bp, synthetic construct; identical to SEQ ID NO: 173
  source 1..80: mol_type = other DNA

SEQ ID NO: 184904 - DNA, 80 bp, synthetic construct; identical to SEQ ID NO: 174
  source 1..80: mol_type = other DNA

SEQ ID NO: 184905 - DNA, 80 bp, synthetic construct; identical to SEQ ID NO: 175
  source 1..80: mol_type = other DNA

SEQ ID NO: 184906 - DNA, 80 bp, synthetic construct; identical to SEQ ID NO: 176
  source 1..80: mol_type = other DNA

SEQ ID NO: 184907 - DNA, 80 bp, synthetic construct; identical to SEQ ID NO: 177
  source 1..80: mol_type = other DNA

SEQ ID NO: 184908 - DNA, 80 bp, synthetic construct; identical to SEQ ID NO: 178
  source 1..80: mol_type = other DNA

SEQ ID NO: 184909 - DNA, 80 bp, synthetic construct; identical to SEQ ID NO: 179
  source 1..80: mol_type = other DNA

SEQ ID NO: 184910 - DNA, 80 bp, synthetic construct; identical to SEQ ID NO: 180
  source 1..80: mol_type = other DNA

SEQ ID NO: 184911 - DNA, 80 bp, synthetic construct; identical to SEQ ID NO: 181
  source 1..80: mol_type = other DNA

SEQ ID NO: 184912 - DNA, 80 bp, synthetic construct; identical to SEQ ID NO: 182
  source 1..80: mol_type = other DNA

SEQ ID NO: 184913 - DNA, 80 bp, synthetic construct; identical to SEQ ID NO: 183
  source 1..80: mol_type = other DNA

SEQ ID NO: 184914 - DNA, 80 bp, synthetic construct; identical to SEQ ID NO: 184
  source 1..80: mol_type = other DNA

SEQ ID NO: 184915 - DNA, 80 bp, synthetic construct; identical to SEQ ID NO: 185
  source 1..80: mol_type = other DNA

SEQ ID NO: 184916 - DNA, 80 bp, synthetic construct; identical to SEQ ID NO: 186
  source 1..80: mol_type = other DNA

SEQ ID NO: 184917 - DNA, 80 bp, synthetic construct; identical to SEQ ID NO: 187
  source 1..80: mol_type = other DNA

SEQ ID NO: 184918 - DNA, 80 bp, synthetic construct; identical to SEQ ID NO: 188
  source 1..80: mol_type = other DNA

SEQ ID NO: 184919 - DNA, 80 bp, synthetic construct; identical to SEQ ID NO: 189
  source 1..80: mol_type = other DNA

SEQ ID NO: 184920 - DNA, 80 bp, synthetic construct; identical to SEQ ID NO: 190
  source 1..80: mol_type = other DNA

SEQ ID NO: 184921 - DNA, 80 bp, synthetic construct; identical to SEQ ID NO: 191
  source 1..80: mol_type = other DNA

SEQ ID NO: 184922 - DNA, 80 bp, synthetic construct; identical to SEQ ID NO: 192
  source 1..80: mol_type = other DNA

SEQ ID NO: 184923 - DNA, 80 bp, synthetic construct; identical to SEQ ID NO: 193
  source 1..80: mol_type = other DNA

SEQ ID NO: 184924 - DNA, 80 bp, synthetic construct; identical to SEQ ID NO: 194
  source 1..80: mol_type = other DNA

SEQ ID NO: 184925 - DNA, 80 bp, synthetic construct; identical to SEQ ID NO: 195
  source 1..80: mol_type = other DNA

SEQ ID NO: 184926 - DNA, 80 bp, synthetic construct; identical to SEQ ID NO: 196
  source 1..80: mol_type = other DNA

SEQ ID NO: 184927 - DNA, 80 bp, synthetic construct; identical to SEQ ID NO: 197
  source 1..80: mol_type = other DNA

SEQ ID NO: 184928 - DNA, 80 bp, synthetic construct; identical to SEQ ID NO: 198
  source 1..80: mol_type = other DNA

SEQ ID NO: 184929 - DNA, 80 bp, synthetic construct; identical to SEQ ID NO: 199
  source 1..80: mol_type = other DNA

SEQ ID NO: 184930 - DNA, 80 bp, synthetic construct; identical to SEQ ID NO: 200
  source 1..80: mol_type = other DNA

SEQ ID NO: 184931 - DNA, 80 bp, synthetic construct; identical to SEQ ID NO: 201
  source 1..80: mol_type = other DNA

SEQ ID NO: 184932 - DNA, 80 bp, synthetic construct; identical to SEQ ID NO: 202
  source 1..80: mol_type = other DNA

SEQ ID NO: 184933 - DNA, 80 bp, synthetic construct; identical to SEQ ID NO: 203
  source 1..80: mol_type = other DNA

SEQ ID NO: 184934 - DNA, 80 bp, synthetic construct; identical to SEQ ID NO: 204
  source 1..80: mol_type = other DNA

SEQ ID NO: 184935 - DNA, 80 bp, synthetic construct; identical to SEQ ID NO: 205
  source 1..80: mol_type = other DNA

SEQ ID NO: 184936 - DNA, 80 bp, synthetic construct; identical to SEQ ID NO: 206
  source 1..80: mol_type = other DNA

SEQ ID NO: 184937 - DNA, 80 bp, synthetic construct; identical to SEQ ID NO: 207
  source 1..80: mol_type = other DNA

SEQ ID NO: 184938 - DNA, 80 bp, synthetic construct; identical to SEQ ID NO: 208
  source 1..80: mol_type = other DNA

SEQ ID NO: 184939 - DNA, 80 bp, synthetic construct; identical to SEQ ID NO: 209
  source 1..80: mol_type = other DNA

SEQ ID NO: 184940 - DNA, 80 bp, synthetic construct; identical to SEQ ID NO: 210
  source 1..80: mol_type = other DNA

SEQ ID NO: 184941 - DNA, 80 bp, synthetic construct; identical to SEQ ID NO: 211
  source 1..80: mol_type = other DNA

SEQ ID NO: 184942 - DNA, 80 bp, synthetic construct; identical to SEQ ID NO: 212
  source 1..80: mol_type = other DNA

SEQ ID NO: 184943 - DNA, 80 bp, synthetic construct; identical to SEQ ID NO: 213
  source 1..80: mol_type = other DNA

SEQ ID NO: 184944 - DNA, 80 bp, synthetic construct; identical to SEQ ID NO: 214
  source 1..80: mol_type = other DNA

SEQ ID NO: 184945 - DNA, 80 bp, synthetic construct; identical to SEQ ID NO: 215
  source 1..80: mol_type = other DNA

SEQ ID NO: 184946 - DNA, 80 bp, synthetic construct; identical to SEQ ID NO: 216
  source 1..80: mol_type = other DNA

SEQ ID NO: 184947 - DNA, 80 bp, synthetic construct; identical to SEQ ID NO: 217
  source 1..80: mol_type = other DNA

SEQ ID NO: 184948 - DNA, 80 bp, synthetic construct; identical to SEQ ID NO: 218
  source 1..80: mol_type = other DNA

SEQ ID NO: 184949 - DNA, 80 bp, synthetic construct; identical to SEQ ID NO: 219
  source 1..80: mol_type = other DNA

SEQ ID NO: 184950 - DNA, 80 bp, synthetic construct; identical to SEQ ID NO: 220
  source 1..80: mol_type = other DNA

SEQ ID NO: 184951 - DNA, 80 bp, synthetic construct; identical to SEQ ID NO: 221
  source 1..80: mol_type = other DNA

SEQ ID NO: 184952 - DNA, 80 bp, synthetic construct; identical to SEQ ID NO: 222
  source 1..80: mol_type = other DNA

SEQ ID NO: 184953 - DNA, 80 bp, synthetic construct; identical to SEQ ID NO: 223
  source 1..80: mol_type = other DNA

SEQ ID NO: 184954 - DNA, 80 bp, synthetic construct; identical to SEQ ID NO: 224
  source 1..80: mol_type = other DNA

SEQ ID NO: 184955 - DNA, 80 bp, synthetic construct; identical to SEQ ID NO: 225
  source 1..80: mol_type = other DNA

SEQ ID NO: 184956 - DNA, 80 bp, synthetic construct; identical to SEQ ID NO: 226
  source 1..80: mol_type = other DNA

SEQ ID NO: 184957 - DNA, 80 bp, synthetic construct; identical to SEQ ID NO: 227
  source 1..80: mol_type = other DNA

SEQ ID NO: 184958 - DNA, 80 bp, synthetic construct; identical to SEQ ID NO: 228
  source 1..80: mol_type = other DNA

SEQ ID NO: 184959 - DNA, 80 bp, synthetic construct; identical to SEQ ID NO: 229
  source 1..80: mol_type = other DNA

SEQ ID NO: 184960 - DNA, 80 bp, synthetic construct; identical to SEQ ID NO: 230
  source 1..80: mol_type = other DNA

SEQ ID NO: 184961 - DNA, 80 bp, synthetic construct; identical to SEQ ID NO: 231
  source 1..80: mol_type = other DNA

SEQ ID NO: 184962 - DNA, 80 bp, synthetic construct; identical to SEQ ID NO: 232
  source 1..80: mol_type = other DNA

SEQ ID NO: 184963 - DNA, 80 bp, synthetic construct; identical to SEQ ID NO: 233
  source 1..80: mol_type = other DNA

SEQ ID NO: 184964 - DNA, 80 bp, synthetic construct; identical to SEQ ID NO: 234
  source 1..80: mol_type = other DNA

SEQ ID NO: 184965 - DNA, 80 bp, synthetic construct; identical to SEQ ID NO: 235
  source 1..80: mol_type = other DNA

SEQ ID NO: 184966 - DNA, 80 bp, synthetic construct; identical to SEQ ID NO: 236
  source 1..80: mol_type = other DNA

SEQ ID NO: 184967 - DNA, 80 bp, synthetic construct; identical to SEQ ID NO: 237
  source 1..80: mol_type = other DNA

SEQ ID NO: 184968 - DNA, 80 bp, synthetic construct; identical to SEQ ID NO: 238
  source 1..80: mol_type = other DNA

SEQ ID NO: 184969 - DNA, 80 bp, synthetic construct; identical to SEQ ID NO: 239
  source 1..80: mol_type = other DNA

SEQ ID NO: 184970 - DNA, 80 bp, synthetic construct; identical to SEQ ID NO: 240
  source 1..80: mol_type = other DNA

SEQ ID NO: 184971 - DNA, 80 bp, synthetic construct; identical to SEQ ID NO: 241
  source 1..80: mol_type = other DNA

SEQ ID NO: 184972 - DNA, 80 bp, synthetic construct; identical to SEQ ID NO: 242
  source 1..80: mol_type = other DNA

SEQ ID NO: 184973 - DNA, 80 bp, synthetic construct; identical to SEQ ID NO: 243
  source 1..80: mol_type = other DNA

SEQ ID NO: 184974 - DNA, 80 bp, synthetic construct; identical to SEQ ID NO: 244
  source 1..80: mol_type = other DNA

SEQ ID NO: 184975 - DNA, 80 bp, synthetic construct; identical to SEQ ID NO: 245
  source 1..80: mol_type = other DNA

SEQ ID NO: 184976 - DNA, 80 bp, synthetic construct; identical to SEQ ID NO: 246
  source 1..80: mol_type = other DNA

SEQ ID NO: 184977 - DNA, 80 bp, synthetic construct; identical to SEQ ID NO: 247
  source 1..80: mol_type = other DNA

SEQ ID NO: 184978 - DNA, 80 bp, synthetic construct; identical to SEQ ID NO: 248
  source 1..80: mol_type = other DNA

SEQ ID NO: 184979 - DNA, 80 bp, synthetic construct; identical to SEQ ID NO: 249
  source 1..80: mol_type = other DNA

SEQ ID NO: 184980 - DNA, 80 bp, synthetic construct; identical to SEQ ID NO: 250
  source 1..80: mol_type = other DNA

SEQ ID NO: 184981 - DNA, 80 bp, synthetic construct; identical to SEQ ID NO: 251
  source 1..80: mol_type = other DNA

SEQ ID NO: 184982 - DNA, 80 bp, synthetic construct; identical to SEQ ID NO: 252
  source 1..80: mol_type = other DNA

SEQ ID NO: 184983 - DNA, 80 bp, synthetic construct; identical to SEQ ID NO: 253
  source 1..80: mol_type = other DNA

SEQ ID NO: 184984 - DNA, 80 bp, synthetic construct; identical to SEQ ID NO: 254
  source 1..80: mol_type = other DNA

SEQ ID NO: 184985 - DNA, 80 bp, synthetic construct; identical to SEQ ID NO: 255
  source 1..80: mol_type = other DNA

SEQ ID NO: 184986 - DNA, 80 bp, synthetic construct; identical to SEQ ID NO: 256
  source 1..80: mol_type = other DNA

SEQ ID NO: 184987 - DNA, 80 bp, synthetic construct; identical to SEQ ID NO: 257
  source 1..80: mol_type = other DNA

SEQ ID NO: 184988 - DNA, 80 bp, synthetic construct; identical to SEQ ID NO: 258
  source 1..80: mol_type = other DNA

SEQ ID NO: 184989 - DNA, 80 bp, synthetic construct; identical to SEQ ID NO: 259
  source 1..80: mol_type = other DNA

SEQ ID NO: 184990 - DNA, 80 bp, synthetic construct; identical to SEQ ID NO: 260
  source 1..80: mol_type = other DNA

SEQ ID NO: 184991 - DNA, 80 bp, synthetic construct; identical to SEQ ID NO: 261
  source 1..80: mol_type = other DNA

SEQ ID NO: 184992 - DNA, 80 bp, synthetic construct; identical to SEQ ID NO: 262
  source 1..80: mol_type = other DNA

SEQ ID NO: 184993 - DNA, 80 bp, synthetic construct; identical to SEQ ID NO: 263
  source 1..80: mol_type = other DNA

SEQ ID NO: 184994 - DNA, 80 bp, synthetic construct; identical to SEQ ID NO: 264
  source 1..80: mol_type = other DNA

SEQ ID NO: 184995 - DNA, 80 bp, synthetic construct; identical to SEQ ID NO: 265
  source 1..80: mol_type = other DNA

SEQ ID NO: 184996 - DNA, 80 bp, synthetic construct; identical to SEQ ID NO: 266
  source 1..80: mol_type = other DNA

SEQ ID NO: 184997 - DNA, 80 bp, synthetic construct; identical to SEQ ID NO: 267
  source 1..80: mol_type = other DNA

SEQ ID NO: 184998 - DNA, 80 bp, synthetic construct; identical to SEQ ID NO: 268
  source 1..80: mol_type = other DNA

SEQ ID NO: 184999 - DNA, 80 bp, synthetic construct; identical to SEQ ID NO: 269
  source 1..80: mol_type = other DNA

SEQ ID NO: 185000 - DNA, 80 bp, synthetic construct; identical to SEQ ID NO: 270
  source 1..80: mol_type = other DNA

SEQ ID NO: 185001 - DNA, 80 bp, synthetic construct; identical to SEQ ID NO: 271
  source 1..80: mol_type = other DNA

SEQ ID NO: 185002 - DNA, 80 bp, synthetic construct; identical to SEQ ID NO: 272
  source 1..80: mol_type = other DNA

SEQ ID NO: 185003 - DNA, 80 bp, synthetic construct; identical to SEQ ID NO: 273
  source 1..80: mol_type = other DNA

SEQ ID NO: 185004 - DNA, 80 bp, synthetic construct; identical to SEQ ID NO: 274
  source 1..80: mol_type = other DNA

SEQ ID NO: 185005 - DNA, 80 bp, synthetic construct; identical to SEQ ID NO: 275
  source 1..80: mol_type = other DNA

SEQ ID NO: 185006 - DNA, 80 bp, synthetic construct; identical to SEQ ID NO: 276
  source 1..80: mol_type = other DNA

SEQ ID NO: 185007 - DNA, 80 bp, synthetic construct; identical to SEQ ID NO: 277
  source 1..80: mol_type = other DNA

SEQ ID NO: 185008 - DNA, 80 bp, synthetic construct; identical to SEQ ID NO: 278
  source 1..80: mol_type = other DNA

SEQ ID NO: 185009 - DNA, 80 bp, synthetic construct; identical to SEQ ID NO: 279
  source 1..80: mol_type = other DNA

SEQ ID NO: 185010 - DNA, 80 bp, synthetic construct; identical to SEQ ID NO: 280
  source 1..80: mol_type = other DNA

SEQ ID NO: 185011 - DNA, 80 bp, synthetic construct; identical to SEQ ID NO: 281
  source 1..80: mol_type = other DNA

SEQ ID NO: 185012 - DNA, 80 bp, synthetic construct; identical to SEQ ID NO: 282
  source 1..80: mol_type = other DNA

SEQ ID NO: 185013 - DNA, 80 bp, synthetic construct; identical to SEQ ID NO: 283
  source 1..80: mol_type = other DNA

SEQ ID NO: 185014 - DNA, 80 bp, synthetic construct; identical to SEQ ID NO: 284
  source 1..80: mol_type = other DNA

SEQ ID NO: 185015 - DNA, 80 bp, synthetic construct; identical to SEQ ID NO: 285
  source 1..80: mol_type = other DNA

SEQ ID NO: 185016 - DNA, 80 bp, synthetic construct; identical to SEQ ID NO: 286
  source 1..80: mol_type = other DNA

SEQ ID NO: 185017 - DNA, 80 bp, synthetic construct; identical to SEQ ID NO: 287
  source 1..80: mol_type = other DNA

SEQ ID NO: 185018 - DNA, 80 bp, synthetic construct; identical to SEQ ID NO: 288
  source 1..80: mol_type = other DNA

SEQ ID NO: 185019 - DNA, 80 bp, synthetic construct; identical to SEQ ID NO: 289
  source 1..80: mol_type = other DNA

SEQ ID NO: 185020 - DNA, 80 bp, synthetic construct; identical to SEQ ID NO: 290
  source 1..80: mol_type = other DNA

SEQ ID NO: 185021 - DNA, 80 bp, synthetic construct; identical to SEQ ID NO: 291
  source 1..80: mol_type = other DNA

SEQ ID NO: 185022 - DNA, 80 bp, synthetic construct; identical to SEQ ID NO: 292
  source 1..80: mol_type = other DNA

SEQ ID NO: 185023 - DNA, 80 bp, synthetic construct; identical to SEQ ID NO: 293
  source 1..80: mol_type = other DNA

SEQ ID NO: 185024 - DNA, 80 bp, synthetic construct; identical to SEQ ID NO: 294
  source 1..80: mol_type = other DNA

SEQ ID NO: 185025 - DNA, 80 bp, synthetic construct; identical to SEQ ID NO: 295
  source 1..80: mol_type = other DNA

SEQ ID NO: 185026 - DNA, 80 bp, synthetic construct; identical to SEQ ID NO: 296
  source 1..80: mol_type = other DNA

SEQ ID NO: 185027 - DNA, 80 bp, synthetic construct; identical to SEQ ID NO: 297
  source 1..80: mol_type = other DNA

SEQ ID NO: 185028 - DNA, 80 bp, synthetic construct; identical to SEQ ID NO: 298
  source 1..80: mol_type = other DNA

SEQ ID NO: 185029 - DNA, 80 bp, synthetic construct; identical to SEQ ID NO: 299
  source 1..80: mol_type = other DNA

SEQ ID NO: 185030 - DNA, 80 bp, synthetic construct; identical to SEQ ID NO: 300
  source 1..80: mol_type = other DNA

SEQ ID NO: 185031 - DNA, 80 bp, synthetic construct; identical to SEQ ID NO: 301
  source 1..80: mol_type = other DNA

SEQ ID NO: 185032 - DNA, 80 bp, synthetic construct; identical to SEQ ID NO: 302
  source 1..80: mol_type = other DNA

SEQ ID NO: 185033 - DNA, 80 bp, synthetic construct; identical to SEQ ID NO: 303
  source 1..80: mol_type = other DNA

SEQ ID NO: 185034 - DNA, 80 bp, synthetic construct; identical to SEQ ID NO: 304
  source 1..80: mol_type = other DNA

SEQ ID NO: 185035 - DNA, 80 bp, synthetic construct; identical to SEQ ID NO: 305
  source 1..80: mol_type = other DNA

SEQ ID NO: 185036 - DNA, 80 bp, synthetic construct; identical to SEQ ID NO: 306
  source 1..80: mol_type = other DNA

SEQ ID NO: 185037 - DNA, 80 bp, synthetic construct; identical to SEQ ID NO: 307
  source 1..80: mol_type = other DNA

SEQ ID NO: 185038 - DNA, 80 bp, synthetic construct; identical to SEQ ID NO: 308
  source 1..80: mol_type = other DNA

SEQ ID NO: 185039 - DNA, 80 bp, synthetic construct; identical to SEQ ID NO: 309
  source 1..80: mol_type = other DNA

SEQ ID NO: 185040 - DNA, 80 bp, synthetic construct; identical to SEQ ID NO: 310
  source 1..80: mol_type = other DNA

SEQ ID NO: 185041 - DNA, 80 bp, synthetic construct; identical to SEQ ID NO: 311
  source 1..80: mol_type = other DNA

SEQ ID NO: 185042 - DNA, 80 bp, synthetic construct; identical to SEQ ID NO: 312
  source 1..80: mol_type = other DNA

SEQ ID NO: 185043 - DNA, 80 bp, synthetic construct; identical to SEQ ID NO: 313
  source 1..80: mol_type = other DNA

SEQ ID NO: 185044 - DNA, 80 bp, synthetic construct; identical to SEQ ID NO: 314
  source 1..80: mol_type = other DNA

SEQ ID NO: 185045 - DNA, 80 bp, synthetic construct; identical to SEQ ID NO: 315
  source 1..80: mol_type = other DNA

SEQ ID NO: 185046 - DNA, 80 bp, synthetic construct; identical to SEQ ID NO: 316
  source 1..80: mol_type = other DNA

SEQ ID NO: 185047 - DNA, 80 bp, synthetic construct; identical to SEQ ID NO: 317
  source 1..80: mol_type = other DNA

SEQ ID NO: 185048 - DNA, 80 bp, synthetic construct; identical to SEQ ID NO: 318
  source 1..80: mol_type = other DNA

SEQ ID NO: 185049 - DNA, 80 bp, synthetic construct; identical to SEQ ID NO: 319
  source 1..80: mol_type = other DNA

SEQ ID NO: 185050 - DNA, 80 bp, synthetic construct; identical to SEQ ID NO: 320
  source 1..80: mol_type = other DNA

SEQ ID NO: 185051 - DNA, 80 bp, synthetic construct; identical to SEQ ID NO: 321
  source 1..80: mol_type = other DNA

SEQ ID NO: 185052 - DNA, 80 bp, synthetic construct; identical to SEQ ID NO: 322
  source 1..80: mol_type = other DNA

SEQ ID NO: 185053 - DNA, 80 bp, synthetic construct; identical to SEQ ID NO: 323
  source 1..80: mol_type = other DNA

SEQ ID NO: 185054 - DNA, 80 bp, synthetic construct; identical to SEQ ID NO: 324
  source 1..80: mol_type = other DNA

SEQ ID NO: 185055 - DNA, 80 bp, synthetic construct; identical to SEQ ID NO: 325
  source 1..80: mol_type = other DNA

SEQ ID NO: 185056 - DNA, 80 bp, synthetic construct; identical to SEQ ID NO: 326
  source 1..80: mol_type = other DNA

SEQ ID NO: 185057 - DNA, 80 bp, synthetic construct; identical to SEQ ID NO: 327
  source 1..80: mol_type = other DNA

SEQ ID NO: 185058 - DNA, 80 bp, synthetic construct; identical to SEQ ID NO: 328
  source 1..80: mol_type = other DNA

SEQ ID NO: 185059 - DNA, 80 bp, synthetic construct; identical to SEQ ID NO: 329
  source 1..80: mol_type = other DNA

SEQ ID NO: 185060 - DNA, 80 bp, synthetic construct; identical to SEQ ID NO: 330
  source 1..80: mol_type = other DNA

SEQ ID NO: 185061 - DNA, 80 bp, synthetic construct; identical to SEQ ID NO: 331
  source 1..80: mol_type = other DNA

SEQ ID NO: 185062 - DNA, 80 bp, synthetic construct; identical to SEQ ID NO: 332
  source 1..80: mol_type = other DNA

SEQ ID NO: 185063 - DNA, 80 bp, synthetic construct; identical to SEQ ID NO: 333
  source 1..80: mol_type = other DNA

SEQ ID NO: 185064 - DNA, 80 bp, synthetic construct; identical to SEQ ID NO: 334
  source 1..80: mol_type = other DNA

SEQ ID NO: 185065 - DNA, 80 bp, synthetic construct; identical to SEQ ID NO: 335
  source 1..80: mol_type = other DNA

SEQ ID NO: 185066 - DNA, 80 bp, synthetic construct; identical to SEQ ID NO: 336
  source 1..80: mol_type = other DNA

SEQ ID NO: 185067 - DNA, 80 bp, synthetic construct; identical to SEQ ID NO: 337
  source 1..80: mol_type = other DNA

SEQ ID NO: 185068 - DNA, 80 bp, synthetic construct; identical to SEQ ID NO: 338
  source 1..80: mol_type = other DNA

SEQ ID NO: 185069 - DNA, 80 bp, synthetic construct; identical to SEQ ID NO: 339
  source 1..80: mol_type = other DNA

SEQ ID NO: 185070 - DNA, 80 bp, synthetic construct; identical to SEQ ID NO: 340
  source 1..80: mol_type = other DNA

SEQ ID NO: 185071 - DNA, 80 bp, synthetic construct; identical to SEQ ID NO: 341
  source 1..80: mol_type = other DNA

SEQ ID NO: 185072 - DNA, 80 bp, synthetic construct; identical to SEQ ID NO: 342
  source 1..80: mol_type = other DNA

SEQ ID NO: 185073 - DNA, 80 bp, synthetic construct; identical to SEQ ID NO: 343
  source 1..80: mol_type = other DNA

SEQ ID NO: 185074 - DNA, 80 bp, synthetic construct; identical to SEQ ID NO: 344
  source 1..80: mol_type = other DNA

SEQ ID NO: 185075 - DNA, 80 bp, synthetic construct; identical to SEQ ID NO: 345
  source 1..80: mol_type = other DNA

SEQ ID NO: 185076 - DNA, 80 bp, synthetic construct; identical to SEQ ID NO: 346
  source 1..80: mol_type = other DNA

SEQ ID NO: 185077 - DNA, 80 bp, synthetic construct; identical to SEQ ID NO: 347
  source 1..80: mol_type = other DNA

SEQ ID NO: 185078 - DNA, 80 bp, synthetic construct; identical to SEQ ID NO: 348
  source 1..80: mol_type = other DNA

SEQ ID NO: 185079 - DNA, 80 bp, synthetic construct; identical to SEQ ID NO: 349
  source 1..80: mol_type = other DNA

SEQ ID NO: 185080 - DNA, 80 bp, synthetic construct; identical to SEQ ID NO: 350
  source 1..80: mol_type = other DNA

SEQ ID NO: 185081 - DNA, 80 bp, synthetic construct; identical to SEQ ID NO: 351
  source 1..80: mol_type = other DNA

SEQ ID NO: 185082 - DNA, 80 bp, synthetic construct; identical to SEQ ID NO: 352
  source 1..80: mol_type = other DNA

SEQ ID NO: 185083 - DNA, 80 bp, synthetic construct; identical to SEQ ID NO: 353
  source 1..80: mol_type = other DNA

SEQ ID NO: 185084 - DNA, 80 bp, synthetic construct; identical to SEQ ID NO: 354
  source 1..80: mol_type = other DNA

SEQ ID NO: 185085 - DNA, 80 bp, synthetic construct; identical to SEQ ID NO: 355
  source 1..80: mol_type = other DNA

SEQ ID NO: 185086 - DNA, 80 bp, synthetic construct; identical to SEQ ID NO: 356
  source 1..80: mol_type = other DNA

SEQ ID NO: 185087 - DNA, 80 bp, synthetic construct; identical to SEQ ID NO: 357
  source 1..80: mol_type = other DNA

SEQ ID NO: 185088 - DNA, 80 bp, synthetic construct; identical to SEQ ID NO: 358
  source 1..80: mol_type = other DNA

SEQ ID NO: 185089 - DNA, 80 bp, synthetic construct; identical to SEQ ID NO: 359
  source 1..80: mol_type = other DNA

SEQ ID NO: 185090 - DNA, 80 bp, synthetic construct; identical to SEQ ID NO: 360
  source 1..80: mol_type = other DNA

SEQ ID NO: 185091 - DNA, 80 bp, synthetic construct; identical to SEQ ID NO: 361
  source 1..80: mol_type = other DNA

SEQ ID NO: 185092 - DNA, 80 bp, synthetic construct; identical to SEQ ID NO: 362
  source 1..80: mol_type = other DNA

SEQ ID NO: 185093 - DNA, 80 bp, synthetic construct; identical to SEQ ID NO: 363
  source 1..80: mol_type = other DNA

SEQ ID NO: 185094 - DNA, 80 bp, synthetic construct; identical to SEQ ID NO: 364
  source 1..80: mol_type = other DNA

SEQ ID NO: 185095 - DNA, 80 bp, synthetic construct; identical to SEQ ID NO: 365
  source 1..80: mol_type = other DNA

SEQ ID NO: 185096 - DNA, 80 bp, synthetic construct; identical to SEQ ID NO: 366
  source 1..80: mol_type = other DNA

SEQ ID NO: 185097 - DNA, 80 bp, synthetic construct; identical to SEQ ID NO: 367
  source 1..80: mol_type = other DNA

SEQ ID NO: 185098 - DNA, 80 bp, synthetic construct; identical to SEQ ID NO: 368
  source 1..80: mol_type = other DNA

SEQ ID NO: 185099 - DNA, 80 bp, synthetic construct; identical to SEQ ID NO: 369
  source 1..80: mol_type = other DNA

SEQ ID NO: 185100 - DNA, 80 bp, synthetic construct; identical to SEQ ID NO: 370
  source 1..80: mol_type = other DNA

SEQ ID NO: 185101 - DNA, 80 bp, synthetic construct; identical to SEQ ID NO: 371
  source 1..80: mol_type = other DNA

SEQ ID NO: 185102 - DNA, 80 bp, synthetic construct; identical to SEQ ID NO: 372
  source 1..80: mol_type = other DNA

SEQ ID NO: 185103 - DNA, 80 bp, synthetic construct; identical to SEQ ID NO: 373
  source 1..80: mol_type = other DNA

SEQ ID NO: 185104 - DNA, 80 bp, synthetic construct; identical to SEQ ID NO: 374
  source 1..80: mol_type = other DNA

SEQ ID NO: 185105 - DNA, 80 bp, synthetic construct; identical to SEQ ID NO: 375
  source 1..80: mol_type = other DNA

SEQ ID NO: 185106 - DNA, 80 bp, synthetic construct; identical to SEQ ID NO: 376
  source 1..80: mol_type = other DNA

SEQ ID NO: 185107 - DNA, 80 bp, synthetic construct; identical to SEQ ID NO: 377
  source 1..80: mol_type = other DNA

SEQ ID NO: 185108 - DNA, 80 bp, synthetic construct; identical to SEQ ID NO: 378
  source 1..80: mol_type = other DNA

SEQ ID NO: 185109 - DNA, 80 bp, synthetic construct; identical to SEQ ID NO: 379
  source 1..80: mol_type = other DNA

SEQ ID NO: 185110 - DNA, 80 bp, synthetic construct; identical to SEQ ID NO: 380
  source 1..80: mol_type = other DNA

SEQ ID NO: 185111 - DNA, 80 bp, synthetic construct; identical to SEQ ID NO: 381
  source 1..80: mol_type = other DNA

SEQ ID NO: 185112 - DNA, 80 bp, synthetic construct; identical to SEQ ID NO: 382
  source 1..80: mol_type = other DNA

SEQ ID NO: 185113 - DNA, 80 bp, synthetic construct; identical to SEQ ID NO: 383
  source 1..80: mol_type = other DNA

SEQ ID NO: 185114 - DNA, 80 bp, synthetic construct; identical to SEQ ID NO: 384
  source 1..80: mol_type = other DNA

SEQ ID NO: 185115 - DNA, 80 bp, synthetic construct; identical to SEQ ID NO: 385
  source 1..80: mol_type = other DNA

SEQ ID NO: 185116 - DNA, 80 bp, synthetic construct; identical to SEQ ID NO: 386
  source 1..80: mol_type = other DNA

SEQ ID NO: 185117 - DNA, 80 bp, synthetic construct; identical to SEQ ID NO: 387
  source 1..80: mol_type = other DNA

SEQ ID NO: 185118 - DNA, 80 bp, synthetic construct; identical to SEQ ID NO: 388
  source 1..80: mol_type = other DNA

SEQ ID NO: 185119 - DNA, 80 bp, synthetic construct; identical to SEQ ID NO: 389
  source 1..80: mol_type = other DNA

SEQ ID NO: 185120 - DNA, 80 bp, synthetic construct; identical to SEQ ID NO: 390
  source 1..80: mol_type = other DNA

SEQ ID NO: 185121 - DNA, 80 bp, synthetic construct; identical to SEQ ID NO: 391
  source 1..80: mol_type = other DNA

SEQ ID NO: 185122 - DNA, 80 bp, synthetic construct; identical to SEQ ID NO: 392
  source 1..80: mol_type = other DNA

SEQ ID NO: 185123 - DNA, 80 bp, synthetic construct; identical to SEQ ID NO: 393
  source 1..80: mol_type = other DNA

SEQ ID NO: 185124 - DNA, 80 bp, synthetic construct; identical to SEQ ID NO: 394
  source 1..80: mol_type = other DNA

SEQ ID NO: 185125 - DNA, 80 bp, synthetic construct; identical to SEQ ID NO: 395
  source 1..80: mol_type = other DNA

SEQ ID NO: 185126 - DNA, 80 bp, synthetic construct; identical to SEQ ID NO: 396
  source 1..80: mol_type = other DNA

SEQ ID NO: 185127 - DNA, 80 bp, synthetic construct; identical to SEQ ID NO: 397
  source 1..80: mol_type = other DNA

SEQ ID NO: 185128 - DNA, 80 bp, synthetic construct; identical to SEQ ID NO: 398
  source 1..80: mol_type = other DNA

SEQ ID NO: 185129 - DNA, 80 bp, synthetic construct; identical to SEQ ID NO: 399
  source 1..80: mol_type = other DNA

SEQ ID NO: 185130 - DNA, 80 bp, synthetic construct; identical to SEQ ID NO: 400
  source 1..80: mol_type = other DNA

SEQ ID NO: 185131 - DNA, 80 bp, synthetic construct; identical to SEQ ID NO: 401
  source 1..80: mol_type = other DNA

SEQ ID NO: 185132 - DNA, 80 bp, synthetic construct; identical to SEQ ID NO: 402
  source 1..80: mol_type = other DNA

SEQ ID NO: 185133 - DNA, 80 bp, synthetic construct; identical to SEQ ID NO: 403
  source 1..80: mol_type = other DNA

SEQ ID NO: 185134 - DNA, 80 bp, synthetic construct; identical to SEQ ID NO: 404
  source 1..80: mol_type = other DNA

SEQ ID NO: 185135 - DNA, 80 bp, synthetic construct; identical to SEQ ID NO: 405
  source 1..80: mol_type = other DNA

SEQ ID NO: 185136 - DNA, 80 bp, synthetic construct; identical to SEQ ID NO: 406
  source 1..80: mol_type = other DNA

SEQ ID NO: 185137 - DNA, 80 bp, synthetic construct; identical to SEQ ID NO: 407
  source 1..80: mol_type = other DNA

SEQ ID NO: 185138 - DNA, 80 bp, synthetic construct; identical to SEQ ID NO: 408
  source 1..80: mol_type = other DNA

SEQ ID NO: 185139 - DNA, 80 bp, synthetic construct; identical to SEQ ID NO: 409
  source 1..80: mol_type = other DNA

SEQ ID NO: 185140 - DNA, 80 bp, synthetic construct; identical to SEQ ID NO: 410
  source 1..80: mol_type = other DNA

SEQ ID NO: 185141 - DNA, 80 bp, synthetic construct; identical to SEQ ID NO: 411
  source 1..80: mol_type = other DNA

SEQ ID NO: 185142 - DNA, 80 bp, synthetic construct; identical to SEQ ID NO: 412
  source 1..80: mol_type = other DNA

SEQ ID NO: 185143 - DNA, 80 bp, synthetic construct; identical to SEQ ID NO: 413
  source 1..80: mol_type = other DNA

SEQ ID NO: 185144 - DNA, 80 bp, synthetic construct; identical to SEQ ID NO: 414
  source 1..80: mol_type = other DNA

SEQ ID NO: 185145 - DNA, 80 bp, synthetic construct; identical to SEQ ID NO: 415
  source 1..80: mol_type = other DNA

SEQ ID NO: 185146 - DNA, 80 bp, synthetic construct; identical to SEQ ID NO: 416
  source 1..80: mol_type = other DNA

SEQ ID NO: 185147 - DNA, 80 bp, synthetic construct; identical to SEQ ID NO: 417
  source 1..80: mol_type = other DNA

SEQ ID NO: 185148 - DNA, 80 bp, synthetic construct; identical to SEQ ID NO: 418
  source 1..80: mol_type = other DNA

SEQ ID NO: 185149 - DNA, 80 bp, synthetic construct; identical to SEQ ID NO: 419
  source 1..80: mol_type = other DNA

SEQ ID NO: 185150 - DNA, 80 bp, synthetic construct; identical to SEQ ID NO: 420
  source 1..80: mol_type = other DNA

SEQ ID NO: 185151 - DNA, 80 bp, synthetic construct; identical to SEQ ID NO: 421
  source 1..80: mol_type = other DNA

SEQ ID NO: 185152 - DNA, 80 bp, synthetic construct; identical to SEQ ID NO: 422
  source 1..80: mol_type = other DNA

SEQ ID NO: 185153 - DNA, 80 bp, synthetic construct; identical to SEQ ID NO: 423
  source 1..80: mol_type = other DNA

SEQ ID NO: 185154 - DNA, 80 bp, synthetic construct; identical to SEQ ID NO: 424
  source 1..80: mol_type = other DNA

SEQ ID NO: 185155 - DNA, 80 bp, synthetic construct; identical to SEQ ID NO: 425
  source 1..80: mol_type = other DNA

SEQ ID NO: 185156 - DNA, 80 bp, synthetic construct; identical to SEQ ID NO: 426
  source 1..80: mol_type = other DNA

SEQ ID NO: 185157 - DNA, 80 bp, synthetic construct; identical to SEQ ID NO: 427
  source 1..80: mol_type = other DNA

SEQ ID NO: 185158 - DNA, 80 bp, synthetic construct; identical to SEQ ID NO: 428
  source 1..80: mol_type = other DNA

SEQ ID NO: 185159 - DNA, 80 bp, synthetic construct; identical to SEQ ID NO: 429
  source 1..80: mol_type = other DNA

SEQ ID NO: 185160 - DNA, 80 bp, synthetic construct; identical to SEQ ID NO: 430
  source 1..80: mol_type = other DNA

SEQ ID NO: 185161 - DNA, 80 bp, synthetic construct; identical to SEQ ID NO: 431
  source 1..80: mol_type = other DNA

SEQ ID NO: 185162 - DNA, 80 bp, synthetic construct; identical to SEQ ID NO: 432
  source 1..80: mol_type = other DNA

SEQ ID NO: 185163 - DNA, 80 bp, synthetic construct; identical to SEQ ID NO: 433
  source 1..80: mol_type = other DNA

SEQ ID NO: 185164 - DNA, 80 bp, synthetic construct; identical to SEQ ID NO: 434
  source 1..80: mol_type = other DNA

SEQ ID NO: 185165 - DNA, 80 bp, synthetic construct; identical to SEQ ID NO: 435
  source 1..80: mol_type = other DNA

SEQ ID NO: 185166 - DNA, 80 bp, synthetic construct; identical to SEQ ID NO: 436
  source 1..80: mol_type = other DNA

SEQ ID NO: 185167 - DNA, 80 bp, synthetic construct; identical to SEQ ID NO: 437
  source 1..80: mol_type = other DNA

SEQ ID NO: 185168 - DNA, 80 bp, synthetic construct; identical to SEQ ID NO: 438
  source 1..80: mol_type = other DNA

SEQ ID NO: 185169 - DNA, 80 bp, synthetic construct; identical to SEQ ID NO: 439
  source 1..80: mol_type = other DNA

SEQ ID NO: 185170 - DNA, 80 bp, synthetic construct; identical to SEQ ID NO: 440
  source 1..80: mol_type = other DNA

SEQ ID NO: 185171 - DNA, 80 bp, synthetic construct; identical to SEQ ID NO: 441
  source 1..80: mol_type = other DNA

SEQ ID NO: 185172 - DNA, 80 bp, synthetic construct; identical to SEQ ID NO: 442
  source 1..80: mol_type = other DNA

SEQ ID NO: 185173 - DNA, 80 bp, synthetic construct; identical to SEQ ID NO: 443
  source 1..80: mol_type = other DNA

SEQ ID NO: 185174 - DNA, 80 bp, synthetic construct; identical to SEQ ID NO: 444
  source 1..80: mol_type = other DNA

SEQ ID NO: 185175 - DNA, 80 bp, synthetic construct; identical to SEQ ID NO: 445
  source 1..80: mol_type = other DNA

SEQ ID NO: 185176 - DNA, 80 bp, synthetic construct; identical to SEQ ID NO: 446
  source 1..80: mol_type = other DNA

SEQ ID NO: 185177 - DNA, 80 bp, synthetic construct; identical to SEQ ID NO: 447
  source 1..80: mol_type = other DNA

SEQ ID NO: 185178 - DNA, 80 bp, synthetic construct; identical to SEQ ID NO: 448
  source 1..80: mol_type = other DNA

SEQ ID NO: 185179 - DNA, 80 bp, synthetic construct; identical to SEQ ID NO: 449
  source 1..80: mol_type = other DNA

SEQ ID NO: 185180 - DNA, 80 bp, synthetic construct; identical to SEQ ID NO: 450
  source 1..80: mol_type = other DNA

SEQ ID NO: 185181 - DNA, 80 bp, synthetic construct; identical to SEQ ID NO: 451
  source 1..80: mol_type = other DNA

SEQ ID NO: 185182 - DNA, 80 bp, synthetic construct; identical to SEQ ID NO: 452
  source 1..80: mol_type = other DNA

SEQ ID NO: 185183 - DNA, 80 bp, synthetic construct; identical to SEQ ID NO: 453
  source 1..80: mol_type = other DNA

SEQ ID NO: 185184 - DNA, 80 bp, synthetic construct; identical to SEQ ID NO: 454
  source 1..80: mol_type = other DNA

SEQ ID NO: 185185 - DNA, 80 bp, synthetic construct; identical to SEQ ID NO: 455
  source 1..80: mol_type = other DNA

SEQ ID NO: 185186 - DNA, 80 bp, synthetic construct; identical to SEQ ID NO: 456
  source 1..80: mol_type = other DNA

SEQ ID NO: 185187 - DNA, 80 bp, synthetic construct; identical to SEQ ID NO: 457
  source 1..80: mol_type = other DNA

SEQ ID NO: 185188 - DNA, 80 bp, synthetic construct; identical to SEQ ID NO: 458
  source 1..80: mol_type = other DNA

SEQ ID NO: 185189 - DNA, 80 bp, synthetic construct; identical to SEQ ID NO: 459
  source 1..80: mol_type = other DNA

SEQ ID NO: 185190 - DNA, 80 bp, synthetic construct; identical to SEQ ID NO: 460
  source 1..80: mol_type = other DNA

SEQ ID NO: 185191 - DNA, 80 bp, synthetic construct; identical to SEQ ID NO: 461
  source 1..80: mol_type = other DNA

SEQ ID NO: 185192 - DNA, 80 bp, synthetic construct; identical to SEQ ID NO: 462
  source 1..80: mol_type = other DNA

SEQ ID NO: 185193 - DNA, 80 bp, synthetic construct; identical to SEQ ID NO: 463
  source 1..80: mol_type = other DNA

SEQ ID NO: 185194 - DNA, 80 bp, synthetic construct; identical to SEQ ID NO: 464
  source 1..80: mol_type = other DNA

SEQ ID NO: 185195 - DNA, 80 bp, synthetic construct; identical to SEQ ID NO: 465
  source 1..80: mol_type = other DNA

SEQ ID NO: 185196 - DNA, 80 bp, synthetic construct; identical to SEQ ID NO: 466
  source 1..80: mol_type = other DNA

SEQ ID NO: 185197 - DNA, 80 bp, synthetic construct; identical to SEQ ID NO: 467
  source 1..80: mol_type = other DNA

SEQ ID NO: 185198 - DNA, 80 bp, synthetic construct; identical to SEQ ID NO: 468
  source 1..80: mol_type = other DNA

SEQ ID NO: 185199 - DNA, 80 bp, synthetic construct; identical to SEQ ID NO: 469
  source 1..80: mol_type = other DNA

SEQ ID NO: 185200 - DNA, 80 bp, synthetic construct; identical to SEQ ID NO: 470
  source 1..80: mol_type = other DNA

SEQ ID NO: 185201 - DNA, 80 bp, synthetic construct; identical to SEQ ID NO: 471
  source 1..80: mol_type = other DNA

SEQ ID NO: 185202 - DNA, 80 bp, synthetic construct; identical to SEQ ID NO: 472
  source 1..80: mol_type = other DNA

SEQ ID NO: 185203 - DNA, 80 bp, synthetic construct; identical to SEQ ID NO: 473
  source 1..80: mol_type = other DNA

SEQ ID NO: 185204 - DNA, 80 bp, synthetic construct; identical to SEQ ID NO: 474
  source 1..80: mol_type = other DNA

SEQ ID NO: 185205 - DNA, 80 bp, synthetic construct; identical to SEQ ID NO: 475
  source 1..80: mol_type = other DNA

SEQ ID NO: 185206 - DNA, 80 bp, synthetic construct; identical to SEQ ID NO: 476
  source 1..80: mol_type = other DNA

SEQ ID NO: 185207 - DNA, 80 bp, synthetic construct; identical to SEQ ID NO: 477
  source 1..80: mol_type = other DNA

SEQ ID NO: 185208 - DNA, 80 bp, synthetic construct; identical to SEQ ID NO: 478
  source 1..80: mol_type = other DNA

SEQ ID NO: 185209 - DNA, 80 bp, synthetic construct; identical to SEQ ID NO: 479
  source 1..80: mol_type = other DNA

SEQ ID NO: 185210 - DNA, 80 bp, synthetic construct; identical to SEQ ID NO: 480
  source 1..80: mol_type = other DNA

SEQ ID NO: 185211 - DNA, 80 bp, synthetic construct; identical to SEQ ID NO: 481
  source 1..80: mol_type = other DNA

SEQ ID NO: 185212 - DNA, 80 bp, synthetic construct; identical to SEQ ID NO: 482
  source 1..80: mol_type = other DNA

SEQ ID NO: 185213 - DNA, 80 bp, synthetic construct; identical to SEQ ID NO: 483
  source 1..80: mol_type = other DNA

SEQ ID NO: 185214 - DNA, 80 bp, synthetic construct; identical to SEQ ID NO: 484
  source 1..80: mol_type = other DNA

SEQ ID NO: 185215 - DNA, 80 bp, synthetic construct; identical to SEQ ID NO: 485
  source 1..80: mol_type = other DNA

SEQ ID NO: 185216 - DNA, 80 bp, synthetic construct; identical to SEQ ID NO: 486
  source 1..80: mol_type = other DNA

SEQ ID NO: 185217 - DNA, 80 bp, synthetic construct; identical to SEQ ID NO: 487
  source 1..80: mol_type = other DNA

SEQ ID NO: 185218 - DNA, 80 bp, synthetic construct; identical to SEQ ID NO: 488
  source 1..80: mol_type = other DNA

SEQ ID NO: 185219 - DNA, 80 bp, synthetic construct; identical to SEQ ID NO: 489
  source 1..80: mol_type = other DNA

SEQ ID NO: 185220 - DNA, 80 bp, synthetic construct; identical to SEQ ID NO: 490
  source 1..80: mol_type = other DNA

SEQ ID NO: 185221 - DNA, 80 bp, synthetic construct; identical to SEQ ID NO: 491
  source 1..80: mol_type = other DNA

SEQ ID NO: 185222 - DNA, 80 bp, synthetic construct; identical to SEQ ID NO: 492
  source 1..80: mol_type = other DNA

SEQ ID NO: 185223 - DNA, 80 bp, synthetic construct; identical to SEQ ID NO: 493
  source 1..80: mol_type = other DNA

SEQ ID NO: 185224 - DNA, 80 bp, synthetic construct; identical to SEQ ID NO: 494
  source 1..80: mol_type = other DNA

SEQ ID NO: 185225 - DNA, 80 bp, synthetic construct; identical to SEQ ID NO: 495
  source 1..80: mol_type = other DNA

SEQ ID NO: 185226 - DNA, 80 bp, synthetic construct; identical to SEQ ID NO: 496
  source 1..80: mol_type = other DNA

SEQ ID NO: 185227 - DNA, 80 bp, synthetic construct; identical to SEQ ID NO: 497
  source 1..80: mol_type = other DNA

SEQ ID NO: 185228 - DNA, 80 bp, synthetic construct; identical to SEQ ID NO: 498
  source 1..80: mol_type = other DNA

SEQ ID NO: 185229 - DNA, 80 bp, synthetic construct; identical to SEQ ID NO: 499
  source 1..80: mol_type = other DNA

SEQ ID NO: 185230 - DNA, 80 bp, synthetic construct; identical to SEQ ID NO: 500
  source 1..80: mol_type = other DNA

SEQ ID NO: 185231 - DNA, 80 bp, synthetic construct; identical to SEQ ID NO: 501
  source 1..80: mol_type = other DNA

SEQ ID NO: 185232 - DNA, 80 bp, synthetic construct; identical to SEQ ID NO: 502
  source 1..80: mol_type = other DNA

SEQ ID NO: 185233 - DNA, 80 bp, synthetic construct; identical to SEQ ID NO: 503
  source 1..80: mol_type = other DNA

SEQ ID NO: 185234 - DNA, 80 bp, synthetic construct; identical to SEQ ID NO: 504
  source 1..80: mol_type = other DNA

SEQ ID NO: 185235 - DNA, 80 bp, synthetic construct; identical to SEQ ID NO: 505
  source 1..80: mol_type = other DNA

SEQ ID NO: 185236 - DNA, 80 bp, synthetic construct; identical to SEQ ID NO: 506
  source 1..80: mol_type = other DNA

SEQ ID NO: 185237 - DNA, 80 bp, synthetic construct; identical to SEQ ID NO: 507
  source 1..80: mol_type = other DNA

SEQ ID NO: 185238 - DNA, 80 bp, synthetic construct; identical to SEQ ID NO: 508
  source 1..80: mol_type = other DNA

SEQ ID NO: 185239 - DNA, 80 bp, synthetic construct; identical to SEQ ID NO: 509
  source 1..80: mol_type = other DNA

SEQ ID NO: 185240 - DNA, 80 bp, synthetic construct; identical to SEQ ID NO: 510
  source 1..80: mol_type = other DNA

SEQ ID NO: 185241 - DNA, 80 bp, synthetic construct; identical to SEQ ID NO: 511
  source 1..80: mol_type = other DNA

SEQ ID NO: 185242 - DNA, 80 bp, synthetic construct; identical to SEQ ID NO: 512
  source 1..80: mol_type = other DNA

SEQ ID NO: 185243 - DNA, 80 bp, synthetic construct; identical to SEQ ID NO: 513
  source 1..80: mol_type = other DNA

SEQ ID NO: 185244 - DNA, 80 bp, synthetic construct; identical to SEQ ID NO: 514
  source 1..80: mol_type = other DNA

SEQ ID NO: 185245 - DNA, 80 bp, synthetic construct; identical to SEQ ID NO: 515
  source 1..80: mol_type = other DNA

SEQ ID NO: 185246 - DNA, 80 bp, synthetic construct; identical to SEQ ID NO: 516
  source 1..80: mol_type = other DNA

SEQ ID NO: 185247 - DNA, 80 bp, synthetic construct; identical to SEQ ID NO: 517
  source 1..80: mol_type = other DNA

SEQ ID NO: 185248 - DNA, 80 bp, synthetic construct; identical to SEQ ID NO: 518
  source 1..80: mol_type = other DNA

SEQ ID NO: 185249 - DNA, 80 bp, synthetic construct; identical to SEQ ID NO: 519
  source 1..80: mol_type = other DNA

SEQ ID NO: 185250 - DNA, 80 bp, synthetic construct; identical to SEQ ID NO: 520
  source 1..80: mol_type = other DNA

SEQ ID NO: 185251 - DNA, 80 bp, synthetic construct; identical to SEQ ID NO: 521
  source 1..80: mol_type = other DNA

SEQ ID NO: 185252 - DNA, 80 bp, synthetic construct; identical to SEQ ID NO: 522
  source 1..80: mol_type = other DNA

SEQ ID NO: 185253 - DNA, 80 bp, synthetic construct; identical to SEQ ID NO: 523
  source 1..80: mol_type = other DNA

SEQ ID NO: 185254 - DNA, 80 bp, synthetic construct; identical to SEQ ID NO: 524
  source 1..80: mol_type = other DNA

SEQ ID NO: 185255 - DNA, 80 bp, synthetic construct; identical to SEQ ID NO: 525
  source 1..80: mol_type = other DNA

SEQ ID NO: 185256 - DNA, 80 bp, synthetic construct; identical to SEQ ID NO: 526
  source 1..80: mol_type = other DNA

SEQ ID NO: 185257 - DNA, 80 bp, synthetic construct; identical to SEQ ID NO: 527
  source 1..80: mol_type = other DNA

SEQ ID NO: 185258 - DNA, 80 bp, synthetic construct; identical to SEQ ID NO: 528
  source 1..80: mol_type = other DNA

SEQ ID NO: 185259 - DNA, 80 bp, synthetic construct; identical to SEQ ID NO: 529
  source 1..80: mol_type = other DNA

SEQ ID NO: 185260 - DNA, 80 bp, synthetic construct; identical to SEQ ID NO: 530
  source 1..80: mol_type = other DNA

SEQ ID NO: 185261 - DNA, 80 bp, synthetic construct; identical to SEQ ID NO: 531
  source 1..80: mol_type = other DNA

SEQ ID NO: 185262 - DNA, 80 bp, synthetic construct; identical to SEQ ID NO: 532
  source 1..80: mol_type = other DNA

SEQ ID NO: 185263 - DNA, 80 bp, synthetic construct; identical to SEQ ID NO: 533
  source 1..80: mol_type = other DNA

SEQ ID NO: 185264 - DNA, 80 bp, synthetic construct; identical to SEQ ID NO: 534
  source 1..80: mol_type = other DNA

SEQ ID NO: 185265 - DNA, 80 bp, synthetic construct; identical to SEQ ID NO: 535
  source 1..80: mol_type = other DNA

SEQ ID NO: 185266 - DNA, 80 bp, synthetic construct; identical to SEQ ID NO: 536
  source 1..80: mol_type = other DNA

SEQ ID NO: 185267 - DNA, 80 bp, synthetic construct; identical to SEQ ID NO: 537
  source 1..80: mol_type = other DNA

SEQ ID NO: 185268 - DNA, 80 bp, synthetic construct; identical to SEQ ID NO: 538
  source 1..80: mol_type = other DNA

SEQ ID NO: 185269 - DNA, 80 bp, synthetic construct; identical to SEQ ID NO: 539
  source 1..80: mol_type = other DNA

SEQ ID NO: 185270 - DNA, 80 bp, synthetic construct; identical to SEQ ID NO: 540
  source 1..80: mol_type = other DNA

SEQ ID NO: 185271 - DNA, 80 bp, synthetic construct; identical to SEQ ID NO: 541
  source 1..80: mol_type = other DNA

SEQ ID NO: 185272 - DNA, 80 bp, synthetic construct; identical to SEQ ID NO: 542
  source 1..80: mol_type = other DNA

SEQ ID NO: 185273 - DNA, 80 bp, synthetic construct; identical to SEQ ID NO: 543
  source 1..80: mol_type = other DNA

SEQ ID NO: 185274 - DNA, 80 bp, synthetic construct; identical to SEQ ID NO: 544
  source 1..80: mol_type = other DNA

SEQ ID NO: 185275 - DNA, 80 bp, synthetic construct; identical to SEQ ID NO: 545
  source 1..80: mol_type = other DNA

SEQ ID NO: 185276 - DNA, 80 bp, synthetic construct; identical to SEQ ID NO: 546
  source 1..80: mol_type = other DNA

SEQ ID NO: 185277 - DNA, 80 bp, synthetic construct; identical to SEQ ID NO: 547
  source 1..80: mol_type = other DNA

SEQ ID NO: 185278 - DNA, 80 bp, synthetic construct; identical to SEQ ID NO: 548
  source 1..80: mol_type = other DNA

SEQ ID NO: 185279 - DNA, 80 bp, synthetic construct; identical to SEQ ID NO: 549
  source 1..80: mol_type = other DNA

SEQ ID NO: 185280 - DNA, 80 bp, synthetic construct; identical to SEQ ID NO: 550
  source 1..80: mol_type = other DNA

SEQ ID NO: 185281 - DNA, 80 bp, synthetic construct; identical to SEQ ID NO: 551
  source 1..80: mol_type = other DNA

SEQ ID NO: 185282 - DNA, 80 bp, synthetic construct; identical to SEQ ID NO: 552
  source 1..80: mol_type = other DNA

SEQ ID NO: 185283 - DNA, 80 bp, synthetic construct; identical to SEQ ID NO: 553
  source 1..80: mol_type = other DNA

SEQ ID NO: 185284 - DNA, 80 bp, synthetic construct; identical to SEQ ID NO: 554
  source 1..80: mol_type = other DNA

SEQ ID NO: 185285 - DNA, 80 bp, synthetic construct; identical to SEQ ID NO: 555
  source 1..80: mol_type = other DNA

SEQ ID NO: 185286 - DNA, 80 bp, synthetic construct; identical to SEQ ID NO: 556
  source 1..80: mol_type = other DNA

SEQ ID NO: 185287 - DNA, 80 bp, synthetic construct; identical to SEQ ID NO: 557
  source 1..80: mol_type = other DNA

SEQ ID NO: 185288 - DNA, 80 bp, synthetic construct; identical to SEQ ID NO: 558
  source 1..80: mol_type = other DNA

SEQ ID NO: 185289 - DNA, 80 bp, synthetic construct; identical to SEQ ID NO: 559
  source 1..80: mol_type = other DNA

SEQ ID NO: 185290 - DNA, 80 bp, synthetic construct; identical to SEQ ID NO: 560
  source 1..80: mol_type = other DNA

SEQ ID NO: 185291 - DNA, 80 bp, synthetic construct; identical to SEQ ID NO: 561
  source 1..80: mol_type = other DNA

SEQ ID NO: 185292 - DNA, 80 bp, synthetic construct; identical to SEQ ID NO: 562
  source 1..80: mol_type = other DNA

SEQ ID NO: 185293 - DNA, 80 bp, synthetic construct; identical to SEQ ID NO: 563
  source 1..80: mol_type = other DNA

SEQ ID NO: 185294 - DNA, 80 bp, synthetic construct; identical to SEQ ID NO: 564
  source 1..80: mol_type = other DNA

SEQ ID NO: 185295 - DNA, 80 bp, synthetic construct; identical to SEQ ID NO: 565
  source 1..80: mol_type = other DNA

SEQ ID NO: 185296 - DNA, 80 bp, synthetic construct; identical to SEQ ID NO: 566
  source 1..80: mol_type = other DNA

SEQ ID NO: 185297 - DNA, 80 bp, synthetic construct; identical to SEQ ID NO: 567
  source 1..80: mol_type = other DNA

SEQ ID NO: 185298 - DNA, 80 bp, synthetic construct; identical to SEQ ID NO: 568
  source 1..80: mol_type = other DNA

SEQ ID NO: 185299 - DNA, 80 bp, synthetic construct; identical to SEQ ID NO: 569
  source 1..80: mol_type = other DNA

SEQ ID NO: 185300 - DNA, 80 bp, synthetic construct; identical to SEQ ID NO: 570
  source 1..80: mol_type = other DNA

SEQ ID NO: 185301 - DNA, 80 bp, synthetic construct; identical to SEQ ID NO: 571
  source 1..80: mol_type = other DNA

SEQ ID NO: 185302 - DNA, 80 bp, synthetic construct; identical to SEQ ID NO: 572
  source 1..80: mol_type = other DNA

SEQ ID NO: 185303 - DNA, 80 bp, synthetic construct; identical to SEQ ID NO: 573
  source 1..80: mol_type = other DNA

SEQ ID NO: 185304 - DNA, 80 bp, synthetic construct; identical to SEQ ID NO: 574
  source 1..80: mol_type = other DNA

SEQ ID NO: 185305 - DNA, 80 bp, synthetic construct; identical to SEQ ID NO: 575
  source 1..80: mol_type = other DNA

SEQ ID NO: 185306 - DNA, 80 bp, synthetic construct; identical to SEQ ID NO: 576
  source 1..80: mol_type = other DNA

SEQ ID NO: 185307 - DNA, 80 bp, synthetic construct; identical to SEQ ID NO: 577
  source 1..80: mol_type = other DNA

SEQ ID NO: 185308 - DNA, 80 bp, synthetic construct; identical to SEQ ID NO: 578
  source 1..80: mol_type = other DNA

SEQ ID NO: 185309 - DNA, 80 bp, synthetic construct; identical to SEQ ID NO: 579
  source 1..80: mol_type = other DNA

SEQ ID NO: 185310 - DNA, 80 bp, synthetic construct; identical to SEQ ID NO: 580
  source 1..80: mol_type = other DNA

SEQ ID NO: 185311 - DNA, 80 bp, synthetic construct; identical to SEQ ID NO: 581
  source 1..80: mol_type = other DNA

SEQ ID NO: 185312 - DNA, 80 bp, synthetic construct; identical to SEQ ID NO: 582
  source 1..80: mol_type = other DNA

SEQ ID NO: 185313 - DNA, 80 bp, synthetic construct; identical to SEQ ID NO: 583
  source 1..80: mol_type = other DNA

SEQ ID NO: 185314 - DNA, 80 bp, synthetic construct; identical to SEQ ID NO: 584
  source 1..80: mol_type = other DNA

SEQ ID NO: 185315 - DNA, 80 bp, synthetic construct; identical to SEQ ID NO: 585
  source 1..80: mol_type = other DNA

SEQ ID NO: 185316 - DNA, 80 bp, synthetic construct; identical to SEQ ID NO: 586
  source 1..80: mol_type = other DNA

SEQ ID NO: 185317 - DNA, 80 bp, synthetic construct; identical to SEQ ID NO: 587
  source 1..80: mol_type = other DNA

SEQ ID NO: 185318 - DNA, 80 bp, synthetic construct; identical to SEQ ID NO: 588
  source 1..80: mol_type = other DNA

SEQ ID NO: 185319 - DNA, 80 bp, synthetic construct; identical to SEQ ID NO: 589
  source 1..80: mol_type = other DNA

SEQ ID NO: 185320 - DNA, 80 bp, synthetic construct; identical to SEQ ID NO: 590
  source 1..80: mol_type = other DNA

SEQ ID NO: 185321 - DNA, 80 bp, synthetic construct; identical to SEQ ID NO: 591
  source 1..80: mol_type = other DNA

SEQ ID NO: 185322 - DNA, 80 bp, synthetic construct; identical to SEQ ID NO: 592
  source 1..80: mol_type = other DNA

SEQ ID NO: 185323 - DNA, 80 bp, synthetic construct; identical to SEQ ID NO: 593
  source 1..80: mol_type = other DNA

SEQ ID NO: 185324 - DNA, 80 bp, synthetic construct; identical to SEQ ID NO: 594
  source 1..80: mol_type = other DNA

SEQ ID NO: 185325 - DNA, 80 bp, synthetic construct; identical to SEQ ID NO: 595
  source 1..80: mol_type = other DNA

SEQ ID NO: 185326 - DNA, 80 bp, synthetic construct; identical to SEQ ID NO: 596
  source 1..80: mol_type = other DNA

SEQ ID NO: 185327 - DNA, 80 bp, synthetic construct; identical to SEQ ID NO: 597
  source 1..80: mol_type = other DNA

SEQ ID NO: 185328 - DNA, 80 bp, synthetic construct; identical to SEQ ID NO: 598
  source 1..80: mol_type = other DNA

SEQ ID NO: 185329 - DNA, 80 bp, synthetic construct; identical to SEQ ID NO: 599
  source 1..80: mol_type = other DNA

SEQ ID NO: 185330 - DNA, 80 bp, synthetic construct; identical to SEQ ID NO: 600
  source 1..80: mol_type = other DNA

SEQ ID NO: 185331 - DNA, 80 bp, synthetic construct; identical to SEQ ID NO: 601
  source 1..80: mol_type = other DNA

SEQ ID NO: 185332 - DNA, 80 bp, synthetic construct; identical to SEQ ID NO: 602
  source 1..80: mol_type = other DNA

SEQ ID NO: 185333 - DNA, 80 bp, synthetic construct; identical to SEQ ID NO: 603
  source 1..80: mol_type = other DNA

SEQ ID NO: 185334 - DNA, 80 bp, synthetic construct; identical to SEQ ID NO: 604
  source 1..80: mol_type = other DNA

SEQ ID NO: 185335 - DNA, 80 bp, synthetic construct; identical to SEQ ID NO: 605
  source 1..80: mol_type = other DNA

SEQ ID NO: 185336 - DNA, 80 bp, synthetic construct; identical to SEQ ID NO: 606
  source 1..80: mol_type = other DNA

SEQ ID NO: 185337 - DNA, 80 bp, synthetic construct; identical to SEQ ID NO: 607
  source 1..80: mol_type = other DNA

SEQ ID NO: 185338 - DNA, 80 bp, synthetic construct; identical to SEQ ID NO: 608
  source 1..80: mol_type = other DNA

SEQ ID NO: 185339 - DNA, 80 bp, synthetic construct; identical to SEQ ID NO: 609
  source 1..80: mol_type = other DNA

SEQ ID NO: 185340 - DNA, 80 bp, synthetic construct; identical to SEQ ID NO: 610
  source 1..80: mol_type = other DNA

SEQ ID NO: 185341 - DNA, 80 bp, synthetic construct; identical to SEQ ID NO: 611
  source 1..80: mol_type = other DNA

SEQ ID NO: 185342 - DNA, 80 bp, synthetic construct; identical to SEQ ID NO: 612
  source 1..80: mol_type = other DNA

SEQ ID NO: 185343 - DNA, 80 bp, synthetic construct; identical to SEQ ID NO: 613
  source 1..80: mol_type = other DNA

SEQ ID NO: 185344 - DNA, 80 bp, synthetic construct; identical to SEQ ID NO: 614
  source 1..80: mol_type = other DNA

SEQ ID NO: 185345 - DNA, 80 bp, synthetic construct; identical to SEQ ID NO: 615
  source 1..80: mol_type = other DNA

SEQ ID NO: 185346 - DNA, 80 bp, synthetic construct; identical to SEQ ID NO: 616
  source 1..80: mol_type = other DNA

SEQ ID NO: 185347 - DNA, 80 bp, synthetic construct; identical to SEQ ID NO: 617
  source 1..80: mol_type = other DNA

SEQ ID NO: 185348 - DNA, 80 bp, synthetic construct; identical to SEQ ID NO: 618
  source 1..80: mol_type = other DNA

SEQ ID NO: 185349 - DNA, 80 bp, synthetic construct; identical to SEQ ID NO: 619
  source 1..80: mol_type = other DNA

SEQ ID NO: 185350 - DNA, 80 bp, synthetic construct; identical to SEQ ID NO: 620
  source 1..80: mol_type = other DNA

SEQ ID NO: 185351 - DNA, 80 bp, synthetic construct; identical to SEQ ID NO: 621
  source 1..80: mol_type = other DNA

SEQ ID NO: 185352 - DNA, 80 bp, synthetic construct; identical to SEQ ID NO: 622
  source 1..80: mol_type = other DNA

SEQ ID NO: 185353 - DNA, 80 bp, synthetic construct; identical to SEQ ID NO: 623
  source 1..80: mol_type = other DNA

SEQ ID NO: 185354 - DNA, 80 bp, synthetic construct; identical to SEQ ID NO: 624
  source 1..80: mol_type = other DNA

SEQ ID NO: 185355 - DNA, 80 bp, synthetic construct; identical to SEQ ID NO: 625
  source 1..80: mol_type = other DNA

SEQ ID NO: 185356 - DNA, 80 bp, synthetic construct; identical to SEQ ID NO: 626
  source 1..80: mol_type = other DNA

SEQ ID NO: 185357 - DNA, 80 bp, synthetic construct; identical to SEQ ID NO: 627
  source 1..80: mol_type = other DNA

SEQ ID NO: 185358 - DNA, 80 bp, synthetic construct; identical to SEQ ID NO: 628
  source 1..80: mol_type = other DNA

SEQ ID NO: 185359 - DNA, 80 bp, synthetic construct; identical to SEQ ID NO: 629
  source 1..80: mol_type = other DNA

SEQ ID NO: 185360 - DNA, 80 bp, synthetic construct; identical to SEQ ID NO: 630
  source 1..80: mol_type = other DNA

SEQ ID NO: 185361 - DNA, 80 bp, synthetic construct; identical to SEQ ID NO: 631
  source 1..80: mol_type = other DNA

SEQ ID NO: 185362 - DNA, 80 bp, synthetic construct; identical to SEQ ID NO: 632
  source 1..80: mol_type = other DNA

SEQ ID NO: 185363 - DNA, 80 bp, synthetic construct; identical to SEQ ID NO: 633
  source 1..80: mol_type = other DNA

SEQ ID NO: 185364 - DNA, 80 bp, synthetic construct; identical to SEQ ID NO: 634
  source 1..80: mol_type = other DNA

SEQ ID NO: 185365 - DNA, 80 bp, synthetic construct; identical to SEQ ID NO: 635
  source 1..80: mol_type = other DNA

SEQ ID NO: 185366 - DNA, 80 bp, synthetic construct; identical to SEQ ID NO: 636
  source 1..80: mol_type = other DNA

SEQ ID NO: 185367 - DNA, 80 bp, synthetic construct; identical to SEQ ID NO: 637
  source 1..80: mol_type = other DNA

SEQ ID NO: 185368 - DNA, 80 bp, synthetic construct; identical to SEQ ID NO: 638
  source 1..80: mol_type = other DNA

SEQ ID NO: 185369 - DNA, 80 bp, synthetic construct; identical to SEQ ID NO: 639
  source 1..80: mol_type = other DNA

SEQ ID NO: 185370 - DNA, 80 bp, synthetic construct; identical to SEQ ID NO: 640
  source 1..80: mol_type = other DNA

SEQ ID NO: 185371 - DNA, 80 bp, synthetic construct; identical to SEQ ID NO: 641
  source 1..80: mol_type = other DNA

SEQ ID NO: 185372 - DNA, 80 bp, synthetic construct; identical to SEQ ID NO: 642
  source 1..80: mol_type = other DNA

SEQ ID NO: 185373 - DNA, 80 bp, synthetic construct; identical to SEQ ID NO: 643
  source 1..80: mol_type = other DNA

SEQ ID NO: 185374 - DNA, 80 bp, synthetic construct; identical to SEQ ID NO: 644
  source 1..80: mol_type = other DNA

SEQ ID NO: 185375 - DNA, 80 bp, synthetic construct; identical to SEQ ID NO: 645
  source 1..80: mol_type = other DNA

SEQ ID NO: 185376 - DNA, 80 bp, synthetic construct; identical to SEQ ID NO: 646
  source 1..80: mol_type = other DNA

SEQ ID NO: 185377 - DNA, 80 bp, synthetic construct; identical to SEQ ID NO: 647
  source 1..80: mol_type = other DNA

SEQ ID NO: 185378 - DNA, 80 bp, synthetic construct; identical to SEQ ID NO: 648
  source 1..80: mol_type = other DNA

SEQ ID NO: 185379 - DNA, 80 bp, synthetic construct; identical to SEQ ID NO: 649
  source 1..80: mol_type = other DNA

SEQ ID NO: 185380 - DNA, 80 bp, synthetic construct; identical to SEQ ID NO: 650
  source 1..80: mol_type = other DNA

SEQ ID NO: 185381 - DNA, 80 bp, synthetic construct; identical to SEQ ID NO: 651
  source 1..80: mol_type = other DNA

SEQ ID NO: 185382 - DNA, 80 bp, synthetic construct; identical to SEQ ID NO: 652
  source 1..80: mol_type = other DNA

SEQ ID NO: 185383 - DNA, 80 bp, synthetic construct; identical to SEQ ID NO: 653
  source 1..80: mol_type = other DNA

SEQ ID NO: 185384 - DNA, 80 bp, synthetic construct; identical to SEQ ID NO: 654
  source 1..80: mol_type = other DNA

SEQ ID NO: 185385 - DNA, 80 bp, synthetic construct; identical to SEQ ID NO: 655
  source 1..80: mol_type = other DNA

SEQ ID NO: 185386 - DNA, 80 bp, synthetic construct; identical to SEQ ID NO: 656
  source 1..80: mol_type = other DNA

SEQ ID NO: 185387 - DNA, 80 bp, synthetic construct; identical to SEQ ID NO: 657
  source 1..80: mol_type = other DNA

SEQ ID NO: 185388 - DNA, 80 bp, synthetic construct; identical to SEQ ID NO: 658
  source 1..80: mol_type = other DNA

SEQ ID NO: 185389 - DNA, 80 bp, synthetic construct; identical to SEQ ID NO: 659
  source 1..80: mol_type = other DNA

SEQ ID NO: 185390 - DNA, 80 bp, synthetic construct; identical to SEQ ID NO: 660
  source 1..80: mol_type = other DNA

SEQ ID NO: 185391 - DNA, 80 bp, synthetic construct; identical to SEQ ID NO: 661
  source 1..80: mol_type = other DNA

SEQ ID NO: 185392 - DNA, 80 bp, synthetic construct; identical to SEQ ID NO: 662
  source 1..80: mol_type = other DNA

SEQ ID NO: 185393 - DNA, 80 bp, synthetic construct; identical to SEQ ID NO: 663
  source 1..80: mol_type = other DNA

SEQ ID NO: 185394 - DNA, 80 bp, synthetic construct; identical to SEQ ID NO: 664
  source 1..80: mol_type = other DNA

SEQ ID NO: 185395 - DNA, 80 bp, synthetic construct; identical to SEQ ID NO: 665
  source 1..80: mol_type = other DNA

SEQ ID NO: 185396 - DNA, 80 bp, synthetic construct; identical to SEQ ID NO: 666
  source 1..80: mol_type = other DNA

SEQ ID NO: 185397 - DNA, 80 bp, synthetic construct; identical to SEQ ID NO: 667
  source 1..80: mol_type = other DNA

SEQ ID NO: 185398 - DNA, 80 bp, synthetic construct; identical to SEQ ID NO: 668
  source 1..80: mol_type = other DNA

SEQ ID NO: 185399 - DNA, 80 bp, synthetic construct; identical to SEQ ID NO: 669
  source 1..80: mol_type = other DNA

SEQ ID NO: 185400 - DNA, 80 bp, synthetic construct; identical to SEQ ID NO: 670
  source 1..80: mol_type = other DNA

SEQ ID NO: 185401 - DNA, 80 bp, synthetic construct; identical to SEQ ID NO: 671
  source 1..80: mol_type = other DNA

SEQ ID NO: 185402 - DNA, 80 bp, synthetic construct; identical to SEQ ID NO: 672
  source 1..80: mol_type = other DNA

SEQ ID NO: 185403 - DNA, 80 bp, synthetic construct; identical to SEQ ID NO: 673
  source 1..80: mol_type = other DNA

SEQ ID NO: 185404 - DNA, 80 bp, synthetic construct; identical to SEQ ID NO: 674
  source 1..80: mol_type = other DNA

SEQ ID NO: 185405 - DNA, 80 bp, synthetic construct; identical to SEQ ID NO: 675
  source 1..80: mol_type = other DNA

SEQ ID NO: 185406 - DNA, 80 bp, synthetic construct; identical to SEQ ID NO: 676
  source 1..80: mol_type = other DNA

SEQ ID NO: 185407 - DNA, 80 bp, synthetic construct; identical to SEQ ID NO: 677
  source 1..80: mol_type = other DNA

SEQ ID NO: 185408 - DNA, 80 bp, synthetic construct; identical to SEQ ID NO: 678
  source 1..80: mol_type = other DNA

SEQ ID NO: 185409 - DNA, 80 bp, synthetic construct; identical to SEQ ID NO: 679
  source 1..80: mol_type = other DNA

SEQ ID NO: 185410 - DNA, 80 bp, synthetic construct; identical to SEQ ID NO: 680
  source 1..80: mol_type = other DNA

SEQ ID NO: 185411 - DNA, 80 bp, synthetic construct; identical to SEQ ID NO: 681
  source 1..80: mol_type = other DNA

SEQ ID NO: 185412 - DNA, 80 bp, synthetic construct; identical to SEQ ID NO: 682
  source 1..80: mol_type = other DNA

SEQ ID NO: 185413 - DNA, 80 bp, synthetic construct; identical to SEQ ID NO: 683
  source 1..80: mol_type = other DNA

SEQ ID NO: 185414 - DNA, 80 bp, synthetic construct; identical to SEQ ID NO: 684
  source 1..80: mol_type = other DNA

SEQ ID NO: 185415 - DNA, 80 bp, synthetic construct; identical to SEQ ID NO: 685
  source 1..80: mol_type = other DNA

SEQ ID NO: 185416 - DNA, 80 bp, synthetic construct; identical to SEQ ID NO: 686
  source 1..80: mol_type = other DNA

SEQ ID NO: 185417 - DNA, 80 bp, synthetic construct; identical to SEQ ID NO: 687
  source 1..80: mol_type = other DNA

SEQ ID NO: 185418 - DNA, 80 bp, synthetic construct; identical to SEQ ID NO: 688
  source 1..80: mol_type = other DNA

SEQ ID NO: 185419 - DNA, 80 bp, synthetic construct; identical to SEQ ID NO: 689
  source 1..80: mol_type = other DNA

SEQ ID NO: 185420 - DNA, 80 bp, synthetic construct; identical to SEQ ID NO: 690
  source 1..80: mol_type = other DNA

SEQ ID NO: 185421 - DNA, 80 bp, synthetic construct; identical to SEQ ID NO: 691
  source 1..80: mol_type = other DNA

SEQ ID NO: 185422 - DNA, 80 bp, synthetic construct; identical to SEQ ID NO: 692
  source 1..80: mol_type = other DNA

SEQ ID NO: 185423 - DNA, 80 bp, synthetic construct; identical to SEQ ID NO: 693
  source 1..80: mol_type = other DNA

SEQ ID NO: 185424 - DNA, 80 bp, synthetic construct; identical to SEQ ID NO: 694
  source 1..80: mol_type = other DNA

SEQ ID NO: 185425 - DNA, 80 bp, synthetic construct; identical to SEQ ID NO: 695
  source 1..80: mol_type = other DNA

SEQ ID NO: 185426 - DNA, 80 bp, synthetic construct; identical to SEQ ID NO: 696
  source 1..80: mol_type = other DNA

SEQ ID NO: 185427 - DNA, 80 bp, synthetic construct; identical to SEQ ID NO: 697
  source 1..80: mol_type = other DNA

SEQ ID NO: 185428 - DNA, 80 bp, synthetic construct; identical to SEQ ID NO: 698
  source 1..80: mol_type = other DNA

SEQ ID NO: 185429 - DNA, 80 bp, synthetic construct; identical to SEQ ID NO: 699
  source 1..80: mol_type = other DNA

SEQ ID NO: 185430 - DNA, 80 bp, synthetic construct; identical to SEQ ID NO: 700
  source 1..80: mol_type = other DNA

SEQ ID NO: 185431 - DNA, 80 bp, synthetic construct; identical to SEQ ID NO: 701
  source 1..80: mol_type = other DNA

SEQ ID NO: 185432 - DNA, 80 bp, synthetic construct; identical to SEQ ID NO: 702
  source 1..80: mol_type = other DNA

SEQ ID NO: 185433 - DNA, 80 bp, synthetic construct; identical to SEQ ID NO: 703
  source 1..80: mol_type = other DNA

SEQ ID NO: 185434 - DNA, 80 bp, synthetic construct; identical to SEQ ID NO: 704
  source 1..80: mol_type = other DNA

SEQ ID NO: 185435 - DNA, 80 bp, synthetic construct; identical to SEQ ID NO: 705
  source 1..80: mol_type = other DNA

SEQ ID NO: 185436 - DNA, 80 bp, synthetic construct; identical to SEQ ID NO: 706
  source 1..80: mol_type = other DNA

SEQ ID NO: 185437 - DNA, 80 bp, synthetic construct; identical to SEQ ID NO: 707
  source 1..80: mol_type = other DNA

SEQ ID NO: 185438 - DNA, 80 bp, synthetic construct; identical to SEQ ID NO: 708
  source 1..80: mol_type = other DNA

SEQ ID NO: 185439 - DNA, 80 bp, synthetic construct; identical to SEQ ID NO: 709
  source 1..80: mol_type = other DNA

SEQ ID NO: 185440 - DNA, 80 bp, synthetic construct; identical to SEQ ID NO: 710
  source 1..80: mol_type = other DNA

SEQ ID NO: 185441 - DNA, 80 bp, synthetic construct; identical to SEQ ID NO: 711
  source 1..80: mol_type = other DNA

SEQ ID NO: 185442 - DNA, 80 bp, synthetic construct; identical to SEQ ID NO: 712
  source 1..80: mol_type = other DNA

SEQ ID NO: 185443 - DNA, 80 bp, synthetic construct; identical to SEQ ID NO: 713
  source 1..80: mol_type = other DNA

SEQ ID NO: 185444 - DNA, 80 bp, synthetic construct; identical to SEQ ID NO: 714
  source 1..80: mol_type = other DNA

SEQ ID NO: 185445 - DNA, 80 bp, synthetic construct; identical to SEQ ID NO: 715
  source 1..80: mol_type = other DNA

SEQ ID NO: 185446 - DNA, 80 bp, synthetic construct; identical to SEQ ID NO: 716
  source 1..80: mol_type = other DNA

SEQ ID NO: 185447 - DNA, 80 bp, synthetic construct; identical to SEQ ID NO: 717
  source 1..80: mol_type = other DNA

SEQ ID NO: 185448 - DNA, 80 bp, synthetic construct; identical to SEQ ID NO: 718
  source 1..80: mol_type = other DNA

SEQ ID NO: 185449 - DNA, 80 bp, synthetic construct; identical to SEQ ID NO: 719
  source 1..80: mol_type = other DNA

SEQ ID NO: 185450 - DNA, 80 bp, synthetic construct; identical to SEQ ID NO: 720
  source 1..80: mol_type = other DNA

SEQ ID NO: 185451 - DNA, 80 bp, synthetic construct; identical to SEQ ID NO: 721
  source 1..80: mol_type = other DNA

SEQ ID NO: 185452 - DNA, 80 bp, synthetic construct; identical to SEQ ID NO: 722
  source 1..80: mol_type = other DNA

SEQ ID NO: 185453 - DNA, 80 bp, synthetic construct; identical to SEQ ID NO: 723
  source 1..80: mol_type = other DNA

SEQ ID NO: 185454 - DNA, 80 bp, synthetic construct; identical to SEQ ID NO: 724
  source 1..80: mol_type = other DNA

SEQ ID NO: 185455 - DNA, 80 bp, synthetic construct; identical to SEQ ID NO: 725
  source 1..80: mol_type = other DNA

SEQ ID NO: 185456 - DNA, 80 bp, synthetic construct; identical to SEQ ID NO: 726
  source 1..80: mol_type = other DNA

SEQ ID NO: 185457 - DNA, 80 bp, synthetic construct; identical to SEQ ID NO: 727
  source 1..80: mol_type = other DNA

SEQ ID NO: 185458 - DNA, 80 bp, synthetic construct; identical to SEQ ID NO: 728
  source 1..80: mol_type = other DNA

SEQ ID NO: 185459 - DNA, 80 bp, synthetic construct; identical to SEQ ID NO: 729
  source 1..80: mol_type = other DNA

SEQ ID NO: 185460 - DNA, 80 bp, synthetic construct; identical to SEQ ID NO: 730
  source 1..80: mol_type = other DNA

SEQ ID NO: 185461 - DNA, 80 bp, synthetic construct; identical to SEQ ID NO: 731
  source 1..80: mol_type = other DNA

SEQ ID NO: 185462 - DNA, 80 bp, synthetic construct; identical to SEQ ID NO: 732
  source 1..80: mol_type = other DNA

SEQ ID NO: 185463 - DNA, 80 bp, synthetic construct; identical to SEQ ID NO: 733
  source 1..80: mol_type = other DNA

SEQ ID NO: 185464 - DNA, 80 bp, synthetic construct; identical to SEQ ID NO: 734
  source 1..80: mol_type = other DNA

SEQ ID NO: 185465 - DNA, 80 bp, synthetic construct; identical to SEQ ID NO: 735
  source 1..80: mol_type = other DNA

SEQ ID NO: 185466 - DNA, 80 bp, synthetic construct; identical to SEQ ID NO: 736
  source 1..80: mol_type = other DNA

SEQ ID NO: 185467 - DNA, 80 bp, synthetic construct; identical to SEQ ID NO: 737
  source 1..80: mol_type = other DNA

SEQ ID NO: 185468 - DNA, 80 bp, synthetic construct; identical to SEQ ID NO: 738
  source 1..80: mol_type = other DNA

SEQ ID NO: 185469 - DNA, 80 bp, synthetic construct; identical to SEQ ID NO: 739
  source 1..80: mol_type = other DNA

SEQ ID NO: 185470 - DNA, 80 bp, synthetic construct; identical to SEQ ID NO: 740
  source 1..80: mol_type = other DNA

SEQ ID NO: 185471 - DNA, 80 bp, synthetic construct; identical to SEQ ID NO: 741
  source 1..80: mol_type = other DNA

SEQ ID NO: 185472 - DNA, 80 bp, synthetic construct; identical to SEQ ID NO: 742
  source 1..80: mol_type = other DNA

SEQ ID NO: 185473 - DNA, 80 bp, synthetic construct; identical to SEQ ID NO: 743
  source 1..80: mol_type = other DNA

SEQ ID NO: 185474 - DNA, 80 bp, synthetic construct; identical to SEQ ID NO: 744
  source 1..80: mol_type = other DNA

SEQ ID NO: 185475 - DNA, 80 bp, synthetic construct; identical to SEQ ID NO: 745
  source 1..80: mol_type = other DNA

SEQ ID NO: 185476 - DNA, 80 bp, synthetic construct; identical to SEQ ID NO: 746
  source 1..80: mol_type = other DNA

SEQ ID NO: 185477 - DNA, 80 bp, synthetic construct; identical to SEQ ID NO: 747
  source 1..80: mol_type = other DNA

SEQ ID NO: 185478 - DNA, 80 bp, synthetic construct; identical to SEQ ID NO: 748
  source 1..80: mol_type = other DNA

SEQ ID NO: 185479 - DNA, 80 bp, synthetic construct; identical to SEQ ID NO: 749
  source 1..80: mol_type = other DNA

SEQ ID NO: 185480 - DNA, 80 bp, synthetic construct; identical to SEQ ID NO: 750
  source 1..80: mol_type = other DNA

SEQ ID NO: 185481 - DNA, 80 bp, synthetic construct; identical to SEQ ID NO: 751
  source 1..80: mol_type = other DNA

SEQ ID NO: 185482 - DNA, 80 bp, synthetic construct; identical to SEQ ID NO: 752
  source 1..80: mol_type = other DNA

SEQ ID NO: 185483 - DNA, 80 bp, synthetic construct; identical to SEQ ID NO: 753
  source 1..80: mol_type = other DNA

SEQ ID NO: 185484 - DNA, 80 bp, synthetic construct; identical to SEQ ID NO: 754
  source 1..80: mol_type = other DNA

SEQ ID NO: 185485 - DNA, 80 bp, synthetic construct; identical to SEQ ID NO: 755
  source 1..80: mol_type = other DNA

SEQ ID NO: 185486 - DNA, 80 bp, synthetic construct; identical to SEQ ID NO: 756
  source 1..80: mol_type = other DNA

SEQ ID NO: 185487 - DNA, 80 bp, synthetic construct; identical to SEQ ID NO: 757
  source 1..80: mol_type = other DNA

SEQ ID NO: 185488 - DNA, 80 bp, synthetic construct; identical to SEQ ID NO: 758
  source 1..80: mol_type = other DNA

SEQ ID NO: 185489 - DNA, 80 bp, synthetic construct; identical to SEQ ID NO: 759
  source 1..80: mol_type = other DNA

SEQ ID NO: 185490 - DNA, 80 bp, synthetic construct; identical to SEQ ID NO: 760
  source 1..80: mol_type = other DNA

SEQ ID NO: 185491 - DNA, 80 bp, synthetic construct; identical to SEQ ID NO: 761
  source 1..80: mol_type = other DNA

SEQ ID NO: 185492 - DNA, 80 bp, synthetic construct; identical to SEQ ID NO: 762
  source 1..80: mol_type = other DNA

SEQ ID NO: 185493 - DNA, 80 bp, synthetic construct; identical to SEQ ID NO: 763
  source 1..80: mol_type = other DNA

SEQ ID NO: 185494 - DNA, 80 bp, synthetic construct; identical to SEQ ID NO: 764
  source 1..80: mol_type = other DNA

SEQ ID NO: 185495 - DNA, 80 bp, synthetic construct; identical to SEQ ID NO: 765
  source 1..80: mol_type = other DNA

SEQ ID NO: 185496 - DNA, 80 bp, synthetic construct; identical to SEQ ID NO: 766
  source 1..80: mol_type = other DNA

SEQ ID NO: 185497 - DNA, 80 bp, synthetic construct; identical to SEQ ID NO: 767
  source 1..80: mol_type = other DNA

SEQ ID NO: 185498 - DNA, 80 bp, synthetic construct; identical to SEQ ID NO: 768
  source 1..80: mol_type = other DNA

SEQ ID NO: 185499 - DNA, 80 bp, synthetic construct; identical to SEQ ID NO: 769
  source 1..80: mol_type = other DNA

SEQ ID NO: 185500 - DNA, 80 bp, synthetic construct; identical to SEQ ID NO: 770
  source 1..80: mol_type = other DNA

SEQ ID NO: 185501 - DNA, 80 bp, synthetic construct; identical to SEQ ID NO: 771
  source 1..80: mol_type = other DNA

SEQ ID NO: 185502 - DNA, 80 bp, synthetic construct; identical to SEQ ID NO: 772
  source 1..80: mol_type = other DNA

SEQ ID NO: 185503 - DNA, 80 bp, synthetic construct; identical to SEQ ID NO: 773
  source 1..80: mol_type = other DNA

SEQ ID NO: 185504 - DNA, 80 bp, synthetic construct; identical to SEQ ID NO: 774
  source 1..80: mol_type = other DNA

SEQ ID NO: 185505 - DNA, 80 bp, synthetic construct; identical to SEQ ID NO: 775
  source 1..80: mol_type = other DNA

SEQ ID NO: 185506 - DNA, 80 bp, synthetic construct; identical to SEQ ID NO: 776
  source 1..80: mol_type = other DNA

SEQ ID NO: 185507 - DNA, 80 bp, synthetic construct; identical to SEQ ID NO: 777
  source 1..80: mol_type = other DNA

SEQ ID NO: 185508 - DNA, 80 bp, synthetic construct; identical to SEQ ID NO: 778
  source 1..80: mol_type = other DNA

SEQ ID NO: 185509 - DNA, 80 bp, synthetic construct; identical to SEQ ID NO: 779
  source 1..80: mol_type = other DNA

SEQ ID NO: 185510 - DNA, 80 bp, synthetic construct; identical to SEQ ID NO: 780
  source 1..80: mol_type = other DNA

SEQ ID NO: 185511 - DNA, 80 bp, synthetic construct; identical to SEQ ID NO: 781
  source 1..80: mol_type = other DNA

SEQ ID NO: 185512 - DNA, 80 bp, synthetic construct; identical to SEQ ID NO: 782
  source 1..80: mol_type = other DNA

SEQ ID NO: 185513 - DNA, 80 bp, synthetic construct; identical to SEQ ID NO: 783
  source 1..80: mol_type = other DNA

SEQ ID NO: 185514 - DNA, 80 bp, synthetic construct; identical to SEQ ID NO: 784
  source 1..80: mol_type = other DNA

SEQ ID NO: 185515 - DNA, 80 bp, synthetic construct; identical to SEQ ID NO: 785
  source 1..80: mol_type = other DNA

SEQ ID NO: 185516 - DNA, 80 bp, synthetic construct; identical to SEQ ID NO: 786
  source 1..80: mol_type = other DNA

SEQ ID NO: 185517 - DNA, 80 bp, synthetic construct; identical to SEQ ID NO: 787
  source 1..80: mol_type = other DNA

SEQ ID NO: 185518 - DNA, 80 bp, synthetic construct; identical to SEQ ID NO: 788
  source 1..80: mol_type = other DNA

SEQ ID NO: 185519 - DNA, 80 bp, synthetic construct; identical to SEQ ID NO: 789
  source 1..80: mol_type = other DNA

SEQ ID NO: 185520 - DNA, 80 bp, synthetic construct; identical to SEQ ID NO: 790
  source 1..80: mol_type = other DNA

SEQ ID NO: 185521 - DNA, 80 bp, synthetic construct; identical to SEQ ID NO: 791
  source 1..80: mol_type = other DNA

SEQ ID NO: 185522 - DNA, 80 bp, synthetic construct; identical to SEQ ID NO: 792
  source 1..80: mol_type = other DNA

SEQ ID NO: 185523 - DNA, 80 bp, synthetic construct; identical to SEQ ID NO: 793
  source 1..80: mol_type = other DNA

SEQ ID NO: 185524 - DNA, 80 bp, synthetic construct; identical to SEQ ID NO: 794
  source 1..80: mol_type = other DNA

SEQ ID NO: 185525 - DNA, 80 bp, synthetic construct; identical to SEQ ID NO: 795
  source 1..80: mol_type = other DNA

SEQ ID NO: 185526 - DNA, 80 bp, synthetic construct; identical to SEQ ID NO: 796
  source 1..80: mol_type = other DNA

SEQ ID NO: 185527 - DNA, 80 bp, synthetic construct; identical to SEQ ID NO: 797
  source 1..80: mol_type = other DNA

SEQ ID NO: 185528 - DNA, 80 bp, synthetic construct; identical to SEQ ID NO: 798
  source 1..80: mol_type = other DNA

SEQ ID NO: 185529 - DNA, 80 bp, synthetic construct; identical to SEQ ID NO: 799
  source 1..80: mol_type = other DNA

SEQ ID NO: 185530 - DNA, 80 bp, synthetic construct; identical to SEQ ID NO: 800
  source 1..80: mol_type = other DNA

SEQ ID NO: 185531 - DNA, 80 bp, synthetic construct; identical to SEQ ID NO: 801
  source 1..80: mol_type = other DNA

SEQ ID NO: 185532 - DNA, 80 bp, synthetic construct; identical to SEQ ID NO: 802
  source 1..80: mol_type = other DNA

SEQ ID NO: 185533 - DNA, 80 bp, synthetic construct; identical to SEQ ID NO: 803
  source 1..80: mol_type = other DNA

SEQ ID NO: 185534 - DNA, 80 bp, synthetic construct; identical to SEQ ID NO: 804
  source 1..80: mol_type = other DNA

SEQ ID NO: 185535 - DNA, 80 bp, synthetic construct; identical to SEQ ID NO: 805
  source 1..80: mol_type = other DNA

SEQ ID NO: 185536 - DNA, 80 bp, synthetic construct; identical to SEQ ID NO: 806
  source 1..80: mol_type = other DNA

SEQ ID NO: 185537 - DNA, 80 bp, synthetic construct; identical to SEQ ID NO: 807
  source 1..80: mol_type = other DNA

SEQ ID NO: 185538 - DNA, 80 bp, synthetic construct; identical to SEQ ID NO: 808
  source 1..80: mol_type = other DNA

SEQ ID NO: 185539 - DNA, 80 bp, synthetic construct; identical to SEQ ID NO: 809
  source 1..80: mol_type = other DNA

SEQ ID NO: 185540 - DNA, 80 bp, synthetic construct; identical to SEQ ID NO: 810
  source 1..80: mol_type = other DNA

SEQ ID NO: 185541 - DNA, 80 bp, synthetic construct; identical to SEQ ID NO: 811
  source 1..80: mol_type = other DNA

SEQ ID NO: 185542 - DNA, 80 bp, synthetic construct; identical to SEQ ID NO: 812
  source 1..80: mol_type = other DNA

SEQ ID NO: 185543 - DNA, 80 bp, synthetic construct; identical to SEQ ID NO: 813
  source 1..80: mol_type = other DNA

SEQ ID NO: 185544 - DNA, 80 bp, synthetic construct; identical to SEQ ID NO: 814
  source 1..80: mol_type = other DNA

SEQ ID NO: 185545 - DNA, 80 bp, synthetic construct; identical to SEQ ID NO: 815
  source 1..80: mol_type = other DNA

SEQ ID NO: 185546 - DNA, 80 bp, synthetic construct; identical to SEQ ID NO: 816
  source 1..80: mol_type = other DNA

SEQ ID NO: 185547 - DNA, 80 bp, synthetic construct; identical to SEQ ID NO: 817
  source 1..80: mol_type = other DNA

SEQ ID NO: 185548 - DNA, 80 bp, synthetic construct; identical to SEQ ID NO: 818
  source 1..80: mol_type = other DNA

SEQ ID NO: 185549 - DNA, 80 bp, synthetic construct; identical to SEQ ID NO: 819
  source 1..80: mol_type = other DNA

SEQ ID NO: 185550 - DNA, 80 bp, synthetic construct; identical to SEQ ID NO: 820
  source 1..80: mol_type = other DNA

SEQ ID NO: 185551 - DNA, 80 bp, synthetic construct; identical to SEQ ID NO: 821
  source 1..80: mol_type = other DNA

SEQ ID NO: 185552 - DNA, 80 bp, synthetic construct; identical to SEQ ID NO: 822
  source 1..80: mol_type = other DNA

SEQ ID NO: 185553 - DNA, 80 bp, synthetic construct; identical to SEQ ID NO: 823
  source 1..80: mol_type = other DNA

SEQ ID NO: 185554 - DNA, 80 bp, synthetic construct; identical to SEQ ID NO: 824
  source 1..80: mol_type = other DNA

SEQ ID NO: 185555 - DNA, 80 bp, synthetic construct; identical to SEQ ID NO: 825
  source 1..80: mol_type = other DNA

SEQ ID NO: 185556 - DNA, 80 bp, synthetic construct; identical to SEQ ID NO: 826
  source 1..80: mol_type = other DNA

SEQ ID NO: 185557 - DNA, 80 bp, synthetic construct; identical to SEQ ID NO: 827
  source 1..80: mol_type = other DNA

SEQ ID NO: 185558 - DNA, 80 bp, synthetic construct; identical to SEQ ID NO: 828
  source 1..80: mol_type = other DNA

SEQ ID NO: 185559 - DNA, 80 bp, synthetic construct; identical to SEQ ID NO: 829
  source 1..80: mol_type = other DNA

SEQ ID NO: 185560 - DNA, 80 bp, synthetic construct; identical to SEQ ID NO: 830
  source 1..80: mol_type = other DNA

SEQ ID NO: 185561 - DNA, 80 bp, synthetic construct; identical to SEQ ID NO: 831
  source 1..80: mol_type = other DNA

SEQ ID NO: 185562 - DNA, 80 bp, synthetic construct; identical to SEQ ID NO: 832
  source 1..80: mol_type = other DNA

SEQ ID NO: 185563 - DNA, 80 bp, synthetic construct; identical to SEQ ID NO: 833
  source 1..80: mol_type = other DNA

SEQ ID NO: 185564 - DNA, 80 bp, synthetic construct; identical to SEQ ID NO: 834
  source 1..80: mol_type = other DNA

SEQ ID NO: 185565 - DNA, 80 bp, synthetic construct; identical to SEQ ID NO: 835
  source 1..80: mol_type = other DNA

SEQ ID NO: 185566 - DNA, 80 bp, synthetic construct; identical to SEQ ID NO: 836
  source 1..80: mol_type = other DNA

SEQ ID NO: 185567 - DNA, 80 bp, synthetic construct; identical to SEQ ID NO: 837
  source 1..80: mol_type = other DNA

SEQ ID NO: 185568 - DNA, 80 bp, synthetic construct; identical to SEQ ID NO: 838
  source 1..80: mol_type = other DNA

SEQ ID NO: 185569 - DNA, 80 bp, synthetic construct; identical to SEQ ID NO: 839
  source 1..80: mol_type = other DNA

SEQ ID NO: 185570 - DNA, 80 bp, synthetic construct; identical to SEQ ID NO: 840
  source 1..80: mol_type = other DNA

SEQ ID NO: 185571 - DNA, 80 bp, synthetic construct; identical to SEQ ID NO: 841
  source 1..80: mol_type = other DNA

SEQ ID NO: 185572 - DNA, 80 bp, synthetic construct; identical to SEQ ID NO: 842
  source 1..80: mol_type = other DNA

SEQ ID NO: 185573 - DNA, 80 bp, synthetic construct; identical to SEQ ID NO: 843
  source 1..80: mol_type = other DNA

SEQ ID NO: 185574 - DNA, 80 bp, synthetic construct; identical to SEQ ID NO: 844
  source 1..80: mol_type = other DNA

SEQ ID NO: 185575 - DNA, 80 bp, synthetic construct; identical to SEQ ID NO: 845
  source 1..80: mol_type = other DNA

SEQ ID NO: 185576 - DNA, 80 bp, synthetic construct; identical to SEQ ID NO: 846
  source 1..80: mol_type = other DNA

SEQ ID NO: 185577 - DNA, 80 bp, synthetic construct; identical to SEQ ID NO: 847
  source 1..80: mol_type = other DNA

SEQ ID NO: 185578 - DNA, 80 bp, synthetic construct; identical to SEQ ID NO: 848
  source 1..80: mol_type = other DNA

SEQ ID NO: 185579 - DNA, 80 bp, synthetic construct; identical to SEQ ID NO: 849
  source 1..80: mol_type = other DNA

SEQ ID NO: 185580 - DNA, 80 bp, synthetic construct; identical to SEQ ID NO: 850
  source 1..80: mol_type = other DNA

SEQ ID NO: 185581 - DNA, 80 bp, synthetic construct; identical to SEQ ID NO: 851
  source 1..80: mol_type = other DNA

SEQ ID NO: 185582 - DNA, 80 bp, synthetic construct; identical to SEQ ID NO: 852
  source 1..80: mol_type = other DNA

SEQ ID NO: 185583 - DNA, 80 bp, synthetic construct; identical to SEQ ID NO: 853
  source 1..80: mol_type = other DNA

SEQ ID NO: 185584 - DNA, 80 bp, synthetic construct; identical to SEQ ID NO: 854
  source 1..80: mol_type = other DNA

SEQ ID NO: 185585 - DNA, 80 bp, synthetic construct; identical to SEQ ID NO: 855
  source 1..80: mol_type = other DNA

SEQ ID NO: 185586 - DNA, 80 bp, synthetic construct; identical to SEQ ID NO: 856
  source 1..80: mol_type = other DNA

SEQ ID NO: 185587 - DNA, 80 bp, synthetic construct; identical to SEQ ID NO: 857
  source 1..80: mol_type = other DNA

SEQ ID NO: 185588 - DNA, 80 bp, synthetic construct; identical to SEQ ID NO: 858
  source 1..80: mol_type = other DNA

SEQ ID NO: 185589 - DNA, 80 bp, synthetic construct; identical to SEQ ID NO: 859
  source 1..80: mol_type = other DNA

SEQ ID NO: 185590 - DNA, 80 bp, synthetic construct; identical to SEQ ID NO: 860
  source 1..80: mol_type = other DNA

SEQ ID NO: 185591 - DNA, 80 bp, synthetic construct; identical to SEQ ID NO: 861
  source 1..80: mol_type = other DNA

SEQ ID NO: 185592 - DNA, 80 bp, synthetic construct; identical to SEQ ID NO: 862
  source 1..80: mol_type = other DNA

SEQ ID NO: 185593 - DNA, 80 bp, synthetic construct; identical to SEQ ID NO: 863
  source 1..80: mol_type = other DNA

SEQ ID NO: 185594 - DNA, 80 bp, synthetic construct; identical to SEQ ID NO: 864
  source 1..80: mol_type = other DNA

SEQ ID NO: 185595 - DNA, 80 bp, synthetic construct; identical to SEQ ID NO: 865
  source 1..80: mol_type = other DNA

SEQ ID NO: 185596 - DNA, 80 bp, synthetic construct; identical to SEQ ID NO: 866
  source 1..80: mol_type = other DNA

SEQ ID NO: 185597 - DNA, 80 bp, synthetic construct; identical to SEQ ID NO: 867
  source 1..80: mol_type = other DNA

SEQ ID NO: 185598 - DNA, 80 bp, synthetic construct; identical to SEQ ID NO: 868
  source 1..80: mol_type = other DNA

SEQ ID NO: 185599 - DNA, 80 bp, synthetic construct; identical to SEQ ID NO: 869
  source 1..80: mol_type = other DNA

SEQ ID NO: 185600 - DNA, 80 bp, synthetic construct; identical to SEQ ID NO: 870
  source 1..80: mol_type = other DNA

SEQ ID NO: 185601 - DNA, 80 bp, synthetic construct; identical to SEQ ID NO: 871
  source 1..80: mol_type = other DNA

SEQ ID NO: 185602 - DNA, 80 bp, synthetic construct; identical to SEQ ID NO: 872
  source 1..80: mol_type = other DNA

SEQ ID NO: 185603 - DNA, 80 bp, synthetic construct; identical to SEQ ID NO: 873
  source 1..80: mol_type = other DNA

SEQ ID NO: 185604 - DNA, 80 bp, synthetic construct; identical to SEQ ID NO: 874
  source 1..80: mol_type = other DNA

SEQ ID NO: 185605 - DNA, 80 bp, synthetic construct; identical to SEQ ID NO: 875
  source 1..80: mol_type = other DNA

SEQ ID NO: 185606 - DNA, 80 bp, synthetic construct; identical to SEQ ID NO: 876
  source 1..80: mol_type = other DNA

SEQ ID NO: 185607 - DNA, 80 bp, synthetic construct; identical to SEQ ID NO: 877
  source 1..80: mol_type = other DNA

SEQ ID NO: 185608 - DNA, 80 bp, synthetic construct; identical to SEQ ID NO: 878
  source 1..80: mol_type = other DNA

SEQ ID NO: 185609 - DNA, 80 bp, synthetic construct; identical to SEQ ID NO: 879
  source 1..80: mol_type = other DNA

SEQ ID NO: 185610 - DNA, 80 bp, synthetic construct; identical to SEQ ID NO: 880
  source 1..80: mol_type = other DNA

SEQ ID NO: 185611 - DNA, 80 bp, synthetic construct; identical to SEQ ID NO: 881
  source 1..80: mol_type = other DNA

SEQ ID NO: 185612 - DNA, 80 bp, synthetic construct; identical to SEQ ID NO: 882
  source 1..80: mol_type = other DNA

SEQ ID NO: 185613 - DNA, 80 bp, synthetic construct; identical to SEQ ID NO: 883
  source 1..80: mol_type = other DNA

SEQ ID NO: 185614 - DNA, 80 bp, synthetic construct; identical to SEQ ID NO: 884
  source 1..80: mol_type = other DNA

SEQ ID NO: 185615 - DNA, 80 bp, synthetic construct; identical to SEQ ID NO: 885
  source 1..80: mol_type = other DNA

SEQ ID NO: 185616 - DNA, 80 bp, synthetic construct; identical to SEQ ID NO: 886
  source 1..80: mol_type = other DNA

SEQ ID NO: 185617 - DNA, 80 bp, synthetic construct; identical to SEQ ID NO: 887
  source 1..80: mol_type = other DNA

SEQ ID NO: 185618 - DNA, 80 bp, synthetic construct; identical to SEQ ID NO: 888
  source 1..80: mol_type = other DNA

SEQ ID NO: 185619 - DNA, 80 bp, synthetic construct; identical to SEQ ID NO: 889
  source 1..80: mol_type = other DNA

SEQ ID NO: 185620 - DNA, 80 bp, synthetic construct; identical to SEQ ID NO: 890
  source 1..80: mol_type = other DNA

SEQ ID NO: 185621 - DNA, 80 bp, synthetic construct; identical to SEQ ID NO: 891
  source 1..80: mol_type = other DNA

SEQ ID NO: 185622 - DNA, 80 bp, synthetic construct; identical to SEQ ID NO: 892
  source 1..80: mol_type = other DNA

SEQ ID NO: 185623 - DNA, 80 bp, synthetic construct; identical to SEQ ID NO: 893
  source 1..80: mol_type = other DNA

SEQ ID NO: 185624 - DNA, 80 bp, synthetic construct; identical to SEQ ID NO: 894
  source 1..80: mol_type = other DNA

SEQ ID NO: 185625 - DNA, 80 bp, synthetic construct; identical to SEQ ID NO: 895
  source 1..80: mol_type = other DNA

SEQ ID NO: 185626 - DNA, 80 bp, synthetic construct; identical to SEQ ID NO: 896
  source 1..80: mol_type = other DNA

SEQ ID NO: 185627 - DNA, 80 bp, synthetic construct; identical to SEQ ID NO: 897
  source 1..80: mol_type = other DNA

SEQ ID NO: 185628 - DNA, 80 bp, synthetic construct; identical to SEQ ID NO: 898
  source 1..80: mol_type = other DNA

SEQ ID NO: 185629 - DNA, 80 bp, synthetic construct; identical to SEQ ID NO: 899
  source 1..80: mol_type = other DNA

SEQ ID NO: 185630 - DNA, 80 bp, synthetic construct; identical to SEQ ID NO: 900
  source 1..80: mol_type = other DNA

SEQ ID NO: 185631 - DNA, 80 bp, synthetic construct; identical to SEQ ID NO: 901
  source 1..80: mol_type = other DNA

SEQ ID NO: 185632 - DNA, 80 bp, synthetic construct; identical to SEQ ID NO: 902
  source 1..80: mol_type = other DNA

SEQ ID NO: 185633 - DNA, 80 bp, synthetic construct; identical to SEQ ID NO: 903
  source 1..80: mol_type = other DNA

SEQ ID NO: 185634 - DNA, 80 bp, synthetic construct; identical to SEQ ID NO: 904
  source 1..80: mol_type = other DNA

SEQ ID NO: 185635 - DNA, 80 bp, synthetic construct; identical to SEQ ID NO: 905
  source 1..80: mol_type = other DNA

SEQ ID NO: 185636 - DNA, 80 bp, synthetic construct; identical to SEQ ID NO: 906
  source 1..80: mol_type = other DNA

SEQ ID NO: 185637 - DNA, 80 bp, synthetic construct; identical to SEQ ID NO: 907
  source 1..80: mol_type = other DNA

SEQ ID NO: 185638 - DNA, 80 bp, synthetic construct; identical to SEQ ID NO: 908
  source 1..80: mol_type = other DNA

SEQ ID NO: 185639 - DNA, 80 bp, synthetic construct; identical to SEQ ID NO: 909
  source 1..80: mol_type = other DNA

SEQ ID NO: 185640 - DNA, 80 bp, synthetic construct; identical to SEQ ID NO: 910
  source 1..80: mol_type = other DNA

SEQ ID NO: 185641 - DNA, 80 bp, synthetic construct; identical to SEQ ID NO: 911
  source 1..80: mol_type = other DNA

SEQ ID NO: 185642 - DNA, 80 bp, synthetic construct; identical to SEQ ID NO: 912
  source 1..80: mol_type = other DNA

SEQ ID NO: 185643 - DNA, 80 bp, synthetic construct; identical to SEQ ID NO: 913
  source 1..80: mol_type = other DNA

SEQ ID NO: 185644 - DNA, 80 bp, synthetic construct; identical to SEQ ID NO: 914
  source 1..80: mol_type = other DNA

SEQ ID NO: 185645 - DNA, 80 bp, synthetic construct; identical to SEQ ID NO: 915
  source 1..80: mol_type = other DNA

SEQ ID NO: 185646 - DNA, 80 bp, synthetic construct; identical to SEQ ID NO: 916
  source 1..80: mol_type = other DNA

SEQ ID NO: 185647 - DNA, 80 bp, synthetic construct; identical to SEQ ID NO: 917
  source 1..80: mol_type = other DNA

SEQ ID NO: 185648 - DNA, 80 bp, synthetic construct; identical to SEQ ID NO: 918
  source 1..80: mol_type = other DNA

SEQ ID NO: 185649 - DNA, 80 bp, synthetic construct; identical to SEQ ID NO: 919
  source 1..80: mol_type = other DNA

SEQ ID NO: 185650 - DNA, 80 bp, synthetic construct; identical to SEQ ID NO: 920
  source 1..80: mol_type = other DNA

SEQ ID NO: 185651 - DNA, 80 bp, synthetic construct; identical to SEQ ID NO: 921
  source 1..80: mol_type = other DNA

SEQ ID NO: 185652 - DNA, 80 bp, synthetic construct; identical to SEQ ID NO: 922
  source 1..80: mol_type = other DNA

SEQ ID NO: 185653 - DNA, 80 bp, synthetic construct; identical to SEQ ID NO: 923
  source 1..80: mol_type = other DNA

SEQ ID NO: 185654 - DNA, 80 bp, synthetic construct; identical to SEQ ID NO: 924
  source 1..80: mol_type = other DNA

SEQ ID NO: 185655 - DNA, 80 bp, synthetic construct; identical to SEQ ID NO: 925
  source 1..80: mol_type = other DNA

SEQ ID NO: 185656 - DNA, 80 bp, synthetic construct; identical to SEQ ID NO: 926
  source 1..80: mol_type = other DNA

SEQ ID NO: 185657 - DNA, 80 bp, synthetic construct; identical to SEQ ID NO: 927
  source 1..80: mol_type = other DNA

SEQ ID NO: 185658 - DNA, 80 bp, synthetic construct; identical to SEQ ID NO: 928
  source 1..80: mol_type = other DNA

SEQ ID NO: 185659 - DNA, 80 bp, synthetic construct; identical to SEQ ID NO: 929
  source 1..80: mol_type = other DNA

SEQ ID NO: 185660 - DNA, 80 bp, synthetic construct; identical to SEQ ID NO: 930
  source 1..80: mol_type = other DNA

SEQ ID NO: 185661 - DNA, 80 bp, synthetic construct; identical to SEQ ID NO: 931
  source 1..80: mol_type = other DNA

SEQ ID NO: 185662 - DNA, 80 bp, synthetic construct; identical to SEQ ID NO: 932
  source 1..80: mol_type = other DNA

SEQ ID NO: 185663 - DNA, 80 bp, synthetic construct; identical to SEQ ID NO: 933
  source 1..80: mol_type = other DNA

SEQ ID NO: 185664 - DNA, 80 bp, synthetic construct; identical to SEQ ID NO: 934
  source 1..80: mol_type = other DNA

SEQ ID NO: 185665 - DNA, 80 bp, synthetic construct; identical to SEQ ID NO: 935
  source 1..80: mol_type = other DNA

SEQ ID NO: 185666 - DNA, 80 bp, synthetic construct; identical to SEQ ID NO: 936
  source 1..80: mol_type = other DNA

SEQ ID NO: 185667 - DNA, 80 bp, synthetic construct; identical to SEQ ID NO: 937
  source 1..80: mol_type = other DNA

SEQ ID NO: 185668 - DNA, 80 bp, synthetic construct; identical to SEQ ID NO: 938
  source 1..80: mol_type = other DNA

SEQ ID NO: 185669 - DNA, 80 bp, synthetic construct; identical to SEQ ID NO: 939
  source 1..80: mol_type = other DNA

SEQ ID NO: 185670 - DNA, 80 bp, synthetic construct; identical to SEQ ID NO: 940
  source 1..80: mol_type = other DNA

SEQ ID NO: 185671 - DNA, 80 bp, synthetic construct; identical to SEQ ID NO: 941
  source 1..80: mol_type = other DNA

SEQ ID NO: 185672 - DNA, 80 bp, synthetic construct; identical to SEQ ID NO: 942
  source 1..80: mol_type = other DNA

SEQ ID NO: 185673 - DNA, 80 bp, synthetic construct; identical to SEQ ID NO: 943
  source 1..80: mol_type = other DNA

SEQ ID NO: 185674 - DNA, 80 bp, synthetic construct; identical to SEQ ID NO: 944
  source 1..80: mol_type = other DNA

SEQ ID NO: 185675 - DNA, 80 bp, synthetic construct; identical to SEQ ID NO: 945
  source 1..80: mol_type = other DNA

SEQ ID NO: 185676 - DNA, 80 bp, synthetic construct; identical to SEQ ID NO: 946
  source 1..80: mol_type = other DNA

SEQ ID NO: 185677 - DNA, 80 bp, synthetic construct; identical to SEQ ID NO: 947
  source 1..80: mol_type = other DNA

SEQ ID NO: 185678 - DNA, 80 bp, synthetic construct; identical to SEQ ID NO: 948
  source 1..80: mol_type = other DNA

SEQ ID NO: 185679 - DNA, 80 bp, synthetic construct; identical to SEQ ID NO: 949
  source 1..80: mol_type = other DNA

SEQ ID NO: 185680 - DNA, 80 bp, synthetic construct; identical to SEQ ID NO: 950
  source 1..80: mol_type = other DNA

SEQ ID NO: 185681 - DNA, 80 bp, synthetic construct; identical to SEQ ID NO: 951
  source 1..80: mol_type = other DNA

SEQ ID NO: 185682 - DNA, 80 bp, synthetic construct; identical to SEQ ID NO: 952
  source 1..80: mol_type = other DNA

SEQ ID NO: 185683 - DNA, 80 bp, synthetic construct; identical to SEQ ID NO: 953
  source 1..80: mol_type = other DNA

SEQ ID NO: 185684 - DNA, 80 bp, synthetic construct; identical to SEQ ID NO: 954
  source 1..80: mol_type = other DNA

SEQ ID NO: 185685 - DNA, 80 bp, synthetic construct; identical to SEQ ID NO: 955
  source 1..80: mol_type = other DNA

SEQ ID NO: 185686 - DNA, 80 bp, synthetic construct; identical to SEQ ID NO: 956
  source 1..80: mol_type = other DNA

SEQ ID NO: 185687 - DNA, 80 bp, synthetic construct; identical to SEQ ID NO: 957
  source 1..80: mol_type = other DNA

SEQ ID NO: 185688 - DNA, 80 bp, synthetic construct; identical to SEQ ID NO: 958
  source 1..80: mol_type = other DNA

SEQ ID NO: 185689 - DNA, 80 bp, synthetic construct; identical to SEQ ID NO: 959
  source 1..80: mol_type = other DNA

SEQ ID NO: 185690 - DNA, 80 bp, synthetic construct; identical to SEQ ID NO: 960
  source 1..80: mol_type = other DNA

SEQ ID NO: 185691 - DNA, 80 bp, synthetic construct; identical to SEQ ID NO: 961
  source 1..80: mol_type = other DNA

SEQ ID NO: 185692 - DNA, 80 bp, synthetic construct; identical to SEQ ID NO: 962
  source 1..80: mol_type = other DNA

SEQ ID NO: 185693 - DNA, 80 bp, synthetic construct; identical to SEQ ID NO: 963
  source 1..80: mol_type = other DNA

SEQ ID NO: 185694 - DNA, 80 bp, synthetic construct; identical to SEQ ID NO: 964
  source 1..80: mol_type = other DNA

SEQ ID NO: 185695 - DNA, 80 bp, synthetic construct; identical to SEQ ID NO: 965
  source 1..80: mol_type = other DNA

SEQ ID NO: 185696 - DNA, 80 bp, synthetic construct; identical to SEQ ID NO: 966
  source 1..80: mol_type = other DNA

SEQ ID NO: 185697 - DNA, 80 bp, synthetic construct; identical to SEQ ID NO: 967
  source 1..80: mol_type = other DNA

SEQ ID NO: 185698 - DNA, 80 bp, synthetic construct; identical to SEQ ID NO: 968
  source 1..80: mol_type = other DNA

SEQ ID NO: 185699 - DNA, 80 bp, synthetic construct; identical to SEQ ID NO: 969
  source 1..80: mol_type = other DNA

SEQ ID NO: 185700 - DNA, 80 bp, synthetic construct; identical to SEQ ID NO: 970
  source 1..80: mol_type = other DNA

SEQ ID NO: 185701 - DNA, 80 bp, synthetic construct; identical to SEQ ID NO: 971
  source 1..80: mol_type = other DNA

SEQ ID NO: 185702 - DNA, 80 bp, synthetic construct; identical to SEQ ID NO: 972
  source 1..80: mol_type = other DNA

SEQ ID NO: 185703 - DNA, 80 bp, synthetic construct; identical to SEQ ID NO: 973
  source 1..80: mol_type = other DNA

SEQ ID NO: 185704 - DNA, 80 bp, synthetic construct; identical to SEQ ID NO: 974
  source 1..80: mol_type = other DNA

SEQ ID NO: 185705 - DNA, 80 bp, synthetic construct; identical to SEQ ID NO: 975
  source 1..80: mol_type = other DNA

SEQ ID NO: 185706 - DNA, 80 bp, synthetic construct; identical to SEQ ID NO: 976
  source 1..80: mol_type = other DNA

SEQ ID NO: 185707 - DNA, 80 bp, synthetic construct; identical to SEQ ID NO: 977
  source 1..80: mol_type = other DNA

SEQ ID NO: 185708 - DNA, 80 bp, synthetic construct; identical to SEQ ID NO: 978
  source 1..80: mol_type = other DNA

SEQ ID NO: 185709 - DNA, 80 bp, synthetic construct; identical to SEQ ID NO: 979
  source 1..80: mol_type = other DNA

SEQ ID NO: 185710 - DNA, 80 bp, synthetic construct; identical to SEQ ID NO: 980
  source 1..80: mol_type = other DNA

SEQ ID NO: 185711 - DNA, 80 bp, synthetic construct; identical to SEQ ID NO: 981
  source 1..80: mol_type = other DNA

SEQ ID NO: 185712 - DNA, 80 bp, synthetic construct; identical to SEQ ID NO: 982
  source 1..80: mol_type = other DNA

SEQ ID NO: 185713 - DNA, 80 bp, synthetic construct; identical to SEQ ID NO: 983
  source 1..80: mol_type = other DNA

SEQ ID NO: 185714 - DNA, 80 bp, synthetic construct; identical to SEQ ID NO: 984
  source 1..80: mol_type = other DNA

SEQ ID NO: 185715 - DNA, 80 bp, synthetic construct; identical to SEQ ID NO: 985
  source 1..80: mol_type = other DNA

SEQ ID NO: 185716 - DNA, 80 bp, synthetic construct; identical to SEQ ID NO: 986
  source 1..80: mol_type = other DNA

SEQ ID NO: 185717 - DNA, 80 bp, synthetic construct; identical to SEQ ID NO: 987
  source 1..80: mol_type = other DNA

SEQ ID NO: 185718 - DNA, 80 bp, synthetic construct; identical to SEQ ID NO: 988
  source 1..80: mol_type = other DNA

SEQ ID NO: 185719 - DNA, 80 bp, synthetic construct; identical to SEQ ID NO: 989
  source 1..80: mol_type = other DNA

SEQ ID NO: 185720 - DNA, 80 bp, synthetic construct; identical to SEQ ID NO: 990
  source 1..80: mol_type = other DNA

SEQ ID NO: 185721 - DNA, 80 bp, synthetic construct; identical to SEQ ID NO: 991
  source 1..80: mol_type = other DNA

SEQ ID NO: 185722 - DNA, 80 bp, synthetic construct; identical to SEQ ID NO: 992
  source 1..80: mol_type = other DNA

SEQ ID NO: 185723 - DNA, 80 bp, synthetic construct; identical to SEQ ID NO: 993
  source 1..80: mol_type = other DNA

SEQ ID NO: 185724 - DNA, 80 bp, synthetic construct; identical to SEQ ID NO: 994
  source 1..80: mol_type = other DNA

SEQ ID NO: 185725 - DNA, 80 bp, synthetic construct; identical to SEQ ID NO: 995
  source 1..80: mol_type = other DNA

SEQ ID NO: 185726 - DNA, 80 bp, synthetic construct; identical to SEQ ID NO: 996
  source 1..80: mol_type = other DNA

SEQ ID NO: 185727 - DNA, 80 bp, synthetic construct; identical to SEQ ID NO: 997
  source 1..80: mol_type = other DNA

SEQ ID NO: 185728 - DNA, 80 bp, synthetic construct; identical to SEQ ID NO: 998
  source 1..80: mol_type = other DNA

SEQ ID NO: 185729 - DNA, 80 bp, synthetic construct; identical to SEQ ID NO: 999
  source 1..80: mol_type = other DNA

SEQ ID NO: 185730 - DNA, 80 bp, synthetic construct; identical to SEQ ID NO: 1000
  source 1..80: mol_type = other DNA

SEQ ID NO: 185731 - DNA, 80 bp, synthetic construct; identical to SEQ ID NO: 1001
  source 1..80: mol_type = other DNA

SEQ ID NO: 185732 - DNA, 80 bp, synthetic construct; identical to SEQ ID NO: 1002
  source 1..80: mol_type = other DNA

SEQ ID NO: 185733 - DNA, 80 bp, synthetic construct; identical to SEQ ID NO: 1003
  source 1..80: mol_type = other DNA

SEQ ID NO: 185734 - DNA, 80 bp, synthetic construct; identical to SEQ ID NO: 1004
  source 1..80: mol_type = other DNA

SEQ ID NO: 185735 - DNA, 80 bp, synthetic construct; identical to SEQ ID NO: 1005
  source 1..80: mol_type = other DNA

SEQ ID NO: 185736 - DNA, 80 bp, synthetic construct; identical to SEQ ID NO: 1006
  source 1..80: mol_type = other DNA

SEQ ID NO: 185737 - DNA, 80 bp, synthetic construct; identical to SEQ ID NO: 1007
  source 1..80: mol_type = other DNA

SEQ ID NO: 185738 - DNA, 80 bp, synthetic construct; identical to SEQ ID NO: 1008
  source 1..80: mol_type = other DNA

SEQ ID NO: 185739 - DNA, 80 bp, synthetic construct; identical to SEQ ID NO: 1009
  source 1..80: mol_type = other DNA

SEQ ID NO: 185740 - DNA, 80 bp, synthetic construct; identical to SEQ ID NO: 1010
  source 1..80: mol_type = other DNA

SEQ ID NO: 185741 - DNA, 80 bp, synthetic construct; identical to SEQ ID NO: 1011
  source 1..80: mol_type = other DNA

SEQ ID NO: 185742 - DNA, 80 bp, synthetic construct; identical to SEQ ID NO: 1012
  source 1..80: mol_type = other DNA

SEQ ID NO: 185743 - DNA, 80 bp, synthetic construct; identical to SEQ ID NO: 1013
  source 1..80: mol_type = other DNA

SEQ ID NO: 185744 - DNA, 80 bp, synthetic construct; identical to SEQ ID NO: 1014
  source 1..80: mol_type = other DNA

SEQ ID NO: 185745 - DNA, 80 bp, synthetic construct; identical to SEQ ID NO: 1015
  source 1..80: mol_type = other DNA

SEQ ID NO: 185746 - DNA, 80 bp, synthetic construct; identical to SEQ ID NO: 1016
  source 1..80: mol_type = other DNA

SEQ ID NO: 185747 - DNA, 80 bp, synthetic construct; identical to SEQ ID NO: 1017
  source 1..80: mol_type = other DNA

SEQ ID NO: 185748 - DNA, 80 bp, synthetic construct; identical to SEQ ID NO: 1018
  source 1..80: mol_type = other DNA

SEQ ID NO: 185749 - DNA, 80 bp, synthetic construct; identical to SEQ ID NO: 1019
  source 1..80: mol_type = other DNA

SEQ ID NO: 185750 - DNA, 80 bp, synthetic construct; identical to SEQ ID NO: 1020
  source 1..80: mol_type = other DNA

SEQ ID NO: 185751 - DNA, 80 bp, synthetic construct; identical to SEQ ID NO: 1021
  source 1..80: mol_type = other DNA

SEQ ID NO: 185752 - DNA, 80 bp, synthetic construct; identical to SEQ ID NO: 1022
  source 1..80: mol_type = other DNA

SEQ ID NO: 185753 - DNA, 80 bp, synthetic construct; identical to SEQ ID NO: 1023
  source 1..80: mol_type = other DNA

SEQ ID NO: 185754 - DNA, 80 bp, synthetic construct; identical to SEQ ID NO: 1024
  source 1..80: mol_type = other DNA

SEQ ID NO: 185755 - DNA, 80 bp, synthetic construct; identical to SEQ ID NO: 1025
  source 1..80: mol_type = other DNA

SEQ ID NO: 185756 - DNA, 80 bp, synthetic construct; identical to SEQ ID NO: 1026
  source 1..80: mol_type = other DNA

SEQ ID NO: 185757 - DNA, 80 bp, synthetic construct; identical to SEQ ID NO: 1027
  source 1..80: mol_type = other DNA

SEQ ID NO: 185758 - DNA, 80 bp, synthetic construct; identical to SEQ ID NO: 1028
  source 1..80: mol_type = other DNA

SEQ ID NO: 185759 - DNA, 80 bp, synthetic construct; identical to SEQ ID NO: 1029
  source 1..80: mol_type = other DNA

SEQ ID NO: 185760 - DNA, 80 bp, synthetic construct; identical to SEQ ID NO: 1030
  source 1..80: mol_type = other DNA

SEQ ID NO: 185761 - DNA, 80 bp, synthetic construct; identical to SEQ ID NO: 1031
  source 1..80: mol_type = other DNA

SEQ ID NO: 185762 - DNA, 80 bp, synthetic construct; identical to SEQ ID NO: 1032
  source 1..80: mol_type = other DNA

SEQ ID NO: 185763 - DNA, 80 bp, synthetic construct; identical to SEQ ID NO: 1033
  source 1..80: mol_type = other DNA

SEQ ID NO: 185764 - DNA, 80 bp, synthetic construct; identical to SEQ ID NO: 1034
  source 1..80: mol_type = other DNA

SEQ ID NO: 185765 - DNA, 80 bp, synthetic construct; identical to SEQ ID NO: 1035
  source 1..80: mol_type = other DNA

SEQ ID NO: 185766 - DNA, 80 bp, synthetic construct; identical to SEQ ID NO: 1036
  source 1..80: mol_type = other DNA

SEQ ID NO: 185767 - DNA, 80 bp, synthetic construct; identical to SEQ ID NO: 1037
  source 1..80: mol_type = other DNA

SEQ ID NO: 185768 - DNA, 80 bp, synthetic construct; identical to SEQ ID NO: 1038
  source 1..80: mol_type = other DNA

SEQ ID NO: 185769 - DNA, 80 bp, synthetic construct; identical to SEQ ID NO: 1039
  source 1..80: mol_type = other DNA

SEQ ID NO: 185770 - DNA, 80 bp, synthetic construct; identical to SEQ ID NO: 1040
  source 1..80: mol_type = other DNA

SEQ ID NO: 185771 - DNA, 80 bp, synthetic construct; identical to SEQ ID NO: 1041
  source 1..80: mol_type = other DNA

SEQ ID NO: 185772 - DNA, 80 bp, synthetic construct; identical to SEQ ID NO: 1042
  source 1..80: mol_type = other DNA

SEQ ID NO: 185773 - DNA, 80 bp, synthetic construct; identical to SEQ ID NO: 1043
  source 1..80: mol_type = other DNA

SEQ ID NO: 185774 - DNA, 80 bp, synthetic construct; identical to SEQ ID NO: 1044
  source 1..80: mol_type = other DNA

SEQ ID NO: 185775 - DNA, 80 bp, synthetic construct; identical to SEQ ID NO: 1045
  source 1..80: mol_type = other DNA

SEQ ID NO: 185776 - DNA, 80 bp, synthetic construct; identical to SEQ ID NO: 1046
  source 1..80: mol_type = other DNA

SEQ ID NO: 185777 - DNA, 80 bp, synthetic construct; identical to SEQ ID NO: 1047
  source 1..80: mol_type = other DNA

SEQ ID NO: 185778 - DNA, 80 bp, synthetic construct; identical to SEQ ID NO: 1048
  source 1..80: mol_type = other DNA

SEQ ID NO: 185779 - DNA, 80 bp, synthetic construct; identical to SEQ ID NO: 1049
  source 1..80: mol_type = other DNA

SEQ ID NO: 185780 - DNA, 80 bp, synthetic construct; identical to SEQ ID NO: 1050
  source 1..80: mol_type = other DNA

SEQ ID NO: 185781 - DNA, 80 bp, synthetic construct; identical to SEQ ID NO: 1051
  source 1..80: mol_type = other DNA

SEQ ID NO: 185782 - DNA, 80 bp, synthetic construct; identical to SEQ ID NO: 1052
  source 1..80: mol_type = other DNA

SEQ ID NO: 185783 - DNA, 80 bp, synthetic construct; identical to SEQ ID NO: 1053
  source 1..80: mol_type = other DNA

SEQ ID NO: 185784 - DNA, 80 bp, synthetic construct; identical to SEQ ID NO: 1054
  source 1..80: mol_type = other DNA

SEQ ID NO: 185785 - DNA, 80 bp, synthetic construct; identical to SEQ ID NO: 1055
  source 1..80: mol_type = other DNA

SEQ ID NO: 185786 - DNA, 80 bp, synthetic construct; identical to SEQ ID NO: 1056
  source 1..80: mol_type = other DNA

SEQ ID NO: 185787 - DNA, 80 bp, synthetic construct; identical to SEQ ID NO: 1057
  source 1..80: mol_type = other DNA

SEQ ID NO: 185788 - DNA, 80 bp, synthetic construct; identical to SEQ ID NO: 1058
  source 1..80: mol_type = other DNA

SEQ ID NO: 185789 - DNA, 80 bp, synthetic construct; identical to SEQ ID NO: 1059
  source 1..80: mol_type = other DNA

SEQ ID NO: 185790 - DNA, 80 bp, synthetic construct; identical to SEQ ID NO: 1060
  source 1..80: mol_type = other DNA

SEQ ID NO: 185791 - DNA, 80 bp, synthetic construct; identical to SEQ ID NO: 1061
  source 1..80: mol_type = other DNA

SEQ ID NO: 185792 - DNA, 80 bp, synthetic construct; identical to SEQ ID NO: 1062
  source 1..80: mol_type = other DNA

SEQ ID NO: 185793 - DNA, 80 bp, synthetic construct; identical to SEQ ID NO: 1063
  source 1..80: mol_type = other DNA

SEQ ID NO: 185794 - DNA, 80 bp, synthetic construct; identical to SEQ ID NO: 1064
  source 1..80: mol_type = other DNA

SEQ ID NO: 185795 - DNA, 80 bp, synthetic construct; identical to SEQ ID NO: 1065
  source 1..80: mol_type = other DNA

SEQ ID NO: 185796 - DNA, 80 bp, synthetic construct; identical to SEQ ID NO: 1066
  source 1..80: mol_type = other DNA

SEQ ID NO: 185797 - DNA, 80 bp, synthetic construct; identical to SEQ ID NO: 1067
  source 1..80: mol_type = other DNA

SEQ ID NO: 185798 - DNA, 80 bp, synthetic construct; identical to SEQ ID NO: 1068
  source 1..80: mol_type = other DNA

SEQ ID NO: 185799 - DNA, 80 bp, synthetic construct; identical to SEQ ID NO: 1069
  source 1..80: mol_type = other DNA

SEQ ID NO: 185800 - DNA, 80 bp, synthetic construct; identical to SEQ ID NO: 1070
  source 1..80: mol_type = other DNA

SEQ ID NO: 185801 - DNA, 80 bp, synthetic construct; identical to SEQ ID NO: 1071
  source 1..80: mol_type = other DNA

SEQ ID NO: 185802 - DNA, 80 bp, synthetic construct; identical to SEQ ID NO: 1072
  source 1..80: mol_type = other DNA

SEQ ID NO: 185803 - DNA, 80 bp, synthetic construct; identical to SEQ ID NO: 1073
  source 1..80: mol_type = other DNA

SEQ ID NO: 185804 - DNA, 80 bp, synthetic construct; identical to SEQ ID NO: 1074
  source 1..80: mol_type = other DNA

SEQ ID NO: 185805 - DNA, 80 bp, synthetic construct; identical to SEQ ID NO: 1075
  source 1..80: mol_type = other DNA

SEQ ID NO: 185806 - DNA, 80 bp, synthetic construct; identical to SEQ ID NO: 1076
  source 1..80: mol_type = other DNA

SEQ ID NO: 185807 - DNA, 80 bp, synthetic construct; identical to SEQ ID NO: 1077
  source 1..80: mol_type = other DNA

SEQ ID NO: 185808 - DNA, 80 bp, synthetic construct; identical to SEQ ID NO: 1078
  source 1..80: mol_type = other DNA

SEQ ID NO: 185809 - DNA, 80 bp, synthetic construct; identical to SEQ ID NO: 1079
  source 1..80: mol_type = other DNA

SEQ ID NO: 185810 - DNA, 80 bp, synthetic construct; identical to SEQ ID NO: 1080
  source 1..80: mol_type = other DNA

SEQ ID NO: 185811 - DNA, 80 bp, synthetic construct; identical to SEQ ID NO: 1081
  source 1..80: mol_type = other DNA

SEQ ID NO: 185812 - DNA, 80 bp, synthetic construct; identical to SEQ ID NO: 1082
  source 1..80: mol_type = other DNA

SEQ ID NO: 185813 - DNA, 80 bp, synthetic construct; identical to SEQ ID NO: 1083
  source 1..80: mol_type = other DNA

SEQ ID NO: 185814 - DNA, 80 bp, synthetic construct; identical to SEQ ID NO: 1084
  source 1..80: mol_type = other DNA

SEQ ID NO: 185815 - DNA, 80 bp, synthetic construct; identical to SEQ ID NO: 1085
  source 1..80: mol_type = other DNA

SEQ ID NO: 185816 - DNA, 80 bp, synthetic construct; identical to SEQ ID NO: 1086
  source 1..80: mol_type = other DNA

SEQ ID NO: 185817 - DNA, 80 bp, synthetic construct; identical to SEQ ID NO: 1087
  source 1..80: mol_type = other DNA

SEQ ID NO: 185818 - DNA, 80 bp, synthetic construct; identical to SEQ ID NO: 1088
  source 1..80: mol_type = other DNA

SEQ ID NO: 185819 - DNA, 80 bp, synthetic construct; identical to SEQ ID NO: 1089
  source 1..80: mol_type = other DNA

SEQ ID NO: 185820 - DNA, 80 bp, synthetic construct; identical to SEQ ID NO: 1090
  source 1..80: mol_type = other DNA

SEQ ID NO: 185821 - DNA, 80 bp, synthetic construct; identical to SEQ ID NO: 1091
  source 1..80: mol_type = other DNA

SEQ ID NO: 185822 - DNA, 80 bp, synthetic construct; identical to SEQ ID NO: 1092
  source 1..80: mol_type = other DNA

SEQ ID NO: 185823 - DNA, 80 bp, synthetic construct; identical to SEQ ID NO: 1093
  source 1..80: mol_type = other DNA

SEQ ID NO: 185824 - DNA, 80 bp, synthetic construct; identical to SEQ ID NO: 1094
  source 1..80: mol_type = other DNA

SEQ ID NO: 185825 - DNA, 80 bp, synthetic construct; identical to SEQ ID NO: 1095
  source 1..80: mol_type = other DNA

SEQ ID NO: 185826 - DNA, 80 bp, synthetic construct; identical to SEQ ID NO: 1096
  source 1..80: mol_type = other DNA

SEQ ID NO: 185827 - DNA, 80 bp, synthetic construct; identical to SEQ ID NO: 1097
  source 1..80: mol_type = other DNA

SEQ ID NO: 185828 - DNA, 80 bp, synthetic construct; identical to SEQ ID NO: 1098
  source 1..80: mol_type = other DNA

SEQ ID NO: 185829 - DNA, 80 bp, synthetic construct; identical to SEQ ID NO: 1099
  source 1..80: mol_type = other DNA

SEQ ID NO: 185830 - DNA, 80 bp, synthetic construct; identical to SEQ ID NO: 1100
  source 1..80: mol_type = other DNA

SEQ ID NO: 185831 - DNA, 80 bp, synthetic construct; identical to SEQ ID NO: 1101
  source 1..80: mol_type = other DNA

SEQ ID NO: 185832 - DNA, 80 bp, synthetic construct; identical to SEQ ID NO: 1102
  source 1..80: mol_type = other DNA

SEQ ID NO: 185833 - DNA, 80 bp, synthetic construct; identical to SEQ ID NO: 1103
  source 1..80: mol_type = other DNA

SEQ ID NO: 185834 - DNA, 80 bp, synthetic construct; identical to SEQ ID NO: 1104
  source 1..80: mol_type = other DNA

SEQ ID NO: 185835 - DNA, 80 bp, synthetic construct; identical to SEQ ID NO: 1105
  source 1..80: mol_type = other DNA

SEQ ID NO: 185836 - DNA, 80 bp, synthetic construct; identical to SEQ ID NO: 1106
  source 1..80: mol_type = other DNA

SEQ ID NO: 185837 - DNA, 80 bp, synthetic construct; identical to SEQ ID NO: 1107
  source 1..80: mol_type = other DNA

SEQ ID NO: 185838 - DNA, 80 bp, synthetic construct; identical to SEQ ID NO: 1108
  source 1..80: mol_type = other DNA

SEQ ID NO: 185839 - DNA, 80 bp, synthetic construct; identical to SEQ ID NO: 1109
  source 1..80: mol_type = other DNA

SEQ ID NO: 185840 - DNA, 80 bp, synthetic construct; identical to SEQ ID NO: 1110
  source 1..80: mol_type = other DNA

SEQ ID NO: 185841 - DNA, 80 bp, synthetic construct; identical to SEQ ID NO: 1111
  source 1..80: mol_type = other DNA

SEQ ID NO: 185842 - DNA, 80 bp, synthetic construct; identical to SEQ ID NO: 1112
  source 1..80: mol_type = other DNA

SEQ ID NO: 185843 - DNA, 80 bp, synthetic construct; identical to SEQ ID NO: 1113
  source 1..80: mol_type = other DNA

SEQ ID NO: 185844 - DNA, 80 bp, synthetic construct; identical to SEQ ID NO: 1114
  source 1..80: mol_type = other DNA

SEQ ID NO: 185845 - DNA, 80 bp, synthetic construct; identical to SEQ ID NO: 1115
  source 1..80: mol_type = other DNA

SEQ ID NO: 185846 - DNA, 80 bp, synthetic construct; identical to SEQ ID NO: 1116
  source 1..80: mol_type = other DNA

SEQ ID NO: 185847 - DNA, 80 bp, synthetic construct; identical to SEQ ID NO: 1117
  source 1..80: mol_type = other DNA

SEQ ID NO: 185848 - DNA, 80 bp, synthetic construct; identical to SEQ ID NO: 1118
  source 1..80: mol_type = other DNA

SEQ ID NO: 185849 - DNA, 80 bp, synthetic construct; identical to SEQ ID NO: 1119
  source 1..80: mol_type = other DNA

SEQ ID NO: 185850 - DNA, 80 bp, synthetic construct; identical to SEQ ID NO: 1120
  source 1..80: mol_type = other DNA

SEQ ID NO: 185851 - DNA, 80 bp, synthetic construct; identical to SEQ ID NO: 1121
  source 1..80: mol_type = other DNA

SEQ ID NO: 185852 - DNA, 80 bp, synthetic construct; identical to SEQ ID NO: 1122
  source 1..80: mol_type = other DNA

SEQ ID NO: 185853 - DNA, 80 bp, synthetic construct; identical to SEQ ID NO: 1123
  source 1..80: mol_type = other DNA

SEQ ID NO: 185854 - DNA, 80 bp, synthetic construct; identical to SEQ ID NO: 1124
  source 1..80: mol_type = other DNA

SEQ ID NO: 185855 - DNA, 80 bp, synthetic construct; identical to SEQ ID NO: 1125
  source 1..80: mol_type = other DNA

SEQ ID NO: 185856 - DNA, 80 bp, synthetic construct; identical to SEQ ID NO: 1126
  source 1..80: mol_type = other DNA

SEQ ID NO: 185857 - DNA, 80 bp, synthetic construct; identical to SEQ ID NO: 1127
  source 1..80: mol_type = other DNA

SEQ ID NO: 185858 - DNA, 80 bp, synthetic construct; identical to SEQ ID NO: 1128
  source 1..80: mol_type = other DNA

SEQ ID NO: 185859 - DNA, 80 bp, synthetic construct; identical to SEQ ID NO: 1129
  source 1..80: mol_type = other DNA

SEQ ID NO: 185860 - DNA, 80 bp, synthetic construct; identical to SEQ ID NO: 1130
  source 1..80: mol_type = other DNA

SEQ ID NO: 185861 - DNA, 80 bp, synthetic construct; identical to SEQ ID NO: 1131
  source 1..80: mol_type = other DNA

SEQ ID NO: 185862 - DNA, 80 bp, synthetic construct; identical to SEQ ID NO: 1132
  source 1..80: mol_type = other DNA

SEQ ID NO: 185863 - DNA, 80 bp, synthetic construct; identical to SEQ ID NO: 1133
  source 1..80: mol_type = other DNA

SEQ ID NO: 185864 - DNA, 80 bp, synthetic construct; identical to SEQ ID NO: 1134
  source 1..80: mol_type = other DNA

SEQ ID NO: 185865 - DNA, 80 bp, synthetic construct; identical to SEQ ID NO: 1135
  source 1..80: mol_type = other DNA

SEQ ID NO: 185866 - DNA, 80 bp, synthetic construct; identical to SEQ ID NO: 1136
  source 1..80: mol_type = other DNA

SEQ ID NO: 185867 - DNA, 80 bp, synthetic construct; identical to SEQ ID NO: 1137
  source 1..80: mol_type = other DNA

SEQ ID NO: 185868 - DNA, 80 bp, synthetic construct; identical to SEQ ID NO: 1138
  source 1..80: mol_type = other DNA

SEQ ID NO: 185869 - DNA, 80 bp, synthetic construct; identical to SEQ ID NO: 1139
  source 1..80: mol_type = other DNA

SEQ ID NO: 185870 - DNA, 80 bp, synthetic construct; identical to SEQ ID NO: 1140
  source 1..80: mol_type = other DNA

SEQ ID NO: 185871 - DNA, 80 bp, synthetic construct; identical to SEQ ID NO: 1141
  source 1..80: mol_type = other DNA

SEQ ID NO: 185872 - DNA, 80 bp, synthetic construct; identical to SEQ ID NO: 1142
  source 1..80: mol_type = other DNA

SEQ ID NO: 185873 - DNA, 80 bp, synthetic construct; identical to SEQ ID NO: 1143
  source 1..80: mol_type = other DNA

SEQ ID NO: 185874 - DNA, 80 bp, synthetic construct; identical to SEQ ID NO: 1144
  source 1..80: mol_type = other DNA

SEQ ID NO: 185875 - DNA, 80 bp, synthetic construct; identical to SEQ ID NO: 1145
  source 1..80: mol_type = other DNA

SEQ ID NO: 185876 - DNA, 80 bp, synthetic construct; identical to SEQ ID NO: 1146
  source 1..80: mol_type = other DNA

SEQ ID NO: 185877 - DNA, 80 bp, synthetic construct; identical to SEQ ID NO: 1147
  source 1..80: mol_type = other DNA

SEQ ID NO: 185878 - DNA, 80 bp, synthetic construct; identical to SEQ ID NO: 1148
  source 1..80: mol_type = other DNA

SEQ ID NO: 185879 - DNA, 80 bp, synthetic construct; identical to SEQ ID NO: 1149
  source 1..80: mol_type = other DNA

SEQ ID NO: 185880 - DNA, 80 bp, synthetic construct; identical to SEQ ID NO: 1150
  source 1..80: mol_type = other DNA

SEQ ID NO: 185881 - DNA, 80 bp, synthetic construct; identical to SEQ ID NO: 1151
  source 1..80: mol_type = other DNA

SEQ ID NO: 185882 - DNA, 80 bp, synthetic construct; identical to SEQ ID NO: 1152
  source 1..80: mol_type = other DNA

SEQ ID NO: 185883 - DNA, 80 bp, synthetic construct; identical to SEQ ID NO: 1153
  source 1..80: mol_type = other DNA

SEQ ID NO: 185884 - DNA, 80 bp, synthetic construct; identical to SEQ ID NO: 1154
  source 1..80: mol_type = other DNA

SEQ ID NO: 185885 - DNA, 80 bp, synthetic construct; identical to SEQ ID NO: 1155
  source 1..80: mol_type = other DNA

SEQ ID NO: 185886 - DNA, 80 bp, synthetic construct; identical to SEQ ID NO: 1156
  source 1..80: mol_type = other DNA

SEQ ID NO: 185887 - DNA, 80 bp, synthetic construct; identical to SEQ ID NO: 1157
  source 1..80: mol_type = other DNA

SEQ ID NO: 185888 - DNA, 80 bp, synthetic construct; identical to SEQ ID NO: 1158
  source 1..80: mol_type = other DNA

SEQ ID NO: 185889 - DNA, 80 bp, synthetic construct; identical to SEQ ID NO: 1159
  source 1..80: mol_type = other DNA

SEQ ID NO: 185890 - DNA, 80 bp, synthetic construct; identical to SEQ ID NO: 1160
  source 1..80: mol_type = other DNA

SEQ ID NO: 185891 - DNA, 80 bp, synthetic construct; identical to SEQ ID NO: 1161
  source 1..80: mol_type = other DNA

SEQ ID NO: 185892 - DNA, 80 bp, synthetic construct; identical to SEQ ID NO: 1162
  source 1..80: mol_type = other DNA

SEQ ID NO: 185893 - DNA, 80 bp, synthetic construct; identical to SEQ ID NO: 1163
  source 1..80: mol_type = other DNA

SEQ ID NO: 185894 - DNA, 80 bp, synthetic construct; identical to SEQ ID NO: 1164
  source 1..80: mol_type = other DNA

SEQ ID NO: 185895 - DNA, 80 bp, synthetic construct; identical to SEQ ID NO: 1165
  source 1..80: mol_type = other DNA

SEQ ID NO: 185896 - DNA, 80 bp, synthetic construct; identical to SEQ ID NO: 1166
  source 1..80: mol_type = other DNA

SEQ ID NO: 185897 - DNA, 80 bp, synthetic construct; identical to SEQ ID NO: 1167
  source 1..80: mol_type = other DNA

SEQ ID NO: 185898 - DNA, 80 bp, synthetic construct; identical to SEQ ID NO: 1168
  source 1..80: mol_type = other DNA

SEQ ID NO: 185899 - DNA, 80 bp, synthetic construct; identical to SEQ ID NO: 1169
  source 1..80: mol_type = other DNA

SEQ ID NO: 185900 - DNA, 80 bp, synthetic construct; identical to SEQ ID NO: 1170
  source 1..80: mol_type = other DNA

SEQ ID NO: 185901 - DNA, 80 bp, synthetic construct; identical to SEQ ID NO: 1171
  source 1..80: mol_type = other DNA

SEQ ID NO: 185902 - DNA, 80 bp, synthetic construct; identical to SEQ ID NO: 1172
  source 1..80: mol_type = other DNA

SEQ ID NO: 185903 - DNA, 80 bp, synthetic construct; identical to SEQ ID NO: 1173
  source 1..80: mol_type = other DNA

SEQ ID NO: 185904 - DNA, 80 bp, synthetic construct; identical to SEQ ID NO: 1174
  source 1..80: mol_type = other DNA

SEQ ID NO: 185905 - DNA, 80 bp, synthetic construct; identical to SEQ ID NO: 1175
  source 1..80: mol_type = other DNA

SEQ ID NO: 185906 - DNA, 80 bp, synthetic construct; identical to SEQ ID NO: 1176
  source 1..80: mol_type = other DNA

SEQ ID NO: 185907 - DNA, 80 bp, synthetic construct; identical to SEQ ID NO: 1177
  source 1..80: mol_type = other DNA

SEQ ID NO: 185908 - DNA, 80 bp, synthetic construct; identical to SEQ ID NO: 1178
  source 1..80: mol_type = other DNA

SEQ ID NO: 185909 - DNA, 80 bp, synthetic construct; identical to SEQ ID NO: 1179
  source 1..80: mol_type = other DNA

SEQ ID NO: 185910 - DNA, 80 bp, synthetic construct; identical to SEQ ID NO: 1180
  source 1..80: mol_type = other DNA

SEQ ID NO: 185911 - DNA, 80 bp, synthetic construct; identical to SEQ ID NO: 1181
  source 1..80: mol_type = other DNA

SEQ ID NO: 185912 - DNA, 80 bp, synthetic construct; identical to SEQ ID NO: 1182
  source 1..80: mol_type = other DNA

SEQ ID NO: 185913 - DNA, 80 bp, synthetic construct; identical to SEQ ID NO: 1183
  source 1..80: mol_type = other DNA

SEQ ID NO: 185914 - DNA, 80 bp, synthetic construct; identical to SEQ ID NO: 1184
  source 1..80: mol_type = other DNA

SEQ ID NO: 185915 - DNA, 80 bp, synthetic construct; identical to SEQ ID NO: 1185
  source 1..80: mol_type = other DNA

SEQ ID NO: 185916 - DNA, 80 bp, synthetic construct; identical to SEQ ID NO: 1186
  source 1..80: mol_type = other DNA

SEQ ID NO: 185917 - DNA, 80 bp, synthetic construct; identical to SEQ ID NO: 1187
  source 1..80: mol_type = other DNA

SEQ ID NO: 185918 - DNA, 80 bp, synthetic construct; identical to SEQ ID NO: 1188
  source 1..80: mol_type = other DNA

SEQ ID NO: 185919 - DNA, 80 bp, synthetic construct; identical to SEQ ID NO: 1189
  source 1..80: mol_type = other DNA

SEQ ID NO: 185920 - DNA, 80 bp, synthetic construct; identical to SEQ ID NO: 1190
  source 1..80: mol_type = other DNA

SEQ ID NO: 185921 - DNA, 80 bp, synthetic construct; identical to SEQ ID NO: 1191
  source 1..80: mol_type = other DNA

SEQ ID NO: 185922 - DNA, 80 bp, synthetic construct; identical to SEQ ID NO: 1192
  source 1..80: mol_type = other DNA

SEQ ID NO: 185923 - DNA, 80 bp, synthetic construct; identical to SEQ ID NO: 1193
  source 1..80: mol_type = other DNA

SEQ ID NO: 185924 - DNA, 80 bp, synthetic construct; identical to SEQ ID NO: 1194
  source 1..80: mol_type = other DNA

SEQ ID NO: 185925 - DNA, 80 bp, synthetic construct; identical to SEQ ID NO: 1195
  source 1..80: mol_type = other DNA

SEQ ID NO: 185926 - DNA, 80 bp, synthetic construct; identical to SEQ ID NO: 1196
  source 1..80: mol_type = other DNA

SEQ ID NO: 185927 - DNA, 80 bp, synthetic construct; identical to SEQ ID NO: 1197
  source 1..80: mol_type = other DNA

SEQ ID NO: 185928 - DNA, 80 bp, synthetic construct; identical to SEQ ID NO: 1198
  source 1..80: mol_type = other DNA

SEQ ID NO: 185929 - DNA, 80 bp, synthetic construct; identical to SEQ ID NO: 1199
  source 1..80: mol_type = other DNA

SEQ ID NO: 185930 - DNA, 80 bp, synthetic construct; identical to SEQ ID NO: 1200
  source 1..80: mol_type = other DNA

SEQ ID NO: 185931 - DNA, 80 bp, synthetic construct; identical to SEQ ID NO: 1201
  source 1..80: mol_type = other DNA

SEQ ID NO: 185932 - DNA, 80 bp, synthetic construct; identical to SEQ ID NO: 1202
  source 1..80: mol_type = other DNA

SEQ ID NO: 185933 - DNA, 80 bp, synthetic construct; identical to SEQ ID NO: 1203
  source 1..80: mol_type = other DNA

SEQ ID NO: 185934 - DNA, 80 bp, synthetic construct; identical to SEQ ID NO: 1204
  source 1..80: mol_type = other DNA

SEQ ID NO: 185935 - DNA, 80 bp, synthetic construct; identical to SEQ ID NO: 1205
  source 1..80: mol_type = other DNA

SEQ ID NO: 185936 - DNA, 80 bp, synthetic construct; identical to SEQ ID NO: 1206
  source 1..80: mol_type = other DNA

SEQ ID NO: 185937 - DNA, 80 bp, synthetic construct; identical to SEQ ID NO: 1207
  source 1..80: mol_type = other DNA

SEQ ID NO: 185938 - DNA, 80 bp, synthetic construct; identical to SEQ ID NO: 1208
  source 1..80: mol_type = other DNA

SEQ ID NO: 185939 - DNA, 80 bp, synthetic construct; identical to SEQ ID NO: 1209
  source 1..80: mol_type = other DNA

SEQ ID NO: 185940 - DNA, 80 bp, synthetic construct; identical to SEQ ID NO: 1210
  source 1..80: mol_type = other DNA

SEQ ID NO: 185941 - DNA, 80 bp, synthetic construct; identical to SEQ ID NO: 1211
  source 1..80: mol_type = other DNA

SEQ ID NO: 185942 - DNA, 80 bp, synthetic construct; identical to SEQ ID NO: 1212
  source 1..80: mol_type = other DNA

SEQ ID NO: 185943 - DNA, 80 bp, synthetic construct; identical to SEQ ID NO: 1213
  source 1..80: mol_type = other DNA

SEQ ID NO: 185944 - DNA, 80 bp, synthetic construct; identical to SEQ ID NO: 1214
  source 1..80: mol_type = other DNA

SEQ ID NO: 185945 - DNA, 80 bp, synthetic construct; identical to SEQ ID NO: 1215
  source 1..80: mol_type = other DNA

SEQ ID NO: 185946 - DNA, 80 bp, synthetic construct; identical to SEQ ID NO: 1216
  source 1..80: mol_type = other DNA

SEQ ID NO: 185947 - DNA, 80 bp, synthetic construct; identical to SEQ ID NO: 1217
  source 1..80: mol_type = other DNA

SEQ ID NO: 185948 - DNA, 80 bp, synthetic construct; identical to SEQ ID NO: 1218
  source 1..80: mol_type = other DNA

SEQ ID NO: 185949 - DNA, 80 bp, synthetic construct; identical to SEQ ID NO: 1219
  source 1..80: mol_type = other DNA

SEQ ID NO: 185950 - DNA, 80 bp, synthetic construct; identical to SEQ ID NO: 1220
  source 1..80: mol_type = other DNA

SEQ ID NO: 185951 - DNA, 80 bp, synthetic construct; identical to SEQ ID NO: 1221
  source 1..80: mol_type = other DNA

SEQ ID NO: 185952 - DNA, 80 bp, synthetic construct; identical to SEQ ID NO: 1222
  source 1..80: mol_type = other DNA

SEQ ID NO: 185953 - DNA, 80 bp, synthetic construct; identical to SEQ ID NO: 1223
  source 1..80: mol_type = other DNA

SEQ ID NO: 185954 - DNA, 80 bp, synthetic construct; identical to SEQ ID NO: 1224
  source 1..80: mol_type = other DNA

SEQ ID NO: 185955 - DNA, 80 bp, synthetic construct; identical to SEQ ID NO: 1225
  source 1..80: mol_type = other DNA

SEQ ID NO: 185956 - DNA, 80 bp, synthetic construct; identical to SEQ ID NO: 1226
  source 1..80: mol_type = other DNA

SEQ ID NO: 185957 - DNA, 80 bp, synthetic construct; identical to SEQ ID NO: 1227
  source 1..80: mol_type = other DNA

SEQ ID NO: 185958 - DNA, 80 bp, synthetic construct; identical to SEQ ID NO: 1228
  source 1..80: mol_type = other DNA

SEQ ID NO: 185959 - DNA, 80 bp, synthetic construct; identical to SEQ ID NO: 1229
  source 1..80: mol_type = other DNA

SEQ ID NO: 185960 - DNA, 80 bp, synthetic construct; identical to SEQ ID NO: 1230
  source 1..80: mol_type = other DNA

SEQ ID NO: 185961 - DNA, 80 bp, synthetic construct; identical to SEQ ID NO: 1231
  source 1..80: mol_type = other DNA

SEQ ID NO: 185962 - DNA, 80 bp, synthetic construct; identical to SEQ ID NO: 1232
  source 1..80: mol_type = other DNA

SEQ ID NO: 185963 - DNA, 80 bp, synthetic construct; identical to SEQ ID NO: 1233
  source 1..80: mol_type = other DNA

SEQ ID NO: 185964 - DNA, 80 bp, synthetic construct; identical to SEQ ID NO: 1234
  source 1..80: mol_type = other DNA

SEQ ID NO: 185965 - DNA, 80 bp, synthetic construct; identical to SEQ ID NO: 1235
  source 1..80: mol_type = other DNA

SEQ ID NO: 185966 - DNA, 80 bp, synthetic construct; identical to SEQ ID NO: 1236
  source 1..80: mol_type = other DNA

SEQ ID NO: 185967 - DNA, 80 bp, synthetic construct; identical to SEQ ID NO: 1237
  source 1..80: mol_type = other DNA

SEQ ID NO: 185968 - DNA, 80 bp, synthetic construct; identical to SEQ ID NO: 1238
  source 1..80: mol_type = other DNA

SEQ ID NO: 185969 - DNA, 80 bp, synthetic construct; identical to SEQ ID NO: 1239
  source 1..80: mol_type = other DNA

SEQ ID NO: 185970 - DNA, 80 bp, synthetic construct; identical to SEQ ID NO: 1240
  source 1..80: mol_type = other DNA

SEQ ID NO: 185971 - DNA, 80 bp, synthetic construct; identical to SEQ ID NO: 1241
  source 1..80: mol_type = other DNA

SEQ ID NO: 185972 - DNA, 80 bp, synthetic construct; identical to SEQ ID NO: 1242
  source 1..80: mol_type = other DNA

SEQ ID NO: 185973 - DNA, 80 bp, synthetic construct; identical to SEQ ID NO: 1243
  source 1..80: mol_type = other DNA

SEQ ID NO: 185974 - DNA, 80 bp, synthetic construct; identical to SEQ ID NO: 1244
  source 1..80: mol_type = other DNA

SEQ ID NO: 185975 - DNA, 80 bp, synthetic construct; identical to SEQ ID NO: 1245
  source 1..80: mol_type = other DNA

SEQ ID NO: 185976 - DNA, 80 bp, synthetic construct; identical to SEQ ID NO: 1246
  source 1..80: mol_type = other DNA

SEQ ID NO: 185977 - DNA, 80 bp, synthetic construct; identical to SEQ ID NO: 1247
  source 1..80: mol_type = other DNA

SEQ ID NO: 185978 - DNA, 80 bp, synthetic construct; identical to SEQ ID NO: 1248
  source 1..80: mol_type = other DNA

SEQ ID NO: 185979 - DNA, 80 bp, synthetic construct; identical to SEQ ID NO: 1249
  source 1..80: mol_type = other DNA

SEQ ID NO: 185980 - DNA, 80 bp, synthetic construct; identical to SEQ ID NO: 1250
  source 1..80: mol_type = other DNA

SEQ ID NO: 185981 - DNA, 80 bp, synthetic construct; identical to SEQ ID NO: 1251
  source 1..80: mol_type = other DNA

SEQ ID NO: 185982 - DNA, 80 bp, synthetic construct; identical to SEQ ID NO: 1252
  source 1..80: mol_type = other DNA

SEQ ID NO: 185983 - DNA, 80 bp, synthetic construct; identical to SEQ ID NO: 1253
  source 1..80: mol_type = other DNA

SEQ ID NO: 185984 - DNA, 80 bp, synthetic construct; identical to SEQ ID NO: 1254
  source 1..80: mol_type = other DNA

SEQ ID NO: 185985 - DNA, 80 bp, synthetic construct; identical to SEQ ID NO: 1255
  source 1..80: mol_type = other DNA

SEQ ID NO: 185986 - DNA, 80 bp, synthetic construct; identical to SEQ ID NO: 1256
  source 1..80: mol_type = other DNA

SEQ ID NO: 185987 - DNA, 80 bp, synthetic construct; identical to SEQ ID NO: 1257
  source 1..80: mol_type = other DNA

SEQ ID NO: 185988 - DNA, 80 bp, synthetic construct; identical to SEQ ID NO: 1258
  source 1..80: mol_type = other DNA

SEQ ID NO: 185989 - DNA, 80 bp, synthetic construct; identical to SEQ ID NO: 1259
  source 1..80: mol_type = other DNA

SEQ ID NO: 185990 - DNA, 80 bp, synthetic construct; identical to SEQ ID NO: 1260
  source 1..80: mol_type = other DNA

SEQ ID NO: 185991 - DNA, 80 bp, synthetic construct; identical to SEQ ID NO: 1261
  source 1..80: mol_type = other DNA

SEQ ID NO: 185992 - DNA, 80 bp, synthetic construct; identical to SEQ ID NO: 1262
  source 1..80: mol_type = other DNA

SEQ ID NO: 185993 - DNA, 80 bp, synthetic construct; identical to SEQ ID NO: 1263
  source 1..80: mol_type = other DNA

SEQ ID NO: 185994 - DNA, 80 bp, synthetic construct; identical to SEQ ID NO: 1264
  source 1..80: mol_type = other DNA

SEQ ID NO: 185995 - DNA, 80 bp, synthetic construct; identical to SEQ ID NO: 1265
  source 1..80: mol_type = other DNA

SEQ ID NO: 185996 - DNA, 80 bp, synthetic construct; identical to SEQ ID NO: 1266
  source 1..80: mol_type = other DNA

SEQ ID NO: 185997 - DNA, 80 bp, synthetic construct; identical to SEQ ID NO: 1267
  source 1..80: mol_type = other DNA

SEQ ID NO: 185998 - DNA, 80 bp, synthetic construct; identical to SEQ ID NO: 1268
  source 1..80: mol_type = other DNA

SEQ ID NO: 185999 - DNA, 80 bp, synthetic construct; identical to SEQ ID NO: 1269
  source 1..80: mol_type = other DNA

SEQ ID NO: 186000 - DNA, 80 bp, synthetic construct; identical to SEQ ID NO: 1270
  source 1..80: mol_type = other DNA

SEQ ID NO: 186001 - DNA, 80 bp, synthetic construct; identical to SEQ ID NO: 1271
  source 1..80: mol_type = other DNA

SEQ ID NO: 186002 - DNA, 80 bp, synthetic construct; identical to SEQ ID NO: 1272
  source 1..80: mol_type = other DNA

SEQ ID NO: 186003 - DNA, 80 bp, synthetic construct; identical to SEQ ID NO: 1273
  source 1..80: mol_type = other DNA

SEQ ID NO: 186004 - DNA, 80 bp, synthetic construct; identical to SEQ ID NO: 1274
  source 1..80: mol_type = other DNA

SEQ ID NO: 186005 - DNA, 80 bp, synthetic construct; identical to SEQ ID NO: 1275
  source 1..80: mol_type = other DNA

SEQ ID NO: 186006 - DNA, 80 bp, synthetic construct; identical to SEQ ID NO: 1276
  source 1..80: mol_type = other DNA

SEQ ID NO: 186007 - DNA, 80 bp, synthetic construct; identical to SEQ ID NO: 1277
  source 1..80: mol_type = other DNA

SEQ ID NO: 186008 - DNA, 80 bp, synthetic construct; identical to SEQ ID NO: 1278
  source 1..80: mol_type = other DNA

SEQ ID NO: 186009 - DNA, 80 bp, synthetic construct; identical to SEQ ID NO: 1279
  source 1..80: mol_type = other DNA

SEQ ID NO: 186010 - DNA, 80 bp, synthetic construct; identical to SEQ ID NO: 1280
  source 1..80: mol_type = other DNA

SEQ ID NO: 186011 - DNA, 80 bp, synthetic construct; identical to SEQ ID NO: 1281
  source 1..80: mol_type = other DNA

SEQ ID NO: 186012 - DNA, 80 bp, synthetic construct; identical to SEQ ID NO: 1282
  source 1..80: mol_type = other DNA

SEQ ID NO: 186013 - DNA, 80 bp, synthetic construct; identical to SEQ ID NO: 1283
  source 1..80: mol_type = other DNA

SEQ ID NO: 186014 - DNA, 80 bp, synthetic construct; identical to SEQ ID NO: 1284
  source 1..80: mol_type = other DNA

SEQ ID NO: 186015 - DNA, 80 bp, synthetic construct; identical to SEQ ID NO: 1285
  source 1..80: mol_type = other DNA

SEQ ID NO: 186016 - DNA, 80 bp, synthetic construct; identical to SEQ ID NO: 1286
  source 1..80: mol_type = other DNA

SEQ ID NO: 186017 - DNA, 80 bp, synthetic construct; identical to SEQ ID NO: 1287
  source 1..80: mol_type = other DNA

SEQ ID NO: 186018 - DNA, 80 bp, synthetic construct; identical to SEQ ID NO: 1288
  source 1..80: mol_type = other DNA

SEQ ID NO: 186019 - DNA, 80 bp, synthetic construct; identical to SEQ ID NO: 1289
  source 1..80: mol_type = other DNA

SEQ ID NO: 186020 - DNA, 80 bp, synthetic construct; identical to SEQ ID NO: 1290
  source 1..80: mol_type = other DNA

SEQ ID NO: 186021 - DNA, 80 bp, synthetic construct; identical to SEQ ID NO: 1291
  source 1..80: mol_type = other DNA

SEQ ID NO: 186022 - DNA, 80 bp, synthetic construct; identical to SEQ ID NO: 1292
  source 1..80: mol_type = other DNA

SEQ ID NO: 186023 - DNA, 80 bp, synthetic construct; identical to SEQ ID NO: 1293
  source 1..80: mol_type = other DNA

SEQ ID NO: 186024 - DNA, 80 bp, synthetic construct; identical to SEQ ID NO: 1294
  source 1..80: mol_type = other DNA

SEQ ID NO: 186025 - DNA, 80 bp, synthetic construct; identical to SEQ ID NO: 1295
  source 1..80: mol_type = other DNA

SEQ ID NO: 186026 - DNA, 80 bp, synthetic construct; identical to SEQ ID NO: 1296
  source 1..80: mol_type = other DNA

SEQ ID NO: 186027 - DNA, 80 bp, synthetic construct; identical to SEQ ID NO: 1297
  source 1..80: mol_type = other DNA

SEQ ID NO: 186028 - DNA, 80 bp, synthetic construct; identical to SEQ ID NO: 1298
  source 1..80: mol_type = other DNA

SEQ ID NO: 186029 - DNA, 80 bp, synthetic construct; identical to SEQ ID NO: 1299
  source 1..80: mol_type = other DNA

SEQ ID NO: 186030 - DNA, 80 bp, synthetic construct; identical to SEQ ID NO: 1300
  source 1..80: mol_type = other DNA

SEQ ID NO: 186031 - DNA, 80 bp, synthetic construct; identical to SEQ ID NO: 1301
  source 1..80: mol_type = other DNA

SEQ ID NO: 186032 - DNA, 80 bp, synthetic construct; identical to SEQ ID NO: 1302
  source 1..80: mol_type = other DNA

SEQ ID NO: 186033 - DNA, 80 bp, synthetic construct; identical to SEQ ID NO: 1303
  source 1..80: mol_type = other DNA

SEQ ID NO: 186034 - DNA, 80 bp, synthetic construct; identical to SEQ ID NO: 1304
  source 1..80: mol_type = other DNA

SEQ ID NO: 186035 - DNA, 80 bp, synthetic construct; identical to SEQ ID NO: 1305
  source 1..80: mol_type = other DNA

SEQ ID NO: 186036 - DNA, 80 bp, synthetic construct; identical to SEQ ID NO: 1306
  source 1..80: mol_type = other DNA

SEQ ID NO: 186037 - DNA, 80 bp, synthetic construct; identical to SEQ ID NO: 1307
  source 1..80: mol_type = other DNA

SEQ ID NO: 186038 - DNA, 80 bp, synthetic construct; identical to SEQ ID NO: 1308
  source 1..80: mol_type = other DNA

SEQ ID NO: 186039 - DNA, 80 bp, synthetic construct; identical to SEQ ID NO: 1309
  source 1..80: mol_type = other DNA

SEQ ID NO: 186040 - DNA, 80 bp, synthetic construct; identical to SEQ ID NO: 1310
  source 1..80: mol_type = other DNA

SEQ ID NO: 186041 - DNA, 80 bp, synthetic construct; identical to SEQ ID NO: 1311
  source 1..80: mol_type = other DNA

SEQ ID NO: 186042 - DNA, 80 bp, synthetic construct; identical to SEQ ID NO: 1312
  source 1..80: mol_type = other DNA

SEQ ID NO: 186043 - DNA, 80 bp, synthetic construct; identical to SEQ ID NO: 1313
  source 1..80: mol_type = other DNA

SEQ ID NO: 186044 - DNA, 80 bp, synthetic construct; identical to SEQ ID NO: 1314
  source 1..80: mol_type = other DNA

SEQ ID NO: 186045 - DNA, 80 bp, synthetic construct; identical to SEQ ID NO: 1315
  source 1..80: mol_type = other DNA

SEQ ID NO: 186046 - DNA, 80 bp, synthetic construct; identical to SEQ ID NO: 1316
  source 1..80: mol_type = other DNA

SEQ ID NO: 186047 - DNA, 80 bp, synthetic construct; identical to SEQ ID NO: 1317
  source 1..80: mol_type = other DNA

SEQ ID NO: 186048 - DNA, 80 bp, synthetic construct; identical to SEQ ID NO: 1318
  source 1..80: mol_type = other DNA

SEQ ID NO: 186049 - DNA, 80 bp, synthetic construct; identical to SEQ ID NO: 1319
  source 1..80: mol_type = other DNA

SEQ ID NO: 186050 - DNA, 80 bp, synthetic construct; identical to SEQ ID NO: 1320
  source 1..80: mol_type = other DNA

SEQ ID NO: 186051 - DNA, 80 bp, synthetic construct; identical to SEQ ID NO: 1321
  source 1..80: mol_type = other DNA

SEQ ID NO: 186052 - DNA, 80 bp, synthetic construct; identical to SEQ ID NO: 1322
  source 1..80: mol_type = other DNA

SEQ ID NO: 186053 - DNA, 80 bp, synthetic construct; identical to SEQ ID NO: 1323
  source 1..80: mol_type = other DNA

SEQ ID NO: 186054 - DNA, 80 bp, synthetic construct; identical to SEQ ID NO: 1324
  source 1..80: mol_type = other DNA

SEQ ID NO: 186055 - DNA, 80 bp, synthetic construct; identical to SEQ ID NO: 1325
  source 1..80: mol_type = other DNA

SEQ ID NO: 186056 - DNA, 80 bp, synthetic construct; identical to SEQ ID NO: 1326
  source 1..80: mol_type = other DNA

SEQ ID NO: 186057 - DNA, 80 bp, synthetic construct; identical to SEQ ID NO: 1327
  source 1..80: mol_type = other DNA

SEQ ID NO: 186058 - DNA, 80 bp, synthetic construct; identical to SEQ ID NO: 1328
  source 1..80: mol_type = other DNA

SEQ ID NO: 186059 - DNA, 80 bp, synthetic construct; identical to SEQ ID NO: 1329
  source 1..80: mol_type = other DNA

SEQ ID NO: 186060 - DNA, 80 bp, synthetic construct; identical to SEQ ID NO: 1330
  source 1..80: mol_type = other DNA

SEQ ID NO: 186061 - DNA, 80 bp, synthetic construct; identical to SEQ ID NO: 1331
  source 1..80: mol_type = other DNA

SEQ ID NO: 186062 - DNA, 80 bp, synthetic construct; identical to SEQ ID NO: 1332
  source 1..80: mol_type = other DNA

SEQ ID NO: 186063 - DNA, 80 bp, synthetic construct; identical to SEQ ID NO: 1333
  source 1..80: mol_type = other DNA

SEQ ID NO: 186064 - DNA, 80 bp, synthetic construct; identical to SEQ ID NO: 1334
  source 1..80: mol_type = other DNA

SEQ ID NO: 186065 - DNA, 80 bp, synthetic construct; identical to SEQ ID NO: 1335
  source 1..80: mol_type = other DNA

SEQ ID NO: 186066 - DNA, 80 bp, synthetic construct; identical to SEQ ID NO: 1336
  source 1..80: mol_type = other DNA

SEQ ID NO: 186067 - DNA, 80 bp, synthetic construct; identical to SEQ ID NO: 1337
  source 1..80: mol_type = other DNA

SEQ ID NO: 186068 - DNA, 80 bp, synthetic construct; identical to SEQ ID NO: 1338
  source 1..80: mol_type = other DNA

SEQ ID NO: 186069 - DNA, 80 bp, synthetic construct; identical to SEQ ID NO: 1339
  source 1..80: mol_type = other DNA

SEQ ID NO: 186070 - DNA, 80 bp, synthetic construct; identical to SEQ ID NO: 1340
  source 1..80: mol_type = other DNA

SEQ ID NO: 186071 - DNA, 80 bp, synthetic construct; identical to SEQ ID NO: 1341
  source 1..80: mol_type = other DNA

SEQ ID NO: 186072 - DNA, 80 bp, synthetic construct; identical to SEQ ID NO: 1342
  source 1..80: mol_type = other DNA

SEQ ID NO: 186073 - DNA, 80 bp, synthetic construct; identical to SEQ ID NO: 1343
  source 1..80: mol_type = other DNA

SEQ ID NO: 186074 - DNA, 80 bp, synthetic construct; identical to SEQ ID NO: 1344
  source 1..80: mol_type = other DNA

SEQ ID NO: 186075 - DNA, 80 bp, synthetic construct; identical to SEQ ID NO: 1345
  source 1..80: mol_type = other DNA

SEQ ID NO: 186076 - DNA, 80 bp, synthetic construct; identical to SEQ ID NO: 1346
  source 1..80: mol_type = other DNA

SEQ ID NO: 186077 - DNA, 80 bp, synthetic construct; identical to SEQ ID NO: 1347
  source 1..80: mol_type = other DNA

SEQ ID NO: 186078 - DNA, 80 bp, synthetic construct; identical to SEQ ID NO: 1348
  source 1..80: mol_type = other DNA

SEQ ID NO: 186079 - DNA, 80 bp, synthetic construct; identical to SEQ ID NO: 1349
  source 1..80: mol_type = other DNA

SEQ ID NO: 186080 - DNA, 80 bp, synthetic construct; identical to SEQ ID NO: 1350
  source 1..80: mol_type = other DNA

SEQ ID NO: 186081 - DNA, 80 bp, synthetic construct; identical to SEQ ID NO: 1351
  source 1..80: mol_type = other DNA

SEQ ID NO: 186082 - DNA, 80 bp, synthetic construct; identical to SEQ ID NO: 1352
  source 1..80: mol_type = other DNA

SEQ ID NO: 186083 - DNA, 80 bp, synthetic construct; identical to SEQ ID NO: 1353
  source 1..80: mol_type = other DNA

SEQ ID NO: 186084 - DNA, 80 bp, synthetic construct; identical to SEQ ID NO: 1354
  source 1..80: mol_type = other DNA

SEQ ID NO: 186085 - DNA, 80 bp, synthetic construct; identical to SEQ ID NO: 1355
  source 1..80: mol_type = other DNA

SEQ ID NO: 186086 - DNA, 80 bp, synthetic construct; identical to SEQ ID NO: 1356
  source 1..80: mol_type = other DNA

SEQ ID NO: 186087 - DNA, 80 bp, synthetic construct; identical to SEQ ID NO: 1357
  source 1..80: mol_type = other DNA

SEQ ID NO: 186088 - DNA, 80 bp, synthetic construct; identical to SEQ ID NO: 1358
  source 1..80: mol_type = other DNA

SEQ ID NO: 186089 - DNA, 80 bp, synthetic construct; identical to SEQ ID NO: 1359
  source 1..80: mol_type = other DNA

SEQ ID NO: 186090 - DNA, 80 bp, synthetic construct; identical to SEQ ID NO: 1360
  source 1..80: mol_type = other DNA

SEQ ID NO: 186091 - DNA, 80 bp, synthetic construct; identical to SEQ ID NO: 1361
  source 1..80: mol_type = other DNA

SEQ ID NO: 186092 - DNA, 80 bp, synthetic construct; identical to SEQ ID NO: 1362
  source 1..80: mol_type = other DNA

SEQ ID NO: 186093 - DNA, 80 bp, synthetic construct; identical to SEQ ID NO: 1363
  source 1..80: mol_type = other DNA

SEQ ID NO: 186094 - DNA, 80 bp, synthetic construct; identical to SEQ ID NO: 1364
  source 1..80: mol_type = other DNA

SEQ ID NO: 186095 - DNA, 80 bp, synthetic construct; identical to SEQ ID NO: 1365
  source 1..80: mol_type = other DNA

SEQ ID NO: 186096 - DNA, 80 bp, synthetic construct; identical to SEQ ID NO: 1366
  source 1..80: mol_type = other DNA

SEQ ID NO: 186097 - DNA, 80 bp, synthetic construct; identical to SEQ ID NO: 1367
  source 1..80: mol_type = other DNA

SEQ ID NO: 186098 - DNA, 80 bp, synthetic construct; identical to SEQ ID NO: 1368
  source 1..80: mol_type = other DNA

SEQ ID NO: 186099 - DNA, 80 bp, synthetic construct; identical to SEQ ID NO: 1369
  source 1..80: mol_type = other DNA

SEQ ID NO: 186100 - DNA, 80 bp, synthetic construct; identical to SEQ ID NO: 1370
  source 1..80: mol_type = other DNA

SEQ ID NO: 186101 - DNA, 80 bp, synthetic construct; identical to SEQ ID NO: 1371
  source 1..80: mol_type = other DNA

SEQ ID NO: 186102 - DNA, 80 bp, synthetic construct; identical to SEQ ID NO: 1372
  source 1..80: mol_type = other DNA

SEQ ID NO: 186103 - DNA, 80 bp, synthetic construct; identical to SEQ ID NO: 1373
  source 1..80: mol_type = other DNA

SEQ ID NO: 186104 - DNA, 80 bp, synthetic construct; identical to SEQ ID NO: 1374
  source 1..80: mol_type = other DNA

SEQ ID NO: 186105 - DNA, 80 bp, synthetic construct; identical to SEQ ID NO: 1375
  source 1..80: mol_type = other DNA

SEQ ID NO: 186106 - DNA, 80 bp, synthetic construct; identical to SEQ ID NO: 1376
  source 1..80: mol_type = other DNA

SEQ ID NO: 186107 - DNA, 80 bp, synthetic construct; identical to SEQ ID NO: 1377
  source 1..80: mol_type = other DNA

SEQ ID NO: 186108 - DNA, 80 bp, synthetic construct; identical to SEQ ID NO: 1378
  source 1..80: mol_type = other DNA

SEQ ID NO: 186109 - DNA, 80 bp, synthetic construct; identical to SEQ ID NO: 1379
  source 1..80: mol_type = other DNA

SEQ ID NO: 186110 - DNA, 80 bp, synthetic construct; identical to SEQ ID NO: 1380
  source 1..80: mol_type = other DNA

SEQ ID NO: 186111 - DNA, 80 bp, synthetic construct; identical to SEQ ID NO: 1381
  source 1..80: mol_type = other DNA

SEQ ID NO: 186112 - DNA, 80 bp, synthetic construct; identical to SEQ ID NO: 1382
  source 1..80: mol_type = other DNA

SEQ ID NO: 186113 - DNA, 80 bp, synthetic construct; identical to SEQ ID NO: 1383
  source 1..80: mol_type = other DNA

SEQ ID NO: 186114 - DNA, 80 bp, synthetic construct; identical to SEQ ID NO: 1384
  source 1..80: mol_type = other DNA

SEQ ID NO: 186115 - DNA, 80 bp, synthetic construct; identical to SEQ ID NO: 1385
  source 1..80: mol_type = other DNA

SEQ ID NO: 186116 - DNA, 80 bp, synthetic construct; identical to SEQ ID NO: 1386
  source 1..80: mol_type = other DNA

SEQ ID NO: 186117 - DNA, 80 bp, synthetic construct; identical to SEQ ID NO: 1387
  source 1..80: mol_type = other DNA

SEQ ID NO: 186118 - DNA, 80 bp, synthetic construct; identical to SEQ ID NO: 1388
  source 1..80: mol_type = other DNA

SEQ ID NO: 186119 - DNA, 80 bp, synthetic construct; identical to SEQ ID NO: 1389
  source 1..80: mol_type = other DNA

SEQ ID NO: 186120 - DNA, 80 bp, synthetic construct; identical to SEQ ID NO: 1390
  source 1..80: mol_type = other DNA

SEQ ID NO: 186121 - DNA, 80 bp, synthetic construct; identical to SEQ ID NO: 1391
  source 1..80: mol_type = other DNA

SEQ ID NO: 186122 - DNA, 80 bp, synthetic construct; identical to SEQ ID NO: 1392
  source 1..80: mol_type = other DNA

SEQ ID NO: 186123 - DNA, 80 bp, synthetic construct; identical to SEQ ID NO: 1393
  source 1..80: mol_type = other DNA

SEQ ID NO: 186124 - DNA, 80 bp, synthetic construct; identical to SEQ ID NO: 1394
  source 1..80: mol_type = other DNA

SEQ ID NO: 186125 - DNA, 80 bp, synthetic construct; identical to SEQ ID NO: 1395
  source 1..80: mol_type = other DNA

SEQ ID NO: 186126 - DNA, 80 bp, synthetic construct; identical to SEQ ID NO: 1396
  source 1..80: mol_type = other DNA

SEQ ID NO: 186127 - DNA, 80 bp, synthetic construct; identical to SEQ ID NO: 1397
  source 1..80: mol_type = other DNA

SEQ ID NO: 186128 - DNA, 80 bp, synthetic construct; identical to SEQ ID NO: 1398
  source 1..80: mol_type = other DNA

SEQ ID NO: 186129 - DNA, 80 bp, synthetic construct; identical to SEQ ID NO: 1399
  source 1..80: mol_type = other DNA

SEQ ID NO: 186130 - DNA, 80 bp, synthetic construct; identical to SEQ ID NO: 1400
  source 1..80: mol_type = other DNA

SEQ ID NO: 186131 - DNA, 80 bp, synthetic construct; identical to SEQ ID NO: 1401
  source 1..80: mol_type = other DNA

SEQ ID NO: 186132 - DNA, 80 bp, synthetic construct; identical to SEQ ID NO: 1402
  source 1..80: mol_type = other DNA

SEQ ID NO: 186133 - DNA, 80 bp, synthetic construct; identical to SEQ ID NO: 1403
  source 1..80: mol_type = other DNA

SEQ ID NO: 186134 - DNA, 80 bp, synthetic construct; identical to SEQ ID NO: 1404
  source 1..80: mol_type = other DNA

SEQ ID NO: 186135 - DNA, 80 bp, synthetic construct; identical to SEQ ID NO: 1405
  source 1..80: mol_type = other DNA

SEQ ID NO: 186136 - DNA, 80 bp, synthetic construct; identical to SEQ ID NO: 1406
  source 1..80: mol_type = other DNA

SEQ ID NO: 186137 - DNA, 80 bp, synthetic construct; identical to SEQ ID NO: 1407
  source 1..80: mol_type = other DNA

SEQ ID NO: 186138 - DNA, 80 bp, synthetic construct; identical to SEQ ID NO: 1408
  source 1..80: mol_type = other DNA

SEQ ID NO: 186139 - DNA, 80 bp, synthetic construct; identical to SEQ ID NO: 1409
  source 1..80: mol_type = other DNA

SEQ ID NO: 186140 - DNA, 80 bp, synthetic construct; identical to SEQ ID NO: 1410
  source 1..80: mol_type = other DNA

SEQ ID NO: 186141 - DNA, 80 bp, synthetic construct; identical to SEQ ID NO: 1411
  source 1..80: mol_type = other DNA

SEQ ID NO: 186142 - DNA, 80 bp, synthetic construct; identical to SEQ ID NO: 1412
  source 1..80: mol_type = other DNA

SEQ ID NO: 186143 - DNA, 80 bp, synthetic construct; identical to SEQ ID NO: 1413
  source 1..80: mol_type = other DNA

SEQ ID NO: 186144 - DNA, 80 bp, synthetic construct; identical to SEQ ID NO: 1414
  source 1..80: mol_type = other DNA

SEQ ID NO: 186145 - DNA, 80 bp, synthetic construct; identical to SEQ ID NO: 1415
  source 1..80: mol_type = other DNA

SEQ ID NO: 186146 - DNA, 80 bp, synthetic construct; identical to SEQ ID NO: 1416
  source 1..80: mol_type = other DNA

SEQ ID NO: 186147 - DNA, 80 bp, synthetic construct; identical to SEQ ID NO: 1417
  source 1..80: mol_type = other DNA

SEQ ID NO: 186148 - DNA, 80 bp, synthetic construct; identical to SEQ ID NO: 1418
  source 1..80: mol_type = other DNA

SEQ ID NO: 186149 - DNA, 80 bp, synthetic construct; identical to SEQ ID NO: 1419
  source 1..80: mol_type = other DNA

SEQ ID NO: 186150 - DNA, 80 bp, synthetic construct; identical to SEQ ID NO: 1420
  source 1..80: mol_type = other DNA

SEQ ID NO: 186151 - DNA, 80 bp, synthetic construct; identical to SEQ ID NO: 1421
  source 1..80: mol_type = other DNA

SEQ ID NO: 186152 - DNA, 80 bp, synthetic construct; identical to SEQ ID NO: 1422
  source 1..80: mol_type = other DNA

SEQ ID NO: 186153 - DNA, 80 bp, synthetic construct; identical to SEQ ID NO: 1423
  source 1..80: mol_type = other DNA

SEQ ID NO: 186154 - DNA, 80 bp, synthetic construct; identical to SEQ ID NO: 1424
  source 1..80: mol_type = other DNA

SEQ ID NO: 186155 - DNA, 80 bp, synthetic construct; identical to SEQ ID NO: 1425
  source 1..80: mol_type = other DNA

SEQ ID NO: 186156 - DNA, 80 bp, synthetic construct; identical to SEQ ID NO: 1426
  source 1..80: mol_type = other DNA

SEQ ID NO: 186157 - DNA, 80 bp, synthetic construct; identical to SEQ ID NO: 1427
  source 1..80: mol_type = other DNA

SEQ ID NO: 186158 - DNA, 80 bp, synthetic construct; identical to SEQ ID NO: 1428
  source 1..80: mol_type = other DNA

SEQ ID NO: 186159 - DNA, 80 bp, synthetic construct; identical to SEQ ID NO: 1429
  source 1..80: mol_type = other DNA

SEQ ID NO: 186160 - DNA, 80 bp, synthetic construct; identical to SEQ ID NO: 1430
  source 1..80: mol_type = other DNA

SEQ ID NO: 186161 - DNA, 80 bp, synthetic construct; identical to SEQ ID NO: 1431
  source 1..80: mol_type = other DNA

SEQ ID NO: 186162 - DNA, 80 bp, synthetic construct; identical to SEQ ID NO: 1432
  source 1..80: mol_type = other DNA

SEQ ID NO: 186163 - DNA, 80 bp, synthetic construct; identical to SEQ ID NO: 1433
  source 1..80: mol_type = other DNA

SEQ ID NO: 186164 - DNA, 80 bp, synthetic construct; identical to SEQ ID NO: 1434
  source 1..80: mol_type = other DNA

SEQ ID NO: 186165 - DNA, 80 bp, synthetic construct; identical to SEQ ID NO: 1435
  source 1..80: mol_type = other DNA

SEQ ID NO: 186166 - DNA, 80 bp, synthetic construct; identical to SEQ ID NO: 1436
  source 1..80: mol_type = other DNA

SEQ ID NO: 186167 - DNA, 80 bp, synthetic construct; identical to SEQ ID NO: 1437
  source 1..80: mol_type = other DNA

SEQ ID NO: 186168 - DNA, 80 bp, synthetic construct; identical to SEQ ID NO: 1438
  source 1..80: mol_type = other DNA

SEQ ID NO: 186169 - DNA, 80 bp, synthetic construct; identical to SEQ ID NO: 1439
  source 1..80: mol_type = other DNA

SEQ ID NO: 186170 - DNA, 80 bp, synthetic construct; identical to SEQ ID NO: 1440
  source 1..80: mol_type = other DNA

SEQ ID NO: 186171 - DNA, 80 bp, synthetic construct; identical to SEQ ID NO: 1441
  source 1..80: mol_type = other DNA

SEQ ID NO: 186172 - DNA, 80 bp, synthetic construct; identical to SEQ ID NO: 1442
  source 1..80: mol_type = other DNA

SEQ ID NO: 186173 - DNA, 80 bp, synthetic construct; identical to SEQ ID NO: 1443
  source 1..80: mol_type = other DNA

SEQ ID NO: 186174 - DNA, 80 bp, synthetic construct; identical to SEQ ID NO: 1444
  source 1..80: mol_type = other DNA

SEQ ID NO: 186175 - DNA, 80 bp, synthetic construct; identical to SEQ ID NO: 1445
  source 1..80: mol_type = other DNA

SEQ ID NO: 186176 - DNA, 80 bp, synthetic construct; identical to SEQ ID NO: 1446
  source 1..80: mol_type = other DNA

SEQ ID NO: 186177 - DNA, 80 bp, synthetic construct; identical to SEQ ID NO: 1447
  source 1..80: mol_type = other DNA

SEQ ID NO: 186178 - DNA, 80 bp, synthetic construct; identical to SEQ ID NO: 1448
  source 1..80: mol_type = other DNA

SEQ ID NO: 186179 - DNA, 80 bp, synthetic construct; identical to SEQ ID NO: 1449
  source 1..80: mol_type = other DNA

SEQ ID NO: 186180 - DNA, 80 bp, synthetic construct; identical to SEQ ID NO: 1450
  source 1..80: mol_type = other DNA

SEQ ID NO: 186181 - DNA, 80 bp, synthetic construct; identical to SEQ ID NO: 1451
  source 1..80: mol_type = other DNA

SEQ ID NO: 186182 - DNA, 80 bp, synthetic construct; identical to SEQ ID NO: 1452
  source 1..80: mol_type = other DNA

SEQ ID NO: 186183 - DNA, 80 bp, synthetic construct; identical to SEQ ID NO: 1453
  source 1..80: mol_type = other DNA

SEQ ID NO: 186184 - DNA, 80 bp, synthetic construct; identical to SEQ ID NO: 1454
  source 1..80: mol_type = other DNA

SEQ ID NO: 186185 - DNA, 80 bp, synthetic construct; identical to SEQ ID NO: 1455
  source 1..80: mol_type = other DNA

SEQ ID NO: 186186 - DNA, 80 bp, synthetic construct; identical to SEQ ID NO: 1456
  source 1..80: mol_type = other DNA

SEQ ID NO: 186187 - DNA, 80 bp, synthetic construct; identical to SEQ ID NO: 1457
  source 1..80: mol_type = other DNA

SEQ ID NO: 186188 - DNA, 80 bp, synthetic construct; identical to SEQ ID NO: 1458
  source 1..80: mol_type = other DNA

SEQ ID NO: 186189 - DNA, 80 bp, synthetic construct; identical to SEQ ID NO: 1459
  source 1..80: mol_type = other DNA

SEQ ID NO: 186190 - DNA, 80 bp, synthetic construct; identical to SEQ ID NO: 1460
  source 1..80: mol_type = other DNA

SEQ ID NO: 186191 - DNA, 80 bp, synthetic construct; identical to SEQ ID NO: 1461
  source 1..80: mol_type = other DNA

SEQ ID NO: 186192 - DNA, 80 bp, synthetic construct; identical to SEQ ID NO: 1462
  source 1..80: mol_type = other DNA

SEQ ID NO: 186193 - DNA, 80 bp, synthetic construct; identical to SEQ ID NO: 1463
  source 1..80: mol_type = other DNA

SEQ ID NO: 186194 - DNA, 80 bp, synthetic construct; identical to SEQ ID NO: 1464
  source 1..80: mol_type = other DNA

SEQ ID NO: 186195 - DNA, 80 bp, synthetic construct; identical to SEQ ID NO: 1465
  source 1..80: mol_type = other DNA

SEQ ID NO: 186196 - DNA, 80 bp, synthetic construct; identical to SEQ ID NO: 1466
  source 1..80: mol_type = other DNA

SEQ ID NO: 186197 - DNA, 80 bp, synthetic construct; identical to SEQ ID NO: 1467
  source 1..80: mol_type = other DNA

SEQ ID NO: 186198 - DNA, 80 bp, synthetic construct; identical to SEQ ID NO: 1468
  source 1..80: mol_type = other DNA

SEQ ID NO: 186199 - DNA, 80 bp, synthetic construct; identical to SEQ ID NO: 1469
  source 1..80: mol_type = other DNA

SEQ ID NO: 186200 - DNA, 80 bp, synthetic construct; identical to SEQ ID NO: 1470
  source 1..80: mol_type = other DNA

SEQ ID NO: 186201 - DNA, 80 bp, synthetic construct; identical to SEQ ID NO: 1471
  source 1..80: mol_type = other DNA

SEQ ID NO: 186202 - DNA, 80 bp, synthetic construct; identical to SEQ ID NO: 1472
  source 1..80: mol_type = other DNA

SEQ ID NO: 186203 - DNA, 80 bp, synthetic construct; identical to SEQ ID NO: 1473
  source 1..80: mol_type = other DNA

SEQ ID NO: 186204 - DNA, 80 bp, synthetic construct; identical to SEQ ID NO: 1474
  source 1..80: mol_type = other DNA

SEQ ID NO: 186205 - DNA, 80 bp, synthetic construct; identical to SEQ ID NO: 1475
  source 1..80: mol_type = other DNA

SEQ ID NO: 186206 - DNA, 80 bp, synthetic construct; identical to SEQ ID NO: 1476
  source 1..80: mol_type = other DNA

SEQ ID NO: 186207 - DNA, 80 bp, synthetic construct; identical to SEQ ID NO: 1477
  source 1..80: mol_type = other DNA

SEQ ID NO: 186208 - DNA, 80 bp, synthetic construct; identical to SEQ ID NO: 1478
  source 1..80: mol_type = other DNA

SEQ ID NO: 186209 - DNA, 80 bp, synthetic construct; identical to SEQ ID NO: 1479
  source 1..80: mol_type = other DNA

SEQ ID NO: 186210 - DNA, 80 bp, synthetic construct; identical to SEQ ID NO: 1480
  source 1..80: mol_type = other DNA

SEQ ID NO: 186211 - DNA, 80 bp, synthetic construct; identical to SEQ ID NO: 1481
  source 1..80: mol_type = other DNA

SEQ ID NO: 186212 - DNA, 80 bp, synthetic construct; identical to SEQ ID NO: 1482
  source 1..80: mol_type = other DNA

SEQ ID NO: 186213 - DNA, 80 bp, synthetic construct; identical to SEQ ID NO: 1483
  source 1..80: mol_type = other DNA

SEQ ID NO: 186214 - DNA, 80 bp, synthetic construct; identical to SEQ ID NO: 1484
  source 1..80: mol_type = other DNA

SEQ ID NO: 186215 - DNA, 80 bp, synthetic construct; identical to SEQ ID NO: 1485
  source 1..80: mol_type = other DNA

SEQ ID NO: 186216 - DNA, 80 bp, synthetic construct; identical to SEQ ID NO: 1486
  source 1..80: mol_type = other DNA

SEQ ID NO: 186217 - DNA, 80 bp, synthetic construct; identical to SEQ ID NO: 1487
  source 1..80: mol_type = other DNA

SEQ ID NO: 186218 - DNA, 80 bp, synthetic construct; identical to SEQ ID NO: 1488
  source 1..80: mol_type = other DNA

SEQ ID NO: 186219 - DNA, 80 bp, synthetic construct; identical to SEQ ID NO: 1489
  source 1..80: mol_type = other DNA

SEQ ID NO: 186220 - DNA, 80 bp, synthetic construct; identical to SEQ ID NO: 1490
  source 1..80: mol_type = other DNA

SEQ ID NO: 186221 - DNA, 80 bp, synthetic construct; identical to SEQ ID NO: 1491
  source 1..80: mol_type = other DNA

SEQ ID NO: 186222 - DNA, 80 bp, synthetic construct; identical to SEQ ID NO: 1492
  source 1..80: mol_type = other DNA

SEQ ID NO: 186223 - DNA, 80 bp, synthetic construct; identical to SEQ ID NO: 1493
  source 1..80: mol_type = other DNA

SEQ ID NO: 186224 - DNA, 80 bp, synthetic construct; identical to SEQ ID NO: 1494
  source 1..80: mol_type = other DNA

SEQ ID NO: 186225 - DNA, 80 bp, synthetic construct; identical to SEQ ID NO: 1495
  source 1..80: mol_type = other DNA

SEQ ID NO: 186226 - DNA, 80 bp, synthetic construct; identical to SEQ ID NO: 1496
  source 1..80: mol_type = other DNA

SEQ ID NO: 186227 - DNA, 80 bp, synthetic construct; identical to SEQ ID NO: 1497
  source 1..80: mol_type = other DNA

SEQ ID NO: 186228 - DNA, 80 bp, synthetic construct; identical to SEQ ID NO: 1498
  source 1..80: mol_type = other DNA

SEQ ID NO: 186229 - DNA, 80 bp, synthetic construct; identical to SEQ ID NO: 1499
  source 1..80: mol_type = other DNA

SEQ ID NO: 186230 - DNA, 80 bp, synthetic construct; identical to SEQ ID NO: 1500
  source 1..80: mol_type = other DNA

SEQ ID NO: 186231 - DNA, 80 bp, synthetic construct; identical to SEQ ID NO: 1501
  source 1..80: mol_type = other DNA

SEQ ID NO: 186232 - DNA, 80 bp, synthetic construct; identical to SEQ ID NO: 1502
  source 1..80: mol_type = other DNA

SEQ ID NO: 186233 - DNA, 80 bp, synthetic construct; identical to SEQ ID NO: 1503
  source 1..80: mol_type = other DNA

SEQ ID NO: 186234 - DNA, 80 bp, synthetic construct; identical to SEQ ID NO: 1504
  source 1..80: mol_type = other DNA

SEQ ID NO: 186235 - DNA, 80 bp, synthetic construct; identical to SEQ ID NO: 1505
  source 1..80: mol_type = other DNA

SEQ ID NO: 186236 - DNA, 80 bp, synthetic construct; identical to SEQ ID NO: 1506
  source 1..80: mol_type = other DNA

SEQ ID NO: 186237 - DNA, 80 bp, synthetic construct; identical to SEQ ID NO: 1507
  source 1..80: mol_type = other DNA

SEQ ID NO: 186238 - DNA, 80 bp, synthetic construct; identical to SEQ ID NO: 1508
  source 1..80: mol_type = other DNA

SEQ ID NO: 186239 - DNA, 80 bp, synthetic construct; identical to SEQ ID NO: 1509
  source 1..80: mol_type = other DNA

SEQ ID NO: 186240 - DNA, 80 bp, synthetic construct; identical to SEQ ID NO: 1510
  source 1..80: mol_type = other DNA

SEQ ID NO: 186241 - DNA, 80 bp, synthetic construct; identical to SEQ ID NO: 1511
  source 1..80: mol_type = other DNA

SEQ ID NO: 186242 - DNA, 80 bp, synthetic construct; identical to SEQ ID NO: 1512
  source 1..80: mol_type = other DNA

SEQ ID NO: 186243 - DNA, 80 bp, synthetic construct; identical to SEQ ID NO: 1513
  source 1..80: mol_type = other DNA

SEQ ID NO: 186244 - DNA, 80 bp, synthetic construct; identical to SEQ ID NO: 1514
  source 1..80: mol_type = other DNA

SEQ ID NO: 186245 - DNA, 80 bp, synthetic construct; identical to SEQ ID NO: 1515
  source 1..80: mol_type = other DNA

SEQ ID NO: 186246 - DNA, 80 bp, synthetic construct; identical to SEQ ID NO: 1516
  source 1..80: mol_type = other DNA

SEQ ID NO: 186247 - DNA, 80 bp, synthetic construct; identical to SEQ ID NO: 1517
  source 1..80: mol_type = other DNA

SEQ ID NO: 186248 - DNA, 80 bp, synthetic construct; identical to SEQ ID NO: 1518
  source 1..80: mol_type = other DNA

SEQ ID NO: 186249 - DNA, 80 bp, synthetic construct; identical to SEQ ID NO: 1519
  source 1..80: mol_type = other DNA

SEQ ID NO: 186250 - DNA, 80 bp, synthetic construct; identical to SEQ ID NO: 1520
  source 1..80: mol_type = other DNA

SEQ ID NO: 186251 - DNA, 80 bp, synthetic construct; identical to SEQ ID NO: 1521
  source 1..80: mol_type = other DNA

SEQ ID NO: 186252 - DNA, 80 bp, synthetic construct; identical to SEQ ID NO: 1522
  source 1..80: mol_type = other DNA

SEQ ID NO: 186253 - DNA, 80 bp, synthetic construct; identical to SEQ ID NO: 1523
  source 1..80: mol_type = other DNA

SEQ ID NO: 186254 - DNA, 80 bp, synthetic construct; identical to SEQ ID NO: 1524
  source 1..80: mol_type = other DNA

SEQ ID NO: 186255 - DNA, 80 bp, synthetic construct; identical to SEQ ID NO: 1525
  source 1..80: mol_type = other DNA

SEQ ID NO: 186256 - DNA, 80 bp, synthetic construct; identical to SEQ ID NO: 1526
  source 1..80: mol_type = other DNA

SEQ ID NO: 186257 - DNA, 80 bp, synthetic construct; identical to SEQ ID NO: 1527
  source 1..80: mol_type = other DNA

SEQ ID NO: 186258 - DNA, 80 bp, synthetic construct; identical to SEQ ID NO: 1528
  source 1..80: mol_type = other DNA

SEQ ID NO: 186259 - DNA, 80 bp, synthetic construct; identical to SEQ ID NO: 1529
  source 1..80: mol_type = other DNA

SEQ ID NO: 186260 - DNA, 80 bp, synthetic construct; identical to SEQ ID NO: 1530
  source 1..80: mol_type = other DNA

SEQ ID NO: 186261 - DNA, 80 bp, synthetic construct; identical to SEQ ID NO: 1531
  source 1..80: mol_type = other DNA

SEQ ID NO: 186262 - DNA, 80 bp, synthetic construct; identical to SEQ ID NO: 1532
  source 1..80: mol_type = other DNA

SEQ ID NO: 186263 - DNA, 80 bp, synthetic construct; identical to SEQ ID NO: 1533
  source 1..80: mol_type = other DNA

SEQ ID NO: 186264 - DNA, 80 bp, synthetic construct; identical to SEQ ID NO: 1534
  source 1..80: mol_type = other DNA

SEQ ID NO: 186265 - DNA, 80 bp, synthetic construct; identical to SEQ ID NO: 1535
  source 1..80: mol_type = other DNA

SEQ ID NO: 186266 - DNA, 80 bp, synthetic construct; identical to SEQ ID NO: 1536
  source 1..80: mol_type = other DNA

SEQ ID NO: 186267 - DNA, 80 bp, synthetic construct; identical to SEQ ID NO: 1537
  source 1..80: mol_type = other DNA

SEQ ID NO: 186268 - DNA, 80 bp, synthetic construct; identical to SEQ ID NO: 1538
  source 1..80: mol_type = other DNA

SEQ ID NO: 186269 - DNA, 80 bp, synthetic construct; identical to SEQ ID NO: 1539
  source 1..80: mol_type = other DNA

SEQ ID NO: 186270 - DNA, 80 bp, synthetic construct; identical to SEQ ID NO: 1540
  source 1..80: mol_type = other DNA

SEQ ID NO: 186271 - DNA, 80 bp, synthetic construct; identical to SEQ ID NO: 1541
  source 1..80: mol_type = other DNA

SEQ ID NO: 186272 - DNA, 80 bp, synthetic construct; identical to SEQ ID NO: 1542
  source 1..80: mol_type = other DNA

SEQ ID NO: 186273 - DNA, 80 bp, synthetic construct; identical to SEQ ID NO: 1543
  source 1..80: mol_type = other DNA

SEQ ID NO: 186274 - DNA, 80 bp, synthetic construct; identical to SEQ ID NO: 1544
  source 1..80: mol_type = other DNA

SEQ ID NO: 186275 - DNA, 80 bp, synthetic construct; identical to SEQ ID NO: 1545
  source 1..80: mol_type = other DNA

SEQ ID NO: 186276 - DNA, 80 bp, synthetic construct; identical to SEQ ID NO: 1546
  source 1..80: mol_type = other DNA

SEQ ID NO: 186277 - DNA, 80 bp, synthetic construct; identical to SEQ ID NO: 1547
  source 1..80: mol_type = other DNA

SEQ ID NO: 186278 - DNA, 80 bp, synthetic construct; identical to SEQ ID NO: 1548
  source 1..80: mol_type = other DNA

SEQ ID NO: 186279 - DNA, 80 bp, synthetic construct; identical to SEQ ID NO: 1549
  source 1..80: mol_type = other DNA

SEQ ID NO: 186280 - DNA, 80 bp, synthetic construct; identical to SEQ ID NO: 1550
  source 1..80: mol_type = other DNA

SEQ ID NO: 186281 - DNA, 80 bp, synthetic construct; identical to SEQ ID NO: 1551
  source 1..80: mol_type = other DNA

SEQ ID NO: 186282 - DNA, 80 bp, synthetic construct; identical to SEQ ID NO: 1552
  source 1..80: mol_type = other DNA

SEQ ID NO: 186283 - DNA, 80 bp, synthetic construct; identical to SEQ ID NO: 1553
  source 1..80: mol_type = other DNA

SEQ ID NO: 186284 - DNA, 80 bp, synthetic construct; identical to SEQ ID NO: 1554
  source 1..80: mol_type = other DNA

SEQ ID NO: 186285 - DNA, 80 bp, synthetic construct; identical to SEQ ID NO: 1555
  source 1..80: mol_type = other DNA

SEQ ID NO: 186286 - DNA, 80 bp, synthetic construct; identical to SEQ ID NO: 1556
  source 1..80: mol_type = other DNA

SEQ ID NO: 186287 - DNA, 80 bp, synthetic construct; identical to SEQ ID NO: 1557
  source 1..80: mol_type = other DNA

SEQ ID NO: 186288 - DNA, 80 bp, synthetic construct; identical to SEQ ID NO: 1558
  source 1..80: mol_type = other DNA

SEQ ID NO: 186289 - DNA, 80 bp, synthetic construct; identical to SEQ ID NO: 1559
  source 1..80: mol_type = other DNA

SEQ ID NO: 186290 - DNA, 80 bp, synthetic construct; identical to SEQ ID NO: 1560
  source 1..80: mol_type = other DNA

SEQ ID NO: 186291 - DNA, 80 bp, synthetic construct; identical to SEQ ID NO: 1561
  source 1..80: mol_type = other DNA

SEQ ID NO: 186292 - DNA, 80 bp, synthetic construct; identical to SEQ ID NO: 1562
  source 1..80: mol_type = other DNA

SEQ ID NO: 186293 - DNA, 80 bp, synthetic construct; identical to SEQ ID NO: 1563
  source 1..80: mol_type = other DNA

SEQ ID NO: 186294 - DNA, 80 bp, synthetic construct; identical to SEQ ID NO: 1564
  source 1..80: mol_type = other DNA

SEQ ID NO: 186295 - DNA, 80 bp, synthetic construct; identical to SEQ ID NO: 1565
  source 1..80: mol_type = other DNA

SEQ ID NO: 186296 - DNA, 80 bp, synthetic construct; identical to SEQ ID NO: 1566
  source 1..80: mol_type = other DNA

SEQ ID NO: 186297 - DNA, 80 bp, synthetic construct; identical to SEQ ID NO: 1567
  source 1..80: mol_type = other DNA

SEQ ID NO: 186298 - DNA, 80 bp, synthetic construct; identical to SEQ ID NO: 1568
  source 1..80: mol_type = other DNA

SEQ ID NO: 186299 - DNA, 80 bp, synthetic construct; identical to SEQ ID NO: 1569
  source 1..80: mol_type = other DNA

SEQ ID NO: 186300 - DNA, 80 bp, synthetic construct; identical to SEQ ID NO: 1570
  source 1..80: mol_type = other DNA

SEQ ID NO: 186301 - DNA, 80 bp, synthetic construct; identical to SEQ ID NO: 1571
  source 1..80: mol_type = other DNA

SEQ ID NO: 186302 - DNA, 80 bp, synthetic construct; identical to SEQ ID NO: 1572
  source 1..80: mol_type = other DNA

SEQ ID NO: 186303 - DNA, 80 bp, synthetic construct; identical to SEQ ID NO: 1573
  source 1..80: mol_type = other DNA

SEQ ID NO: 186304 - DNA, 80 bp, synthetic construct; identical to SEQ ID NO: 1574
  source 1..80: mol_type = other DNA

SEQ ID NO: 186305 - DNA, 80 bp, synthetic construct; identical to SEQ ID NO: 1575
  source 1..80: mol_type = other DNA

SEQ ID NO: 186306 - DNA, 80 bp, synthetic construct; identical to SEQ ID NO: 1576
  source 1..80: mol_type = other DNA

SEQ ID NO: 186307 - DNA, 80 bp, synthetic construct; identical to SEQ ID NO: 1577
  source 1..80: mol_type = other DNA

SEQ ID NO: 186308 - DNA, 80 bp, synthetic construct; identical to SEQ ID NO: 1578
  source 1..80: mol_type = other DNA

SEQ ID NO: 186309 - DNA, 80 bp, synthetic construct; identical to SEQ ID NO: 1579
  source 1..80: mol_type = other DNA

SEQ ID NO: 186310 - DNA, 80 bp, synthetic construct; identical to SEQ ID NO: 1580
  source 1..80: mol_type = other DNA

SEQ ID NO: 186311 - DNA, 80 bp, synthetic construct; identical to SEQ ID NO: 1581
  source 1..80: mol_type = other DNA

SEQ ID NO: 186312 - DNA, 80 bp, synthetic construct; identical to SEQ ID NO: 1582
  source 1..80: mol_type = other DNA

SEQ ID NO: 186313 - DNA, 80 bp, synthetic construct; identical to SEQ ID NO: 1583
  source 1..80: mol_type = other DNA

SEQ ID NO: 186314 - DNA, 80 bp, synthetic construct; identical to SEQ ID NO: 1584
  source 1..80: mol_type = other DNA

SEQ ID NO: 186315 - DNA, 80 bp, synthetic construct; identical to SEQ ID NO: 1585
  source 1..80: mol_type = other DNA

SEQ ID NO: 186316 - DNA, 80 bp, synthetic construct; identical to SEQ ID NO: 1586
  source 1..80: mol_type = other DNA

SEQ ID NO: 186317 - DNA, 80 bp, synthetic construct; identical to SEQ ID NO: 1587
  source 1..80: mol_type = other DNA

SEQ ID NO: 186318 - DNA, 80 bp, synthetic construct; identical to SEQ ID NO: 1588
  source 1..80: mol_type = other DNA

SEQ ID NO: 186319 - DNA, 80 bp, synthetic construct; identical to SEQ ID NO: 1589
  source 1..80: mol_type = other DNA

SEQ ID NO: 186320 - DNA, 80 bp, synthetic construct; identical to SEQ ID NO: 1590
  source 1..80: mol_type = other DNA

SEQ ID NO: 186321 - DNA, 80 bp, synthetic construct; identical to SEQ ID NO: 1591
  source 1..80: mol_type = other DNA

SEQ ID NO: 186322 - DNA, 80 bp, synthetic construct; identical to SEQ ID NO: 1592
  source 1..80: mol_type = other DNA

SEQ ID NO: 186323 - DNA, 80 bp, synthetic construct; identical to SEQ ID NO: 1593
  source 1..80: mol_type = other DNA

SEQ ID NO: 186324 - DNA, 80 bp, synthetic construct; identical to SEQ ID NO: 1594
  source 1..80: mol_type = other DNA

SEQ ID NO: 186325 - DNA, 80 bp, synthetic construct; identical to SEQ ID NO: 1595
  source 1..80: mol_type = other DNA

SEQ ID NO: 186326 - DNA, 80 bp, synthetic construct; identical to SEQ ID NO: 1596
  source 1..80: mol_type = other DNA

SEQ ID NO: 186327 - DNA, 80 bp, synthetic construct; identical to SEQ ID NO: 1597
  source 1..80: mol_type = other DNA

SEQ ID NO: 186328 - DNA, 80 bp, synthetic construct; identical to SEQ ID NO: 1598
  source 1..80: mol_type = other DNA

SEQ ID NO: 186329 - DNA, 80 bp, synthetic construct; identical to SEQ ID NO: 1599
  source 1..80: mol_type = other DNA

SEQ ID NO: 186330 - DNA, 80 bp, synthetic construct; identical to SEQ ID NO: 1600
  source 1..80: mol_type = other DNA

SEQ ID NO: 186331 - DNA, 80 bp, synthetic construct; identical to SEQ ID NO: 1601
  source 1..80: mol_type = other DNA

SEQ ID NO: 186332 - DNA, 80 bp, synthetic construct; identical to SEQ ID NO: 1602
  source 1..80: mol_type = other DNA

SEQ ID NO: 186333 - DNA, 80 bp, synthetic construct; identical to SEQ ID NO: 1603
  source 1..80: mol_type = other DNA

SEQ ID NO: 186334 - DNA, 80 bp, synthetic construct; identical to SEQ ID NO: 1604
  source 1..80: mol_type = other DNA

SEQ ID NO: 186335 - DNA, 80 bp, synthetic construct; identical to SEQ ID NO: 1605
  source 1..80: mol_type = other DNA

SEQ ID NO: 186336 - DNA, 80 bp, synthetic construct; identical to SEQ ID NO: 1606
  source 1..80: mol_type = other DNA

SEQ ID NO: 186337 - DNA, 80 bp, synthetic construct; identical to SEQ ID NO: 1607
  source 1..80: mol_type = other DNA

SEQ ID NO: 186338 - DNA, 80 bp, synthetic construct; identical to SEQ ID NO: 1608
  source 1..80: mol_type = other DNA

SEQ ID NO: 186339 - DNA, 80 bp, synthetic construct; identical to SEQ ID NO: 1609
  source 1..80: mol_type = other DNA

SEQ ID NO: 186340 - DNA, 80 bp, synthetic construct; identical to SEQ ID NO: 1610
  source 1..80: mol_type = other DNA

SEQ ID NO: 186341 - DNA, 80 bp, synthetic construct; identical to SEQ ID NO: 1611
  source 1..80: mol_type = other DNA

SEQ ID NO: 186342 - DNA, 80 bp, synthetic construct; identical to SEQ ID NO: 1612
  source 1..80: mol_type = other DNA

SEQ ID NO: 186343 - DNA, 80 bp, synthetic construct; identical to SEQ ID NO: 1613
  source 1..80: mol_type = other DNA

SEQ ID NO: 186344 - DNA, 80 bp, synthetic construct; identical to SEQ ID NO: 1614
  source 1..80: mol_type = other DNA

SEQ ID NO: 186345 - DNA, 80 bp, synthetic construct; identical to SEQ ID NO: 1615
  source 1..80: mol_type = other DNA

SEQ ID NO: 186346 - DNA, 80 bp, synthetic construct; identical to SEQ ID NO: 1616
  source 1..80: mol_type = other DNA

SEQ ID NO: 186347 - DNA, 80 bp, synthetic construct; identical to SEQ ID NO: 1617
  source 1..80: mol_type = other DNA

SEQ ID NO: 186348 - DNA, 80 bp, synthetic construct; identical to SEQ ID NO: 1618
  source 1..80: mol_type = other DNA

SEQ ID NO: 186349 - DNA, 80 bp, synthetic construct; identical to SEQ ID NO: 1619
  source 1..80: mol_type = other DNA

SEQ ID NO: 186350 - DNA, 80 bp, synthetic construct; identical to SEQ ID NO: 1620
  source 1..80: mol_type = other DNA

SEQ ID NO: 186351 - DNA, 80 bp, synthetic construct; identical to SEQ ID NO: 1621
  source 1..80: mol_type = other DNA

SEQ ID NO: 186352 - DNA, 80 bp, synthetic construct; identical to SEQ ID NO: 1622
  source 1..80: mol_type = other DNA

SEQ ID NO: 186353 - DNA, 80 bp, synthetic construct; identical to SEQ ID NO: 1623
  source 1..80: mol_type = other DNA

SEQ ID NO: 186354 - DNA, 80 bp, synthetic construct; identical to SEQ ID NO: 1624
  source 1..80: mol_type = other DNA

SEQ ID NO: 186355 - DNA, 80 bp, synthetic construct; identical to SEQ ID NO: 1625
  source 1..80: mol_type = other DNA

SEQ ID NO: 186356 - DNA, 80 bp, synthetic construct; identical to SEQ ID NO: 1626
  source 1..80: mol_type = other DNA

SEQ ID NO: 186357 - DNA, 80 bp, synthetic construct; identical to SEQ ID NO: 1627
  source 1..80: mol_type = other DNA

SEQ ID NO: 186358 - DNA, 80 bp, synthetic construct; identical to SEQ ID NO: 1628
  source 1..80: mol_type = other DNA

SEQ ID NO: 186359 - DNA, 80 bp, synthetic construct; identical to SEQ ID NO: 1629
  source 1..80: mol_type = other DNA

SEQ ID NO: 186360 - DNA, 80 bp, synthetic construct; identical to SEQ ID NO: 1630
  source 1..80: mol_type = other DNA

SEQ ID NO: 186361 - DNA, 80 bp, synthetic construct; identical to SEQ ID NO: 1631
  source 1..80: mol_type = other DNA

SEQ ID NO: 186362 - DNA, 80 bp, synthetic construct; identical to SEQ ID NO: 1632
  source 1..80: mol_type = other DNA

SEQ ID NO: 186363 - DNA, 80 bp, synthetic construct; identical to SEQ ID NO: 1633
  source 1..80: mol_type = other DNA

SEQ ID NO: 186364 - DNA, 80 bp, synthetic construct; identical to SEQ ID NO: 1634
  source 1..80: mol_type = other DNA

SEQ ID NO: 186365 - DNA, 80 bp, synthetic construct; identical to SEQ ID NO: 1635
  source 1..80: mol_type = other DNA

SEQ ID NO: 186366 - DNA, 80 bp, synthetic construct; identical to SEQ ID NO: 1636
  source 1..80: mol_type = other DNA

SEQ ID NO: 186367 - DNA, 80 bp, synthetic construct; identical to SEQ ID NO: 1637
  source 1..80: mol_type = other DNA

SEQ ID NO: 186368 - DNA, 80 bp, synthetic construct; identical to SEQ ID NO: 1638
  source 1..80: mol_type = other DNA

SEQ ID NO: 186369 - DNA, 80 bp, synthetic construct; identical to SEQ ID NO: 1639
  source 1..80: mol_type = other DNA

SEQ ID NO: 186370 - DNA, 80 bp, synthetic construct; identical to SEQ ID NO: 1640
  source 1..80: mol_type = other DNA

SEQ ID NO: 186371 - DNA, 80 bp, synthetic construct; identical to SEQ ID NO: 1641
  source 1..80: mol_type = other DNA

SEQ ID NO: 186372 - DNA, 80 bp, synthetic construct; identical to SEQ ID NO: 1642
  source 1..80: mol_type = other DNA

SEQ ID NO: 186373 - DNA, 80 bp, synthetic construct; identical to SEQ ID NO: 1643
  source 1..80: mol_type = other DNA

SEQ ID NO: 186374 - DNA, 80 bp, synthetic construct; identical to SEQ ID NO: 1644
  source 1..80: mol_type = other DNA

SEQ ID NO: 186375 - DNA, 80 bp, synthetic construct; identical to SEQ ID NO: 1645
  source 1..80: mol_type = other DNA

SEQ ID NO: 186376 - DNA, 80 bp, synthetic construct; identical to SEQ ID NO: 1646
  source 1..80: mol_type = other DNA

SEQ ID NO: 186377 - DNA, 80 bp, synthetic construct; identical to SEQ ID NO: 1647
  source 1..80: mol_type = other DNA

SEQ ID NO: 186378 - DNA, 80 bp, synthetic construct; identical to SEQ ID NO: 1648
  source 1..80: mol_type = other DNA

SEQ ID NO: 186379 - DNA, 80 bp, synthetic construct; identical to SEQ ID NO: 1649
  source 1..80: mol_type = other DNA

SEQ ID NO: 186380 - DNA, 80 bp, synthetic construct; identical to SEQ ID NO: 1650
  source 1..80: mol_type = other DNA

SEQ ID NO: 186381 - DNA, 80 bp, synthetic construct; identical to SEQ ID NO: 1651
  source 1..80: mol_type = other DNA

SEQ ID NO: 186382 - DNA, 80 bp, synthetic construct; identical to SEQ ID NO: 1652
  source 1..80: mol_type = other DNA

SEQ ID NO: 186383 - DNA, 80 bp, synthetic construct; identical to SEQ ID NO: 1653
  source 1..80: mol_type = other DNA

SEQ ID NO: 186384 - DNA, 80 bp, synthetic construct; identical to SEQ ID NO: 1654
  source 1..80: mol_type = other DNA

SEQ ID NO: 186385 - DNA, 80 bp, synthetic construct; identical to SEQ ID NO: 1655
  source 1..80: mol_type = other DNA

SEQ ID NO: 186386 - DNA, 80 bp, synthetic construct; identical to SEQ ID NO: 1656
  source 1..80: mol_type = other DNA

SEQ ID NO: 186387 - DNA, 80 bp, synthetic construct; identical to SEQ ID NO: 1657
  source 1..80: mol_type = other DNA

SEQ ID NO: 186388 - DNA, 80 bp, synthetic construct; identical to SEQ ID NO: 1658
  source 1..80: mol_type = other DNA

SEQ ID NO: 186389 - DNA, 80 bp, synthetic construct; identical to SEQ ID NO: 1659
  source 1..80: mol_type = other DNA

SEQ ID NO: 186390 - DNA, 80 bp, synthetic construct; identical to SEQ ID NO: 1660
  source 1..80: mol_type = other DNA

SEQ ID NO: 186391 - DNA, 80 bp, synthetic construct; identical to SEQ ID NO: 1661
  source 1..80: mol_type = other DNA

SEQ ID NO: 186392 - DNA, 80 bp, synthetic construct; identical to SEQ ID NO: 1662
  source 1..80: mol_type = other DNA

SEQ ID NO: 186393 - DNA, 80 bp, synthetic construct; identical to SEQ ID NO: 1663
  source 1..80: mol_type = other DNA

SEQ ID NO: 186394 - DNA, 80 bp, synthetic construct; identical to SEQ ID NO: 1664
  source 1..80: mol_type = other DNA

SEQ ID NO: 186395 - DNA, 80 bp, synthetic construct; identical to SEQ ID NO: 1665
  source 1..80: mol_type = other DNA

SEQ ID NO: 186396 - DNA, 80 bp, synthetic construct; identical to SEQ ID NO: 1666
  source 1..80: mol_type = other DNA

SEQ ID NO: 186397 - DNA, 80 bp, synthetic construct; identical to SEQ ID NO: 1667
  source 1..80: mol_type = other DNA

SEQ ID NO: 186398 - DNA, 80 bp, synthetic construct; identical to SEQ ID NO: 1668
  source 1..80: mol_type = other DNA

SEQ ID NO: 186399 - DNA, 80 bp, synthetic construct; identical to SEQ ID NO: 1669
  source 1..80: mol_type = other DNA

SEQ ID NO: 186400 - DNA, 80 bp, synthetic construct; identical to SEQ ID NO: 1670
  source 1..80: mol_type = other DNA

SEQ ID NO: 186401 - DNA, 80 bp, synthetic construct; identical to SEQ ID NO: 1671
  source 1..80: mol_type = other DNA

SEQ ID NO: 186402 - DNA, 80 bp, synthetic construct; identical to SEQ ID NO: 1672
  source 1..80: mol_type = other DNA

SEQ ID NO: 186403 - DNA, 80 bp, synthetic construct; identical to SEQ ID NO: 1673
  source 1..80: mol_type = other DNA

SEQ ID NO: 186404 - DNA, 80 bp, synthetic construct; identical to SEQ ID NO: 1674
  source 1..80: mol_type = other DNA

SEQ ID NO: 186405 - DNA, 80 bp, synthetic construct; identical to SEQ ID NO: 1675
  source 1..80: mol_type = other DNA

SEQ ID NO: 186406 - DNA, 80 bp, synthetic construct; identical to SEQ ID NO: 1676
  source 1..80: mol_type = other DNA

SEQ ID NO: 186407 - DNA, 80 bp, synthetic construct; identical to SEQ ID NO: 1677
  source 1..80: mol_type = other DNA

SEQ ID NO: 186408 - DNA, 80 bp, synthetic construct; identical to SEQ ID NO: 1678
  source 1..80: mol_type = other DNA

SEQ ID NO: 186409 - DNA, 80 bp, synthetic construct; identical to SEQ ID NO: 1679
  source 1..80: mol_type = other DNA

SEQ ID NO: 186410 - DNA, 80 bp, synthetic construct; identical to SEQ ID NO: 1680
  source 1..80: mol_type = other DNA

SEQ ID NO: 186411 - DNA, 80 bp, synthetic construct; identical to SEQ ID NO: 1681
  source 1..80: mol_type = other DNA

SEQ ID NO: 186412 - DNA, 80 bp, synthetic construct; identical to SEQ ID NO: 1682
  source 1..80: mol_type = other DNA

SEQ ID NO: 186413 - DNA, 80 bp, synthetic construct; identical to SEQ ID NO: 1683
  source 1..80: mol_type = other DNA

SEQ ID NO: 186414 - DNA, 80 bp, synthetic construct; identical to SEQ ID NO: 1684
  source 1..80: mol_type = other DNA

SEQ ID NO: 186415 - DNA, 80 bp, synthetic construct; identical to SEQ ID NO: 1685
  source 1..80: mol_type = other DNA

SEQ ID NO: 186416 - DNA, 80 bp, synthetic construct; identical to SEQ ID NO: 1686
  source 1..80: mol_type = other DNA

SEQ ID NO: 186417 - DNA, 80 bp, synthetic construct; identical to SEQ ID NO: 1687
  source 1..80: mol_type = other DNA

SEQ ID NO: 186418 - DNA, 80 bp, synthetic construct; identical to SEQ ID NO: 1688
  source 1..80: mol_type = other DNA

SEQ ID NO: 186419 - DNA, 80 bp, synthetic construct; identical to SEQ ID NO: 1689
  source 1..80: mol_type = other DNA

SEQ ID NO: 186420 - DNA, 80 bp, synthetic construct; identical to SEQ ID NO: 1690
  source 1..80: mol_type = other DNA

SEQ ID NO: 186421 - DNA, 80 bp, synthetic construct; identical to SEQ ID NO: 1691
  source 1..80: mol_type = other DNA

SEQ ID NO: 186422 - DNA, 80 bp, synthetic construct; identical to SEQ ID NO: 1692
  source 1..80: mol_type = other DNA

SEQ ID NO: 186423 - DNA, 80 bp, synthetic construct; identical to SEQ ID NO: 1693
  source 1..80: mol_type = other DNA

SEQ ID NO: 186424 - DNA, 80 bp, synthetic construct; identical to SEQ ID NO: 1694
  source 1..80: mol_type = other DNA

SEQ ID NO: 186425 - DNA, 80 bp, synthetic construct; identical to SEQ ID NO: 1695
  source 1..80: mol_type = other DNA

SEQ ID NO: 186426 - DNA, 80 bp, synthetic construct; identical to SEQ ID NO: 1696
  source 1..80: mol_type = other DNA

SEQ ID NO: 186427 - DNA, 80 bp, synthetic construct; identical to SEQ ID NO: 1697
  source 1..80: mol_type = other DNA

SEQ ID NO: 186428 - DNA, 80 bp, synthetic construct; identical to SEQ ID NO: 1698
  source 1..80: mol_type = other DNA

SEQ ID NO: 186429 - DNA, 80 bp, synthetic construct; identical to SEQ ID NO: 1699
  source 1..80: mol_type = other DNA

SEQ ID NO: 186430 - DNA, 80 bp, synthetic construct; identical to SEQ ID NO: 1700
  source 1..80: mol_type = other DNA

SEQ ID NO: 186431 - DNA, 80 bp, synthetic construct; identical to SEQ ID NO: 1701
  source 1..80: mol_type = other DNA

SEQ ID NO: 186432 - DNA, 80 bp, synthetic construct; identical to SEQ ID NO: 1702
  source 1..80: mol_type = other DNA

SEQ ID NO: 186433 - DNA, 80 bp, synthetic construct; identical to SEQ ID NO: 1703
  source 1..80: mol_type = other DNA

SEQ ID NO: 186434 - DNA, 80 bp, synthetic construct; identical to SEQ ID NO: 1704
  source 1..80: mol_type = other DNA

SEQ ID NO: 186435 - DNA, 80 bp, synthetic construct; identical to SEQ ID NO: 1705
  source 1..80: mol_type = other DNA

SEQ ID NO: 186436 - DNA, 80 bp, synthetic construct; identical to SEQ ID NO: 1706
  source 1..80: mol_type = other DNA

SEQ ID NO: 186437 - DNA, 80 bp, synthetic construct; identical to SEQ ID NO: 1707
  source 1..80: mol_type = other DNA

SEQ ID NO: 186438 - DNA, 80 bp, synthetic construct; identical to SEQ ID NO: 1708
  source 1..80: mol_type = other DNA

SEQ ID NO: 186439 - DNA, 80 bp, synthetic construct; identical to SEQ ID NO: 1709
  source 1..80: mol_type = other DNA

SEQ ID NO: 186440 - DNA, 80 bp, synthetic construct; identical to SEQ ID NO: 1710
  source 1..80: mol_type = other DNA

SEQ ID NO: 186441 - DNA, 80 bp, synthetic construct; identical to SEQ ID NO: 1711
  source 1..80: mol_type = other DNA

SEQ ID NO: 186442 - DNA, 80 bp, synthetic construct; identical to SEQ ID NO: 1712
  source 1..80: mol_type = other DNA

SEQ ID NO: 186443 - DNA, 80 bp, synthetic construct; identical to SEQ ID NO: 1713
  source 1..80: mol_type = other DNA

SEQ ID NO: 186444 - DNA, 80 bp, synthetic construct; identical to SEQ ID NO: 1714
  source 1..80: mol_type = other DNA

SEQ ID NO: 186445 - DNA, 80 bp, synthetic construct; identical to SEQ ID NO: 1715
  source 1..80: mol_type = other DNA

SEQ ID NO: 186446 - DNA, 80 bp, synthetic construct; identical to SEQ ID NO: 1716
  source 1..80: mol_type = other DNA

SEQ ID NO: 186447 - DNA, 80 bp, synthetic construct; identical to SEQ ID NO: 1717
  source 1..80: mol_type = other DNA

SEQ ID NO: 186448 - DNA, 80 bp, synthetic construct; identical to SEQ ID NO: 1718
  source 1..80: mol_type = other DNA

SEQ ID NO: 186449 - DNA, 80 bp, synthetic construct; identical to SEQ ID NO: 1719
  source 1..80: mol_type = other DNA

SEQ ID NO: 186450 - DNA, 80 bp, synthetic construct; identical to SEQ ID NO: 1720
  source 1..80: mol_type = other DNA

SEQ ID NO: 186451 - DNA, 80 bp, synthetic construct; identical to SEQ ID NO: 1721
  source 1..80: mol_type = other DNA

SEQ ID NO: 186452 - DNA, 80 bp, synthetic construct; identical to SEQ ID NO: 1722
  source 1..80: mol_type = other DNA

SEQ ID NO: 186453 - DNA, 80 bp, synthetic construct; identical to SEQ ID NO: 1723
  source 1..80: mol_type = other DNA

SEQ ID NO: 186454 - DNA, 80 bp, synthetic construct; identical to SEQ ID NO: 1724
  source 1..80: mol_type = other DNA

SEQ ID NO: 186455 - DNA, 80 bp, synthetic construct; identical to SEQ ID NO: 1725
  source 1..80: mol_type = other DNA

SEQ ID NO: 186456 - DNA, 80 bp, synthetic construct; identical to SEQ ID NO: 1726
  source 1..80: mol_type = other DNA

SEQ ID NO: 186457 - DNA, 80 bp, synthetic construct; identical to SEQ ID NO: 1727
  source 1..80: mol_type = other DNA

SEQ ID NO: 186458 - DNA, 80 bp, synthetic construct; identical to SEQ ID NO: 1728
  source 1..80: mol_type = other DNA

SEQ ID NO: 186459 - DNA, 80 bp, synthetic construct; identical to SEQ ID NO: 1729
  source 1..80: mol_type = other DNA

SEQ ID NO: 186460 - DNA, 80 bp, synthetic construct; identical to SEQ ID NO: 1730
  source 1..80: mol_type = other DNA

SEQ ID NO: 186461 - DNA, 80 bp, synthetic construct; identical to SEQ ID NO: 1731
  source 1..80: mol_type = other DNA

SEQ ID NO: 186462 - DNA, 80 bp, synthetic construct; identical to SEQ ID NO: 1732
  source 1..80: mol_type = other DNA

SEQ ID NO: 186463 - DNA, 80 bp, synthetic construct; identical to SEQ ID NO: 1733
  source 1..80: mol_type = other DNA

SEQ ID NO: 186464 - DNA, 80 bp, synthetic construct; identical to SEQ ID NO: 1734
  source 1..80: mol_type = other DNA

SEQ ID NO: 186465 - DNA, 80 bp, synthetic construct; identical to SEQ ID NO: 1735
  source 1..80: mol_type = other DNA

SEQ ID NO: 186466 - DNA, 80 bp, synthetic construct; identical to SEQ ID NO: 1736
  source 1..80: mol_type = other DNA

SEQ ID NO: 186467 - DNA, 80 bp, synthetic construct; identical to SEQ ID NO: 1737
  source 1..80: mol_type = other DNA

SEQ ID NO: 186468 - DNA, 80 bp, synthetic construct; identical to SEQ ID NO: 1738
  source 1..80: mol_type = other DNA

SEQ ID NO: 186469 - DNA, 80 bp, synthetic construct; identical to SEQ ID NO: 1739
  source 1..80: mol_type = other DNA

SEQ ID NO: 186470 - DNA, 80 bp, synthetic construct; identical to SEQ ID NO: 1740
  source 1..80: mol_type = other DNA

SEQ ID NO: 186471 - DNA, 80 bp, synthetic construct; identical to SEQ ID NO: 1741
  source 1..80: mol_type = other DNA

SEQ ID NO: 186472 - DNA, 80 bp, synthetic construct; identical to SEQ ID NO: 1742
  source 1..80: mol_type = other DNA

SEQ ID NO: 186473 - DNA, 80 bp, synthetic construct; identical to SEQ ID NO: 1743
  source 1..80: mol_type = other DNA

SEQ ID NO: 186474 - DNA, 80 bp, synthetic construct; identical to SEQ ID NO: 1744
  source 1..80: mol_type = other DNA

SEQ ID NO: 186475 - DNA, 80 bp, synthetic construct; identical to SEQ ID NO: 1745
  source 1..80: mol_type = other DNA

SEQ ID NO: 186476 - DNA, 80 bp, synthetic construct; identical to SEQ ID NO: 1746
  source 1..80: mol_type = other DNA

SEQ ID NO: 186477 - DNA, 80 bp, synthetic construct; identical to SEQ ID NO: 1747
  source 1..80: mol_type = other DNA

SEQ ID NO: 186478 - DNA, 80 bp, synthetic construct; identical to SEQ ID NO: 1748
  source 1..80: mol_type = other DNA

SEQ ID NO: 186479 - DNA, 80 bp, synthetic construct; identical to SEQ ID NO: 1749
  source 1..80: mol_type = other DNA

SEQ ID NO: 186480 - DNA, 80 bp, synthetic construct; identical to SEQ ID NO: 1750
  source 1..80: mol_type = other DNA

SEQ ID NO: 186481 - DNA, 80 bp, synthetic construct; identical to SEQ ID NO: 1751
  source 1..80: mol_type = other DNA

SEQ ID NO: 186482 - DNA, 80 bp, synthetic construct; identical to SEQ ID NO: 1752
  source 1..80: mol_type = other DNA

SEQ ID NO: 186483 - DNA, 80 bp, synthetic construct; identical to SEQ ID NO: 1753
  source 1..80: mol_type = other DNA

SEQ ID NO: 186484 - DNA, 80 bp, synthetic construct; identical to SEQ ID NO: 1754
  source 1..80: mol_type = other DNA

SEQ ID NO: 186485 - DNA, 80 bp, synthetic construct; identical to SEQ ID NO: 1755
  source 1..80: mol_type = other DNA

SEQ ID NO: 186486 - DNA, 80 bp, synthetic construct; identical to SEQ ID NO: 1756
  source 1..80: mol_type = other DNA

SEQ ID NO: 186487 - DNA, 80 bp, synthetic construct; identical to SEQ ID NO: 1757
  source 1..80: mol_type = other DNA

SEQ ID NO: 186488 - DNA, 80 bp, synthetic construct; identical to SEQ ID NO: 1758
  source 1..80: mol_type = other DNA

SEQ ID NO: 186489 - DNA, 80 bp, synthetic construct; identical to SEQ ID NO: 1759
  source 1..80: mol_type = other DNA

SEQ ID NO: 186490 - DNA, 80 bp, synthetic construct; identical to SEQ ID NO: 1760
  source 1..80: mol_type = other DNA

SEQ ID NO: 186491 - DNA, 80 bp, synthetic construct; identical to SEQ ID NO: 1761
  source 1..80: mol_type = other DNA

SEQ ID NO: 186492 - DNA, 80 bp, synthetic construct; identical to SEQ ID NO: 1762
  source 1..80: mol_type = other DNA

SEQ ID NO: 186493 - DNA, 80 bp, synthetic construct; identical to SEQ ID NO: 1763
  source 1..80: mol_type = other DNA

SEQ ID NO: 186494 - DNA, 80 bp, synthetic construct; identical to SEQ ID NO: 1764
  source 1..80: mol_type = other DNA

SEQ ID NO: 186495 - DNA, 80 bp, synthetic construct; identical to SEQ ID NO: 1765
  source 1..80: mol_type = other DNA

SEQ ID NO: 186496 - DNA, 80 bp, synthetic construct; identical to SEQ ID NO: 1766
  source 1..80: mol_type = other DNA

SEQ ID NO: 186497 - DNA, 80 bp, synthetic construct; identical to SEQ ID NO: 1767
  source 1..80: mol_type = other DNA

SEQ ID NO: 186498 - DNA, 80 bp, synthetic construct; identical to SEQ ID NO: 1768
  source 1..80: mol_type = other DNA

SEQ ID NO: 186499 - DNA, 80 bp, synthetic construct; identical to SEQ ID NO: 1769
  source 1..80: mol_type = other DNA

SEQ ID NO: 186500 - DNA, 80 bp, synthetic construct; identical to SEQ ID NO: 1770
  source 1..80: mol_type = other DNA

SEQ ID NO: 186501 - DNA, 80 bp, synthetic construct; identical to SEQ ID NO: 1771
  source 1..80: mol_type = other DNA

SEQ ID NO: 186502 - DNA, 80 bp, synthetic construct; identical to SEQ ID NO: 1772
  source 1..80: mol_type = other DNA

SEQ ID NO: 186503 - DNA, 80 bp, synthetic construct; identical to SEQ ID NO: 1773
  source 1..80: mol_type = other DNA

SEQ ID NO: 186504 - DNA, 80 bp, synthetic construct; identical to SEQ ID NO: 1774
  source 1..80: mol_type = other DNA

SEQ ID NO: 186505 - DNA, 80 bp, synthetic construct; identical to SEQ ID NO: 1775
  source 1..80: mol_type = other DNA

SEQ ID NO: 186506 - DNA, 80 bp, synthetic construct; identical to SEQ ID NO: 1776
  source 1..80: mol_type = other DNA

SEQ ID NO: 186507 - DNA, 80 bp, synthetic construct; identical to SEQ ID NO: 1777
  source 1..80: mol_type = other DNA

SEQ ID NO: 186508 - DNA, 80 bp, synthetic construct; identical to SEQ ID NO: 1778
  source 1..80: mol_type = other DNA

SEQ ID NO: 186509 - DNA, 80 bp, synthetic construct; identical to SEQ ID NO: 1779
  source 1..80: mol_type = other DNA

SEQ ID NO: 186510 - DNA, 80 bp, synthetic construct; identical to SEQ ID NO: 1780
  source 1..80: mol_type = other DNA

SEQ ID NO: 186511 - DNA, 80 bp, synthetic construct; identical to SEQ ID NO: 1781
  source 1..80: mol_type = other DNA

SEQ ID NO: 186512 - DNA, 80 bp, synthetic construct; identical to SEQ ID NO: 1782
  source 1..80: mol_type = other DNA

SEQ ID NO: 186513 - DNA, 80 bp, synthetic construct; identical to SEQ ID NO: 1783
  source 1..80: mol_type = other DNA

SEQ ID NO: 186514 - DNA, 80 bp, synthetic construct; identical to SEQ ID NO: 1784
  source 1..80: mol_type = other DNA

SEQ ID NO: 186515 - DNA, 80 bp, synthetic construct; identical to SEQ ID NO: 1785
  source 1..80: mol_type = other DNA

SEQ ID NO: 186516 - DNA, 80 bp, synthetic construct; identical to SEQ ID NO: 1786
  source 1..80: mol_type = other DNA

SEQ ID NO: 186517 - DNA, 80 bp, synthetic construct; identical to SEQ ID NO: 1787
  source 1..80: mol_type = other DNA

SEQ ID NO: 186518 - DNA, 80 bp, synthetic construct; identical to SEQ ID NO: 1788
  source 1..80: mol_type = other DNA

SEQ ID NO: 186519 - DNA, 80 bp, synthetic construct; identical to SEQ ID NO: 1789
  source 1..80: mol_type = other DNA

SEQ ID NO: 186520 - DNA, 80 bp, synthetic construct; identical to SEQ ID NO: 1790
  source 1..80: mol_type = other DNA

SEQ ID NO: 186521 - DNA, 80 bp, synthetic construct; identical to SEQ ID NO: 1791
  source 1..80: mol_type = other DNA

SEQ ID NO: 186522 - DNA, 80 bp, synthetic construct; identical to SEQ ID NO: 1792
  source 1..80: mol_type = other DNA

SEQ ID NO: 186523 - DNA, 80 bp, synthetic construct; identical to SEQ ID NO: 1793
  source 1..80: mol_type = other DNA

SEQ ID NO: 186524 - DNA, 80 bp, synthetic construct; identical to SEQ ID NO: 1794
  source 1..80: mol_type = other DNA

SEQ ID NO: 186525 - DNA, 80 bp, synthetic construct; identical to SEQ ID NO: 1795
  source 1..80: mol_type = other DNA

SEQ ID NO: 186526 - DNA, 80 bp, synthetic construct; identical to SEQ ID NO: 1796
  source 1..80: mol_type = other DNA

SEQ ID NO: 186527 - DNA, 80 bp, synthetic construct; identical to SEQ ID NO: 1797
  source 1..80: mol_type = other DNA

SEQ ID NO: 186528 - DNA, 80 bp, synthetic construct; identical to SEQ ID NO: 1798
  source 1..80: mol_type = other DNA

SEQ ID NO: 186529 - DNA, 80 bp, synthetic construct; identical to SEQ ID NO: 1799
  source 1..80: mol_type = other DNA

SEQ ID NO: 186530 - DNA, 80 bp, synthetic construct; identical to SEQ ID NO: 1800
  source 1..80: mol_type = other DNA

SEQ ID NO: 186531 - DNA, 80 bp, synthetic construct; identical to SEQ ID NO: 1801
  source 1..80: mol_type = other DNA

SEQ ID NO: 186532 - DNA, 80 bp, synthetic construct; identical to SEQ ID NO: 1802
  source 1..80: mol_type = other DNA

SEQ ID NO: 186533 - DNA, 80 bp, synthetic construct; identical to SEQ ID NO: 1803
  source 1..80: mol_type = other DNA

SEQ ID NO: 186534 - DNA, 80 bp, synthetic construct; identical to SEQ ID NO: 1804
  source 1..80: mol_type = other DNA

SEQ ID NO: 186535 - DNA, 80 bp, synthetic construct; identical to SEQ ID NO: 1805
  source 1..80: mol_type = other DNA

SEQ ID NO: 186536 - DNA, 80 bp, synthetic construct; identical to SEQ ID NO: 1806
  source 1..80: mol_type = other DNA

SEQ ID NO: 186537 - DNA, 80 bp, synthetic construct; identical to SEQ ID NO: 1807
  source 1..80: mol_type = other DNA

SEQ ID NO: 186538 - DNA, 80 bp, synthetic construct; identical to SEQ ID NO: 1808
  source 1..80: mol_type = other DNA

SEQ ID NO: 186539 - DNA, 80 bp, synthetic construct; identical to SEQ ID NO: 1809
  source 1..80: mol_type = other DNA

SEQ ID NO: 186540 - DNA, 80 bp, synthetic construct; identical to SEQ ID NO: 1810
  source 1..80: mol_type = other DNA

SEQ ID NO: 186541 - DNA, 80 bp, synthetic construct; identical to SEQ ID NO: 1811
  source 1..80: mol_type = other DNA

SEQ ID NO: 186542 - DNA, 80 bp, synthetic construct; identical to SEQ ID NO: 1812
  source 1..80: mol_type = other DNA

SEQ ID NO: 186543 - DNA, 80 bp, synthetic construct; identical to SEQ ID NO: 1813
  source 1..80: mol_type = other DNA

SEQ ID NO: 186544 - DNA, 80 bp, synthetic construct; identical to SEQ ID NO: 1814
  source 1..80: mol_type = other DNA

SEQ ID NO: 186545 - DNA, 80 bp, synthetic construct; identical to SEQ ID NO: 1815
  source 1..80: mol_type = other DNA

SEQ ID NO: 186546 - DNA, 80 bp, synthetic construct; identical to SEQ ID NO: 1816
  source 1..80: mol_type = other DNA

SEQ ID NO: 186547 - DNA, 80 bp, synthetic construct; identical to SEQ ID NO: 1817
  source 1..80: mol_type = other DNA

SEQ ID NO: 186548 - DNA, 80 bp, synthetic construct; identical to SEQ ID NO: 1818
  source 1..80: mol_type = other DNA

SEQ ID NO: 186549 - DNA, 80 bp, synthetic construct; identical to SEQ ID NO: 1819
  source 1..80: mol_type = other DNA

SEQ ID NO: 186550 - DNA, 80 bp, synthetic construct; identical to SEQ ID NO: 1820
  source 1..80: mol_type = other DNA

SEQ ID NO: 186551 - DNA, 80 bp, synthetic construct; identical to SEQ ID NO: 1821
  source 1..80: mol_type = other DNA

SEQ ID NO: 186552 - DNA, 80 bp, synthetic construct; identical to SEQ ID NO: 1822
  source 1..80: mol_type = other DNA

SEQ ID NO: 186553 - DNA, 80 bp, synthetic construct; identical to SEQ ID NO: 1823
  source 1..80: mol_type = other DNA

SEQ ID NO: 186554 - DNA, 80 bp, synthetic construct; identical to SEQ ID NO: 1824
  source 1..80: mol_type = other DNA

SEQ ID NO: 186555 - DNA, 80 bp, synthetic construct; identical to SEQ ID NO: 1825
  source 1..80: mol_type = other DNA

SEQ ID NO: 186556 - DNA, 80 bp, synthetic construct; identical to SEQ ID NO: 1826
  source 1..80: mol_type = other DNA

SEQ ID NO: 186557 - DNA, 80 bp, synthetic construct; identical to SEQ ID NO: 1827
  source 1..80: mol_type = other DNA

SEQ ID NO: 186558 - DNA, 80 bp, synthetic construct; identical to SEQ ID NO: 1828
  source 1..80: mol_type = other DNA

SEQ ID NO: 186559 - DNA, 80 bp, synthetic construct; identical to SEQ ID NO: 1829
  source 1..80: mol_type = other DNA

SEQ ID NO: 186560 - DNA, 80 bp, synthetic construct; identical to SEQ ID NO: 1830
  source 1..80: mol_type = other DNA

SEQ ID NO: 186561 - DNA, 80 bp, synthetic construct; identical to SEQ ID NO: 1831
  source 1..80: mol_type = other DNA

SEQ ID NO: 186562 - DNA, 80 bp, synthetic construct; identical to SEQ ID NO: 1832
  source 1..80: mol_type = other DNA

SEQ ID NO: 186563 - DNA, 80 bp, synthetic construct; identical to SEQ ID NO: 1833
  source 1..80: mol_type = other DNA

SEQ ID NO: 186564 - DNA, 80 bp, synthetic construct; identical to SEQ ID NO: 1834
  source 1..80: mol_type = other DNA

SEQ ID NO: 186565 - DNA, 80 bp, synthetic construct; identical to SEQ ID NO: 1835
  source 1..80: mol_type = other DNA

SEQ ID NO: 186566 - DNA, 80 bp, synthetic construct; identical to SEQ ID NO: 1836
  source 1..80: mol_type = other DNA

SEQ ID NO: 186567 - DNA, 80 bp, synthetic construct; identical to SEQ ID NO: 1837
  source 1..80: mol_type = other DNA

SEQ ID NO: 186568 - DNA, 80 bp, synthetic construct; identical to SEQ ID NO: 1838
  source 1..80: mol_type = other DNA

SEQ ID NO: 186569 - DNA, 80 bp, synthetic construct; identical to SEQ ID NO: 1839
  source 1..80: mol_type = other DNA

SEQ ID NO: 186570 - DNA, 80 bp, synthetic construct; identical to SEQ ID NO: 1840
  source 1..80: mol_type = other DNA

SEQ ID NO: 186571 - DNA, 80 bp, synthetic construct; identical to SEQ ID NO: 1841
  source 1..80: mol_type = other DNA

SEQ ID NO: 186572 - DNA, 80 bp, synthetic construct; identical to SEQ ID NO: 1842
  source 1..80: mol_type = other DNA

SEQ ID NO: 186573 - DNA, 80 bp, synthetic construct; identical to SEQ ID NO: 1843
  source 1..80: mol_type = other DNA

SEQ ID NO: 186574 - DNA, 80 bp, synthetic construct; identical to SEQ ID NO: 1844
  source 1..80: mol_type = other DNA

SEQ ID NO: 186575 - DNA, 80 bp, synthetic construct; identical to SEQ ID NO: 1845
  source 1..80: mol_type = other DNA

SEQ ID NO: 186576 - DNA, 80 bp, synthetic construct; identical to SEQ ID NO: 1846
  source 1..80: mol_type = other DNA

SEQ ID NO: 186577 - DNA, 80 bp, synthetic construct; identical to SEQ ID NO: 1847
  source 1..80: mol_type = other DNA

SEQ ID NO: 186578 - DNA, 80 bp, synthetic construct; identical to SEQ ID NO: 1848
  source 1..80: mol_type = other DNA

SEQ ID NO: 186579 - DNA, 80 bp, synthetic construct; identical to SEQ ID NO: 1849
  source 1..80: mol_type = other DNA

SEQ ID NO: 186580 - DNA, 80 bp, synthetic construct; identical to SEQ ID NO: 1850
  source 1..80: mol_type = other DNA

SEQ ID NO: 186581 - DNA, 80 bp, synthetic construct; identical to SEQ ID NO: 1851
  source 1..80: mol_type = other DNA

SEQ ID NO: 186582 - DNA, 80 bp, synthetic construct; identical to SEQ ID NO: 1852
  source 1..80: mol_type = other DNA

SEQ ID NO: 186583 - DNA, 80 bp, synthetic construct; identical to SEQ ID NO: 1853
  source 1..80: mol_type = other DNA

SEQ ID NO: 186584 - DNA, 80 bp, synthetic construct; identical to SEQ ID NO: 1854
  source 1..80: mol_type = other DNA

SEQ ID NO: 186585 - DNA, 80 bp, synthetic construct; identical to SEQ ID NO: 1855
  source 1..80: mol_type = other DNA

SEQ ID NO: 186586 - DNA, 80 bp, synthetic construct; identical to SEQ ID NO: 1856
  source 1..80: mol_type = other DNA

SEQ ID NO: 186587 - DNA, 80 bp, synthetic construct; identical to SEQ ID NO: 1857
  source 1..80: mol_type = other DNA

SEQ ID NO: 186588 - DNA, 80 bp, synthetic construct; identical to SEQ ID NO: 1858
  source 1..80: mol_type = other DNA

SEQ ID NO: 186589 - DNA, 80 bp, synthetic construct; identical to SEQ ID NO: 1859
  source 1..80: mol_type = other DNA

SEQ ID NO: 186590 - DNA, 80 bp, synthetic construct; identical to SEQ ID NO: 1860
  source 1..80: mol_type = other DNA

SEQ ID NO: 186591 - DNA, 80 bp, synthetic construct; identical to SEQ ID NO: 1861
  source 1..80: mol_type = other DNA

SEQ ID NO: 186592 - DNA, 80 bp, synthetic construct; identical to SEQ ID NO: 1862
  source 1..80: mol_type = other DNA

SEQ ID NO: 186593 - DNA, 80 bp, synthetic construct; identical to SEQ ID NO: 1863
  source 1..80: mol_type = other DNA

SEQ ID NO: 186594 - DNA, 80 bp, synthetic construct; identical to SEQ ID NO: 1864
  source 1..80: mol_type = other DNA

SEQ ID NO: 186595 - DNA, 80 bp, synthetic construct; identical to SEQ ID NO: 1865
  source 1..80: mol_type = other DNA

SEQ ID NO: 186596 - DNA, 80 bp, synthetic construct; identical to SEQ ID NO: 1866
  source 1..80: mol_type = other DNA

SEQ ID NO: 186597 - DNA, 80 bp, synthetic construct; identical to SEQ ID NO: 1867
  source 1..80: mol_type = other DNA

SEQ ID NO: 186598 - DNA, 80 bp, synthetic construct; identical to SEQ ID NO: 1868
  source 1..80: mol_type = other DNA

SEQ ID NO: 186599 - DNA, 80 bp, synthetic construct; identical to SEQ ID NO: 1869
  source 1..80: mol_type = other DNA

SEQ ID NO: 186600 - DNA, 80 bp, synthetic construct; identical to SEQ ID NO: 1870
  source 1..80: mol_type = other DNA

SEQ ID NO: 186601 - DNA, 80 bp, synthetic construct; identical to SEQ ID NO: 1871
  source 1..80: mol_type = other DNA

SEQ ID NO: 186602 - DNA, 80 bp, synthetic construct; identical to SEQ ID NO: 1872
  source 1..80: mol_type = other DNA

SEQ ID NO: 186603 - DNA, 80 bp, synthetic construct; identical to SEQ ID NO: 1873
  source 1..80: mol_type = other DNA

SEQ ID NO: 186604 - DNA, 80 bp, synthetic construct; identical to SEQ ID NO: 1874
  source 1..80: mol_type = other DNA

SEQ ID NO: 186605 - DNA, 80 bp, synthetic construct; identical to SEQ ID NO: 1875
  source 1..80: mol_type = other DNA

SEQ ID NO: 186606 - DNA, 80 bp, synthetic construct; identical to SEQ ID NO: 1876
  source 1..80: mol_type = other DNA

SEQ ID NO: 186607 - DNA, 80 bp, synthetic construct; identical to SEQ ID NO: 1877
  source 1..80: mol_type = other DNA

SEQ ID NO: 186608 - DNA, 80 bp, synthetic construct; identical to SEQ ID NO: 1878
  source 1..80: mol_type = other DNA

SEQ ID NO: 186609 - DNA, 80 bp, synthetic construct; identical to SEQ ID NO: 1879
  source 1..80: mol_type = other DNA

SEQ ID NO: 186610 - DNA, 80 bp, synthetic construct; identical to SEQ ID NO: 1880
  source 1..80: mol_type = other DNA

SEQ ID NO: 186611 - DNA, 80 bp, synthetic construct; identical to SEQ ID NO: 1881
  source 1..80: mol_type = other DNA

SEQ ID NO: 186612 - DNA, 80 bp, synthetic construct; identical to SEQ ID NO: 1882
  source 1..80: mol_type = other DNA

SEQ ID NO: 186613 - DNA, 80 bp, synthetic construct; identical to SEQ ID NO: 1883
  source 1..80: mol_type = other DNA

SEQ ID NO: 186614 - DNA, 80 bp, synthetic construct; identical to SEQ ID NO: 1884
  source 1..80: mol_type = other DNA

SEQ ID NO: 186615 - DNA, 80 bp, synthetic construct; identical to SEQ ID NO: 1885
  source 1..80: mol_type = other DNA

SEQ ID NO: 186616 - DNA, 80 bp, synthetic construct; identical to SEQ ID NO: 1886
  source 1..80: mol_type = other DNA

SEQ ID NO: 186617 - DNA, 80 bp, synthetic construct; identical to SEQ ID NO: 1887
  source 1..80: mol_type = other DNA

SEQ ID NO: 186618 - DNA, 80 bp, synthetic construct; identical to SEQ ID NO: 1888
  source 1..80: mol_type = other DNA

SEQ ID NO: 186619 - DNA, 80 bp, synthetic construct; identical to SEQ ID NO: 1889
  source 1..80: mol_type = other DNA

SEQ ID NO: 186620 - DNA, 80 bp, synthetic construct; identical to SEQ ID NO: 1890
  source 1..80: mol_type = other DNA

SEQ ID NO: 186621 - DNA, 80 bp, synthetic construct; identical to SEQ ID NO: 1891
  source 1..80: mol_type = other DNA

SEQ ID NO: 186622 - DNA, 80 bp, synthetic construct; identical to SEQ ID NO: 1892
  source 1..80: mol_type = other DNA

SEQ ID NO: 186623 - DNA, 80 bp, synthetic construct; identical to SEQ ID NO: 1893
  source 1..80: mol_type = other DNA

SEQ ID NO: 186624 - DNA, 80 bp, synthetic construct; identical to SEQ ID NO: 1894
  source 1..80: mol_type = other DNA

SEQ ID NO: 186625 - DNA, 80 bp, synthetic construct; identical to SEQ ID NO: 1895
  source 1..80: mol_type = other DNA

SEQ ID NO: 186626 - DNA, 80 bp, synthetic construct; identical to SEQ ID NO: 1896
  source 1..80: mol_type = other DNA

SEQ ID NO: 186627 - DNA, 80 bp, synthetic construct; identical to SEQ ID NO: 1897
  source 1..80: mol_type = other DNA

SEQ ID NO: 186628 - DNA, 80 bp, synthetic construct; identical to SEQ ID NO: 1898
  source 1..80: mol_type = other DNA

SEQ ID NO: 186629 - DNA, 80 bp, synthetic construct; identical to SEQ ID NO: 1899
  source 1..80: mol_type = other DNA

SEQ ID NO: 186630 - DNA, 80 bp, synthetic construct; identical to SEQ ID NO: 1900
  source 1..80: mol_type = other DNA

SEQ ID NO: 186631 - DNA, 80 bp, synthetic construct; identical to SEQ ID NO: 1901
  source 1..80: mol_type = other DNA

SEQ ID NO: 186632 - DNA, 80 bp, synthetic construct; identical to SEQ ID NO: 1902
  source 1..80: mol_type = other DNA

SEQ ID NO: 186633 - DNA, 80 bp, synthetic construct; identical to SEQ ID NO: 1903
  source 1..80: mol_type = other DNA

SEQ ID NO: 186634 - DNA, 80 bp, synthetic construct; identical to SEQ ID NO: 1904
  source 1..80: mol_type = other DNA

SEQ ID NO: 186635 - DNA, 80 bp, synthetic construct; identical to SEQ ID NO: 1905
  source 1..80: mol_type = other DNA

SEQ ID NO: 186636 - DNA, 80 bp, synthetic construct; identical to SEQ ID NO: 1906
  source 1..80: mol_type = other DNA

SEQ ID NO: 186637 - DNA, 80 bp, synthetic construct; identical to SEQ ID NO: 1907
  source 1..80: mol_type = other DNA

SEQ ID NO: 186638 - DNA, 80 bp, synthetic construct; identical to SEQ ID NO: 1908
  source 1..80: mol_type = other DNA

SEQ ID NO: 186639 - DNA, 80 bp, synthetic construct; identical to SEQ ID NO: 1909
  source 1..80: mol_type = other DNA

SEQ ID NO: 186640 - DNA, 80 bp, synthetic construct; identical to SEQ ID NO: 1910
  source 1..80: mol_type = other DNA

SEQ ID NO: 186641 - DNA, 80 bp, synthetic construct; identical to SEQ ID NO: 1911
  source 1..80: mol_type = other DNA

SEQ ID NO: 186642 - DNA, 80 bp, synthetic construct; identical to SEQ ID NO: 1912
  source 1..80: mol_type = other DNA

SEQ ID NO: 186643 - DNA, 80 bp, synthetic construct; identical to SEQ ID NO: 1913
  source 1..80: mol_type = other DNA

SEQ ID NO: 186644 - DNA, 80 bp, synthetic construct; identical to SEQ ID NO: 1914
  source 1..80: mol_type = other DNA

SEQ ID NO: 186645 - DNA, 80 bp, synthetic construct; identical to SEQ ID NO: 1915
  source 1..80: mol_type = other DNA

SEQ ID NO: 186646 - DNA, 80 bp, synthetic construct; identical to SEQ ID NO: 1916
  source 1..80: mol_type = other DNA

SEQ ID NO: 186647 - DNA, 80 bp, synthetic construct; identical to SEQ ID NO: 1917
  source 1..80: mol_type = other DNA

SEQ ID NO: 186648 - DNA, 80 bp, synthetic construct; identical to SEQ ID NO: 1918
  source 1..80: mol_type = other DNA

SEQ ID NO: 186649 - DNA, 80 bp, synthetic construct; identical to SEQ ID NO: 1919
  source 1..80: mol_type = other DNA

SEQ ID NO: 186650 - DNA, 80 bp, synthetic construct; identical to SEQ ID NO: 1920
  source 1..80: mol_type = other DNA

SEQ ID NO: 186651 - DNA, 80 bp, synthetic construct; identical to SEQ ID NO: 1921
  source 1..80: mol_type = other DNA

SEQ ID NO: 186652 - DNA, 80 bp, synthetic construct; identical to SEQ ID NO: 1922
  source 1..80: mol_type = other DNA

SEQ ID NO: 186653 - DNA, 80 bp, synthetic construct; identical to SEQ ID NO: 1923
  source 1..80: mol_type = other DNA

SEQ ID NO: 186654 - DNA, 80 bp, synthetic construct; identical to SEQ ID NO: 1924
  source 1..80: mol_type = other DNA

SEQ ID NO: 186655 - DNA, 80 bp, synthetic construct; identical to SEQ ID NO: 1925
  source 1..80: mol_type = other DNA

SEQ ID NO: 186656 - DNA, 80 bp, synthetic construct; identical to SEQ ID NO: 1926
  source 1..80: mol_type = other DNA

SEQ ID NO: 186657 - DNA, 80 bp, synthetic construct; identical to SEQ ID NO: 1927
  source 1..80: mol_type = other DNA

SEQ ID NO: 186658 - DNA, 80 bp, synthetic construct; identical to SEQ ID NO: 1928
  source 1..80: mol_type = other DNA

SEQ ID NO: 186659 - DNA, 80 bp, synthetic construct; identical to SEQ ID NO: 1929
  source 1..80: mol_type = other DNA

SEQ ID NO: 186660 - DNA, 80 bp, synthetic construct; identical to SEQ ID NO: 1930
  source 1..80: mol_type = other DNA

SEQ ID NO: 186661 - DNA, 80 bp, synthetic construct; identical to SEQ ID NO: 1931
  source 1..80: mol_type = other DNA

SEQ ID NO: 186662 - DNA, 80 bp, synthetic construct; identical to SEQ ID NO: 1932
  source 1..80: mol_type = other DNA

SEQ ID NO: 186663 - DNA, 80 bp, synthetic construct; identical to SEQ ID NO: 1933
  source 1..80: mol_type = other DNA

SEQ ID NO: 186664 - DNA, 80 bp, synthetic construct; identical to SEQ ID NO: 1934
  source 1..80: mol_type = other DNA

SEQ ID NO: 186665 - DNA, 80 bp, synthetic construct; identical to SEQ ID NO: 1935
  source 1..80: mol_type = other DNA

SEQ ID NO: 186666 - DNA, 80 bp, synthetic construct; identical to SEQ ID NO: 1936
  source 1..80: mol_type = other DNA

SEQ ID NO: 186667 - DNA, 80 bp, synthetic construct; identical to SEQ ID NO: 1937
  source 1..80: mol_type = other DNA

SEQ ID NO: 186668 - DNA, 80 bp, synthetic construct; identical to SEQ ID NO: 1938
  source 1..80: mol_type = other DNA

SEQ ID NO: 186669 - DNA, 80 bp, synthetic construct; identical to SEQ ID NO: 1939
  source 1..80: mol_type = other DNA

SEQ ID NO: 186670 - DNA, 80 bp, synthetic construct; identical to SEQ ID NO: 1940
  source 1..80: mol_type = other DNA

SEQ ID NO: 186671 - DNA, 80 bp, synthetic construct; identical to SEQ ID NO: 1941
  source 1..80: mol_type = other DNA

SEQ ID NO: 186672 - DNA, 80 bp, synthetic construct; identical to SEQ ID NO: 1942
  source 1..80: mol_type = other DNA

SEQ ID NO: 186673 - DNA, 80 bp, synthetic construct; identical to SEQ ID NO: 1943
  source 1..80: mol_type = other DNA

SEQ ID NO: 186674 - DNA, 80 bp, synthetic construct; identical to SEQ ID NO: 1944
  source 1..80: mol_type = other DNA

SEQ ID NO: 186675 - DNA, 80 bp, synthetic construct; identical to SEQ ID NO: 1945
  source 1..80: mol_type = other DNA

SEQ ID NO: 186676 - DNA, 80 bp, synthetic construct; identical to SEQ ID NO: 1946
  source 1..80: mol_type = other DNA

SEQ ID NO: 186677 - DNA, 80 bp, synthetic construct; identical to SEQ ID NO: 1947
  source 1..80: mol_type = other DNA

SEQ ID NO: 186678 - DNA, 80 bp, synthetic construct; identical to SEQ ID NO: 1948
  source 1..80: mol_type = other DNA

SEQ ID NO: 186679 - DNA, 80 bp, synthetic construct; identical to SEQ ID NO: 1949
  source 1..80: mol_type = other DNA

SEQ ID NO: 186680 - DNA, 80 bp, synthetic construct; identical to SEQ ID NO: 1950
  source 1..80: mol_type = other DNA

SEQ ID NO: 186681 - DNA, 80 bp, synthetic construct; identical to SEQ ID NO: 1951
  source 1..80: mol_type = other DNA

SEQ ID NO: 186682 - DNA, 80 bp, synthetic construct; identical to SEQ ID NO: 1952
  source 1..80: mol_type = other DNA

SEQ ID NO: 186683 - DNA, 80 bp, synthetic construct; identical to SEQ ID NO: 1953
  source 1..80: mol_type = other DNA

SEQ ID NO: 186684 - DNA, 80 bp, synthetic construct; identical to SEQ ID NO: 1954
  source 1..80: mol_type = other DNA

SEQ ID NO: 186685 - DNA, 80 bp, synthetic construct; identical to SEQ ID NO: 1955
  source 1..80: mol_type = other DNA

SEQ ID NO: 186686 - DNA, 80 bp, synthetic construct; identical to SEQ ID NO: 1956
  source 1..80: mol_type = other DNA

SEQ ID NO: 186687 - DNA, 80 bp, synthetic construct; identical to SEQ ID NO: 1957
  source 1..80: mol_type = other DNA

SEQ ID NO: 186688 - DNA, 80 bp, synthetic construct; identical to SEQ ID NO: 1958
  source 1..80: mol_type = other DNA

SEQ ID NO: 186689 - DNA, 80 bp, synthetic construct; identical to SEQ ID NO: 1959
  source 1..80: mol_type = other DNA

SEQ ID NO: 186690 - DNA, 80 bp, synthetic construct; identical to SEQ ID NO: 1960
  source 1..80: mol_type = other DNA

SEQ ID NO: 186691 - DNA, 80 bp, synthetic construct; identical to SEQ ID NO: 1961
  source 1..80: mol_type = other DNA

SEQ ID NO: 186692 - DNA, 80 bp, synthetic construct; identical to SEQ ID NO: 1962
  source 1..80: mol_type = other DNA

SEQ ID NO: 186693 - DNA, 80 bp, synthetic construct; identical to SEQ ID NO: 1963
  source 1..80: mol_type = other DNA

SEQ ID NO: 186694 - DNA, 80 bp, synthetic construct; identical to SEQ ID NO: 1964
  source 1..80: mol_type = other DNA

SEQ ID NO: 186695 - DNA, 80 bp, synthetic construct; identical to SEQ ID NO: 1965
  source 1..80: mol_type = other DNA

SEQ ID NO: 186696 - DNA, 80 bp, synthetic construct; identical to SEQ ID NO: 1966
  source 1..80: mol_type = other DNA

SEQ ID NO: 186697 - DNA, 80 bp, synthetic construct; identical to SEQ ID NO: 1967
  source 1..80: mol_type = other DNA

SEQ ID NO: 186698 - DNA, 80 bp, synthetic construct; identical to SEQ ID NO: 1968
  source 1..80: mol_type = other DNA

SEQ ID NO: 186699 - DNA, 80 bp, synthetic construct; identical to SEQ ID NO: 1969
  source 1..80: mol_type = other DNA

SEQ ID NO: 186700 - DNA, 80 bp, synthetic construct; identical to SEQ ID NO: 1970
  source 1..80: mol_type = other DNA

SEQ ID NO: 186701 - DNA, 80 bp, synthetic construct; identical to SEQ ID NO: 1971
  source 1..80: mol_type = other DNA

SEQ ID NO: 186702 - DNA, 80 bp, synthetic construct; identical to SEQ ID NO: 1972
  source 1..80: mol_type = other DNA

SEQ ID NO: 186703 - DNA, 80 bp, synthetic construct; identical to SEQ ID NO: 1973
  source 1..80: mol_type = other DNA

SEQ ID NO: 186704 - DNA, 80 bp, synthetic construct; identical to SEQ ID NO: 1974
  source 1..80: mol_type = other DNA

SEQ ID NO: 186705 - DNA, 80 bp, synthetic construct; identical to SEQ ID NO: 1975
  source 1..80: mol_type = other DNA

SEQ ID NO: 186706 - DNA, 80 bp, synthetic construct; identical to SEQ ID NO: 1976
  source 1..80: mol_type = other DNA

SEQ ID NO: 186707 - DNA, 80 bp, synthetic construct; identical to SEQ ID NO: 1977
  source 1..80: mol_type = other DNA

SEQ ID NO: 186708 - DNA, 80 bp, synthetic construct; identical to SEQ ID NO: 1978
  source 1..80: mol_type = other DNA

SEQ ID NO: 186709 - DNA, 80 bp, synthetic construct; identical to SEQ ID NO: 1979
  source 1..80: mol_type = other DNA

SEQ ID NO: 186710 - DNA, 80 bp, synthetic construct; identical to SEQ ID NO: 1980
  source 1..80: mol_type = other DNA

SEQ ID NO: 186711 - DNA, 80 bp, synthetic construct; identical to SEQ ID NO: 1981
  source 1..80: mol_type = other DNA

SEQ ID NO: 186712 - DNA, 80 bp, synthetic construct; identical to SEQ ID NO: 1982
  source 1..80: mol_type = other DNA

SEQ ID NO: 186713 - DNA, 80 bp, synthetic construct; identical to SEQ ID NO: 1983
  source 1..80: mol_type = other DNA

SEQ ID NO: 186714 - DNA, 80 bp, synthetic construct; identical to SEQ ID NO: 1984
  source 1..80: mol_type = other DNA

SEQ ID NO: 186715 - DNA, 80 bp, synthetic construct; identical to SEQ ID NO: 1985
  source 1..80: mol_type = other DNA

SEQ ID NO: 186716 - DNA, 80 bp, synthetic construct; identical to SEQ ID NO: 1986
  source 1..80: mol_type = other DNA

SEQ ID NO: 186717 - DNA, 80 bp, synthetic construct; identical to SEQ ID NO: 1987
  source 1..80: mol_type = other DNA

SEQ ID NO: 186718 - DNA, 80 bp, synthetic construct; identical to SEQ ID NO: 1988
  source 1..80: mol_type = other DNA

SEQ ID NO: 186719 - DNA, 80 bp, synthetic construct; identical to SEQ ID NO: 1989
  source 1..80: mol_type = other DNA

SEQ ID NO: 186720 - DNA, 80 bp, synthetic construct; identical to SEQ ID NO: 1990
  source 1..80: mol_type = other DNA

SEQ ID NO: 186721 - DNA, 80 bp, synthetic construct; identical to SEQ ID NO: 1991
  source 1..80: mol_type = other DNA

SEQ ID NO: 186722 - DNA, 80 bp, synthetic construct; identical to SEQ ID NO: 1992
  source 1..80: mol_type = other DNA

SEQ ID NO: 186723 - DNA, 80 bp, synthetic construct; identical to SEQ ID NO: 1993
  source 1..80: mol_type = other DNA

SEQ ID NO: 186724 - DNA, 80 bp, synthetic construct; identical to SEQ ID NO: 1994
  source 1..80: mol_type = other DNA

SEQ ID NO: 186725 - DNA, 80 bp, synthetic construct; identical to SEQ ID NO: 1995
  source 1..80: mol_type = other DNA

SEQ ID NO: 186726 - DNA, 80 bp, synthetic construct; identical to SEQ ID NO: 1996
  source 1..80: mol_type = other DNA

SEQ ID NO: 186727 - DNA, 80 bp, synthetic construct; identical to SEQ ID NO: 1997
  source 1..80: mol_type = other DNA

SEQ ID NO: 186728 - DNA, 80 bp, synthetic construct; identical to SEQ ID NO: 1998
  source 1..80: mol_type = other DNA

SEQ ID NO: 186729 - DNA, 80 bp, synthetic construct; identical to SEQ ID NO: 1999
  source 1..80: mol_type = other DNA

SEQ ID NO: 186730 - DNA, 80 bp, synthetic construct; identical to SEQ ID NO: 2000
  source 1..80: mol_type = other DNA

SEQ ID NO: 186731 - DNA, 80 bp, synthetic construct; identical to SEQ ID NO: 2001
  source 1..80: mol_type = other DNA

SEQ ID NO: 186732 - DNA, 80 bp, synthetic construct; identical to SEQ ID NO: 2002
  source 1..80: mol_type = other DNA

SEQ ID NO: 186733 - DNA, 80 bp, synthetic construct; identical to SEQ ID NO: 2003
  source 1..80: mol_type = other DNA

SEQ ID NO: 186734 - DNA, 80 bp, synthetic construct; identical to SEQ ID NO: 2004
  source 1..80: mol_type = other DNA

SEQ ID NO: 186735 - DNA, 80 bp, synthetic construct; identical to SEQ ID NO: 2005
  source 1..80: mol_type = other DNA

SEQ ID NO: 186736 - DNA, 80 bp, synthetic construct; identical to SEQ ID NO: 2006
  source 1..80: mol_type = other DNA

SEQ ID NO: 186737 - DNA, 80 bp, synthetic construct; identical to SEQ ID NO: 2007
  source 1..80: mol_type = other DNA

SEQ ID NO: 186738 - DNA, 80 bp, synthetic construct; identical to SEQ ID NO: 2008
  source 1..80: mol_type = other DNA

SEQ ID NO: 186739 - DNA, 80 bp, synthetic construct; identical to SEQ ID NO: 2009
  source 1..80: mol_type = other DNA

SEQ ID NO: 186740 - DNA, 80 bp, synthetic construct; identical to SEQ ID NO: 2010
  source 1..80: mol_type = other DNA

SEQ ID NO: 186741 - DNA, 80 bp, synthetic construct; identical to SEQ ID NO: 2011
  source 1..80: mol_type = other DNA

SEQ ID NO: 186742 - DNA, 80 bp, synthetic construct; identical to SEQ ID NO: 2012
  source 1..80: mol_type = other DNA

SEQ ID NO: 186743 - DNA, 80 bp, synthetic construct; identical to SEQ ID NO: 2013
  source 1..80: mol_type = other DNA

SEQ ID NO: 186744 - DNA, 80 bp, synthetic construct; identical to SEQ ID NO: 2014
  source 1..80: mol_type = other DNA

SEQ ID NO: 186745 - DNA, 80 bp, synthetic construct; identical to SEQ ID NO: 2015
  source 1..80: mol_type = other DNA

SEQ ID NO: 186746 - DNA, 80 bp, synthetic construct; identical to SEQ ID NO: 2016
  source 1..80: mol_type = other DNA

SEQ ID NO: 186747 - DNA, 80 bp, synthetic construct; identical to SEQ ID NO: 2017
  source 1..80: mol_type = other DNA

SEQ ID NO: 186748 - DNA, 80 bp, synthetic construct; identical to SEQ ID NO: 2018
  source 1..80: mol_type = other DNA

SEQ ID NO: 186749 - DNA, 80 bp, synthetic construct; identical to SEQ ID NO: 2019
  source 1..80: mol_type = other DNA

SEQ ID NO: 186750 - DNA, 80 bp, synthetic construct; identical to SEQ ID NO: 2020
  source 1..80: mol_type = other DNA

SEQ ID NO: 186751 - DNA, 80 bp, synthetic construct; identical to SEQ ID NO: 2021
  source 1..80: mol_type = other DNA

SEQ ID NO: 186752 - DNA, 80 bp, synthetic construct; identical to SEQ ID NO: 2022
  source 1..80: mol_type = other DNA

SEQ ID NO: 186753 - DNA, 80 bp, synthetic construct; identical to SEQ ID NO: 2023
  source 1..80: mol_type = other DNA

SEQ ID NO: 186754 - DNA, 80 bp, synthetic construct; identical to SEQ ID NO: 2024
  source 1..80: mol_type = other DNA

SEQ ID NO: 186755 - DNA, 80 bp, synthetic construct; identical to SEQ ID NO: 2025
  source 1..80: mol_type = other DNA

SEQ ID NO: 186756 - DNA, 80 bp, synthetic construct; identical to SEQ ID NO: 2026
  source 1..80: mol_type = other DNA

SEQ ID NO: 186757 - DNA, 80 bp, synthetic construct; identical to SEQ ID NO: 2027
  source 1..80: mol_type = other DNA

SEQ ID NO: 186758 - DNA, 80 bp, synthetic construct; identical to SEQ ID NO: 2028
  source 1..80: mol_type = other DNA

SEQ ID NO: 186759 - DNA, 80 bp, synthetic construct; identical to SEQ ID NO: 2029
  source 1..80: mol_type = other DNA

SEQ ID NO: 186760 - DNA, 80 bp, synthetic construct; identical to SEQ ID NO: 2030
  source 1..80: mol_type = other DNA

SEQ ID NO: 186761 - DNA, 80 bp, synthetic construct; identical to SEQ ID NO: 2031
  source 1..80: mol_type = other DNA

SEQ ID NO: 186762 - DNA, 80 bp, synthetic construct; identical to SEQ ID NO: 2032
  source 1..80: mol_type = other DNA

SEQ ID NO: 186763 - DNA, 80 bp, synthetic construct; identical to SEQ ID NO: 2033
  source 1..80: mol_type = other DNA

SEQ ID NO: 186764 - DNA, 80 bp, synthetic construct; identical to SEQ ID NO: 2034
  source 1..80: mol_type = other DNA

SEQ ID NO: 186765 - DNA, 80 bp, synthetic construct; identical to SEQ ID NO: 2035
  source 1..80: mol_type = other DNA

SEQ ID NO: 186766 - DNA, 80 bp, synthetic construct; identical to SEQ ID NO: 2036
  source 1..80: mol_type = other DNA

SEQ ID NO: 186767 - DNA, 80 bp, synthetic construct; identical to SEQ ID NO: 2037
  source 1..80: mol_type = other DNA

SEQ ID NO: 186768 - DNA, 80 bp, synthetic construct; identical to SEQ ID NO: 2038
  source 1..80: mol_type = other DNA

SEQ ID NO: 186769 - DNA, 80 bp, synthetic construct; identical to SEQ ID NO: 2039
  source 1..80: mol_type = other DNA

SEQ ID NO: 186770 - DNA, 80 bp, synthetic construct; identical to SEQ ID NO: 2040
  source 1..80: mol_type = other DNA

SEQ ID NO: 186771 - DNA, 80 bp, synthetic construct; identical to SEQ ID NO: 2041
  source 1..80: mol_type = other DNA

SEQ ID NO: 186772 - DNA, 80 bp, synthetic construct; identical to SEQ ID NO: 2042
  source 1..80: mol_type = other DNA

SEQ ID NO: 186773 - DNA, 80 bp, synthetic construct; identical to SEQ ID NO: 2043
  source 1..80: mol_type = other DNA

SEQ ID NO: 186774 - DNA, 80 bp, synthetic construct; identical to SEQ ID NO: 2044
  source 1..80: mol_type = other DNA

SEQ ID NO: 186775 - DNA, 80 bp, synthetic construct; identical to SEQ ID NO: 2045
  source 1..80: mol_type = other DNA

SEQ ID NO: 186776 - DNA, 80 bp, synthetic construct; identical to SEQ ID NO: 2046
  source 1..80: mol_type = other DNA

SEQ ID NO: 186777 - DNA, 80 bp, synthetic construct; identical to SEQ ID NO: 2047
  source 1..80: mol_type = other DNA

SEQ ID NO: 186778 - DNA, 80 bp, synthetic construct; identical to SEQ ID NO: 2048
  source 1..80: mol_type = other DNA

SEQ ID NO: 186779 - DNA, 80 bp, synthetic construct; identical to SEQ ID NO: 2049
  source 1..80: mol_type = other DNA

SEQ ID NO: 186780 - DNA, 80 bp, synthetic construct; identical to SEQ ID NO: 2050
  source 1..80: mol_type = other DNA

SEQ ID NO: 186781 - DNA, 80 bp, synthetic construct; identical to SEQ ID NO: 2051
  source 1..80: mol_type = other DNA

SEQ ID NO: 186782 - DNA, 80 bp, synthetic construct; identical to SEQ ID NO: 2052
  source 1..80: mol_type = other DNA

SEQ ID NO: 186783 - DNA, 80 bp, synthetic construct; identical to SEQ ID NO: 2053
  source 1..80: mol_type = other DNA

SEQ ID NO: 186784 - DNA, 80 bp, synthetic construct; identical to SEQ ID NO: 2054
  source 1..80: mol_type = other DNA

SEQ ID NO: 186785 - DNA, 80 bp, synthetic construct; identical to SEQ ID NO: 2055
  source 1..80: mol_type = other DNA

SEQ ID NO: 186786 - DNA, 80 bp, synthetic construct; identical to SEQ ID NO: 2056
  source 1..80: mol_type = other DNA

SEQ ID NO: 186787 - DNA, 80 bp, synthetic construct; identical to SEQ ID NO: 2057
  source 1..80: mol_type = other DNA

SEQ ID NO: 186788 - DNA, 80 bp, synthetic construct; identical to SEQ ID NO: 2058
  source 1..80: mol_type = other DNA

SEQ ID NO: 186789 - DNA, 80 bp, synthetic construct; identical to SEQ ID NO: 2059
  source 1..80: mol_type = other DNA

SEQ ID NO: 186790 - DNA, 80 bp, synthetic construct; identical to SEQ ID NO: 2060
  source 1..80: mol_type = other DNA

SEQ ID NO: 186791 - DNA, 80 bp, synthetic construct; identical to SEQ ID NO: 2061
  source 1..80: mol_type = other DNA

SEQ ID NO: 186792 - DNA, 80 bp, synthetic construct; identical to SEQ ID NO: 2062
  source 1..80: mol_type = other DNA

SEQ ID NO: 186793 - DNA, 80 bp, synthetic construct; identical to SEQ ID NO: 2063
  source 1..80: mol_type = other DNA

SEQ ID NO: 186794 - DNA, 80 bp, synthetic construct; identical to SEQ ID NO: 2064
  source 1..80: mol_type = other DNA

SEQ ID NO: 186795 - DNA, 80 bp, synthetic construct; identical to SEQ ID NO: 2065
  source 1..80: mol_type = other DNA

SEQ ID NO: 186796 - DNA, 80 bp, synthetic construct; identical to SEQ ID NO: 2066
  source 1..80: mol_type = other DNA

SEQ ID NO: 186797 - DNA, 80 bp, synthetic construct; identical to SEQ ID NO: 2067
  source 1..80: mol_type = other DNA

SEQ ID NO: 186798 - DNA, 80 bp, synthetic construct; identical to SEQ ID NO: 2068
  source 1..80: mol_type = other DNA

SEQ ID NO: 186799 - DNA, 80 bp, synthetic construct; identical to SEQ ID NO: 2069
  source 1..80: mol_type = other DNA

SEQ ID NO: 186800 - DNA, 80 bp, synthetic construct; identical to SEQ ID NO: 2070
  source 1..80: mol_type = other DNA

SEQ ID NO: 186801 - DNA, 80 bp, synthetic construct; identical to SEQ ID NO: 2071
  source 1..80: mol_type = other DNA

SEQ ID NO: 186802 - DNA, 80 bp, synthetic construct; identical to SEQ ID NO: 2072
  source 1..80: mol_type = other DNA

SEQ ID NO: 186803 - DNA, 80 bp, synthetic construct; identical to SEQ ID NO: 2073
  source 1..80: mol_type = other DNA

SEQ ID NO: 186804 - DNA, 80 bp, synthetic construct; identical to SEQ ID NO: 2074
  source 1..80: mol_type = other DNA

SEQ ID NO: 186805 - DNA, 80 bp, synthetic construct; identical to SEQ ID NO: 2075
  source 1..80: mol_type = other DNA

SEQ ID NO: 186806 - DNA, 80 bp, synthetic construct; identical to SEQ ID NO: 2076
  source 1..80: mol_type = other DNA

SEQ ID NO: 186807 - DNA, 80 bp, synthetic construct; identical to SEQ ID NO: 2077
  source 1..80: mol_type = other DNA

SEQ ID NO: 186808 - DNA, 80 bp, synthetic construct; identical to SEQ ID NO: 2078
  source 1..80: mol_type = other DNA

SEQ ID NO: 186809 - DNA, 80 bp, synthetic construct; identical to SEQ ID NO: 2079
  source 1..80: mol_type = other DNA

SEQ ID NO: 186810 - DNA, 80 bp, synthetic construct; identical to SEQ ID NO: 2080
  source 1..80: mol_type = other DNA

SEQ ID NO: 186811 - DNA, 80 bp, synthetic construct; identical to SEQ ID NO: 2081
  source 1..80: mol_type = other DNA

SEQ ID NO: 186812 - DNA, 80 bp, synthetic construct; identical to SEQ ID NO: 2082
  source 1..80: mol_type = other DNA

SEQ ID NO: 186813 - DNA, 80 bp, synthetic construct; identical to SEQ ID NO: 2083
  source 1..80: mol_type = other DNA

SEQ ID NO: 186814 - DNA, 80 bp, synthetic construct; identical to SEQ ID NO: 2084
  source 1..80: mol_type = other DNA

SEQ ID NO: 186815 - DNA, 80 bp, synthetic construct; identical to SEQ ID NO: 2085
  source 1..80: mol_type = other DNA

SEQ ID NO: 186816 - DNA, 80 bp, synthetic construct; identical to SEQ ID NO: 2086
  source 1..80: mol_type = other DNA

SEQ ID NO: 186817 - DNA, 80 bp, synthetic construct; identical to SEQ ID NO: 2087
  source 1..80: mol_type = other DNA

SEQ ID NO: 186818 - DNA, 80 bp, synthetic construct; identical to SEQ ID NO: 2088
  source 1..80: mol_type = other DNA

SEQ ID NO: 186819 - DNA, 80 bp, synthetic construct; identical to SEQ ID NO: 2089
  source 1..80: mol_type = other DNA

SEQ ID NO: 186820 - DNA, 80 bp, synthetic construct; identical to SEQ ID NO: 2090
  source 1..80: mol_type = other DNA

SEQ ID NO: 186821 - DNA, 80 bp, synthetic construct; identical to SEQ ID NO: 2091
  source 1..80: mol_type = other DNA

SEQ ID NO: 186822 - DNA, 80 bp, synthetic construct; identical to SEQ ID NO: 2092
  source 1..80: mol_type = other DNA

SEQ ID NO: 186823 - DNA, 80 bp, synthetic construct; identical to SEQ ID NO: 2093
  source 1..80: mol_type = other DNA

SEQ ID NO: 186824 - DNA, 80 bp, synthetic construct; identical to SEQ ID NO: 2094
  source 1..80: mol_type = other DNA

SEQ ID NO: 186825 - DNA, 80 bp, synthetic construct; identical to SEQ ID NO: 2095
  source 1..80: mol_type = other DNA

SEQ ID NO: 186826 - DNA, 80 bp, synthetic construct; identical to SEQ ID NO: 2096
  source 1..80: mol_type = other DNA

SEQ ID NO: 186827 - DNA, 80 bp, synthetic construct; identical to SEQ ID NO: 2097
  source 1..80: mol_type = other DNA

SEQ ID NO: 186828 - DNA, 80 bp, synthetic construct; identical to SEQ ID NO: 2098
  source 1..80: mol_type = other DNA

SEQ ID NO: 186829 - DNA, 80 bp, synthetic construct; identical to SEQ ID NO: 2099
  source 1..80: mol_type = other DNA

SEQ ID NO: 186830 - DNA, 80 bp, synthetic construct; identical to SEQ ID NO: 2100
  source 1..80: mol_type = other DNA

SEQ ID NO: 186831 - DNA, 80 bp, synthetic construct; identical to SEQ ID NO: 2101
  source 1..80: mol_type = other DNA

SEQ ID NO: 186832 - DNA, 80 bp, synthetic construct; identical to SEQ ID NO: 2102
  source 1..80: mol_type = other DNA

SEQ ID NO: 186833 - DNA, 80 bp, synthetic construct; identical to SEQ ID NO: 2103
  source 1..80: mol_type = other DNA

SEQ ID NO: 186834 - DNA, 80 bp, synthetic construct; identical to SEQ ID NO: 2104
  source 1..80: mol_type = other DNA

SEQ ID NO: 186835 - DNA, 80 bp, synthetic construct; identical to SEQ ID NO: 2105
  source 1..80: mol_type = other DNA

SEQ ID NO: 186836 - DNA, 80 bp, synthetic construct; identical to SEQ ID NO: 2106
  source 1..80: mol_type = other DNA

SEQ ID NO: 186837 - DNA, 80 bp, synthetic construct; identical to SEQ ID NO: 2107
  source 1..80: mol_type = other DNA

SEQ ID NO: 186838 - DNA, 80 bp, synthetic construct; identical to SEQ ID NO: 2108
  source 1..80: mol_type = other DNA

SEQ ID NO: 186839 - DNA, 80 bp, synthetic construct; identical to SEQ ID NO: 2109
  source 1..80: mol_type = other DNA

SEQ ID NO: 186840 - DNA, 80 bp, synthetic construct; identical to SEQ ID NO: 2110
  source 1..80: mol_type = other DNA

SEQ ID NO: 186841 - DNA, 80 bp, synthetic construct; identical to SEQ ID NO: 2111
  source 1..80: mol_type = other DNA

SEQ ID NO: 186842 - DNA, 80 bp, synthetic construct; identical to SEQ ID NO: 2112
  source 1..80: mol_type = other DNA

SEQ ID NO: 186843 - DNA, 80 bp, synthetic construct; identical to SEQ ID NO: 2113
  source 1..80: mol_type = other DNA

SEQ ID NO: 186844 - DNA, 80 bp, synthetic construct; identical to SEQ ID NO: 2114
  source 1..80: mol_type = other DNA

SEQ ID NO: 186845 - DNA, 80 bp, synthetic construct; identical to SEQ ID NO: 2115
  source 1..80: mol_type = other DNA

SEQ ID NO: 186846 - DNA, 80 bp, synthetic construct; identical to SEQ ID NO: 2116
  source 1..80: mol_type = other DNA

SEQ ID NO: 186847 - DNA, 80 bp, synthetic construct; identical to SEQ ID NO: 2117
  source 1..80: mol_type = other DNA

SEQ ID NO: 186848 - DNA, 80 bp, synthetic construct; identical to SEQ ID NO: 2118
  source 1..80: mol_type = other DNA

SEQ ID NO: 186849 - DNA, 80 bp, synthetic construct; identical to SEQ ID NO: 2119
  source 1..80: mol_type = other DNA

SEQ ID NO: 186850 - DNA, 80 bp, synthetic construct; identical to SEQ ID NO: 2120
  source 1..80: mol_type = other DNA

SEQ ID NO: 186851 - DNA, 80 bp, synthetic construct; identical to SEQ ID NO: 2121
  source 1..80: mol_type = other DNA

SEQ ID NO: 186852 - DNA, 80 bp, synthetic construct; identical to SEQ ID NO: 2122
  source 1..80: mol_type = other DNA

SEQ ID NO: 186853 - DNA, 80 bp, synthetic construct; identical to SEQ ID NO: 2123
  source 1..80: mol_type = other DNA

SEQ ID NO: 186854 - DNA, 80 bp, synthetic construct; identical to SEQ ID NO: 2124
  source 1..80: mol_type = other DNA

SEQ ID NO: 186855 - DNA, 80 bp, synthetic construct; identical to SEQ ID NO: 2125
  source 1..80: mol_type = other DNA

SEQ ID NO: 186856 - DNA, 80 bp, synthetic construct; identical to SEQ ID NO: 2126
  source 1..80: mol_type = other DNA

SEQ ID NO: 186857 - DNA, 80 bp, synthetic construct; identical to SEQ ID NO: 2127
  source 1..80: mol_type = other DNA

SEQ ID NO: 186858 - DNA, 80 bp, synthetic construct; identical to SEQ ID NO: 2128
  source 1..80: mol_type = other DNA

SEQ ID NO: 186859 - DNA, 80 bp, synthetic construct; identical to SEQ ID NO: 2129
  source 1..80: mol_type = other DNA

SEQ ID NO: 186860 - DNA, 80 bp, synthetic construct; identical to SEQ ID NO: 2130
  source 1..80: mol_type = other DNA

SEQ ID NO: 186861 - DNA, 80 bp, synthetic construct; identical to SEQ ID NO: 2131
  source 1..80: mol_type = other DNA

SEQ ID NO: 186862 - DNA, 80 bp, synthetic construct; identical to SEQ ID NO: 2132
  source 1..80: mol_type = other DNA

SEQ ID NO: 186863 - DNA, 80 bp, synthetic construct; identical to SEQ ID NO: 2133
  source 1..80: mol_type = other DNA

SEQ ID NO: 186864 - DNA, 80 bp, synthetic construct; identical to SEQ ID NO: 2134
  source 1..80: mol_type = other DNA

SEQ ID NO: 186865 - DNA, 80 bp, synthetic construct; identical to SEQ ID NO: 2135
  source 1..80: mol_type = other DNA

SEQ ID NO: 186866 - DNA, 80 bp, synthetic construct; identical to SEQ ID NO: 2136
  source 1..80: mol_type = other DNA

SEQ ID NO: 186867 - DNA, 80 bp, synthetic construct; identical to SEQ ID NO: 2137
  source 1..80: mol_type = other DNA

SEQ ID NO: 186868 - DNA, 80 bp, synthetic construct; identical to SEQ ID NO: 2138
  source 1..80: mol_type = other DNA

SEQ ID NO: 186869 - DNA, 80 bp, synthetic construct; identical to SEQ ID NO: 2139
  source 1..80: mol_type = other DNA

SEQ ID NO: 186870 - DNA, 80 bp, synthetic construct; identical to SEQ ID NO: 2140
  source 1..80: mol_type = other DNA

SEQ ID NO: 186871 - DNA, 80 bp, synthetic construct; identical to SEQ ID NO: 2141
  source 1..80: mol_type = other DNA

SEQ ID NO: 186872 - DNA, 80 bp, synthetic construct; identical to SEQ ID NO: 2142
  source 1..80: mol_type = other DNA

SEQ ID NO: 186873 - DNA, 80 bp, synthetic construct; identical to SEQ ID NO: 2143
  source 1..80: mol_type = other DNA

SEQ ID NO: 186874 - DNA, 80 bp, synthetic construct; identical to SEQ ID NO: 2144
  source 1..80: mol_type = other DNA

SEQ ID NO: 186875 - DNA, 80 bp, synthetic construct; identical to SEQ ID NO: 2145
  source 1..80: mol_type = other DNA

SEQ ID NO: 186876 - DNA, 80 bp, synthetic construct; identical to SEQ ID NO: 2146
  source 1..80: mol_type = other DNA

SEQ ID NO: 186877 - DNA, 80 bp, synthetic construct; identical to SEQ ID NO: 2147
  source 1..80: mol_type = other DNA

SEQ ID NO: 186878 - DNA, 80 bp, synthetic construct; identical to SEQ ID NO: 2148
  source 1..80: mol_type = other DNA

SEQ ID NO: 186879 - DNA, 80 bp, synthetic construct; identical to SEQ ID NO: 2149
  source 1..80: mol_type = other DNA

SEQ ID NO: 186880 - DNA, 80 bp, synthetic construct; identical to SEQ ID NO: 2150
  source 1..80: mol_type = other DNA

SEQ ID NO: 186881 - DNA, 80 bp, synthetic construct; identical to SEQ ID NO: 2151
  source 1..80: mol_type = other DNA

SEQ ID NO: 186882 - DNA, 80 bp, synthetic construct; identical to SEQ ID NO: 2152
  source 1..80: mol_type = other DNA

SEQ ID NO: 186883 - DNA, 80 bp, synthetic construct; identical to SEQ ID NO: 2153
  source 1..80: mol_type = other DNA

SEQ ID NO: 186884 - DNA, 80 bp, synthetic construct; identical to SEQ ID NO: 2154
  source 1..80: mol_type = other DNA

SEQ ID NO: 186885 - DNA, 80 bp, synthetic construct; identical to SEQ ID NO: 2155
  source 1..80: mol_type = other DNA

SEQ ID NO: 186886 - DNA, 80 bp, synthetic construct; identical to SEQ ID NO: 2156
  source 1..80: mol_type = other DNA

SEQ ID NO: 186887 - DNA, 80 bp, synthetic construct; identical to SEQ ID NO: 2157
  source 1..80: mol_type = other DNA

SEQ ID NO: 186888 - DNA, 80 bp, synthetic construct; identical to SEQ ID NO: 2158
  source 1..80: mol_type = other DNA

SEQ ID NO: 186889 - DNA, 80 bp, synthetic construct; identical to SEQ ID NO: 2159
  source 1..80: mol_type = other DNA

SEQ ID NO: 186890 - DNA, 80 bp, synthetic construct; identical to SEQ ID NO: 2160
  source 1..80: mol_type = other DNA

SEQ ID NO: 186891 - DNA, 80 bp, synthetic construct; identical to SEQ ID NO: 2161
  source 1..80: mol_type = other DNA

SEQ ID NO: 186892 - DNA, 80 bp, synthetic construct; identical to SEQ ID NO: 2162
  source 1..80: mol_type = other DNA

SEQ ID NO: 186893 - DNA, 80 bp, synthetic construct; identical to SEQ ID NO: 2163
  source 1..80: mol_type = other DNA

SEQ ID NO: 186894 - DNA, 80 bp, synthetic construct; identical to SEQ ID NO: 2164
  source 1..80: mol_type = other DNA

SEQ ID NO: 186895 - DNA, 80 bp, synthetic construct; identical to SEQ ID NO: 2165
  source 1..80: mol_type = other DNA

SEQ ID NO: 186896 - DNA, 80 bp, synthetic construct; identical to SEQ ID NO: 2166
  source 1..80: mol_type = other DNA

SEQ ID NO: 186897 - DNA, 80 bp, synthetic construct; identical to SEQ ID NO: 2167
  source 1..80: mol_type = other DNA

SEQ ID NO: 186898 - DNA, 80 bp, synthetic construct; identical to SEQ ID NO: 2168
  source 1..80: mol_type = other DNA

SEQ ID NO: 186899 - DNA, 80 bp, synthetic construct; identical to SEQ ID NO: 2169
  source 1..80: mol_type = other DNA

SEQ ID NO: 186900 - DNA, 80 bp, synthetic construct; identical to SEQ ID NO: 2170
  source 1..80: mol_type = other DNA

SEQ ID NO: 186901 - DNA, 80 bp, synthetic construct; identical to SEQ ID NO: 2171
  source 1..80: mol_type = other DNA

SEQ ID NO: 186902 - DNA, 80 bp, synthetic construct; identical to SEQ ID NO: 2172
  source 1..80: mol_type = other DNA

SEQ ID NO: 186903 - DNA, 80 bp, synthetic construct; identical to SEQ ID NO: 2173
  source 1..80: mol_type = other DNA

SEQ ID NO: 186904 - DNA, 80 bp, synthetic construct; identical to SEQ ID NO: 2174
  source 1..80: mol_type = other DNA

SEQ ID NO: 186905 - DNA, 80 bp, synthetic construct; identical to SEQ ID NO: 2175
  source 1..80: mol_type = other DNA

SEQ ID NO: 186906 - DNA, 80 bp, synthetic construct; identical to SEQ ID NO: 2176
  source 1..80: mol_type = other DNA

SEQ ID NO: 186907 - DNA, 80 bp, synthetic construct; identical to SEQ ID NO: 2177
  source 1..80: mol_type = other DNA

SEQ ID NO: 186908 - DNA, 80 bp, synthetic construct; identical to SEQ ID NO: 2178
  source 1..80: mol_type = other DNA

SEQ ID NO: 186909 - DNA, 80 bp, synthetic construct; identical to SEQ ID NO: 2179
  source 1..80: mol_type = other DNA

SEQ ID NO: 186910 - DNA, 80 bp, synthetic construct; identical to SEQ ID NO: 2180
  source 1..80: mol_type = other DNA

SEQ ID NO: 186911 - DNA, 80 bp, synthetic construct; identical to SEQ ID NO: 2181
  source 1..80: mol_type = other DNA

SEQ ID NO: 186912 - DNA, 80 bp, synthetic construct; identical to SEQ ID NO: 2182
  source 1..80: mol_type = other DNA

SEQ ID NO: 186913 - DNA, 80 bp, synthetic construct; identical to SEQ ID NO: 2183
  source 1..80: mol_type = other DNA

SEQ ID NO: 186914 - DNA, 80 bp, synthetic construct; identical to SEQ ID NO: 2184
  source 1..80: mol_type = other DNA

SEQ ID NO: 186915 - DNA, 80 bp, synthetic construct; identical to SEQ ID NO: 2185
  source 1..80: mol_type = other DNA

SEQ ID NO: 186916 - DNA, 80 bp, synthetic construct; identical to SEQ ID NO: 2186
  source 1..80: mol_type = other DNA

SEQ ID NO: 186917 - DNA, 80 bp, synthetic construct; identical to SEQ ID NO: 2187
  source 1..80: mol_type = other DNA

SEQ ID NO: 186918 - DNA, 80 bp, synthetic construct; identical to SEQ ID NO: 2188
  source 1..80: mol_type = other DNA

SEQ ID NO: 186919 - DNA, 80 bp, synthetic construct; identical to SEQ ID NO: 2189
  source 1..80: mol_type = other DNA

SEQ ID NO: 186920 - DNA, 80 bp, synthetic construct; identical to SEQ ID NO: 2190
  source 1..80: mol_type = other DNA

SEQ ID NO: 186921 - DNA, 80 bp, synthetic construct; identical to SEQ ID NO: 2191
  source 1..80: mol_type = other DNA

SEQ ID NO: 186922 - DNA, 80 bp, synthetic construct; identical to SEQ ID NO: 2192
  source 1..80: mol_type = other DNA

SEQ ID NO: 186923 - DNA, 80 bp, synthetic construct; identical to SEQ ID NO: 2193
  source 1..80: mol_type = other DNA

SEQ ID NO: 186924 - DNA, 80 bp, synthetic construct; identical to SEQ ID NO: 2194
  source 1..80: mol_type = other DNA

SEQ ID NO: 186925 - DNA, 80 bp, synthetic construct; identical to SEQ ID NO: 2195
  source 1..80: mol_type = other DNA

SEQ ID NO: 186926 - DNA, 80 bp, synthetic construct; identical to SEQ ID NO: 2196
  source 1..80: mol_type = other DNA

SEQ ID NO: 186927 - DNA, 80 bp, synthetic construct; identical to SEQ ID NO: 2197
  source 1..80: mol_type = other DNA

SEQ ID NO: 186928 - DNA, 80 bp, synthetic construct; identical to SEQ ID NO: 2198
  source 1..80: mol_type = other DNA

SEQ ID NO: 186929 - DNA, 80 bp, synthetic construct; identical to SEQ ID NO: 2199
  source 1..80: mol_type = other DNA

SEQ ID NO: 186930 - DNA, 80 bp, synthetic construct; identical to SEQ ID NO: 2200
  source 1..80: mol_type = other DNA

SEQ ID NO: 186931 - DNA, 80 bp, synthetic construct; identical to SEQ ID NO: 2201
  source 1..80: mol_type = other DNA

SEQ ID NO: 186932 - DNA, 80 bp, synthetic construct; identical to SEQ ID NO: 2202
  source 1..80: mol_type = other DNA

SEQ ID NO: 186933 - DNA, 80 bp, synthetic construct; identical to SEQ ID NO: 2203
  source 1..80: mol_type = other DNA

SEQ ID NO: 186934 - DNA, 80 bp, synthetic construct; identical to SEQ ID NO: 2204
  source 1..80: mol_type = other DNA

SEQ ID NO: 186935 - DNA, 80 bp, synthetic construct; identical to SEQ ID NO: 2205
  source 1..80: mol_type = other DNA

SEQ ID NO: 186936 - DNA, 80 bp, synthetic construct; identical to SEQ ID NO: 2206
  source 1..80: mol_type = other DNA

SEQ ID NO: 186937 - DNA, 80 bp, synthetic construct; identical to SEQ ID NO: 2207
  source 1..80: mol_type = other DNA

SEQ ID NO: 186938 - DNA, 80 bp, synthetic construct; identical to SEQ ID NO: 2208
  source 1..80: mol_type = other DNA

SEQ ID NO: 186939 - DNA, 80 bp, synthetic construct; identical to SEQ ID NO: 2209
  source 1..80: mol_type = other DNA

SEQ ID NO: 186940 - DNA, 80 bp, synthetic construct; identical to SEQ ID NO: 2210
  source 1..80: mol_type = other DNA

SEQ ID NO: 186941 - DNA, 80 bp, synthetic construct; identical to SEQ ID NO: 2211
  source 1..80: mol_type = other DNA

SEQ ID NO: 186942 - DNA, 80 bp, synthetic construct; identical to SEQ ID NO: 2212
  source 1..80: mol_type = other DNA

SEQ ID NO: 186943 - DNA, 80 bp, synthetic construct; identical to SEQ ID NO: 2213
  source 1..80: mol_type = other DNA

SEQ ID NO: 186944 - DNA, 80 bp, synthetic construct; identical to SEQ ID NO: 2214
  source 1..80: mol_type = other DNA

SEQ ID NO: 186945 - DNA, 80 bp, synthetic construct; identical to SEQ ID NO: 2215
  source 1..80: mol_type = other DNA

SEQ ID NO: 186946 - DNA, 80 bp, synthetic construct; identical to SEQ ID NO: 2216
  source 1..80: mol_type = other DNA

SEQ ID NO: 186947 - DNA, 80 bp, synthetic construct; identical to SEQ ID NO: 2217
  source 1..80: mol_type = other DNA

SEQ ID NO: 186948 - DNA, 80 bp, synthetic construct; identical to SEQ ID NO: 2218
  source 1..80: mol_type = other DNA

SEQ ID NO: 186949 - DNA, 80 bp, synthetic construct; identical to SEQ ID NO: 2219
  source 1..80: mol_type = other DNA

SEQ ID NO: 186950 - DNA, 80 bp, synthetic construct; identical to SEQ ID NO: 2220
  source 1..80: mol_type = other DNA

SEQ ID NO: 186951 - DNA, 80 bp, synthetic construct; identical to SEQ ID NO: 2221
  source 1..80: mol_type = other DNA

SEQ ID NO: 186952 - DNA, 80 bp, synthetic construct; identical to SEQ ID NO: 2222
  source 1..80: mol_type = other DNA

SEQ ID NO: 186953 - DNA, 80 bp, synthetic construct; identical to SEQ ID NO: 2223
  source 1..80: mol_type = other DNA

SEQ ID NO: 186954 - DNA, 80 bp, synthetic construct; identical to SEQ ID NO: 2224
  source 1..80: mol_type = other DNA

SEQ ID NO: 186955 - DNA, 80 bp, synthetic construct; identical to SEQ ID NO: 2225
  source 1..80: mol_type = other DNA

SEQ ID NO: 186956 - DNA, 80 bp, synthetic construct; identical to SEQ ID NO: 2226
  source 1..80: mol_type = other DNA

SEQ ID NO: 186957 - DNA, 80 bp, synthetic construct; identical to SEQ ID NO: 2227
  source 1..80: mol_type = other DNA

SEQ ID NO: 186958 - DNA, 80 bp, synthetic construct; identical to SEQ ID NO: 2228
  source 1..80: mol_type = other DNA

SEQ ID NO: 186959 - DNA, 80 bp, synthetic construct; identical to SEQ ID NO: 2229
  source 1..80: mol_type = other DNA

SEQ ID NO: 186960 - DNA, 80 bp, synthetic construct; identical to SEQ ID NO: 2230
  source 1..80: mol_type = other DNA

SEQ ID NO: 186961 - DNA, 80 bp, synthetic construct; identical to SEQ ID NO: 2231
  source 1..80: mol_type = other DNA

SEQ ID NO: 186962 - DNA, 80 bp, synthetic construct; identical to SEQ ID NO: 2232
  source 1..80: mol_type = other DNA

SEQ ID NO: 186963 - DNA, 80 bp, synthetic construct; identical to SEQ ID NO: 2233
  source 1..80: mol_type = other DNA

SEQ ID NO: 186964 - DNA, 80 bp, synthetic construct; identical to SEQ ID NO: 2234
  source 1..80: mol_type = other DNA

SEQ ID NO: 186965 - DNA, 80 bp, synthetic construct; identical to SEQ ID NO: 2235
  source 1..80: mol_type = other DNA

SEQ ID NO: 186966 - DNA, 80 bp, synthetic construct; identical to SEQ ID NO: 2236
  source 1..80: mol_type = other DNA

SEQ ID NO: 186967 - DNA, 80 bp, synthetic construct; identical to SEQ ID NO: 2237
  source 1..80: mol_type = other DNA

SEQ ID NO: 186968 - DNA, 80 bp, synthetic construct; identical to SEQ ID NO: 2238
  source 1..80: mol_type = other DNA

SEQ ID NO: 186969 - DNA, 80 bp, synthetic construct; identical to SEQ ID NO: 2239
  source 1..80: mol_type = other DNA

SEQ ID NO: 186970 - DNA, 80 bp, synthetic construct; identical to SEQ ID NO: 2240
  source 1..80: mol_type = other DNA

SEQ ID NO: 186971 - DNA, 80 bp, synthetic construct; identical to SEQ ID NO: 2241
  source 1..80: mol_type = other DNA

SEQ ID NO: 186972 - DNA, 80 bp, synthetic construct; identical to SEQ ID NO: 2242
  source 1..80: mol_type = other DNA

SEQ ID NO: 186973 - DNA, 80 bp, synthetic construct; identical to SEQ ID NO: 2243
  source 1..80: mol_type = other DNA

SEQ ID NO: 186974 - DNA, 80 bp, synthetic construct; identical to SEQ ID NO: 2244
  source 1..80: mol_type = other DNA

SEQ ID NO: 186975 - DNA, 80 bp, synthetic construct; identical to SEQ ID NO: 2245
  source 1..80: mol_type = other DNA

SEQ ID NO: 186976 - DNA, 80 bp, synthetic construct; identical to SEQ ID NO: 2246
  source 1..80: mol_type = other DNA

SEQ ID NO: 186977 - DNA, 80 bp, synthetic construct; identical to SEQ ID NO: 2247
  source 1..80: mol_type = other DNA

SEQ ID NO: 186978 - DNA, 80 bp, synthetic construct; identical to SEQ ID NO: 2248
  source 1..80: mol_type = other DNA

SEQ ID NO: 186979 - DNA, 80 bp, synthetic construct; identical to SEQ ID NO: 2249
  source 1..80: mol_type = other DNA

SEQ ID NO: 186980 - DNA, 80 bp, synthetic construct; identical to SEQ ID NO: 2250
  source 1..80: mol_type = other DNA

SEQ ID NO: 186981 - DNA, 80 bp, synthetic construct; identical to SEQ ID NO: 2251
  source 1..80: mol_type = other DNA

SEQ ID NO: 186982 - DNA, 80 bp, synthetic construct; identical to SEQ ID NO: 2252
  source 1..80: mol_type = other DNA

SEQ ID NO: 186983 - DNA, 80 bp, synthetic construct; identical to SEQ ID NO: 2253
  source 1..80: mol_type = other DNA

SEQ ID NO: 186984 - DNA, 80 bp, synthetic construct; identical to SEQ ID NO: 2254
  source 1..80: mol_type = other DNA

SEQ ID NO: 186985 - DNA, 80 bp, synthetic construct; identical to SEQ ID NO: 2255
  source 1..80: mol_type = other DNA

SEQ ID NO: 186986 - DNA, 80 bp, synthetic construct; identical to SEQ ID NO: 2256
  source 1..80: mol_type = other DNA

SEQ ID NO: 186987 - DNA, 80 bp, synthetic construct; identical to SEQ ID NO: 2257
  source 1..80: mol_type = other DNA

SEQ ID NO: 186988 - DNA, 80 bp, synthetic construct; identical to SEQ ID NO: 2258
  source 1..80: mol_type = other DNA

SEQ ID NO: 186989 - DNA, 80 bp, synthetic construct; identical to SEQ ID NO: 2259
  source 1..80: mol_type = other DNA

SEQ ID NO: 186990 - DNA, 80 bp, synthetic construct; identical to SEQ ID NO: 2260
  source 1..80: mol_type = other DNA

SEQ ID NO: 186991 - DNA, 80 bp, synthetic construct; identical to SEQ ID NO: 2261
  source 1..80: mol_type = other DNA

SEQ ID NO: 186992 - DNA, 80 bp, synthetic construct; identical to SEQ ID NO: 2262
  source 1..80: mol_type = other DNA

SEQ ID NO: 186993 - DNA, 80 bp, synthetic construct; identical to SEQ ID NO: 2263
  source 1..80: mol_type = other DNA

SEQ ID NO: 186994 - DNA, 80 bp, synthetic construct; identical to SEQ ID NO: 2264
  source 1..80: mol_type = other DNA

SEQ ID NO: 186995 - DNA, 80 bp, synthetic construct; identical to SEQ ID NO: 2265
  source 1..80: mol_type = other DNA

SEQ ID NO: 186996 - DNA, 80 bp, synthetic construct; identical to SEQ ID NO: 2266
  source 1..80: mol_type = other DNA

SEQ ID NO: 186997 - DNA, 80 bp, synthetic construct; identical to SEQ ID NO: 2267
  source 1..80: mol_type = other DNA

SEQ ID NO: 186998 - DNA, 80 bp, synthetic construct; identical to SEQ ID NO: 2268
  source 1..80: mol_type = other DNA

SEQ ID NO: 186999 - DNA, 80 bp, synthetic construct; identical to SEQ ID NO: 2269
  source 1..80: mol_type = other DNA

SEQ ID NO: 187000 - DNA, 80 bp, synthetic construct; identical to SEQ ID NO: 2270
  source 1..80: mol_type = other DNA

SEQ ID NO: 187001 - DNA, 80 bp, synthetic construct; identical to SEQ ID NO: 2271
  source 1..80: mol_type = other DNA

SEQ ID NO: 187002 - DNA, 80 bp, synthetic construct; identical to SEQ ID NO: 2272
  source 1..80: mol_type = other DNA

SEQ ID NO: 187003 - DNA, 80 bp, synthetic construct; identical to SEQ ID NO: 2273
  source 1..80: mol_type = other DNA

SEQ ID NO: 187004 - DNA, 80 bp, synthetic construct; identical to SEQ ID NO: 2274
  source 1..80: mol_type = other DNA

SEQ ID NO: 187005 - DNA, 80 bp, synthetic construct; identical to SEQ ID NO: 2275
  source 1..80: mol_type = other DNA

SEQ ID NO: 187006 - DNA, 80 bp, synthetic construct; identical to SEQ ID NO: 2276
  source 1..80: mol_type = other DNA

SEQ ID NO: 187007 - DNA, 80 bp, synthetic construct; identical to SEQ ID NO: 2277
  source 1..80: mol_type = other DNA

SEQ ID NO: 187008 - DNA, 80 bp, synthetic construct; identical to SEQ ID NO: 2278
  source 1..80: mol_type = other DNA

SEQ ID NO: 187009 - DNA, 80 bp, synthetic construct; identical to SEQ ID NO: 2279
  source 1..80: mol_type = other DNA

SEQ ID NO: 187010 - DNA, 80 bp, synthetic construct; identical to SEQ ID NO: 2280
  source 1..80: mol_type = other DNA

SEQ ID NO: 187011 - DNA, 80 bp, synthetic construct; identical to SEQ ID NO: 2281
  source 1..80: mol_type = other DNA

SEQ ID NO: 187012 - DNA, 80 bp, synthetic construct; identical to SEQ ID NO: 2282
  source 1..80: mol_type = other DNA

SEQ ID NO: 187013 - DNA, 80 bp, synthetic construct; identical to SEQ ID NO: 2283
  source 1..80: mol_type = other DNA

SEQ ID NO: 187014 - DNA, 80 bp, synthetic construct; identical to SEQ ID NO: 2284
  source 1..80: mol_type = other DNA

SEQ ID NO: 187015 - DNA, 80 bp, synthetic construct; identical to SEQ ID NO: 2285
  source 1..80: mol_type = other DNA

SEQ ID NO: 187016 - DNA, 80 bp, synthetic construct; identical to SEQ ID NO: 2286
  source 1..80: mol_type = other DNA

SEQ ID NO: 187017 - DNA, 80 bp, synthetic construct; identical to SEQ ID NO: 2287
  source 1..80: mol_type = other DNA

SEQ ID NO: 187018 - DNA, 80 bp, synthetic construct; identical to SEQ ID NO: 2288
  source 1..80: mol_type = other DNA

SEQ ID NO: 187019 - DNA, 80 bp, synthetic construct; identical to SEQ ID NO: 2289
  source 1..80: mol_type = other DNA

SEQ ID NO: 187020 - DNA, 80 bp, synthetic construct; identical to SEQ ID NO: 2290
  source 1..80: mol_type = other DNA

SEQ ID NO: 187021 - DNA, 80 bp, synthetic construct; identical to SEQ ID NO: 2291
  source 1..80: mol_type = other DNA

SEQ ID NO: 187022 - DNA, 80 bp, synthetic construct; identical to SEQ ID NO: 2292
  source 1..80: mol_type = other DNA

SEQ ID NO: 187023 - DNA, 80 bp, synthetic construct; identical to SEQ ID NO: 2293
  source 1..80: mol_type = other DNA

SEQ ID NO: 187024 - DNA, 80 bp, synthetic construct; identical to SEQ ID NO: 2294
  source 1..80: mol_type = other DNA

SEQ ID NO: 187025 - DNA, 80 bp, synthetic construct; identical to SEQ ID NO: 2295
  source 1..80: mol_type = other DNA

SEQ ID NO: 187026 - DNA, 80 bp, synthetic construct; identical to SEQ ID NO: 2296
  source 1..80: mol_type = other DNA

SEQ ID NO: 187027 - DNA, 80 bp, synthetic construct; identical to SEQ ID NO: 2297
  source 1..80: mol_type = other DNA

SEQ ID NO: 187028 - DNA, 80 bp, synthetic construct; identical to SEQ ID NO: 2298
  source 1..80: mol_type = other DNA

SEQ ID NO: 187029 - DNA, 80 bp, synthetic construct; identical to SEQ ID NO: 2299
  source 1..80: mol_type = other DNA

SEQ ID NO: 187030 - DNA, 80 bp, synthetic construct; identical to SEQ ID NO: 2300
  source 1..80: mol_type = other DNA

SEQ ID NO: 187031 - DNA, 80 bp, synthetic construct; identical to SEQ ID NO: 2301
  source 1..80: mol_type = other DNA

SEQ ID NO: 187032 - DNA, 80 bp, synthetic construct; identical to SEQ ID NO: 2302
  source 1..80: mol_type = other DNA

SEQ ID NO: 187033 - DNA, 80 bp, synthetic construct; identical to SEQ ID NO: 2303
  source 1..80: mol_type = other DNA

SEQ ID NO: 187034 - DNA, 80 bp, synthetic construct; identical to SEQ ID NO: 2304
  source 1..80: mol_type = other DNA

SEQ ID NO: 187035 - DNA, 80 bp, synthetic construct; identical to SEQ ID NO: 2305
  source 1..80: mol_type = other DNA

SEQ ID NO: 187036 - DNA, 80 bp, synthetic construct; identical to SEQ ID NO: 2306
  source 1..80: mol_type = other DNA

SEQ ID NO: 187037 - DNA, 80 bp, synthetic construct; identical to SEQ ID NO: 2307
  source 1..80: mol_type = other DNA

SEQ ID NO: 187038 - DNA, 80 bp, synthetic construct; identical to SEQ ID NO: 2308
  source 1..80: mol_type = other DNA

SEQ ID NO: 187039 - DNA, 80 bp, synthetic construct; identical to SEQ ID NO: 2309
  source 1..80: mol_type = other DNA

SEQ ID NO: 187040 - DNA, 80 bp, synthetic construct; identical to SEQ ID NO: 2310
  source 1..80: mol_type = other DNA

SEQ ID NO: 187041 - DNA, 80 bp, synthetic construct; identical to SEQ ID NO: 2311
  source 1..80: mol_type = other DNA

SEQ ID NO: 187042 - DNA, 80 bp, synthetic construct; identical to SEQ ID NO: 2312
  source 1..80: mol_type = other DNA

SEQ ID NO: 187043 - DNA, 80 bp, synthetic construct; identical to SEQ ID NO: 2313
  source 1..80: mol_type = other DNA

SEQ ID NO: 187044 - DNA, 80 bp, synthetic construct; identical to SEQ ID NO: 2314
  source 1..80: mol_type = other DNA

SEQ ID NO: 187045 - DNA, 80 bp, synthetic construct; identical to SEQ ID NO: 2315
  source 1..80: mol_type = other DNA

SEQ ID NO: 187046 - DNA, 80 bp, synthetic construct; identical to SEQ ID NO: 2316
  source 1..80: mol_type = other DNA

SEQ ID NO: 187047 - DNA, 80 bp, synthetic construct; identical to SEQ ID NO: 2317
  source 1..80: mol_type = other DNA

SEQ ID NO: 187048 - DNA, 80 bp, synthetic construct; identical to SEQ ID NO: 2318
  source 1..80: mol_type = other DNA

SEQ ID NO: 187049 - DNA, 80 bp, synthetic construct; identical to SEQ ID NO: 2319
  source 1..80: mol_type = other DNA

SEQ ID NO: 187050 - DNA, 80 bp, synthetic construct; identical to SEQ ID NO: 2320
  source 1..80: mol_type = other DNA

SEQ ID NO: 187051 - DNA, 80 bp, synthetic construct; identical to SEQ ID NO: 2321
  source 1..80: mol_type = other DNA

SEQ ID NO: 187052 - DNA, 80 bp, synthetic construct; identical to SEQ ID NO: 2322
  source 1..80: mol_type = other DNA

SEQ ID NO: 187053 - DNA, 80 bp, synthetic construct; identical to SEQ ID NO: 2323
  source 1..80: mol_type = other DNA

SEQ ID NO: 187054 - DNA, 80 bp, synthetic construct; identical to SEQ ID NO: 2324
  source 1..80: mol_type = other DNA

SEQ ID NO: 187055 - DNA, 80 bp, synthetic construct; identical to SEQ ID NO: 2325
  source 1..80: mol_type = other DNA

SEQ ID NO: 187056 - DNA, 80 bp, synthetic construct; identical to SEQ ID NO: 2326
  source 1..80: mol_type = other DNA

SEQ ID NO: 187057 - DNA, 80 bp, synthetic construct; identical to SEQ ID NO: 2327
  source 1..80: mol_type = other DNA

SEQ ID NO: 187058 - DNA, 80 bp, synthetic construct; identical to SEQ ID NO: 2328
  source 1..80: mol_type = other DNA

SEQ ID NO: 187059 - DNA, 80 bp, synthetic construct; identical to SEQ ID NO: 2329
  source 1..80: mol_type = other DNA

SEQ ID NO: 187060 - DNA, 80 bp, synthetic construct; identical to SEQ ID NO: 2330
  source 1..80: mol_type = other DNA

SEQ ID NO: 187061 - DNA, 80 bp, synthetic construct; identical to SEQ ID NO: 2331
  source 1..80: mol_type = other DNA

SEQ ID NO: 187062 - DNA, 80 bp, synthetic construct; identical to SEQ ID NO: 2332
  source 1..80: mol_type = other DNA

SEQ ID NO: 187063 - DNA, 80 bp, synthetic construct; identical to SEQ ID NO: 2333
  source 1..80: mol_type = other DNA

SEQ ID NO: 187064 - DNA, 80 bp, synthetic construct; identical to SEQ ID NO: 2334
  source 1..80: mol_type = other DNA

SEQ ID NO: 187065 - DNA, 80 bp, synthetic construct; identical to SEQ ID NO: 2335
  source 1..80: mol_type = other DNA

SEQ ID NO: 187066 - DNA, 80 bp, synthetic construct; identical to SEQ ID NO: 2336
  source 1..80: mol_type = other DNA

SEQ ID NO: 187067 - DNA, 80 bp, synthetic construct; identical to SEQ ID NO: 2337
  source 1..80: mol_type = other DNA

SEQ ID NO: 187068 - DNA, 80 bp, synthetic construct; identical to SEQ ID NO: 2338
  source 1..80: mol_type = other DNA

SEQ ID NO: 187069 - DNA, 80 bp, synthetic construct; identical to SEQ ID NO: 2339
  source 1..80: mol_type = other DNA

SEQ ID NO: 187070 - DNA, 80 bp, synthetic construct; identical to SEQ ID NO: 2340
  source 1..80: mol_type = other DNA

SEQ ID NO: 187071 - DNA, 80 bp, synthetic construct; identical to SEQ ID NO: 2341
  source 1..80: mol_type = other DNA

SEQ ID NO: 187072 - DNA, 80 bp, synthetic construct; identical to SEQ ID NO: 2342
  source 1..80: mol_type = other DNA

SEQ ID NO: 187073 - DNA, 80 bp, synthetic construct; identical to SEQ ID NO: 2343
  source 1..80: mol_type = other DNA

SEQ ID NO: 187074 - DNA, 80 bp, synthetic construct; identical to SEQ ID NO: 2344
  source 1..80: mol_type = other DNA

SEQ ID NO: 187075 - DNA, 80 bp, synthetic construct; identical to SEQ ID NO: 2345
  source 1..80: mol_type = other DNA

SEQ ID NO: 187076 - DNA, 80 bp, synthetic construct; identical to SEQ ID NO: 2346
  source 1..80: mol_type = other DNA

SEQ ID NO: 187077 - DNA, 80 bp, synthetic construct; identical to SEQ ID NO: 2347
  source 1..80: mol_type = other DNA

SEQ ID NO: 187078 - DNA, 80 bp, synthetic construct; identical to SEQ ID NO: 2348
  source 1..80: mol_type = other DNA

SEQ ID NO: 187079 - DNA, 80 bp, synthetic construct; identical to SEQ ID NO: 2349
  source 1..80: mol_type = other DNA

SEQ ID NO: 187080 - DNA, 80 bp, synthetic construct; identical to SEQ ID NO: 2350
  source 1..80: mol_type = other DNA

SEQ ID NO: 187081 - DNA, 80 bp, synthetic construct; identical to SEQ ID NO: 2351
  source 1..80: mol_type = other DNA

SEQ ID NO: 187082 - DNA, 80 bp, synthetic construct; identical to SEQ ID NO: 2352
  source 1..80: mol_type = other DNA

SEQ ID NO: 187083 - DNA, 80 bp, synthetic construct; identical to SEQ ID NO: 2353
  source 1..80: mol_type = other DNA

SEQ ID NO: 187084 - DNA, 80 bp, synthetic construct; identical to SEQ ID NO: 2354
  source 1..80: mol_type = other DNA

SEQ ID NO: 187085 - DNA, 80 bp, synthetic construct; identical to SEQ ID NO: 2355
  source 1..80: mol_type = other DNA

SEQ ID NO: 187086 - DNA, 80 bp, synthetic construct; identical to SEQ ID NO: 2356
  source 1..80: mol_type = other DNA

SEQ ID NO: 187087 - DNA, 80 bp, synthetic construct; identical to SEQ ID NO: 2357
  source 1..80: mol_type = other DNA

SEQ ID NO: 187088 - DNA, 80 bp, synthetic construct; identical to SEQ ID NO: 2358
  source 1..80: mol_type = other DNA

SEQ ID NO: 187089 - DNA, 80 bp, synthetic construct; identical to SEQ ID NO: 2359
  source 1..80: mol_type = other DNA

SEQ ID NO: 187090 - DNA, 80 bp, synthetic construct; identical to SEQ ID NO: 2360
  source 1..80: mol_type = other DNA

SEQ ID NO: 187091 - DNA, 80 bp, synthetic construct; identical to SEQ ID NO: 2361
  source 1..80: mol_type = other DNA

SEQ ID NO: 187092 - DNA, 80 bp, synthetic construct; identical to SEQ ID NO: 2362
  source 1..80: mol_type = other DNA

SEQ ID NO: 187093 - DNA, 80 bp, synthetic construct; identical to SEQ ID NO: 2363
  source 1..80: mol_type = other DNA

SEQ ID NO: 187094 - DNA, 80 bp, synthetic construct; identical to SEQ ID NO: 2364
  source 1..80: mol_type = other DNA

SEQ ID NO: 187095 - DNA, 80 bp, synthetic construct; identical to SEQ ID NO: 2365
  source 1..80: mol_type = other DNA

SEQ ID NO: 187096 - DNA, 80 bp, synthetic construct; identical to SEQ ID NO: 2366
  source 1..80: mol_type = other DNA

SEQ ID NO: 187097 - DNA, 80 bp, synthetic construct; identical to SEQ ID NO: 2367
  source 1..80: mol_type = other DNA

SEQ ID NO: 187098 - DNA, 80 bp, synthetic construct; identical to SEQ ID NO: 2368
  source 1..80: mol_type = other DNA

SEQ ID NO: 187099 - DNA, 80 bp, synthetic construct; identical to SEQ ID NO: 2369
  source 1..80: mol_type = other DNA

SEQ ID NO: 187100 - DNA, 80 bp, synthetic construct; identical to SEQ ID NO: 2370
  source 1..80: mol_type = other DNA

SEQ ID NO: 187101 - DNA, 80 bp, synthetic construct; identical to SEQ ID NO: 2371
  source 1..80: mol_type = other DNA

SEQ ID NO: 187102 - DNA, 80 bp, synthetic construct; identical to SEQ ID NO: 2372
  source 1..80: mol_type = other DNA

SEQ ID NO: 187103 - DNA, 80 bp, synthetic construct; identical to SEQ ID NO: 2373
  source 1..80: mol_type = other DNA

SEQ ID NO: 187104 - DNA, 80 bp, synthetic construct; identical to SEQ ID NO: 2374
  source 1..80: mol_type = other DNA

SEQ ID NO: 187105 - DNA, 80 bp, synthetic construct; identical to SEQ ID NO: 2375
  source 1..80: mol_type = other DNA

SEQ ID NO: 187106 - DNA, 80 bp, synthetic construct; identical to SEQ ID NO: 2376
  source 1..80: mol_type = other DNA

SEQ ID NO: 187107 - DNA, 80 bp, synthetic construct; identical to SEQ ID NO: 2377
  source 1..80: mol_type = other DNA

SEQ ID NO: 187108 - DNA, 80 bp, synthetic construct; identical to SEQ ID NO: 2378
  source 1..80: mol_type = other DNA

SEQ ID NO: 187109 - DNA, 80 bp, synthetic construct; identical to SEQ ID NO: 2379
  source 1..80: mol_type = other DNA

SEQ ID NO: 187110 - DNA, 80 bp, synthetic construct; identical to SEQ ID NO: 2380
  source 1..80: mol_type = other DNA

SEQ ID NO: 187111 - DNA, 80 bp, synthetic construct; identical to SEQ ID NO: 2381
  source 1..80: mol_type = other DNA

SEQ ID NO: 187112 - DNA, 80 bp, synthetic construct; identical to SEQ ID NO: 2382
  source 1..80: mol_type = other DNA

SEQ ID NO: 187113 - DNA, 80 bp, synthetic construct; identical to SEQ ID NO: 2383
  source 1..80: mol_type = other DNA

SEQ ID NO: 187114 - DNA, 80 bp, synthetic construct; identical to SEQ ID NO: 2384
  source 1..80: mol_type = other DNA

SEQ ID NO: 187115 - DNA, 80 bp, synthetic construct; identical to SEQ ID NO: 2385
  source 1..80: mol_type = other DNA

SEQ ID NO: 187116 - DNA, 80 bp, synthetic construct; identical to SEQ ID NO: 2386
  source 1..80: mol_type = other DNA

SEQ ID NO: 187117 - DNA, 80 bp, synthetic construct; identical to SEQ ID NO: 2387
  source 1..80: mol_type = other DNA

SEQ ID NO: 187118 - DNA, 80 bp, synthetic construct; identical to SEQ ID NO: 2388
  source 1..80: mol_type = other DNA

SEQ ID NO: 187119 - DNA, 80 bp, synthetic construct; identical to SEQ ID NO: 2389
  source 1..80: mol_type = other DNA

SEQ ID NO: 187120 - DNA, 80 bp, synthetic construct; identical to SEQ ID NO: 2390
  source 1..80: mol_type = other DNA

SEQ ID NO: 187121 - DNA, 80 bp, synthetic construct; identical to SEQ ID NO: 2391
  source 1..80: mol_type = other DNA

SEQ ID NO: 187122 - DNA, 80 bp, synthetic construct; identical to SEQ ID NO: 2392
  source 1..80: mol_type = other DNA

SEQ ID NO: 187123 - DNA, 80 bp, synthetic construct; identical to SEQ ID NO: 2393
  source 1..80: mol_type = other DNA

SEQ ID NO: 187124 - DNA, 80 bp, synthetic construct; identical to SEQ ID NO: 2394
  source 1..80: mol_type = other DNA

SEQ ID NO: 187125 - DNA, 80 bp, synthetic construct; identical to SEQ ID NO: 2395
  source 1..80: mol_type = other DNA

SEQ ID NO: 187126 - DNA, 80 bp, synthetic construct; identical to SEQ ID NO: 2396
  source 1..80: mol_type = other DNA

SEQ ID NO: 187127 - DNA, 80 bp, synthetic construct; identical to SEQ ID NO: 2397
  source 1..80: mol_type = other DNA

SEQ ID NO: 187128 - DNA, 80 bp, synthetic construct; identical to SEQ ID NO: 2398
  source 1..80: mol_type = other DNA

SEQ ID NO: 187129 - DNA, 80 bp, synthetic construct; identical to SEQ ID NO: 2399
  source 1..80: mol_type = other DNA

SEQ ID NO: 187130 - DNA, 80 bp, synthetic construct; identical to SEQ ID NO: 2400
  source 1..80: mol_type = other DNA

SEQ ID NO: 187131 - DNA, 80 bp, synthetic construct; identical to SEQ ID NO: 2401
  source 1..80: mol_type = other DNA

SEQ ID NO: 187132 - DNA, 80 bp, synthetic construct; identical to SEQ ID NO: 2402
  source 1..80: mol_type = other DNA

SEQ ID NO: 187133 - DNA, 80 bp, synthetic construct; identical to SEQ ID NO: 2403
  source 1..80: mol_type = other DNA

SEQ ID NO: 187134 - DNA, 80 bp, synthetic construct; identical to SEQ ID NO: 2404
  source 1..80: mol_type = other DNA

SEQ ID NO: 187135 - DNA, 80 bp, synthetic construct; identical to SEQ ID NO: 2405
  source 1..80: mol_type = other DNA

SEQ ID NO: 187136 - DNA, 80 bp, synthetic construct; identical to SEQ ID NO: 2406
  source 1..80: mol_type = other DNA

SEQ ID NO: 187137 - DNA, 80 bp, synthetic construct; identical to SEQ ID NO: 2407
  source 1..80: mol_type = other DNA

SEQ ID NO: 187138 - DNA, 80 bp, synthetic construct; identical to SEQ ID NO: 2408
  source 1..80: mol_type = other DNA

SEQ ID NO: 187139 - DNA, 80 bp, synthetic construct; identical to SEQ ID NO: 2409
  source 1..80: mol_type = other DNA

SEQ ID NO: 187140 - DNA, 80 bp, synthetic construct; identical to SEQ ID NO: 2410
  source 1..80: mol_type = other DNA

SEQ ID NO: 187141 - DNA, 80 bp, synthetic construct; identical to SEQ ID NO: 2411
  source 1..80: mol_type = other DNA

SEQ ID NO: 187142 - DNA, 80 bp, synthetic construct; identical to SEQ ID NO: 2412
  source 1..80: mol_type = other DNA

SEQ ID NO: 187143 - DNA, 80 bp, synthetic construct; identical to SEQ ID NO: 2413
  source 1..80: mol_type = other DNA

SEQ ID NO: 187144 - DNA, 80 bp, synthetic construct; identical to SEQ ID NO: 2414
  source 1..80: mol_type = other DNA

SEQ ID NO: 187145 - DNA, 80 bp, synthetic construct; identical to SEQ ID NO: 2415
  source 1..80: mol_type = other DNA

SEQ ID NO: 187146 - DNA, 80 bp, synthetic construct; identical to SEQ ID NO: 2416
  source 1..80: mol_type = other DNA

SEQ ID NO: 187147 - DNA, 80 bp, synthetic construct; identical to SEQ ID NO: 2417
  source 1..80: mol_type = other DNA

SEQ ID NO: 187148 - DNA, 80 bp, synthetic construct; identical to SEQ ID NO: 2418
  source 1..80: mol_type = other DNA

SEQ ID NO: 187149 - DNA, 80 bp, synthetic construct; identical to SEQ ID NO: 2419
  source 1..80: mol_type = other DNA

SEQ ID NO: 187150 - DNA, 80 bp, synthetic construct; identical to SEQ ID NO: 2420
  source 1..80: mol_type = other DNA

SEQ ID NO: 187151 - DNA, 80 bp, synthetic construct; identical to SEQ ID NO: 2421
  source 1..80: mol_type = other DNA

SEQ ID NO: 187152 - DNA, 80 bp, synthetic construct; identical to SEQ ID NO: 2422
  source 1..80: mol_type = other DNA

SEQ ID NO: 187153 - DNA, 80 bp, synthetic construct; identical to SEQ ID NO: 2423
  source 1..80: mol_type = other DNA

SEQ ID NO: 187154 - DNA, 80 bp, synthetic construct; identical to SEQ ID NO: 2424
  source 1..80: mol_type = other DNA

SEQ ID NO: 187155 - DNA, 80 bp, synthetic construct; identical to SEQ ID NO: 2425
  source 1..80: mol_type = other DNA

SEQ ID NO: 187156 - DNA, 80 bp, synthetic construct; identical to SEQ ID NO: 2426
  source 1..80: mol_type = other DNA

SEQ ID NO: 187157 - DNA, 80 bp, synthetic construct; identical to SEQ ID NO: 2427
  source 1..80: mol_type = other DNA

SEQ ID NO: 187158 - DNA, 80 bp, synthetic construct; identical to SEQ ID NO: 2428
  source 1..80: mol_type = other DNA

SEQ ID NO: 187159 - DNA, 80 bp, synthetic construct; identical to SEQ ID NO: 2429
  source 1..80: mol_type = other DNA

SEQ ID NO: 187160 - DNA, 80 bp, synthetic construct; identical to SEQ ID NO: 2430
  source 1..80: mol_type = other DNA

SEQ ID NO: 187161 - DNA, 80 bp, synthetic construct; identical to SEQ ID NO: 2431
  source 1..80: mol_type = other DNA

SEQ ID NO: 187162 - DNA, 80 bp, synthetic construct; identical to SEQ ID NO: 2432
  source 1..80: mol_type = other DNA

SEQ ID NO: 187163 - DNA, 80 bp, synthetic construct; identical to SEQ ID NO: 2433
  source 1..80: mol_type = other DNA

SEQ ID NO: 187164 - DNA, 80 bp, synthetic construct; identical to SEQ ID NO: 2434
  source 1..80: mol_type = other DNA

SEQ ID NO: 187165 - DNA, 80 bp, synthetic construct; identical to SEQ ID NO: 2435
  source 1..80: mol_type = other DNA

SEQ ID NO: 187166 - DNA, 80 bp, synthetic construct; identical to SEQ ID NO: 2436
  source 1..80: mol_type = other DNA

SEQ ID NO: 187167 - DNA, 80 bp, synthetic construct; identical to SEQ ID NO: 2437
  source 1..80: mol_type = other DNA

SEQ ID NO: 187168 - DNA, 80 bp, synthetic construct; identical to SEQ ID NO: 2438
  source 1..80: mol_type = other DNA

SEQ ID NO: 187169 - DNA, 80 bp, synthetic construct; identical to SEQ ID NO: 2439
  source 1..80: mol_type = other DNA

SEQ ID NO: 187170 - DNA, 80 bp, synthetic construct; identical to SEQ ID NO: 2440
  source 1..80: mol_type = other DNA

SEQ ID NO: 187171 - DNA, 80 bp, synthetic construct; identical to SEQ ID NO: 2441
  source 1..80: mol_type = other DNA

SEQ ID NO: 187172 - DNA, 80 bp, synthetic construct; identical to SEQ ID NO: 2442
  source 1..80: mol_type = other DNA

SEQ ID NO: 187173 - DNA, 80 bp, synthetic construct; identical to SEQ ID NO: 2443
  source 1..80: mol_type = other DNA

SEQ ID NO: 187174 - DNA, 80 bp, synthetic construct; identical to SEQ ID NO: 2444
  source 1..80: mol_type = other DNA

SEQ ID NO: 187175 - DNA, 80 bp, synthetic construct; identical to SEQ ID NO: 2445
  source 1..80: mol_type = other DNA

SEQ ID NO: 187176 - DNA, 80 bp, synthetic construct; identical to SEQ ID NO: 2446
  source 1..80: mol_type = other DNA

SEQ ID NO: 187177 - DNA, 80 bp, synthetic construct; identical to SEQ ID NO: 2447
  source 1..80: mol_type = other DNA

SEQ ID NO: 187178 - DNA, 80 bp, synthetic construct; identical to SEQ ID NO: 2448
  source 1..80: mol_type = other DNA

SEQ ID NO: 187179 - DNA, 80 bp, synthetic construct; identical to SEQ ID NO: 2449
  source 1..80: mol_type = other DNA

SEQ ID NO: 187180 - DNA, 80 bp, synthetic construct; identical to SEQ ID NO: 2450
  source 1..80: mol_type = other DNA

SEQ ID NO: 187181 - DNA, 80 bp, synthetic construct; identical to SEQ ID NO: 2451
  source 1..80: mol_type = other DNA

SEQ ID NO: 187182 - DNA, 80 bp, synthetic construct; identical to SEQ ID NO: 2452
  source 1..80: mol_type = other DNA

SEQ ID NO: 187183 - DNA, 80 bp, synthetic construct; identical to SEQ ID NO: 2453
  source 1..80: mol_type = other DNA

SEQ ID NO: 187184 - DNA, 80 bp, synthetic construct; identical to SEQ ID NO: 2454
  source 1..80: mol_type = other DNA

SEQ ID NO: 187185 - DNA, 80 bp, synthetic construct; identical to SEQ ID NO: 2455
  source 1..80: mol_type = other DNA

SEQ ID NO: 187186 - DNA, 80 bp, synthetic construct; identical to SEQ ID NO: 2456
  source 1..80: mol_type = other DNA

SEQ ID NO: 187187 - DNA, 80 bp, synthetic construct; identical to SEQ ID NO: 2457
  source 1..80: mol_type = other DNA

SEQ ID NO: 187188 - DNA, 80 bp, synthetic construct; identical to SEQ ID NO: 2458
  source 1..80: mol_type = other DNA

SEQ ID NO: 187189 - DNA, 80 bp, synthetic construct; identical to SEQ ID NO: 2459
  source 1..80: mol_type = other DNA

SEQ ID NO: 187190 - DNA, 80 bp, synthetic construct; identical to SEQ ID NO: 2460
  source 1..80: mol_type = other DNA

SEQ ID NO: 187191 - DNA, 80 bp, synthetic construct; identical to SEQ ID NO: 2461
  source 1..80: mol_type = other DNA

SEQ ID NO: 187192 - DNA, 80 bp, synthetic construct; identical to SEQ ID NO: 2462
  source 1..80: mol_type = other DNA

SEQ ID NO: 187193 - DNA, 80 bp, synthetic construct; identical to SEQ ID NO: 2463
  source 1..80: mol_type = other DNA

SEQ ID NO: 187194 - DNA, 80 bp, synthetic construct; identical to SEQ ID NO: 2464
  source 1..80: mol_type = other DNA

SEQ ID NO: 187195 - DNA, 80 bp, synthetic construct; identical to SEQ ID NO: 2465
  source 1..80: mol_type = other DNA

SEQ ID NO: 187196 - DNA, 80 bp, synthetic construct; identical to SEQ ID NO: 2466
  source 1..80: mol_type = other DNA

SEQ ID NO: 187197 - DNA, 80 bp, synthetic construct; identical to SEQ ID NO: 2467
  source 1..80: mol_type = other DNA

SEQ ID NO: 187198 - DNA, 80 bp, synthetic construct; identical to SEQ ID NO: 2468
  source 1..80: mol_type = other DNA

SEQ ID NO: 187199 - DNA, 80 bp, synthetic construct; identical to SEQ ID NO: 2469
  source 1..80: mol_type = other DNA

SEQ ID NO: 187200 - DNA, 80 bp, synthetic construct; identical to SEQ ID NO: 2470
  source 1..80: mol_type = other DNA

SEQ ID NO: 187201 - DNA, 80 bp, synthetic construct; identical to SEQ ID NO: 2471
  source 1..80: mol_type = other DNA

SEQ ID NO: 187202 - DNA, 80 bp, synthetic construct; identical to SEQ ID NO: 2472
  source 1..80: mol_type = other DNA

SEQ ID NO: 187203 - DNA, 80 bp, synthetic construct; identical to SEQ ID NO: 2473
  source 1..80: mol_type = other DNA

SEQ ID NO: 187204 - DNA, 80 bp, synthetic construct; identical to SEQ ID NO: 2474
  source 1..80: mol_type = other DNA

SEQ ID NO: 187205 - DNA, 80 bp, synthetic construct; identical to SEQ ID NO: 2475
  source 1..80: mol_type = other DNA

SEQ ID NO: 187206 - DNA, 80 bp, synthetic construct; identical to SEQ ID NO: 2476
  source 1..80: mol_type = other DNA

SEQ ID NO: 187207 - DNA, 80 bp, synthetic construct; identical to SEQ ID NO: 2477
  source 1..80: mol_type = other DNA

SEQ ID NO: 187208 - DNA, 80 bp, synthetic construct; identical to SEQ ID NO: 2478
  source 1..80: mol_type = other DNA

SEQ ID NO: 187209 - DNA, 80 bp, synthetic construct; identical to SEQ ID NO: 2479
  source 1..80: mol_type = other DNA

SEQ ID NO: 187210 - DNA, 80 bp, synthetic construct; identical to SEQ ID NO: 2480
  source 1..80: mol_type = other DNA

SEQ ID NO: 187211 - DNA, 80 bp, synthetic construct; identical to SEQ ID NO: 2481
  source 1..80: mol_type = other DNA

SEQ ID NO: 187212 - DNA, 80 bp, synthetic construct; identical to SEQ ID NO: 2482
  source 1..80: mol_type = other DNA

SEQ ID NO: 187213 - DNA, 80 bp, synthetic construct; identical to SEQ ID NO: 2483
  source 1..80: mol_type = other DNA

SEQ ID NO: 187214 - DNA, 80 bp, synthetic construct; identical to SEQ ID NO: 2484
  source 1..80: mol_type = other DNA

SEQ ID NO: 187215 - DNA, 80 bp, synthetic construct; identical to SEQ ID NO: 2485
  source 1..80: mol_type = other DNA

SEQ ID NO: 187216 - DNA, 80 bp, synthetic construct; identical to SEQ ID NO: 2486
  source 1..80: mol_type = other DNA

SEQ ID NO: 187217 - DNA, 80 bp, synthetic construct; identical to SEQ ID NO: 2487
  source 1..80: mol_type = other DNA

SEQ ID NO: 187218 - DNA, 80 bp, synthetic construct; identical to SEQ ID NO: 2488
  source 1..80: mol_type = other DNA

SEQ ID NO: 187219 - DNA, 80 bp, synthetic construct; identical to SEQ ID NO: 2489
  source 1..80: mol_type = other DNA

SEQ ID NO: 187220 - DNA, 80 bp, synthetic construct; identical to SEQ ID NO: 2490
  source 1..80: mol_type = other DNA

SEQ ID NO: 187221 - DNA, 80 bp, synthetic construct; identical to SEQ ID NO: 2491
  source 1..80: mol_type = other DNA

SEQ ID NO: 187222 - DNA, 80 bp, synthetic construct; identical to SEQ ID NO: 2492
  source 1..80: mol_type = other DNA

SEQ ID NO: 187223 - DNA, 80 bp, synthetic construct; identical to SEQ ID NO: 2493
  source 1..80: mol_type = other DNA

SEQ ID NO: 187224 - DNA, 80 bp, synthetic construct; identical to SEQ ID NO: 2494
  source 1..80: mol_type = other DNA

SEQ ID NO: 187225 - DNA, 80 bp, synthetic construct; identical to SEQ ID NO: 2495
  source 1..80: mol_type = other DNA

SEQ ID NO: 187226 - DNA, 80 bp, synthetic construct; identical to SEQ ID NO: 2496
  source 1..80: mol_type = other DNA

SEQ ID NO: 187227 - DNA, 80 bp, synthetic construct; identical to SEQ ID NO: 2497
  source 1..80: mol_type = other DNA

SEQ ID NO: 187228 - DNA, 80 bp, synthetic construct; identical to SEQ ID NO: 2498
  source 1..80: mol_type = other DNA

SEQ ID NO: 187229 - DNA, 80 bp, synthetic construct; identical to SEQ ID NO: 2499
  source 1..80: mol_type = other DNA

SEQ ID NO: 187230 - DNA, 80 bp, synthetic construct; identical to SEQ ID NO: 2500
  source 1..80: mol_type = other DNA

SEQ ID NO: 187231 - DNA, 80 bp, synthetic construct; identical to SEQ ID NO: 2501
  source 1..80: mol_type = other DNA

SEQ ID NO: 187232 - DNA, 80 bp, synthetic construct; identical to SEQ ID NO: 2502
  source 1..80: mol_type = other DNA

SEQ ID NO: 187233 - DNA, 80 bp, synthetic construct; identical to SEQ ID NO: 2503
  source 1..80: mol_type = other DNA

SEQ ID NO: 187234 - DNA, 80 bp, synthetic construct; identical to SEQ ID NO: 2504
  source 1..80: mol_type = other DNA

SEQ ID NO: 187235 - DNA, 80 bp, synthetic construct; identical to SEQ ID NO: 2505
  source 1..80: mol_type = other DNA

SEQ ID NO: 187236 - DNA, 80 bp, synthetic construct; identical to SEQ ID NO: 2506
  source 1..80: mol_type = other DNA

SEQ ID NO: 187237 - DNA, 80 bp, synthetic construct; identical to SEQ ID NO: 2507
  source 1..80: mol_type = other DNA

SEQ ID NO: 187238 - DNA, 80 bp, synthetic construct; identical to SEQ ID NO: 2508
  source 1..80: mol_type = other DNA

SEQ ID NO: 187239 - DNA, 80 bp, synthetic construct; identical to SEQ ID NO: 2509
  source 1..80: mol_type = other DNA

SEQ ID NO: 187240 - DNA, 80 bp, synthetic construct; identical to SEQ ID NO: 2510
  source 1..80: mol_type = other DNA

SEQ ID NO: 187241 - DNA, 80 bp, synthetic construct; identical to SEQ ID NO: 2511
  source 1..80: mol_type = other DNA

SEQ ID NO: 187242 - DNA, 80 bp, synthetic construct; identical to SEQ ID NO: 2512
  source 1..80: mol_type = other DNA

SEQ ID NO: 187243 - DNA, 80 bp, synthetic construct; identical to SEQ ID NO: 2513
  source 1..80: mol_type = other DNA

SEQ ID NO: 187244 - DNA, 80 bp, synthetic construct; identical to SEQ ID NO: 2514
  source 1..80: mol_type = other DNA

SEQ ID NO: 187245 - DNA, 80 bp, synthetic construct; identical to SEQ ID NO: 2515
  source 1..80: mol_type = other DNA

SEQ ID NO: 187246 - DNA, 80 bp, synthetic construct; identical to SEQ ID NO: 2516
  source 1..80: mol_type = other DNA

SEQ ID NO: 187247 - DNA, 80 bp, synthetic construct; identical to SEQ ID NO: 2517
  source 1..80: mol_type = other DNA

SEQ ID NO: 187248 - DNA, 80 bp, synthetic construct; identical to SEQ ID NO: 2518
  source 1..80: mol_type = other DNA

SEQ ID NO: 187249 - DNA, 80 bp, synthetic construct; identical to SEQ ID NO: 2519
  source 1..80: mol_type = other DNA

SEQ ID NO: 187250 - DNA, 80 bp, synthetic construct; identical to SEQ ID NO: 2520
  source 1..80: mol_type = other DNA

SEQ ID NO: 187251 - DNA, 80 bp, synthetic construct; identical to SEQ ID NO: 2521
  source 1..80: mol_type = other DNA

SEQ ID NO: 187252 - DNA, 80 bp, synthetic construct; identical to SEQ ID NO: 2522
  source 1..80: mol_type = other DNA

SEQ ID NO: 187253 - DNA, 80 bp, synthetic construct; identical to SEQ ID NO: 2523
  source 1..80: mol_type = other DNA

SEQ ID NO: 187254 - DNA, 80 bp, synthetic construct; identical to SEQ ID NO: 2524
  source 1..80: mol_type = other DNA

SEQ ID NO: 187255 - DNA, 80 bp, synthetic construct; identical to SEQ ID NO: 2525
  source 1..80: mol_type = other DNA

SEQ ID NO: 187256 - DNA, 80 bp, synthetic construct; identical to SEQ ID NO: 2526
  source 1..80: mol_type = other DNA

SEQ ID NO: 187257 - DNA, 80 bp, synthetic construct; identical to SEQ ID NO: 2527
  source 1..80: mol_type = other DNA

SEQ ID NO: 187258 - DNA, 80 bp, synthetic construct; identical to SEQ ID NO: 2528
  source 1..80: mol_type = other DNA

SEQ ID NO: 187259 - DNA, 80 bp, synthetic construct; identical to SEQ ID NO: 2529
  source 1..80: mol_type = other DNA

SEQ ID NO: 187260 - DNA, 80 bp, synthetic construct; identical to SEQ ID NO: 2530
  source 1..80: mol_type = other DNA

SEQ ID NO: 187261 - DNA, 80 bp, synthetic construct; identical to SEQ ID NO: 2531
  source 1..80: mol_type = other DNA

SEQ ID NO: 187262 - DNA, 80 bp, synthetic construct; identical to SEQ ID NO: 2532
  source 1..80: mol_type = other DNA

SEQ ID NO: 187263 - DNA, 80 bp, synthetic construct; identical to SEQ ID NO: 2533
  source 1..80: mol_type = other DNA

SEQ ID NO: 187264 - DNA, 80 bp, synthetic construct; identical to SEQ ID NO: 2534
  source 1..80: mol_type = other DNA

SEQ ID NO: 187265 - DNA, 80 bp, synthetic construct; identical to SEQ ID NO: 2535
  source 1..80: mol_type = other DNA

SEQ ID NO: 187266 - DNA, 80 bp, synthetic construct; identical to SEQ ID NO: 2536
  source 1..80: mol_type = other DNA

SEQ ID NO: 187267 - DNA, 80 bp, synthetic construct; identical to SEQ ID NO: 2537
  source 1..80: mol_type = other DNA

SEQ ID NO: 187268 - DNA, 80 bp, synthetic construct; identical to SEQ ID NO: 2538
  source 1..80: mol_type = other DNA

SEQ ID NO: 187269 - DNA, 80 bp, synthetic construct; identical to SEQ ID NO: 2539
  source 1..80: mol_type = other DNA

SEQ ID NO: 187270 - DNA, 80 bp, synthetic construct; identical to SEQ ID NO: 2540
  source 1..80: mol_type = other DNA

SEQ ID NO: 187271 - DNA, 80 bp, synthetic construct; identical to SEQ ID NO: 2541
  source 1..80: mol_type = other DNA

SEQ ID NO: 187272 - DNA, 80 bp, synthetic construct; identical to SEQ ID NO: 2542
  source 1..80: mol_type = other DNA

SEQ ID NO: 187273 - DNA, 80 bp, synthetic construct; identical to SEQ ID NO: 2543
  source 1..80: mol_type = other DNA

SEQ ID NO: 187274 - DNA, 80 bp, synthetic construct; identical to SEQ ID NO: 2544
  source 1..80: mol_type = other DNA

SEQ ID NO: 187275 - DNA, 80 bp, synthetic construct; identical to SEQ ID NO: 2545
  source 1..80: mol_type = other DNA

SEQ ID NO: 187276 - DNA, 80 bp, synthetic construct; identical to SEQ ID NO: 2546
  source 1..80: mol_type = other DNA

SEQ ID NO: 187277 - DNA, 80 bp, synthetic construct; identical to SEQ ID NO: 2547
  source 1..80: mol_type = other DNA

SEQ ID NO: 187278 - DNA, 80 bp, synthetic construct; identical to SEQ ID NO: 2548
  source 1..80: mol_type = other DNA

SEQ ID NO: 187279 - DNA, 80 bp, synthetic construct; identical to SEQ ID NO: 2549
  source 1..80: mol_type = other DNA

SEQ ID NO: 187280 - DNA, 80 bp, synthetic construct; identical to SEQ ID NO: 2550
  source 1..80: mol_type = other DNA

SEQ ID NO: 187281 - DNA, 80 bp, synthetic construct; identical to SEQ ID NO: 2551
  source 1..80: mol_type = other DNA

SEQ ID NO: 187282 - DNA, 80 bp, synthetic construct; identical to SEQ ID NO: 2552
  source 1..80: mol_type = other DNA

SEQ ID NO: 187283 - DNA, 80 bp, synthetic construct; identical to SEQ ID NO: 2553
  source 1..80: mol_type = other DNA

SEQ ID NO: 187284 - DNA, 80 bp, synthetic construct; identical to SEQ ID NO: 2554
  source 1..80: mol_type = other DNA

SEQ ID NO: 187285 - DNA, 80 bp, synthetic construct; identical to SEQ ID NO: 2555
  source 1..80: mol_type = other DNA

SEQ ID NO: 187286 - DNA, 80 bp, synthetic construct; identical to SEQ ID NO: 2556
  source 1..80: mol_type = other DNA

SEQ ID NO: 187287 - DNA, 80 bp, synthetic construct; identical to SEQ ID NO: 2557
  source 1..80: mol_type = other DNA

SEQ ID NO: 187288 - DNA, 80 bp, synthetic construct; identical to SEQ ID NO: 2558
  source 1..80: mol_type = other DNA

SEQ ID NO: 187289 - DNA, 80 bp, synthetic construct; identical to SEQ ID NO: 2559
  source 1..80: mol_type = other DNA

SEQ ID NO: 187290 - DNA, 80 bp, synthetic construct; identical to SEQ ID NO: 2560
  source 1..80: mol_type = other DNA

SEQ ID NO: 187291 - DNA, 80 bp, synthetic construct; identical to SEQ ID NO: 2561
  source 1..80: mol_type = other DNA

SEQ ID NO: 187292 - DNA, 80 bp, synthetic construct; identical to SEQ ID NO: 2562
  source 1..80: mol_type = other DNA

SEQ ID NO: 187293 - DNA, 80 bp, synthetic construct; identical to SEQ ID NO: 2563
  source 1..80: mol_type = other DNA

SEQ ID NO: 187294 - DNA, 80 bp, synthetic construct; identical to SEQ ID NO: 2564
  source 1..80: mol_type = other DNA

SEQ ID NO: 187295 - DNA, 80 bp, synthetic construct; identical to SEQ ID NO: 2565
  source 1..80: mol_type = other DNA

SEQ ID NO: 187296 - DNA, 80 bp, synthetic construct; identical to SEQ ID NO: 2566
  source 1..80: mol_type = other DNA

SEQ ID NO: 187297 - DNA, 80 bp, synthetic construct; identical to SEQ ID NO: 2567
  source 1..80: mol_type = other DNA

SEQ ID NO: 187298 - DNA, 80 bp, synthetic construct; identical to SEQ ID NO: 2568
  source 1..80: mol_type = other DNA

SEQ ID NO: 187299 - DNA, 80 bp, synthetic construct; identical to SEQ ID NO: 2569
  source 1..80: mol_type = other DNA

SEQ ID NO: 187300 - DNA, 80 bp, synthetic construct; identical to SEQ ID NO: 2570
  source 1..80: mol_type = other DNA

SEQ ID NO: 187301 - DNA, 80 bp, synthetic construct; identical to SEQ ID NO: 2571
  source 1..80: mol_type = other DNA

SEQ ID NO: 187302 - DNA, 80 bp, synthetic construct; identical to SEQ ID NO: 2572
  source 1..80: mol_type = other DNA

SEQ ID NO: 187303 - DNA, 80 bp, synthetic construct; identical to SEQ ID NO: 2573
  source 1..80: mol_type = other DNA

SEQ ID NO: 187304 - DNA, 80 bp, synthetic construct; identical to SEQ ID NO: 2574
  source 1..80: mol_type = other DNA

SEQ ID NO: 187305 - DNA, 80 bp, synthetic construct; identical to SEQ ID NO: 2575
  source 1..80: mol_type = other DNA

SEQ ID NO: 187306 - DNA, 80 bp, synthetic construct; identical to SEQ ID NO: 2576
  source 1..80: mol_type = other DNA

SEQ ID NO: 187307 - DNA, 80 bp, synthetic construct; identical to SEQ ID NO: 2577
  source 1..80: mol_type = other DNA

SEQ ID NO: 187308 - DNA, 80 bp, synthetic construct; identical to SEQ ID NO: 2578
  source 1..80: mol_type = other DNA

SEQ ID NO: 187309 - DNA, 80 bp, synthetic construct; identical to SEQ ID NO: 2579
  source 1..80: mol_type = other DNA

SEQ ID NO: 187310 - DNA, 80 bp, synthetic construct; identical to SEQ ID NO: 2580
  source 1..80: mol_type = other DNA

SEQ ID NO: 187311 - DNA, 80 bp, synthetic construct; identical to SEQ ID NO: 2581
  source 1..80: mol_type = other DNA

SEQ ID NO: 187312 - DNA, 80 bp, synthetic construct; identical to SEQ ID NO: 2582
  source 1..80: mol_type = other DNA

SEQ ID NO: 187313 - DNA, 80 bp, synthetic construct; identical to SEQ ID NO: 2583
  source 1..80: mol_type = other DNA

SEQ ID NO: 187314 - DNA, 80 bp, synthetic construct; identical to SEQ ID NO: 2584
  source 1..80: mol_type = other DNA

SEQ ID NO: 187315 - DNA, 80 bp, synthetic construct; identical to SEQ ID NO: 2585
  source 1..80: mol_type = other DNA

SEQ ID NO: 187316 - DNA, 80 bp, synthetic construct; identical to SEQ ID NO: 2586
  source 1..80: mol_type = other DNA

SEQ ID NO: 187317 - DNA, 80 bp, synthetic construct; identical to SEQ ID NO: 2587
  source 1..80: mol_type = other DNA

SEQ ID NO: 187318 - DNA, 80 bp, synthetic construct; identical to SEQ ID NO: 2588
  source 1..80: mol_type = other DNA

SEQ ID NO: 187319 - DNA, 80 bp, synthetic construct; identical to SEQ ID NO: 2589
  source 1..80: mol_type = other DNA

SEQ ID NO: 187320 - DNA, 80 bp, synthetic construct; identical to SEQ ID NO: 2590
  source 1..80: mol_type = other DNA

SEQ ID NO: 187321 - DNA, 80 bp, synthetic construct; identical to SEQ ID NO: 2591
  source 1..80: mol_type = other DNA

SEQ ID NO: 187322 - DNA, 80 bp, synthetic construct; identical to SEQ ID NO: 2592
  source 1..80: mol_type = other DNA

SEQ ID NO: 187323 - DNA, 80 bp, synthetic construct; identical to SEQ ID NO: 2593
  source 1..80: mol_type = other DNA

SEQ ID NO: 187324 - DNA, 80 bp, synthetic construct; identical to SEQ ID NO: 2594
  source 1..80: mol_type = other DNA

SEQ ID NO: 187325 - DNA, 80 bp, synthetic construct; identical to SEQ ID NO: 2595
  source 1..80: mol_type = other DNA

SEQ ID NO: 187326 - DNA, 80 bp, synthetic construct; identical to SEQ ID NO: 2596
  source 1..80: mol_type = other DNA

SEQ ID NO: 187327 - DNA, 80 bp, synthetic construct; identical to SEQ ID NO: 2597
  source 1..80: mol_type = other DNA

SEQ ID NO: 187328 - DNA, 80 bp, synthetic construct; identical to SEQ ID NO: 2598
  source 1..80: mol_type = other DNA

SEQ ID NO: 187329 - DNA, 80 bp, synthetic construct; identical to SEQ ID NO: 2599
  source 1..80: mol_type = other DNA

SEQ ID NO: 187330 - DNA, 80 bp, synthetic construct; identical to SEQ ID NO: 2600
  source 1..80: mol_type = other DNA

SEQ ID NO: 187331 - DNA, 80 bp, synthetic construct; identical to SEQ ID NO: 2601
  source 1..80: mol_type = other DNA

SEQ ID NO: 187332 - DNA, 80 bp, synthetic construct; identical to SEQ ID NO: 2602
  source 1..80: mol_type = other DNA

SEQ ID NO: 187333 - DNA, 80 bp, synthetic construct; identical to SEQ ID NO: 2603
  source 1..80: mol_type = other DNA

SEQ ID NO: 187334 - DNA, 80 bp, synthetic construct; identical to SEQ ID NO: 2604
  source 1..80: mol_type = other DNA

SEQ ID NO: 187335 - DNA, 80 bp, synthetic construct; identical to SEQ ID NO: 2605
  source 1..80: mol_type = other DNA

SEQ ID NO: 187336 - DNA, 80 bp, synthetic construct; identical to SEQ ID NO: 2606
  source 1..80: mol_type = other DNA

SEQ ID NO: 187337 - DNA, 80 bp, synthetic construct; identical to SEQ ID NO: 2607
  source 1..80: mol_type = other DNA

SEQ ID NO: 187338 - DNA, 80 bp, synthetic construct; identical to SEQ ID NO: 2608
  source 1..80: mol_type = other DNA

SEQ ID NO: 187339 - DNA, 80 bp, synthetic construct; identical to SEQ ID NO: 2609
  source 1..80: mol_type = other DNA

SEQ ID NO: 187340 - DNA, 80 bp, synthetic construct; identical to SEQ ID NO: 2610
  source 1..80: mol_type = other DNA

SEQ ID NO: 187341 - DNA, 80 bp, synthetic construct; identical to SEQ ID NO: 2611
  source 1..80: mol_type = other DNA

SEQ ID NO: 187342 - DNA, 80 bp, synthetic construct; identical to SEQ ID NO: 2612
  source 1..80: mol_type = other DNA

SEQ ID NO: 187343 - DNA, 80 bp, synthetic construct; identical to SEQ ID NO: 2613
  source 1..80: mol_type = other DNA

SEQ ID NO: 187344 - DNA, 80 bp, synthetic construct; identical to SEQ ID NO: 2614
  source 1..80: mol_type = other DNA

SEQ ID NO: 187345 - DNA, 80 bp, synthetic construct; identical to SEQ ID NO: 2615
  source 1..80: mol_type = other DNA

SEQ ID NO: 187346 - DNA, 80 bp, synthetic construct; identical to SEQ ID NO: 2616
  source 1..80: mol_type = other DNA

SEQ ID NO: 187347 - DNA, 80 bp, synthetic construct; identical to SEQ ID NO: 2617
  source 1..80: mol_type = other DNA

SEQ ID NO: 187348 - DNA, 80 bp, synthetic construct; identical to SEQ ID NO: 2618
  source 1..80: mol_type = other DNA

SEQ ID NO: 187349 - DNA, 80 bp, synthetic construct; identical to SEQ ID NO: 2619
  source 1..80: mol_type = other DNA

SEQ ID NO: 187350 - DNA, 80 bp, synthetic construct; identical to SEQ ID NO: 2620
  source 1..80: mol_type = other DNA

SEQ ID NO: 187351 - DNA, 80 bp, synthetic construct; identical to SEQ ID NO: 2621
  source 1..80: mol_type = other DNA

SEQ ID NO: 187352 - DNA, 80 bp, synthetic construct; identical to SEQ ID NO: 2622
  source 1..80: mol_type = other DNA

SEQ ID NO: 187353 - DNA, 80 bp, synthetic construct; identical to SEQ ID NO: 2623
  source 1..80: mol_type = other DNA

SEQ ID NO: 187354 - DNA, 80 bp, synthetic construct; identical to SEQ ID NO: 2624
  source 1..80: mol_type = other DNA

SEQ ID NO: 187355 - DNA, 80 bp, synthetic construct; identical to SEQ ID NO: 2625
  source 1..80: mol_type = other DNA

SEQ ID NO: 187356 - DNA, 80 bp, synthetic construct; identical to SEQ ID NO: 2626
  source 1..80: mol_type = other DNA

SEQ ID NO: 187357 - DNA, 80 bp, synthetic construct; identical to SEQ ID NO: 2627
  source 1..80: mol_type = other DNA

SEQ ID NO: 187358 - DNA, 80 bp, synthetic construct; identical to SEQ ID NO: 2628
  source 1..80: mol_type = other DNA

SEQ ID NO: 187359 - DNA, 80 bp, synthetic construct; identical to SEQ ID NO: 2629
  source 1..80: mol_type = other DNA

SEQ ID NO: 187360 - DNA, 80 bp, synthetic construct; identical to SEQ ID NO: 2630
  source 1..80: mol_type = other DNA

SEQ ID NO: 187361 - DNA, 80 bp, synthetic construct; identical to SEQ ID NO: 2631
  source 1..80: mol_type = other DNA

SEQ ID NO: 187362 - DNA, 80 bp, synthetic construct; identical to SEQ ID NO: 2632
  source 1..80: mol_type = other DNA

SEQ ID NO: 187363 - DNA, 80 bp, synthetic construct; identical to SEQ ID NO: 2633
  source 1..80: mol_type = other DNA

SEQ ID NO: 187364 - DNA, 80 bp, synthetic construct; identical to SEQ ID NO: 2634
  source 1..80: mol_type = other DNA

SEQ ID NO: 187365 - DNA, 80 bp, synthetic construct; identical to SEQ ID NO: 2635
  source 1..80: mol_type = other DNA

SEQ ID NO: 187366 - DNA, 80 bp, synthetic construct; identical to SEQ ID NO: 2636
  source 1..80: mol_type = other DNA

SEQ ID NO: 187367 - DNA, 80 bp, synthetic construct; identical to SEQ ID NO: 2637
  source 1..80: mol_type = other DNA

SEQ ID NO: 187368 - DNA, 80 bp, synthetic construct; identical to SEQ ID NO: 2638
  source 1..80: mol_type = other DNA

SEQ ID NO: 187369 - DNA, 80 bp, synthetic construct; identical to SEQ ID NO: 2639
  source 1..80: mol_type = other DNA

SEQ ID NO: 187370 - DNA, 80 bp, synthetic construct; identical to SEQ ID NO: 2640
  source 1..80: mol_type = other DNA

SEQ ID NO: 187371 - DNA, 80 bp, synthetic construct; identical to SEQ ID NO: 2641
  source 1..80: mol_type = other DNA

SEQ ID NO: 187372 - DNA, 80 bp, synthetic construct; identical to SEQ ID NO: 2642
  source 1..80: mol_type = other DNA

SEQ ID NO: 187373 - DNA, 80 bp, synthetic construct; identical to SEQ ID NO: 2643
  source 1..80: mol_type = other DNA

SEQ ID NO: 187374 - DNA, 80 bp, synthetic construct; identical to SEQ ID NO: 2644
  source 1..80: mol_type = other DNA

SEQ ID NO: 187375 - DNA, 80 bp, synthetic construct; identical to SEQ ID NO: 2645
  source 1..80: mol_type = other DNA

SEQ ID NO: 187376 - DNA, 80 bp, synthetic construct; identical to SEQ ID NO: 2646
  source 1..80: mol_type = other DNA

SEQ ID NO: 187377 - DNA, 80 bp, synthetic construct; identical to SEQ ID NO: 2647
  source 1..80: mol_type = other DNA

SEQ ID NO: 187378 - DNA, 80 bp, synthetic construct; identical to SEQ ID NO: 2648
  source 1..80: mol_type = other DNA

SEQ ID NO: 187379 - DNA, 80 bp, synthetic construct; identical to SEQ ID NO: 2649
  source 1..80: mol_type = other DNA

SEQ ID NO: 187380 - DNA, 80 bp, synthetic construct; identical to SEQ ID NO: 2650
  source 1..80: mol_type = other DNA

SEQ ID NO: 187381 - DNA, 80 bp, synthetic construct; identical to SEQ ID NO: 2651
  source 1..80: mol_type = other DNA

SEQ ID NO: 187382 - DNA, 80 bp, synthetic construct; identical to SEQ ID NO: 2652
  source 1..80: mol_type = other DNA

SEQ ID NO: 187383 - DNA, 80 bp, synthetic construct; identical to SEQ ID NO: 2653
  source 1..80: mol_type = other DNA

SEQ ID NO: 187384 - DNA, 80 bp, synthetic construct; identical to SEQ ID NO: 2654
  source 1..80: mol_type = other DNA

SEQ ID NO: 187385 - DNA, 80 bp, synthetic construct; identical to SEQ ID NO: 2655
  source 1..80: mol_type = other DNA

SEQ ID NO: 187386 - DNA, 80 bp, synthetic construct; identical to SEQ ID NO: 2656
  source 1..80: mol_type = other DNA

SEQ ID NO: 187387 - DNA, 80 bp, synthetic construct; identical to SEQ ID NO: 2657
  source 1..80: mol_type = other DNA

SEQ ID NO: 187388 - DNA, 80 bp, synthetic construct; identical to SEQ ID NO: 2658
  source 1..80: mol_type = other DNA

SEQ ID NO: 187389 - DNA, 80 bp, synthetic construct; identical to SEQ ID NO: 2659
  source 1..80: mol_type = other DNA

SEQ ID NO: 187390 - DNA, 80 bp, synthetic construct; identical to SEQ ID NO: 2660
  source 1..80: mol_type = other DNA

SEQ ID NO: 187391 - DNA, 80 bp, synthetic construct; identical to SEQ ID NO: 2661
  source 1..80: mol_type = other DNA

SEQ ID NO: 187392 - DNA, 80 bp, synthetic construct; identical to SEQ ID NO: 2662
  source 1..80: mol_type = other DNA

SEQ ID NO: 187393 - DNA, 80 bp, synthetic construct; identical to SEQ ID NO: 2663
  source 1..80: mol_type = other DNA

SEQ ID NO: 187394 - DNA, 80 bp, synthetic construct; identical to SEQ ID NO: 2664
  source 1..80: mol_type = other DNA

SEQ ID NO: 187395 - DNA, 80 bp, synthetic construct; identical to SEQ ID NO: 2665
  source 1..80: mol_type = other DNA

SEQ ID NO: 187396 - DNA, 80 bp, synthetic construct; identical to SEQ ID NO: 2666
  source 1..80: mol_type = other DNA

SEQ ID NO: 187397 - DNA, 80 bp, synthetic construct; identical to SEQ ID NO: 2667
  source 1..80: mol_type = other DNA

SEQ ID NO: 187398 - DNA, 80 bp, synthetic construct; identical to SEQ ID NO: 2668
  source 1..80: mol_type = other DNA

SEQ ID NO: 187399 - DNA, 80 bp, synthetic construct; identical to SEQ ID NO: 2669
  source 1..80: mol_type = other DNA

SEQ ID NO: 187400 - DNA, 80 bp, synthetic construct; identical to SEQ ID NO: 2670
  source 1..80: mol_type = other DNA

SEQ ID NO: 187401 - DNA, 80 bp, synthetic construct; identical to SEQ ID NO: 2671
  source 1..80: mol_type = other DNA

SEQ ID NO: 187402 - DNA, 80 bp, synthetic construct; identical to SEQ ID NO: 2672
  source 1..80: mol_type = other DNA

SEQ ID NO: 187403 - DNA, 80 bp, synthetic construct; identical to SEQ ID NO: 2673
  source 1..80: mol_type = other DNA

SEQ ID NO: 187404 - DNA, 80 bp, synthetic construct; identical to SEQ ID NO: 2674
  source 1..80: mol_type = other DNA

SEQ ID NO: 187405 - DNA, 80 bp, synthetic construct; identical to SEQ ID NO: 2675
  source 1..80: mol_type = other DNA

SEQ ID NO: 187406 - DNA, 80 bp, synthetic construct; identical to SEQ ID NO: 2676
  source 1..80: mol_type = other DNA

SEQ ID NO: 187407 - DNA, 80 bp, synthetic construct; identical to SEQ ID NO: 2677
  source 1..80: mol_type = other DNA

SEQ ID NO: 187408 - DNA, 80 bp, synthetic construct; identical to SEQ ID NO: 2678
  source 1..80: mol_type = other DNA

SEQ ID NO: 187409 - DNA, 80 bp, synthetic construct; identical to SEQ ID NO: 2679
  source 1..80: mol_type = other DNA

SEQ ID NO: 187410 - DNA, 80 bp, synthetic construct; identical to SEQ ID NO: 2680
  source 1..80: mol_type = other DNA

SEQ ID NO: 187411 - DNA, 80 bp, synthetic construct; identical to SEQ ID NO: 2681
  source 1..80: mol_type = other DNA

SEQ ID NO: 187412 - DNA, 80 bp, synthetic construct; identical to SEQ ID NO: 2682
  source 1..80: mol_type = other DNA

SEQ ID NO: 187413 - DNA, 80 bp, synthetic construct; identical to SEQ ID NO: 2683
  source 1..80: mol_type = other DNA

SEQ ID NO: 187414 - DNA, 80 bp, synthetic construct; identical to SEQ ID NO: 2684
  source 1..80: mol_type = other DNA

SEQ ID NO: 187415 - DNA, 80 bp, synthetic construct; identical to SEQ ID NO: 2685
  source 1..80: mol_type = other DNA

SEQ ID NO: 187416 - DNA, 80 bp, synthetic construct; identical to SEQ ID NO: 2686
  source 1..80: mol_type = other DNA

SEQ ID NO: 187417 - DNA, 80 bp, synthetic construct; identical to SEQ ID NO: 2687
  source 1..80: mol_type = other DNA

SEQ ID NO: 187418 - DNA, 80 bp, synthetic construct; identical to SEQ ID NO: 2688
  source 1..80: mol_type = other DNA

SEQ ID NO: 187419 - DNA, 80 bp, synthetic construct; identical to SEQ ID NO: 2689
  source 1..80: mol_type = other DNA

SEQ ID NO: 187420 - DNA, 80 bp, synthetic construct; identical to SEQ ID NO: 2690
  source 1..80: mol_type = other DNA

SEQ ID NO: 187421 - DNA, 80 bp, synthetic construct; identical to SEQ ID NO: 2691
  source 1..80: mol_type = other DNA

SEQ ID NO: 187422 - DNA, 80 bp, synthetic construct; identical to SEQ ID NO: 2692
  source 1..80: mol_type = other DNA

SEQ ID NO: 187423 - DNA, 80 bp, synthetic construct; identical to SEQ ID NO: 2693
  source 1..80: mol_type = other DNA

SEQ ID NO: 187424 - DNA, 80 bp, synthetic construct; identical to SEQ ID NO: 2694
  source 1..80: mol_type = other DNA

SEQ ID NO: 187425 - DNA, 80 bp, synthetic construct; identical to SEQ ID NO: 2695
  source 1..80: mol_type = other DNA

SEQ ID NO: 187426 - DNA, 80 bp, synthetic construct; identical to SEQ ID NO: 2696
  source 1..80: mol_type = other DNA

SEQ ID NO: 187427 - DNA, 80 bp, synthetic construct; identical to SEQ ID NO: 2697
  source 1..80: mol_type = other DNA

SEQ ID NO: 187428 - DNA, 80 bp, synthetic construct; identical to SEQ ID NO: 2698
  source 1..80: mol_type = other DNA

SEQ ID NO: 187429 - DNA, 80 bp, synthetic construct; identical to SEQ ID NO: 2699
  source 1..80: mol_type = other DNA

SEQ ID NO: 187430 - DNA, 80 bp, synthetic construct; identical to SEQ ID NO: 2700
  source 1..80: mol_type = other DNA

SEQ ID NO: 187431 - DNA, 80 bp, synthetic construct; identical to SEQ ID NO: 2701
  source 1..80: mol_type = other DNA

SEQ ID NO: 187432 - DNA, 80 bp, synthetic construct; identical to SEQ ID NO: 2702
  source 1..80: mol_type = other DNA

SEQ ID NO: 187433 - DNA, 80 bp, synthetic construct; identical to SEQ ID NO: 2703
  source 1..80: mol_type = other DNA

SEQ ID NO: 187434 - DNA, 80 bp, synthetic construct; identical to SEQ ID NO: 2704
  source 1..80: mol_type = other DNA

SEQ ID NO: 187435 - DNA, 80 bp, synthetic construct; identical to SEQ ID NO: 2705
  source 1..80: mol_type = other DNA

SEQ ID NO: 187436 - DNA, 80 bp, synthetic construct; identical to SEQ ID NO: 2706
  source 1..80: mol_type = other DNA

SEQ ID NO: 187437 - DNA, 80 bp, synthetic construct; identical to SEQ ID NO: 2707
  source 1..80: mol_type = other DNA

SEQ ID NO: 187438 - DNA, 80 bp, synthetic construct; identical to SEQ ID NO: 2708
  source 1..80: mol_type = other DNA

SEQ ID NO: 187439 - DNA, 80 bp, synthetic construct; identical to SEQ ID NO: 2709
  source 1..80: mol_type = other DNA

SEQ ID NO: 187440 - DNA, 80 bp, synthetic construct; identical to SEQ ID NO: 2710
  source 1..80: mol_type = other DNA

SEQ ID NO: 187441 - DNA, 80 bp, synthetic construct; identical to SEQ ID NO: 2711
  source 1..80: mol_type = other DNA

SEQ ID NO: 187442 - DNA, 80 bp, synthetic construct; identical to SEQ ID NO: 2712
  source 1..80: mol_type = other DNA

SEQ ID NO: 187443 - DNA, 80 bp, synthetic construct; identical to SEQ ID NO: 2713
  source 1..80: mol_type = other DNA

SEQ ID NO: 187444 - DNA, 80 bp, synthetic construct; identical to SEQ ID NO: 2714
  source 1..80: mol_type = other DNA

SEQ ID NO: 187445 - DNA, 80 bp, synthetic construct; identical to SEQ ID NO: 2715
  source 1..80: mol_type = other DNA

SEQ ID NO: 187446 - DNA, 80 bp, synthetic construct; identical to SEQ ID NO: 2716
  source 1..80: mol_type = other DNA

SEQ ID NO: 187447 - DNA, 80 bp, synthetic construct; identical to SEQ ID NO: 2717
  source 1..80: mol_type = other DNA

SEQ ID NO: 187448 - DNA, 80 bp, synthetic construct; identical to SEQ ID NO: 2718
  source 1..80: mol_type = other DNA

SEQ ID NO: 187449 - DNA, 80 bp, synthetic construct; identical to SEQ ID NO: 2719
  source 1..80: mol_type = other DNA

SEQ ID NO: 187450 - DNA, 80 bp, synthetic construct; identical to SEQ ID NO: 2720
  source 1..80: mol_type = other DNA

SEQ ID NO: 187451 - DNA, 80 bp, synthetic construct; identical to SEQ ID NO: 2721
  source 1..80: mol_type = other DNA

SEQ ID NO: 187452 - DNA, 80 bp, synthetic construct; identical to SEQ ID NO: 2722
  source 1..80: mol_type = other DNA

SEQ ID NO: 187453 - DNA, 80 bp, synthetic construct; identical to SEQ ID NO: 2723
  source 1..80: mol_type = other DNA

SEQ ID NO: 187454 - DNA, 80 bp, synthetic construct; identical to SEQ ID NO: 2724
  source 1..80: mol_type = other DNA

SEQ ID NO: 187455 - DNA, 80 bp, synthetic construct; identical to SEQ ID NO: 2725
  source 1..80: mol_type = other DNA

SEQ ID NO: 187456 - DNA, 80 bp, synthetic construct; identical to SEQ ID NO: 2726
  source 1..80: mol_type = other DNA

SEQ ID NO: 187457 - DNA, 80 bp, synthetic construct; identical to SEQ ID NO: 2727
  source 1..80: mol_type = other DNA

SEQ ID NO: 187458 - DNA, 80 bp, synthetic construct; identical to SEQ ID NO: 2728
  source 1..80: mol_type = other DNA

SEQ ID NO: 187459 - DNA, 80 bp, synthetic construct; identical to SEQ ID NO: 2729
  source 1..80: mol_type = other DNA

SEQ ID NO: 187460 - DNA, 80 bp, synthetic construct; identical to SEQ ID NO: 2730
  source 1..80: mol_type = other DNA

SEQ ID NO: 187461 - DNA, 80 bp, synthetic construct; identical to SEQ ID NO: 2731
  source 1..80: mol_type = other DNA

SEQ ID NO: 187462 - DNA, 80 bp, synthetic construct; identical to SEQ ID NO: 2732
  source 1..80: mol_type = other DNA

SEQ ID NO: 187463 - DNA, 80 bp, synthetic construct; identical to SEQ ID NO: 2733
  source 1..80: mol_type = other DNA

SEQ ID NO: 187464 - DNA, 80 bp, synthetic construct; identical to SEQ ID NO: 2734
  source 1..80: mol_type = other DNA

SEQ ID NO: 187465 - DNA, 80 bp, synthetic construct; identical to SEQ ID NO: 2735
  source 1..80: mol_type = other DNA

SEQ ID NO: 187466 - DNA, 80 bp, synthetic construct; identical to SEQ ID NO: 2736
  source 1..80: mol_type = other DNA

SEQ ID NO: 187467 - DNA, 80 bp, synthetic construct; identical to SEQ ID NO: 2737
  source 1..80: mol_type = other DNA

SEQ ID NO: 187468 - DNA, 80 bp, synthetic construct; identical to SEQ ID NO: 2738
  source 1..80: mol_type = other DNA

SEQ ID NO: 187469 - DNA, 80 bp, synthetic construct; identical to SEQ ID NO: 2739
  source 1..80: mol_type = other DNA

SEQ ID NO: 187470 - DNA, 80 bp, synthetic construct; identical to SEQ ID NO: 2740
  source 1..80: mol_type = other DNA

SEQ ID NO: 187471 - DNA, 80 bp, synthetic construct; identical to SEQ ID NO: 2741
  source 1..80: mol_type = other DNA

SEQ ID NO: 187472 - DNA, 80 bp, synthetic construct; identical to SEQ ID NO: 2742
  source 1..80: mol_type = other DNA

SEQ ID NO: 187473 - DNA, 80 bp, synthetic construct; identical to SEQ ID NO: 2743
  source 1..80: mol_type = other DNA

SEQ ID NO: 187474 - DNA, 80 bp, synthetic construct; identical to SEQ ID NO: 2744
  source 1..80: mol_type = other DNA

SEQ ID NO: 187475 - DNA, 80 bp, synthetic construct; identical to SEQ ID NO: 2745
  source 1..80: mol_type = other DNA

SEQ ID NO: 187476 - DNA, 80 bp, synthetic construct; identical to SEQ ID NO: 2746
  source 1..80: mol_type = other DNA

SEQ ID NO: 187477 - DNA, 80 bp, synthetic construct; identical to SEQ ID NO: 2747
  source 1..80: mol_type = other DNA

SEQ ID NO: 187478 - DNA, 80 bp, synthetic construct; identical to SEQ ID NO: 2748
  source 1..80: mol_type = other DNA

SEQ ID NO: 187479 - DNA, 80 bp, synthetic construct; identical to SEQ ID NO: 2749
  source 1..80: mol_type = other DNA

SEQ ID NO: 187480 - DNA, 80 bp, synthetic construct; identical to SEQ ID NO: 2750
  source 1..80: mol_type = other DNA

SEQ ID NO: 187481 - DNA, 80 bp, synthetic construct; identical to SEQ ID NO: 2751
  source 1..80: mol_type = other DNA

SEQ ID NO: 187482 - DNA, 80 bp, synthetic construct; identical to SEQ ID NO: 2752
  source 1..80: mol_type = other DNA

SEQ ID NO: 187483 - DNA, 80 bp, synthetic construct; identical to SEQ ID NO: 2753
  source 1..80: mol_type = other DNA

SEQ ID NO: 187484 - DNA, 80 bp, synthetic construct; identical to SEQ ID NO: 2754
  source 1..80: mol_type = other DNA

SEQ ID NO: 187485 - DNA, 80 bp, synthetic construct; identical to SEQ ID NO: 2755
  source 1..80: mol_type = other DNA

SEQ ID NO: 187486 - DNA, 80 bp, synthetic construct; identical to SEQ ID NO: 2756
  source 1..80: mol_type = other DNA

SEQ ID NO: 187487 - DNA, 80 bp, synthetic construct; identical to SEQ ID NO: 2757
  source 1..80: mol_type = other DNA

SEQ ID NO: 187488 - DNA, 80 bp, synthetic construct; identical to SEQ ID NO: 2758
  source 1..80: mol_type = other DNA

SEQ ID NO: 187489 - DNA, 80 bp, synthetic construct; identical to SEQ ID NO: 2759
  source 1..80: mol_type = other DNA

SEQ ID NO: 187490 - DNA, 80 bp, synthetic construct; identical to SEQ ID NO: 2760
  source 1..80: mol_type = other DNA

SEQ ID NO: 187491 - DNA, 80 bp, synthetic construct; identical to SEQ ID NO: 2761
  source 1..80: mol_type = other DNA

SEQ ID NO: 187492 - DNA, 80 bp, synthetic construct; identical to SEQ ID NO: 2762
  source 1..80: mol_type = other DNA

SEQ ID NO: 187493 - DNA, 80 bp, synthetic construct; identical to SEQ ID NO: 2763
  source 1..80: mol_type = other DNA

SEQ ID NO: 187494 - DNA, 80 bp, synthetic construct; identical to SEQ ID NO: 2764
  source 1..80: mol_type = other DNA

SEQ ID NO: 187495 - DNA, 80 bp, synthetic construct; identical to SEQ ID NO: 2765
  source 1..80: mol_type = other DNA

SEQ ID NO: 187496 - DNA, 80 bp, synthetic construct; identical to SEQ ID NO: 2766
  source 1..80: mol_type = other DNA

SEQ ID NO: 187497 - DNA, 80 bp, synthetic construct; identical to SEQ ID NO: 2767
  source 1..80: mol_type = other DNA

SEQ ID NO: 187498 - DNA, 80 bp, synthetic construct; identical to SEQ ID NO: 2768
  source 1..80: mol_type = other DNA

SEQ ID NO: 187499 - DNA, 80 bp, synthetic construct; identical to SEQ ID NO: 2769
  source 1..80: mol_type = other DNA

SEQ ID NO: 187500 - DNA, 80 bp, synthetic construct; identical to SEQ ID NO: 2770
  source 1..80: mol_type = other DNA

SEQ ID NO: 187501 - DNA, 80 bp, synthetic construct; identical to SEQ ID NO: 2771
  source 1..80: mol_type = other DNA

SEQ ID NO: 187502 - DNA, 80 bp, synthetic construct; identical to SEQ ID NO: 2772
  source 1..80: mol_type = other DNA

SEQ ID NO: 187503 - DNA, 80 bp, synthetic construct; identical to SEQ ID NO: 2773
  source 1..80: mol_type = other DNA

SEQ ID NO: 187504 - DNA, 80 bp, synthetic construct; identical to SEQ ID NO: 2774
  source 1..80: mol_type = other DNA

SEQ ID NO: 187505 - DNA, 80 bp, synthetic construct; identical to SEQ ID NO: 2775
  source 1..80: mol_type = other DNA

SEQ ID NO: 187506 - DNA, 80 bp, synthetic construct; identical to SEQ ID NO: 2776
  source 1..80: mol_type = other DNA

SEQ ID NO: 187507 - DNA, 80 bp, synthetic construct; identical to SEQ ID NO: 2777
  source 1..80: mol_type = other DNA

SEQ ID NO: 187508 - DNA, 80 bp, synthetic construct; identical to SEQ ID NO: 2778
  source 1..80: mol_type = other DNA

SEQ ID NO: 187509 - DNA, 80 bp, synthetic construct; identical to SEQ ID NO: 2779
  source 1..80: mol_type = other DNA

SEQ ID NO: 187510 - DNA, 80 bp, synthetic construct; identical to SEQ ID NO: 2780
  source 1..80: mol_type = other DNA

SEQ ID NO: 187511 - DNA, 80 bp, synthetic construct; identical to SEQ ID NO: 2781
  source 1..80: mol_type = other DNA

SEQ ID NO: 187512 - DNA, 80 bp, synthetic construct; identical to SEQ ID NO: 2782
  source 1..80: mol_type = other DNA

SEQ ID NO: 187513 - DNA, 80 bp, synthetic construct; identical to SEQ ID NO: 2783
  source 1..80: mol_type = other DNA

SEQ ID NO: 187514 - DNA, 80 bp, synthetic construct; identical to SEQ ID NO: 2784
  source 1..80: mol_type = other DNA

SEQ ID NO: 187515 - DNA, 80 bp, synthetic construct; identical to SEQ ID NO: 2785
  source 1..80: mol_type = other DNA

SEQ ID NO: 187516 - DNA, 80 bp, synthetic construct; identical to SEQ ID NO: 2786
  source 1..80: mol_type = other DNA

SEQ ID NO: 187517 - DNA, 80 bp, synthetic construct; identical to SEQ ID NO: 2787
  source 1..80: mol_type = other DNA

SEQ ID NO: 187518 - DNA, 80 bp, synthetic construct; identical to SEQ ID NO: 2788
  source 1..80: mol_type = other DNA

SEQ ID NO: 187519 - DNA, 80 bp, synthetic construct; identical to SEQ ID NO: 2789
  source 1..80: mol_type = other DNA

SEQ ID NO: 187520 - DNA, 80 bp, synthetic construct; identical to SEQ ID NO: 2790
  source 1..80: mol_type = other DNA

SEQ ID NO: 187521 - DNA, 80 bp, synthetic construct; identical to SEQ ID NO: 2791
  source 1..80: mol_type = other DNA

SEQ ID NO: 187522 - DNA, 80 bp, synthetic construct; identical to SEQ ID NO: 2792
  source 1..80: mol_type = other DNA

SEQ ID NO: 187523 - DNA, 80 bp, synthetic construct; identical to SEQ ID NO: 2793
  source 1..80: mol_type = other DNA

SEQ ID NO: 187524 - DNA, 80 bp, synthetic construct; identical to SEQ ID NO: 2794
  source 1..80: mol_type = other DNA

SEQ ID NO: 187525 - DNA, 80 bp, synthetic construct; identical to SEQ ID NO: 2795
  source 1..80: mol_type = other DNA

SEQ ID NO: 187526 - DNA, 80 bp, synthetic construct; identical to SEQ ID NO: 2796
  source 1..80: mol_type = other DNA

SEQ ID NO: 187527 - DNA, 80 bp, synthetic construct; identical to SEQ ID NO: 2797
  source 1..80: mol_type = other DNA

SEQ ID NO: 187528 - DNA, 80 bp, synthetic construct; identical to SEQ ID NO: 2798
  source 1..80: mol_type = other DNA

SEQ ID NO: 187529 - DNA, 80 bp, synthetic construct; identical to SEQ ID NO: 2799
  source 1..80: mol_type = other DNA

SEQ ID NO: 187530 - DNA, 80 bp, synthetic construct; identical to SEQ ID NO: 2800
  source 1..80: mol_type = other DNA

SEQ ID NO: 187531 - DNA, 80 bp, synthetic construct; identical to SEQ ID NO: 2801
  source 1..80: mol_type = other DNA

SEQ ID NO: 187532 - DNA, 80 bp, synthetic construct; identical to SEQ ID NO: 2802
  source 1..80: mol_type = other DNA

SEQ ID NO: 187533 - DNA, 80 bp, synthetic construct; identical to SEQ ID NO: 2803
  source 1..80: mol_type = other DNA

SEQ ID NO: 187534 - DNA, 80 bp, synthetic construct; identical to SEQ ID NO: 2804
  source 1..80: mol_type = other DNA

SEQ ID NO: 187535 - DNA, 80 bp, synthetic construct; identical to SEQ ID NO: 2805
  source 1..80: mol_type = other DNA

SEQ ID NO: 187536 - DNA, 80 bp, synthetic construct; identical to SEQ ID NO: 2806
  source 1..80: mol_type = other DNA

SEQ ID NO: 187537 - DNA, 80 bp, synthetic construct; identical to SEQ ID NO: 2807
  source 1..80: mol_type = other DNA

SEQ ID NO: 187538 - DNA, 80 bp, synthetic construct; identical to SEQ ID NO: 2808
  source 1..80: mol_type = other DNA

SEQ ID NO: 187539 - DNA, 80 bp, synthetic construct; identical to SEQ ID NO: 2809
  source 1..80: mol_type = other DNA

SEQ ID NO: 187540 - DNA, 80 bp, synthetic construct; identical to SEQ ID NO: 2810
  source 1..80: mol_type = other DNA

SEQ ID NO: 187541 - DNA, 80 bp, synthetic construct; identical to SEQ ID NO: 2811
  source 1..80: mol_type = other DNA

SEQ ID NO: 187542 - DNA, 80 bp, synthetic construct; identical to SEQ ID NO: 2812
  source 1..80: mol_type = other DNA

SEQ ID NO: 187543 - DNA, 80 bp, synthetic construct; identical to SEQ ID NO: 2813
  source 1..80: mol_type = other DNA

SEQ ID NO: 187544 - DNA, 80 bp, synthetic construct; identical to SEQ ID NO: 2814
  source 1..80: mol_type = other DNA

SEQ ID NO: 187545 - DNA, 80 bp, synthetic construct; identical to SEQ ID NO: 2815
  source 1..80: mol_type = other DNA

SEQ ID NO: 187546 - DNA, 80 bp, synthetic construct; identical to SEQ ID NO: 2816
  source 1..80: mol_type = other DNA

SEQ ID NO: 187547 - DNA, 80 bp, synthetic construct; identical to SEQ ID NO: 2817
  source 1..80: mol_type = other DNA

SEQ ID NO: 187548 - DNA, 80 bp, synthetic construct; identical to SEQ ID NO: 2818
  source 1..80: mol_type = other DNA

SEQ ID NO: 187549 - DNA, 80 bp, synthetic construct; identical to SEQ ID NO: 2819
  source 1..80: mol_type = other DNA

SEQ ID NO: 187550 - DNA, 80 bp, synthetic construct; identical to SEQ ID NO: 2820
  source 1..80: mol_type = other DNA

SEQ ID NO: 187551 - DNA, 80 bp, synthetic construct; identical to SEQ ID NO: 2821
  source 1..80: mol_type = other DNA

SEQ ID NO: 187552 - DNA, 80 bp, synthetic construct; identical to SEQ ID NO: 2822
  source 1..80: mol_type = other DNA

SEQ ID NO: 187553 - DNA, 80 bp, synthetic construct; identical to SEQ ID NO: 2823
  source 1..80: mol_type = other DNA

SEQ ID NO: 187554 - DNA, 80 bp, synthetic construct; identical to SEQ ID NO: 2824
  source 1..80: mol_type = other DNA

SEQ ID NO: 187555 - DNA, 80 bp, synthetic construct; identical to SEQ ID NO: 2825
  source 1..80: mol_type = other DNA

SEQ ID NO: 187556 - DNA, 80 bp, synthetic construct; identical to SEQ ID NO: 2826
  source 1..80: mol_type = other DNA

SEQ ID NO: 187557 - DNA, 80 bp, synthetic construct; identical to SEQ ID NO: 2827
  source 1..80: mol_type = other DNA

SEQ ID NO: 187558 - DNA, 80 bp, synthetic construct; identical to SEQ ID NO: 2828
  source 1..80: mol_type = other DNA

SEQ ID NO: 187559 - DNA, 80 bp, synthetic construct; identical to SEQ ID NO: 2829
  source 1..80: mol_type = other DNA

SEQ ID NO: 187560 - DNA, 80 bp, synthetic construct; identical to SEQ ID NO: 2830
  source 1..80: mol_type = other DNA

SEQ ID NO: 187561 - DNA, 80 bp, synthetic construct; identical to SEQ ID NO: 2831
  source 1..80: mol_type = other DNA

SEQ ID NO: 187562 - DNA, 80 bp, synthetic construct; identical to SEQ ID NO: 2832
  source 1..80: mol_type = other DNA

SEQ ID NO: 187563 - DNA, 80 bp, synthetic construct; identical to SEQ ID NO: 2833
  source 1..80: mol_type = other DNA

SEQ ID NO: 187564 - DNA, 80 bp, synthetic construct; identical to SEQ ID NO: 2834
  source 1..80: mol_type = other DNA

SEQ ID NO: 187565 - DNA, 80 bp, synthetic construct; identical to SEQ ID NO: 2835
  source 1..80: mol_type = other DNA

SEQ ID NO: 187566 - DNA, 80 bp, synthetic construct; identical to SEQ ID NO: 2836
  source 1..80: mol_type = other DNA

SEQ ID NO: 187567 - DNA, 80 bp, synthetic construct; identical to SEQ ID NO: 2837
  source 1..80: mol_type = other DNA

SEQ ID NO: 187568 - DNA, 80 bp, synthetic construct; identical to SEQ ID NO: 2838
  source 1..80: mol_type = other DNA

SEQ ID NO: 187569 - DNA, 80 bp, synthetic construct; identical to SEQ ID NO: 2839
  source 1..80: mol_type = other DNA

SEQ ID NO: 187570 - DNA, 80 bp, synthetic construct; identical to SEQ ID NO: 2840
  source 1..80: mol_type = other DNA

SEQ ID NO: 187571 - DNA, 80 bp, synthetic construct; identical to SEQ ID NO: 2841
  source 1..80: mol_type = other DNA

SEQ ID NO: 187572 - DNA, 80 bp, synthetic construct; identical to SEQ ID NO: 2842
  source 1..80: mol_type = other DNA

SEQ ID NO: 187573 - DNA, 80 bp, synthetic construct; identical to SEQ ID NO: 2843
  source 1..80: mol_type = other DNA

SEQ ID NO: 187574 - DNA, 80 bp, synthetic construct; identical to SEQ ID NO: 2844
  source 1..80: mol_type = other DNA

SEQ ID NO: 187575 - DNA, 80 bp, synthetic construct; identical to SEQ ID NO: 2845
  source 1..80: mol_type = other DNA

SEQ ID NO: 187576 - DNA, 80 bp, synthetic construct; identical to SEQ ID NO: 2846
  source 1..80: mol_type = other DNA

SEQ ID NO: 187577 - DNA, 80 bp, synthetic construct; identical to SEQ ID NO: 2847
  source 1..80: mol_type = other DNA

SEQ ID NO: 187578 - DNA, 80 bp, synthetic construct; identical to SEQ ID NO: 2848
  source 1..80: mol_type = other DNA

SEQ ID NO: 187579 - DNA, 80 bp, synthetic construct; identical to SEQ ID NO: 2849
  source 1..80: mol_type = other DNA

SEQ ID NO: 187580 - DNA, 80 bp, synthetic construct; identical to SEQ ID NO: 2850
  source 1..80: mol_type = other DNA

SEQ ID NO: 187581 - DNA, 80 bp, synthetic construct; identical to SEQ ID NO: 2851
  source 1..80: mol_type = other DNA

SEQ ID NO: 187582 - DNA, 80 bp, synthetic construct; identical to SEQ ID NO: 2852
  source 1..80: mol_type = other DNA

SEQ ID NO: 187583 - DNA, 80 bp, synthetic construct; identical to SEQ ID NO: 2853
  source 1..80: mol_type = other DNA

SEQ ID NO: 187584 - DNA, 80 bp, synthetic construct; identical to SEQ ID NO: 2854
  source 1..80: mol_type = other DNA

SEQ ID NO: 187585 - DNA, 80 bp, synthetic construct; identical to SEQ ID NO: 2855
  source 1..80: mol_type = other DNA

SEQ ID NO: 187586 - DNA, 80 bp, synthetic construct; identical to SEQ ID NO: 2856
  source 1..80: mol_type = other DNA

SEQ ID NO: 187587 - DNA, 80 bp, synthetic construct; identical to SEQ ID NO: 2857
  source 1..80: mol_type = other DNA

SEQ ID NO: 187588 - DNA, 80 bp, synthetic construct; identical to SEQ ID NO: 2858
  source 1..80: mol_type = other DNA

SEQ ID NO: 187589 - DNA, 80 bp, synthetic construct; identical to SEQ ID NO: 2859
  source 1..80: mol_type = other DNA

SEQ ID NO: 187590 - DNA, 80 bp, synthetic construct; identical to SEQ ID NO: 2860
  source 1..80: mol_type = other DNA

SEQ ID NO: 187591 - DNA, 80 bp, synthetic construct; identical to SEQ ID NO: 2861
  source 1..80: mol_type = other DNA

SEQ ID NO: 187592 - DNA, 80 bp, synthetic construct; identical to SEQ ID NO: 2862
  source 1..80: mol_type = other DNA

SEQ ID NO: 187593 - DNA, 80 bp, synthetic construct; identical to SEQ ID NO: 2863
  source 1..80: mol_type = other DNA

SEQ ID NO: 187594 - DNA, 80 bp, synthetic construct; identical to SEQ ID NO: 2864
  source 1..80: mol_type = other DNA

SEQ ID NO: 187595 - DNA, 80 bp, synthetic construct; identical to SEQ ID NO: 2865
  source 1..80: mol_type = other DNA

SEQ ID NO: 187596 - DNA, 80 bp, synthetic construct; identical to SEQ ID NO: 2866
  source 1..80: mol_type = other DNA

SEQ ID NO: 187597 - DNA, 80 bp, synthetic construct; identical to SEQ ID NO: 2867
  source 1..80: mol_type = other DNA

SEQ ID NO: 187598 - DNA, 80 bp, synthetic construct; identical to SEQ ID NO: 2868
  source 1..80: mol_type = other DNA

SEQ ID NO: 187599 - DNA, 80 bp, synthetic construct; identical to SEQ ID NO: 2869
  source 1..80: mol_type = other DNA

SEQ ID NO: 187600 - DNA, 80 bp, synthetic construct; identical to SEQ ID NO: 2870
  source 1..80: mol_type = other DNA

SEQ ID NO: 187601 - DNA, 80 bp, synthetic construct; identical to SEQ ID NO: 2871
  source 1..80: mol_type = other DNA

SEQ ID NO: 187602 - DNA, 80 bp, synthetic construct; identical to SEQ ID NO: 2872
  source 1..80: mol_type = other DNA

SEQ ID NO: 187603 - DNA, 80 bp, synthetic construct; identical to SEQ ID NO: 2873
  source 1..80: mol_type = other DNA

SEQ ID NO: 187604 - DNA, 80 bp, synthetic construct; identical to SEQ ID NO: 2874
  source 1..80: mol_type = other DNA

SEQ ID NO: 187605 - DNA, 80 bp, synthetic construct; identical to SEQ ID NO: 2875
  source 1..80: mol_type = other DNA

SEQ ID NO: 187606 - DNA, 80 bp, synthetic construct; identical to SEQ ID NO: 2876
  source 1..80: mol_type = other DNA

SEQ ID NO: 187607 - DNA, 80 bp, synthetic construct; identical to SEQ ID NO: 2877
  source 1..80: mol_type = other DNA

SEQ ID NO: 187608 - DNA, 80 bp, synthetic construct; identical to SEQ ID NO: 2878
  source 1..80: mol_type = other DNA

SEQ ID NO: 187609 - DNA, 80 bp, synthetic construct; identical to SEQ ID NO: 2879
  source 1..80: mol_type = other DNA

SEQ ID NO: 187610 - DNA, 80 bp, synthetic construct; identical to SEQ ID NO: 2880
  source 1..80: mol_type = other DNA

SEQ ID NO: 187611 - DNA, 80 bp, synthetic construct; identical to SEQ ID NO: 2881
  source 1..80: mol_type = other DNA

SEQ ID NO: 187612 - DNA, 80 bp, synthetic construct; identical to SEQ ID NO: 2882
  source 1..80: mol_type = other DNA

SEQ ID NO: 187613 - DNA, 80 bp, synthetic construct; identical to SEQ ID NO: 2883
  source 1..80: mol_type = other DNA

SEQ ID NO: 187614 - DNA, 80 bp, synthetic construct; identical to SEQ ID NO: 2884
  source 1..80: mol_type = other DNA

SEQ ID NO: 187615 - DNA, 80 bp, synthetic construct; identical to SEQ ID NO: 2885
  source 1..80: mol_type = other DNA

SEQ ID NO: 187616 - DNA, 80 bp, synthetic construct; identical to SEQ ID NO: 2886
  source 1..80: mol_type = other DNA

SEQ ID NO: 187617 - DNA, 80 bp, synthetic construct; identical to SEQ ID NO: 2887
  source 1..80: mol_type = other DNA

SEQ ID NO: 187618 - DNA, 80 bp, synthetic construct; identical to SEQ ID NO: 2888
  source 1..80: mol_type = other DNA

SEQ ID NO: 187619 - DNA, 80 bp, synthetic construct; identical to SEQ ID NO: 2889
  source 1..80: mol_type = other DNA

SEQ ID NO: 187620 - DNA, 80 bp, synthetic construct; identical to SEQ ID NO: 2890
  source 1..80: mol_type = other DNA

SEQ ID NO: 187621 - DNA, 80 bp, synthetic construct; identical to SEQ ID NO: 2891
  source 1..80: mol_type = other DNA

SEQ ID NO: 187622 - DNA, 80 bp, synthetic construct; identical to SEQ ID NO: 2892
  source 1..80: mol_type = other DNA

SEQ ID NO: 187623 - DNA, 80 bp, synthetic construct; identical to SEQ ID NO: 2893
  source 1..80: mol_type = other DNA

SEQ ID NO: 187624 - DNA, 80 bp, synthetic construct; identical to SEQ ID NO: 2894
  source 1..80: mol_type = other DNA

SEQ ID NO: 187625 - DNA, 80 bp, synthetic construct; identical to SEQ ID NO: 2895
  source 1..80: mol_type = other DNA

SEQ ID NO: 187626 - DNA, 80 bp, synthetic construct; identical to SEQ ID NO: 2896
  source 1..80: mol_type = other DNA

SEQ ID NO: 187627 - DNA, 80 bp, synthetic construct; identical to SEQ ID NO: 2897
  source 1..80: mol_type = other DNA

SEQ ID NO: 187628 - DNA, 80 bp, synthetic construct; identical to SEQ ID NO: 2898
  source 1..80: mol_type = other DNA

SEQ ID NO: 187629 - DNA, 80 bp, synthetic construct; identical to SEQ ID NO: 2899
  source 1..80: mol_type = other DNA

SEQ ID NO: 187630 - DNA, 80 bp, synthetic construct; identical to SEQ ID NO: 2900
  source 1..80: mol_type = other DNA

SEQ ID NO: 187631 - DNA, 80 bp, synthetic construct; identical to SEQ ID NO: 2901
  source 1..80: mol_type = other DNA

SEQ ID NO: 187632 - DNA, 80 bp, synthetic construct; identical to SEQ ID NO: 2902
  source 1..80: mol_type = other DNA

SEQ ID NO: 187633 - DNA, 80 bp, synthetic construct; identical to SEQ ID NO: 2903
  source 1..80: mol_type = other DNA

SEQ ID NO: 187634 - DNA, 80 bp, synthetic construct; identical to SEQ ID NO: 2904
  source 1..80: mol_type = other DNA

SEQ ID NO: 187635 - DNA, 80 bp, synthetic construct; identical to SEQ ID NO: 2905
  source 1..80: mol_type = other DNA

SEQ ID NO: 187636 - DNA, 80 bp, synthetic construct; identical to SEQ ID NO: 2906
  source 1..80: mol_type = other DNA

SEQ ID NO: 187637 - DNA, 80 bp, synthetic construct; identical to SEQ ID NO: 2907
  source 1..80: mol_type = other DNA

SEQ ID NO: 187638 - DNA, 80 bp, synthetic construct; identical to SEQ ID NO: 2908
  source 1..80: mol_type = other DNA

SEQ ID NO: 187639 - DNA, 80 bp, synthetic construct; identical to SEQ ID NO: 2909
  source 1..80: mol_type = other DNA

SEQ ID NO: 187640 - DNA, 80 bp, synthetic construct; identical to SEQ ID NO: 2910
  source 1..80: mol_type = other DNA

SEQ ID NO: 187641 - DNA, 80 bp, synthetic construct; identical to SEQ ID NO: 2911
  source 1..80: mol_type = other DNA

SEQ ID NO: 187642 - DNA, 80 bp, synthetic construct; identical to SEQ ID NO: 2912
  source 1..80: mol_type = other DNA

SEQ ID NO: 187643 - DNA, 80 bp, synthetic construct; identical to SEQ ID NO: 2913
  source 1..80: mol_type = other DNA

SEQ ID NO: 187644 - DNA, 80 bp, synthetic construct; identical to SEQ ID NO: 2914
  source 1..80: mol_type = other DNA

SEQ ID NO: 187645 - DNA, 80 bp, synthetic construct; identical to SEQ ID NO: 2915
  source 1..80: mol_type = other DNA

SEQ ID NO: 187646 - DNA, 80 bp, synthetic construct; identical to SEQ ID NO: 2916
  source 1..80: mol_type = other DNA

SEQ ID NO: 187647 - DNA, 80 bp, synthetic construct; identical to SEQ ID NO: 2917
  source 1..80: mol_type = other DNA

SEQ ID NO: 187648 - DNA, 80 bp, synthetic construct; identical to SEQ ID NO: 2918
  source 1..80: mol_type = other DNA

SEQ ID NO: 187649 - DNA, 80 bp, synthetic construct; identical to SEQ ID NO: 2919
  source 1..80: mol_type = other DNA

SEQ ID NO: 187650 - DNA, 80 bp, synthetic construct; identical to SEQ ID NO: 2920
  source 1..80: mol_type = other DNA

SEQ ID NO: 187651 - DNA, 80 bp, synthetic construct; identical to SEQ ID NO: 2921
  source 1..80: mol_type = other DNA

SEQ ID NO: 187652 - DNA, 80 bp, synthetic construct; identical to SEQ ID NO: 2922
  source 1..80: mol_type = other DNA

SEQ ID NO: 187653 - DNA, 80 bp, synthetic construct; identical to SEQ ID NO: 2923
  source 1..80: mol_type = other DNA

SEQ ID NO: 187654 - DNA, 80 bp, synthetic construct; identical to SEQ ID NO: 2924
  source 1..80: mol_type = other DNA

SEQ ID NO: 187655 - DNA, 80 bp, synthetic construct; identical to SEQ ID NO: 2925
  source 1..80: mol_type = other DNA

SEQ ID NO: 187656 - DNA, 80 bp, synthetic construct; identical to SEQ ID NO: 2926
  source 1..80: mol_type = other DNA

SEQ ID NO: 187657 - DNA, 80 bp, synthetic construct; identical to SEQ ID NO: 2927
  source 1..80: mol_type = other DNA

SEQ ID NO: 187658 - DNA, 80 bp, synthetic construct; identical to SEQ ID NO: 2928
  source 1..80: mol_type = other DNA

SEQ ID NO: 187659 - DNA, 80 bp, synthetic construct; identical to SEQ ID NO: 2929
  source 1..80: mol_type = other DNA

SEQ ID NO: 187660 - DNA, 80 bp, synthetic construct; identical to SEQ ID NO: 2930
  source 1..80: mol_type = other DNA

SEQ ID NO: 187661 - DNA, 80 bp, synthetic construct; identical to SEQ ID NO: 2931
  source 1..80: mol_type = other DNA

SEQ ID NO: 187662 - DNA, 80 bp, synthetic construct; identical to SEQ ID NO: 2932
  source 1..80: mol_type = other DNA

SEQ ID NO: 187663 - DNA, 80 bp, synthetic construct; identical to SEQ ID NO: 2933
  source 1..80: mol_type = other DNA

SEQ ID NO: 187664 - DNA, 80 bp, synthetic construct; identical to SEQ ID NO: 2934
  source 1..80: mol_type = other DNA

SEQ ID NO: 187665 - DNA, 80 bp, synthetic construct; identical to SEQ ID NO: 2935
  source 1..80: mol_type = other DNA

SEQ ID NO: 187666 - DNA, 80 bp, synthetic construct; identical to SEQ ID NO: 2936
  source 1..80: mol_type = other DNA

SEQ ID NO: 187667 - DNA, 80 bp, synthetic construct; identical to SEQ ID NO: 2937
  source 1..80: mol_type = other DNA

SEQ ID NO: 187668 - DNA, 80 bp, synthetic construct; identical to SEQ ID NO: 2938
  source 1..80: mol_type = other DNA

SEQ ID NO: 187669 - DNA, 80 bp, synthetic construct; identical to SEQ ID NO: 2939
  source 1..80: mol_type = other DNA

SEQ ID NO: 187670 - DNA, 80 bp, synthetic construct; identical to SEQ ID NO: 2940
  source 1..80: mol_type = other DNA

SEQ ID NO: 187671 - DNA, 80 bp, synthetic construct; identical to SEQ ID NO: 2941
  source 1..80: mol_type = other DNA

SEQ ID NO: 187672 - DNA, 80 bp, synthetic construct; identical to SEQ ID NO: 2942
  source 1..80: mol_type = other DNA

SEQ ID NO: 187673 - DNA, 80 bp, synthetic construct; identical to SEQ ID NO: 2943
  source 1..80: mol_type = other DNA

SEQ ID NO: 187674 - DNA, 80 bp, synthetic construct; identical to SEQ ID NO: 2944
  source 1..80: mol_type = other DNA

SEQ ID NO: 187675 - DNA, 80 bp, synthetic construct; identical to SEQ ID NO: 2945
  source 1..80: mol_type = other DNA

SEQ ID NO: 187676 - DNA, 80 bp, synthetic construct; identical to SEQ ID NO: 2946
  source 1..80: mol_type = other DNA

SEQ ID NO: 187677 - DNA, 80 bp, synthetic construct; identical to SEQ ID NO: 2947
  source 1..80: mol_type = other DNA

SEQ ID NO: 187678 - DNA, 80 bp, synthetic construct; identical to SEQ ID NO: 2948
  source 1..80: mol_type = other DNA

SEQ ID NO: 187679 - DNA, 80 bp, synthetic construct; identical to SEQ ID NO: 2949
  source 1..80: mol_type = other DNA

SEQ ID NO: 187680 - DNA, 80 bp, synthetic construct; identical to SEQ ID NO: 2950
  source 1..80: mol_type = other DNA

SEQ ID NO: 187681 - DNA, 80 bp, synthetic construct; identical to SEQ ID NO: 2951
  source 1..80: mol_type = other DNA

SEQ ID NO: 187682 - DNA, 80 bp, synthetic construct; identical to SEQ ID NO: 2952
  source 1..80: mol_type = other DNA

SEQ ID NO: 187683 - DNA, 80 bp, synthetic construct; identical to SEQ ID NO: 2953
  source 1..80: mol_type = other DNA

SEQ ID NO: 187684 - DNA, 80 bp, synthetic construct; identical to SEQ ID NO: 2954
  source 1..80: mol_type = other DNA

SEQ ID NO: 187685 - DNA, 80 bp, synthetic construct; identical to SEQ ID NO: 2955
  source 1..80: mol_type = other DNA

SEQ ID NO: 187686 - DNA, 80 bp, synthetic construct; identical to SEQ ID NO: 2956
  source 1..80: mol_type = other DNA

SEQ ID NO: 187687 - DNA, 80 bp, synthetic construct; identical to SEQ ID NO: 2957
  source 1..80: mol_type = other DNA

SEQ ID NO: 187688 - DNA, 80 bp, synthetic construct; identical to SEQ ID NO: 2958
  source 1..80: mol_type = other DNA

SEQ ID NO: 187689 - DNA, 80 bp, synthetic construct; identical to SEQ ID NO: 2959
  source 1..80: mol_type = other DNA

SEQ ID NO: 187690 - DNA, 80 bp, synthetic construct; identical to SEQ ID NO: 2960
  source 1..80: mol_type = other DNA

SEQ ID NO: 187691 - DNA, 80 bp, synthetic construct; identical to SEQ ID NO: 2961
  source 1..80: mol_type = other DNA

SEQ ID NO: 187692 - DNA, 80 bp, synthetic construct; identical to SEQ ID NO: 2962
  source 1..80: mol_type = other DNA

SEQ ID NO: 187693 - DNA, 80 bp, synthetic construct; identical to SEQ ID NO: 2963
  source 1..80: mol_type = other DNA

SEQ ID NO: 187694 - DNA, 80 bp, synthetic construct; identical to SEQ ID NO: 2964
  source 1..80: mol_type = other DNA

SEQ ID NO: 187695 - DNA, 80 bp, synthetic construct; identical to SEQ ID NO: 2965
  source 1..80: mol_type = other DNA

SEQ ID NO: 187696 - DNA, 80 bp, synthetic construct; identical to SEQ ID NO: 2966
  source 1..80: mol_type = other DNA

SEQ ID NO: 187697 - DNA, 80 bp, synthetic construct; identical to SEQ ID NO: 2967
  source 1..80: mol_type = other DNA

SEQ ID NO: 187698 - DNA, 80 bp, synthetic construct; identical to SEQ ID NO: 2968
  source 1..80: mol_type = other DNA

SEQ ID NO: 187699 - DNA, 80 bp, synthetic construct; identical to SEQ ID NO: 2969
  source 1..80: mol_type = other DNA

SEQ ID NO: 187700 - DNA, 80 bp, synthetic construct; identical to SEQ ID NO: 2970
  source 1..80: mol_type = other DNA

SEQ ID NO: 187701 - DNA, 80 bp, synthetic construct; identical to SEQ ID NO: 2971
  source 1..80: mol_type = other DNA

SEQ ID NO: 187702 - DNA, 80 bp, synthetic construct; identical to SEQ ID NO: 2972
  source 1..80: mol_type = other DNA

SEQ ID NO: 187703 - DNA, 80 bp, synthetic construct; identical to SEQ ID NO: 2973
  source 1..80: mol_type = other DNA

SEQ ID NO: 187704 - DNA, 80 bp, synthetic construct; identical to SEQ ID NO: 2974
  source 1..80: mol_type = other DNA

SEQ ID NO: 187705 - DNA, 80 bp, synthetic construct; identical to SEQ ID NO: 2975
  source 1..80: mol_type = other DNA

SEQ ID NO: 187706 - DNA, 80 bp, synthetic construct; identical to SEQ ID NO: 2976
  source 1..80: mol_type = other DNA

SEQ ID NO: 187707 - DNA, 80 bp, synthetic construct; identical to SEQ ID NO: 2977
  source 1..80: mol_type = other DNA

SEQ ID NO: 187708 - DNA, 80 bp, synthetic construct; identical to SEQ ID NO: 2978
  source 1..80: mol_type = other DNA

SEQ ID NO: 187709 - DNA, 80 bp, synthetic construct; identical to SEQ ID NO: 2979
  source 1..80: mol_type = other DNA

SEQ ID NO: 187710 - DNA, 80 bp, synthetic construct; identical to SEQ ID NO: 2980
  source 1..80: mol_type = other DNA

SEQ ID NO: 187711 - DNA, 80 bp, synthetic construct; identical to SEQ ID NO: 2981
  source 1..80: mol_type = other DNA

SEQ ID NO: 187712 - DNA, 80 bp, synthetic construct; identical to SEQ ID NO: 2982
  source 1..80: mol_type = other DNA

SEQ ID NO: 187713 - DNA, 80 bp, synthetic construct; identical to SEQ ID NO: 2983
  source 1..80: mol_type = other DNA

SEQ ID NO: 187714 - DNA, 80 bp, synthetic construct; identical to SEQ ID NO: 2984
  source 1..80: mol_type = other DNA

SEQ ID NO: 187715 - DNA, 80 bp, synthetic construct; identical to SEQ ID NO: 2985
  source 1..80: mol_type = other DNA

SEQ ID NO: 187716 - DNA, 80 bp, synthetic construct; identical to SEQ ID NO: 2986
  source 1..80: mol_type = other DNA

SEQ ID NO: 187717 - DNA, 80 bp, synthetic construct; identical to SEQ ID NO: 2987
  source 1..80: mol_type = other DNA

SEQ ID NO: 187718 - DNA, 80 bp, synthetic construct; identical to SEQ ID NO: 2988
  source 1..80: mol_type = other DNA

SEQ ID NO: 187719 - DNA, 80 bp, synthetic construct; identical to SEQ ID NO: 2989
  source 1..80: mol_type = other DNA

SEQ ID NO: 187720 - DNA, 80 bp, synthetic construct; identical to SEQ ID NO: 2990
  source 1..80: mol_type = other DNA

SEQ ID NO: 187721 - DNA, 80 bp, synthetic construct; identical to SEQ ID NO: 2991
  source 1..80: mol_type = other DNA

SEQ ID NO: 187722 - DNA, 80 bp, synthetic construct; identical to SEQ ID NO: 2992
  source 1..80: mol_type = other DNA

SEQ ID NO: 187723 - DNA, 80 bp, synthetic construct; identical to SEQ ID NO: 2993
  source 1..80: mol_type = other DNA

SEQ ID NO: 187724 - DNA, 80 bp, synthetic construct; identical to SEQ ID NO: 2994
  source 1..80: mol_type = other DNA

SEQ ID NO: 187725 - DNA, 80 bp, synthetic construct; identical to SEQ ID NO: 2995
  source 1..80: mol_type = other DNA

SEQ ID NO: 187726 - DNA, 80 bp, synthetic construct; identical to SEQ ID NO: 2996
  source 1..80: mol_type = other DNA

SEQ ID NO: 187727 - DNA, 80 bp, synthetic construct; identical to SEQ ID NO: 2997
  source 1..80: mol_type = other DNA

SEQ ID NO: 187728 - DNA, 80 bp, synthetic construct; identical to SEQ ID NO: 2998
  source 1..80: mol_type = other DNA

SEQ ID NO: 187729 - DNA, 80 bp, synthetic construct; identical to SEQ ID NO: 2999
  source 1..80: mol_type = other DNA

SEQ ID NO: 187730 - DNA, 80 bp, synthetic construct; identical to SEQ ID NO: 3000
  source 1..80: mol_type = other DNA

SEQ ID NO: 187731 - DNA, 80 bp, synthetic construct; identical to SEQ ID NO: 3001
  source 1..80: mol_type = other DNA

SEQ ID NO: 187732 - DNA, 80 bp, synthetic construct; identical to SEQ ID NO: 3002
  source 1..80: mol_type = other DNA

SEQ ID NO: 187733 - DNA, 80 bp, synthetic construct; identical to SEQ ID NO: 3003
  source 1..80: mol_type = other DNA

SEQ ID NO: 187734 - DNA, 80 bp, synthetic construct; identical to SEQ ID NO: 3004
  source 1..80: mol_type = other DNA

SEQ ID NO: 187735 - DNA, 80 bp, synthetic construct; identical to SEQ ID NO: 3005
  source 1..80: mol_type = other DNA

SEQ ID NO: 187736 - DNA, 80 bp, synthetic construct; identical to SEQ ID NO: 3006
  source 1..80: mol_type = other DNA

SEQ ID NO: 187737 - DNA, 80 bp, synthetic construct; identical to SEQ ID NO: 3007
  source 1..80: mol_type = other DNA

SEQ ID NO: 187738 - DNA, 80 bp, synthetic construct; identical to SEQ ID NO: 3008
  source 1..80: mol_type = other DNA

SEQ ID NO: 187739 - DNA, 80 bp, synthetic construct; identical to SEQ ID NO: 3009
  source 1..80: mol_type = other DNA

SEQ ID NO: 187740 - DNA, 80 bp, synthetic construct; identical to SEQ ID NO: 3010
  source 1..80: mol_type = other DNA

SEQ ID NO: 187741 - DNA, 80 bp, synthetic construct; identical to SEQ ID NO: 3011
  source 1..80: mol_type = other DNA

SEQ ID NO: 187742 - DNA, 80 bp, synthetic construct; identical to SEQ ID NO: 3012
  source 1..80: mol_type = other DNA

SEQ ID NO: 187743 - DNA, 80 bp, synthetic construct; identical to SEQ ID NO: 3013
  source 1..80: mol_type = other DNA

SEQ ID NO: 187744 - DNA, 80 bp, synthetic construct; identical to SEQ ID NO: 3014
  source 1..80: mol_type = other DNA

SEQ ID NO: 187745 - DNA, 80 bp, synthetic construct; identical to SEQ ID NO: 3015
  source 1..80: mol_type = other DNA

SEQ ID NO: 187746 - DNA, 80 bp, synthetic construct; identical to SEQ ID NO: 3016
  source 1..80: mol_type = other DNA

SEQ ID NO: 187747 - DNA, 80 bp, synthetic construct; identical to SEQ ID NO: 3017
  source 1..80: mol_type = other DNA

SEQ ID NO: 187748 - DNA, 80 bp, synthetic construct; identical to SEQ ID NO: 3018
  source 1..80: mol_type = other DNA

SEQ ID NO: 187749 - DNA, 80 bp, synthetic construct; identical to SEQ ID NO: 3019
  source 1..80: mol_type = other DNA

SEQ ID NO: 187750 - DNA, 80 bp, synthetic construct; identical to SEQ ID NO: 3020
  source 1..80: mol_type = other DNA

SEQ ID NO: 187751 - DNA, 80 bp, synthetic construct; identical to SEQ ID NO: 3021
  source 1..80: mol_type = other DNA

SEQ ID NO: 187752 - DNA, 80 bp, synthetic construct; identical to SEQ ID NO: 3022
  source 1..80: mol_type = other DNA

SEQ ID NO: 187753 - DNA, 80 bp, synthetic construct; identical to SEQ ID NO: 3023
  source 1..80: mol_type = other DNA

SEQ ID NO: 187754 - DNA, 80 bp, synthetic construct; identical to SEQ ID NO: 3024
  source 1..80: mol_type = other DNA

SEQ ID NO: 187755 - DNA, 80 bp, synthetic construct; identical to SEQ ID NO: 3025
  source 1..80: mol_type = other DNA

SEQ ID NO: 187756 - DNA, 80 bp, synthetic construct; identical to SEQ ID NO: 3026
  source 1..80: mol_type = other DNA

SEQ ID NO: 187757 - DNA, 80 bp, synthetic construct; identical to SEQ ID NO: 3027
  source 1..80: mol_type = other DNA

SEQ ID NO: 187758 - DNA, 80 bp, synthetic construct; identical to SEQ ID NO: 3028
  source 1..80: mol_type = other DNA

SEQ ID NO: 187759 - DNA, 80 bp, synthetic construct; identical to SEQ ID NO: 3029
  source 1..80: mol_type = other DNA

SEQ ID NO: 187760 - DNA, 80 bp, synthetic construct; identical to SEQ ID NO: 3030
  source 1..80: mol_type = other DNA

SEQ ID NO: 187761 - DNA, 80 bp, synthetic construct; identical to SEQ ID NO: 3031
  source 1..80: mol_type = other DNA

SEQ ID NO: 187762 - DNA, 80 bp, synthetic construct; identical to SEQ ID NO: 3032
  source 1..80: mol_type = other DNA

SEQ ID NO: 187763 - DNA, 80 bp, synthetic construct; identical to SEQ ID NO: 3033
  source 1..80: mol_type = other DNA

SEQ ID NO: 187764 - DNA, 80 bp, synthetic construct; identical to SEQ ID NO: 3034
  source 1..80: mol_type = other DNA

SEQ ID NO: 187765 - DNA, 80 bp, synthetic construct; identical to SEQ ID NO: 3035
  source 1..80: mol_type = other DNA

SEQ ID NO: 187766 - DNA, 80 bp, synthetic construct; identical to SEQ ID NO: 3036
  source 1..80: mol_type = other DNA

SEQ ID NO: 187767 - DNA, 80 bp, synthetic construct; identical to SEQ ID NO: 3037
  source 1..80: mol_type = other DNA

SEQ ID NO: 187768 - DNA, 80 bp, synthetic construct; identical to SEQ ID NO: 3038
  source 1..80: mol_type = other DNA

SEQ ID NO: 187769 - DNA, 80 bp, synthetic construct; identical to SEQ ID NO: 3039
  source 1..80: mol_type = other DNA

SEQ ID NO: 187770 - DNA, 80 bp, synthetic construct; identical to SEQ ID NO: 3040
  source 1..80: mol_type = other DNA

SEQ ID NO: 187771 - DNA, 80 bp, synthetic construct; identical to SEQ ID NO: 3041
  source 1..80: mol_type = other DNA

SEQ ID NO: 187772 - DNA, 80 bp, synthetic construct; identical to SEQ ID NO: 3042
  source 1..80: mol_type = other DNA

SEQ ID NO: 187773 - DNA, 80 bp, synthetic construct; identical to SEQ ID NO: 3043
  source 1..80: mol_type = other DNA

SEQ ID NO: 187774 - DNA, 80 bp, synthetic construct; identical to SEQ ID NO: 3044
  source 1..80: mol_type = other DNA

SEQ ID NO: 187775 - DNA, 80 bp, synthetic construct; identical to SEQ ID NO: 3045
  source 1..80: mol_type = other DNA

SEQ ID NO: 187776 - DNA, 80 bp, synthetic construct; identical to SEQ ID NO: 3046
  source 1..80: mol_type = other DNA

SEQ ID NO: 187777 - DNA, 80 bp, synthetic construct; identical to SEQ ID NO: 3047
  source 1..80: mol_type = other DNA

SEQ ID NO: 187778 - DNA, 80 bp, synthetic construct; identical to SEQ ID NO: 3048
  source 1..80: mol_type = other DNA

SEQ ID NO: 187779 - DNA, 80 bp, synthetic construct; identical to SEQ ID NO: 3049
  source 1..80: mol_type = other DNA

SEQ ID NO: 187780 - DNA, 80 bp, synthetic construct; identical to SEQ ID NO: 3050
  source 1..80: mol_type = other DNA

SEQ ID NO: 187781 - DNA, 80 bp, synthetic construct; identical to SEQ ID NO: 3051
  source 1..80: mol_type = other DNA

SEQ ID NO: 187782 - DNA, 80 bp, synthetic construct; identical to SEQ ID NO: 3052
  source 1..80: mol_type = other DNA

SEQ ID NO: 187783 - DNA, 80 bp, synthetic construct; identical to SEQ ID NO: 3053
  source 1..80: mol_type = other DNA

SEQ ID NO: 187784 - DNA, 80 bp, synthetic construct; identical to SEQ ID NO: 3054
  source 1..80: mol_type = other DNA

SEQ ID NO: 187785 - DNA, 80 bp, synthetic construct; identical to SEQ ID NO: 3055
  source 1..80: mol_type = other DNA

SEQ ID NO: 187786 - DNA, 80 bp, synthetic construct; identical to SEQ ID NO: 3056
  source 1..80: mol_type = other DNA

SEQ ID NO: 187787 - DNA, 80 bp, synthetic construct; identical to SEQ ID NO: 3057
  source 1..80: mol_type = other DNA

SEQ ID NO: 187788 - DNA, 80 bp, synthetic construct; identical to SEQ ID NO: 3058
  source 1..80: mol_type = other DNA

SEQ ID NO: 187789 - DNA, 80 bp, synthetic construct; identical to SEQ ID NO: 3059
  source 1..80: mol_type = other DNA

SEQ ID NO: 187790 - DNA, 80 bp, synthetic construct; identical to SEQ ID NO: 3060
  source 1..80: mol_type = other DNA

SEQ ID NO: 187791 - DNA, 80 bp, synthetic construct; identical to SEQ ID NO: 3061
  source 1..80: mol_type = other DNA

SEQ ID NO: 187792 - DNA, 80 bp, synthetic construct; identical to SEQ ID NO: 3062
  source 1..80: mol_type = other DNA

SEQ ID NO: 187793 - DNA, 80 bp, synthetic construct; identical to SEQ ID NO: 3063
  source 1..80: mol_type = other DNA

SEQ ID NO: 187794 - DNA, 80 bp, synthetic construct; identical to SEQ ID NO: 3064
  source 1..80: mol_type = other DNA

SEQ ID NO: 187795 - DNA, 80 bp, synthetic construct; identical to SEQ ID NO: 3065
  source 1..80: mol_type = other DNA

SEQ ID NO: 187796 - DNA, 80 bp, synthetic construct; identical to SEQ ID NO: 3066
  source 1..80: mol_type = other DNA

SEQ ID NO: 187797 - DNA, 80 bp, synthetic construct; identical to SEQ ID NO: 3067
  source 1..80: mol_type = other DNA

SEQ ID NO: 187798 - DNA, 80 bp, synthetic construct; identical to SEQ ID NO: 3068
  source 1..80: mol_type = other DNA

SEQ ID NO: 187799 - DNA, 80 bp, synthetic construct; identical to SEQ ID NO: 3069
  source 1..80: mol_type = other DNA

SEQ ID NO: 187800 - DNA, 80 bp, synthetic construct; identical to SEQ ID NO: 3070
  source 1..80: mol_type = other DNA

SEQ ID NO: 187801 - DNA, 80 bp, synthetic construct; identical to SEQ ID NO: 3071
  source 1..80: mol_type = other DNA

SEQ ID NO: 187802 - DNA, 80 bp, synthetic construct; identical to SEQ ID NO: 3072
  source 1..80: mol_type = other DNA

SEQ ID NO: 187803 - DNA, 80 bp, synthetic construct; identical to SEQ ID NO: 3073
  source 1..80: mol_type = other DNA

SEQ ID NO: 187804 - DNA, 80 bp, synthetic construct; identical to SEQ ID NO: 3074
  source 1..80: mol_type = other DNA

SEQ ID NO: 187805 - DNA, 80 bp, synthetic construct; identical to SEQ ID NO: 3075
  source 1..80: mol_type = other DNA

SEQ ID NO: 187806 - DNA, 80 bp, synthetic construct; identical to SEQ ID NO: 3076
  source 1..80: mol_type = other DNA

SEQ ID NO: 187807 - DNA, 80 bp, synthetic construct; identical to SEQ ID NO: 3077
  source 1..80: mol_type = other DNA

SEQ ID NO: 187808 - DNA, 80 bp, synthetic construct; identical to SEQ ID NO: 3078
  source 1..80: mol_type = other DNA

SEQ ID NO: 187809 - DNA, 80 bp, synthetic construct; identical to SEQ ID NO: 3079
  source 1..80: mol_type = other DNA

SEQ ID NO: 187810 - DNA, 80 bp, synthetic construct; identical to SEQ ID NO: 3080
  source 1..80: mol_type = other DNA

SEQ ID NO: 187811 - DNA, 80 bp, synthetic construct; identical to SEQ ID NO: 3081
  source 1..80: mol_type = other DNA

SEQ ID NO: 187812 - DNA, 80 bp, synthetic construct; identical to SEQ ID NO: 3082
  source 1..80: mol_type = other DNA

SEQ ID NO: 187813 - DNA, 80 bp, synthetic construct; identical to SEQ ID NO: 3083
  source 1..80: mol_type = other DNA

SEQ ID NO: 187814 - DNA, 80 bp, synthetic construct; identical to SEQ ID NO: 3084
  source 1..80: mol_type = other DNA

SEQ ID NO: 187815 - DNA, 80 bp, synthetic construct; identical to SEQ ID NO: 3085
  source 1..80: mol_type = other DNA

SEQ ID NO: 187816 - DNA, 80 bp, synthetic construct; identical to SEQ ID NO: 3086
  source 1..80: mol_type = other DNA

SEQ ID NO: 187817 - DNA, 80 bp, synthetic construct; identical to SEQ ID NO: 3087
  source 1..80: mol_type = other DNA

SEQ ID NO: 187818 - DNA, 80 bp, synthetic construct; identical to SEQ ID NO: 3088
  source 1..80: mol_type = other DNA

SEQ ID NO: 187819 - DNA, 80 bp, synthetic construct; identical to SEQ ID NO: 3089
  source 1..80: mol_type = other DNA

SEQ ID NO: 187820 - DNA, 80 bp, synthetic construct; identical to SEQ ID NO: 3090
  source 1..80: mol_type = other DNA

SEQ ID NO: 187821 - DNA, 80 bp, synthetic construct; identical to SEQ ID NO: 3091
  source 1..80: mol_type = other DNA

SEQ ID NO: 187822 - DNA, 80 bp, synthetic construct; identical to SEQ ID NO: 3092
  source 1..80: mol_type = other DNA

SEQ ID NO: 187823 - DNA, 80 bp, synthetic construct; identical to SEQ ID NO: 3093
  source 1..80: mol_type = other DNA

SEQ ID NO: 187824 - DNA, 80 bp, synthetic construct; identical to SEQ ID NO: 3094
  source 1..80: mol_type = other DNA

SEQ ID NO: 187825 - DNA, 80 bp, synthetic construct; identical to SEQ ID NO: 3095
  source 1..80: mol_type = other DNA

SEQ ID NO: 187826 - DNA, 80 bp, synthetic construct; identical to SEQ ID NO: 3096
  source 1..80: mol_type = other DNA

SEQ ID NO: 187827 - DNA, 80 bp, synthetic construct; identical to SEQ ID NO: 3097
  source 1..80: mol_type = other DNA

SEQ ID NO: 187828 - DNA, 80 bp, synthetic construct; identical to SEQ ID NO: 3098
  source 1..80: mol_type = other DNA

SEQ ID NO: 187829 - DNA, 80 bp, synthetic construct; identical to SEQ ID NO: 3099
  source 1..80: mol_type = other DNA

SEQ ID NO: 187830 - DNA, 80 bp, synthetic construct; identical to SEQ ID NO: 3100
  source 1..80: mol_type = other DNA

SEQ ID NO: 187831 - DNA, 80 bp, synthetic construct; identical to SEQ ID NO: 3101
  source 1..80: mol_type = other DNA

SEQ ID NO: 187832 - DNA, 80 bp, synthetic construct; identical to SEQ ID NO: 3102
  source 1..80: mol_type = other DNA

SEQ ID NO: 187833 - DNA, 80 bp, synthetic construct; identical to SEQ ID NO: 3103
  source 1..80: mol_type = other DNA

SEQ ID NO: 187834 - DNA, 80 bp, synthetic construct; identical to SEQ ID NO: 3104
  source 1..80: mol_type = other DNA

SEQ ID NO: 187835 - DNA, 80 bp, synthetic construct; identical to SEQ ID NO: 3105
  source 1..80: mol_type = other DNA

SEQ ID NO: 187836 - DNA, 80 bp, synthetic construct; identical to SEQ ID NO: 3106
  source 1..80: mol_type = other DNA

SEQ ID NO: 187837 - DNA, 80 bp, synthetic construct; identical to SEQ ID NO: 3107
  source 1..80: mol_type = other DNA

SEQ ID NO: 187838 - DNA, 80 bp, synthetic construct; identical to SEQ ID NO: 3108
  source 1..80: mol_type = other DNA

SEQ ID NO: 187839 - DNA, 80 bp, synthetic construct; identical to SEQ ID NO: 3109
  source 1..80: mol_type = other DNA

SEQ ID NO: 187840 - DNA, 80 bp, synthetic construct; identical to SEQ ID NO: 3110
  source 1..80: mol_type = other DNA

SEQ ID NO: 187841 - DNA, 80 bp, synthetic construct; identical to SEQ ID NO: 3111
  source 1..80: mol_type = other DNA

SEQ ID NO: 187842 - DNA, 80 bp, synthetic construct; identical to SEQ ID NO: 3112
  source 1..80: mol_type = other DNA

SEQ ID NO: 187843 - DNA, 80 bp, synthetic construct; identical to SEQ ID NO: 3113
  source 1..80: mol_type = other DNA

SEQ ID NO: 187844 - DNA, 80 bp, synthetic construct; identical to SEQ ID NO: 3114
  source 1..80: mol_type = other DNA

SEQ ID NO: 187845 - DNA, 80 bp, synthetic construct; identical to SEQ ID NO: 3115
  source 1..80: mol_type = other DNA

SEQ ID NO: 187846 - DNA, 80 bp, synthetic construct; identical to SEQ ID NO: 3116
  source 1..80: mol_type = other DNA

SEQ ID NO: 187847 - DNA, 80 bp, synthetic construct; identical to SEQ ID NO: 3117
  source 1..80: mol_type = other DNA

SEQ ID NO: 187848 - DNA, 80 bp, synthetic construct; identical to SEQ ID NO: 3118
  source 1..80: mol_type = other DNA

SEQ ID NO: 187849 - DNA, 80 bp, synthetic construct; identical to SEQ ID NO: 3119
  source 1..80: mol_type = other DNA

SEQ ID NO: 187850 - DNA, 80 bp, synthetic construct; identical to SEQ ID NO: 3120
  source 1..80: mol_type = other DNA

SEQ ID NO: 187851 - DNA, 80 bp, synthetic construct; identical to SEQ ID NO: 3121
  source 1..80: mol_type = other DNA

SEQ ID NO: 187852 - DNA, 80 bp, synthetic construct; identical to SEQ ID NO: 3122
  source 1..80: mol_type = other DNA

SEQ ID NO: 187853 - DNA, 80 bp, synthetic construct; identical to SEQ ID NO: 3123
  source 1..80: mol_type = other DNA

SEQ ID NO: 187854 - DNA, 80 bp, synthetic construct; identical to SEQ ID NO: 3124
  source 1..80: mol_type = other DNA

SEQ ID NO: 187855 - DNA, 80 bp, synthetic construct; identical to SEQ ID NO: 3125
  source 1..80: mol_type = other DNA

SEQ ID NO: 187856 - DNA, 80 bp, synthetic construct; identical to SEQ ID NO: 3126
  source 1..80: mol_type = other DNA

SEQ ID NO: 187857 - DNA, 80 bp, synthetic construct; identical to SEQ ID NO: 3127
  source 1..80: mol_type = other DNA

SEQ ID NO: 187858 - DNA, 80 bp, synthetic construct; identical to SEQ ID NO: 3128
  source 1..80: mol_type = other DNA

SEQ ID NO: 187859 - DNA, 80 bp, synthetic construct; identical to SEQ ID NO: 3129
  source 1..80: mol_type = other DNA

SEQ ID NO: 187860 - DNA, 80 bp, synthetic construct; identical to SEQ ID NO: 3130
  source 1..80: mol_type = other DNA

SEQ ID NO: 187861 - DNA, 80 bp, synthetic construct; identical to SEQ ID NO: 3131
  source 1..80: mol_type = other DNA

SEQ ID NO: 187862 - DNA, 80 bp, synthetic construct; identical to SEQ ID NO: 3132
  source 1..80: mol_type = other DNA

SEQ ID NO: 187863 - DNA, 80 bp, synthetic construct; identical to SEQ ID NO: 3133
  source 1..80: mol_type = other DNA

SEQ ID NO: 187864 - DNA, 80 bp, synthetic construct; identical to SEQ ID NO: 3134
  source 1..80: mol_type = other DNA

SEQ ID NO: 187865 - DNA, 80 bp, synthetic construct; identical to SEQ ID NO: 3135
  source 1..80: mol_type = other DNA

SEQ ID NO: 187866 - DNA, 80 bp, synthetic construct; identical to SEQ ID NO: 3136
  source 1..80: mol_type = other DNA

SEQ ID NO: 187867 - DNA, 80 bp, synthetic construct; identical to SEQ ID NO: 3137
  source 1..80: mol_type = other DNA

SEQ ID NO: 187868 - DNA, 80 bp, synthetic construct; identical to SEQ ID NO: 3138
  source 1..80: mol_type = other DNA

SEQ ID NO: 187869 - DNA, 80 bp, synthetic construct; identical to SEQ ID NO: 3139
  source 1..80: mol_type = other DNA

SEQ ID NO: 187870 - DNA, 80 bp, synthetic construct; identical to SEQ ID NO: 3140
  source 1..80: mol_type = other DNA

SEQ ID NO: 187871 - DNA, 80 bp, synthetic construct; identical to SEQ ID NO: 3141
  source 1..80: mol_type = other DNA

SEQ ID NO: 187872 - DNA, 80 bp, synthetic construct; identical to SEQ ID NO: 3142
  source 1..80: mol_type = other DNA

SEQ ID NO: 187873 - DNA, 80 bp, synthetic construct; identical to SEQ ID NO: 3143
  source 1..80: mol_type = other DNA

SEQ ID NO: 187874 - DNA, 80 bp, synthetic construct; identical to SEQ ID NO: 3144
  source 1..80: mol_type = other DNA

SEQ ID NO: 187875 - DNA, 80 bp, synthetic construct; identical to SEQ ID NO: 3145
  source 1..80: mol_type = other DNA

SEQ ID NO: 187876 - DNA, 80 bp, synthetic construct; identical to SEQ ID NO: 3146
  source 1..80: mol_type = other DNA

SEQ ID NO: 187877 - DNA, 80 bp, synthetic construct; identical to SEQ ID NO: 3147
  source 1..80: mol_type = other DNA

SEQ ID NO: 187878 - DNA, 80 bp, synthetic construct; identical to SEQ ID NO: 3148
  source 1..80: mol_type = other DNA

SEQ ID NO: 187879 - DNA, 80 bp, synthetic construct; identical to SEQ ID NO: 3149
  source 1..80: mol_type = other DNA

SEQ ID NO: 187880 - DNA, 80 bp, synthetic construct; identical to SEQ ID NO: 3150
  source 1..80: mol_type = other DNA

SEQ ID NO: 187881 - DNA, 80 bp, synthetic construct; identical to SEQ ID NO: 3151
  source 1..80: mol_type = other DNA

SEQ ID NO: 187882 - DNA, 80 bp, synthetic construct; identical to SEQ ID NO: 3152
  source 1..80: mol_type = other DNA

SEQ ID NO: 187883 - DNA, 80 bp, synthetic construct; identical to SEQ ID NO: 3153
  source 1..80: mol_type = other DNA

SEQ ID NO: 187884 - DNA, 80 bp, synthetic construct; identical to SEQ ID NO: 3154
  source 1..80: mol_type = other DNA

SEQ ID NO: 187885 - DNA, 80 bp, synthetic construct; identical to SEQ ID NO: 3155
  source 1..80: mol_type = other DNA

SEQ ID NO: 187886 - DNA, 80 bp, synthetic construct; identical to SEQ ID NO: 3156
  source 1..80: mol_type = other DNA

SEQ ID NO: 187887 - DNA, 80 bp, synthetic construct; identical to SEQ ID NO: 3157
  source 1..80: mol_type = other DNA

SEQ ID NO: 187888 - DNA, 80 bp, synthetic construct; identical to SEQ ID NO: 3158
  source 1..80: mol_type = other DNA

SEQ ID NO: 187889 - DNA, 80 bp, synthetic construct; identical to SEQ ID NO: 3159
  source 1..80: mol_type = other DNA

SEQ ID NO: 187890 - DNA, 80 bp, synthetic construct; identical to SEQ ID NO: 3160
  source 1..80: mol_type = other DNA

SEQ ID NO: 187891 - DNA, 80 bp, synthetic construct; identical to SEQ ID NO: 3161
  source 1..80: mol_type = other DNA

SEQ ID NO: 187892 - DNA, 80 bp, synthetic construct; identical to SEQ ID NO: 3162
  source 1..80: mol_type = other DNA

SEQ ID NO: 187893 - DNA, 80 bp, synthetic construct; identical to SEQ ID NO: 3163
  source 1..80: mol_type = other DNA

SEQ ID NO: 187894 - DNA, 80 bp, synthetic construct; identical to SEQ ID NO: 3164
  source 1..80: mol_type = other DNA

SEQ ID NO: 187895 - DNA, 80 bp, synthetic construct; identical to SEQ ID NO: 3165
  source 1..80: mol_type = other DNA

SEQ ID NO: 187896 - DNA, 80 bp, synthetic construct; identical to SEQ ID NO: 3166
  source 1..80: mol_type = other DNA

SEQ ID NO: 187897 - DNA, 80 bp, synthetic construct; identical to SEQ ID NO: 3167
  source 1..80: mol_type = other DNA

SEQ ID NO: 187898 - DNA, 80 bp, synthetic construct; identical to SEQ ID NO: 3168
  source 1..80: mol_type = other DNA

SEQ ID NO: 187899 - DNA, 80 bp, synthetic construct; identical to SEQ ID NO: 3169
  source 1..80: mol_type = other DNA

SEQ ID NO: 187900 - DNA, 80 bp, synthetic construct; identical to SEQ ID NO: 3170
  source 1..80: mol_type = other DNA

SEQ ID NO: 187901 - DNA, 80 bp, synthetic construct; identical to SEQ ID NO: 3171
  source 1..80: mol_type = other DNA

SEQ ID NO: 187902 - DNA, 80 bp, synthetic construct; identical to SEQ ID NO: 3172
  source 1..80: mol_type = other DNA

SEQ ID NO: 187903 - DNA, 80 bp, synthetic construct; identical to SEQ ID NO: 3173
  source 1..80: mol_type = other DNA

SEQ ID NO: 187904 - DNA, 80 bp, synthetic construct; identical to SEQ ID NO: 3174
  source 1..80: mol_type = other DNA

SEQ ID NO: 187905 - DNA, 80 bp, synthetic construct; identical to SEQ ID NO: 3175
  source 1..80: mol_type = other DNA

SEQ ID NO: 187906 - DNA, 80 bp, synthetic construct; identical to SEQ ID NO: 3176
  source 1..80: mol_type = other DNA

SEQ ID NO: 187907 - DNA, 80 bp, synthetic construct; identical to SEQ ID NO: 3177
  source 1..80: mol_type = other DNA

SEQ ID NO: 187908 - DNA, 80 bp, synthetic construct; identical to SEQ ID NO: 3178
  source 1..80: mol_type = other DNA

SEQ ID NO: 187909 - DNA, 80 bp, synthetic construct; identical to SEQ ID NO: 3179
  source 1..80: mol_type = other DNA

SEQ ID NO: 187910 - DNA, 80 bp, synthetic construct; identical to SEQ ID NO: 3180
  source 1..80: mol_type = other DNA

SEQ ID NO: 187911 - DNA, 80 bp, synthetic construct; identical to SEQ ID NO: 3181
  source 1..80: mol_type = other DNA

SEQ ID NO: 187912 - DNA, 80 bp, synthetic construct; identical to SEQ ID NO: 3182
  source 1..80: mol_type = other DNA

SEQ ID NO: 187913 - DNA, 80 bp, synthetic construct; identical to SEQ ID NO: 3183
  source 1..80: mol_type = other DNA

SEQ ID NO: 187914 - DNA, 80 bp, synthetic construct; identical to SEQ ID NO: 3184
  source 1..80: mol_type = other DNA

SEQ ID NO: 187915 - DNA, 80 bp, synthetic construct; identical to SEQ ID NO: 3185
  source 1..80: mol_type = other DNA

SEQ ID NO: 187916 - DNA, 80 bp, synthetic construct; identical to SEQ ID NO: 3186
  source 1..80: mol_type = other DNA

SEQ ID NO: 187917 - DNA, 80 bp, synthetic construct; identical to SEQ ID NO: 3187
  source 1..80: mol_type = other DNA

SEQ ID NO: 187918 - DNA, 80 bp, synthetic construct; identical to SEQ ID NO: 3188
  source 1..80: mol_type = other DNA

SEQ ID NO: 187919 - DNA, 80 bp, synthetic construct; identical to SEQ ID NO: 3189
  source 1..80: mol_type = other DNA

SEQ ID NO: 187920 - DNA, 80 bp, synthetic construct; identical to SEQ ID NO: 3190
  source 1..80: mol_type = other DNA

SEQ ID NO: 187921 - DNA, 80 bp, synthetic construct; identical to SEQ ID NO: 3191
  source 1..80: mol_type = other DNA

SEQ ID NO: 187922 - DNA, 80 bp, synthetic construct; identical to SEQ ID NO: 3192
  source 1..80: mol_type = other DNA

SEQ ID NO: 187923 - DNA, 80 bp, synthetic construct; identical to SEQ ID NO: 3193
  source 1..80: mol_type = other DNA

SEQ ID NO: 187924 - DNA, 80 bp, synthetic construct; identical to SEQ ID NO: 3194
  source 1..80: mol_type = other DNA

SEQ ID NO: 187925 - DNA, 80 bp, synthetic construct; identical to SEQ ID NO: 3195
  source 1..80: mol_type = other DNA

SEQ ID NO: 187926 - DNA, 80 bp, synthetic construct; identical to SEQ ID NO: 3196
  source 1..80: mol_type = other DNA

SEQ ID NO: 187927 - DNA, 80 bp, synthetic construct; identical to SEQ ID NO: 3197
  source 1..80: mol_type = other DNA

SEQ ID NO: 187928 - DNA, 80 bp, synthetic construct; identical to SEQ ID NO: 3198
  source 1..80: mol_type = other DNA

SEQ ID NO: 187929 - DNA, 80 bp, synthetic construct; identical to SEQ ID NO: 3199
  source 1..80: mol_type = other DNA

SEQ ID NO: 187930 - DNA, 80 bp, synthetic construct; identical to SEQ ID NO: 3200
  source 1..80: mol_type = other DNA

SEQ ID NO: 187931 - DNA, 80 bp, synthetic construct; identical to SEQ ID NO: 3201
  source 1..80: mol_type = other DNA

SEQ ID NO: 187932 - DNA, 80 bp, synthetic construct; identical to SEQ ID NO: 3202
  source 1..80: mol_type = other DNA

SEQ ID NO: 187933 - DNA, 80 bp, synthetic construct; identical to SEQ ID NO: 3203
  source 1..80: mol_type = other DNA

SEQ ID NO: 187934 - DNA, 80 bp, synthetic construct; identical to SEQ ID NO: 3204
  source 1..80: mol_type = other DNA

SEQ ID NO: 187935 - DNA, 80 bp, synthetic construct; identical to SEQ ID NO: 3205
  source 1..80: mol_type = other DNA

SEQ ID NO: 187936 - DNA, 80 bp, synthetic construct; identical to SEQ ID NO: 3206
  source 1..80: mol_type = other DNA

SEQ ID NO: 187937 - DNA, 80 bp, synthetic construct; identical to SEQ ID NO: 3207
  source 1..80: mol_type = other DNA

SEQ ID NO: 187938 - DNA, 80 bp, synthetic construct; identical to SEQ ID NO: 3208
  source 1..80: mol_type = other DNA

SEQ ID NO: 187939 - DNA, 80 bp, synthetic construct; identical to SEQ ID NO: 3209
  source 1..80: mol_type = other DNA

SEQ ID NO: 187940 - DNA, 80 bp, synthetic construct; identical to SEQ ID NO: 3210
  source 1..80: mol_type = other DNA

SEQ ID NO: 187941 - DNA, 80 bp, synthetic construct; identical to SEQ ID NO: 3211
  source 1..80: mol_type = other DNA

SEQ ID NO: 187942 - DNA, 80 bp, synthetic construct; identical to SEQ ID NO: 3212
  source 1..80: mol_type = other DNA

SEQ ID NO: 187943 - DNA, 80 bp, synthetic construct; identical to SEQ ID NO: 3213
  source 1..80: mol_type = other DNA

SEQ ID NO: 187944 - DNA, 80 bp, synthetic construct; identical to SEQ ID NO: 3214
  source 1..80: mol_type = other DNA

SEQ ID NO: 187945 - DNA, 80 bp, synthetic construct; identical to SEQ ID NO: 3215
  source 1..80: mol_type = other DNA

SEQ ID NO: 187946 - DNA, 80 bp, synthetic construct; identical to SEQ ID NO: 3216
  source 1..80: mol_type = other DNA

SEQ ID NO: 187947 - DNA, 80 bp, synthetic construct; identical to SEQ ID NO: 3217
  source 1..80: mol_type = other DNA

SEQ ID NO: 187948 - DNA, 80 bp, synthetic construct; identical to SEQ ID NO: 3218
  source 1..80: mol_type = other DNA

SEQ ID NO: 187949 - DNA, 80 bp, synthetic construct; identical to SEQ ID NO: 3219
  source 1..80: mol_type = other DNA

SEQ ID NO: 187950 - DNA, 80 bp, synthetic construct; identical to SEQ ID NO: 3220
  source 1..80: mol_type = other DNA

SEQ ID NO: 187951 - DNA, 80 bp, synthetic construct; identical to SEQ ID NO: 3221
  source 1..80: mol_type = other DNA

SEQ ID NO: 187952 - DNA, 80 bp, synthetic construct; identical to SEQ ID NO: 3222
  source 1..80: mol_type = other DNA

SEQ ID NO: 187953 - DNA, 80 bp, synthetic construct; identical to SEQ ID NO: 3223
  source 1..80: mol_type = other DNA

SEQ ID NO: 187954 - DNA, 80 bp, synthetic construct; identical to SEQ ID NO: 3224
  source 1..80: mol_type = other DNA

SEQ ID NO: 187955 - DNA, 80 bp, synthetic construct; identical to SEQ ID NO: 3225
  source 1..80: mol_type = other DNA

SEQ ID NO: 187956 - DNA, 80 bp, synthetic construct; identical to SEQ ID NO: 3226
  source 1..80: mol_type = other DNA

SEQ ID NO: 187957 - DNA, 80 bp, synthetic construct; identical to SEQ ID NO: 3227
  source 1..80: mol_type = other DNA

SEQ ID NO: 187958 - DNA, 80 bp, synthetic construct; identical to SEQ ID NO: 3228
  source 1..80: mol_type = other DNA

SEQ ID NO: 187959 - DNA, 80 bp, synthetic construct; identical to SEQ ID NO: 3229
  source 1..80: mol_type = other DNA

SEQ ID NO: 187960 - DNA, 80 bp, synthetic construct; identical to SEQ ID NO: 3230
  source 1..80: mol_type = other DNA

SEQ ID NO: 187961 - DNA, 80 bp, synthetic construct; identical to SEQ ID NO: 3231
  source 1..80: mol_type = other DNA

SEQ ID NO: 187962 - DNA, 80 bp, synthetic construct; identical to SEQ ID NO: 3232
  source 1..80: mol_type = other DNA

SEQ ID NO: 187963 - DNA, 80 bp, synthetic construct; identical to SEQ ID NO: 3233
  source 1..80: mol_type = other DNA

SEQ ID NO: 187964 - DNA, 80 bp, synthetic construct; identical to SEQ ID NO: 3234
  source 1..80: mol_type = other DNA

SEQ ID NO: 187965 - DNA, 80 bp, synthetic construct; identical to SEQ ID NO: 3235
  source 1..80: mol_type = other DNA

SEQ ID NO: 187966 - DNA, 80 bp, synthetic construct; identical to SEQ ID NO: 3236
  source 1..80: mol_type = other DNA

SEQ ID NO: 187967 - DNA, 80 bp, synthetic construct; identical to SEQ ID NO: 3237
  source 1..80: mol_type = other DNA

SEQ ID NO: 187968 - DNA, 80 bp, synthetic construct; identical to SEQ ID NO: 3238
  source 1..80: mol_type = other DNA

SEQ ID NO: 187969 - DNA, 80 bp, synthetic construct; identical to SEQ ID NO: 3239
  source 1..80: mol_type = other DNA

SEQ ID NO: 187970 - DNA, 80 bp, synthetic construct; identical to SEQ ID NO: 3240
  source 1..80: mol_type = other DNA

SEQ ID NO: 187971 - DNA, 80 bp, synthetic construct; identical to SEQ ID NO: 3241
  source 1..80: mol_type = other DNA

SEQ ID NO: 187972 - DNA, 80 bp, synthetic construct; identical to SEQ ID NO: 3242
  source 1..80: mol_type = other DNA

SEQ ID NO: 187973 - DNA, 80 bp, synthetic construct; identical to SEQ ID NO: 3243
  source 1..80: mol_type = other DNA

SEQ ID NO: 187974 - DNA, 80 bp, synthetic construct; identical to SEQ ID NO: 3244
  source 1..80: mol_type = other DNA

SEQ ID NO: 187975 - DNA, 80 bp, synthetic construct; identical to SEQ ID NO: 3245
  source 1..80: mol_type = other DNA

SEQ ID NO: 187976 - DNA, 80 bp, synthetic construct; identical to SEQ ID NO: 3246
  source 1..80: mol_type = other DNA

SEQ ID NO: 187977 - DNA, 80 bp, synthetic construct; identical to SEQ ID NO: 3247
  source 1..80: mol_type = other DNA

SEQ ID NO: 187978 - DNA, 80 bp, synthetic construct; identical to SEQ ID NO: 3248
  source 1..80: mol_type = other DNA

SEQ ID NO: 187979 - DNA, 80 bp, synthetic construct; identical to SEQ ID NO: 3249
  source 1..80: mol_type = other DNA

SEQ ID NO: 187980 - DNA, 80 bp, synthetic construct; identical to SEQ ID NO: 3250
  source 1..80: mol_type = other DNA

SEQ ID NO: 187981 - DNA, 80 bp, synthetic construct; identical to SEQ ID NO: 3251
  source 1..80: mol_type = other DNA

SEQ ID NO: 187982 - DNA, 80 bp, synthetic construct; identical to SEQ ID NO: 3252
  source 1..80: mol_type = other DNA

SEQ ID NO: 187983 - DNA, 80 bp, synthetic construct; identical to SEQ ID NO: 3253
  source 1..80: mol_type = other DNA

SEQ ID NO: 187984 - DNA, 80 bp, synthetic construct; identical to SEQ ID NO: 3254
  source 1..80: mol_type = other DNA

SEQ ID NO: 187985 - DNA, 80 bp, synthetic construct; identical to SEQ ID NO: 3255
  source 1..80: mol_type = other DNA

SEQ ID NO: 187986 - DNA, 80 bp, synthetic construct; identical to SEQ ID NO: 3256
  source 1..80: mol_type = other DNA

SEQ ID NO: 187987 - DNA, 80 bp, synthetic construct; identical to SEQ ID NO: 3257
  source 1..80: mol_type = other DNA

SEQ ID NO: 187988 - DNA, 80 bp, synthetic construct; identical to SEQ ID NO: 3258
  source 1..80: mol_type = other DNA

SEQ ID NO: 187989 - DNA, 80 bp, synthetic construct; identical to SEQ ID NO: 3259
  source 1..80: mol_type = other DNA

SEQ ID NO: 187990 - DNA, 80 bp, synthetic construct; identical to SEQ ID NO: 3260
  source 1..80: mol_type = other DNA

SEQ ID NO: 187991 - DNA, 80 bp, synthetic construct; identical to SEQ ID NO: 3261
  source 1..80: mol_type = other DNA

SEQ ID NO: 187992 - DNA, 80 bp, synthetic construct; identical to SEQ ID NO: 3262
  source 1..80: mol_type = other DNA

SEQ ID NO: 187993 - DNA, 80 bp, synthetic construct; identical to SEQ ID NO: 3263
  source 1..80: mol_type = other DNA

SEQ ID NO: 187994 - DNA, 80 bp, synthetic construct; identical to SEQ ID NO: 3264
  source 1..80: mol_type = other DNA

SEQ ID NO: 187995 - DNA, 80 bp, synthetic construct; identical to SEQ ID NO: 3265
  source 1..80: mol_type = other DNA

SEQ ID NO: 187996 - DNA, 80 bp, synthetic construct; identical to SEQ ID NO: 3266
  source 1..80: mol_type = other DNA

SEQ ID NO: 187997 - DNA, 80 bp, synthetic construct; identical to SEQ ID NO: 3267
  source 1..80: mol_type = other DNA

SEQ ID NO: 187998 - DNA, 80 bp, synthetic construct; identical to SEQ ID NO: 3268
  source 1..80: mol_type = other DNA

SEQ ID NO: 187999 - DNA, 80 bp, synthetic construct; identical to SEQ ID NO: 3269
  source 1..80: mol_type = other DNA

SEQ ID NO: 188000 - DNA, 80 bp, synthetic construct; identical to SEQ ID NO: 3270
  source 1..80: mol_type = other DNA

SEQ ID NO: 188001 - DNA, 80 bp, synthetic construct; identical to SEQ ID NO: 3271
  source 1..80: mol_type = other DNA

SEQ ID NO: 188002 - DNA, 80 bp, synthetic construct; identical to SEQ ID NO: 3272
  source 1..80: mol_type = other DNA

SEQ ID NO: 188003 - DNA, 80 bp, synthetic construct; identical to SEQ ID NO: 3273
  source 1..80: mol_type = other DNA

SEQ ID NO: 188004 - DNA, 80 bp, synthetic construct; identical to SEQ ID NO: 3274
  source 1..80: mol_type = other DNA

SEQ ID NO: 188005 - DNA, 80 bp, synthetic construct; identical to SEQ ID NO: 3275
  source 1..80: mol_type = other DNA

SEQ ID NO: 188006 - DNA, 80 bp, synthetic construct; identical to SEQ ID NO: 3276
  source 1..80: mol_type = other DNA

SEQ ID NO: 188007 - DNA, 80 bp, synthetic construct; identical to SEQ ID NO: 3277
  source 1..80: mol_type = other DNA

SEQ ID NO: 188008 - DNA, 80 bp, synthetic construct; identical to SEQ ID NO: 3278
  source 1..80: mol_type = other DNA

SEQ ID NO: 188009 - DNA, 80 bp, synthetic construct; identical to SEQ ID NO: 3279
  source 1..80: mol_type = other DNA

SEQ ID NO: 188010 - DNA, 80 bp, synthetic construct; identical to SEQ ID NO: 3280
  source 1..80: mol_type = other DNA

SEQ ID NO: 188011 - DNA, 80 bp, synthetic construct; identical to SEQ ID NO: 3281
  source 1..80: mol_type = other DNA

SEQ ID NO: 188012 - DNA, 80 bp, synthetic construct; identical to SEQ ID NO: 3282
  source 1..80: mol_type = other DNA

SEQ ID NO: 188013 - DNA, 80 bp, synthetic construct; identical to SEQ ID NO: 3283
  source 1..80: mol_type = other DNA

SEQ ID NO: 188014 - DNA, 80 bp, synthetic construct; identical to SEQ ID NO: 3284
  source 1..80: mol_type = other DNA

SEQ ID NO: 188015 - DNA, 80 bp, synthetic construct; identical to SEQ ID NO: 3285
  source 1..80: mol_type = other DNA

SEQ ID NO: 188016 - DNA, 80 bp, synthetic construct; identical to SEQ ID NO: 3286
  source 1..80: mol_type = other DNA

SEQ ID NO: 188017 - DNA, 80 bp, synthetic construct; identical to SEQ ID NO: 3287
  source 1..80: mol_type = other DNA

SEQ ID NO: 188018 - DNA, 80 bp, synthetic construct; identical to SEQ ID NO: 3288
  source 1..80: mol_type = other DNA

SEQ ID NO: 188019 - DNA, 80 bp, synthetic construct; identical to SEQ ID NO: 3289
  source 1..80: mol_type = other DNA

SEQ ID NO: 188020 - DNA, 80 bp, synthetic construct; identical to SEQ ID NO: 3290
  source 1..80: mol_type = other DNA

SEQ ID NO: 188021 - DNA, 80 bp, synthetic construct; identical to SEQ ID NO: 3291
  source 1..80: mol_type = other DNA

SEQ ID NO: 188022 - DNA, 80 bp, synthetic construct; identical to SEQ ID NO: 3292
  source 1..80: mol_type = other DNA

SEQ ID NO: 188023 - DNA, 80 bp, synthetic construct; identical to SEQ ID NO: 3293
  source 1..80: mol_type = other DNA

SEQ ID NO: 188024 - DNA, 80 bp, synthetic construct; identical to SEQ ID NO: 3294
  source 1..80: mol_type = other DNA

SEQ ID NO: 188025 - DNA, 80 bp, synthetic construct; identical to SEQ ID NO: 3295
  source 1..80: mol_type = other DNA

SEQ ID NO: 188026 - DNA, 80 bp, synthetic construct; identical to SEQ ID NO: 3296
  source 1..80: mol_type = other DNA

SEQ ID NO: 188027 - DNA, 80 bp, synthetic construct; identical to SEQ ID NO: 3297
  source 1..80: mol_type = other DNA

SEQ ID NO: 188028 - DNA, 80 bp, synthetic construct; identical to SEQ ID NO: 3298
  source 1..80: mol_type = other DNA

SEQ ID NO: 188029 - DNA, 80 bp, synthetic construct; identical to SEQ ID NO: 3299
  source 1..80: mol_type = other DNA

SEQ ID NO: 188030 - DNA, 80 bp, synthetic construct; identical to SEQ ID NO: 3300
  source 1..80: mol_type = other DNA

SEQ ID NO: 188031 - DNA, 80 bp, synthetic construct; identical to SEQ ID NO: 3301
  source 1..80: mol_type = other DNA

SEQ ID NO: 188032 - DNA, 80 bp, synthetic construct; identical to SEQ ID NO: 3302
  source 1..80: mol_type = other DNA

SEQ ID NO: 188033 - DNA, 80 bp, synthetic construct; identical to SEQ ID NO: 3303
  source 1..80: mol_type = other DNA

SEQ ID NO: 188034 - DNA, 80 bp, synthetic construct; identical to SEQ ID NO: 3304
  source 1..80: mol_type = other DNA

SEQ ID NO: 188035 - DNA, 80 bp, synthetic construct; identical to SEQ ID NO: 3305
  source 1..80: mol_type = other DNA

SEQ ID NO: 188036 - DNA, 80 bp, synthetic construct; identical to SEQ ID NO: 3306
  source 1..80: mol_type = other DNA

SEQ ID NO: 188037 - DNA, 80 bp, synthetic construct; identical to SEQ ID NO: 3307
  source 1..80: mol_type = other DNA

SEQ ID NO: 188038 - DNA, 80 bp, synthetic construct; identical to SEQ ID NO: 3308
  source 1..80: mol_type = other DNA

SEQ ID NO: 188039 - DNA, 80 bp, synthetic construct; identical to SEQ ID NO: 3309
  source 1..80: mol_type = other DNA

SEQ ID NO: 188040 - DNA, 80 bp, synthetic construct; identical to SEQ ID NO: 3310
  source 1..80: mol_type = other DNA

SEQ ID NO: 188041 - DNA, 80 bp, synthetic construct; identical to SEQ ID NO: 3311
  source 1..80: mol_type = other DNA

SEQ ID NO: 188042 - DNA, 80 bp, synthetic construct; identical to SEQ ID NO: 3312
  source 1..80: mol_type = other DNA

SEQ ID NO: 188043 - DNA, 80 bp, synthetic construct; identical to SEQ ID NO: 3313
  source 1..80: mol_type = other DNA

SEQ ID NO: 188044 - DNA, 80 bp, synthetic construct; identical to SEQ ID NO: 3314
  source 1..80: mol_type = other DNA

SEQ ID NO: 188045 - DNA, 80 bp, synthetic construct; identical to SEQ ID NO: 3315
  source 1..80: mol_type = other DNA

SEQ ID NO: 188046 - DNA, 80 bp, synthetic construct; identical to SEQ ID NO: 3316
  source 1..80: mol_type = other DNA

SEQ ID NO: 188047 - DNA, 80 bp, synthetic construct; identical to SEQ ID NO: 3317
  source 1..80: mol_type = other DNA

SEQ ID NO: 188048 - DNA, 80 bp, synthetic construct; identical to SEQ ID NO: 3318
  source 1..80: mol_type = other DNA

SEQ ID NO: 188049 - DNA, 80 bp, synthetic construct; identical to SEQ ID NO: 3319
  source 1..80: mol_type = other DNA

SEQ ID NO: 188050 - DNA, 80 bp, synthetic construct; identical to SEQ ID NO: 3320
  source 1..80: mol_type = other DNA

SEQ ID NO: 188051 - DNA, 80 bp, synthetic construct; identical to SEQ ID NO: 3321
  source 1..80: mol_type = other DNA

SEQ ID NO: 188052 - DNA, 80 bp, synthetic construct; identical to SEQ ID NO: 3322
  source 1..80: mol_type = other DNA

SEQ ID NO: 188053 - DNA, 80 bp, synthetic construct; identical to SEQ ID NO: 3323
  source 1..80: mol_type = other DNA

SEQ ID NO: 188054 - DNA, 80 bp, synthetic construct; identical to SEQ ID NO: 3324
  source 1..80: mol_type = other DNA

SEQ ID NO: 188055 - DNA, 80 bp, synthetic construct; identical to SEQ ID NO: 3325
  source 1..80: mol_type = other DNA

SEQ ID NO: 188056 - DNA, 80 bp, synthetic construct; identical to SEQ ID NO: 3326
  source 1..80: mol_type = other DNA

SEQ ID NO: 188057 - DNA, 80 bp, synthetic construct; identical to SEQ ID NO: 3327
  source 1..80: mol_type = other DNA

SEQ ID NO: 188058 - DNA, 80 bp, synthetic construct; identical to SEQ ID NO: 3328
  source 1..80: mol_type = other DNA

SEQ ID NO: 188059 - DNA, 80 bp, synthetic construct; identical to SEQ ID NO: 3329
  source 1..80: mol_type = other DNA

SEQ ID NO: 188060 - DNA, 80 bp, synthetic construct; identical to SEQ ID NO: 3330
  source 1..80: mol_type = other DNA

SEQ ID NO: 188061 - DNA, 80 bp, synthetic construct; identical to SEQ ID NO: 3331
  source 1..80: mol_type = other DNA

SEQ ID NO: 188062 - DNA, 80 bp, synthetic construct; identical to SEQ ID NO: 3332
  source 1..80: mol_type = other DNA

SEQ ID NO: 188063 - DNA, 80 bp, synthetic construct; identical to SEQ ID NO: 3333
  source 1..80: mol_type = other DNA

SEQ ID NO: 188064 - DNA, 80 bp, synthetic construct; identical to SEQ ID NO: 3334
  source 1..80: mol_type = other DNA

SEQ ID NO: 188065 - DNA, 80 bp, synthetic construct; identical to SEQ ID NO: 3335
  source 1..80: mol_type = other DNA

SEQ ID NO: 188066 - DNA, 80 bp, synthetic construct; identical to SEQ ID NO: 3336
  source 1..80: mol_type = other DNA

SEQ ID NO: 188067 - DNA, 80 bp, synthetic construct; identical to SEQ ID NO: 3337
  source 1..80: mol_type = other DNA

SEQ ID NO: 188068 - DNA, 80 bp, synthetic construct; identical to SEQ ID NO: 3338
  source 1..80: mol_type = other DNA

SEQ ID NO: 188069 - DNA, 80 bp, synthetic construct; identical to SEQ ID NO: 3339
  source 1..80: mol_type = other DNA

SEQ ID NO: 188070 - DNA, 80 bp, synthetic construct; identical to SEQ ID NO: 3340
  source 1..80: mol_type = other DNA

SEQ ID NO: 188071 - DNA, 80 bp, synthetic construct; identical to SEQ ID NO: 3341
  source 1..80: mol_type = other DNA

SEQ ID NO: 188072 - DNA, 80 bp, synthetic construct; identical to SEQ ID NO: 3342
  source 1..80: mol_type = other DNA

SEQ ID NO: 188073 - DNA, 80 bp, synthetic construct; identical to SEQ ID NO: 3343
  source 1..80: mol_type = other DNA

SEQ ID NO: 188074 - DNA, 80 bp, synthetic construct; identical to SEQ ID NO: 3344
  source 1..80: mol_type = other DNA

SEQ ID NO: 188075 - DNA, 80 bp, synthetic construct; identical to SEQ ID NO: 3345
  source 1..80: mol_type = other DNA

SEQ ID NO: 188076 - DNA, 80 bp, synthetic construct; identical to SEQ ID NO: 3346
  source 1..80: mol_type = other DNA

SEQ ID NO: 188077 - DNA, 80 bp, synthetic construct; identical to SEQ ID NO: 3347
  source 1..80: mol_type = other DNA

SEQ ID NO: 188078 - DNA, 80 bp, synthetic construct; identical to SEQ ID NO: 3348
  source 1..80: mol_type = other DNA

SEQ ID NO: 188079 - DNA, 80 bp, synthetic construct; identical to SEQ ID NO: 3349
  source 1..80: mol_type = other DNA

SEQ ID NO: 188080 - DNA, 80 bp, synthetic construct; identical to SEQ ID NO: 3350
  source 1..80: mol_type = other DNA

SEQ ID NO: 188081 - DNA, 80 bp, synthetic construct; identical to SEQ ID NO: 3351
  source 1..80: mol_type = other DNA

SEQ ID NO: 188082 - DNA, 80 bp, synthetic construct; identical to SEQ ID NO: 3352
  source 1..80: mol_type = other DNA

SEQ ID NO: 188083 - DNA, 80 bp, synthetic construct; identical to SEQ ID NO: 3353
  source 1..80: mol_type = other DNA

SEQ ID NO: 188084 - DNA, 80 bp, synthetic construct; identical to SEQ ID NO: 3354
  source 1..80: mol_type = other DNA

SEQ ID NO: 188085 - DNA, 80 bp, synthetic construct; identical to SEQ ID NO: 3355
  source 1..80: mol_type = other DNA

SEQ ID NO: 188086 - DNA, 80 bp, synthetic construct; identical to SEQ ID NO: 3356
  source 1..80: mol_type = other DNA

SEQ ID NO: 188087 - DNA, 80 bp, synthetic construct; identical to SEQ ID NO: 3357
  source 1..80: mol_type = other DNA

SEQ ID NO: 188088 - DNA, 80 bp, synthetic construct; identical to SEQ ID NO: 3358
  source 1..80: mol_type = other DNA

SEQ ID NO: 188089 - DNA, 80 bp, synthetic construct; identical to SEQ ID NO: 3359
  source 1..80: mol_type = other DNA

SEQ ID NO: 188090 - DNA, 80 bp, synthetic construct; identical to SEQ ID NO: 3360
  source 1..80: mol_type = other DNA

SEQ ID NO: 188091 - DNA, 80 bp, synthetic construct; identical to SEQ ID NO: 3361
  source 1..80: mol_type = other DNA

SEQ ID NO: 188092 - DNA, 80 bp, synthetic construct; identical to SEQ ID NO: 3362
  source 1..80: mol_type = other DNA

SEQ ID NO: 188093 - DNA, 80 bp, synthetic construct; identical to SEQ ID NO: 3363
  source 1..80: mol_type = other DNA

SEQ ID NO: 188094 - DNA, 80 bp, synthetic construct; identical to SEQ ID NO: 3364
  source 1..80: mol_type = other DNA

SEQ ID NO: 188095 - DNA, 80 bp, synthetic construct; identical to SEQ ID NO: 3365
  source 1..80: mol_type = other DNA

SEQ ID NO: 188096 - DNA, 80 bp, synthetic construct; identical to SEQ ID NO: 3366
  source 1..80: mol_type = other DNA

SEQ ID NO: 188097 - DNA, 80 bp, synthetic construct; identical to SEQ ID NO: 3367
  source 1..80: mol_type = other DNA

SEQ ID NO: 188098 - DNA, 80 bp, synthetic construct; identical to SEQ ID NO: 3368
  source 1..80: mol_type = other DNA

SEQ ID NO: 188099 - DNA, 80 bp, synthetic construct; identical to SEQ ID NO: 3369
  source 1..80: mol_type = other DNA

SEQ ID NO: 188100 - DNA, 80 bp, synthetic construct; identical to SEQ ID NO: 3370
  source 1..80: mol_type = other DNA

SEQ ID NO: 188101 - DNA, 80 bp, synthetic construct; identical to SEQ ID NO: 3371
  source 1..80: mol_type = other DNA

SEQ ID NO: 188102 - DNA, 80 bp, synthetic construct; identical to SEQ ID NO: 3372
  source 1..80: mol_type = other DNA

SEQ ID NO: 188103 - DNA, 80 bp, synthetic construct; identical to SEQ ID NO: 3373
  source 1..80: mol_type = other DNA

SEQ ID NO: 188104 - DNA, 80 bp, synthetic construct; identical to SEQ ID NO: 3374
  source 1..80: mol_type = other DNA

SEQ ID NO: 188105 - DNA, 80 bp, synthetic construct; identical to SEQ ID NO: 3375
  source 1..80: mol_type = other DNA

SEQ ID NO: 188106 - DNA, 80 bp, synthetic construct; identical to SEQ ID NO: 3376
  source 1..80: mol_type = other DNA

SEQ ID NO: 188107 - DNA, 80 bp, synthetic construct; identical to SEQ ID NO: 3377
  source 1..80: mol_type = other DNA

SEQ ID NO: 188108 - DNA, 80 bp, synthetic construct; identical to SEQ ID NO: 3378
  source 1..80: mol_type = other DNA

SEQ ID NO: 188109 - DNA, 80 bp, synthetic construct; identical to SEQ ID NO: 3379
  source 1..80: mol_type = other DNA

SEQ ID NO: 188110 - DNA, 80 bp, synthetic construct; identical to SEQ ID NO: 3380
  source 1..80: mol_type = other DNA

SEQ ID NO: 188111 - DNA, 80 bp, synthetic construct; identical to SEQ ID NO: 3381
  source 1..80: mol_type = other DNA

SEQ ID NO: 188112 - DNA, 80 bp, synthetic construct; identical to SEQ ID NO: 3382
  source 1..80: mol_type = other DNA

SEQ ID NO: 188113 - DNA, 80 bp, synthetic construct; identical to SEQ ID NO: 3383
  source 1..80: mol_type = other DNA

SEQ ID NO: 188114 - DNA, 80 bp, synthetic construct; identical to SEQ ID NO: 3384
  source 1..80: mol_type = other DNA

SEQ ID NO: 188115 - DNA, 80 bp, synthetic construct; identical to SEQ ID NO: 3385
  source 1..80: mol_type = other DNA

SEQ ID NO: 188116 - DNA, 80 bp, synthetic construct; identical to SEQ ID NO: 3386
  source 1..80: mol_type = other DNA

SEQ ID NO: 188117 - DNA, 80 bp, synthetic construct; identical to SEQ ID NO: 3387
  source 1..80: mol_type = other DNA

SEQ ID NO: 188118 - DNA, 80 bp, synthetic construct; identical to SEQ ID NO: 3388
  source 1..80: mol_type = other DNA

SEQ ID NO: 188119 - DNA, 80 bp, synthetic construct; identical to SEQ ID NO: 3389
  source 1..80: mol_type = other DNA

SEQ ID NO: 188120 - DNA, 80 bp, synthetic construct; identical to SEQ ID NO: 3390
  source 1..80: mol_type = other DNA

SEQ ID NO: 188121 - DNA, 80 bp, synthetic construct; identical to SEQ ID NO: 3391
  source 1..80: mol_type = other DNA

SEQ ID NO: 188122 - DNA, 80 bp, synthetic construct; identical to SEQ ID NO: 3392
  source 1..80: mol_type = other DNA

SEQ ID NO: 188123 - DNA, 80 bp, synthetic construct; identical to SEQ ID NO: 3393
  source 1..80: mol_type = other DNA

SEQ ID NO: 188124 - DNA, 80 bp, synthetic construct; identical to SEQ ID NO: 3394
  source 1..80: mol_type = other DNA

SEQ ID NO: 188125 - DNA, 80 bp, synthetic construct; identical to SEQ ID NO: 3395
  source 1..80: mol_type = other DNA

SEQ ID NO: 188126 - DNA, 80 bp, synthetic construct; identical to SEQ ID NO: 3396
  source 1..80: mol_type = other DNA

SEQ ID NO: 188127 - DNA, 80 bp, synthetic construct; identical to SEQ ID NO: 3397
  source 1..80: mol_type = other DNA

SEQ ID NO: 188128 - DNA, 80 bp, synthetic construct; identical to SEQ ID NO: 3398
  source 1..80: mol_type = other DNA

SEQ ID NO: 188129 - DNA, 80 bp, synthetic construct; identical to SEQ ID NO: 3399
  source 1..80: mol_type = other DNA

SEQ ID NO: 188130 - DNA, 80 bp, synthetic construct; identical to SEQ ID NO: 3400
  source 1..80: mol_type = other DNA

SEQ ID NO: 188131 - DNA, 80 bp, synthetic construct; identical to SEQ ID NO: 3401
  source 1..80: mol_type = other DNA

SEQ ID NO: 188132 - DNA, 80 bp, synthetic construct; identical to SEQ ID NO: 3402
  source 1..80: mol_type = other DNA

SEQ ID NO: 188133 - DNA, 80 bp, synthetic construct; identical to SEQ ID NO: 3403
  source 1..80: mol_type = other DNA

SEQ ID NO: 188134 - DNA, 80 bp, synthetic construct; identical to SEQ ID NO: 3404
  source 1..80: mol_type = other DNA

SEQ ID NO: 188135 - DNA, 80 bp, synthetic construct; identical to SEQ ID NO: 3405
  source 1..80: mol_type = other DNA

SEQ ID NO: 188136 - DNA, 80 bp, synthetic construct; identical to SEQ ID NO: 3406
  source 1..80: mol_type = other DNA

SEQ ID NO: 188137 - DNA, 80 bp, synthetic construct; identical to SEQ ID NO: 3407
  source 1..80: mol_type = other DNA

SEQ ID NO: 188138 - DNA, 80 bp, synthetic construct; identical to SEQ ID NO: 3408
  source 1..80: mol_type = other DNA

SEQ ID NO: 188139 - DNA, 80 bp, synthetic construct; identical to SEQ ID NO: 3409
  source 1..80: mol_type = other DNA

SEQ ID NO: 188140 - DNA, 80 bp, synthetic construct; identical to SEQ ID NO: 3410
  source 1..80: mol_type = other DNA

SEQ ID NO: 188141 - DNA, 80 bp, synthetic construct; identical to SEQ ID NO: 3411
  source 1..80: mol_type = other DNA

SEQ ID NO: 188142 - DNA, 80 bp, synthetic construct; identical to SEQ ID NO: 3412
  source 1..80: mol_type = other DNA

SEQ ID NO: 188143 - DNA, 80 bp, synthetic construct; identical to SEQ ID NO: 3413
  source 1..80: mol_type = other DNA

SEQ ID NO: 188144 - DNA, 80 bp, synthetic construct; identical to SEQ ID NO: 3414
  source 1..80: mol_type = other DNA

SEQ ID NO: 188145 - DNA, 80 bp, synthetic construct; identical to SEQ ID NO: 3415
  source 1..80: mol_type = other DNA

SEQ ID NO: 188146 - DNA, 80 bp, synthetic construct; identical to SEQ ID NO: 3416
  source 1..80: mol_type = other DNA

SEQ ID NO: 188147 - DNA, 80 bp, synthetic construct; identical to SEQ ID NO: 3417
  source 1..80: mol_type = other DNA

SEQ ID NO: 188148 - DNA, 80 bp, synthetic construct; identical to SEQ ID NO: 3418
  source 1..80: mol_type = other DNA

SEQ ID NO: 188149 - DNA, 80 bp, synthetic construct; identical to SEQ ID NO: 3419
  source 1..80: mol_type = other DNA

SEQ ID NO: 188150 - DNA, 80 bp, synthetic construct; identical to SEQ ID NO: 3420
  source 1..80: mol_type = other DNA

SEQ ID NO: 188151 - DNA, 80 bp, synthetic construct; identical to SEQ ID NO: 3421
  source 1..80: mol_type = other DNA

SEQ ID NO: 188152 - DNA, 80 bp, synthetic construct; identical to SEQ ID NO: 3422
  source 1..80: mol_type = other DNA

SEQ ID NO: 188153 - DNA, 80 bp, synthetic construct; identical to SEQ ID NO: 3423
  source 1..80: mol_type = other DNA

SEQ ID NO: 188154 - DNA, 80 bp, synthetic construct; identical to SEQ ID NO: 3424
  source 1..80: mol_type = other DNA

SEQ ID NO: 188155 - DNA, 80 bp, synthetic construct; identical to SEQ ID NO: 3425
  source 1..80: mol_type = other DNA

SEQ ID NO: 188156 - DNA, 80 bp, synthetic construct; identical to SEQ ID NO: 3426
  source 1..80: mol_type = other DNA

SEQ ID NO: 188157 - DNA, 80 bp, synthetic construct; identical to SEQ ID NO: 3427
  source 1..80: mol_type = other DNA

SEQ ID NO: 188158 - DNA, 80 bp, synthetic construct; identical to SEQ ID NO: 3428
  source 1..80: mol_type = other DNA

SEQ ID NO: 188159 - DNA, 80 bp, synthetic construct; identical to SEQ ID NO: 3429
  source 1..80: mol_type = other DNA

SEQ ID NO: 188160 - DNA, 80 bp, synthetic construct; identical to SEQ ID NO: 3430
  source 1..80: mol_type = other DNA

SEQ ID NO: 188161 - DNA, 80 bp, synthetic construct; identical to SEQ ID NO: 3431
  source 1..80: mol_type = other DNA

SEQ ID NO: 188162 - DNA, 80 bp, synthetic construct; identical to SEQ ID NO: 3432
  source 1..80: mol_type = other DNA

SEQ ID NO: 188163 - DNA, 80 bp, synthetic construct; identical to SEQ ID NO: 3433
  source 1..80: mol_type = other DNA

SEQ ID NO: 188164 - DNA, 80 bp, synthetic construct; identical to SEQ ID NO: 3434
  source 1..80: mol_type = other DNA

SEQ ID NO: 188165 - DNA, 80 bp, synthetic construct; identical to SEQ ID NO: 3435
  source 1..80: mol_type = other DNA

SEQ ID NO: 188166 - DNA, 80 bp, synthetic construct; identical to SEQ ID NO: 3436
  source 1..80: mol_type = other DNA

SEQ ID NO: 188167 - DNA, 80 bp, synthetic construct; identical to SEQ ID NO: 3437
  source 1..80: mol_type = other DNA

SEQ ID NO: 188168 - DNA, 80 bp, synthetic construct; identical to SEQ ID NO: 3438
  source 1..80: mol_type = other DNA

SEQ ID NO: 188169 - DNA, 80 bp, synthetic construct; identical to SEQ ID NO: 3439
  source 1..80: mol_type = other DNA

SEQ ID NO: 188170 - DNA, 80 bp, synthetic construct; identical to SEQ ID NO: 3440
  source 1..80: mol_type = other DNA

SEQ ID NO: 188171 - DNA, 80 bp, synthetic construct; identical to SEQ ID NO: 3441
  source 1..80: mol_type = other DNA

SEQ ID NO: 188172 - DNA, 80 bp, synthetic construct; identical to SEQ ID NO: 3442
  source 1..80: mol_type = other DNA

SEQ ID NO: 188173 - DNA, 80 bp, synthetic construct; identical to SEQ ID NO: 3443
  source 1..80: mol_type = other DNA

SEQ ID NO: 188174 - DNA, 80 bp, synthetic construct; identical to SEQ ID NO: 3444
  source 1..80: mol_type = other DNA

SEQ ID NO: 188175 - DNA, 80 bp, synthetic construct; identical to SEQ ID NO: 3445
  source 1..80: mol_type = other DNA

SEQ ID NO: 188176 - DNA, 80 bp, synthetic construct; identical to SEQ ID NO: 3446
  source 1..80: mol_type = other DNA

SEQ ID NO: 188177 - DNA, 80 bp, synthetic construct; identical to SEQ ID NO: 3447
  source 1..80: mol_type = other DNA

SEQ ID NO: 188178 - DNA, 80 bp, synthetic construct; identical to SEQ ID NO: 3448
  source 1..80: mol_type = other DNA

SEQ ID NO: 188179 - DNA, 80 bp, synthetic construct; identical to SEQ ID NO: 3449
  source 1..80: mol_type = other DNA

SEQ ID NO: 188180 - DNA, 80 bp, synthetic construct; identical to SEQ ID NO: 3450
  source 1..80: mol_type = other DNA

SEQ ID NO: 188181 - DNA, 80 bp, synthetic construct; identical to SEQ ID NO: 3451
  source 1..80: mol_type = other DNA

SEQ ID NO: 188182 - DNA, 80 bp, synthetic construct; identical to SEQ ID NO: 3452
  source 1..80: mol_type = other DNA

SEQ ID NO: 188183 - DNA, 80 bp, synthetic construct; identical to SEQ ID NO: 3453
  source 1..80: mol_type = other DNA

SEQ ID NO: 188184 - DNA, 80 bp, synthetic construct; identical to SEQ ID NO: 3454
  source 1..80: mol_type = other DNA

SEQ ID NO: 188185 - DNA, 80 bp, synthetic construct; identical to SEQ ID NO: 3455
  source 1..80: mol_type = other DNA

SEQ ID NO: 188186 - DNA, 80 bp, synthetic construct; identical to SEQ ID NO: 3456
  source 1..80: mol_type = other DNA

SEQ ID NO: 188187 - DNA, 80 bp, synthetic construct; identical to SEQ ID NO: 3457
  source 1..80: mol_type = other DNA

SEQ ID NO: 188188 - DNA, 80 bp, synthetic construct; identical to SEQ ID NO: 3458
  source 1..80: mol_type = other DNA

SEQ ID NO: 188189 - DNA, 80 bp, synthetic construct; identical to SEQ ID NO: 3459
  source 1..80: mol_type = other DNA

SEQ ID NO: 188190 - DNA, 80 bp, synthetic construct; identical to SEQ ID NO: 3460
  source 1..80: mol_type = other DNA

SEQ ID NO: 188191 - DNA, 80 bp, synthetic construct; identical to SEQ ID NO: 3461
  source 1..80: mol_type = other DNA

SEQ ID NO: 188192 - DNA, 80 bp, synthetic construct; identical to SEQ ID NO: 3462
  source 1..80: mol_type = other DNA

SEQ ID NO: 188193 - DNA, 80 bp, synthetic construct; identical to SEQ ID NO: 3463
  source 1..80: mol_type = other DNA

SEQ ID NO: 188194 - DNA, 80 bp, synthetic construct; identical to SEQ ID NO: 3464
  source 1..80: mol_type = other DNA

SEQ ID NO: 188195 - DNA, 80 bp, synthetic construct; identical to SEQ ID NO: 3465
  source 1..80: mol_type = other DNA

SEQ ID NO: 188196 - DNA, 80 bp, synthetic construct; identical to SEQ ID NO: 3466
  source 1..80: mol_type = other DNA

SEQ ID NO: 188197 - DNA, 80 bp, synthetic construct; identical to SEQ ID NO: 3467
  source 1..80: mol_type = other DNA

SEQ ID NO: 188198 - DNA, 80 bp, synthetic construct; identical to SEQ ID NO: 3468
  source 1..80: mol_type = other DNA

SEQ ID NO: 188199 - DNA, 80 bp, synthetic construct; identical to SEQ ID NO: 3469
  source 1..80: mol_type = other DNA

SEQ ID NO: 188200 - DNA, 80 bp, synthetic construct; identical to SEQ ID NO: 3470
  source 1..80: mol_type = other DNA

SEQ ID NO: 188201 - DNA, 80 bp, synthetic construct; identical to SEQ ID NO: 3471
  source 1..80: mol_type = other DNA

SEQ ID NO: 188202 - DNA, 80 bp, synthetic construct; identical to SEQ ID NO: 3472
  source 1..80: mol_type = other DNA

SEQ ID NO: 188203 - DNA, 80 bp, synthetic construct; identical to SEQ ID NO: 3473
  source 1..80: mol_type = other DNA

SEQ ID NO: 188204 - DNA, 80 bp, synthetic construct; identical to SEQ ID NO: 3474
  source 1..80: mol_type = other DNA

SEQ ID NO: 188205 - DNA, 80 bp, synthetic construct; identical to SEQ ID NO: 3475
  source 1..80: mol_type = other DNA

SEQ ID NO: 188206 - DNA, 80 bp, synthetic construct; identical to SEQ ID NO: 3476
  source 1..80: mol_type = other DNA

SEQ ID NO: 188207 - DNA, 80 bp, synthetic construct; identical to SEQ ID NO: 3477
  source 1..80: mol_type = other DNA

SEQ ID NO: 188208 - DNA, 80 bp, synthetic construct; identical to SEQ ID NO: 3478
  source 1..80: mol_type = other DNA

SEQ ID NO: 188209 - DNA, 80 bp, synthetic construct; identical to SEQ ID NO: 3479
  source 1..80: mol_type = other DNA

SEQ ID NO: 188210 - DNA, 80 bp, synthetic construct; identical to SEQ ID NO: 3480
  source 1..80: mol_type = other DNA

SEQ ID NO: 188211 - DNA, 80 bp, synthetic construct; identical to SEQ ID NO: 3481
  source 1..80: mol_type = other DNA

SEQ ID NO: 188212 - DNA, 80 bp, synthetic construct; identical to SEQ ID NO: 3482
  source 1..80: mol_type = other DNA

SEQ ID NO: 188213 - DNA, 80 bp, synthetic construct; identical to SEQ ID NO: 3483
  source 1..80: mol_type = other DNA

SEQ ID NO: 188214 - DNA, 80 bp, synthetic construct; identical to SEQ ID NO: 3484
  source 1..80: mol_type = other DNA

SEQ ID NO: 188215 - DNA, 80 bp, synthetic construct; identical to SEQ ID NO: 3485
  source 1..80: mol_type = other DNA

SEQ ID NO: 188216 - DNA, 80 bp, synthetic construct; identical to SEQ ID NO: 3486
  source 1..80: mol_type = other DNA

SEQ ID NO: 188217 - DNA, 80 bp, synthetic construct; identical to SEQ ID NO: 3487
  source 1..80: mol_type = other DNA

SEQ ID NO: 188218 - DNA, 80 bp, synthetic construct; identical to SEQ ID NO: 3488
  source 1..80: mol_type = other DNA

SEQ ID NO: 188219 - DNA, 80 bp, synthetic construct; identical to SEQ ID NO: 3489
  source 1..80: mol_type = other DNA

SEQ ID NO: 188220 - DNA, 80 bp, synthetic construct; identical to SEQ ID NO: 3490
  source 1..80: mol_type = other DNA

SEQ ID NO: 188221 - DNA, 80 bp, synthetic construct; identical to SEQ ID NO: 3491
  source 1..80: mol_type = other DNA

SEQ ID NO: 188222 - DNA, 80 bp, synthetic construct; identical to SEQ ID NO: 3492
  source 1..80: mol_type = other DNA

SEQ ID NO: 188223 - DNA, 80 bp, synthetic construct; identical to SEQ ID NO: 3493
  source 1..80: mol_type = other DNA

SEQ ID NO: 188224 - DNA, 80 bp, synthetic construct; identical to SEQ ID NO: 3494
  source 1..80: mol_type = other DNA

SEQ ID NO: 188225 - DNA, 80 bp, synthetic construct; identical to SEQ ID NO: 3495
  source 1..80: mol_type = other DNA

SEQ ID NO: 188226 - DNA, 80 bp, synthetic construct; identical to SEQ ID NO: 3496
  source 1..80: mol_type = other DNA

SEQ ID NO: 188227 - DNA, 80 bp, synthetic construct; identical to SEQ ID NO: 3497
  source 1..80: mol_type = other DNA

SEQ ID NO: 188228 - DNA, 80 bp, synthetic construct; identical to SEQ ID NO: 3498
  source 1..80: mol_type = other DNA

SEQ ID NO: 188229 - DNA, 80 bp, synthetic construct; identical to SEQ ID NO: 3499
  source 1..80: mol_type = other DNA

SEQ ID NO: 188230 - DNA, 80 bp, synthetic construct; identical to SEQ ID NO: 3500
  source 1..80: mol_type = other DNA

SEQ ID NO: 188231 - DNA, 80 bp, synthetic construct; identical to SEQ ID NO: 3501
  source 1..80: mol_type = other DNA

SEQ ID NO: 188232 - DNA, 80 bp, synthetic construct; identical to SEQ ID NO: 3502
  source 1..80: mol_type = other DNA

SEQ ID NO: 188233 - DNA, 80 bp, synthetic construct; identical to SEQ ID NO: 3503
  source 1..80: mol_type = other DNA

SEQ ID NO: 188234 - DNA, 80 bp, synthetic construct; identical to SEQ ID NO: 3504
  source 1..80: mol_type = other DNA

SEQ ID NO: 188235 - DNA, 80 bp, synthetic construct; identical to SEQ ID NO: 3505
  source 1..80: mol_type = other DNA

SEQ ID NO: 188236 - DNA, 80 bp, synthetic construct; identical to SEQ ID NO: 3506
  source 1..80: mol_type = other DNA

SEQ ID NO: 188237 - DNA, 80 bp, synthetic construct; identical to SEQ ID NO: 3507
  source 1..80: mol_type = other DNA

SEQ ID NO: 188238 - DNA, 80 bp, synthetic construct; identical to SEQ ID NO: 3508
  source 1..80: mol_type = other DNA

SEQ ID NO: 188239 - DNA, 80 bp, synthetic construct; identical to SEQ ID NO: 3509
  source 1..80: mol_type = other DNA

SEQ ID NO: 188240 - DNA, 80 bp, synthetic construct; identical to SEQ ID NO: 3510
  source 1..80: mol_type = other DNA

SEQ ID NO: 188241 - DNA, 80 bp, synthetic construct; identical to SEQ ID NO: 3511
  source 1..80: mol_type = other DNA

SEQ ID NO: 188242 - DNA, 80 bp, synthetic construct; identical to SEQ ID NO: 3512
  source 1..80: mol_type = other DNA

SEQ ID NO: 188243 - DNA, 80 bp, synthetic construct; identical to SEQ ID NO: 3513
  source 1..80: mol_type = other DNA

SEQ ID NO: 188244 - DNA, 80 bp, synthetic construct; identical to SEQ ID NO: 3514
  source 1..80: mol_type = other DNA

SEQ ID NO: 188245 - DNA, 80 bp, synthetic construct; identical to SEQ ID NO: 3515
  source 1..80: mol_type = other DNA

SEQ ID NO: 188246 - DNA, 80 bp, synthetic construct; identical to SEQ ID NO: 3516
  source 1..80: mol_type = other DNA

SEQ ID NO: 188247 - DNA, 80 bp, synthetic construct; identical to SEQ ID NO: 3517
  source 1..80: mol_type = other DNA

SEQ ID NO: 188248 - DNA, 80 bp, synthetic construct; identical to SEQ ID NO: 3518
  source 1..80: mol_type = other DNA

SEQ ID NO: 188249 - DNA, 80 bp, synthetic construct; identical to SEQ ID NO: 3519
  source 1..80: mol_type = other DNA

SEQ ID NO: 188250 - DNA, 80 bp, synthetic construct; identical to SEQ ID NO: 3520
  source 1..80: mol_type = other DNA

SEQ ID NO: 188251 - DNA, 80 bp, synthetic construct; identical to SEQ ID NO: 3521
  source 1..80: mol_type = other DNA

SEQ ID NO: 188252 - DNA, 80 bp, synthetic construct; identical to SEQ ID NO: 3522
  source 1..80: mol_type = other DNA

SEQ ID NO: 188253 - DNA, 80 bp, synthetic construct; identical to SEQ ID NO: 3523
  source 1..80: mol_type = other DNA

SEQ ID NO: 188254 - DNA, 80 bp, synthetic construct; identical to SEQ ID NO: 3524
  source 1..80: mol_type = other DNA

SEQ ID NO: 188255 - DNA, 80 bp, synthetic construct; identical to SEQ ID NO: 3525
  source 1..80: mol_type = other DNA

SEQ ID NO: 188256 - DNA, 80 bp, synthetic construct; identical to SEQ ID NO: 3526
  source 1..80: mol_type = other DNA

SEQ ID NO: 188257 - DNA, 80 bp, synthetic construct; identical to SEQ ID NO: 3527
  source 1..80: mol_type = other DNA

SEQ ID NO: 188258 - DNA, 80 bp, synthetic construct; identical to SEQ ID NO: 3528
  source 1..80: mol_type = other DNA

SEQ ID NO: 188259 - DNA, 80 bp, synthetic construct; identical to SEQ ID NO: 3529
  source 1..80: mol_type = other DNA

SEQ ID NO: 188260 - DNA, 80 bp, synthetic construct; identical to SEQ ID NO: 3530
  source 1..80: mol_type = other DNA

SEQ ID NO: 188261 - DNA, 80 bp, synthetic construct; identical to SEQ ID NO: 3531
  source 1..80: mol_type = other DNA

SEQ ID NO: 188262 - DNA, 80 bp, synthetic construct; identical to SEQ ID NO: 3532
  source 1..80: mol_type = other DNA

SEQ ID NO: 188263 - DNA, 80 bp, synthetic construct; identical to SEQ ID NO: 3533
  source 1..80: mol_type = other DNA

SEQ ID NO: 188264 - DNA, 80 bp, synthetic construct; identical to SEQ ID NO: 3534
  source 1..80: mol_type = other DNA

SEQ ID NO: 188265 - DNA, 80 bp, synthetic construct; identical to SEQ ID NO: 3535
  source 1..80: mol_type = other DNA

SEQ ID NO: 188266 - DNA, 80 bp, synthetic construct; identical to SEQ ID NO: 3536
  source 1..80: mol_type = other DNA

SEQ ID NO: 188267 - DNA, 80 bp, synthetic construct; identical to SEQ ID NO: 3537
  source 1..80: mol_type = other DNA

SEQ ID NO: 188268 - DNA, 80 bp, synthetic construct; identical to SEQ ID NO: 3538
  source 1..80: mol_type = other DNA

SEQ ID NO: 188269 - DNA, 80 bp, synthetic construct; identical to SEQ ID NO: 3539
  source 1..80: mol_type = other DNA

SEQ ID NO: 188270 - DNA, 80 bp, synthetic construct; identical to SEQ ID NO: 3540
  source 1..80: mol_type = other DNA

SEQ ID NO: 188271 - DNA, 80 bp, synthetic construct; identical to SEQ ID NO: 3541
  source 1..80: mol_type = other DNA

SEQ ID NO: 188272 - DNA, 80 bp, synthetic construct; identical to SEQ ID NO: 3542
  source 1..80: mol_type = other DNA

SEQ ID NO: 188273 - DNA, 80 bp, synthetic construct; identical to SEQ ID NO: 3543
  source 1..80: mol_type = other DNA

SEQ ID NO: 188274 - DNA, 80 bp, synthetic construct; identical to SEQ ID NO: 3544
  source 1..80: mol_type = other DNA

SEQ ID NO: 188275 - DNA, 80 bp, synthetic construct; identical to SEQ ID NO: 3545
  source 1..80: mol_type = other DNA

SEQ ID NO: 188276 - DNA, 80 bp, synthetic construct; identical to SEQ ID NO: 3546
  source 1..80: mol_type = other DNA

SEQ ID NO: 188277 - DNA, 80 bp, synthetic construct; identical to SEQ ID NO: 3547
  source 1..80: mol_type = other DNA

SEQ ID NO: 188278 - DNA, 80 bp, synthetic construct; identical to SEQ ID NO: 3548
  source 1..80: mol_type = other DNA

SEQ ID NO: 188279 - DNA, 80 bp, synthetic construct; identical to SEQ ID NO: 3549
  source 1..80: mol_type = other DNA

SEQ ID NO: 188280 - DNA, 80 bp, synthetic construct; identical to SEQ ID NO: 3550
  source 1..80: mol_type = other DNA

SEQ ID NO: 188281 - DNA, 80 bp, synthetic construct; identical to SEQ ID NO: 3551
  source 1..80: mol_type = other DNA

SEQ ID NO: 188282 - DNA, 80 bp, synthetic construct; identical to SEQ ID NO: 3552
  source 1..80: mol_type = other DNA

SEQ ID NO: 188283 - DNA, 80 bp, synthetic construct; identical to SEQ ID NO: 3553
  source 1..80: mol_type = other DNA

SEQ ID NO: 188284 - DNA, 80 bp, synthetic construct; identical to SEQ ID NO: 3554
  source 1..80: mol_type = other DNA

SEQ ID NO: 188285 - DNA, 80 bp, synthetic construct; identical to SEQ ID NO: 3555
  source 1..80: mol_type = other DNA

SEQ ID NO: 188286 - DNA, 80 bp, synthetic construct; identical to SEQ ID NO: 3556
  source 1..80: mol_type = other DNA

SEQ ID NO: 188287 - DNA, 80 bp, synthetic construct; identical to SEQ ID NO: 3557
  source 1..80: mol_type = other DNA

SEQ ID NO: 188288 - DNA, 80 bp, synthetic construct; identical to SEQ ID NO: 3558
  source 1..80: mol_type = other DNA

SEQ ID NO: 188289 - DNA, 80 bp, synthetic construct; identical to SEQ ID NO: 3559
  source 1..80: mol_type = other DNA

SEQ ID NO: 188290 - DNA, 80 bp, synthetic construct; identical to SEQ ID NO: 3560
  source 1..80: mol_type = other DNA

SEQ ID NO: 188291 - DNA, 80 bp, synthetic construct; identical to SEQ ID NO: 3561
  source 1..80: mol_type = other DNA

SEQ ID NO: 188292 - DNA, 80 bp, synthetic construct; identical to SEQ ID NO: 3562
  source 1..80: mol_type = other DNA

SEQ ID NO: 188293 - DNA, 80 bp, synthetic construct; identical to SEQ ID NO: 3563
  source 1..80: mol_type = other DNA

SEQ ID NO: 188294 - DNA, 80 bp, synthetic construct; identical to SEQ ID NO: 3564
  source 1..80: mol_type = other DNA

SEQ ID NO: 188295 - DNA, 80 bp, synthetic construct; identical to SEQ ID NO: 3565
  source 1..80: mol_type = other DNA

SEQ ID NO: 188296 - DNA, 80 bp, synthetic construct; identical to SEQ ID NO: 3566
  source 1..80: mol_type = other DNA

SEQ ID NO: 188297 - DNA, 80 bp, synthetic construct; identical to SEQ ID NO: 3567
  source 1..80: mol_type = other DNA

SEQ ID NO: 188298 - DNA, 80 bp, synthetic construct; identical to SEQ ID NO: 3568
  source 1..80: mol_type = other DNA

SEQ ID NO: 188299 - DNA, 80 bp, synthetic construct; identical to SEQ ID NO: 3569
  source 1..80: mol_type = other DNA

SEQ ID NO: 188300 - DNA, 80 bp, synthetic construct; identical to SEQ ID NO: 3570
  source 1..80: mol_type = other DNA

SEQ ID NO: 188301 - DNA, 80 bp, synthetic construct; identical to SEQ ID NO: 3571
  source 1..80: mol_type = other DNA

SEQ ID NO: 188302 - DNA, 80 bp, synthetic construct; identical to SEQ ID NO: 3572
  source 1..80: mol_type = other DNA

SEQ ID NO: 188303 - DNA, 80 bp, synthetic construct; identical to SEQ ID NO: 3573
  source 1..80: mol_type = other DNA

SEQ ID NO: 188304 - DNA, 80 bp, synthetic construct; identical to SEQ ID NO: 3574
  source 1..80: mol_type = other DNA

SEQ ID NO: 188305 - DNA, 80 bp, synthetic construct; identical to SEQ ID NO: 3575
  source 1..80: mol_type = other DNA

SEQ ID NO: 188306 - DNA, 80 bp, synthetic construct; identical to SEQ ID NO: 3576
  source 1..80: mol_type = other DNA

SEQ ID NO: 188307 - DNA, 80 bp, synthetic construct; identical to SEQ ID NO: 3577
  source 1..80: mol_type = other DNA

SEQ ID NO: 188308 - DNA, 80 bp, synthetic construct; identical to SEQ ID NO: 3578
  source 1..80: mol_type = other DNA

SEQ ID NO: 188309 - DNA, 80 bp, synthetic construct; identical to SEQ ID NO: 3579
  source 1..80: mol_type = other DNA

SEQ ID NO: 188310 - DNA, 80 bp, synthetic construct; identical to SEQ ID NO: 3580
  source 1..80: mol_type = other DNA

SEQ ID NO: 188311 - DNA, 80 bp, synthetic construct; identical to SEQ ID NO: 3581
  source 1..80: mol_type = other DNA

SEQ ID NO: 188312 - DNA, 80 bp, synthetic construct; identical to SEQ ID NO: 3582
  source 1..80: mol_type = other DNA

SEQ ID NO: 188313 - DNA, 80 bp, synthetic construct; identical to SEQ ID NO: 3583
  source 1..80: mol_type = other DNA

SEQ ID NO: 188314 - DNA, 80 bp, synthetic construct; identical to SEQ ID NO: 3584
  source 1..80: mol_type = other DNA

SEQ ID NO: 188315 - DNA, 80 bp, synthetic construct; identical to SEQ ID NO: 3585
  source 1..80: mol_type = other DNA

SEQ ID NO: 188316 - DNA, 80 bp, synthetic construct; identical to SEQ ID NO: 3586
  source 1..80: mol_type = other DNA

SEQ ID NO: 188317 - DNA, 80 bp, synthetic construct; identical to SEQ ID NO: 3587
  source 1..80: mol_type = other DNA

SEQ ID NO: 188318 - DNA, 80 bp, synthetic construct; identical to SEQ ID NO: 3588
  source 1..80: mol_type = other DNA

SEQ ID NO: 188319 - DNA, 80 bp, synthetic construct; identical to SEQ ID NO: 3589
  source 1..80: mol_type = other DNA

SEQ ID NO: 188320 - DNA, 80 bp, synthetic construct; identical to SEQ ID NO: 3590
  source 1..80: mol_type = other DNA

SEQ ID NO: 188321 - DNA, 80 bp, synthetic construct; identical to SEQ ID NO: 3591
  source 1..80: mol_type = other DNA

SEQ ID NO: 188322 - DNA, 80 bp, synthetic construct; identical to SEQ ID NO: 3592
  source 1..80: mol_type = other DNA

SEQ ID NO: 188323 - DNA, 80 bp, synthetic construct; identical to SEQ ID NO: 3593
  source 1..80: mol_type = other DNA

SEQ ID NO: 188324 - DNA, 80 bp, synthetic construct; identical to SEQ ID NO: 3594
  source 1..80: mol_type = other DNA

SEQ ID NO: 188325 - DNA, 80 bp, synthetic construct; identical to SEQ ID NO: 3595
  source 1..80: mol_type = other DNA

SEQ ID NO: 188326 - DNA, 80 bp, synthetic construct; identical to SEQ ID NO: 3596
  source 1..80: mol_type = other DNA

SEQ ID NO: 188327 - DNA, 80 bp, synthetic construct; identical to SEQ ID NO: 3597
  source 1..80: mol_type = other DNA

SEQ ID NO: 188328 - DNA, 80 bp, synthetic construct; identical to SEQ ID NO: 3598
  source 1..80: mol_type = other DNA

SEQ ID NO: 188329 - DNA, 80 bp, synthetic construct; identical to SEQ ID NO: 3599
  source 1..80: mol_type = other DNA

SEQ ID NO: 188330 - DNA, 80 bp, synthetic construct; identical to SEQ ID NO: 3600
  source 1..80: mol_type = other DNA

SEQ ID NO: 188331 - DNA, 80 bp, synthetic construct; identical to SEQ ID NO: 3601
  source 1..80: mol_type = other DNA

SEQ ID NO: 188332 - DNA, 80 bp, synthetic construct; identical to SEQ ID NO: 3602
  source 1..80: mol_type = other DNA

SEQ ID NO: 188333 - DNA, 80 bp, synthetic construct; identical to SEQ ID NO: 3603
  source 1..80: mol_type = other DNA

SEQ ID NO: 188334 - DNA, 80 bp, synthetic construct; identical to SEQ ID NO: 3604
  source 1..80: mol_type = other DNA

SEQ ID NO: 188335 - DNA, 80 bp, synthetic construct; identical to SEQ ID NO: 3605
  source 1..80: mol_type = other DNA

SEQ ID NO: 188336 - DNA, 80 bp, synthetic construct; identical to SEQ ID NO: 3606
  source 1..80: mol_type = other DNA

SEQ ID NO: 188337 - DNA, 80 bp, synthetic construct; identical to SEQ ID NO: 3607
  source 1..80: mol_type = other DNA

SEQ ID NO: 188338 - DNA, 80 bp, synthetic construct; identical to SEQ ID NO: 3608
  source 1..80: mol_type = other DNA

SEQ ID NO: 188339 - DNA, 80 bp, synthetic construct; identical to SEQ ID NO: 3609
  source 1..80: mol_type = other DNA

SEQ ID NO: 188340 - DNA, 80 bp, synthetic construct; identical to SEQ ID NO: 3610
  source 1..80: mol_type = other DNA

SEQ ID NO: 188341 - DNA, 80 bp, synthetic construct; identical to SEQ ID NO: 3611
  source 1..80: mol_type = other DNA

SEQ ID NO: 188342 - DNA, 80 bp, synthetic construct; identical to SEQ ID NO: 3612
  source 1..80: mol_type = other DNA

SEQ ID NO: 188343 - DNA, 80 bp, synthetic construct; identical to SEQ ID NO: 3613
  source 1..80: mol_type = other DNA

SEQ ID NO: 188344 - DNA, 80 bp, synthetic construct; identical to SEQ ID NO: 3614
  source 1..80: mol_type = other DNA

SEQ ID NO: 188345 - DNA, 80 bp, synthetic construct; identical to SEQ ID NO: 3615
  source 1..80: mol_type = other DNA

SEQ ID NO: 188346 - DNA, 80 bp, synthetic construct; identical to SEQ ID NO: 3616
  source 1..80: mol_type = other DNA

SEQ ID NO: 188347 - DNA, 80 bp, synthetic construct; identical to SEQ ID NO: 3617
  source 1..80: mol_type = other DNA

SEQ ID NO: 188348 - DNA, 80 bp, synthetic construct; identical to SEQ ID NO: 3618
  source 1..80: mol_type = other DNA

SEQ ID NO: 188349 - DNA, 80 bp, synthetic construct; identical to SEQ ID NO: 3619
  source 1..80: mol_type = other DNA

SEQ ID NO: 188350 - DNA, 80 bp, synthetic construct; identical to SEQ ID NO: 3620
  source 1..80: mol_type = other DNA

SEQ ID NO: 188351 - DNA, 80 bp, synthetic construct; identical to SEQ ID NO: 3621
  source 1..80: mol_type = other DNA

SEQ ID NO: 188352 - DNA, 80 bp, synthetic construct; identical to SEQ ID NO: 3622
  source 1..80: mol_type = other DNA

SEQ ID NO: 188353 - DNA, 80 bp, synthetic construct; identical to SEQ ID NO: 3623
  source 1..80: mol_type = other DNA

SEQ ID NO: 188354 - DNA, 80 bp, synthetic construct; identical to SEQ ID NO: 3624
  source 1..80: mol_type = other DNA

SEQ ID NO: 188355 - DNA, 80 bp, synthetic construct; identical to SEQ ID NO: 3625
  source 1..80: mol_type = other DNA

SEQ ID NO: 188356 - DNA, 80 bp, synthetic construct; identical to SEQ ID NO: 3626
  source 1..80: mol_type = other DNA

SEQ ID NO: 188357 - DNA, 80 bp, synthetic construct; identical to SEQ ID NO: 3627
  source 1..80: mol_type = other DNA

SEQ ID NO: 188358 - DNA, 80 bp, synthetic construct; identical to SEQ ID NO: 3628
  source 1..80: mol_type = other DNA

SEQ ID NO: 188359 - DNA, 80 bp, synthetic construct; identical to SEQ ID NO: 3629
  source 1..80: mol_type = other DNA

SEQ ID NO: 188360 - DNA, 80 bp, synthetic construct; identical to SEQ ID NO: 3630
  source 1..80: mol_type = other DNA

SEQ ID NO: 188361 - DNA, 80 bp, synthetic construct; identical to SEQ ID NO: 3631
  source 1..80: mol_type = other DNA

SEQ ID NO: 188362 - DNA, 80 bp, synthetic construct; identical to SEQ ID NO: 3632
  source 1..80: mol_type = other DNA

SEQ ID NO: 188363 - DNA, 80 bp, synthetic construct; identical to SEQ ID NO: 3633
  source 1..80: mol_type = other DNA

SEQ ID NO: 188364 - DNA, 80 bp, synthetic construct; identical to SEQ ID NO: 3634
  source 1..80: mol_type = other DNA

SEQ ID NO: 188365 - DNA, 80 bp, synthetic construct; identical to SEQ ID NO: 3635
  source 1..80: mol_type = other DNA

SEQ ID NO: 188366 - DNA, 80 bp, synthetic construct; identical to SEQ ID NO: 3636
  source 1..80: mol_type = other DNA

SEQ ID NO: 188367 - DNA, 80 bp, synthetic construct; identical to SEQ ID NO: 3637
  source 1..80: mol_type = other DNA

SEQ ID NO: 188368 - DNA, 80 bp, synthetic construct; identical to SEQ ID NO: 3638
  source 1..80: mol_type = other DNA

SEQ ID NO: 188369 - DNA, 80 bp, synthetic construct; identical to SEQ ID NO: 3639
  source 1..80: mol_type = other DNA

SEQ ID NO: 188370 - DNA, 80 bp, synthetic construct; identical to SEQ ID NO: 3640
  source 1..80: mol_type = other DNA

SEQ ID NO: 188371 - DNA, 80 bp, synthetic construct; identical to SEQ ID NO: 3641
  source 1..80: mol_type = other DNA

SEQ ID NO: 188372 - DNA, 80 bp, synthetic construct; identical to SEQ ID NO: 3642
  source 1..80: mol_type = other DNA

SEQ ID NO: 188373 - DNA, 80 bp, synthetic construct; identical to SEQ ID NO: 3643
  source 1..80: mol_type = other DNA

SEQ ID NO: 188374 - DNA, 80 bp, synthetic construct; identical to SEQ ID NO: 3644
  source 1..80: mol_type = other DNA

SEQ ID NO: 188375 - DNA, 80 bp, synthetic construct; identical to SEQ ID NO: 3645
  source 1..80: mol_type = other DNA

SEQ ID NO: 188376 - DNA, 80 bp, synthetic construct; identical to SEQ ID NO: 3646
  source 1..80: mol_type = other DNA

SEQ ID NO: 188377 - DNA, 80 bp, synthetic construct; identical to SEQ ID NO: 3647
  source 1..80: mol_type = other DNA

SEQ ID NO: 188378 - DNA, 80 bp, synthetic construct; identical to SEQ ID NO: 3648
  source 1..80: mol_type = other DNA

SEQ ID NO: 188379 - DNA, 80 bp, synthetic construct; identical to SEQ ID NO: 3649
  source 1..80: mol_type = other DNA

SEQ ID NO: 188380 - DNA, 80 bp, synthetic construct; identical to SEQ ID NO: 3650
  source 1..80: mol_type = other DNA

SEQ ID NO: 188381 - DNA, 80 bp, synthetic construct; identical to SEQ ID NO: 3651
  source 1..80: mol_type = other DNA

SEQ ID NO: 188382 - DNA, 80 bp, synthetic construct; identical to SEQ ID NO: 3652
  source 1..80: mol_type = other DNA

SEQ ID NO: 188383 - DNA, 80 bp, synthetic construct; identical to SEQ ID NO: 3653
  source 1..80: mol_type = other DNA

SEQ ID NO: 188384 - DNA, 80 bp, synthetic construct; identical to SEQ ID NO: 3654
  source 1..80: mol_type = other DNA

SEQ ID NO: 188385 - DNA, 80 bp, synthetic construct; identical to SEQ ID NO: 3655
  source 1..80: mol_type = other DNA

SEQ ID NO: 188386 - DNA, 80 bp, synthetic construct; identical to SEQ ID NO: 3656
  source 1..80: mol_type = other DNA

SEQ ID NO: 188387 - DNA, 80 bp, synthetic construct; identical to SEQ ID NO: 3657
  source 1..80: mol_type = other DNA

SEQ ID NO: 188388 - DNA, 80 bp, synthetic construct; identical to SEQ ID NO: 3658
  source 1..80: mol_type = other DNA

SEQ ID NO: 188389 - DNA, 80 bp, synthetic construct; identical to SEQ ID NO: 3659
  source 1..80: mol_type = other DNA

SEQ ID NO: 188390 - DNA, 80 bp, synthetic construct; identical to SEQ ID NO: 3660
  source 1..80: mol_type = other DNA

SEQ ID NO: 188391 - DNA, 80 bp, synthetic construct; identical to SEQ ID NO: 3661
  source 1..80: mol_type = other DNA

SEQ ID NO: 188392 - DNA, 80 bp, synthetic construct; identical to SEQ ID NO: 3662
  source 1..80: mol_type = other DNA

SEQ ID NO: 188393 - DNA, 80 bp, synthetic construct; identical to SEQ ID NO: 3663
  source 1..80: mol_type = other DNA

SEQ ID NO: 188394 - DNA, 80 bp, synthetic construct; identical to SEQ ID NO: 3664
  source 1..80: mol_type = other DNA

SEQ ID NO: 188395 - DNA, 80 bp, synthetic construct; identical to SEQ ID NO: 3665
  source 1..80: mol_type = other DNA

SEQ ID NO: 188396 - DNA, 80 bp, synthetic construct; identical to SEQ ID NO: 3666
  source 1..80: mol_type = other DNA

SEQ ID NO: 188397 - DNA, 80 bp, synthetic construct; identical to SEQ ID NO: 3667
  source 1..80: mol_type = other DNA

SEQ ID NO: 188398 - DNA, 80 bp, synthetic construct; identical to SEQ ID NO: 3668
  source 1..80: mol_type = other DNA

SEQ ID NO: 188399 - DNA, 80 bp, synthetic construct; identical to SEQ ID NO: 3669
  source 1..80: mol_type = other DNA

SEQ ID NO: 188400 - DNA, 80 bp, synthetic construct; identical to SEQ ID NO: 3670
  source 1..80: mol_type = other DNA

SEQ ID NO: 188401 - DNA, 80 bp, synthetic construct; identical to SEQ ID NO: 3671
  source 1..80: mol_type = other DNA

SEQ ID NO: 188402 - DNA, 80 bp, synthetic construct; identical to SEQ ID NO: 3672
  source 1..80: mol_type = other DNA

SEQ ID NO: 188403 - DNA, 80 bp, synthetic construct; identical to SEQ ID NO: 3673
  source 1..80: mol_type = other DNA

SEQ ID NO: 188404 - DNA, 80 bp, synthetic construct; identical to SEQ ID NO: 3674
  source 1..80: mol_type = other DNA

SEQ ID NO: 188405 - DNA, 80 bp, synthetic construct; identical to SEQ ID NO: 3675
  source 1..80: mol_type = other DNA

SEQ ID NO: 188406 - DNA, 80 bp, synthetic construct; identical to SEQ ID NO: 3676
  source 1..80: mol_type = other DNA

SEQ ID NO: 188407 - DNA, 80 bp, synthetic construct; identical to SEQ ID NO: 3677
  source 1..80: mol_type = other DNA

SEQ ID NO: 188408 - DNA, 80 bp, synthetic construct; identical to SEQ ID NO: 3678
  source 1..80: mol_type = other DNA

SEQ ID NO: 188409 - DNA, 80 bp, synthetic construct; identical to SEQ ID NO: 3679
  source 1..80: mol_type = other DNA

SEQ ID NO: 188410 - DNA, 80 bp, synthetic construct; identical to SEQ ID NO: 3680
  source 1..80: mol_type = other DNA

SEQ ID NO: 188411 - DNA, 80 bp, synthetic construct; identical to SEQ ID NO: 3681
  source 1..80: mol_type = other DNA

SEQ ID NO: 188412 - DNA, 80 bp, synthetic construct; identical to SEQ ID NO: 3682
  source 1..80: mol_type = other DNA

SEQ ID NO: 188413 - DNA, 80 bp, synthetic construct; identical to SEQ ID NO: 3683
  source 1..80: mol_type = other DNA

SEQ ID NO: 188414 - DNA, 80 bp, synthetic construct; identical to SEQ ID NO: 3684
  source 1..80: mol_type = other DNA

SEQ ID NO: 188415 - DNA, 80 bp, synthetic construct; identical to SEQ ID NO: 3685
  source 1..80: mol_type = other DNA

SEQ ID NO: 188416 - DNA, 80 bp, synthetic construct; identical to SEQ ID NO: 3686
  source 1..80: mol_type = other DNA

SEQ ID NO: 188417 - DNA, 80 bp, synthetic construct; identical to SEQ ID NO: 3687
  source 1..80: mol_type = other DNA

SEQ ID NO: 188418 - DNA, 80 bp, synthetic construct; identical to SEQ ID NO: 3688
  source 1..80: mol_type = other DNA

SEQ ID NO: 188419 - DNA, 80 bp, synthetic construct; identical to SEQ ID NO: 3689
  source 1..80: mol_type = other DNA

SEQ ID NO: 188420 - DNA, 80 bp, synthetic construct; identical to SEQ ID NO: 3690
  source 1..80: mol_type = other DNA

SEQ ID NO: 188421 - DNA, 80 bp, synthetic construct; identical to SEQ ID NO: 3691
  source 1..80: mol_type = other DNA

SEQ ID NO: 188422 - DNA, 80 bp, synthetic construct; identical to SEQ ID NO: 3692
  source 1..80: mol_type = other DNA

SEQ ID NO: 188423 - DNA, 80 bp, synthetic construct; identical to SEQ ID NO: 3693
  source 1..80: mol_type = other DNA

SEQ ID NO: 188424 - DNA, 80 bp, synthetic construct; identical to SEQ ID NO: 3694
  source 1..80: mol_type = other DNA

SEQ ID NO: 188425 - DNA, 80 bp, synthetic construct; identical to SEQ ID NO: 3695
  source 1..80: mol_type = other DNA

SEQ ID NO: 188426 - DNA, 80 bp, synthetic construct; identical to SEQ ID NO: 3696
  source 1..80: mol_type = other DNA

SEQ ID NO: 188427 - DNA, 80 bp, synthetic construct; identical to SEQ ID NO: 3697
  source 1..80: mol_type = other DNA

SEQ ID NO: 188428 - DNA, 80 bp, synthetic construct; identical to SEQ ID NO: 3698
  source 1..80: mol_type = other DNA

SEQ ID NO: 188429 - DNA, 80 bp, synthetic construct; identical to SEQ ID NO: 3699
  source 1..80: mol_type = other DNA

SEQ ID NO: 188430 - DNA, 80 bp, synthetic construct; identical to SEQ ID NO: 3700
  source 1..80: mol_type = other DNA

SEQ ID NO: 188431 - DNA, 80 bp, synthetic construct; identical to SEQ ID NO: 3701
  source 1..80: mol_type = other DNA

SEQ ID NO: 188432 - DNA, 80 bp, synthetic construct; identical to SEQ ID NO: 3702
  source 1..80: mol_type = other DNA

SEQ ID NO: 188433 - DNA, 80 bp, synthetic construct; identical to SEQ ID NO: 3703
  source 1..80: mol_type = other DNA

SEQ ID NO: 188434 - DNA, 80 bp, synthetic construct; identical to SEQ ID NO: 3704
  source 1..80: mol_type = other DNA

SEQ ID NO: 188435 - DNA, 80 bp, synthetic construct; identical to SEQ ID NO: 3705
  source 1..80: mol_type = other DNA

SEQ ID NO: 188436 - DNA, 80 bp, synthetic construct; identical to SEQ ID NO: 3706
  source 1..80: mol_type = other DNA

SEQ ID NO: 188437 - DNA, 80 bp, synthetic construct; identical to SEQ ID NO: 3707
  source 1..80: mol_type = other DNA

SEQ ID NO: 188438 - DNA, 80 bp, synthetic construct; identical to SEQ ID NO: 3708
  source 1..80: mol_type = other DNA

SEQ ID NO: 188439 - DNA, 80 bp, synthetic construct; identical to SEQ ID NO: 3709
  source 1..80: mol_type = other DNA

SEQ ID NO: 188440 - DNA, 80 bp, synthetic construct; identical to SEQ ID NO: 3710
  source 1..80: mol_type = other DNA

SEQ ID NO: 188441 - DNA, 80 bp, synthetic construct; identical to SEQ ID NO: 3711
  source 1..80: mol_type = other DNA

SEQ ID NO: 188442 - DNA, 80 bp, synthetic construct; identical to SEQ ID NO: 3712
  source 1..80: mol_type = other DNA

SEQ ID NO: 188443 - DNA, 80 bp, synthetic construct; identical to SEQ ID NO: 3713
  source 1..80: mol_type = other DNA

SEQ ID NO: 188444 - DNA, 80 bp, synthetic construct; identical to SEQ ID NO: 3714
  source 1..80: mol_type = other DNA

SEQ ID NO: 188445 - DNA, 80 bp, synthetic construct; identical to SEQ ID NO: 3715
  source 1..80: mol_type = other DNA

SEQ ID NO: 188446 - DNA, 80 bp, synthetic construct; identical to SEQ ID NO: 3716
  source 1..80: mol_type = other DNA

SEQ ID NO: 188447 - DNA, 80 bp, synthetic construct; identical to SEQ ID NO: 3717
  source 1..80: mol_type = other DNA

SEQ ID NO: 188448 - DNA, 80 bp, synthetic construct; identical to SEQ ID NO: 3718
  source 1..80: mol_type = other DNA

SEQ ID NO: 188449 - DNA, 80 bp, synthetic construct; identical to SEQ ID NO: 3719
  source 1..80: mol_type = other DNA

SEQ ID NO: 188450 - DNA, 80 bp, synthetic construct; identical to SEQ ID NO: 3720
  source 1..80: mol_type = other DNA

SEQ ID NO: 188451 - DNA, 80 bp, synthetic construct; identical to SEQ ID NO: 3721
  source 1..80: mol_type = other DNA

SEQ ID NO: 188452 - DNA, 80 bp, synthetic construct; identical to SEQ ID NO: 3722
  source 1..80: mol_type = other DNA

SEQ ID NO: 188453 - DNA, 80 bp, synthetic construct; identical to SEQ ID NO: 3723
  source 1..80: mol_type = other DNA

SEQ ID NO: 188454 - DNA, 80 bp, synthetic construct; identical to SEQ ID NO: 3724
  source 1..80: mol_type = other DNA

SEQ ID NO: 188455 - DNA, 80 bp, synthetic construct; identical to SEQ ID NO: 3725
  source 1..80: mol_type = other DNA

SEQ ID NO: 188456 - DNA, 80 bp, synthetic construct; identical to SEQ ID NO: 3726
  source 1..80: mol_type = other DNA

SEQ ID NO: 188457 - DNA, 80 bp, synthetic construct; identical to SEQ ID NO: 3727
  source 1..80: mol_type = other DNA

SEQ ID NO: 188458 - DNA, 80 bp, synthetic construct; identical to SEQ ID NO: 3728
  source 1..80: mol_type = other DNA

SEQ ID NO: 188459 - DNA, 80 bp, synthetic construct; identical to SEQ ID NO: 3729
  source 1..80: mol_type = other DNA

SEQ ID NO: 188460 - DNA, 80 bp, synthetic construct; identical to SEQ ID NO: 3730
  source 1..80: mol_type = other DNA

SEQ ID NO: 188461 - DNA, 80 bp, synthetic construct; identical to SEQ ID NO: 3731
  source 1..80: mol_type = other DNA

SEQ ID NO: 188462 - DNA, 80 bp, synthetic construct; identical to SEQ ID NO: 3732
  source 1..80: mol_type = other DNA

SEQ ID NO: 188463 - DNA, 80 bp, synthetic construct; identical to SEQ ID NO: 3733
  source 1..80: mol_type = other DNA

SEQ ID NO: 188464 - DNA, 80 bp, synthetic construct; identical to SEQ ID NO: 3734
  source 1..80: mol_type = other DNA

SEQ ID NO: 188465 - DNA, 80 bp, synthetic construct; identical to SEQ ID NO: 3735
  source 1..80: mol_type = other DNA

SEQ ID NO: 188466 - DNA, 80 bp, synthetic construct; identical to SEQ ID NO: 3736
  source 1..80: mol_type = other DNA

SEQ ID NO: 188467 - DNA, 80 bp, synthetic construct; identical to SEQ ID NO: 3737
  source 1..80: mol_type = other DNA

SEQ ID NO: 188468 - DNA, 80 bp, synthetic construct; identical to SEQ ID NO: 3738
  source 1..80: mol_type = other DNA

SEQ ID NO: 188469 - DNA, 80 bp, synthetic construct; identical to SEQ ID NO: 3739
  source 1..80: mol_type = other DNA

SEQ ID NO: 188470 - DNA, 80 bp, synthetic construct; identical to SEQ ID NO: 3740
  source 1..80: mol_type = other DNA

SEQ ID NO: 188471 - DNA, 80 bp, synthetic construct; identical to SEQ ID NO: 3741
  source 1..80: mol_type = other DNA

SEQ ID NO: 188472 - DNA, 80 bp, synthetic construct; identical to SEQ ID NO: 3742
  source 1..80: mol_type = other DNA

SEQ ID NO: 188473 - DNA, 80 bp, synthetic construct; identical to SEQ ID NO: 3743
  source 1..80: mol_type = other DNA

SEQ ID NO: 188474 - DNA, 80 bp, synthetic construct; identical to SEQ ID NO: 3744
  source 1..80: mol_type = other DNA

SEQ ID NO: 188475 - DNA, 80 bp, synthetic construct; identical to SEQ ID NO: 3745
  source 1..80: mol_type = other DNA

SEQ ID NO: 188476 - DNA, 80 bp, synthetic construct; identical to SEQ ID NO: 3746
  source 1..80: mol_type = other DNA

SEQ ID NO: 188477 - DNA, 80 bp, synthetic construct; identical to SEQ ID NO: 3747
  source 1..80: mol_type = other DNA

SEQ ID NO: 188478 - DNA, 80 bp, synthetic construct; identical to SEQ ID NO: 3748
  source 1..80: mol_type = other DNA

SEQ ID NO: 188479 - DNA, 80 bp, synthetic construct; identical to SEQ ID NO: 3749
  source 1..80: mol_type = other DNA

SEQ ID NO: 188480 - DNA, 80 bp, synthetic construct; identical to SEQ ID NO: 3750
  source 1..80: mol_type = other DNA

SEQ ID NO: 188481 - DNA, 80 bp, synthetic construct; identical to SEQ ID NO: 3751
  source 1..80: mol_type = other DNA

SEQ ID NO: 188482 - DNA, 80 bp, synthetic construct; identical to SEQ ID NO: 3752
  source 1..80: mol_type = other DNA

SEQ ID NO: 188483 - DNA, 80 bp, synthetic construct; identical to SEQ ID NO: 3753
  source 1..80: mol_type = other DNA

SEQ ID NO: 188484 - DNA, 80 bp, synthetic construct; identical to SEQ ID NO: 3754
  source 1..80: mol_type = other DNA

SEQ ID NO: 188485 - DNA, 80 bp, synthetic construct; identical to SEQ ID NO: 3755
  source 1..80: mol_type = other DNA

SEQ ID NO: 188486 - DNA, 80 bp, synthetic construct; identical to SEQ ID NO: 3756
  source 1..80: mol_type = other DNA

SEQ ID NO: 188487 - DNA, 80 bp, synthetic construct; identical to SEQ ID NO: 3757
  source 1..80: mol_type = other DNA

SEQ ID NO: 188488 - DNA, 80 bp, synthetic construct; identical to SEQ ID NO: 3758
  source 1..80: mol_type = other DNA

SEQ ID NO: 188489 - DNA, 80 bp, synthetic construct; identical to SEQ ID NO: 3759
  source 1..80: mol_type = other DNA

SEQ ID NO: 188490 - DNA, 80 bp, synthetic construct; identical to SEQ ID NO: 3760
  source 1..80: mol_type = other DNA

SEQ ID NO: 188491 - DNA, 80 bp, synthetic construct; identical to SEQ ID NO: 3761
  source 1..80: mol_type = other DNA

SEQ ID NO: 188492 - DNA, 80 bp, synthetic construct; identical to SEQ ID NO: 3762
  source 1..80: mol_type = other DNA

SEQ ID NO: 188493 - DNA, 80 bp, synthetic construct; identical to SEQ ID NO: 3763
  source 1..80: mol_type = other DNA

SEQ ID NO: 188494 - DNA, 80 bp, synthetic construct; identical to SEQ ID NO: 3764
  source 1..80: mol_type = other DNA

SEQ ID NO: 188495 - DNA, 80 bp, synthetic construct; identical to SEQ ID NO: 3765
  source 1..80: mol_type = other DNA

SEQ ID NO: 188496 - DNA, 80 bp, synthetic construct; identical to SEQ ID NO: 3766
  source 1..80: mol_type = other DNA

SEQ ID NO: 188497 - DNA, 80 bp, synthetic construct; identical to SEQ ID NO: 3767
  source 1..80: mol_type = other DNA

SEQ ID NO: 188498 - DNA, 80 bp, synthetic construct; identical to SEQ ID NO: 3768
  source 1..80: mol_type = other DNA

SEQ ID NO: 188499 - DNA, 80 bp, synthetic construct; identical to SEQ ID NO: 3769
  source 1..80: mol_type = other DNA

SEQ ID NO: 188500 - DNA, 80 bp, synthetic construct; identical to SEQ ID NO: 3770
  source 1..80: mol_type = other DNA

SEQ ID NO: 188501 - DNA, 80 bp, synthetic construct; identical to SEQ ID NO: 3771
  source 1..80: mol_type = other DNA

SEQ ID NO: 188502 - DNA, 80 bp, synthetic construct; identical to SEQ ID NO: 3772
  source 1..80: mol_type = other DNA

SEQ ID NO: 188503 - DNA, 80 bp, synthetic construct; identical to SEQ ID NO: 3773
  source 1..80: mol_type = other DNA

SEQ ID NO: 188504 - DNA, 80 bp, synthetic construct; identical to SEQ ID NO: 3774
  source 1..80: mol_type = other DNA

SEQ ID NO: 188505 - DNA, 80 bp, synthetic construct; identical to SEQ ID NO: 3775
  source 1..80: mol_type = other DNA

SEQ ID NO: 188506 - DNA, 80 bp, synthetic construct; identical to SEQ ID NO: 3776
  source 1..80: mol_type = other DNA

SEQ ID NO: 188507 - DNA, 80 bp, synthetic construct; identical to SEQ ID NO: 3777
  source 1..80: mol_type = other DNA

SEQ ID NO: 188508 - DNA, 80 bp, synthetic construct; identical to SEQ ID NO: 3778
  source 1..80: mol_type = other DNA

SEQ ID NO: 188509 - DNA, 80 bp, synthetic construct; identical to SEQ ID NO: 3779
  source 1..80: mol_type = other DNA

SEQ ID NO: 188510 - DNA, 80 bp, synthetic construct; identical to SEQ ID NO: 3780
  source 1..80: mol_type = other DNA

SEQ ID NO: 188511 - DNA, 80 bp, synthetic construct; identical to SEQ ID NO: 3781
  source 1..80: mol_type = other DNA

SEQ ID NO: 188512 - DNA, 80 bp, synthetic construct; identical to SEQ ID NO: 3782
  source 1..80: mol_type = other DNA

SEQ ID NO: 188513 - DNA, 80 bp, synthetic construct; identical to SEQ ID NO: 3783
  source 1..80: mol_type = other DNA

SEQ ID NO: 188514 - DNA, 80 bp, synthetic construct; identical to SEQ ID NO: 3784
  source 1..80: mol_type = other DNA

SEQ ID NO: 188515 - DNA, 80 bp, synthetic construct; identical to SEQ ID NO: 3785
  source 1..80: mol_type = other DNA

SEQ ID NO: 188516 - DNA, 80 bp, synthetic construct; identical to SEQ ID NO: 3786
  source 1..80: mol_type = other DNA

SEQ ID NO: 188517 - DNA, 80 bp, synthetic construct; identical to SEQ ID NO: 3787
  source 1..80: mol_type = other DNA

SEQ ID NO: 188518 - DNA, 80 bp, synthetic construct; identical to SEQ ID NO: 3788
  source 1..80: mol_type = other DNA

SEQ ID NO: 188519 - DNA, 80 bp, synthetic construct; identical to SEQ ID NO: 3789
  source 1..80: mol_type = other DNA

SEQ ID NO: 188520 - DNA, 80 bp, synthetic construct; identical to SEQ ID NO: 3790
  source 1..80: mol_type = other DNA

SEQ ID NO: 188521 - DNA, 80 bp, synthetic construct; identical to SEQ ID NO: 3791
  source 1..80: mol_type = other DNA

SEQ ID NO: 188522 - DNA, 80 bp, synthetic construct; identical to SEQ ID NO: 3792
  source 1..80: mol_type = other DNA

SEQ ID NO: 188523 - DNA, 80 bp, synthetic construct; identical to SEQ ID NO: 3793
  source 1..80: mol_type = other DNA

SEQ ID NO: 188524 - DNA, 80 bp, synthetic construct; identical to SEQ ID NO: 3794
  source 1..80: mol_type = other DNA

SEQ ID NO: 188525 - DNA, 80 bp, synthetic construct; identical to SEQ ID NO: 3795
  source 1..80: mol_type = other DNA

SEQ ID NO: 188526 - DNA, 80 bp, synthetic construct; identical to SEQ ID NO: 3796
  source 1..80: mol_type = other DNA

SEQ ID NO: 188527 - DNA, 80 bp, synthetic construct; identical to SEQ ID NO: 3797
  source 1..80: mol_type = other DNA

SEQ ID NO: 188528 - DNA, 80 bp, synthetic construct; identical to SEQ ID NO: 3798
  source 1..80: mol_type = other DNA

SEQ ID NO: 188529 - DNA, 80 bp, synthetic construct; identical to SEQ ID NO: 3799
  source 1..80: mol_type = other DNA

SEQ ID NO: 188530 - DNA, 80 bp, synthetic construct; identical to SEQ ID NO: 3800
  source 1..80: mol_type = other DNA

SEQ ID NO: 188531 - DNA, 80 bp, synthetic construct; identical to SEQ ID NO: 3801
  source 1..80: mol_type = other DNA

SEQ ID NO: 188532 - DNA, 80 bp, synthetic construct; identical to SEQ ID NO: 3802
  source 1..80: mol_type = other DNA

SEQ ID NO: 188533 - DNA, 80 bp, synthetic construct; identical to SEQ ID NO: 3803
  source 1..80: mol_type = other DNA

SEQ ID NO: 188534 - DNA, 80 bp, synthetic construct; identical to SEQ ID NO: 3804
  source 1..80: mol_type = other DNA

SEQ ID NO: 188535 - DNA, 80 bp, synthetic construct; identical to SEQ ID NO: 3805
  source 1..80: mol_type = other DNA

SEQ ID NO: 188536 - DNA, 80 bp, synthetic construct; identical to SEQ ID NO: 3806
  source 1..80: mol_type = other DNA

SEQ ID NO: 188537 - DNA, 80 bp, synthetic construct; identical to SEQ ID NO: 3807
  source 1..80: mol_type = other DNA

SEQ ID NO: 188538 - DNA, 80 bp, synthetic construct; identical to SEQ ID NO: 3808
  source 1..80: mol_type = other DNA

SEQ ID NO: 188539 - DNA, 80 bp, synthetic construct; identical to SEQ ID NO: 3809
  source 1..80: mol_type = other DNA

SEQ ID NO: 188540 - DNA, 80 bp, synthetic construct; identical to SEQ ID NO: 3810
  source 1..80: mol_type = other DNA

SEQ ID NO: 188541 - DNA, 80 bp, synthetic construct; identical to SEQ ID NO: 3811
  source 1..80: mol_type = other DNA

SEQ ID NO: 188542 - DNA, 80 bp, synthetic construct; identical to SEQ ID NO: 3812
  source 1..80: mol_type = other DNA

SEQ ID NO: 188543 - DNA, 80 bp, synthetic construct; identical to SEQ ID NO: 3813
  source 1..80: mol_type = other DNA

SEQ ID NO: 188544 - DNA, 80 bp, synthetic construct; identical to SEQ ID NO: 3814
  source 1..80: mol_type = other DNA

SEQ ID NO: 188545 - DNA, 80 bp, synthetic construct; identical to SEQ ID NO: 3815
  source 1..80: mol_type = other DNA

SEQ ID NO: 188546 - DNA, 80 bp, synthetic construct; identical to SEQ ID NO: 3816
  source 1..80: mol_type = other DNA

SEQ ID NO: 188547 - DNA, 80 bp, synthetic construct; identical to SEQ ID NO: 3817
  source 1..80: mol_type = other DNA

SEQ ID NO: 188548 - DNA, 80 bp, synthetic construct; identical to SEQ ID NO: 3818
  source 1..80: mol_type = other DNA

SEQ ID NO: 188549 - DNA, 80 bp, synthetic construct; identical to SEQ ID NO: 3819
  source 1..80: mol_type = other DNA

SEQ ID NO: 188550 - DNA, 80 bp, synthetic construct; identical to SEQ ID NO: 3820
  source 1..80: mol_type = other DNA

SEQ ID NO: 188551 - DNA, 80 bp, synthetic construct; identical to SEQ ID NO: 3821
  source 1..80: mol_type = other DNA

SEQ ID NO: 188552 - DNA, 80 bp, synthetic construct; identical to SEQ ID NO: 3822
  source 1..80: mol_type = other DNA

SEQ ID NO: 188553 - DNA, 80 bp, synthetic construct; identical to SEQ ID NO: 3823
  source 1..80: mol_type = other DNA

SEQ ID NO: 188554 - DNA, 80 bp, synthetic construct; identical to SEQ ID NO: 3824
  source 1..80: mol_type = other DNA

SEQ ID NO: 188555 - DNA, 80 bp, synthetic construct; identical to SEQ ID NO: 3825
  source 1..80: mol_type = other DNA

SEQ ID NO: 188556 - DNA, 80 bp, synthetic construct; identical to SEQ ID NO: 3826
  source 1..80: mol_type = other DNA

SEQ ID NO: 188557 - DNA, 80 bp, synthetic construct; identical to SEQ ID NO: 3827
  source 1..80: mol_type = other DNA

SEQ ID NO: 188558 - DNA, 80 bp, synthetic construct; identical to SEQ ID NO: 3828
  source 1..80: mol_type = other DNA

SEQ ID NO: 188559 - DNA, 80 bp, synthetic construct; identical to SEQ ID NO: 3829
  source 1..80: mol_type = other DNA

SEQ ID NO: 188560 - DNA, 80 bp, synthetic construct; identical to SEQ ID NO: 3830
  source 1..80: mol_type = other DNA

SEQ ID NO: 188561 - DNA, 80 bp, synthetic construct; identical to SEQ ID NO: 3831
  source 1..80: mol_type = other DNA

SEQ ID NO: 188562 - DNA, 80 bp, synthetic construct; identical to SEQ ID NO: 3832
  source 1..80: mol_type = other DNA

SEQ ID NO: 188563 - DNA, 80 bp, synthetic construct; identical to SEQ ID NO: 3833
  source 1..80: mol_type = other DNA

SEQ ID NO: 188564 - DNA, 80 bp, synthetic construct; identical to SEQ ID NO: 3834
  source 1..80: mol_type = other DNA

SEQ ID NO: 188565 - DNA, 80 bp, synthetic construct; identical to SEQ ID NO: 3835
  source 1..80: mol_type = other DNA

SEQ ID NO: 188566 - DNA, 80 bp, synthetic construct; identical to SEQ ID NO: 3836
  source 1..80: mol_type = other DNA

SEQ ID NO: 188567 - DNA, 80 bp, synthetic construct; identical to SEQ ID NO: 3837
  source 1..80: mol_type = other DNA

SEQ ID NO: 188568 - DNA, 80 bp, synthetic construct; identical to SEQ ID NO: 3838
  source 1..80: mol_type = other DNA

SEQ ID NO: 188569 - DNA, 80 bp, synthetic construct; identical to SEQ ID NO: 3839
  source 1..80: mol_type = other DNA

SEQ ID NO: 188570 - DNA, 80 bp, synthetic construct; identical to SEQ ID NO: 3840
  source 1..80: mol_type = other DNA

SEQ ID NO: 188571 - DNA, 80 bp, synthetic construct; identical to SEQ ID NO: 3841
  source 1..80: mol_type = other DNA

SEQ ID NO: 188572 - DNA, 80 bp, synthetic construct; identical to SEQ ID NO: 3842
  source 1..80: mol_type = other DNA

SEQ ID NO: 188573 - DNA, 80 bp, synthetic construct; identical to SEQ ID NO: 3843
  source 1..80: mol_type = other DNA

SEQ ID NO: 188574 - DNA, 80 bp, synthetic construct; identical to SEQ ID NO: 3844
  source 1..80: mol_type = other DNA

SEQ ID NO: 188575 - DNA, 80 bp, synthetic construct; identical to SEQ ID NO: 3845
  source 1..80: mol_type = other DNA

SEQ ID NO: 188576 - DNA, 80 bp, synthetic construct; identical to SEQ ID NO: 3846
  source 1..80: mol_type = other DNA

SEQ ID NO: 188577 - DNA, 80 bp, synthetic construct; identical to SEQ ID NO: 3847
  source 1..80: mol_type = other DNA

SEQ ID NO: 188578 - DNA, 80 bp, synthetic construct; identical to SEQ ID NO: 3848
  source 1..80: mol_type = other DNA

SEQ ID NO: 188579 - DNA, 80 bp, synthetic construct; identical to SEQ ID NO: 3849
  source 1..80: mol_type = other DNA

SEQ ID NO: 188580 - DNA, 80 bp, synthetic construct; identical to SEQ ID NO: 3850
  source 1..80: mol_type = other DNA

SEQ ID NO: 188581 - DNA, 80 bp, synthetic construct; identical to SEQ ID NO: 3851
  source 1..80: mol_type = other DNA

SEQ ID NO: 188582 - DNA, 80 bp, synthetic construct; identical to SEQ ID NO: 3852
  source 1..80: mol_type = other DNA

SEQ ID NO: 188583 - DNA, 80 bp, synthetic construct; identical to SEQ ID NO: 3853
  source 1..80: mol_type = other DNA

SEQ ID NO: 188584 - DNA, 80 bp, synthetic construct; identical to SEQ ID NO: 3854
  source 1..80: mol_type = other DNA

SEQ ID NO: 188585 - DNA, 80 bp, synthetic construct; identical to SEQ ID NO: 3855
  source 1..80: mol_type = other DNA

SEQ ID NO: 188586 - DNA, 80 bp, synthetic construct; identical to SEQ ID NO: 3856
  source 1..80: mol_type = other DNA

SEQ ID NO: 188587 - DNA, 80 bp, synthetic construct; identical to SEQ ID NO: 3857
  source 1..80: mol_type = other DNA

SEQ ID NO: 188588 - DNA, 80 bp, synthetic construct; identical to SEQ ID NO: 3858
  source 1..80: mol_type = other DNA

SEQ ID NO: 188589 - DNA, 80 bp, synthetic construct; identical to SEQ ID NO: 3859
  source 1..80: mol_type = other DNA

SEQ ID NO: 188590 - DNA, 80 bp, synthetic construct; identical to SEQ ID NO: 3860
  source 1..80: mol_type = other DNA

SEQ ID NO: 188591 - DNA, 80 bp, synthetic construct; identical to SEQ ID NO: 3861
  source 1..80: mol_type = other DNA

SEQ ID NO: 188592 - DNA, 80 bp, synthetic construct; identical to SEQ ID NO: 3862
  source 1..80: mol_type = other DNA

SEQ ID NO: 188593 - DNA, 80 bp, synthetic construct; identical to SEQ ID NO: 3863
  source 1..80: mol_type = other DNA

SEQ ID NO: 188594 - DNA, 80 bp, synthetic construct; identical to SEQ ID NO: 3864
  source 1..80: mol_type = other DNA

SEQ ID NO: 188595 - DNA, 80 bp, synthetic construct; identical to SEQ ID NO: 3865
  source 1..80: mol_type = other DNA

SEQ ID NO: 188596 - DNA, 80 bp, synthetic construct; identical to SEQ ID NO: 3866
  source 1..80: mol_type = other DNA

SEQ ID NO: 188597 - DNA, 80 bp, synthetic construct; identical to SEQ ID NO: 3867
  source 1..80: mol_type = other DNA

SEQ ID NO: 188598 - DNA, 80 bp, synthetic construct; identical to SEQ ID NO: 3868
  source 1..80: mol_type = other DNA

SEQ ID NO: 188599 - DNA, 80 bp, synthetic construct; identical to SEQ ID NO: 3869
  source 1..80: mol_type = other DNA

SEQ ID NO: 188600 - DNA, 80 bp, synthetic construct; identical to SEQ ID NO: 3870
  source 1..80: mol_type = other DNA

SEQ ID NO: 188601 - DNA, 80 bp, synthetic construct; identical to SEQ ID NO: 3871
  source 1..80: mol_type = other DNA

SEQ ID NO: 188602 - DNA, 80 bp, synthetic construct; identical to SEQ ID NO: 3872
  source 1..80: mol_type = other DNA

SEQ ID NO: 188603 - DNA, 80 bp, synthetic construct; identical to SEQ ID NO: 3873
  source 1..80: mol_type = other DNA

SEQ ID NO: 188604 - DNA, 80 bp, synthetic construct; identical to SEQ ID NO: 3874
  source 1..80: mol_type = other DNA

SEQ ID NO: 188605 - DNA, 80 bp, synthetic construct; identical to SEQ ID NO: 3875
  source 1..80: mol_type = other DNA

SEQ ID NO: 188606 - DNA, 80 bp, synthetic construct; identical to SEQ ID NO: 3876
  source 1..80: mol_type = other DNA

SEQ ID NO: 188607 - DNA, 80 bp, synthetic construct; identical to SEQ ID NO: 3877
  source 1..80: mol_type = other DNA

SEQ ID NO: 188608 - DNA, 80 bp, synthetic construct; identical to SEQ ID NO: 3878
  source 1..80: mol_type = other DNA

SEQ ID NO: 188609 - DNA, 80 bp, synthetic construct; identical to SEQ ID NO: 3879
  source 1..80: mol_type = other DNA

SEQ ID NO: 188610 - DNA, 80 bp, synthetic construct; identical to SEQ ID NO: 3880
  source 1..80: mol_type = other DNA

SEQ ID NO: 188611 - DNA, 80 bp, synthetic construct; identical to SEQ ID NO: 3881
  source 1..80: mol_type = other DNA

SEQ ID NO: 188612 - DNA, 80 bp, synthetic construct; identical to SEQ ID NO: 3882
  source 1..80: mol_type = other DNA

SEQ ID NO: 188613 - DNA, 80 bp, synthetic construct; identical to SEQ ID NO: 3883
  source 1..80: mol_type = other DNA

SEQ ID NO: 188614 - DNA, 80 bp, synthetic construct; identical to SEQ ID NO: 3884
  source 1..80: mol_type = other DNA

SEQ ID NO: 188615 - DNA, 80 bp, synthetic construct; identical to SEQ ID NO: 3885
  source 1..80: mol_type = other DNA

SEQ ID NO: 188616 - DNA, 80 bp, synthetic construct; identical to SEQ ID NO: 3886
  source 1..80: mol_type = other DNA

SEQ ID NO: 188617 - DNA, 80 bp, synthetic construct; identical to SEQ ID NO: 3887
  source 1..80: mol_type = other DNA

SEQ ID NO: 188618 - DNA, 80 bp, synthetic construct; identical to SEQ ID NO: 3888
  source 1..80: mol_type = other DNA

SEQ ID NO: 188619 - DNA, 80 bp, synthetic construct; identical to SEQ ID NO: 3889
  source 1..80: mol_type = other DNA

SEQ ID NO: 188620 - DNA, 80 bp, synthetic construct; identical to SEQ ID NO: 3890
  source 1..80: mol_type = other DNA

SEQ ID NO: 188621 - DNA, 80 bp, synthetic construct; identical to SEQ ID NO: 3891
  source 1..80: mol_type = other DNA

SEQ ID NO: 188622 - DNA, 80 bp, synthetic construct; identical to SEQ ID NO: 3892
  source 1..80: mol_type = other DNA

SEQ ID NO: 188623 - DNA, 80 bp, synthetic construct; identical to SEQ ID NO: 3893
  source 1..80: mol_type = other DNA

SEQ ID NO: 188624 - DNA, 80 bp, synthetic construct; identical to SEQ ID NO: 3894
  source 1..80: mol_type = other DNA

SEQ ID NO: 188625 - DNA, 80 bp, synthetic construct; identical to SEQ ID NO: 3895
  source 1..80: mol_type = other DNA

SEQ ID NO: 188626 - DNA, 80 bp, synthetic construct; identical to SEQ ID NO: 3896
  source 1..80: mol_type = other DNA

SEQ ID NO: 188627 - DNA, 80 bp, synthetic construct; identical to SEQ ID NO: 3897
  source 1..80: mol_type = other DNA

SEQ ID NO: 188628 - DNA, 80 bp, synthetic construct; identical to SEQ ID NO: 3898
  source 1..80: mol_type = other DNA

SEQ ID NO: 188629 - DNA, 80 bp, synthetic construct; identical to SEQ ID NO: 3899
  source 1..80: mol_type = other DNA

SEQ ID NO: 188630 - DNA, 80 bp, synthetic construct; identical to SEQ ID NO: 3900
  source 1..80: mol_type = other DNA

SEQ ID NO: 188631 - DNA, 80 bp, synthetic construct; identical to SEQ ID NO: 3901
  source 1..80: mol_type = other DNA

SEQ ID NO: 188632 - DNA, 80 bp, synthetic construct; identical to SEQ ID NO: 3902
  source 1..80: mol_type = other DNA

SEQ ID NO: 188633 - DNA, 80 bp, synthetic construct; identical to SEQ ID NO: 3903
  source 1..80: mol_type = other DNA

SEQ ID NO: 188634 - DNA, 80 bp, synthetic construct; identical to SEQ ID NO: 3904
  source 1..80: mol_type = other DNA

SEQ ID NO: 188635 - DNA, 80 bp, synthetic construct; identical to SEQ ID NO: 3905
  source 1..80: mol_type = other DNA

SEQ ID NO: 188636 - DNA, 80 bp, synthetic construct; identical to SEQ ID NO: 3906
  source 1..80: mol_type = other DNA

SEQ ID NO: 188637 - DNA, 80 bp, synthetic construct; identical to SEQ ID NO: 3907
  source 1..80: mol_type = other DNA

SEQ ID NO: 188638 - DNA, 80 bp, synthetic construct; identical to SEQ ID NO: 3908
  source 1..80: mol_type = other DNA

SEQ ID NO: 188639 - DNA, 80 bp, synthetic construct; identical to SEQ ID NO: 3909
  source 1..80: mol_type = other DNA

SEQ ID NO: 188640 - DNA, 80 bp, synthetic construct; identical to SEQ ID NO: 3910
  source 1..80: mol_type = other DNA

SEQ ID NO: 188641 - DNA, 80 bp, synthetic construct; identical to SEQ ID NO: 3911
  source 1..80: mol_type = other DNA

SEQ ID NO: 188642 - DNA, 80 bp, synthetic construct; identical to SEQ ID NO: 3912
  source 1..80: mol_type = other DNA

SEQ ID NO: 188643 - DNA, 80 bp, synthetic construct; identical to SEQ ID NO: 3913
  source 1..80: mol_type = other DNA

SEQ ID NO: 188644 - DNA, 80 bp, synthetic construct; identical to SEQ ID NO: 3914
  source 1..80: mol_type = other DNA

SEQ ID NO: 188645 - DNA, 80 bp, synthetic construct; identical to SEQ ID NO: 3915
  source 1..80: mol_type = other DNA

SEQ ID NO: 188646 - DNA, 80 bp, synthetic construct; identical to SEQ ID NO: 3916
  source 1..80: mol_type = other DNA

SEQ ID NO: 188647 - DNA, 80 bp, synthetic construct; identical to SEQ ID NO: 3917
  source 1..80: mol_type = other DNA

SEQ ID NO: 188648 - DNA, 80 bp, synthetic construct; identical to SEQ ID NO: 3918
  source 1..80: mol_type = other DNA

SEQ ID NO: 188649 - DNA, 80 bp, synthetic construct; identical to SEQ ID NO: 3919
  source 1..80: mol_type = other DNA

SEQ ID NO: 188650 - DNA, 80 bp, synthetic construct; identical to SEQ ID NO: 3920
  source 1..80: mol_type = other DNA

SEQ ID NO: 188651 - DNA, 80 bp, synthetic construct; identical to SEQ ID NO: 3921
  source 1..80: mol_type = other DNA

SEQ ID NO: 188652 - DNA, 80 bp, synthetic construct; identical to SEQ ID NO: 3922
  source 1..80: mol_type = other DNA

SEQ ID NO: 188653 - DNA, 80 bp, synthetic construct; identical to SEQ ID NO: 3923
  source 1..80: mol_type = other DNA

SEQ ID NO: 188654 - DNA, 80 bp, synthetic construct; identical to SEQ ID NO: 3924
  source 1..80: mol_type = other DNA

SEQ ID NO: 188655 - DNA, 80 bp, synthetic construct; identical to SEQ ID NO: 3925
  source 1..80: mol_type = other DNA

SEQ ID NO: 188656 - DNA, 80 bp, synthetic construct; identical to SEQ ID NO: 3926
  source 1..80: mol_type = other DNA

SEQ ID NO: 188657 - DNA, 80 bp, synthetic construct; identical to SEQ ID NO: 3927
  source 1..80: mol_type = other DNA

SEQ ID NO: 188658 - DNA, 80 bp, synthetic construct; identical to SEQ ID NO: 3928
  source 1..80: mol_type = other DNA

SEQ ID NO: 188659 - DNA, 80 bp, synthetic construct; identical to SEQ ID NO: 3929
  source 1..80: mol_type = other DNA

SEQ ID NO: 188660 - DNA, 80 bp, synthetic construct; identical to SEQ ID NO: 3930
  source 1..80: mol_type = other DNA

SEQ ID NO: 188661 - DNA, 80 bp, synthetic construct; identical to SEQ ID NO: 3931
  source 1..80: mol_type = other DNA

SEQ ID NO: 188662 - DNA, 80 bp, synthetic construct; identical to SEQ ID NO: 3932
  source 1..80: mol_type = other DNA

SEQ ID NO: 188663 - DNA, 80 bp, synthetic construct; identical to SEQ ID NO: 3933
  source 1..80: mol_type = other DNA

SEQ ID NO: 188664 - DNA, 80 bp, synthetic construct; identical to SEQ ID NO: 3934
  source 1..80: mol_type = other DNA

SEQ ID NO: 188665 - DNA, 80 bp, synthetic construct; identical to SEQ ID NO: 3935
  source 1..80: mol_type = other DNA

SEQ ID NO: 188666 - DNA, 80 bp, synthetic construct; identical to SEQ ID NO: 3936
  source 1..80: mol_type = other DNA

SEQ ID NO: 188667 - DNA, 80 bp, synthetic construct; identical to SEQ ID NO: 3937
  source 1..80: mol_type = other DNA

SEQ ID NO: 188668 - DNA, 80 bp, synthetic construct; identical to SEQ ID NO: 3938
  source 1..80: mol_type = other DNA

SEQ ID NO: 188669 - DNA, 80 bp, synthetic construct; identical to SEQ ID NO: 3939
  source 1..80: mol_type = other DNA

SEQ ID NO: 188670 - DNA, 80 bp, synthetic construct; identical to SEQ ID NO: 3940
  source 1..80: mol_type = other DNA

SEQ ID NO: 188671 - DNA, 80 bp, synthetic construct; identical to SEQ ID NO: 3941
  source 1..80: mol_type = other DNA

SEQ ID NO: 188672 - DNA, 80 bp, synthetic construct; identical to SEQ ID NO: 3942
  source 1..80: mol_type = other DNA

SEQ ID NO: 188673 - DNA, 80 bp, synthetic construct; identical to SEQ ID NO: 3943
  source 1..80: mol_type = other DNA

SEQ ID NO: 188674 - DNA, 80 bp, synthetic construct; identical to SEQ ID NO: 3944
  source 1..80: mol_type = other DNA

SEQ ID NO: 188675 - DNA, 80 bp, synthetic construct; identical to SEQ ID NO: 3945
  source 1..80: mol_type = other DNA

SEQ ID NO: 188676 - DNA, 80 bp, synthetic construct; identical to SEQ ID NO: 3946
  source 1..80: mol_type = other DNA

SEQ ID NO: 188677 - DNA, 80 bp, synthetic construct; identical to SEQ ID NO: 3947
  source 1..80: mol_type = other DNA

SEQ ID NO: 188678 - DNA, 80 bp, synthetic construct; identical to SEQ ID NO: 3948
  source 1..80: mol_type = other DNA

SEQ ID NO: 188679 - DNA, 80 bp, synthetic construct; identical to SEQ ID NO: 3949
  source 1..80: mol_type = other DNA

SEQ ID NO: 188680 - DNA, 80 bp, synthetic construct; identical to SEQ ID NO: 3950
  source 1..80: mol_type = other DNA

SEQ ID NO: 188681 - DNA, 80 bp, synthetic construct; identical to SEQ ID NO: 3951
  source 1..80: mol_type = other DNA

SEQ ID NO: 188682 - DNA, 80 bp, synthetic construct; identical to SEQ ID NO: 3952
  source 1..80: mol_type = other DNA

SEQ ID NO: 188683 - DNA, 80 bp, synthetic construct; identical to SEQ ID NO: 3953
  source 1..80: mol_type = other DNA

SEQ ID NO: 188684 - DNA, 80 bp, synthetic construct; identical to SEQ ID NO: 3954
  source 1..80: mol_type = other DNA

SEQ ID NO: 188685 - DNA, 80 bp, synthetic construct; identical to SEQ ID NO: 3955
  source 1..80: mol_type = other DNA

SEQ ID NO: 188686 - DNA, 80 bp, synthetic construct; identical to SEQ ID NO: 3956
  source 1..80: mol_type = other DNA

SEQ ID NO: 188687 - DNA, 80 bp, synthetic construct; identical to SEQ ID NO: 3957
  source 1..80: mol_type = other DNA

SEQ ID NO: 188688 - DNA, 80 bp, synthetic construct; identical to SEQ ID NO: 3958
  source 1..80: mol_type = other DNA

SEQ ID NO: 188689 - DNA, 80 bp, synthetic construct; identical to SEQ ID NO: 3959
  source 1..80: mol_type = other DNA

SEQ ID NO: 188690 - DNA, 80 bp, synthetic construct; identical to SEQ ID NO: 3960
  source 1..80: mol_type = other DNA

SEQ ID NO: 188691 - DNA, 80 bp, synthetic construct; identical to SEQ ID NO: 3961
  source 1..80: mol_type = other DNA

SEQ ID NO: 188692 - DNA, 80 bp, synthetic construct; identical to SEQ ID NO: 3962
  source 1..80: mol_type = other DNA

SEQ ID NO: 188693 - DNA, 80 bp, synthetic construct; identical to SEQ ID NO: 3963
  source 1..80: mol_type = other DNA

SEQ ID NO: 188694 - DNA, 80 bp, synthetic construct; identical to SEQ ID NO: 3964
  source 1..80: mol_type = other DNA

SEQ ID NO: 188695 - DNA, 80 bp, synthetic construct; identical to SEQ ID NO: 3965
  source 1..80: mol_type = other DNA

SEQ ID NO: 188696 - DNA, 80 bp, synthetic construct; identical to SEQ ID NO: 3966
  source 1..80: mol_type = other DNA

SEQ ID NO: 188697 - DNA, 80 bp, synthetic construct; identical to SEQ ID NO: 3967
  source 1..80: mol_type = other DNA

SEQ ID NO: 188698 - DNA, 80 bp, synthetic construct; identical to SEQ ID NO: 3968
  source 1..80: mol_type = other DNA

SEQ ID NO: 188699 - DNA, 80 bp, synthetic construct; identical to SEQ ID NO: 3969
  source 1..80: mol_type = other DNA

SEQ ID NO: 188700 - DNA, 80 bp, synthetic construct; identical to SEQ ID NO: 3970
  source 1..80: mol_type = other DNA

SEQ ID NO: 188701 - DNA, 80 bp, synthetic construct; identical to SEQ ID NO: 3971
  source 1..80: mol_type = other DNA

SEQ ID NO: 188702 - DNA, 80 bp, synthetic construct; identical to SEQ ID NO: 3972
  source 1..80: mol_type = other DNA

SEQ ID NO: 188703 - DNA, 80 bp, synthetic construct; identical to SEQ ID NO: 3973
  source 1..80: mol_type = other DNA

SEQ ID NO: 188704 - DNA, 80 bp, synthetic construct; identical to SEQ ID NO: 3974
  source 1..80: mol_type = other DNA

SEQ ID NO: 188705 - DNA, 80 bp, synthetic construct; identical to SEQ ID NO: 3975
  source 1..80: mol_type = other DNA

SEQ ID NO: 188706 - DNA, 80 bp, synthetic construct; identical to SEQ ID NO: 3976
  source 1..80: mol_type = other DNA

SEQ ID NO: 188707 - DNA, 80 bp, synthetic construct; identical to SEQ ID NO: 3977
  source 1..80: mol_type = other DNA

SEQ ID NO: 188708 - DNA, 80 bp, synthetic construct; identical to SEQ ID NO: 3978
  source 1..80: mol_type = other DNA

SEQ ID NO: 188709 - DNA, 80 bp, synthetic construct; identical to SEQ ID NO: 3979
  source 1..80: mol_type = other DNA

SEQ ID NO: 188710 - DNA, 80 bp, synthetic construct; identical to SEQ ID NO: 3980
  source 1..80: mol_type = other DNA

SEQ ID NO: 188711 - DNA, 80 bp, synthetic construct; identical to SEQ ID NO: 3981
  source 1..80: mol_type = other DNA

SEQ ID NO: 188712 - DNA, 80 bp, synthetic construct; identical to SEQ ID NO: 3982
  source 1..80: mol_type = other DNA

SEQ ID NO: 188713 - DNA, 80 bp, synthetic construct; identical to SEQ ID NO: 3983
  source 1..80: mol_type = other DNA

SEQ ID NO: 188714 - DNA, 80 bp, synthetic construct; identical to SEQ ID NO: 3984
  source 1..80: mol_type = other DNA

SEQ ID NO: 188715 - DNA, 80 bp, synthetic construct; identical to SEQ ID NO: 3985
  source 1..80: mol_type = other DNA

SEQ ID NO: 188716 - DNA, 80 bp, synthetic construct; identical to SEQ ID NO: 3986
  source 1..80: mol_type = other DNA

SEQ ID NO: 188717 - DNA, 80 bp, synthetic construct; identical to SEQ ID NO: 3987
  source 1..80: mol_type = other DNA

SEQ ID NO: 188718 - DNA, 80 bp, synthetic construct; identical to SEQ ID NO: 3988
  source 1..80: mol_type = other DNA

SEQ ID NO: 188719 - DNA, 80 bp, synthetic construct; identical to SEQ ID NO: 3989
  source 1..80: mol_type = other DNA

SEQ ID NO: 188720 - DNA, 80 bp, synthetic construct; identical to SEQ ID NO: 3990
  source 1..80: mol_type = other DNA

SEQ ID NO: 188721 - DNA, 80 bp, synthetic construct; identical to SEQ ID NO: 3991
  source 1..80: mol_type = other DNA

SEQ ID NO: 188722 - DNA, 80 bp, synthetic construct; identical to SEQ ID NO: 3992
  source 1..80: mol_type = other DNA

SEQ ID NO: 188723 - DNA, 80 bp, synthetic construct; identical to SEQ ID NO: 3993
  source 1..80: mol_type = other DNA

SEQ ID NO: 188724 - DNA, 80 bp, synthetic construct; identical to SEQ ID NO: 3994
  source 1..80: mol_type = other DNA

SEQ ID NO: 188725 - DNA, 80 bp, synthetic construct; identical to SEQ ID NO: 3995
  source 1..80: mol_type = other DNA

SEQ ID NO: 188726 - DNA, 80 bp, synthetic construct; identical to SEQ ID NO: 3996
  source 1..80: mol_type = other DNA

SEQ ID NO: 188727 - DNA, 80 bp, synthetic construct; identical to SEQ ID NO: 3997
  source 1..80: mol_type = other DNA

SEQ ID NO: 188728 - DNA, 80 bp, synthetic construct; identical to SEQ ID NO: 3998
  source 1..80: mol_type = other DNA

SEQ ID NO: 188729 - DNA, 80 bp, synthetic construct; identical to SEQ ID NO: 3999
  source 1..80: mol_type = other DNA

SEQ ID NO: 188730 - DNA, 80 bp, synthetic construct; identical to SEQ ID NO: 4000
  source 1..80: mol_type = other DNA

SEQ ID NO: 188731 - DNA, 80 bp, synthetic construct; identical to SEQ ID NO: 4001
  source 1..80: mol_type = other DNA

SEQ ID NO: 188732 - DNA, 80 bp, synthetic construct; identical to SEQ ID NO: 4002
  source 1..80: mol_type = other DNA

SEQ ID NO: 188733 - DNA, 80 bp, synthetic construct; identical to SEQ ID NO: 4003
  source 1..80: mol_type = other DNA

SEQ ID NO: 188734 - DNA, 80 bp, synthetic construct; identical to SEQ ID NO: 4004
  source 1..80: mol_type = other DNA

SEQ ID NO: 188735 - DNA, 80 bp, synthetic construct; identical to SEQ ID NO: 4005
  source 1..80: mol_type = other DNA

SEQ ID NO: 188736 - DNA, 80 bp, synthetic construct; identical to SEQ ID NO: 4006
  source 1..80: mol_type = other DNA

SEQ ID NO: 188737 - DNA, 80 bp, synthetic construct; identical to SEQ ID NO: 4007
  source 1..80: mol_type = other DNA

SEQ ID NO: 188738 - DNA, 80 bp, synthetic construct; identical to SEQ ID NO: 4008
  source 1..80: mol_type = other DNA

SEQ ID NO: 188739 - DNA, 80 bp, synthetic construct; identical to SEQ ID NO: 4009
  source 1..80: mol_type = other DNA

SEQ ID NO: 188740 - DNA, 80 bp, synthetic construct; identical to SEQ ID NO: 4010
  source 1..80: mol_type = other DNA

SEQ ID NO: 188741 - DNA, 80 bp, synthetic construct; identical to SEQ ID NO: 4011
  source 1..80: mol_type = other DNA

SEQ ID NO: 188742 - DNA, 80 bp, synthetic construct; identical to SEQ ID NO: 4012
  source 1..80: mol_type = other DNA

SEQ ID NO: 188743 - DNA, 80 bp, synthetic construct; identical to SEQ ID NO: 4013
  source 1..80: mol_type = other DNA

SEQ ID NO: 188744 - DNA, 80 bp, synthetic construct; identical to SEQ ID NO: 4014
  source 1..80: mol_type = other DNA

SEQ ID NO: 188745 - DNA, 80 bp, synthetic construct; identical to SEQ ID NO: 4015
  source 1..80: mol_type = other DNA

SEQ ID NO: 188746 - DNA, 80 bp, synthetic construct; identical to SEQ ID NO: 4016
  source 1..80: mol_type = other DNA

SEQ ID NO: 188747 - DNA, 80 bp, synthetic construct; identical to SEQ ID NO: 4017
  source 1..80: mol_type = other DNA

SEQ ID NO: 188748 - DNA, 80 bp, synthetic construct; identical to SEQ ID NO: 4018
  source 1..80: mol_type = other DNA

SEQ ID NO: 188749 - DNA, 80 bp, synthetic construct; identical to SEQ ID NO: 4019
  source 1..80: mol_type = other DNA

SEQ ID NO: 188750 - DNA, 80 bp, synthetic construct; identical to SEQ ID NO: 4020
  source 1..80: mol_type = other DNA

SEQ ID NO: 188751 - DNA, 80 bp, synthetic construct; identical to SEQ ID NO: 4021
  source 1..80: mol_type = other DNA

SEQ ID NO: 188752 - DNA, 80 bp, synthetic construct; identical to SEQ ID NO: 4022
  source 1..80: mol_type = other DNA

SEQ ID NO: 188753 - DNA, 80 bp, synthetic construct; identical to SEQ ID NO: 4023
  source 1..80: mol_type = other DNA

SEQ ID NO: 188754 - DNA, 80 bp, synthetic construct; identical to SEQ ID NO: 4024
  source 1..80: mol_type = other DNA

SEQ ID NO: 188755 - DNA, 80 bp, synthetic construct; identical to SEQ ID NO: 4025
  source 1..80: mol_type = other DNA

SEQ ID NO: 188756 - DNA, 80 bp, synthetic construct; identical to SEQ ID NO: 4026
  source 1..80: mol_type = other DNA

SEQ ID NO: 188757 - DNA, 80 bp, synthetic construct; identical to SEQ ID NO: 4027
  source 1..80: mol_type = other DNA

SEQ ID NO: 188758 - DNA, 80 bp, synthetic construct; identical to SEQ ID NO: 4028
  source 1..80: mol_type = other DNA

SEQ ID NO: 188759 - DNA, 80 bp, synthetic construct; identical to SEQ ID NO: 4029
  source 1..80: mol_type = other DNA

SEQ ID NO: 188760 - DNA, 80 bp, synthetic construct; identical to SEQ ID NO: 4030
  source 1..80: mol_type = other DNA

SEQ ID NO: 188761 - DNA, 80 bp, synthetic construct; identical to SEQ ID NO: 4031
  source 1..80: mol_type = other DNA

SEQ ID NO: 188762 - DNA, 80 bp, synthetic construct; identical to SEQ ID NO: 4032
  source 1..80: mol_type = other DNA

SEQ ID NO: 188763 - DNA, 80 bp, synthetic construct; identical to SEQ ID NO: 4033
  source 1..80: mol_type = other DNA

SEQ ID NO: 188764 - DNA, 80 bp, synthetic construct; identical to SEQ ID NO: 4034
  source 1..80: mol_type = other DNA

SEQ ID NO: 188765 - DNA, 80 bp, synthetic construct; identical to SEQ ID NO: 4035
  source 1..80: mol_type = other DNA

SEQ ID NO: 188766 - DNA, 80 bp, synthetic construct; identical to SEQ ID NO: 4036
  source 1..80: mol_type = other DNA

SEQ ID NO: 188767 - DNA, 80 bp, synthetic construct; identical to SEQ ID NO: 4037
  source 1..80: mol_type = other DNA

SEQ ID NO: 188768 - DNA, 80 bp, synthetic construct; identical to SEQ ID NO: 4038
  source 1..80: mol_type = other DNA

SEQ ID NO: 188769 - DNA, 80 bp, synthetic construct; identical to SEQ ID NO: 4039
  source 1..80: mol_type = other DNA

SEQ ID NO: 188770 - DNA, 80 bp, synthetic construct; identical to SEQ ID NO: 4040
  source 1..80: mol_type = other DNA

SEQ ID NO: 188771 - DNA, 80 bp, synthetic construct; identical to SEQ ID NO: 4041
  source 1..80: mol_type = other DNA

SEQ ID NO: 188772 - DNA, 80 bp, synthetic construct; identical to SEQ ID NO: 4042
  source 1..80: mol_type = other DNA

SEQ ID NO: 188773 - DNA, 80 bp, synthetic construct; identical to SEQ ID NO: 4043
  source 1..80: mol_type = other DNA

SEQ ID NO: 188774 - DNA, 80 bp, synthetic construct; identical to SEQ ID NO: 4044
  source 1..80: mol_type = other DNA

SEQ ID NO: 188775 - DNA, 80 bp, synthetic construct; identical to SEQ ID NO: 4045
  source 1..80: mol_type = other DNA

SEQ ID NO: 188776 - DNA, 80 bp, synthetic construct; identical to SEQ ID NO: 4046
  source 1..80: mol_type = other DNA

SEQ ID NO: 188777 - DNA, 80 bp, synthetic construct; identical to SEQ ID NO: 4047
  source 1..80: mol_type = other DNA

SEQ ID NO: 188778 - DNA, 80 bp, synthetic construct; identical to SEQ ID NO: 4048
  source 1..80: mol_type = other DNA

SEQ ID NO: 188779 - DNA, 80 bp, synthetic construct; identical to SEQ ID NO: 4049
  source 1..80: mol_type = other DNA

SEQ ID NO: 188780 - DNA, 80 bp, synthetic construct; identical to SEQ ID NO: 4050
  source 1..80: mol_type = other DNA

SEQ ID NO: 188781 - DNA, 80 bp, synthetic construct; identical to SEQ ID NO: 4051
  source 1..80: mol_type = other DNA

SEQ ID NO: 188782 - DNA, 80 bp, synthetic construct; identical to SEQ ID NO: 4052
  source 1..80: mol_type = other DNA

SEQ ID NO: 188783 - DNA, 80 bp, synthetic construct; identical to SEQ ID NO: 4053
  source 1..80: mol_type = other DNA

SEQ ID NO: 188784 - DNA, 80 bp, synthetic construct; identical to SEQ ID NO: 4054
  source 1..80: mol_type = other DNA

SEQ ID NO: 188785 - DNA, 80 bp, synthetic construct; identical to SEQ ID NO: 4055
  source 1..80: mol_type = other DNA

SEQ ID NO: 188786 - DNA, 80 bp, synthetic construct; identical to SEQ ID NO: 4056
  source 1..80: mol_type = other DNA

SEQ ID NO: 188787 - DNA, 80 bp, synthetic construct; identical to SEQ ID NO: 4057
  source 1..80: mol_type = other DNA

SEQ ID NO: 188788 - DNA, 80 bp, synthetic construct; identical to SEQ ID NO: 4058
  source 1..80: mol_type = other DNA

SEQ ID NO: 188789 - DNA, 80 bp, synthetic construct; identical to SEQ ID NO: 4059
  source 1..80: mol_type = other DNA

SEQ ID NO: 188790 - DNA, 80 bp, synthetic construct; identical to SEQ ID NO: 4060
  source 1..80: mol_type = other DNA

SEQ ID NO: 188791 - DNA, 80 bp, synthetic construct; identical to SEQ ID NO: 4061
  source 1..80: mol_type = other DNA

SEQ ID NO: 188792 - DNA, 80 bp, synthetic construct; identical to SEQ ID NO: 4062
  source 1..80: mol_type = other DNA

SEQ ID NO: 188793 - DNA, 80 bp, synthetic construct; identical to SEQ ID NO: 4063
  source 1..80: mol_type = other DNA

SEQ ID NO: 188794 - DNA, 80 bp, synthetic construct; identical to SEQ ID NO: 4064
  source 1..80: mol_type = other DNA

SEQ ID NO: 188795 - DNA, 80 bp, synthetic construct; identical to SEQ ID NO: 4065
  source 1..80: mol_type = other DNA

SEQ ID NO: 188796 - DNA, 80 bp, synthetic construct; identical to SEQ ID NO: 4066
  source 1..80: mol_type = other DNA

SEQ ID NO: 188797 - DNA, 80 bp, synthetic construct; identical to SEQ ID NO: 4067
  source 1..80: mol_type = other DNA

SEQ ID NO: 188798 - DNA, 80 bp, synthetic construct; identical to SEQ ID NO: 4068
  source 1..80: mol_type = other DNA

SEQ ID NO: 188799 - DNA, 80 bp, synthetic construct; identical to SEQ ID NO: 4069
  source 1..80: mol_type = other DNA

SEQ ID NO: 188800 - DNA, 80 bp, synthetic construct; identical to SEQ ID NO: 4070
  source 1..80: mol_type = other DNA

SEQ ID NO: 188801 - DNA, 80 bp, synthetic construct; identical to SEQ ID NO: 4071
  source 1..80: mol_type = other DNA

SEQ ID NO: 188802 - DNA, 80 bp, synthetic construct; identical to SEQ ID NO: 4072
  source 1..80: mol_type = other DNA

SEQ ID NO: 188803 - DNA, 80 bp, synthetic construct; identical to SEQ ID NO: 4073
  source 1..80: mol_type = other DNA

SEQ ID NO: 188804 - DNA, 80 bp, synthetic construct; identical to SEQ ID NO: 4074
  source 1..80: mol_type = other DNA

SEQ ID NO: 188805 - DNA, 80 bp, synthetic construct; identical to SEQ ID NO: 4075
  source 1..80: mol_type = other DNA

SEQ ID NO: 188806 - DNA, 80 bp, synthetic construct; identical to SEQ ID NO: 4076
  source 1..80: mol_type = other DNA

SEQ ID NO: 188807 - DNA, 80 bp, synthetic construct; identical to SEQ ID NO: 4077
  source 1..80: mol_type = other DNA

SEQ ID NO: 188808 - DNA, 80 bp, synthetic construct; identical to SEQ ID NO: 4078
  source 1..80: mol_type = other DNA

SEQ ID NO: 188809 - DNA, 80 bp, synthetic construct; identical to SEQ ID NO: 4079
  source 1..80: mol_type = other DNA

SEQ ID NO: 188810 - DNA, 80 bp, synthetic construct; identical to SEQ ID NO: 4080
  source 1..80: mol_type = other DNA

SEQ ID NO: 188811 - DNA, 80 bp, synthetic construct; identical to SEQ ID NO: 4081
  source 1..80: mol_type = other DNA

SEQ ID NO: 188812 - DNA, 80 bp, synthetic construct; identical to SEQ ID NO: 4082
  source 1..80: mol_type = other DNA

SEQ ID NO: 188813 - DNA, 80 bp, synthetic construct; identical to SEQ ID NO: 4083
  source 1..80: mol_type = other DNA

SEQ ID NO: 188814 - DNA, 80 bp, synthetic construct; identical to SEQ ID NO: 4084
  source 1..80: mol_type = other DNA

SEQ ID NO: 188815 - DNA, 80 bp, synthetic construct; identical to SEQ ID NO: 4085
  source 1..80: mol_type = other DNA

SEQ ID NO: 188816 - DNA, 80 bp, synthetic construct; identical to SEQ ID NO: 4086
  source 1..80: mol_type = other DNA

SEQ ID NO: 188817 - DNA, 80 bp, synthetic construct; identical to SEQ ID NO: 4087
  source 1..80: mol_type = other DNA

SEQ ID NO: 188818 - DNA, 80 bp, synthetic construct; identical to SEQ ID NO: 4088
  source 1..80: mol_type = other DNA

SEQ ID NO: 188819 - DNA, 80 bp, synthetic construct; identical to SEQ ID NO: 4089
  source 1..80: mol_type = other DNA

SEQ ID NO: 188820 - DNA, 80 bp, synthetic construct; identical to SEQ ID NO: 4090
  source 1..80: mol_type = other DNA

SEQ ID NO: 188821 - DNA, 80 bp, synthetic construct; identical to SEQ ID NO: 4091
  source 1..80: mol_type = other DNA

SEQ ID NO: 188822 - DNA, 80 bp, synthetic construct; identical to SEQ ID NO: 4092
  source 1..80: mol_type = other DNA

SEQ ID NO: 188823 - DNA, 80 bp, synthetic construct; identical to SEQ ID NO: 4093
  source 1..80: mol_type = other DNA

SEQ ID NO: 188824 - DNA, 80 bp, synthetic construct; identical to SEQ ID NO: 4094
  source 1..80: mol_type = other DNA

SEQ ID NO: 188825 - DNA, 80 bp, synthetic construct; identical to SEQ ID NO: 4095
  source 1..80: mol_type = other DNA

SEQ ID NO: 188826 - DNA, 80 bp, synthetic construct; identical to SEQ ID NO: 4096
  source 1..80: mol_type = other DNA

SEQ ID NO: 188827 - DNA, 80 bp, synthetic construct; identical to SEQ ID NO: 4097
  source 1..80: mol_type = other DNA

SEQ ID NO: 188828 - DNA, 80 bp, synthetic construct; identical to SEQ ID NO: 4098
  source 1..80: mol_type = other DNA

SEQ ID NO: 188829 - DNA, 80 bp, synthetic construct; identical to SEQ ID NO: 4099
  source 1..80: mol_type = other DNA

SEQ ID NO: 188830 - DNA, 80 bp, synthetic construct; identical to SEQ ID NO: 4100
  source 1..80: mol_type = other DNA

SEQ ID NO: 188831 - DNA, 80 bp, synthetic construct; identical to SEQ ID NO: 4101
  source 1..80: mol_type = other DNA

SEQ ID NO: 188832 - DNA, 80 bp, synthetic construct; identical to SEQ ID NO: 4102
  source 1..80: mol_type = other DNA

SEQ ID NO: 188833 - DNA, 80 bp, synthetic construct; identical to SEQ ID NO: 4103
  source 1..80: mol_type = other DNA

SEQ ID NO: 188834 - DNA, 80 bp, synthetic construct; identical to SEQ ID NO: 4104
  source 1..80: mol_type = other DNA

SEQ ID NO: 188835 - DNA, 80 bp, synthetic construct; identical to SEQ ID NO: 4105
  source 1..80: mol_type = other DNA

SEQ ID NO: 188836 - DNA, 80 bp, synthetic construct; identical to SEQ ID NO: 4106
  source 1..80: mol_type = other DNA

SEQ ID NO: 188837 - DNA, 80 bp, synthetic construct; identical to SEQ ID NO: 4107
  source 1..80: mol_type = other DNA

SEQ ID NO: 188838 - DNA, 80 bp, synthetic construct; identical to SEQ ID NO: 4108
  source 1..80: mol_type = other DNA

SEQ ID NO: 188839 - DNA, 80 bp, synthetic construct; identical to SEQ ID NO: 4109
  source 1..80: mol_type = other DNA

SEQ ID NO: 188840 - DNA, 80 bp, synthetic construct; identical to SEQ ID NO: 4110
  source 1..80: mol_type = other DNA

SEQ ID NO: 188841 - DNA, 80 bp, synthetic construct; identical to SEQ ID NO: 4111
  source 1..80: mol_type = other DNA

SEQ ID NO: 188842 - DNA, 80 bp, synthetic construct; identical to SEQ ID NO: 4112
  source 1..80: mol_type = other DNA

SEQ ID NO: 188843 - DNA, 80 bp, synthetic construct; identical to SEQ ID NO: 4113
  source 1..80: mol_type = other DNA

SEQ ID NO: 188844 - DNA, 80 bp, synthetic construct; identical to SEQ ID NO: 4114
  source 1..80: mol_type = other DNA

SEQ ID NO: 188845 - DNA, 80 bp, synthetic construct; identical to SEQ ID NO: 4115
  source 1..80: mol_type = other DNA

SEQ ID NO: 188846 - DNA, 80 bp, synthetic construct; identical to SEQ ID NO: 4116
  source 1..80: mol_type = other DNA

SEQ ID NO: 188847 - DNA, 80 bp, synthetic construct; identical to SEQ ID NO: 4117
  source 1..80: mol_type = other DNA

SEQ ID NO: 188848 - DNA, 80 bp, synthetic construct; identical to SEQ ID NO: 4118
  source 1..80: mol_type = other DNA

SEQ ID NO: 188849 - DNA, 80 bp, synthetic construct; identical to SEQ ID NO: 4119
  source 1..80: mol_type = other DNA

SEQ ID NO: 188850 - DNA, 80 bp, synthetic construct; identical to SEQ ID NO: 4120
  source 1..80: mol_type = other DNA

SEQ ID NO: 188851 - DNA, 80 bp, synthetic construct; identical to SEQ ID NO: 4121
  source 1..80: mol_type = other DNA

SEQ ID NO: 188852 - DNA, 80 bp, synthetic construct; identical to SEQ ID NO: 4122
  source 1..80: mol_type = other DNA

SEQ ID NO: 188853 - DNA, 80 bp, synthetic construct; identical to SEQ ID NO: 4123
  source 1..80: mol_type = other DNA

SEQ ID NO: 188854 - DNA, 80 bp, synthetic construct; identical to SEQ ID NO: 4124
  source 1..80: mol_type = other DNA

SEQ ID NO: 188855 - DNA, 80 bp, synthetic construct; identical to SEQ ID NO: 4125
  source 1..80: mol_type = other DNA

SEQ ID NO: 188856 - DNA, 80 bp, synthetic construct; identical to SEQ ID NO: 4126
  source 1..80: mol_type = other DNA

SEQ ID NO: 188857 - DNA, 80 bp, synthetic construct; identical to SEQ ID NO: 4127
  source 1..80: mol_type = other DNA

SEQ ID NO: 188858 - DNA, 80 bp, synthetic construct; identical to SEQ ID NO: 4128
  source 1..80: mol_type = other DNA

SEQ ID NO: 188859 - DNA, 80 bp, synthetic construct; identical to SEQ ID NO: 4129
  source 1..80: mol_type = other DNA

SEQ ID NO: 188860 - DNA, 80 bp, synthetic construct; identical to SEQ ID NO: 4130
  source 1..80: mol_type = other DNA

SEQ ID NO: 188861 - DNA, 80 bp, synthetic construct; identical to SEQ ID NO: 4131
  source 1..80: mol_type = other DNA

SEQ ID NO: 188862 - DNA, 80 bp, synthetic construct; identical to SEQ ID NO: 4132
  source 1..80: mol_type = other DNA

SEQ ID NO: 188863 - DNA, 80 bp, synthetic construct; identical to SEQ ID NO: 4133
  source 1..80: mol_type = other DNA

SEQ ID NO: 188864 - DNA, 80 bp, synthetic construct; identical to SEQ ID NO: 4134
  source 1..80: mol_type = other DNA

SEQ ID NO: 188865 - DNA, 80 bp, synthetic construct; identical to SEQ ID NO: 4135
  source 1..80: mol_type = other DNA

SEQ ID NO: 188866 - DNA, 80 bp, synthetic construct; identical to SEQ ID NO: 4136
  source 1..80: mol_type = other DNA

SEQ ID NO: 188867 - DNA, 80 bp, synthetic construct; identical to SEQ ID NO: 4137
  source 1..80: mol_type = other DNA

SEQ ID NO: 188868 - DNA, 80 bp, synthetic construct; identical to SEQ ID NO: 4138
  source 1..80: mol_type = other DNA

SEQ ID NO: 188869 - DNA, 80 bp, synthetic construct; identical to SEQ ID NO: 4139
  source 1..80: mol_type = other DNA

SEQ ID NO: 188870 - DNA, 80 bp, synthetic construct; identical to SEQ ID NO: 4140
  source 1..80: mol_type = other DNA

SEQ ID NO: 188871 - DNA, 80 bp, synthetic construct; identical to SEQ ID NO: 4141
  source 1..80: mol_type = other DNA

SEQ ID NO: 188872 - DNA, 80 bp, synthetic construct; identical to SEQ ID NO: 4142
  source 1..80: mol_type = other DNA

SEQ ID NO: 188873 - DNA, 80 bp, synthetic construct; identical to SEQ ID NO: 4143
  source 1..80: mol_type = other DNA

SEQ ID NO: 188874 - DNA, 80 bp, synthetic construct; identical to SEQ ID NO: 4144
  source 1..80: mol_type = other DNA

SEQ ID NO: 188875 - DNA, 80 bp, synthetic construct; identical to SEQ ID NO: 4145
  source 1..80: mol_type = other DNA

SEQ ID NO: 188876 - DNA, 80 bp, synthetic construct; identical to SEQ ID NO: 4146
  source 1..80: mol_type = other DNA

SEQ ID NO: 188877 - DNA, 80 bp, synthetic construct; identical to SEQ ID NO: 4147
  source 1..80: mol_type = other DNA

SEQ ID NO: 188878 - DNA, 80 bp, synthetic construct; identical to SEQ ID NO: 4148
  source 1..80: mol_type = other DNA

SEQ ID NO: 188879 - DNA, 80 bp, synthetic construct; identical to SEQ ID NO: 4149
  source 1..80: mol_type = other DNA

SEQ ID NO: 188880 - DNA, 80 bp, synthetic construct; identical to SEQ ID NO: 4150
  source 1..80: mol_type = other DNA

SEQ ID NO: 188881 - DNA, 80 bp, synthetic construct; identical to SEQ ID NO: 4151
  source 1..80: mol_type = other DNA

SEQ ID NO: 188882 - DNA, 80 bp, synthetic construct; identical to SEQ ID NO: 4152
  source 1..80: mol_type = other DNA

SEQ ID NO: 188883 - DNA, 80 bp, synthetic construct; identical to SEQ ID NO: 4153
  source 1..80: mol_type = other DNA

SEQ ID NO: 188884 - DNA, 80 bp, synthetic construct; identical to SEQ ID NO: 4154
  source 1..80: mol_type = other DNA

SEQ ID NO: 188885 - DNA, 80 bp, synthetic construct; identical to SEQ ID NO: 4155
  source 1..80: mol_type = other DNA

SEQ ID NO: 188886 - DNA, 80 bp, synthetic construct; identical to SEQ ID NO: 4156
  source 1..80: mol_type = other DNA

SEQ ID NO: 188887 - DNA, 80 bp, synthetic construct; identical to SEQ ID NO: 4157
  source 1..80: mol_type = other DNA

SEQ ID NO: 188888 - DNA, 80 bp, synthetic construct; identical to SEQ ID NO: 4158
  source 1..80: mol_type = other DNA

SEQ ID NO: 188889 - DNA, 80 bp, synthetic construct; identical to SEQ ID NO: 4159
  source 1..80: mol_type = other DNA

SEQ ID NO: 188890 - DNA, 80 bp, synthetic construct; identical to SEQ ID NO: 4160
  source 1..80: mol_type = other DNA

SEQ ID NO: 188891 - DNA, 80 bp, synthetic construct; identical to SEQ ID NO: 4161
  source 1..80: mol_type = other DNA

SEQ ID NO: 188892 - DNA, 80 bp, synthetic construct; identical to SEQ ID NO: 4162
  source 1..80: mol_type = other DNA

SEQ ID NO: 188893 - DNA, 80 bp, synthetic construct; identical to SEQ ID NO: 4163
  source 1..80: mol_type = other DNA

SEQ ID NO: 188894 - DNA, 80 bp, synthetic construct; identical to SEQ ID NO: 4164
  source 1..80: mol_type = other DNA

SEQ ID NO: 188895 - DNA, 80 bp, synthetic construct; identical to SEQ ID NO: 4165
  source 1..80: mol_type = other DNA

SEQ ID NO: 188896 - DNA, 80 bp, synthetic construct; identical to SEQ ID NO: 4166
  source 1..80: mol_type = other DNA

SEQ ID NO: 188897 - DNA, 80 bp, synthetic construct; identical to SEQ ID NO: 4167
  source 1..80: mol_type = other DNA

SEQ ID NO: 188898 - DNA, 80 bp, synthetic construct; identical to SEQ ID NO: 4168
  source 1..80: mol_type = other DNA

SEQ ID NO: 188899 - DNA, 80 bp, synthetic construct; identical to SEQ ID NO: 4169
  source 1..80: mol_type = other DNA

SEQ ID NO: 188900 - DNA, 80 bp, synthetic construct; identical to SEQ ID NO: 4170
  source 1..80: mol_type = other DNA

SEQ ID NO: 188901 - DNA, 80 bp, synthetic construct; identical to SEQ ID NO: 4171
  source 1..80: mol_type = other DNA

SEQ ID NO: 188902 - DNA, 80 bp, synthetic construct; identical to SEQ ID NO: 4172
  source 1..80: mol_type = other DNA

SEQ ID NO: 188903 - DNA, 80 bp, synthetic construct; identical to SEQ ID NO: 4173
  source 1..80: mol_type = other DNA

SEQ ID NO: 188904 - DNA, 80 bp, synthetic construct; identical to SEQ ID NO: 4174
  source 1..80: mol_type = other DNA

SEQ ID NO: 188905 - DNA, 80 bp, synthetic construct; identical to SEQ ID NO: 4175
  source 1..80: mol_type = other DNA

SEQ ID NO: 188906 - DNA, 80 bp, synthetic construct; identical to SEQ ID NO: 4176
  source 1..80: mol_type = other DNA

SEQ ID NO: 188907 - DNA, 80 bp, synthetic construct; identical to SEQ ID NO: 4177
  source 1..80: mol_type = other DNA

SEQ ID NO: 188908 - DNA, 80 bp, synthetic construct; identical to SEQ ID NO: 4178
  source 1..80: mol_type = other DNA

SEQ ID NO: 188909 - DNA, 80 bp, synthetic construct; identical to SEQ ID NO: 4179
  source 1..80: mol_type = other DNA

SEQ ID NO: 188910 - DNA, 80 bp, synthetic construct; identical to SEQ ID NO: 4180
  source 1..80: mol_type = other DNA

SEQ ID NO: 188911 - DNA, 80 bp, synthetic construct; identical to SEQ ID NO: 4181
  source 1..80: mol_type = other DNA

SEQ ID NO: 188912 - DNA, 80 bp, synthetic construct; identical to SEQ ID NO: 4182
  source 1..80: mol_type = other DNA

SEQ ID NO: 188913 - DNA, 80 bp, synthetic construct; identical to SEQ ID NO: 4183
  source 1..80: mol_type = other DNA

SEQ ID NO: 188914 - DNA, 80 bp, synthetic construct; identical to SEQ ID NO: 4184
  source 1..80: mol_type = other DNA

SEQ ID NO: 188915 - DNA, 80 bp, synthetic construct; identical to SEQ ID NO: 4185
  source 1..80: mol_type = other DNA

SEQ ID NO: 188916 - DNA, 80 bp, synthetic construct; identical to SEQ ID NO: 4186
  source 1..80: mol_type = other DNA

SEQ ID NO: 188917 - DNA, 80 bp, synthetic construct; identical to SEQ ID NO: 4187
  source 1..80: mol_type = other DNA

SEQ ID NO: 188918 - DNA, 80 bp, synthetic construct; identical to SEQ ID NO: 4188
  source 1..80: mol_type = other DNA

SEQ ID NO: 188919 - DNA, 80 bp, synthetic construct; identical to SEQ ID NO: 4189
  source 1..80: mol_type = other DNA

SEQ ID NO: 188920 - DNA, 80 bp, synthetic construct; identical to SEQ ID NO: 4190
  source 1..80: mol_type = other DNA

SEQ ID NO: 188921 - DNA, 80 bp, synthetic construct; identical to SEQ ID NO: 4191
  source 1..80: mol_type = other DNA

SEQ ID NO: 188922 - DNA, 80 bp, synthetic construct; identical to SEQ ID NO: 4192
  source 1..80: mol_type = other DNA

SEQ ID NO: 188923 - DNA, 80 bp, synthetic construct; identical to SEQ ID NO: 4193
  source 1..80: mol_type = other DNA

SEQ ID NO: 188924 - DNA, 80 bp, synthetic construct; identical to SEQ ID NO: 4194
  source 1..80: mol_type = other DNA

SEQ ID NO: 188925 - DNA, 80 bp, synthetic construct; identical to SEQ ID NO: 4195
  source 1..80: mol_type = other DNA

SEQ ID NO: 188926 - DNA, 80 bp, synthetic construct; identical to SEQ ID NO: 4196
  source 1..80: mol_type = other DNA

SEQ ID NO: 188927 - DNA, 80 bp, synthetic construct; identical to SEQ ID NO: 4197
  source 1..80: mol_type = other DNA

SEQ ID NO: 188928 - DNA, 80 bp, synthetic construct; identical to SEQ ID NO: 4198
  source 1..80: mol_type = other DNA

SEQ ID NO: 188929 - DNA, 80 bp, synthetic construct; identical to SEQ ID NO: 4199
  source 1..80: mol_type = other DNA

SEQ ID NO: 188930 - DNA, 80 bp, synthetic construct; identical to SEQ ID NO: 4200
  source 1..80: mol_type = other DNA

SEQ ID NO: 188931 - DNA, 80 bp, synthetic construct; identical to SEQ ID NO: 4201
  source 1..80: mol_type = other DNA

SEQ ID NO: 188932 - DNA, 80 bp, synthetic construct; identical to SEQ ID NO: 4202
  source 1..80: mol_type = other DNA

SEQ ID NO: 188933 - DNA, 80 bp, synthetic construct; identical to SEQ ID NO: 4203
  source 1..80: mol_type = other DNA

SEQ ID NO: 188934 - DNA, 80 bp, synthetic construct; identical to SEQ ID NO: 4204
  source 1..80: mol_type = other DNA

SEQ ID NO: 188935 - DNA, 80 bp, synthetic construct; identical to SEQ ID NO: 4205
  source 1..80: mol_type = other DNA

SEQ ID NO: 188936 - DNA, 80 bp, synthetic construct; identical to SEQ ID NO: 4206
  source 1..80: mol_type = other DNA

SEQ ID NO: 188937 - DNA, 80 bp, synthetic construct; identical to SEQ ID NO: 4207
  source 1..80: mol_type = other DNA

SEQ ID NO: 188938 - DNA, 80 bp, synthetic construct; identical to SEQ ID NO: 4208
  source 1..80: mol_type = other DNA

SEQ ID NO: 188939 - DNA, 80 bp, synthetic construct; identical to SEQ ID NO: 4209
  source 1..80: mol_type = other DNA

SEQ ID NO: 188940 - DNA, 80 bp, synthetic construct; identical to SEQ ID NO: 4210
  source 1..80: mol_type = other DNA

SEQ ID NO: 188941 - DNA, 80 bp, synthetic construct; identical to SEQ ID NO: 4211
  source 1..80: mol_type = other DNA

SEQ ID NO: 188942 - DNA, 80 bp, synthetic construct; identical to SEQ ID NO: 4212
  source 1..80: mol_type = other DNA

SEQ ID NO: 188943 - DNA, 80 bp, synthetic construct; identical to SEQ ID NO: 4213
  source 1..80: mol_type = other DNA

SEQ ID NO: 188944 - DNA, 80 bp, synthetic construct; identical to SEQ ID NO: 4214
  source 1..80: mol_type = other DNA

SEQ ID NO: 188945 - DNA, 80 bp, synthetic construct; identical to SEQ ID NO: 4215
  source 1..80: mol_type = other DNA

SEQ ID NO: 188946 - DNA, 80 bp, synthetic construct; identical to SEQ ID NO: 4216
  source 1..80: mol_type = other DNA

SEQ ID NO: 188947 - DNA, 80 bp, synthetic construct; identical to SEQ ID NO: 4217
  source 1..80: mol_type = other DNA

SEQ ID NO: 188948 - DNA, 80 bp, synthetic construct; identical to SEQ ID NO: 4218
  source 1..80: mol_type = other DNA

SEQ ID NO: 188949 - DNA, 80 bp, synthetic construct; identical to SEQ ID NO: 4219
  source 1..80: mol_type = other DNA

SEQ ID NO: 188950 - DNA, 80 bp, synthetic construct; identical to SEQ ID NO: 4220
  source 1..80: mol_type = other DNA

SEQ ID NO: 188951 - DNA, 80 bp, synthetic construct; identical to SEQ ID NO: 4221
  source 1..80: mol_type = other DNA

SEQ ID NO: 188952 - DNA, 80 bp, synthetic construct; identical to SEQ ID NO: 4222
  source 1..80: mol_type = other DNA

SEQ ID NO: 188953 - DNA, 80 bp, synthetic construct; identical to SEQ ID NO: 4223
  source 1..80: mol_type = other DNA

SEQ ID NO: 188954 - DNA, 80 bp, synthetic construct; identical to SEQ ID NO: 4224
  source 1..80: mol_type = other DNA

SEQ ID NO: 188955 - DNA, 80 bp, synthetic construct; identical to SEQ ID NO: 4225
  source 1..80: mol_type = other DNA

SEQ ID NO: 188956 - DNA, 80 bp, synthetic construct; identical to SEQ ID NO: 4226
  source 1..80: mol_type = other DNA

SEQ ID NO: 188957 - DNA, 80 bp, synthetic construct; identical to SEQ ID NO: 4227
  source 1..80: mol_type = other DNA

SEQ ID NO: 188958 - DNA, 80 bp, synthetic construct; identical to SEQ ID NO: 4228
  source 1..80: mol_type = other DNA

SEQ ID NO: 188959 - DNA, 80 bp, synthetic construct; identical to SEQ ID NO: 4229
  source 1..80: mol_type = other DNA

SEQ ID NO: 188960 - DNA, 80 bp, synthetic construct; identical to SEQ ID NO: 4230
  source 1..80: mol_type = other DNA

SEQ ID NO: 188961 - DNA, 80 bp, synthetic construct; identical to SEQ ID NO: 4231
  source 1..80: mol_type = other DNA

SEQ ID NO: 188962 - DNA, 80 bp, synthetic construct; identical to SEQ ID NO: 4232
  source 1..80: mol_type = other DNA

SEQ ID NO: 188963 - DNA, 80 bp, synthetic construct; identical to SEQ ID NO: 4233
  source 1..80: mol_type = other DNA

SEQ ID NO: 188964 - DNA, 80 bp, synthetic construct; identical to SEQ ID NO: 4234
  source 1..80: mol_type = other DNA

SEQ ID NO: 188965 - DNA, 80 bp, synthetic construct; identical to SEQ ID NO: 4235
  source 1..80: mol_type = other DNA

SEQ ID NO: 188966 - DNA, 80 bp, synthetic construct; identical to SEQ ID NO: 4236
  source 1..80: mol_type = other DNA

SEQ ID NO: 188967 - DNA, 80 bp, synthetic construct; identical to SEQ ID NO: 4237
  source 1..80: mol_type = other DNA

SEQ ID NO: 188968 - DNA, 80 bp, synthetic construct; identical to SEQ ID NO: 4238
  source 1..80: mol_type = other DNA

SEQ ID NO: 188969 - DNA, 80 bp, synthetic construct; identical to SEQ ID NO: 4239
  source 1..80: mol_type = other DNA

SEQ ID NO: 188970 - DNA, 80 bp, synthetic construct; identical to SEQ ID NO: 4240
  source 1..80: mol_type = other DNA

SEQ ID NO: 188971 - DNA, 80 bp, synthetic construct; identical to SEQ ID NO: 4241
  source 1..80: mol_type = other DNA

SEQ ID NO: 188972 - DNA, 80 bp, synthetic construct; identical to SEQ ID NO: 4242
  source 1..80: mol_type = other DNA

SEQ ID NO: 188973 - DNA, 80 bp, synthetic construct; identical to SEQ ID NO: 4243
  source 1..80: mol_type = other DNA

SEQ ID NO: 188974 - DNA, 80 bp, synthetic construct; identical to SEQ ID NO: 4244
  source 1..80: mol_type = other DNA

SEQ ID NO: 188975 - DNA, 80 bp, synthetic construct; identical to SEQ ID NO: 4245
  source 1..80: mol_type = other DNA

SEQ ID NO: 188976 - DNA, 80 bp, synthetic construct; identical to SEQ ID NO: 4246
  source 1..80: mol_type = other DNA

SEQ ID NO: 188977 - DNA, 80 bp, synthetic construct; identical to SEQ ID NO: 4247
  source 1..80: mol_type = other DNA

SEQ ID NO: 188978 - DNA, 80 bp, synthetic construct; identical to SEQ ID NO: 4248
  source 1..80: mol_type = other DNA

SEQ ID NO: 188979 - DNA, 80 bp, synthetic construct; identical to SEQ ID NO: 4249
  source 1..80: mol_type = other DNA

SEQ ID NO: 188980 - DNA, 80 bp, synthetic construct; identical to SEQ ID NO: 4250
  source 1..80: mol_type = other DNA

SEQ ID NO: 188981 - DNA, 80 bp, synthetic construct; identical to SEQ ID NO: 4251
  source 1..80: mol_type = other DNA

SEQ ID NO: 188982 - DNA, 80 bp, synthetic construct; identical to SEQ ID NO: 4252
  source 1..80: mol_type = other DNA

SEQ ID NO: 188983 - DNA, 80 bp, synthetic construct; identical to SEQ ID NO: 4253
  source 1..80: mol_type = other DNA

SEQ ID NO: 188984 - DNA, 80 bp, synthetic construct; identical to SEQ ID NO: 4254
  source 1..80: mol_type = other DNA

SEQ ID NO: 188985 - DNA, 80 bp, synthetic construct; identical to SEQ ID NO: 4255
  source 1..80: mol_type = other DNA

SEQ ID NO: 188986 - DNA, 80 bp, synthetic construct; identical to SEQ ID NO: 4256
  source 1..80: mol_type = other DNA

SEQ ID NO: 188987 - DNA, 80 bp, synthetic construct; identical to SEQ ID NO: 4257
  source 1..80: mol_type = other DNA

SEQ ID NO: 188988 - DNA, 80 bp, synthetic construct; identical to SEQ ID NO: 4258
  source 1..80: mol_type = other DNA

SEQ ID NO: 188989 - DNA, 80 bp, synthetic construct; identical to SEQ ID NO: 4259
  source 1..80: mol_type = other DNA

SEQ ID NO: 188990 - DNA, 80 bp, synthetic construct; identical to SEQ ID NO: 4260
  source 1..80: mol_type = other DNA

SEQ ID NO: 188991 - DNA, 80 bp, synthetic construct; identical to SEQ ID NO: 4261
  source 1..80: mol_type = other DNA

SEQ ID NO: 188992 - DNA, 80 bp, synthetic construct; identical to SEQ ID NO: 4262
  source 1..80: mol_type = other DNA

SEQ ID NO: 188993 - DNA, 80 bp, synthetic construct; identical to SEQ ID NO: 4263
  source 1..80: mol_type = other DNA

SEQ ID NO: 188994 - DNA, 80 bp, synthetic construct; identical to SEQ ID NO: 4264
  source 1..80: mol_type = other DNA

SEQ ID NO: 188995 - DNA, 80 bp, synthetic construct; identical to SEQ ID NO: 4265
  source 1..80: mol_type = other DNA

SEQ ID NO: 188996 - DNA, 80 bp, synthetic construct; identical to SEQ ID NO: 4266
  source 1..80: mol_type = other DNA

SEQ ID NO: 188997 - DNA, 80 bp, synthetic construct; identical to SEQ ID NO: 4267
  source 1..80: mol_type = other DNA

SEQ ID NO: 188998 - DNA, 80 bp, synthetic construct; identical to SEQ ID NO: 4268
  source 1..80: mol_type = other DNA

SEQ ID NO: 188999 - DNA, 80 bp, synthetic construct; identical to SEQ ID NO: 4269
  source 1..80: mol_type = other DNA

SEQ ID NO: 189000 - DNA, 80 bp, synthetic construct; identical to SEQ ID NO: 4270
  source 1..80: mol_type = other DNA

SEQ ID NO: 189001 - DNA, 80 bp, synthetic construct; identical to SEQ ID NO: 4271
  source 1..80: mol_type = other DNA

SEQ ID NO: 189002 - DNA, 80 bp, synthetic construct; identical to SEQ ID NO: 4272
  source 1..80: mol_type = other DNA

SEQ ID NO: 189003 - DNA, 80 bp, synthetic construct; identical to SEQ ID NO: 4273
  source 1..80: mol_type = other DNA

SEQ ID NO: 189004 - DNA, 80 bp, synthetic construct; identical to SEQ ID NO: 4274
  source 1..80: mol_type = other DNA

SEQ ID NO: 189005 - DNA, 80 bp, synthetic construct; identical to SEQ ID NO: 4275
  source 1..80: mol_type = other DNA

SEQ ID NO: 189006 - DNA, 80 bp, synthetic construct; identical to SEQ ID NO: 4276
  source 1..80: mol_type = other DNA

SEQ ID NO: 189007 - DNA, 80 bp, synthetic construct; identical to SEQ ID NO: 4277
  source 1..80: mol_type = other DNA

SEQ ID NO: 189008 - DNA, 80 bp, synthetic construct; identical to SEQ ID NO: 4278
  source 1..80: mol_type = other DNA

SEQ ID NO: 189009 - DNA, 80 bp, synthetic construct; identical to SEQ ID NO: 4279
  source 1..80: mol_type = other DNA

SEQ ID NO: 189010 - DNA, 80 bp, synthetic construct; identical to SEQ ID NO: 4280
  source 1..80: mol_type = other DNA

SEQ ID NO: 189011 - DNA, 80 bp, synthetic construct; identical to SEQ ID NO: 4281
  source 1..80: mol_type = other DNA

SEQ ID NO: 189012 - DNA, 80 bp, synthetic construct; identical to SEQ ID NO: 4282
  source 1..80: mol_type = other DNA

SEQ ID NO: 189013 - DNA, 80 bp, synthetic construct; identical to SEQ ID NO: 4283
  source 1..80: mol_type = other DNA

SEQ ID NO: 189014 - DNA, 80 bp, synthetic construct; identical to SEQ ID NO: 4284
  source 1..80: mol_type = other DNA

SEQ ID NO: 189015 - DNA, 80 bp, synthetic construct; identical to SEQ ID NO: 4285
  source 1..80: mol_type = other DNA

SEQ ID NO: 189016 - DNA, 80 bp, synthetic construct; identical to SEQ ID NO: 4286
  source 1..80: mol_type = other DNA

SEQ ID NO: 189017 - DNA, 80 bp, synthetic construct; identical to SEQ ID NO: 4287
  source 1..80: mol_type = other DNA

SEQ ID NO: 189018 - DNA, 80 bp, synthetic construct; identical to SEQ ID NO: 4288
  source 1..80: mol_type = other DNA

SEQ ID NO: 189019 - DNA, 80 bp, synthetic construct; identical to SEQ ID NO: 4289
  source 1..80: mol_type = other DNA

SEQ ID NO: 189020 - DNA, 80 bp, synthetic construct; identical to SEQ ID NO: 4290
  source 1..80: mol_type = other DNA

SEQ ID NO: 189021 - DNA, 80 bp, synthetic construct; identical to SEQ ID NO: 4291
  source 1..80: mol_type = other DNA

SEQ ID NO: 189022 - DNA, 80 bp, synthetic construct; identical to SEQ ID NO: 4292
  source 1..80: mol_type = other DNA

SEQ ID NO: 189023 - DNA, 80 bp, synthetic construct; identical to SEQ ID NO: 4293
  source 1..80: mol_type = other DNA

SEQ ID NO: 189024 - DNA, 80 bp, synthetic construct; identical to SEQ ID NO: 4294
  source 1..80: mol_type = other DNA

SEQ ID NO: 189025 - DNA, 80 bp, synthetic construct; identical to SEQ ID NO: 4295
  source 1..80: mol_type = other DNA

SEQ ID NO: 189026 - DNA, 80 bp, synthetic construct; identical to SEQ ID NO: 4296
  source 1..80: mol_type = other DNA

SEQ ID NO: 189027 - DNA, 80 bp, synthetic construct; identical to SEQ ID NO: 4297
  source 1..80: mol_type = other DNA

SEQ ID NO: 189028 - DNA, 80 bp, synthetic construct; identical to SEQ ID NO: 4298
  source 1..80: mol_type = other DNA

SEQ ID NO: 189029 - DNA, 80 bp, synthetic construct; identical to SEQ ID NO: 4299
  source 1..80: mol_type = other DNA

SEQ ID NO: 189030 - DNA, 80 bp, synthetic construct; identical to SEQ ID NO: 4300
  source 1..80: mol_type = other DNA

SEQ ID NO: 189031 - DNA, 80 bp, synthetic construct; identical to SEQ ID NO: 4301
  source 1..80: mol_type = other DNA

SEQ ID NO: 189032 - DNA, 80 bp, synthetic construct; identical to SEQ ID NO: 4302
  source 1..80: mol_type = other DNA

SEQ ID NO: 189033 - DNA, 80 bp, synthetic construct; identical to SEQ ID NO: 4303
  source 1..80: mol_type = other DNA

SEQ ID NO: 189034 - DNA, 80 bp, synthetic construct; identical to SEQ ID NO: 4304
  source 1..80: mol_type = other DNA

SEQ ID NO: 189035 - DNA, 80 bp, synthetic construct; identical to SEQ ID NO: 4305
  source 1..80: mol_type = other DNA

SEQ ID NO: 189036 - DNA, 80 bp, synthetic construct; identical to SEQ ID NO: 4306
  source 1..80: mol_type = other DNA

SEQ ID NO: 189037 - DNA, 80 bp, synthetic construct; identical to SEQ ID NO: 4307
  source 1..80: mol_type = other DNA

SEQ ID NO: 189038 - DNA, 80 bp, synthetic construct; identical to SEQ ID NO: 4308
  source 1..80: mol_type = other DNA

SEQ ID NO: 189039 - DNA, 80 bp, synthetic construct; identical to SEQ ID NO: 4309
  source 1..80: mol_type = other DNA

SEQ ID NO: 189040 - DNA, 80 bp, synthetic construct; identical to SEQ ID NO: 4310
  source 1..80: mol_type = other DNA

SEQ ID NO: 189041 - DNA, 80 bp, synthetic construct; identical to SEQ ID NO: 4311
  source 1..80: mol_type = other DNA

SEQ ID NO: 189042 - DNA, 80 bp, synthetic construct; identical to SEQ ID NO: 4312
  source 1..80: mol_type = other DNA

SEQ ID NO: 189043 - DNA, 80 bp, synthetic construct; identical to SEQ ID NO: 4313
  source 1..80: mol_type = other DNA

SEQ ID NO: 189044 - DNA, 80 bp, synthetic construct; identical to SEQ ID NO: 4314
  source 1..80: mol_type = other DNA

SEQ ID NO: 189045 - DNA, 80 bp, synthetic construct; identical to SEQ ID NO: 4315
  source 1..80: mol_type = other DNA

SEQ ID NO: 189046 - DNA, 80 bp, synthetic construct; identical to SEQ ID NO: 4316
  source 1..80: mol_type = other DNA

SEQ ID NO: 189047 - DNA, 80 bp, synthetic construct; identical to SEQ ID NO: 4317
  source 1..80: mol_type = other DNA

SEQ ID NO: 189048 - DNA, 80 bp, synthetic construct; identical to SEQ ID NO: 4318
  source 1..80: mol_type = other DNA

SEQ ID NO: 189049 - DNA, 80 bp, synthetic construct; identical to SEQ ID NO: 4319
  source 1..80: mol_type = other DNA

SEQ ID NO: 189050 - DNA, 80 bp, synthetic construct; identical to SEQ ID NO: 4320
  source 1..80: mol_type = other DNA

SEQ ID NO: 189051 - DNA, 80 bp, synthetic construct; identical to SEQ ID NO: 4321
  source 1..80: mol_type = other DNA

SEQ ID NO: 189052 - DNA, 80 bp, synthetic construct; identical to SEQ ID NO: 4322
  source 1..80: mol_type = other DNA

SEQ ID NO: 189053 - DNA, 80 bp, synthetic construct; identical to SEQ ID NO: 4323
  source 1..80: mol_type = other DNA

SEQ ID NO: 189054 - DNA, 80 bp, synthetic construct; identical to SEQ ID NO: 4324
  source 1..80: mol_type = other DNA

SEQ ID NO: 189055 - DNA, 80 bp, synthetic construct; identical to SEQ ID NO: 4325
  source 1..80: mol_type = other DNA

SEQ ID NO: 189056 - DNA, 80 bp, synthetic construct; identical to SEQ ID NO: 4326
  source 1..80: mol_type = other DNA

SEQ ID NO: 189057 - DNA, 80 bp, synthetic construct; identical to SEQ ID NO: 4327
  source 1..80: mol_type = other DNA

SEQ ID NO: 189058 - DNA, 80 bp, synthetic construct; identical to SEQ ID NO: 4328
  source 1..80: mol_type = other DNA

SEQ ID NO: 189059 - DNA, 80 bp, synthetic construct; identical to SEQ ID NO: 4329
  source 1..80: mol_type = other DNA

SEQ ID NO: 189060 - DNA, 80 bp, synthetic construct; identical to SEQ ID NO: 4330
  source 1..80: mol_type = other DNA

SEQ ID NO: 189061 - DNA, 80 bp, synthetic construct; identical to SEQ ID NO: 4331
  source 1..80: mol_type = other DNA

SEQ ID NO: 189062 - DNA, 80 bp, synthetic construct; identical to SEQ ID NO: 4332
  source 1..80: mol_type = other DNA

SEQ ID NO: 189063 - DNA, 80 bp, synthetic construct; identical to SEQ ID NO: 4333
  source 1..80: mol_type = other DNA

SEQ ID NO: 189064 - DNA, 80 bp, synthetic construct; identical to SEQ ID NO: 4334
  source 1..80: mol_type = other DNA

SEQ ID NO: 189065 - DNA, 80 bp, synthetic construct; identical to SEQ ID NO: 4335
  source 1..80: mol_type = other DNA

SEQ ID NO: 189066 - DNA, 80 bp, synthetic construct; identical to SEQ ID NO: 4336
  source 1..80: mol_type = other DNA

SEQ ID NO: 189067 - DNA, 80 bp, synthetic construct; identical to SEQ ID NO: 4337
  source 1..80: mol_type = other DNA

SEQ ID NO: 189068 - DNA, 80 bp, synthetic construct; identical to SEQ ID NO: 4338
  source 1..80: mol_type = other DNA

SEQ ID NO: 189069 - DNA, 80 bp, synthetic construct; identical to SEQ ID NO: 4339
  source 1..80: mol_type = other DNA

SEQ ID NO: 189070 - DNA, 80 bp, synthetic construct; identical to SEQ ID NO: 4340
  source 1..80: mol_type = other DNA

SEQ ID NO: 189071 - DNA, 80 bp, synthetic construct; identical to SEQ ID NO: 4341
  source 1..80: mol_type = other DNA

SEQ ID NO: 189072 - DNA, 80 bp, synthetic construct; identical to SEQ ID NO: 4342
  source 1..80: mol_type = other DNA

SEQ ID NO: 189073 - DNA, 80 bp, synthetic construct; identical to SEQ ID NO: 4343
  source 1..80: mol_type = other DNA

SEQ ID NO: 189074 - DNA, 80 bp, synthetic construct; identical to SEQ ID NO: 4344
  source 1..80: mol_type = other DNA

SEQ ID NO: 189075 - DNA, 80 bp, synthetic construct; identical to SEQ ID NO: 4345
  source 1..80: mol_type = other DNA

SEQ ID NO: 189076 - DNA, 80 bp, synthetic construct; identical to SEQ ID NO: 4346
  source 1..80: mol_type = other DNA

SEQ ID NO: 189077 - DNA, 80 bp, synthetic construct; identical to SEQ ID NO: 4347
  source 1..80: mol_type = other DNA

SEQ ID NO: 189078 - DNA, 80 bp, synthetic construct; identical to SEQ ID NO: 4348
  source 1..80: mol_type = other DNA

SEQ ID NO: 189079 - DNA, 80 bp, synthetic construct; identical to SEQ ID NO: 4349
  source 1..80: mol_type = other DNA

SEQ ID NO: 189080 - DNA, 80 bp, synthetic construct; identical to SEQ ID NO: 4350
  source 1..80: mol_type = other DNA

SEQ ID NO: 189081 - DNA, 80 bp, synthetic construct; identical to SEQ ID NO: 4351
  source 1..80: mol_type = other DNA

SEQ ID NO: 189082 - DNA, 80 bp, synthetic construct; identical to SEQ ID NO: 4352
  source 1..80: mol_type = other DNA

SEQ ID NO: 189083 - DNA, 80 bp, synthetic construct; identical to SEQ ID NO: 4353
  source 1..80: mol_type = other DNA

SEQ ID NO: 189084 - DNA, 80 bp, synthetic construct; identical to SEQ ID NO: 4354
  source 1..80: mol_type = other DNA

SEQ ID NO: 189085 - DNA, 80 bp, synthetic construct; identical to SEQ ID NO: 4355
  source 1..80: mol_type = other DNA

SEQ ID NO: 189086 - DNA, 80 bp, synthetic construct; identical to SEQ ID NO: 4356
  source 1..80: mol_type = other DNA

SEQ ID NO: 189087 - DNA, 80 bp, synthetic construct; identical to SEQ ID NO: 4357
  source 1..80: mol_type = other DNA

SEQ ID NO: 189088 - DNA, 80 bp, synthetic construct; identical to SEQ ID NO: 4358
  source 1..80: mol_type = other DNA

SEQ ID NO: 189089 - DNA, 80 bp, synthetic construct; identical to SEQ ID NO: 4359
  source 1..80: mol_type = other DNA

SEQ ID NO: 189090 - DNA, 80 bp, synthetic construct; identical to SEQ ID NO: 4360
  source 1..80: mol_type = other DNA

SEQ ID NO: 189091 - DNA, 80 bp, synthetic construct; identical to SEQ ID NO: 4361
  source 1..80: mol_type = other DNA

SEQ ID NO: 189092 - DNA, 80 bp, synthetic construct; identical to SEQ ID NO: 4362
  source 1..80: mol_type = other DNA

SEQ ID NO: 189093 - DNA, 80 bp, synthetic construct; identical to SEQ ID NO: 4363
  source 1..80: mol_type = other DNA

SEQ ID NO: 189094 - DNA, 80 bp, synthetic construct; identical to SEQ ID NO: 4364
  source 1..80: mol_type = other DNA

SEQ ID NO: 189095 - DNA, 80 bp, synthetic construct; identical to SEQ ID NO: 4365
  source 1..80: mol_type = other DNA

SEQ ID NO: 189096 - DNA, 80 bp, synthetic construct; identical to SEQ ID NO: 4366
  source 1..80: mol_type = other DNA

SEQ ID NO: 189097 - DNA, 80 bp, synthetic construct; identical to SEQ ID NO: 4367
  source 1..80: mol_type = other DNA

SEQ ID NO: 189098 - DNA, 80 bp, synthetic construct; identical to SEQ ID NO: 4368
  source 1..80: mol_type = other DNA

SEQ ID NO: 189099 - DNA, 80 bp, synthetic construct; identical to SEQ ID NO: 4369
  source 1..80: mol_type = other DNA

SEQ ID NO: 189100 - DNA, 80 bp, synthetic construct; identical to SEQ ID NO: 4370
  source 1..80: mol_type = other DNA

SEQ ID NO: 189101 - DNA, 80 bp, synthetic construct; identical to SEQ ID NO: 4371
  source 1..80: mol_type = other DNA

SEQ ID NO: 189102 - DNA, 80 bp, synthetic construct; identical to SEQ ID NO: 4372
  source 1..80: mol_type = other DNA

SEQ ID NO: 189103 - DNA, 80 bp, synthetic construct; identical to SEQ ID NO: 4373
  source 1..80: mol_type = other DNA

SEQ ID NO: 189104 - DNA, 80 bp, synthetic construct; identical to SEQ ID NO: 4374
  source 1..80: mol_type = other DNA

SEQ ID NO: 189105 - DNA, 80 bp, synthetic construct; identical to SEQ ID NO: 4375
  source 1..80: mol_type = other DNA

SEQ ID NO: 189106 - DNA, 80 bp, synthetic construct; identical to SEQ ID NO: 4376
  source 1..80: mol_type = other DNA

SEQ ID NO: 189107 - DNA, 80 bp, synthetic construct; identical to SEQ ID NO: 4377
  source 1..80: mol_type = other DNA

SEQ ID NO: 189108 - DNA, 80 bp, synthetic construct; identical to SEQ ID NO: 4378
  source 1..80: mol_type = other DNA

SEQ ID NO: 189109 - DNA, 80 bp, synthetic construct; identical to SEQ ID NO: 4379
  source 1..80: mol_type = other DNA

SEQ ID NO: 189110 - DNA, 80 bp, synthetic construct; identical to SEQ ID NO: 4380
  source 1..80: mol_type = other DNA

SEQ ID NO: 189111 - DNA, 80 bp, synthetic construct; identical to SEQ ID NO: 4381
  source 1..80: mol_type = other DNA

SEQ ID NO: 189112 - DNA, 80 bp, synthetic construct; identical to SEQ ID NO: 4382
  source 1..80: mol_type = other DNA

SEQ ID NO: 189113 - DNA, 80 bp, synthetic construct; identical to SEQ ID NO: 4383
  source 1..80: mol_type = other DNA

SEQ ID NO: 189114 - DNA, 80 bp, synthetic construct; identical to SEQ ID NO: 4384
  source 1..80: mol_type = other DNA

SEQ ID NO: 189115 - DNA, 80 bp, synthetic construct; identical to SEQ ID NO: 4385
  source 1..80: mol_type = other DNA

SEQ ID NO: 189116 - DNA, 80 bp, synthetic construct; identical to SEQ ID NO: 4386
  source 1..80: mol_type = other DNA

SEQ ID NO: 189117 - DNA, 80 bp, synthetic construct; identical to SEQ ID NO: 4387
  source 1..80: mol_type = other DNA

SEQ ID NO: 189118 - DNA, 80 bp, synthetic construct; identical to SEQ ID NO: 4388
  source 1..80: mol_type = other DNA

SEQ ID NO: 189119 - DNA, 80 bp, synthetic construct; identical to SEQ ID NO: 4389
  source 1..80: mol_type = other DNA

SEQ ID NO: 189120 - DNA, 80 bp, synthetic construct; identical to SEQ ID NO: 4390
  source 1..80: mol_type = other DNA

SEQ ID NO: 189121 - DNA, 80 bp, synthetic construct; identical to SEQ ID NO: 4391
  source 1..80: mol_type = other DNA

SEQ ID NO: 189122 - DNA, 80 bp, synthetic construct; identical to SEQ ID NO: 4392
  source 1..80: mol_type = other DNA

SEQ ID NO: 189123 - DNA, 80 bp, synthetic construct; identical to SEQ ID NO: 4393
  source 1..80: mol_type = other DNA

SEQ ID NO: 189124 - DNA, 80 bp, synthetic construct; identical to SEQ ID NO: 4394
  source 1..80: mol_type = other DNA

SEQ ID NO: 189125 - DNA, 80 bp, synthetic construct; identical to SEQ ID NO: 4395
  source 1..80: mol_type = other DNA

SEQ ID NO: 189126 - DNA, 80 bp, synthetic construct; identical to SEQ ID NO: 4396
  source 1..80: mol_type = other DNA

SEQ ID NO: 189127 - DNA, 80 bp, synthetic construct; identical to SEQ ID NO: 4397
  source 1..80: mol_type = other DNA

SEQ ID NO: 189128 - DNA, 80 bp, synthetic construct; identical to SEQ ID NO: 4398
  source 1..80: mol_type = other DNA

SEQ ID NO: 189129 - DNA, 80 bp, synthetic construct; identical to SEQ ID NO: 4399
  source 1..80: mol_type = other DNA

SEQ ID NO: 189130 - DNA, 80 bp, synthetic construct; identical to SEQ ID NO: 4400
  source 1..80: mol_type = other DNA

SEQ ID NO: 189131 - DNA, 80 bp, synthetic construct; identical to SEQ ID NO: 4401
  source 1..80: mol_type = other DNA

SEQ ID NO: 189132 - DNA, 80 bp, synthetic construct; identical to SEQ ID NO: 4402
  source 1..80: mol_type = other DNA

SEQ ID NO: 189133 - DNA, 80 bp, synthetic construct; identical to SEQ ID NO: 4403
  source 1..80: mol_type = other DNA

SEQ ID NO: 189134 - DNA, 80 bp, synthetic construct; identical to SEQ ID NO: 4404
  source 1..80: mol_type = other DNA

SEQ ID NO: 189135 - DNA, 80 bp, synthetic construct; identical to SEQ ID NO: 4405
  source 1..80: mol_type = other DNA

SEQ ID NO: 189136 - DNA, 80 bp, synthetic construct; identical to SEQ ID NO: 4406
  source 1..80: mol_type = other DNA

SEQ ID NO: 189137 - DNA, 80 bp, synthetic construct; identical to SEQ ID NO: 4407
  source 1..80: mol_type = other DNA

SEQ ID NO: 189138 - DNA, 80 bp, synthetic construct; identical to SEQ ID NO: 4408
  source 1..80: mol_type = other DNA

SEQ ID NO: 189139 - DNA, 80 bp, synthetic construct; identical to SEQ ID NO: 4409
  source 1..80: mol_type = other DNA

SEQ ID NO: 189140 - DNA, 80 bp, synthetic construct; identical to SEQ ID NO: 4410
  source 1..80: mol_type = other DNA

SEQ ID NO: 189141 - DNA, 80 bp, synthetic construct; identical to SEQ ID NO: 4411
  source 1..80: mol_type = other DNA

SEQ ID NO: 189142 - DNA, 80 bp, synthetic construct; identical to SEQ ID NO: 4412
  source 1..80: mol_type = other DNA

SEQ ID NO: 189143 - DNA, 80 bp, synthetic construct; identical to SEQ ID NO: 4413
  source 1..80: mol_type = other DNA

SEQ ID NO: 189144 - DNA, 80 bp, synthetic construct; identical to SEQ ID NO: 4414
  source 1..80: mol_type = other DNA

SEQ ID NO: 189145 - DNA, 80 bp, synthetic construct; identical to SEQ ID NO: 4415
  source 1..80: mol_type = other DNA

SEQ ID NO: 189146 - DNA, 80 bp, synthetic construct; identical to SEQ ID NO: 4416
  source 1..80: mol_type = other DNA

SEQ ID NO: 189147 - DNA, 80 bp, synthetic construct; identical to SEQ ID NO: 4417
  source 1..80: mol_type = other DNA

SEQ ID NO: 189148 - DNA, 80 bp, synthetic construct; identical to SEQ ID NO: 4418
  source 1..80: mol_type = other DNA

SEQ ID NO: 189149 - DNA, 80 bp, synthetic construct; identical to SEQ ID NO: 4419
  source 1..80: mol_type = other DNA

SEQ ID NO: 189150 - DNA, 80 bp, synthetic construct; identical to SEQ ID NO: 4420
  source 1..80: mol_type = other DNA

SEQ ID NO: 189151 - DNA, 80 bp, synthetic construct; identical to SEQ ID NO: 4421
  source 1..80: mol_type = other DNA

SEQ ID NO: 189152 - DNA, 80 bp, synthetic construct; identical to SEQ ID NO: 4422
  source 1..80: mol_type = other DNA

SEQ ID NO: 189153 - DNA, 80 bp, synthetic construct; identical to SEQ ID NO: 4423
  source 1..80: mol_type = other DNA

SEQ ID NO: 189154 - DNA, 80 bp, synthetic construct; identical to SEQ ID NO: 4424
  source 1..80: mol_type = other DNA

SEQ ID NO: 189155 - DNA, 80 bp, synthetic construct; identical to SEQ ID NO: 4425
  source 1..80: mol_type = other DNA

SEQ ID NO: 189156 - DNA, 80 bp, synthetic construct; identical to SEQ ID NO: 4426
  source 1..80: mol_type = other DNA

SEQ ID NO: 189157 - DNA, 80 bp, synthetic construct; identical to SEQ ID NO: 4427
  source 1..80: mol_type = other DNA

SEQ ID NO: 189158 - DNA, 80 bp, synthetic construct; identical to SEQ ID NO: 4428
  source 1..80: mol_type = other DNA

SEQ ID NO: 189159 - DNA, 80 bp, synthetic construct; identical to SEQ ID NO: 4429
  source 1..80: mol_type = other DNA

SEQ ID NO: 189160 - DNA, 80 bp, synthetic construct; identical to SEQ ID NO: 4430
  source 1..80: mol_type = other DNA

SEQ ID NO: 189161 - DNA, 80 bp, synthetic construct; identical to SEQ ID NO: 4431
  source 1..80: mol_type = other DNA

SEQ ID NO: 189162 - DNA, 80 bp, synthetic construct; identical to SEQ ID NO: 4432
  source 1..80: mol_type = other DNA

SEQ ID NO: 189163 - DNA, 80 bp, synthetic construct; identical to SEQ ID NO: 4433
  source 1..80: mol_type = other DNA

SEQ ID NO: 189164 - DNA, 80 bp, synthetic construct; identical to SEQ ID NO: 4434
  source 1..80: mol_type = other DNA

SEQ ID NO: 189165 - DNA, 80 bp, synthetic construct; identical to SEQ ID NO: 4435
  source 1..80: mol_type = other DNA

SEQ ID NO: 189166 - DNA, 80 bp, synthetic construct; identical to SEQ ID NO: 4436
  source 1..80: mol_type = other DNA

SEQ ID NO: 189167 - DNA, 80 bp, synthetic construct; identical to SEQ ID NO: 4437
  source 1..80: mol_type = other DNA

SEQ ID NO: 189168 - DNA, 80 bp, synthetic construct; identical to SEQ ID NO: 4438
  source 1..80: mol_type = other DNA

SEQ ID NO: 189169 - DNA, 80 bp, synthetic construct; identical to SEQ ID NO: 4439
  source 1..80: mol_type = other DNA

SEQ ID NO: 189170 - DNA, 80 bp, synthetic construct; identical to SEQ ID NO: 4440
  source 1..80: mol_type = other DNA

SEQ ID NO: 189171 - DNA, 80 bp, synthetic construct; identical to SEQ ID NO: 4441
  source 1..80: mol_type = other DNA

SEQ ID NO: 189172 - DNA, 80 bp, synthetic construct; identical to SEQ ID NO: 4442
  source 1..80: mol_type = other DNA

SEQ ID NO: 189173 - DNA, 80 bp, synthetic construct; identical to SEQ ID NO: 4443
  source 1..80: mol_type = other DNA

SEQ ID NO: 189174 - DNA, 80 bp, synthetic construct; identical to SEQ ID NO: 4444
  source 1..80: mol_type = other DNA

SEQ ID NO: 189175 - DNA, 80 bp, synthetic construct; identical to SEQ ID NO: 4445
  source 1..80: mol_type = other DNA

SEQ ID NO: 189176 - DNA, 80 bp, synthetic construct; identical to SEQ ID NO: 4446
  source 1..80: mol_type = other DNA

SEQ ID NO: 189177 - DNA, 80 bp, synthetic construct; identical to SEQ ID NO: 4447
  source 1..80: mol_type = other DNA

SEQ ID NO: 189178 - DNA, 80 bp, synthetic construct; identical to SEQ ID NO: 4448
  source 1..80: mol_type = other DNA

SEQ ID NO: 189179 - DNA, 80 bp, synthetic construct; identical to SEQ ID NO: 4449
  source 1..80: mol_type = other DNA

SEQ ID NO: 189180 - DNA, 80 bp, synthetic construct; identical to SEQ ID NO: 4450
  source 1..80: mol_type = other DNA

SEQ ID NO: 189181 - DNA, 80 bp, synthetic construct; identical to SEQ ID NO: 4451
  source 1..80: mol_type = other DNA

SEQ ID NO: 189182 - DNA, 80 bp, synthetic construct; identical to SEQ ID NO: 4452
  source 1..80: mol_type = other DNA

SEQ ID NO: 189183 - DNA, 80 bp, synthetic construct; identical to SEQ ID NO: 4453
  source 1..80: mol_type = other DNA

SEQ ID NO: 189184 - DNA, 80 bp, synthetic construct; identical to SEQ ID NO: 4454
  source 1..80: mol_type = other DNA

SEQ ID NO: 189185 - DNA, 80 bp, synthetic construct; identical to SEQ ID NO: 4455
  source 1..80: mol_type = other DNA

SEQ ID NO: 189186 - DNA, 80 bp, synthetic construct; identical to SEQ ID NO: 4456
  source 1..80: mol_type = other DNA

SEQ ID NO: 189187 - DNA, 80 bp, synthetic construct; identical to SEQ ID NO: 4457
  source 1..80: mol_type = other DNA

SEQ ID NO: 189188 - DNA, 80 bp, synthetic construct; identical to SEQ ID NO: 4458
  source 1..80: mol_type = other DNA

SEQ ID NO: 189189 - DNA, 80 bp, synthetic construct; identical to SEQ ID NO: 4459
  source 1..80: mol_type = other DNA

SEQ ID NO: 189190 - DNA, 80 bp, synthetic construct; identical to SEQ ID NO: 4460
  source 1..80: mol_type = other DNA

SEQ ID NO: 189191 - DNA, 80 bp, synthetic construct; identical to SEQ ID NO: 4461
  source 1..80: mol_type = other DNA

SEQ ID NO: 189192 - DNA, 80 bp, synthetic construct; identical to SEQ ID NO: 4462
  source 1..80: mol_type = other DNA

SEQ ID NO: 189193 - DNA, 80 bp, synthetic construct; identical to SEQ ID NO: 4463
  source 1..80: mol_type = other DNA

SEQ ID NO: 189194 - DNA, 80 bp, synthetic construct; identical to SEQ ID NO: 4464
  source 1..80: mol_type = other DNA

SEQ ID NO: 189195 - DNA, 80 bp, synthetic construct; identical to SEQ ID NO: 4465
  source 1..80: mol_type = other DNA

SEQ ID NO: 189196 - DNA, 80 bp, synthetic construct; identical to SEQ ID NO: 4466
  source 1..80: mol_type = other DNA

SEQ ID NO: 189197 - DNA, 80 bp, synthetic construct; identical to SEQ ID NO: 4467
  source 1..80: mol_type = other DNA

SEQ ID NO: 189198 - DNA, 80 bp, synthetic construct; identical to SEQ ID NO: 4468
  source 1..80: mol_type = other DNA

SEQ ID NO: 189199 - DNA, 80 bp, synthetic construct; identical to SEQ ID NO: 4469
  source 1..80: mol_type = other DNA

SEQ ID NO: 189200 - DNA, 80 bp, synthetic construct; identical to SEQ ID NO: 4470
  source 1..80: mol_type = other DNA

SEQ ID NO: 189201 - DNA, 80 bp, synthetic construct; identical to SEQ ID NO: 4471
  source 1..80: mol_type = other DNA

SEQ ID NO: 189202 - DNA, 80 bp, synthetic construct; identical to SEQ ID NO: 4472
  source 1..80: mol_type = other DNA

SEQ ID NO: 189203 - DNA, 80 bp, synthetic construct; identical to SEQ ID NO: 4473
  source 1..80: mol_type = other DNA

SEQ ID NO: 189204 - DNA, 80 bp, synthetic construct; identical to SEQ ID NO: 4474
  source 1..80: mol_type = other DNA

SEQ ID NO: 189205 - DNA, 80 bp, synthetic construct; identical to SEQ ID NO: 4475
  source 1..80: mol_type = other DNA

SEQ ID NO: 189206 - DNA, 80 bp, synthetic construct; identical to SEQ ID NO: 4476
  source 1..80: mol_type = other DNA

SEQ ID NO: 189207 - DNA, 80 bp, synthetic construct; identical to SEQ ID NO: 4477
  source 1..80: mol_type = other DNA

SEQ ID NO: 189208 - DNA, 80 bp, synthetic construct; identical to SEQ ID NO: 4478
  source 1..80: mol_type = other DNA

SEQ ID NO: 189209 - DNA, 80 bp, synthetic construct; identical to SEQ ID NO: 4479
  source 1..80: mol_type = other DNA

SEQ ID NO: 189210 - DNA, 80 bp, synthetic construct; identical to SEQ ID NO: 4480
  source 1..80: mol_type = other DNA

SEQ ID NO: 189211 - DNA, 80 bp, synthetic construct; identical to SEQ ID NO: 4481
  source 1..80: mol_type = other DNA

SEQ ID NO: 189212 - DNA, 80 bp, synthetic construct; identical to SEQ ID NO: 4482
  source 1..80: mol_type = other DNA

SEQ ID NO: 189213 - DNA, 80 bp, synthetic construct; identical to SEQ ID NO: 4483
  source 1..80: mol_type = other DNA

SEQ ID NO: 189214 - DNA, 80 bp, synthetic construct; identical to SEQ ID NO: 4484
  source 1..80: mol_type = other DNA

SEQ ID NO: 189215 - DNA, 80 bp, synthetic construct; identical to SEQ ID NO: 4485
  source 1..80: mol_type = other DNA

SEQ ID NO: 189216 - DNA, 80 bp, synthetic construct; identical to SEQ ID NO: 4486
  source 1..80: mol_type = other DNA

SEQ ID NO: 189217 - DNA, 80 bp, synthetic construct; identical to SEQ ID NO: 4487
  source 1..80: mol_type = other DNA

SEQ ID NO: 189218 - DNA, 80 bp, synthetic construct; identical to SEQ ID NO: 4488
  source 1..80: mol_type = other DNA

SEQ ID NO: 189219 - DNA, 80 bp, synthetic construct; identical to SEQ ID NO: 4489
  source 1..80: mol_type = other DNA

SEQ ID NO: 189220 - DNA, 80 bp, synthetic construct; identical to SEQ ID NO: 4490
  source 1..80: mol_type = other DNA

SEQ ID NO: 189221 - DNA, 80 bp, synthetic construct; identical to SEQ ID NO: 4491
  source 1..80: mol_type = other DNA

SEQ ID NO: 189222 - DNA, 80 bp, synthetic construct; identical to SEQ ID NO: 4492
  source 1..80: mol_type = other DNA

SEQ ID NO: 189223 - DNA, 80 bp, synthetic construct; identical to SEQ ID NO: 4493
  source 1..80: mol_type = other DNA

SEQ ID NO: 189224 - DNA, 80 bp, synthetic construct; identical to SEQ ID NO: 4494
  source 1..80: mol_type = other DNA

SEQ ID NO: 189225 - DNA, 80 bp, synthetic construct; identical to SEQ ID NO: 4495
  source 1..80: mol_type = other DNA

SEQ ID NO: 189226 - DNA, 80 bp, synthetic construct; identical to SEQ ID NO: 4496
  source 1..80: mol_type = other DNA

SEQ ID NO: 189227 - DNA, 80 bp, synthetic construct; identical to SEQ ID NO: 4497
  source 1..80: mol_type = other DNA

SEQ ID NO: 189228 - DNA, 80 bp, synthetic construct; identical to SEQ ID NO: 4498
  source 1..80: mol_type = other DNA

SEQ ID NO: 189229 - DNA, 80 bp, synthetic construct; identical to SEQ ID NO: 4499
  source 1..80: mol_type = other DNA

SEQ ID NO: 189230 - DNA, 80 bp, synthetic construct; identical to SEQ ID NO: 4500
  source 1..80: mol_type = other DNA

SEQ ID NO: 189231 - DNA, 80 bp, synthetic construct; identical to SEQ ID NO: 4501
  source 1..80: mol_type = other DNA

SEQ ID NO: 189232 - DNA, 80 bp, synthetic construct; identical to SEQ ID NO: 4502
  source 1..80: mol_type = other DNA

SEQ ID NO: 189233 - DNA, 80 bp, synthetic construct; identical to SEQ ID NO: 4503
  source 1..80: mol_type = other DNA

SEQ ID NO: 189234 - DNA, 80 bp, synthetic construct; identical to SEQ ID NO: 4504
  source 1..80: mol_type = other DNA

SEQ ID NO: 189235 - DNA, 80 bp, synthetic construct; identical to SEQ ID NO: 4505
  source 1..80: mol_type = other DNA

SEQ ID NO: 189236 - DNA, 80 bp, synthetic construct; identical to SEQ ID NO: 4506
  source 1..80: mol_type = other DNA

SEQ ID NO: 189237 - DNA, 80 bp, synthetic construct; identical to SEQ ID NO: 4507
  source 1..80: mol_type = other DNA

SEQ ID NO: 189238 - DNA, 80 bp, synthetic construct; identical to SEQ ID NO: 4508
  source 1..80: mol_type = other DNA

SEQ ID NO: 189239 - DNA, 80 bp, synthetic construct; identical to SEQ ID NO: 4509
  source 1..80: mol_type = other DNA

SEQ ID NO: 189240 - DNA, 80 bp, synthetic construct; identical to SEQ ID NO: 4510
  source 1..80: mol_type = other DNA

SEQ ID NO: 189241 - DNA, 80 bp, synthetic construct; identical to SEQ ID NO: 4511
  source 1..80: mol_type = other DNA

SEQ ID NO: 189242 - DNA, 80 bp, synthetic construct; identical to SEQ ID NO: 4512
  source 1..80: mol_type = other DNA

SEQ ID NO: 189243 - DNA, 80 bp, synthetic construct; identical to SEQ ID NO: 4513
  source 1..80: mol_type = other DNA

SEQ ID NO: 189244 - DNA, 80 bp, synthetic construct; identical to SEQ ID NO: 4514
  source 1..80: mol_type = other DNA

SEQ ID NO: 189245 - DNA, 80 bp, synthetic construct; identical to SEQ ID NO: 4515
  source 1..80: mol_type = other DNA

SEQ ID NO: 189246 - DNA, 80 bp, synthetic construct; identical to SEQ ID NO: 4516
  source 1..80: mol_type = other DNA

SEQ ID NO: 189247 - DNA, 80 bp, synthetic construct; identical to SEQ ID NO: 4517
  source 1..80: mol_type = other DNA

SEQ ID NO: 189248 - DNA, 80 bp, synthetic construct; identical to SEQ ID NO: 4518
  source 1..80: mol_type = other DNA

SEQ ID NO: 189249 - DNA, 80 bp, synthetic construct; identical to SEQ ID NO: 4519
  source 1..80: mol_type = other DNA

SEQ ID NO: 189250 - DNA, 80 bp, synthetic construct; identical to SEQ ID NO: 4520
  source 1..80: mol_type = other DNA

SEQ ID NO: 189251 - DNA, 80 bp, synthetic construct; identical to SEQ ID NO: 4521
  source 1..80: mol_type = other DNA

SEQ ID NO: 189252 - DNA, 80 bp, synthetic construct; identical to SEQ ID NO: 4522
  source 1..80: mol_type = other DNA

SEQ ID NO: 189253 - DNA, 80 bp, synthetic construct; identical to SEQ ID NO: 4523
  source 1..80: mol_type = other DNA

SEQ ID NO: 189254 - DNA, 80 bp, synthetic construct; identical to SEQ ID NO: 4524
  source 1..80: mol_type = other DNA

SEQ ID NO: 189255 - DNA, 80 bp, synthetic construct; identical to SEQ ID NO: 4525
  source 1..80: mol_type = other DNA

SEQ ID NO: 189256 - DNA, 80 bp, synthetic construct; identical to SEQ ID NO: 4526
  source 1..80: mol_type = other DNA

SEQ ID NO: 189257 - DNA, 80 bp, synthetic construct; identical to SEQ ID NO: 4527
  source 1..80: mol_type = other DNA

SEQ ID NO: 189258 - DNA, 80 bp, synthetic construct; identical to SEQ ID NO: 4528
  source 1..80: mol_type = other DNA

SEQ ID NO: 189259 - DNA, 80 bp, synthetic construct; identical to SEQ ID NO: 4529
  source 1..80: mol_type = other DNA

SEQ ID NO: 189260 - DNA, 80 bp, synthetic construct; identical to SEQ ID NO: 4530
  source 1..80: mol_type = other DNA

SEQ ID NO: 189261 - DNA, 80 bp, synthetic construct; identical to SEQ ID NO: 4531
  source 1..80: mol_type = other DNA

SEQ ID NO: 189262 - DNA, 80 bp, synthetic construct; identical to SEQ ID NO: 4532
  source 1..80: mol_type = other DNA

SEQ ID NO: 189263 - DNA, 80 bp, synthetic construct; identical to SEQ ID NO: 4533
  source 1..80: mol_type = other DNA

SEQ ID NO: 189264 - DNA, 80 bp, synthetic construct; identical to SEQ ID NO: 4534
  source 1..80: mol_type = other DNA

SEQ ID NO: 189265 - DNA, 80 bp, synthetic construct; identical to SEQ ID NO: 4535
  source 1..80: mol_type = other DNA

SEQ ID NO: 189266 - DNA, 80 bp, synthetic construct; identical to SEQ ID NO: 4536
  source 1..80: mol_type = other DNA

SEQ ID NO: 189267 - DNA, 80 bp, synthetic construct; identical to SEQ ID NO: 4537
  source 1..80: mol_type = other DNA

SEQ ID NO: 189268 - DNA, 80 bp, synthetic construct; identical to SEQ ID NO: 4538
  source 1..80: mol_type = other DNA

SEQ ID NO: 189269 - DNA, 80 bp, synthetic construct; identical to SEQ ID NO: 4539
  source 1..80: mol_type = other DNA

SEQ ID NO: 189270 - DNA, 80 bp, synthetic construct; identical to SEQ ID NO: 4540
  source 1..80: mol_type = other DNA

SEQ ID NO: 189271 - DNA, 80 bp, synthetic construct; identical to SEQ ID NO: 4541
  source 1..80: mol_type = other DNA

SEQ ID NO: 189272 - DNA, 80 bp, synthetic construct; identical to SEQ ID NO: 4542
  source 1..80: mol_type = other DNA

SEQ ID NO: 189273 - DNA, 80 bp, synthetic construct; identical to SEQ ID NO: 4543
  source 1..80: mol_type = other DNA

SEQ ID NO: 189274 - DNA, 80 bp, synthetic construct; identical to SEQ ID NO: 4544
  source 1..80: mol_type = other DNA

SEQ ID NO: 189275 - DNA, 80 bp, synthetic construct; identical to SEQ ID NO: 4545
  source 1..80: mol_type = other DNA

SEQ ID NO: 189276 - DNA, 80 bp, synthetic construct; identical to SEQ ID NO: 4546
  source 1..80: mol_type = other DNA

SEQ ID NO: 189277 - DNA, 80 bp, synthetic construct; identical to SEQ ID NO: 4547
  source 1..80: mol_type = other DNA

SEQ ID NO: 189278 - DNA, 80 bp, synthetic construct; identical to SEQ ID NO: 4548
  source 1..80: mol_type = other DNA

SEQ ID NO: 189279 - DNA, 80 bp, synthetic construct; identical to SEQ ID NO: 4549
  source 1..80: mol_type = other DNA

SEQ ID NO: 189280 - DNA, 80 bp, synthetic construct; identical to SEQ ID NO: 4550
  source 1..80: mol_type = other DNA

SEQ ID NO: 189281 - DNA, 80 bp, synthetic construct; identical to SEQ ID NO: 4551
  source 1..80: mol_type = other DNA

SEQ ID NO: 189282 - DNA, 80 bp, synthetic construct; identical to SEQ ID NO: 4552
  source 1..80: mol_type = other DNA

SEQ ID NO: 189283 - DNA, 80 bp, synthetic construct; identical to SEQ ID NO: 4553
  source 1..80: mol_type = other DNA

SEQ ID NO: 189284 - DNA, 80 bp, synthetic construct; identical to SEQ ID NO: 4554
  source 1..80: mol_type = other DNA

SEQ ID NO: 189285 - DNA, 80 bp, synthetic construct; identical to SEQ ID NO: 4555
  source 1..80: mol_type = other DNA

SEQ ID NO: 189286 - DNA, 80 bp, synthetic construct; identical to SEQ ID NO: 4556
  source 1..80: mol_type = other DNA

SEQ ID NO: 189287 - DNA, 80 bp, synthetic construct; identical to SEQ ID NO: 4557
  source 1..80: mol_type = other DNA

SEQ ID NO: 189288 - DNA, 80 bp, synthetic construct; identical to SEQ ID NO: 4558
  source 1..80: mol_type = other DNA

SEQ ID NO: 189289 - DNA, 80 bp, synthetic construct; identical to SEQ ID NO: 4559
  source 1..80: mol_type = other DNA

SEQ ID NO: 189290 - DNA, 80 bp, synthetic construct; identical to SEQ ID NO: 4560
  source 1..80: mol_type = other DNA

SEQ ID NO: 189291 - DNA, 80 bp, synthetic construct; identical to SEQ ID NO: 4561
  source 1..80: mol_type = other DNA

SEQ ID NO: 189292 - DNA, 80 bp, synthetic construct; identical to SEQ ID NO: 4562
  source 1..80: mol_type = other DNA

SEQ ID NO: 189293 - DNA, 80 bp, synthetic construct; identical to SEQ ID NO: 4563
  source 1..80: mol_type = other DNA

SEQ ID NO: 189294 - DNA, 80 bp, synthetic construct; identical to SEQ ID NO: 4564
  source 1..80: mol_type = other DNA

SEQ ID NO: 189295 - DNA, 80 bp, synthetic construct; identical to SEQ ID NO: 4565
  source 1..80: mol_type = other DNA

SEQ ID NO: 189296 - DNA, 80 bp, synthetic construct; identical to SEQ ID NO: 4566
  source 1..80: mol_type = other DNA

SEQ ID NO: 189297 - DNA, 80 bp, synthetic construct; identical to SEQ ID NO: 4567
  source 1..80: mol_type = other DNA

SEQ ID NO: 189298 - DNA, 80 bp, synthetic construct; identical to SEQ ID NO: 4568
  source 1..80: mol_type = other DNA

SEQ ID NO: 189299 - DNA, 80 bp, synthetic construct; identical to SEQ ID NO: 4569
  source 1..80: mol_type = other DNA

SEQ ID NO: 189300 - DNA, 80 bp, synthetic construct; identical to SEQ ID NO: 4570
  source 1..80: mol_type = other DNA

SEQ ID NO: 189301 - DNA, 80 bp, synthetic construct; identical to SEQ ID NO: 4571
  source 1..80: mol_type = other DNA

SEQ ID NO: 189302 - DNA, 80 bp, synthetic construct; identical to SEQ ID NO: 4572
  source 1..80: mol_type = other DNA

SEQ ID NO: 189303 - DNA, 80 bp, synthetic construct; identical to SEQ ID NO: 4573
  source 1..80: mol_type = other DNA

SEQ ID NO: 189304 - DNA, 80 bp, synthetic construct; identical to SEQ ID NO: 4574
  source 1..80: mol_type = other DNA

SEQ ID NO: 189305 - DNA, 80 bp, synthetic construct; identical to SEQ ID NO: 4575
  source 1..80: mol_type = other DNA

SEQ ID NO: 189306 - DNA, 80 bp, synthetic construct; identical to SEQ ID NO: 4576
  source 1..80: mol_type = other DNA

SEQ ID NO: 189307 - DNA, 80 bp, synthetic construct; identical to SEQ ID NO: 4577
  source 1..80: mol_type = other DNA

SEQ ID NO: 189308 - DNA, 80 bp, synthetic construct; identical to SEQ ID NO: 4578
  source 1..80: mol_type = other DNA

SEQ ID NO: 189309 - DNA, 80 bp, synthetic construct; identical to SEQ ID NO: 4579
  source 1..80: mol_type = other DNA

SEQ ID NO: 189310 - DNA, 80 bp, synthetic construct; identical to SEQ ID NO: 4580
  source 1..80: mol_type = other DNA

SEQ ID NO: 189311 - DNA, 80 bp, synthetic construct; identical to SEQ ID NO: 4581
  source 1..80: mol_type = other DNA

SEQ ID NO: 189312 - DNA, 80 bp, synthetic construct; identical to SEQ ID NO: 4582
  source 1..80: mol_type = other DNA

SEQ ID NO: 189313 - DNA, 80 bp, synthetic construct; identical to SEQ ID NO: 4583
  source 1..80: mol_type = other DNA

SEQ ID NO: 189314 - DNA, 80 bp, synthetic construct; identical to SEQ ID NO: 4584
  source 1..80: mol_type = other DNA

SEQ ID NO: 189315 - DNA, 80 bp, synthetic construct; identical to SEQ ID NO: 4585
  source 1..80: mol_type = other DNA

SEQ ID NO: 189316 - DNA, 80 bp, synthetic construct; identical to SEQ ID NO: 4586
  source 1..80: mol_type = other DNA

SEQ ID NO: 189317 - DNA, 80 bp, synthetic construct; identical to SEQ ID NO: 4587
  source 1..80: mol_type = other DNA

SEQ ID NO: 189318 - DNA, 80 bp, synthetic construct; identical to SEQ ID NO: 4588
  source 1..80: mol_type = other DNA

SEQ ID NO: 189319 - DNA, 80 bp, synthetic construct; identical to SEQ ID NO: 4589
  source 1..80: mol_type = other DNA

SEQ ID NO: 189320 - DNA, 80 bp, synthetic construct; identical to SEQ ID NO: 4590
  source 1..80: mol_type = other DNA

SEQ ID NO: 189321 - DNA, 80 bp, synthetic construct; identical to SEQ ID NO: 4591
  source 1..80: mol_type = other DNA

SEQ ID NO: 189322 - DNA, 80 bp, synthetic construct; identical to SEQ ID NO: 4592
  source 1..80: mol_type = other DNA

SEQ ID NO: 189323 - DNA, 80 bp, synthetic construct; identical to SEQ ID NO: 4593
  source 1..80: mol_type = other DNA

SEQ ID NO: 189324 - DNA, 80 bp, synthetic construct; identical to SEQ ID NO: 4594
  source 1..80: mol_type = other DNA

SEQ ID NO: 189325 - DNA, 80 bp, synthetic construct; identical to SEQ ID NO: 4595
  source 1..80: mol_type = other DNA

SEQ ID NO: 189326 - DNA, 80 bp, synthetic construct; identical to SEQ ID NO: 4596
  source 1..80: mol_type = other DNA

SEQ ID NO: 189327 - DNA, 80 bp, synthetic construct; identical to SEQ ID NO: 4597
  source 1..80: mol_type = other DNA

SEQ ID NO: 189328 - DNA, 80 bp, synthetic construct; identical to SEQ ID NO: 4598
  source 1..80: mol_type = other DNA

SEQ ID NO: 189329 - DNA, 80 bp, synthetic construct; identical to SEQ ID NO: 4599
  source 1..80: mol_type = other DNA

SEQ ID NO: 189330 - DNA, 80 bp, synthetic construct; identical to SEQ ID NO: 4600
  source 1..80: mol_type = other DNA

SEQ ID NO: 189331 - DNA, 80 bp, synthetic construct; identical to SEQ ID NO: 4601
  source 1..80: mol_type = other DNA

SEQ ID NO: 189332 - DNA, 80 bp, synthetic construct; identical to SEQ ID NO: 4602
  source 1..80: mol_type = other DNA

SEQ ID NO: 189333 - DNA, 80 bp, synthetic construct; identical to SEQ ID NO: 4603
  source 1..80: mol_type = other DNA

SEQ ID NO: 189334 - DNA, 80 bp, synthetic construct; identical to SEQ ID NO: 4604
  source 1..80: mol_type = other DNA

SEQ ID NO: 189335 - DNA, 80 bp, synthetic construct; identical to SEQ ID NO: 4605
  source 1..80: mol_type = other DNA

SEQ ID NO: 189336 - DNA, 80 bp, synthetic construct; identical to SEQ ID NO: 4606
  source 1..80: mol_type = other DNA

SEQ ID NO: 189337 - DNA, 80 bp, synthetic construct; identical to SEQ ID NO: 4607
  source 1..80: mol_type = other DNA

SEQ ID NO: 189338 - DNA, 80 bp, synthetic construct; identical to SEQ ID NO: 4608
  source 1..80: mol_type = other DNA

SEQ ID NO: 189339 - DNA, 80 bp, synthetic construct; identical to SEQ ID NO: 4609
  source 1..80: mol_type = other DNA

SEQ ID NO: 189340 - DNA, 80 bp, synthetic construct; identical to SEQ ID NO: 4610
  source 1..80: mol_type = other DNA

SEQ ID NO: 189341 - DNA, 80 bp, synthetic construct; identical to SEQ ID NO: 4611
  source 1..80: mol_type = other DNA

SEQ ID NO: 189342 - DNA, 80 bp, synthetic construct; identical to SEQ ID NO: 4612
  source 1..80: mol_type = other DNA

SEQ ID NO: 189343 - DNA, 80 bp, synthetic construct; identical to SEQ ID NO: 4613
  source 1..80: mol_type = other DNA

SEQ ID NO: 189344 - DNA, 80 bp, synthetic construct; identical to SEQ ID NO: 4614
  source 1..80: mol_type = other DNA

SEQ ID NO: 189345 - DNA, 80 bp, synthetic construct; identical to SEQ ID NO: 4615
  source 1..80: mol_type = other DNA

SEQ ID NO: 189346 - DNA, 80 bp, synthetic construct; identical to SEQ ID NO: 4616
  source 1..80: mol_type = other DNA

SEQ ID NO: 189347 - DNA, 80 bp, synthetic construct; identical to SEQ ID NO: 4617
  source 1..80: mol_type = other DNA

SEQ ID NO: 189348 - DNA, 80 bp, synthetic construct; identical to SEQ ID NO: 4618
  source 1..80: mol_type = other DNA

SEQ ID NO: 189349 - DNA, 80 bp, synthetic construct; identical to SEQ ID NO: 4619
  source 1..80: mol_type = other DNA

SEQ ID NO: 189350 - DNA, 80 bp, synthetic construct; identical to SEQ ID NO: 4620
  source 1..80: mol_type = other DNA

SEQ ID NO: 189351 - DNA, 80 bp, synthetic construct; identical to SEQ ID NO: 4621
  source 1..80: mol_type = other DNA

SEQ ID NO: 189352 - DNA, 80 bp, synthetic construct; identical to SEQ ID NO: 4622
  source 1..80: mol_type = other DNA

SEQ ID NO: 189353 - DNA, 80 bp, synthetic construct; identical to SEQ ID NO: 4623
  source 1..80: mol_type = other DNA

SEQ ID NO: 189354 - DNA, 80 bp, synthetic construct; identical to SEQ ID NO: 4624
  source 1..80: mol_type = other DNA

SEQ ID NO: 189355 - DNA, 80 bp, synthetic construct; identical to SEQ ID NO: 4625
  source 1..80: mol_type = other DNA

SEQ ID NO: 189356 - DNA, 80 bp, synthetic construct; identical to SEQ ID NO: 4626
  source 1..80: mol_type = other DNA

SEQ ID NO: 189357 - DNA, 80 bp, synthetic construct; identical to SEQ ID NO: 4627
  source 1..80: mol_type = other DNA

SEQ ID NO: 189358 - DNA, 80 bp, synthetic construct; identical to SEQ ID NO: 4628
  source 1..80: mol_type = other DNA

SEQ ID NO: 189359 - DNA, 80 bp, synthetic construct; identical to SEQ ID NO: 4629
  source 1..80: mol_type = other DNA

SEQ ID NO: 189360 - DNA, 80 bp, synthetic construct; identical to SEQ ID NO: 4630
  source 1..80: mol_type = other DNA

SEQ ID NO: 189361 - DNA, 80 bp, synthetic construct; identical to SEQ ID NO: 4631
  source 1..80: mol_type = other DNA

SEQ ID NO: 189362 - DNA, 80 bp, synthetic construct; identical to SEQ ID NO: 4632
  source 1..80: mol_type = other DNA

SEQ ID NO: 189363 - DNA, 80 bp, synthetic construct; identical to SEQ ID NO: 4633
  source 1..80: mol_type = other DNA

SEQ ID NO: 189364 - DNA, 80 bp, synthetic construct; identical to SEQ ID NO: 4634
  source 1..80: mol_type = other DNA

SEQ ID NO: 189365 - DNA, 80 bp, synthetic construct; identical to SEQ ID NO: 4635
  source 1..80: mol_type = other DNA

SEQ ID NO: 189366 - DNA, 80 bp, synthetic construct; identical to SEQ ID NO: 4636
  source 1..80: mol_type = other DNA

SEQ ID NO: 189367 - DNA, 80 bp, synthetic construct; identical to SEQ ID NO: 4637
  source 1..80: mol_type = other DNA

SEQ ID NO: 189368 - DNA, 80 bp, synthetic construct; identical to SEQ ID NO: 4638
  source 1..80: mol_type = other DNA

SEQ ID NO: 189369 - DNA, 80 bp, synthetic construct; identical to SEQ ID NO: 4639
  source 1..80: mol_type = other DNA

SEQ ID NO: 189370 - DNA, 80 bp, synthetic construct; identical to SEQ ID NO: 4640
  source 1..80: mol_type = other DNA

SEQ ID NO: 189371 - DNA, 80 bp, synthetic construct; identical to SEQ ID NO: 4641
  source 1..80: mol_type = other DNA

SEQ ID NO: 189372 - DNA, 80 bp, synthetic construct; identical to SEQ ID NO: 4642
  source 1..80: mol_type = other DNA

SEQ ID NO: 189373 - DNA, 80 bp, synthetic construct; identical to SEQ ID NO: 4643
  source 1..80: mol_type = other DNA

SEQ ID NO: 189374 - DNA, 80 bp, synthetic construct; identical to SEQ ID NO: 4644
  source 1..80: mol_type = other DNA

SEQ ID NO: 189375 - DNA, 80 bp, synthetic construct; identical to SEQ ID NO: 4645
  source 1..80: mol_type = other DNA

SEQ ID NO: 189376 - DNA, 80 bp, synthetic construct; identical to SEQ ID NO: 4646
  source 1..80: mol_type = other DNA

SEQ ID NO: 189377 - DNA, 80 bp, synthetic construct; identical to SEQ ID NO: 4647
  source 1..80: mol_type = other DNA

SEQ ID NO: 189378 - DNA, 80 bp, synthetic construct; identical to SEQ ID NO: 4648
  source 1..80: mol_type = other DNA

SEQ ID NO: 189379 - DNA, 80 bp, synthetic construct; identical to SEQ ID NO: 4649
  source 1..80: mol_type = other DNA

SEQ ID NO: 189380 - DNA, 80 bp, synthetic construct; identical to SEQ ID NO: 4650
  source 1..80: mol_type = other DNA

SEQ ID NO: 189381 - DNA, 80 bp, synthetic construct; identical to SEQ ID NO: 4651
  source 1..80: mol_type = other DNA

SEQ ID NO: 189382 - DNA, 80 bp, synthetic construct; identical to SEQ ID NO: 4652
  source 1..80: mol_type = other DNA

SEQ ID NO: 189383 - DNA, 80 bp, synthetic construct; identical to SEQ ID NO: 4653
  source 1..80: mol_type = other DNA

SEQ ID NO: 189384 - DNA, 80 bp, synthetic construct; identical to SEQ ID NO: 4654
  source 1..80: mol_type = other DNA

SEQ ID NO: 189385 - DNA, 80 bp, synthetic construct; identical to SEQ ID NO: 4655
  source 1..80: mol_type = other DNA

SEQ ID NO: 189386 - DNA, 80 bp, synthetic construct; identical to SEQ ID NO: 4656
  source 1..80: mol_type = other DNA

SEQ ID NO: 189387 - DNA, 80 bp, synthetic construct; identical to SEQ ID NO: 4657
  source 1..80: mol_type = other DNA

SEQ ID NO: 189388 - DNA, 80 bp, synthetic construct; identical to SEQ ID NO: 4658
  source 1..80: mol_type = other DNA

SEQ ID NO: 189389 - DNA, 80 bp, synthetic construct; identical to SEQ ID NO: 4659
  source 1..80: mol_type = other DNA

SEQ ID NO: 189390 - DNA, 80 bp, synthetic construct; identical to SEQ ID NO: 4660
  source 1..80: mol_type = other DNA

SEQ ID NO: 189391 - DNA, 80 bp, synthetic construct; identical to SEQ ID NO: 4661
  source 1..80: mol_type = other DNA

SEQ ID NO: 189392 - DNA, 80 bp, synthetic construct; identical to SEQ ID NO: 4662
  source 1..80: mol_type = other DNA

SEQ ID NO: 189393 - DNA, 80 bp, synthetic construct; identical to SEQ ID NO: 4663
  source 1..80: mol_type = other DNA

SEQ ID NO: 189394 - DNA, 80 bp, synthetic construct; identical to SEQ ID NO: 4664
  source 1..80: mol_type = other DNA

SEQ ID NO: 189395 - DNA, 80 bp, synthetic construct; identical to SEQ ID NO: 4665
  source 1..80: mol_type = other DNA

SEQ ID NO: 189396 - DNA, 80 bp, synthetic construct; identical to SEQ ID NO: 4666
  source 1..80: mol_type = other DNA

SEQ ID NO: 189397 - DNA, 80 bp, synthetic construct; identical to SEQ ID NO: 4667
  source 1..80: mol_type = other DNA

SEQ ID NO: 189398 - DNA, 80 bp, synthetic construct; identical to SEQ ID NO: 4668
  source 1..80: mol_type = other DNA

SEQ ID NO: 189399 - DNA, 80 bp, synthetic construct; identical to SEQ ID NO: 4669
  source 1..80: mol_type = other DNA

SEQ ID NO: 189400 - DNA, 80 bp, synthetic construct; identical to SEQ ID NO: 4670
  source 1..80: mol_type = other DNA

SEQ ID NO: 189401 - DNA, 80 bp, synthetic construct; identical to SEQ ID NO: 4671
  source 1..80: mol_type = other DNA

SEQ ID NO: 189402 - DNA, 80 bp, synthetic construct; identical to SEQ ID NO: 4672
  source 1..80: mol_type = other DNA

SEQ ID NO: 189403 - DNA, 80 bp, synthetic construct; identical to SEQ ID NO: 4673
  source 1..80: mol_type = other DNA

SEQ ID NO: 189404 - DNA, 80 bp, synthetic construct; identical to SEQ ID NO: 4674
  source 1..80: mol_type = other DNA

SEQ ID NO: 189405 - DNA, 80 bp, synthetic construct; identical to SEQ ID NO: 4675
  source 1..80: mol_type = other DNA

SEQ ID NO: 189406 - DNA, 80 bp, synthetic construct; identical to SEQ ID NO: 4676
  source 1..80: mol_type = other DNA

SEQ ID NO: 189407 - DNA, 80 bp, synthetic construct; identical to SEQ ID NO: 4677
  source 1..80: mol_type = other DNA

SEQ ID NO: 189408 - DNA, 80 bp, synthetic construct; identical to SEQ ID NO: 4678
  source 1..80: mol_type = other DNA

SEQ ID NO: 189409 - DNA, 80 bp, synthetic construct; identical to SEQ ID NO: 4679
  source 1..80: mol_type = other DNA

SEQ ID NO: 189410 - DNA, 80 bp, synthetic construct; identical to SEQ ID NO: 4680
  source 1..80: mol_type = other DNA

SEQ ID NO: 189411 - DNA, 80 bp, synthetic construct; identical to SEQ ID NO: 4681
  source 1..80: mol_type = other DNA

SEQ ID NO: 189412 - DNA, 80 bp, synthetic construct; identical to SEQ ID NO: 4682
  source 1..80: mol_type = other DNA

SEQ ID NO: 189413 - DNA, 80 bp, synthetic construct; identical to SEQ ID NO: 4683
  source 1..80: mol_type = other DNA

SEQ ID NO: 189414 - DNA, 80 bp, synthetic construct; identical to SEQ ID NO: 4684
  source 1..80: mol_type = other DNA

SEQ ID NO: 189415 - DNA, 80 bp, synthetic construct; identical to SEQ ID NO: 4685
  source 1..80: mol_type = other DNA

SEQ ID NO: 189416 - DNA, 80 bp, synthetic construct; identical to SEQ ID NO: 4686
  source 1..80: mol_type = other DNA

SEQ ID NO: 189417 - DNA, 80 bp, synthetic construct; identical to SEQ ID NO: 4687
  source 1..80: mol_type = other DNA

SEQ ID NO: 189418 - DNA, 80 bp, synthetic construct; identical to SEQ ID NO: 4688
  source 1..80: mol_type = other DNA

SEQ ID NO: 189419 - DNA, 80 bp, synthetic construct; identical to SEQ ID NO: 4689
  source 1..80: mol_type = other DNA

SEQ ID NO: 189420 - DNA, 80 bp, synthetic construct; identical to SEQ ID NO: 4690
  source 1..80: mol_type = other DNA

SEQ ID NO: 189421 - DNA, 80 bp, synthetic construct; identical to SEQ ID NO: 4691
  source 1..80: mol_type = other DNA

SEQ ID NO: 189422 - DNA, 80 bp, synthetic construct; identical to SEQ ID NO: 4692
  source 1..80: mol_type = other DNA

SEQ ID NO: 189423 - DNA, 80 bp, synthetic construct; identical to SEQ ID NO: 4693
  source 1..80: mol_type = other DNA

SEQ ID NO: 189424 - DNA, 80 bp, synthetic construct; identical to SEQ ID NO: 4694
  source 1..80: mol_type = other DNA

SEQ ID NO: 189425 - DNA, 80 bp, synthetic construct; identical to SEQ ID NO: 4695
  source 1..80: mol_type = other DNA

SEQ ID NO: 189426 - DNA, 80 bp, synthetic construct; identical to SEQ ID NO: 4696
  source 1..80: mol_type = other DNA

SEQ ID NO: 189427 - DNA, 80 bp, synthetic construct; identical to SEQ ID NO: 4697
  source 1..80: mol_type = other DNA

SEQ ID NO: 189428 - DNA, 80 bp, synthetic construct; identical to SEQ ID NO: 4698
  source 1..80: mol_type = other DNA

SEQ ID NO: 189429 - DNA, 80 bp, synthetic construct; identical to SEQ ID NO: 4699
  source 1..80: mol_type = other DNA

SEQ ID NO: 189430 - DNA, 80 bp, synthetic construct; identical to SEQ ID NO: 4700
  source 1..80: mol_type = other DNA

SEQ ID NO: 189431 - DNA, 80 bp, synthetic construct; identical to SEQ ID NO: 4701
  source 1..80: mol_type = other DNA

SEQ ID NO: 189432 - DNA, 80 bp, synthetic construct; identical to SEQ ID NO: 4702
  source 1..80: mol_type = other DNA

SEQ ID NO: 189433 - DNA, 80 bp, synthetic construct; identical to SEQ ID NO: 4703
  source 1..80: mol_type = other DNA

SEQ ID NO: 189434 - DNA, 80 bp, synthetic construct; identical to SEQ ID NO: 4704
  source 1..80: mol_type = other DNA

SEQ ID NO: 189435 - DNA, 80 bp, synthetic construct; identical to SEQ ID NO: 4705
  source 1..80: mol_type = other DNA

SEQ ID NO: 189436 - DNA, 80 bp, synthetic construct; identical to SEQ ID NO: 4706
  source 1..80: mol_type = other DNA

SEQ ID NO: 189437 - DNA, 80 bp, synthetic construct; identical to SEQ ID NO: 4707
  source 1..80: mol_type = other DNA

SEQ ID NO: 189438 - DNA, 80 bp, synthetic construct; identical to SEQ ID NO: 4708
  source 1..80: mol_type = other DNA

SEQ ID NO: 189439 - DNA, 80 bp, synthetic construct; identical to SEQ ID NO: 4709
  source 1..80: mol_type = other DNA

SEQ ID NO: 189440 - DNA, 80 bp, synthetic construct; identical to SEQ ID NO: 4710
  source 1..80: mol_type = other DNA

SEQ ID NO: 189441 - DNA, 80 bp, synthetic construct; identical to SEQ ID NO: 4711
  source 1..80: mol_type = other DNA

SEQ ID NO: 189442 - DNA, 80 bp, synthetic construct; identical to SEQ ID NO: 4712
  source 1..80: mol_type = other DNA

SEQ ID NO: 189443 - DNA, 80 bp, synthetic construct; identical to SEQ ID NO: 4713
  source 1..80: mol_type = other DNA

SEQ ID NO: 189444 - DNA, 80 bp, synthetic construct; identical to SEQ ID NO: 4714
  source 1..80: mol_type = other DNA

SEQ ID NO: 189445 - DNA, 80 bp, synthetic construct; identical to SEQ ID NO: 4715
  source 1..80: mol_type = other DNA

SEQ ID NO: 189446 - DNA, 80 bp, synthetic construct; identical to SEQ ID NO: 4716
  source 1..80: mol_type = other DNA

SEQ ID NO: 189447 - DNA, 80 bp, synthetic construct; identical to SEQ ID NO: 4717
  source 1..80: mol_type = other DNA

SEQ ID NO: 189448 - DNA, 80 bp, synthetic construct; identical to SEQ ID NO: 4718
  source 1..80: mol_type = other DNA

SEQ ID NO: 189449 - DNA, 80 bp, synthetic construct; identical to SEQ ID NO: 4719
  source 1..80: mol_type = other DNA

SEQ ID NO: 189450 - DNA, 80 bp, synthetic construct; identical to SEQ ID NO: 4720
  source 1..80: mol_type = other DNA

SEQ ID NO: 189451 - DNA, 80 bp, synthetic construct; identical to SEQ ID NO: 4721
  source 1..80: mol_type = other DNA

SEQ ID NO: 189452 - DNA, 80 bp, synthetic construct; identical to SEQ ID NO: 4722
  source 1..80: mol_type = other DNA

SEQ ID NO: 189453 - DNA, 80 bp, synthetic construct; identical to SEQ ID NO: 4723
  source 1..80: mol_type = other DNA

SEQ ID NO: 189454 - DNA, 80 bp, synthetic construct; identical to SEQ ID NO: 4724
  source 1..80: mol_type = other DNA

SEQ ID NO: 189455 - DNA, 80 bp, synthetic construct; identical to SEQ ID NO: 4725
  source 1..80: mol_type = other DNA

SEQ ID NO: 189456 - DNA, 80 bp, synthetic construct; identical to SEQ ID NO: 4726
  source 1..80: mol_type = other DNA

SEQ ID NO: 189457 - DNA, 80 bp, synthetic construct; identical to SEQ ID NO: 4727
  source 1..80: mol_type = other DNA

SEQ ID NO: 189458 - DNA, 80 bp, synthetic construct; identical to SEQ ID NO: 4728
  source 1..80: mol_type = other DNA

SEQ ID NO: 189459 - DNA, 80 bp, synthetic construct; identical to SEQ ID NO: 4729
  source 1..80: mol_type = other DNA

SEQ ID NO: 189460 - DNA, 80 bp, synthetic construct; identical to SEQ ID NO: 4730
  source 1..80: mol_type = other DNA

SEQ ID NO: 189461 - DNA, 80 bp, synthetic construct; identical to SEQ ID NO: 4731
  source 1..80: mol_type = other DNA

SEQ ID NO: 189462 - DNA, 80 bp, synthetic construct; identical to SEQ ID NO: 4732
  source 1..80: mol_type = other DNA

SEQ ID NO: 189463 - DNA, 80 bp, synthetic construct; identical to SEQ ID NO: 4733
  source 1..80: mol_type = other DNA

SEQ ID NO: 189464 - DNA, 80 bp, synthetic construct; identical to SEQ ID NO: 4734
  source 1..80: mol_type = other DNA

SEQ ID NO: 189465 - DNA, 80 bp, synthetic construct; identical to SEQ ID NO: 4735
  source 1..80: mol_type = other DNA

SEQ ID NO: 189466 - DNA, 80 bp, synthetic construct; identical to SEQ ID NO: 4736
  source 1..80: mol_type = other DNA

SEQ ID NO: 189467 - DNA, 80 bp, synthetic construct; identical to SEQ ID NO: 4737
  source 1..80: mol_type = other DNA

SEQ ID NO: 189468 - DNA, 80 bp, synthetic construct; identical to SEQ ID NO: 4738
  source 1..80: mol_type = other DNA

SEQ ID NO: 189469 - DNA, 80 bp, synthetic construct; identical to SEQ ID NO: 4739
  source 1..80: mol_type = other DNA

SEQ ID NO: 189470 - DNA, 80 bp, synthetic construct; identical to SEQ ID NO: 4740
  source 1..80: mol_type = other DNA

SEQ ID NO: 189471 - DNA, 80 bp, synthetic construct; identical to SEQ ID NO: 4741
  source 1..80: mol_type = other DNA

SEQ ID NO: 189472 - DNA, 80 bp, synthetic construct; identical to SEQ ID NO: 4742
  source 1..80: mol_type = other DNA

SEQ ID NO: 189473 - DNA, 80 bp, synthetic construct; identical to SEQ ID NO: 4743
  source 1..80: mol_type = other DNA

SEQ ID NO: 189474 - DNA, 80 bp, synthetic construct; identical to SEQ ID NO: 4744
  source 1..80: mol_type = other DNA

SEQ ID NO: 189475 - DNA, 80 bp, synthetic construct; identical to SEQ ID NO: 4745
  source 1..80: mol_type = other DNA

SEQ ID NO: 189476 - DNA, 80 bp, synthetic construct; identical to SEQ ID NO: 4746
  source 1..80: mol_type = other DNA

SEQ ID NO: 189477 - DNA, 80 bp, synthetic construct; identical to SEQ ID NO: 4747
  source 1..80: mol_type = other DNA

SEQ ID NO: 189478 - DNA, 80 bp, synthetic construct; identical to SEQ ID NO: 4748
  source 1..80: mol_type = other DNA

SEQ ID NO: 189479 - DNA, 80 bp, synthetic construct; identical to SEQ ID NO: 4749
  source 1..80: mol_type = other DNA

SEQ ID NO: 189480 - DNA, 80 bp, synthetic construct; identical to SEQ ID NO: 4750
  source 1..80: mol_type = other DNA

SEQ ID NO: 189481 - DNA, 80 bp, synthetic construct; identical to SEQ ID NO: 4751
  source 1..80: mol_type = other DNA

SEQ ID NO: 189482 - DNA, 80 bp, synthetic construct; identical to SEQ ID NO: 4752
  source 1..80: mol_type = other DNA

SEQ ID NO: 189483 - DNA, 80 bp, synthetic construct; identical to SEQ ID NO: 4753
  source 1..80: mol_type = other DNA

SEQ ID NO: 189484 - DNA, 80 bp, synthetic construct; identical to SEQ ID NO: 4754
  source 1..80: mol_type = other DNA

SEQ ID NO: 189485 - DNA, 80 bp, synthetic construct; identical to SEQ ID NO: 4755
  source 1..80: mol_type = other DNA

SEQ ID NO: 189486 - DNA, 80 bp, synthetic construct; identical to SEQ ID NO: 4756
  source 1..80: mol_type = other DNA

SEQ ID NO: 189487 - DNA, 80 bp, synthetic construct; identical to SEQ ID NO: 4757
  source 1..80: mol_type = other DNA

SEQ ID NO: 189488 - DNA, 80 bp, synthetic construct; identical to SEQ ID NO: 4758
  source 1..80: mol_type = other DNA

SEQ ID NO: 189489 - DNA, 80 bp, synthetic construct; identical to SEQ ID NO: 4759
  source 1..80: mol_type = other DNA

SEQ ID NO: 189490 - DNA, 80 bp, synthetic construct; identical to SEQ ID NO: 4760
  source 1..80: mol_type = other DNA

SEQ ID NO: 189491 - DNA, 80 bp, synthetic construct; identical to SEQ ID NO: 4761
  source 1..80: mol_type = other DNA

SEQ ID NO: 189492 - DNA, 80 bp, synthetic construct; identical to SEQ ID NO: 4762
  source 1..80: mol_type = other DNA

SEQ ID NO: 189493 - DNA, 80 bp, synthetic construct; identical to SEQ ID NO: 4763
  source 1..80: mol_type = other DNA

SEQ ID NO: 189494 - DNA, 80 bp, synthetic construct; identical to SEQ ID NO: 4764
  source 1..80: mol_type = other DNA

SEQ ID NO: 189495 - DNA, 80 bp, synthetic construct; identical to SEQ ID NO: 4765
  source 1..80: mol_type = other DNA

SEQ ID NO: 189496 - DNA, 80 bp, synthetic construct; identical to SEQ ID NO: 4766
  source 1..80: mol_type = other DNA

SEQ ID NO: 189497 - DNA, 80 bp, synthetic construct; identical to SEQ ID NO: 4767
  source 1..80: mol_type = other DNA

SEQ ID NO: 189498 - DNA, 80 bp, synthetic construct; identical to SEQ ID NO: 4768
  source 1..80: mol_type = other DNA

SEQ ID NO: 189499 - DNA, 80 bp, synthetic construct; identical to SEQ ID NO: 4769
  source 1..80: mol_type = other DNA

SEQ ID NO: 189500 - DNA, 80 bp, synthetic construct; identical to SEQ ID NO: 4770
  source 1..80: mol_type = other DNA

SEQ ID NO: 189501 - DNA, 80 bp, synthetic construct; identical to SEQ ID NO: 4771
  source 1..80: mol_type = other DNA

SEQ ID NO: 189502 - DNA, 80 bp, synthetic construct; identical to SEQ ID NO: 4772
  source 1..80: mol_type = other DNA

SEQ ID NO: 189503 - DNA, 80 bp, synthetic construct; identical to SEQ ID NO: 4773
  source 1..80: mol_type = other DNA

SEQ ID NO: 189504 - DNA, 80 bp, synthetic construct; identical to SEQ ID NO: 4774
  source 1..80: mol_type = other DNA

SEQ ID NO: 189505 - DNA, 80 bp, synthetic construct; identical to SEQ ID NO: 4775
  source 1..80: mol_type = other DNA

SEQ ID NO: 189506 - DNA, 80 bp, synthetic construct; identical to SEQ ID NO: 4776
  source 1..80: mol_type = other DNA

SEQ ID NO: 189507 - DNA, 80 bp, synthetic construct; identical to SEQ ID NO: 4777
  source 1..80: mol_type = other DNA

SEQ ID NO: 189508 - DNA, 80 bp, synthetic construct; identical to SEQ ID NO: 4778
  source 1..80: mol_type = other DNA

SEQ ID NO: 189509 - DNA, 80 bp, synthetic construct; identical to SEQ ID NO: 4779
  source 1..80: mol_type = other DNA

SEQ ID NO: 189510 - DNA, 80 bp, synthetic construct; identical to SEQ ID NO: 4780
  source 1..80: mol_type = other DNA

SEQ ID NO: 189511 - DNA, 80 bp, synthetic construct; identical to SEQ ID NO: 4781
  source 1..80: mol_type = other DNA

SEQ ID NO: 189512 - DNA, 80 bp, synthetic construct; identical to SEQ ID NO: 4782
  source 1..80: mol_type = other DNA

SEQ ID NO: 189513 - DNA, 80 bp, synthetic construct; identical to SEQ ID NO: 4783
  source 1..80: mol_type = other DNA

SEQ ID NO: 189514 - DNA, 80 bp, synthetic construct; identical to SEQ ID NO: 4784
  source 1..80: mol_type = other DNA

SEQ ID NO: 189515 - DNA, 80 bp, synthetic construct; identical to SEQ ID NO: 4785
  source 1..80: mol_type = other DNA

SEQ ID NO: 189516 - DNA, 80 bp, synthetic construct; identical to SEQ ID NO: 4786
  source 1..80: mol_type = other DNA

SEQ ID NO: 189517 - DNA, 80 bp, synthetic construct; identical to SEQ ID NO: 4787
  source 1..80: mol_type = other DNA

SEQ ID NO: 189518 - DNA, 80 bp, synthetic construct; identical to SEQ ID NO: 4788
  source 1..80: mol_type = other DNA

SEQ ID NO: 189519 - DNA, 80 bp, synthetic construct; identical to SEQ ID NO: 4789
  source 1..80: mol_type = other DNA

SEQ ID NO: 189520 - DNA, 80 bp, synthetic construct; identical to SEQ ID NO: 4790
  source 1..80: mol_type = other DNA

SEQ ID NO: 189521 - DNA, 80 bp, synthetic construct; identical to SEQ ID NO: 4791
  source 1..80: mol_type = other DNA

SEQ ID NO: 189522 - DNA, 80 bp, synthetic construct; identical to SEQ ID NO: 4792
  source 1..80: mol_type = other DNA

SEQ ID NO: 189523 - DNA, 80 bp, synthetic construct; identical to SEQ ID NO: 4793
  source 1..80: mol_type = other DNA

SEQ ID NO: 189524 - DNA, 80 bp, synthetic construct; identical to SEQ ID NO: 4794
  source 1..80: mol_type = other DNA

SEQ ID NO: 189525 - DNA, 80 bp, synthetic construct; identical to SEQ ID NO: 4795
  source 1..80: mol_type = other DNA

SEQ ID NO: 189526 - DNA, 80 bp, synthetic construct; identical to SEQ ID NO: 4796
  source 1..80: mol_type = other DNA

SEQ ID NO: 189527 - DNA, 80 bp, synthetic construct; identical to SEQ ID NO: 4797
  source 1..80: mol_type = other DNA

SEQ ID NO: 189528 - DNA, 80 bp, synthetic construct; identical to SEQ ID NO: 4798
  source 1..80: mol_type = other DNA

SEQ ID NO: 189529 - DNA, 80 bp, synthetic construct; identical to SEQ ID NO: 4799
  source 1..80: mol_type = other DNA

SEQ ID NO: 189530 - DNA, 80 bp, synthetic construct; identical to SEQ ID NO: 4800
  source 1..80: mol_type = other DNA

SEQ ID NO: 189531 - DNA, 80 bp, synthetic construct; identical to SEQ ID NO: 4801
  source 1..80: mol_type = other DNA

SEQ ID NO: 189532 - DNA, 80 bp, synthetic construct; identical to SEQ ID NO: 4802
  source 1..80: mol_type = other DNA

SEQ ID NO: 189533 - DNA, 80 bp, synthetic construct; identical to SEQ ID NO: 4803
  source 1..80: mol_type = other DNA

SEQ ID NO: 189534 - DNA, 80 bp, synthetic construct; identical to SEQ ID NO: 4804
  source 1..80: mol_type = other DNA

SEQ ID NO: 189535 - DNA, 80 bp, synthetic construct; identical to SEQ ID NO: 4805
  source 1..80: mol_type = other DNA

SEQ ID NO: 189536 - DNA, 80 bp, synthetic construct; identical to SEQ ID NO: 4806
  source 1..80: mol_type = other DNA

SEQ ID NO: 189537 - DNA, 80 bp, synthetic construct; identical to SEQ ID NO: 4807
  source 1..80: mol_type = other DNA

SEQ ID NO: 189538 - DNA, 80 bp, synthetic construct; identical to SEQ ID NO: 4808
  source 1..80: mol_type = other DNA

SEQ ID NO: 189539 - DNA, 80 bp, synthetic construct; identical to SEQ ID NO: 4809
  source 1..80: mol_type = other DNA

SEQ ID NO: 189540 - DNA, 80 bp, synthetic construct; identical to SEQ ID NO: 4810
  source 1..80: mol_type = other DNA

SEQ ID NO: 189541 - DNA, 80 bp, synthetic construct; identical to SEQ ID NO: 4811
  source 1..80: mol_type = other DNA

SEQ ID NO: 189542 - DNA, 80 bp, synthetic construct; identical to SEQ ID NO: 4812
  source 1..80: mol_type = other DNA

SEQ ID NO: 189543 - DNA, 80 bp, synthetic construct; identical to SEQ ID NO: 4813
  source 1..80: mol_type = other DNA

SEQ ID NO: 189544 - DNA, 80 bp, synthetic construct; identical to SEQ ID NO: 4814
  source 1..80: mol_type = other DNA

SEQ ID NO: 189545 - DNA, 80 bp, synthetic construct; identical to SEQ ID NO: 4815
  source 1..80: mol_type = other DNA

SEQ ID NO: 189546 - DNA, 80 bp, synthetic construct; identical to SEQ ID NO: 4816
  source 1..80: mol_type = other DNA

SEQ ID NO: 189547 - DNA, 80 bp, synthetic construct; identical to SEQ ID NO: 4817
  source 1..80: mol_type = other DNA

SEQ ID NO: 189548 - DNA, 80 bp, synthetic construct; identical to SEQ ID NO: 4818
  source 1..80: mol_type = other DNA

SEQ ID NO: 189549 - DNA, 80 bp, synthetic construct; identical to SEQ ID NO: 4819
  source 1..80: mol_type = other DNA

SEQ ID NO: 189550 - DNA, 80 bp, synthetic construct; identical to SEQ ID NO: 4820
  source 1..80: mol_type = other DNA

SEQ ID NO: 189551 - DNA, 80 bp, synthetic construct; identical to SEQ ID NO: 4821
  source 1..80: mol_type = other DNA

SEQ ID NO: 189552 - DNA, 80 bp, synthetic construct; identical to SEQ ID NO: 4822
  source 1..80: mol_type = other DNA

SEQ ID NO: 189553 - DNA, 80 bp, synthetic construct; identical to SEQ ID NO: 4823
  source 1..80: mol_type = other DNA

SEQ ID NO: 189554 - DNA, 80 bp, synthetic construct; identical to SEQ ID NO: 4824
  source 1..80: mol_type = other DNA

SEQ ID NO: 189555 - DNA, 80 bp, synthetic construct; identical to SEQ ID NO: 4825
  source 1..80: mol_type = other DNA

SEQ ID NO: 189556 - DNA, 80 bp, synthetic construct; identical to SEQ ID NO: 4826
  source 1..80: mol_type = other DNA

SEQ ID NO: 189557 - DNA, 80 bp, synthetic construct; identical to SEQ ID NO: 4827
  source 1..80: mol_type = other DNA

SEQ ID NO: 189558 - DNA, 80 bp, synthetic construct; identical to SEQ ID NO: 4828
  source 1..80: mol_type = other DNA

SEQ ID NO: 189559 - DNA, 80 bp, synthetic construct; identical to SEQ ID NO: 4829
  source 1..80: mol_type = other DNA

SEQ ID NO: 189560 - DNA, 80 bp, synthetic construct; identical to SEQ ID NO: 4830
  source 1..80: mol_type = other DNA

SEQ ID NO: 189561 - DNA, 80 bp, synthetic construct; identical to SEQ ID NO: 4831
  source 1..80: mol_type = other DNA

SEQ ID NO: 189562 - DNA, 80 bp, synthetic construct; identical to SEQ ID NO: 4832
  source 1..80: mol_type = other DNA

SEQ ID NO: 189563 - DNA, 80 bp, synthetic construct; identical to SEQ ID NO: 4833
  source 1..80: mol_type = other DNA

SEQ ID NO: 189564 - DNA, 80 bp, synthetic construct; identical to SEQ ID NO: 4834
  source 1..80: mol_type = other DNA

SEQ ID NO: 189565 - DNA, 80 bp, synthetic construct; identical to SEQ ID NO: 4835
  source 1..80: mol_type = other DNA

SEQ ID NO: 189566 - DNA, 80 bp, synthetic construct; identical to SEQ ID NO: 4836
  source 1..80: mol_type = other DNA

SEQ ID NO: 189567 - DNA, 80 bp, synthetic construct; identical to SEQ ID NO: 4837
  source 1..80: mol_type = other DNA

SEQ ID NO: 189568 - DNA, 80 bp, synthetic construct; identical to SEQ ID NO: 4838
  source 1..80: mol_type = other DNA

SEQ ID NO: 189569 - DNA, 80 bp, synthetic construct; identical to SEQ ID NO: 4839
  source 1..80: mol_type = other DNA

SEQ ID NO: 189570 - DNA, 80 bp, synthetic construct; identical to SEQ ID NO: 4840
  source 1..80: mol_type = other DNA

SEQ ID NO: 189571 - DNA, 80 bp, synthetic construct; identical to SEQ ID NO: 4841
  source 1..80: mol_type = other DNA

SEQ ID NO: 189572 - DNA, 80 bp, synthetic construct; identical to SEQ ID NO: 4842
  source 1..80: mol_type = other DNA

SEQ ID NO: 189573 - DNA, 80 bp, synthetic construct; identical to SEQ ID NO: 4843
  source 1..80: mol_type = other DNA

SEQ ID NO: 189574 - DNA, 80 bp, synthetic construct; identical to SEQ ID NO: 4844
  source 1..80: mol_type = other DNA

SEQ ID NO: 189575 - DNA, 80 bp, synthetic construct; identical to SEQ ID NO: 4845
  source 1..80: mol_type = other DNA

SEQ ID NO: 189576 - DNA, 80 bp, synthetic construct; identical to SEQ ID NO: 4846
  source 1..80: mol_type = other DNA

SEQ ID NO: 189577 - DNA, 80 bp, synthetic construct; identical to SEQ ID NO: 4847
  source 1..80: mol_type = other DNA

SEQ ID NO: 189578 - DNA, 80 bp, synthetic construct; identical to SEQ ID NO: 4848
  source 1..80: mol_type = other DNA

SEQ ID NO: 189579 - DNA, 80 bp, synthetic construct; identical to SEQ ID NO: 4849
  source 1..80: mol_type = other DNA

SEQ ID NO: 189580 - DNA, 80 bp, synthetic construct; identical to SEQ ID NO: 4850
  source 1..80: mol_type = other DNA

SEQ ID NO: 189581 - DNA, 80 bp, synthetic construct; identical to SEQ ID NO: 4851
  source 1..80: mol_type = other DNA

SEQ ID NO: 189582 - DNA, 80 bp, synthetic construct; identical to SEQ ID NO: 4852
  source 1..80: mol_type = other DNA

SEQ ID NO: 189583 - DNA, 80 bp, synthetic construct; identical to SEQ ID NO: 4853
  source 1..80: mol_type = other DNA

SEQ ID NO: 189584 - DNA, 80 bp, synthetic construct; identical to SEQ ID NO: 4854
  source 1..80: mol_type = other DNA

SEQ ID NO: 189585 - DNA, 80 bp, synthetic construct; identical to SEQ ID NO: 4855
  source 1..80: mol_type = other DNA

SEQ ID NO: 189586 - DNA, 80 bp, synthetic construct; identical to SEQ ID NO: 4856
  source 1..80: mol_type = other DNA

SEQ ID NO: 189587 - DNA, 80 bp, synthetic construct; identical to SEQ ID NO: 4857
  source 1..80: mol_type = other DNA

SEQ ID NO: 189588 - DNA, 80 bp, synthetic construct; identical to SEQ ID NO: 4858
  source 1..80: mol_type = other DNA

SEQ ID NO: 189589 - DNA, 80 bp, synthetic construct; identical to SEQ ID NO: 4859
  source 1..80: mol_type = other DNA

SEQ ID NO: 189590 - DNA, 80 bp, synthetic construct; identical to SEQ ID NO: 4860
  source 1..80: mol_type = other DNA

SEQ ID NO: 189591 - DNA, 80 bp, synthetic construct; identical to SEQ ID NO: 4861
  source 1..80: mol_type = other DNA

SEQ ID NO: 189592 - DNA, 80 bp, synthetic construct; identical to SEQ ID NO: 4862
  source 1..80: mol_type = other DNA

SEQ ID NO: 189593 - DNA, 80 bp, synthetic construct; identical to SEQ ID NO: 4863
  source 1..80: mol_type = other DNA

SEQ ID NO: 189594 - DNA, 80 bp, synthetic construct; identical to SEQ ID NO: 4864
  source 1..80: mol_type = other DNA

SEQ ID NO: 189595 - DNA, 80 bp, synthetic construct; identical to SEQ ID NO: 4865
  source 1..80: mol_type = other DNA

SEQ ID NO: 189596 - DNA, 80 bp, synthetic construct; identical to SEQ ID NO: 4866
  source 1..80: mol_type = other DNA

SEQ ID NO: 189597 - DNA, 80 bp, synthetic construct; identical to SEQ ID NO: 4867
  source 1..80: mol_type = other DNA

SEQ ID NO: 189598 - DNA, 80 bp, synthetic construct; identical to SEQ ID NO: 4868
  source 1..80: mol_type = other DNA

SEQ ID NO: 189599 - DNA, 80 bp, synthetic construct; identical to SEQ ID NO: 4869
  source 1..80: mol_type = other DNA

SEQ ID NO: 189600 - DNA, 80 bp, synthetic construct; identical to SEQ ID NO: 4870
  source 1..80: mol_type = other DNA

SEQ ID NO: 189601 - DNA, 80 bp, synthetic construct; identical to SEQ ID NO: 4871
  source 1..80: mol_type = other DNA

SEQ ID NO: 189602 - DNA, 80 bp, synthetic construct; identical to SEQ ID NO: 4872
  source 1..80: mol_type = other DNA

SEQ ID NO: 189603 - DNA, 80 bp, synthetic construct; identical to SEQ ID NO: 4873
  source 1..80: mol_type = other DNA

SEQ ID NO: 189604 - DNA, 80 bp, synthetic construct; identical to SEQ ID NO: 4874
  source 1..80: mol_type = other DNA

SEQ ID NO: 189605 - DNA, 80 bp, synthetic construct; identical to SEQ ID NO: 4875
  source 1..80: mol_type = other DNA

SEQ ID NO: 189606 - DNA, 80 bp, synthetic construct; identical to SEQ ID NO: 4876
  source 1..80: mol_type = other DNA

SEQ ID NO: 189607 - DNA, 80 bp, synthetic construct; identical to SEQ ID NO: 4877
  source 1..80: mol_type = other DNA

SEQ ID NO: 189608 - DNA, 80 bp, synthetic construct; identical to SEQ ID NO: 4878
  source 1..80: mol_type = other DNA

SEQ ID NO: 189609 - DNA, 80 bp, synthetic construct; identical to SEQ ID NO: 4879
  source 1..80: mol_type = other DNA

SEQ ID NO: 189610 - DNA, 80 bp, synthetic construct; identical to SEQ ID NO: 4880
  source 1..80: mol_type = other DNA

SEQ ID NO: 189611 - DNA, 80 bp, synthetic construct; identical to SEQ ID NO: 4881
  source 1..80: mol_type = other DNA

SEQ ID NO: 189612 - DNA, 80 bp, synthetic construct; identical to SEQ ID NO: 4882
  source 1..80: mol_type = other DNA

SEQ ID NO: 189613 - DNA, 80 bp, synthetic construct; identical to SEQ ID NO: 4883
  source 1..80: mol_type = other DNA

SEQ ID NO: 189614 - DNA, 80 bp, synthetic construct; identical to SEQ ID NO: 4884
  source 1..80: mol_type = other DNA

SEQ ID NO: 189615 - DNA, 80 bp, synthetic construct; identical to SEQ ID NO: 4885
  source 1..80: mol_type = other DNA

SEQ ID NO: 189616 - DNA, 80 bp, synthetic construct; identical to SEQ ID NO: 4886
  source 1..80: mol_type = other DNA

SEQ ID NO: 189617 - DNA, 80 bp, synthetic construct; identical to SEQ ID NO: 4887
  source 1..80: mol_type = other DNA

SEQ ID NO: 189618 - DNA, 80 bp, synthetic construct; identical to SEQ ID NO: 4888
  source 1..80: mol_type = other DNA

SEQ ID NO: 189619 - DNA, 80 bp, synthetic construct; identical to SEQ ID NO: 4889
  source 1..80: mol_type = other DNA

SEQ ID NO: 189620 - DNA, 80 bp, synthetic construct; identical to SEQ ID NO: 4890
  source 1..80: mol_type = other DNA

SEQ ID NO: 189621 - DNA, 80 bp, synthetic construct; identical to SEQ ID NO: 4891
  source 1..80: mol_type = other DNA

SEQ ID NO: 189622 - DNA, 80 bp, synthetic construct; identical to SEQ ID NO: 4892
  source 1..80: mol_type = other DNA

SEQ ID NO: 189623 - DNA, 80 bp, synthetic construct; identical to SEQ ID NO: 4893
  source 1..80: mol_type = other DNA

SEQ ID NO: 189624 - DNA, 80 bp, synthetic construct; identical to SEQ ID NO: 4894
  source 1..80: mol_type = other DNA

SEQ ID NO: 189625 - DNA, 80 bp, synthetic construct; identical to SEQ ID NO: 4895
  source 1..80: mol_type = other DNA

SEQ ID NO: 189626 - DNA, 80 bp, synthetic construct; identical to SEQ ID NO: 4896
  source 1..80: mol_type = other DNA

SEQ ID NO: 189627 - DNA, 80 bp, synthetic construct; identical to SEQ ID NO: 4897
  source 1..80: mol_type = other DNA

SEQ ID NO: 189628 - DNA, 80 bp, synthetic construct; identical to SEQ ID NO: 4898
  source 1..80: mol_type = other DNA

SEQ ID NO: 189629 - DNA, 80 bp, synthetic construct; identical to SEQ ID NO: 4899
  source 1..80: mol_type = other DNA

SEQ ID NO: 189630 - DNA, 80 bp, synthetic construct; identical to SEQ ID NO: 4900
  source 1..80: mol_type = other DNA

SEQ ID NO: 189631 - DNA, 80 bp, synthetic construct; identical to SEQ ID NO: 4901
  source 1..80: mol_type = other DNA

SEQ ID NO: 189632 - DNA, 80 bp, synthetic construct; identical to SEQ ID NO: 4902
  source 1..80: mol_type = other DNA

SEQ ID NO: 189633 - DNA, 80 bp, synthetic construct; identical to SEQ ID NO: 4903
  source 1..80: mol_type = other DNA

SEQ ID NO: 189634 - DNA, 80 bp, synthetic construct; identical to SEQ ID NO: 4904
  source 1..80: mol_type = other DNA

SEQ ID NO: 189635 - DNA, 80 bp, synthetic construct; identical to SEQ ID NO: 4905
  source 1..80: mol_type = other DNA

SEQ ID NO: 189636 - DNA, 80 bp, synthetic construct; identical to SEQ ID NO: 4906
  source 1..80: mol_type = other DNA

SEQ ID NO: 189637 - DNA, 80 bp, synthetic construct; identical to SEQ ID NO: 4907
  source 1..80: mol_type = other DNA

SEQ ID NO: 189638 - DNA, 80 bp, synthetic construct; identical to SEQ ID NO: 4908
  source 1..80: mol_type = other DNA

SEQ ID NO: 189639 - DNA, 80 bp, synthetic construct; identical to SEQ ID NO: 4909
  source 1..80: mol_type = other DNA

SEQ ID NO: 189640 - DNA, 80 bp, synthetic construct; identical to SEQ ID NO: 4910
  source 1..80: mol_type = other DNA

SEQ ID NO: 189641 - DNA, 80 bp, synthetic construct; identical to SEQ ID NO: 4911
  source 1..80: mol_type = other DNA

SEQ ID NO: 189642 - DNA, 80 bp, synthetic construct; identical to SEQ ID NO: 4912
  source 1..80: mol_type = other DNA

SEQ ID NO: 189643 - DNA, 80 bp, synthetic construct; identical to SEQ ID NO: 4913
  source 1..80: mol_type = other DNA

SEQ ID NO: 189644 - DNA, 80 bp, synthetic construct; identical to SEQ ID NO: 4914
  source 1..80: mol_type = other DNA

SEQ ID NO: 189645 - DNA, 80 bp, synthetic construct; identical to SEQ ID NO: 4915
  source 1..80: mol_type = other DNA

SEQ ID NO: 189646 - DNA, 80 bp, synthetic construct; identical to SEQ ID NO: 4916
  source 1..80: mol_type = other DNA

SEQ ID NO: 189647 - DNA, 80 bp, synthetic construct; identical to SEQ ID NO: 4917
  source 1..80: mol_type = other DNA

SEQ ID NO: 189648 - DNA, 80 bp, synthetic construct; identical to SEQ ID NO: 4918
  source 1..80: mol_type = other DNA

SEQ ID NO: 189649 - DNA, 80 bp, synthetic construct; identical to SEQ ID NO: 4919
  source 1..80: mol_type = other DNA

SEQ ID NO: 189650 - DNA, 80 bp, synthetic construct; identical to SEQ ID NO: 4920
  source 1..80: mol_type = other DNA

SEQ ID NO: 189651 - DNA, 80 bp, synthetic construct; identical to SEQ ID NO: 4921
  source 1..80: mol_type = other DNA

SEQ ID NO: 189652 - DNA, 80 bp, synthetic construct; identical to SEQ ID NO: 4922
  source 1..80: mol_type = other DNA

SEQ ID NO: 189653 - DNA, 80 bp, synthetic construct; identical to SEQ ID NO: 4923
  source 1..80: mol_type = other DNA

SEQ ID NO: 189654 - DNA, 80 bp, synthetic construct; identical to SEQ ID NO: 4924
  source 1..80: mol_type = other DNA

SEQ ID NO: 189655 - DNA, 80 bp, synthetic construct; identical to SEQ ID NO: 4925
  source 1..80: mol_type = other DNA

SEQ ID NO: 189656 - DNA, 80 bp, synthetic construct; identical to SEQ ID NO: 4926
  source 1..80: mol_type = other DNA

SEQ ID NO: 189657 - DNA, 80 bp, synthetic construct; identical to SEQ ID NO: 4927
  source 1..80: mol_type = other DNA

SEQ ID NO: 189658 - DNA, 80 bp, synthetic construct; identical to SEQ ID NO: 4928
  source 1..80: mol_type = other DNA

SEQ ID NO: 189659 - DNA, 80 bp, synthetic construct; identical to SEQ ID NO: 4929
  source 1..80: mol_type = other DNA

SEQ ID NO: 189660 - DNA, 80 bp, synthetic construct; identical to SEQ ID NO: 4930
  source 1..80: mol_type = other DNA

SEQ ID NO: 189661 - DNA, 80 bp, synthetic construct; identical to SEQ ID NO: 4931
  source 1..80: mol_type = other DNA

SEQ ID NO: 189662 - DNA, 80 bp, synthetic construct; identical to SEQ ID NO: 4932
  source 1..80: mol_type = other DNA

SEQ ID NO: 189663 - DNA, 80 bp, synthetic construct; identical to SEQ ID NO: 4933
  source 1..80: mol_type = other DNA

SEQ ID NO: 189664 - DNA, 80 bp, synthetic construct; identical to SEQ ID NO: 4934
  source 1..80: mol_type = other DNA

SEQ ID NO: 189665 - DNA, 80 bp, synthetic construct; identical to SEQ ID NO: 4935
  source 1..80: mol_type = other DNA

SEQ ID NO: 189666 - DNA, 80 bp, synthetic construct; identical to SEQ ID NO: 4936
  source 1..80: mol_type = other DNA

SEQ ID NO: 189667 - DNA, 80 bp, synthetic construct; identical to SEQ ID NO: 4937
  source 1..80: mol_type = other DNA

SEQ ID NO: 189668 - DNA, 80 bp, synthetic construct; identical to SEQ ID NO: 4938
  source 1..80: mol_type = other DNA

SEQ ID NO: 189669 - DNA, 80 bp, synthetic construct; identical to SEQ ID NO: 4939
  source 1..80: mol_type = other DNA

SEQ ID NO: 189670 - DNA, 80 bp, synthetic construct; identical to SEQ ID NO: 4940
  source 1..80: mol_type = other DNA

SEQ ID NO: 189671 - DNA, 80 bp, synthetic construct; identical to SEQ ID NO: 4941
  source 1..80: mol_type = other DNA

SEQ ID NO: 189672 - DNA, 80 bp, synthetic construct; identical to SEQ ID NO: 4942
  source 1..80: mol_type = other DNA

SEQ ID NO: 189673 - DNA, 80 bp, synthetic construct; identical to SEQ ID NO: 4943
  source 1..80: mol_type = other DNA

SEQ ID NO: 189674 - DNA, 80 bp, synthetic construct; identical to SEQ ID NO: 4944
  source 1..80: mol_type = other DNA

SEQ ID NO: 189675 - DNA, 80 bp, synthetic construct; identical to SEQ ID NO: 4945
  source 1..80: mol_type = other DNA

SEQ ID NO: 189676 - DNA, 80 bp, synthetic construct; identical to SEQ ID NO: 4946
  source 1..80: mol_type = other DNA

SEQ ID NO: 189677 - DNA, 80 bp, synthetic construct; identical to SEQ ID NO: 4947
  source 1..80: mol_type = other DNA

SEQ ID NO: 189678 - DNA, 80 bp, synthetic construct; identical to SEQ ID NO: 4948
  source 1..80: mol_type = other DNA

SEQ ID NO: 189679 - DNA, 80 bp, synthetic construct; identical to SEQ ID NO: 4949
  source 1..80: mol_type = other DNA

SEQ ID NO: 189680 - DNA, 80 bp, synthetic construct; identical to SEQ ID NO: 4950
  source 1..80: mol_type = other DNA

SEQ ID NO: 189681 - DNA, 80 bp, synthetic construct; identical to SEQ ID NO: 4951
  source 1..80: mol_type = other DNA

SEQ ID NO: 189682 - DNA, 80 bp, synthetic construct; identical to SEQ ID NO: 4952
  source 1..80: mol_type = other DNA

SEQ ID NO: 189683 - DNA, 80 bp, synthetic construct; identical to SEQ ID NO: 4953
  source 1..80: mol_type = other DNA

SEQ ID NO: 189684 - DNA, 80 bp, synthetic construct; identical to SEQ ID NO: 4954
  source 1..80: mol_type = other DNA

SEQ ID NO: 189685 - DNA, 80 bp, synthetic construct; identical to SEQ ID NO: 4955
  source 1..80: mol_type = other DNA

SEQ ID NO: 189686 - DNA, 80 bp, synthetic construct; identical to SEQ ID NO: 4956
  source 1..80: mol_type = other DNA

SEQ ID NO: 189687 - DNA, 80 bp, synthetic construct; identical to SEQ ID NO: 4957
  source 1..80: mol_type = other DNA

SEQ ID NO: 189688 - DNA, 80 bp, synthetic construct; identical to SEQ ID NO: 4958
  source 1..80: mol_type = other DNA

SEQ ID NO: 189689 - DNA, 80 bp, synthetic construct; identical to SEQ ID NO: 4959
  source 1..80: mol_type = other DNA

SEQ ID NO: 189690 - DNA, 80 bp, synthetic construct; identical to SEQ ID NO: 4960
  source 1..80: mol_type = other DNA

SEQ ID NO: 189691 - DNA, 80 bp, synthetic construct; identical to SEQ ID NO: 4961
  source 1..80: mol_type = other DNA

SEQ ID NO: 189692 - DNA, 80 bp, synthetic construct; identical to SEQ ID NO: 4962
  source 1..80: mol_type = other DNA

SEQ ID NO: 189693 - DNA, 80 bp, synthetic construct; identical to SEQ ID NO: 4963
  source 1..80: mol_type = other DNA

SEQ ID NO: 189694 - DNA, 80 bp, synthetic construct; identical to SEQ ID NO: 4964
  source 1..80: mol_type = other DNA

SEQ ID NO: 189695 - DNA, 80 bp, synthetic construct; identical to SEQ ID NO: 4965
  source 1..80: mol_type = other DNA

SEQ ID NO: 189696 - DNA, 80 bp, synthetic construct; identical to SEQ ID NO: 4966
  source 1..80: mol_type = other DNA

SEQ ID NO: 189697 - DNA, 80 bp, synthetic construct; identical to SEQ ID NO: 4967
  source 1..80: mol_type = other DNA

SEQ ID NO: 189698 - DNA, 80 bp, synthetic construct; identical to SEQ ID NO: 4968
  source 1..80: mol_type = other DNA

SEQ ID NO: 189699 - DNA, 80 bp, synthetic construct; identical to SEQ ID NO: 4969
  source 1..80: mol_type = other DNA

SEQ ID NO: 189700 - DNA, 80 bp, synthetic construct; identical to SEQ ID NO: 4970
  source 1..80: mol_type = other DNA

SEQ ID NO: 189701 - DNA, 80 bp, synthetic construct; identical to SEQ ID NO: 4971
  source 1..80: mol_type = other DNA

SEQ ID NO: 189702 - DNA, 80 bp, synthetic construct; identical to SEQ ID NO: 4972
  source 1..80: mol_type = other DNA

SEQ ID NO: 189703 - DNA, 80 bp, synthetic construct; identical to SEQ ID NO: 4973
  source 1..80: mol_type = other DNA

SEQ ID NO: 189704 - DNA, 80 bp, synthetic construct; identical to SEQ ID NO: 4974
  source 1..80: mol_type = other DNA

SEQ ID NO: 189705 - DNA, 80 bp, synthetic construct; identical to SEQ ID NO: 4975
  source 1..80: mol_type = other DNA

SEQ ID NO: 189706 - DNA, 80 bp, synthetic construct; identical to SEQ ID NO: 4976
  source 1..80: mol_type = other DNA

SEQ ID NO: 189707 - DNA, 80 bp, synthetic construct; identical to SEQ ID NO: 4977
  source 1..80: mol_type = other DNA

SEQ ID NO: 189708 - DNA, 80 bp, synthetic construct; identical to SEQ ID NO: 4978
  source 1..80: mol_type = other DNA

SEQ ID NO: 189709 - DNA, 80 bp, synthetic construct; identical to SEQ ID NO: 4979
  source 1..80: mol_type = other DNA

SEQ ID NO: 189710 - DNA, 80 bp, synthetic construct; identical to SEQ ID NO: 4980
  source 1..80: mol_type = other DNA

SEQ ID NO: 189711 - DNA, 80 bp, synthetic construct; identical to SEQ ID NO: 4981
  source 1..80: mol_type = other DNA

SEQ ID NO: 189712 - DNA, 80 bp, synthetic construct; identical to SEQ ID NO: 4982
  source 1..80: mol_type = other DNA

SEQ ID NO: 189713 - DNA, 80 bp, synthetic construct; identical to SEQ ID NO: 4983
  source 1..80: mol_type = other DNA

SEQ ID NO: 189714 - DNA, 80 bp, synthetic construct; identical to SEQ ID NO: 4984
  source 1..80: mol_type = other DNA

SEQ ID NO: 189715 - DNA, 80 bp, synthetic construct; identical to SEQ ID NO: 4985
  source 1..80: mol_type = other DNA

SEQ ID NO: 189716 - DNA, 80 bp, synthetic construct; identical to SEQ ID NO: 4986
  source 1..80: mol_type = other DNA

SEQ ID NO: 189717 - DNA, 80 bp, synthetic construct; identical to SEQ ID NO: 4987
  source 1..80: mol_type = other DNA

SEQ ID NO: 189718 - DNA, 80 bp, synthetic construct; identical to SEQ ID NO: 4988
  source 1..80: mol_type = other DNA

SEQ ID NO: 189719 - DNA, 80 bp, synthetic construct; identical to SEQ ID NO: 4989
  source 1..80: mol_type = other DNA

SEQ ID NO: 189720 - DNA, 80 bp, synthetic construct; identical to SEQ ID NO: 4990
  source 1..80: mol_type = other DNA

SEQ ID NO: 189721 - DNA, 80 bp, synthetic construct; identical to SEQ ID NO: 4991
  source 1..80: mol_type = other DNA

SEQ ID NO: 189722 - DNA, 80 bp, synthetic construct; identical to SEQ ID NO: 4992
  source 1..80: mol_type = other DNA

SEQ ID NO: 189723 - DNA, 80 bp, synthetic construct; identical to SEQ ID NO: 4993
  source 1..80: mol_type = other DNA

SEQ ID NO: 189724 - DNA, 80 bp, synthetic construct; identical to SEQ ID NO: 4994
  source 1..80: mol_type = other DNA

SEQ ID NO: 189725 - DNA, 80 bp, synthetic construct; identical to SEQ ID NO: 4995
  source 1..80: mol_type = other DNA

SEQ ID NO: 189726 - DNA, 80 bp, synthetic construct; identical to SEQ ID NO: 4996
  source 1..80: mol_type = other DNA

SEQ ID NO: 189727 - DNA, 80 bp, synthetic construct; identical to SEQ ID NO: 4997
  source 1..80: mol_type = other DNA

SEQ ID NO: 189728 - DNA, 80 bp, synthetic construct; identical to SEQ ID NO: 4998
  source 1..80: mol_type = other DNA

SEQ ID NO: 189729 - DNA, 80 bp, synthetic construct; identical to SEQ ID NO: 4999
  source 1..80: mol_type = other DNA

SEQ ID NO: 189730 - DNA, 80 bp, synthetic construct; identical to SEQ ID NO: 5000
  source 1..80: mol_type = other DNA

SEQ ID NO: 189731 - DNA, 80 bp, synthetic construct; identical to SEQ ID NO: 5001
  source 1..80: mol_type = other DNA

SEQ ID NO: 189732 - DNA, 80 bp, synthetic construct; identical to SEQ ID NO: 5002
  source 1..80: mol_type = other DNA

SEQ ID NO: 189733 - DNA, 80 bp, synthetic construct; identical to SEQ ID NO: 5003
  source 1..80: mol_type = other DNA

SEQ ID NO: 189734 - DNA, 80 bp, synthetic construct; identical to SEQ ID NO: 5004
  source 1..80: mol_type = other DNA

SEQ ID NO: 189735 - DNA, 80 bp, synthetic construct; identical to SEQ ID NO: 5005
  source 1..80: mol_type = other DNA

SEQ ID NO: 189736 - DNA, 80 bp, synthetic construct; identical to SEQ ID NO: 5006
  source 1..80: mol_type = other DNA

SEQ ID NO: 189737 - DNA, 80 bp, synthetic construct; identical to SEQ ID NO: 5007
  source 1..80: mol_type = other DNA

SEQ ID NO: 189738 - DNA, 80 bp, synthetic construct; identical to SEQ ID NO: 5008
  source 1..80: mol_type = other DNA

SEQ ID NO: 189739 - DNA, 80 bp, synthetic construct; identical to SEQ ID NO: 5009
  source 1..80: mol_type = other DNA

SEQ ID NO: 189740 - DNA, 80 bp, synthetic construct; identical to SEQ ID NO: 5010
  source 1..80: mol_type = other DNA

SEQ ID NO: 189741 - DNA, 80 bp, synthetic construct; identical to SEQ ID NO: 5011
  source 1..80: mol_type = other DNA

SEQ ID NO: 189742 - DNA, 80 bp, synthetic construct; identical to SEQ ID NO: 5012
  source 1..80: mol_type = other DNA

SEQ ID NO: 189743 - DNA, 80 bp, synthetic construct; identical to SEQ ID NO: 5013
  source 1..80: mol_type = other DNA

SEQ ID NO: 189744 - DNA, 80 bp, synthetic construct; identical to SEQ ID NO: 5014
  source 1..80: mol_type = other DNA

SEQ ID NO: 189745 - DNA, 80 bp, synthetic construct; identical to SEQ ID NO: 5015
  source 1..80: mol_type = other DNA

SEQ ID NO: 189746 - DNA, 80 bp, synthetic construct; identical to SEQ ID NO: 5016
  source 1..80: mol_type = other DNA

SEQ ID NO: 189747 - DNA, 80 bp, synthetic construct; identical to SEQ ID NO: 5017
  source 1..80: mol_type = other DNA

SEQ ID NO: 189748 - DNA, 80 bp, synthetic construct; identical to SEQ ID NO: 5018
  source 1..80: mol_type = other DNA

SEQ ID NO: 189749 - DNA, 80 bp, synthetic construct; identical to SEQ ID NO: 5019
  source 1..80: mol_type = other DNA

SEQ ID NO: 189750 - DNA, 80 bp, synthetic construct; identical to SEQ ID NO: 5020
  source 1..80: mol_type = other DNA

SEQ ID NO: 189751 - DNA, 80 bp, synthetic construct; identical to SEQ ID NO: 5021
  source 1..80: mol_type = other DNA

SEQ ID NO: 189752 - DNA, 80 bp, synthetic construct; identical to SEQ ID NO: 5022
  source 1..80: mol_type = other DNA

SEQ ID NO: 189753 - DNA, 80 bp, synthetic construct; identical to SEQ ID NO: 5023
  source 1..80: mol_type = other DNA

SEQ ID NO: 189754 - DNA, 80 bp, synthetic construct; identical to SEQ ID NO: 5024
  source 1..80: mol_type = other DNA

SEQ ID NO: 189755 - DNA, 80 bp, synthetic construct; identical to SEQ ID NO: 5025
  source 1..80: mol_type = other DNA

SEQ ID NO: 189756 - DNA, 80 bp, synthetic construct; identical to SEQ ID NO: 5026
  source 1..80: mol_type = other DNA

SEQ ID NO: 189757 - DNA, 80 bp, synthetic construct; identical to SEQ ID NO: 5027
  source 1..80: mol_type = other DNA

SEQ ID NO: 189758 - DNA, 80 bp, synthetic construct; identical to SEQ ID NO: 5028
  source 1..80: mol_type = other DNA

SEQ ID NO: 189759 - DNA, 80 bp, synthetic construct; identical to SEQ ID NO: 5029
  source 1..80: mol_type = other DNA

SEQ ID NO: 189760 - DNA, 80 bp, synthetic construct; identical to SEQ ID NO: 5030
  source 1..80: mol_type = other DNA

SEQ ID NO: 189761 - DNA, 80 bp, synthetic construct; identical to SEQ ID NO: 5031
  source 1..80: mol_type = other DNA

SEQ ID NO: 189762 - DNA, 80 bp, synthetic construct; identical to SEQ ID NO: 5032
  source 1..80: mol_type = other DNA

SEQ ID NO: 189763 - DNA, 80 bp, synthetic construct; identical to SEQ ID NO: 5033
  source 1..80: mol_type = other DNA

SEQ ID NO: 189764 - DNA, 80 bp, synthetic construct; identical to SEQ ID NO: 5034
  source 1..80: mol_type = other DNA

SEQ ID NO: 189765 - DNA, 80 bp, synthetic construct; identical to SEQ ID NO: 5035
  source 1..80: mol_type = other DNA

SEQ ID NO: 189766 - DNA, 80 bp, synthetic construct; identical to SEQ ID NO: 5036
  source 1..80: mol_type = other DNA

SEQ ID NO: 189767 - DNA, 80 bp, synthetic construct; identical to SEQ ID NO: 5037
  source 1..80: mol_type = other DNA

SEQ ID NO: 189768 - DNA, 80 bp, synthetic construct; identical to SEQ ID NO: 5038
  source 1..80: mol_type = other DNA

SEQ ID NO: 189769 - DNA, 80 bp, synthetic construct; identical to SEQ ID NO: 5039
  source 1..80: mol_type = other DNA

SEQ ID NO: 189770 - DNA, 80 bp, synthetic construct; identical to SEQ ID NO: 5040
  source 1..80: mol_type = other DNA

SEQ ID NO: 189771 - DNA, 80 bp, synthetic construct; identical to SEQ ID NO: 5041
  source 1..80: mol_type = other DNA

SEQ ID NO: 189772 - DNA, 80 bp, synthetic construct; identical to SEQ ID NO: 5042
  source 1..80: mol_type = other DNA

SEQ ID NO: 189773 - DNA, 80 bp, synthetic construct; identical to SEQ ID NO: 5043
  source 1..80: mol_type = other DNA

SEQ ID NO: 189774 - DNA, 80 bp, synthetic construct; identical to SEQ ID NO: 5044
  source 1..80: mol_type = other DNA

SEQ ID NO: 189775 - DNA, 80 bp, synthetic construct; identical to SEQ ID NO: 5045
  source 1..80: mol_type = other DNA

SEQ ID NO: 189776 - DNA, 80 bp, synthetic construct; identical to SEQ ID NO: 5046
  source 1..80: mol_type = other DNA

SEQ ID NO: 189777 - DNA, 80 bp, synthetic construct; identical to SEQ ID NO: 5047
  source 1..80: mol_type = other DNA

SEQ ID NO: 189778 - DNA, 80 bp, synthetic construct; identical to SEQ ID NO: 5048
  source 1..80: mol_type = other DNA

SEQ ID NO: 189779 - DNA, 80 bp, synthetic construct; identical to SEQ ID NO: 5049
  source 1..80: mol_type = other DNA

SEQ ID NO: 189780 - DNA, 80 bp, synthetic construct; identical to SEQ ID NO: 5050
  source 1..80: mol_type = other DNA

SEQ ID NO: 189781 - DNA, 80 bp, synthetic construct; identical to SEQ ID NO: 5051
  source 1..80: mol_type = other DNA

SEQ ID NO: 189782 - DNA, 80 bp, synthetic construct; identical to SEQ ID NO: 5052
  source 1..80: mol_type = other DNA

SEQ ID NO: 189783 - DNA, 80 bp, synthetic construct; identical to SEQ ID NO: 5053
  source 1..80: mol_type = other DNA

SEQ ID NO: 189784 - DNA, 80 bp, synthetic construct; identical to SEQ ID NO: 5054
  source 1..80: mol_type = other DNA

SEQ ID NO: 189785 - DNA, 80 bp, synthetic construct; identical to SEQ ID NO: 5055
  source 1..80: mol_type = other DNA

SEQ ID NO: 189786 - DNA, 80 bp, synthetic construct; identical to SEQ ID NO: 5056
  source 1..80: mol_type = other DNA

SEQ ID NO: 189787 - DNA, 80 bp, synthetic construct; identical to SEQ ID NO: 5057
  source 1..80: mol_type = other DNA

SEQ ID NO: 189788 - DNA, 80 bp, synthetic construct; identical to SEQ ID NO: 5058
  source 1..80: mol_type = other DNA

SEQ ID NO: 189789 - DNA, 80 bp, synthetic construct; identical to SEQ ID NO: 5059
  source 1..80: mol_type = other DNA

SEQ ID NO: 189790 - DNA, 80 bp, synthetic construct; identical to SEQ ID NO: 5060
  source 1..80: mol_type = other DNA

SEQ ID NO: 189791 - DNA, 80 bp, synthetic construct; identical to SEQ ID NO: 5061
  source 1..80: mol_type = other DNA

SEQ ID NO: 189792 - DNA, 80 bp, synthetic construct; identical to SEQ ID NO: 5062
  source 1..80: mol_type = other DNA

SEQ ID NO: 189793 - DNA, 80 bp, synthetic construct; identical to SEQ ID NO: 5063
  source 1..80: mol_type = other DNA

SEQ ID NO: 189794 - DNA, 80 bp, synthetic construct; identical to SEQ ID NO: 5064
  source 1..80: mol_type = other DNA

SEQ ID NO: 189795 - DNA, 80 bp, synthetic construct; identical to SEQ ID NO: 5065
  source 1..80: mol_type = other DNA

SEQ ID NO: 189796 - DNA, 80 bp, synthetic construct; identical to SEQ ID NO: 5066
  source 1..80: mol_type = other DNA

SEQ ID NO: 189797 - DNA, 80 bp, synthetic construct; identical to SEQ ID NO: 5067
  source 1..80: mol_type = other DNA

SEQ ID NO: 189798 - DNA, 80 bp, synthetic construct; identical to SEQ ID NO: 5068
  source 1..80: mol_type = other DNA

SEQ ID NO: 189799 - DNA, 80 bp, synthetic construct; identical to SEQ ID NO: 5069
  source 1..80: mol_type = other DNA

SEQ ID NO: 189800 - DNA, 80 bp, synthetic construct; identical to SEQ ID NO: 5070
  source 1..80: mol_type = other DNA

SEQ ID NO: 189801 - DNA, 80 bp, synthetic construct; identical to SEQ ID NO: 5071
  source 1..80: mol_type = other DNA

SEQ ID NO: 189802 - DNA, 80 bp, synthetic construct; identical to SEQ ID NO: 5072
  source 1..80: mol_type = other DNA

SEQ ID NO: 189803 - DNA, 80 bp, synthetic construct; identical to SEQ ID NO: 5073
  source 1..80: mol_type = other DNA

SEQ ID NO: 189804 - DNA, 80 bp, synthetic construct; identical to SEQ ID NO: 5074
  source 1..80: mol_type = other DNA

SEQ ID NO: 189805 - DNA, 80 bp, synthetic construct; identical to SEQ ID NO: 5075
  source 1..80: mol_type = other DNA

SEQ ID NO: 189806 - DNA, 80 bp, synthetic construct; identical to SEQ ID NO: 5076
  source 1..80: mol_type = other DNA

SEQ ID NO: 189807 - DNA, 80 bp, synthetic construct; identical to SEQ ID NO: 5077
  source 1..80: mol_type = other DNA

SEQ ID NO: 189808 - DNA, 80 bp, synthetic construct; identical to SEQ ID NO: 5078
  source 1..80: mol_type = other DNA

SEQ ID NO: 189809 - DNA, 80 bp, synthetic construct; identical to SEQ ID NO: 5079
  source 1..80: mol_type = other DNA

SEQ ID NO: 189810 - DNA, 80 bp, synthetic construct; identical to SEQ ID NO: 5080
  source 1..80: mol_type = other DNA

SEQ ID NO: 189811 - DNA, 80 bp, synthetic construct; identical to SEQ ID NO: 5081
  source 1..80: mol_type = other DNA

SEQ ID NO: 189812 - DNA, 80 bp, synthetic construct; identical to SEQ ID NO: 5082
  source 1..80: mol_type = other DNA

SEQ ID NO: 189813 - DNA, 80 bp, synthetic construct; identical to SEQ ID NO: 5083
  source 1..80: mol_type = other DNA

SEQ ID NO: 189814 - DNA, 80 bp, synthetic construct; identical to SEQ ID NO: 5084
  source 1..80: mol_type = other DNA

SEQ ID NO: 189815 - DNA, 80 bp, synthetic construct; identical to SEQ ID NO: 5085
  source 1..80: mol_type = other DNA

SEQ ID NO: 189816 - DNA, 80 bp, synthetic construct; identical to SEQ ID NO: 5086
  source 1..80: mol_type = other DNA

SEQ ID NO: 189817 - DNA, 80 bp, synthetic construct; identical to SEQ ID NO: 5087
  source 1..80: mol_type = other DNA

SEQ ID NO: 189818 - DNA, 80 bp, synthetic construct; identical to SEQ ID NO: 5088
  source 1..80: mol_type = other DNA

SEQ ID NO: 189819 - DNA, 80 bp, synthetic construct; identical to SEQ ID NO: 5089
  source 1..80: mol_type = other DNA

SEQ ID NO: 189820 - DNA, 80 bp, synthetic construct; identical to SEQ ID NO: 5090
  source 1..80: mol_type = other DNA

SEQ ID NO: 189821 - DNA, 80 bp, synthetic construct; identical to SEQ ID NO: 5091
  source 1..80: mol_type = other DNA

SEQ ID NO: 189822 - DNA, 80 bp, synthetic construct; identical to SEQ ID NO: 5092
  source 1..80: mol_type = other DNA

SEQ ID NO: 189823 - DNA, 80 bp, synthetic construct; identical to SEQ ID NO: 5093
  source 1..80: mol_type = other DNA

SEQ ID NO: 189824 - DNA, 80 bp, synthetic construct; identical to SEQ ID NO: 5094
  source 1..80: mol_type = other DNA

SEQ ID NO: 189825 - DNA, 80 bp, synthetic construct; identical to SEQ ID NO: 5095
  source 1..80: mol_type = other DNA

SEQ ID NO: 189826 - DNA, 80 bp, synthetic construct; identical to SEQ ID NO: 5096
  source 1..80: mol_type = other DNA

SEQ ID NO: 189827 - DNA, 80 bp, synthetic construct; identical to SEQ ID NO: 5097
  source 1..80: mol_type = other DNA

SEQ ID NO: 189828 - DNA, 80 bp, synthetic construct; identical to SEQ ID NO: 5098
  source 1..80: mol_type = other DNA

SEQ ID NO: 189829 - DNA, 80 bp, synthetic construct; identical to SEQ ID NO: 5099
  source 1..80: mol_type = other DNA

SEQ ID NO: 189830 - DNA, 80 bp, synthetic construct; identical to SEQ ID NO: 5100
  source 1..80: mol_type = other DNA

SEQ ID NO: 189831 - DNA, 80 bp, synthetic construct; identical to SEQ ID NO: 5101
  source 1..80: mol_type = other DNA

SEQ ID NO: 189832 - DNA, 80 bp, synthetic construct; identical to SEQ ID NO: 5102
  source 1..80: mol_type = other DNA

SEQ ID NO: 189833 - DNA, 80 bp, synthetic construct; identical to SEQ ID NO: 5103
  source 1..80: mol_type = other DNA

SEQ ID NO: 189834 - DNA, 80 bp, synthetic construct; identical to SEQ ID NO: 5104
  source 1..80: mol_type = other DNA

SEQ ID NO: 189835 - DNA, 80 bp, synthetic construct; identical to SEQ ID NO: 5105
  source 1..80: mol_type = other DNA

SEQ ID NO: 189836 - DNA, 80 bp, synthetic construct; identical to SEQ ID NO: 5106
  source 1..80: mol_type = other DNA

SEQ ID NO: 189837 - DNA, 80 bp, synthetic construct; identical to SEQ ID NO: 5107
  source 1..80: mol_type = other DNA

SEQ ID NO: 189838 - DNA, 80 bp, synthetic construct; identical to SEQ ID NO: 5108
  source 1..80: mol_type = other DNA

SEQ ID NO: 189839 - DNA, 80 bp, synthetic construct; identical to SEQ ID NO: 5109
  source 1..80: mol_type = other DNA

SEQ ID NO: 189840 - DNA, 80 bp, synthetic construct; identical to SEQ ID NO: 5110
  source 1..80: mol_type = other DNA

SEQ ID NO: 189841 - DNA, 80 bp, synthetic construct; identical to SEQ ID NO: 5111
  source 1..80: mol_type = other DNA

SEQ ID NO: 189842 - DNA, 80 bp, synthetic construct; identical to SEQ ID NO: 5112
  source 1..80: mol_type = other DNA

SEQ ID NO: 189843 - DNA, 80 bp, synthetic construct; identical to SEQ ID NO: 5113
  source 1..80: mol_type = other DNA

SEQ ID NO: 189844 - DNA, 80 bp, synthetic construct; identical to SEQ ID NO: 5114
  source 1..80: mol_type = other DNA

SEQ ID NO: 189845 - DNA, 80 bp, synthetic construct; identical to SEQ ID NO: 5115
  source 1..80: mol_type = other DNA

SEQ ID NO: 189846 - DNA, 80 bp, synthetic construct; identical to SEQ ID NO: 5116
  source 1..80: mol_type = other DNA

SEQ ID NO: 189847 - DNA, 80 bp, synthetic construct; identical to SEQ ID NO: 5117
  source 1..80: mol_type = other DNA

SEQ ID NO: 189848 - DNA, 80 bp, synthetic construct; identical to SEQ ID NO: 5118
  source 1..80: mol_type = other DNA

SEQ ID NO: 189849 - DNA, 80 bp, synthetic construct; identical to SEQ ID NO: 5119
  source 1..80: mol_type = other DNA

SEQ ID NO: 189850 - DNA, 80 bp, synthetic construct; identical to SEQ ID NO: 5120
  source 1..80: mol_type = other DNA

SEQ ID NO: 189851 - DNA, 80 bp, synthetic construct; identical to SEQ ID NO: 5121
  source 1..80: mol_type = other DNA

SEQ ID NO: 189852 - DNA, 80 bp, synthetic construct; identical to SEQ ID NO: 5122
  source 1..80: mol_type = other DNA

SEQ ID NO: 189853 - DNA, 80 bp, synthetic construct; identical to SEQ ID NO: 5123
  source 1..80: mol_type = other DNA

SEQ ID NO: 189854 - DNA, 80 bp, synthetic construct; identical to SEQ ID NO: 5124
  source 1..80: mol_type = other DNA

SEQ ID NO: 189855 - DNA, 80 bp, synthetic construct; identical to SEQ ID NO: 5125
  source 1..80: mol_type = other DNA

SEQ ID NO: 189856 - DNA, 80 bp, synthetic construct; identical to SEQ ID NO: 5126
  source 1..80: mol_type = other DNA

SEQ ID NO: 189857 - DNA, 80 bp, synthetic construct; identical to SEQ ID NO: 5127
  source 1..80: mol_type = other DNA

SEQ ID NO: 189858 - DNA, 80 bp, synthetic construct; identical to SEQ ID NO: 5128
  source 1..80: mol_type = other DNA

SEQ ID NO: 189859 - DNA, 80 bp, synthetic construct; identical to SEQ ID NO: 5129
  source 1..80: mol_type = other DNA

SEQ ID NO: 189860 - DNA, 80 bp, synthetic construct; identical to SEQ ID NO: 5130
  source 1..80: mol_type = other DNA

SEQ ID NO: 189861 - DNA, 80 bp, synthetic construct; identical to SEQ ID NO: 5131
  source 1..80: mol_type = other DNA

SEQ ID NO: 189862 - DNA, 80 bp, synthetic construct; identical to SEQ ID NO: 5132
  source 1..80: mol_type = other DNA

SEQ ID NO: 189863 - DNA, 80 bp, synthetic construct; identical to SEQ ID NO: 5133
  source 1..80: mol_type = other DNA

SEQ ID NO: 189864 - DNA, 80 bp, synthetic construct; identical to SEQ ID NO: 5134
  source 1..80: mol_type = other DNA

SEQ ID NO: 189865 - DNA, 80 bp, synthetic construct; identical to SEQ ID NO: 5135
  source 1..80: mol_type = other DNA

SEQ ID NO: 189866 - DNA, 80 bp, synthetic construct; identical to SEQ ID NO: 5136
  source 1..80: mol_type = other DNA

SEQ ID NO: 189867 - DNA, 80 bp, synthetic construct; identical to SEQ ID NO: 5137
  source 1..80: mol_type = other DNA

SEQ ID NO: 189868 - DNA, 80 bp, synthetic construct; identical to SEQ ID NO: 5138
  source 1..80: mol_type = other DNA

SEQ ID NO: 189869 - DNA, 80 bp, synthetic construct; identical to SEQ ID NO: 5139
  source 1..80: mol_type = other DNA

SEQ ID NO: 189870 - DNA, 80 bp, synthetic construct; identical to SEQ ID NO: 5140
  source 1..80: mol_type = other DNA

SEQ ID NO: 189871 - DNA, 80 bp, synthetic construct; identical to SEQ ID NO: 5141
  source 1..80: mol_type = other DNA

SEQ ID NO: 189872 - DNA, 80 bp, synthetic construct; identical to SEQ ID NO: 5142
  source 1..80: mol_type = other DNA

SEQ ID NO: 189873 - DNA, 80 bp, synthetic construct; identical to SEQ ID NO: 5143
  source 1..80: mol_type = other DNA

SEQ ID NO: 189874 - DNA, 80 bp, synthetic construct; identical to SEQ ID NO: 5144
  source 1..80: mol_type = other DNA

SEQ ID NO: 189875 - DNA, 80 bp, synthetic construct; identical to SEQ ID NO: 5145
  source 1..80: mol_type = other DNA

SEQ ID NO: 189876 - DNA, 80 bp, synthetic construct; identical to SEQ ID NO: 5146
  source 1..80: mol_type = other DNA

SEQ ID NO: 189877 - DNA, 80 bp, synthetic construct; identical to SEQ ID NO: 5147
  source 1..80: mol_type = other DNA

SEQ ID NO: 189878 - DNA, 80 bp, synthetic construct; identical to SEQ ID NO: 5148
  source 1..80: mol_type = other DNA

SEQ ID NO: 189879 - DNA, 80 bp, synthetic construct; identical to SEQ ID NO: 5149
  source 1..80: mol_type = other DNA

SEQ ID NO: 189880 - DNA, 80 bp, synthetic construct; identical to SEQ ID NO: 5150
  source 1..80: mol_type = other DNA

SEQ ID NO: 189881 - DNA, 80 bp, synthetic construct; identical to SEQ ID NO: 5151
  source 1..80: mol_type = other DNA

SEQ ID NO: 189882 - DNA, 80 bp, synthetic construct; identical to SEQ ID NO: 5152
  source 1..80: mol_type = other DNA

SEQ ID NO: 189883 - DNA, 80 bp, synthetic construct; identical to SEQ ID NO: 5153
  source 1..80: mol_type = other DNA

SEQ ID NO: 189884 - DNA, 80 bp, synthetic construct; identical to SEQ ID NO: 5154
  source 1..80: mol_type = other DNA

SEQ ID NO: 189885 - DNA, 80 bp, synthetic construct; identical to SEQ ID NO: 5155
  source 1..80: mol_type = other DNA

SEQ ID NO: 189886 - DNA, 80 bp, synthetic construct; identical to SEQ ID NO: 5156
  source 1..80: mol_type = other DNA

SEQ ID NO: 189887 - DNA, 80 bp, synthetic construct; identical to SEQ ID NO: 5157
  source 1..80: mol_type = other DNA

SEQ ID NO: 189888 - DNA, 80 bp, synthetic construct; identical to SEQ ID NO: 5158
  source 1..80: mol_type = other DNA

SEQ ID NO: 189889 - DNA, 80 bp, synthetic construct; identical to SEQ ID NO: 5159
  source 1..80: mol_type = other DNA

SEQ ID NO: 189890 - DNA, 80 bp, synthetic construct; identical to SEQ ID NO: 5160
  source 1..80: mol_type = other DNA

SEQ ID NO: 189891 - DNA, 80 bp, synthetic construct; identical to SEQ ID NO: 5161
  source 1..80: mol_type = other DNA

SEQ ID NO: 189892 - DNA, 80 bp, synthetic construct; identical to SEQ ID NO: 5162
  source 1..80: mol_type = other DNA

SEQ ID NO: 189893 - DNA, 80 bp, synthetic construct; identical to SEQ ID NO: 5163
  source 1..80: mol_type = other DNA

SEQ ID NO: 189894 - DNA, 80 bp, synthetic construct; identical to SEQ ID NO: 5164
  source 1..80: mol_type = other DNA

SEQ ID NO: 189895 - DNA, 80 bp, synthetic construct; identical to SEQ ID NO: 5165
  source 1..80: mol_type = other DNA

SEQ ID NO: 189896 - DNA, 80 bp, synthetic construct; identical to SEQ ID NO: 5166
  source 1..80: mol_type = other DNA

SEQ ID NO: 189897 - DNA, 80 bp, synthetic construct; identical to SEQ ID NO: 5167
  source 1..80: mol_type = other DNA

SEQ ID NO: 189898 - DNA, 80 bp, synthetic construct; identical to SEQ ID NO: 5168
  source 1..80: mol_type = other DNA

SEQ ID NO: 189899 - DNA, 80 bp, synthetic construct; identical to SEQ ID NO: 5169
  source 1..80: mol_type = other DNA

SEQ ID NO: 189900 - DNA, 80 bp, synthetic construct; identical to SEQ ID NO: 5170
  source 1..80: mol_type = other DNA

SEQ ID NO: 189901 - DNA, 80 bp, synthetic construct; identical to SEQ ID NO: 5171
  source 1..80: mol_type = other DNA

SEQ ID NO: 189902 - DNA, 80 bp, synthetic construct; identical to SEQ ID NO: 5172
  source 1..80: mol_type = other DNA

SEQ ID NO: 189903 - DNA, 80 bp, synthetic construct; identical to SEQ ID NO: 5173
  source 1..80: mol_type = other DNA

SEQ ID NO: 189904 - DNA, 80 bp, synthetic construct; identical to SEQ ID NO: 5174
  source 1..80: mol_type = other DNA

SEQ ID NO: 189905 - DNA, 80 bp, synthetic construct; identical to SEQ ID NO: 5175
  source 1..80: mol_type = other DNA

SEQ ID NO: 189906 - DNA, 80 bp, synthetic construct; identical to SEQ ID NO: 5176
  source 1..80: mol_type = other DNA

SEQ ID NO: 189907 - DNA, 80 bp, synthetic construct; identical to SEQ ID NO: 5177
  source 1..80: mol_type = other DNA

SEQ ID NO: 189908 - DNA, 80 bp, synthetic construct; identical to SEQ ID NO: 5178
  source 1..80: mol_type = other DNA

SEQ ID NO: 189909 - DNA, 80 bp, synthetic construct; identical to SEQ ID NO: 5179
  source 1..80: mol_type = other DNA

SEQ ID NO: 189910 - DNA, 80 bp, synthetic construct; identical to SEQ ID NO: 5180
  source 1..80: mol_type = other DNA

SEQ ID NO: 189911 - DNA, 80 bp, synthetic construct; identical to SEQ ID NO: 5181
  source 1..80: mol_type = other DNA

SEQ ID NO: 189912 - DNA, 80 bp, synthetic construct; identical to SEQ ID NO: 5182
  source 1..80: mol_type = other DNA

SEQ ID NO: 189913 - DNA, 80 bp, synthetic construct; identical to SEQ ID NO: 5183
  source 1..80: mol_type = other DNA

SEQ ID NO: 189914 - DNA, 80 bp, synthetic construct; identical to SEQ ID NO: 5184
  source 1..80: mol_type = other DNA

SEQ ID NO: 189915 - DNA, 80 bp, synthetic construct; identical to SEQ ID NO: 5185
  source 1..80: mol_type = other DNA

SEQ ID NO: 189916 - DNA, 80 bp, synthetic construct; identical to SEQ ID NO: 5186
  source 1..80: mol_type = other DNA

SEQ ID NO: 189917 - DNA, 80 bp, synthetic construct; identical to SEQ ID NO: 5187
  source 1..80: mol_type = other DNA

SEQ ID NO: 189918 - DNA, 80 bp, synthetic construct; identical to SEQ ID NO: 5188
  source 1..80: mol_type = other DNA

SEQ ID NO: 189919 - DNA, 80 bp, synthetic construct; identical to SEQ ID NO: 5189
  source 1..80: mol_type = other DNA

SEQ ID NO: 189920 - DNA, 80 bp, synthetic construct; identical to SEQ ID NO: 5190
  source 1..80: mol_type = other DNA

SEQ ID NO: 189921 - DNA, 80 bp, synthetic construct; identical to SEQ ID NO: 5191
  source 1..80: mol_type = other DNA

SEQ ID NO: 189922 - DNA, 80 bp, synthetic construct; identical to SEQ ID NO: 5192
  source 1..80: mol_type = other DNA

SEQ ID NO: 189923 - DNA, 80 bp, synthetic construct; identical to SEQ ID NO: 5193
  source 1..80: mol_type = other DNA

SEQ ID NO: 189924 - DNA, 80 bp, synthetic construct; identical to SEQ ID NO: 5194
  source 1..80: mol_type = other DNA

SEQ ID NO: 189925 - DNA, 80 bp, synthetic construct; identical to SEQ ID NO: 5195
  source 1..80: mol_type = other DNA

SEQ ID NO: 189926 - DNA, 80 bp, synthetic construct; identical to SEQ ID NO: 5196
  source 1..80: mol_type = other DNA

SEQ ID NO: 189927 - DNA, 80 bp, synthetic construct; identical to SEQ ID NO: 5197
  source 1..80: mol_type = other DNA

SEQ ID NO: 189928 - DNA, 80 bp, synthetic construct; identical to SEQ ID NO: 5198
  source 1..80: mol_type = other DNA

SEQ ID NO: 189929 - DNA, 80 bp, synthetic construct; identical to SEQ ID NO: 5199
  source 1..80: mol_type = other DNA

SEQ ID NO: 189930 - DNA, 80 bp, synthetic construct; identical to SEQ ID NO: 5200
  source 1..80: mol_type = other DNA

SEQ ID NO: 189931 - DNA, 80 bp, synthetic construct; identical to SEQ ID NO: 5201
  source 1..80: mol_type = other DNA

SEQ ID NO: 189932 - DNA, 80 bp, synthetic construct; identical to SEQ ID NO: 5202
  source 1..80: mol_type = other DNA

SEQ ID NO: 189933 - DNA, 80 bp, synthetic construct; identical to SEQ ID NO: 5203
  source 1..80: mol_type = other DNA

SEQ ID NO: 189934 - DNA, 80 bp, synthetic construct; identical to SEQ ID NO: 5204
  source 1..80: mol_type = other DNA

SEQ ID NO: 189935 - DNA, 80 bp, synthetic construct; identical to SEQ ID NO: 5205
  source 1..80: mol_type = other DNA

SEQ ID NO: 189936 - DNA, 80 bp, synthetic construct; identical to SEQ ID NO: 5206
  source 1..80: mol_type = other DNA

SEQ ID NO: 189937 - DNA, 80 bp, synthetic construct; identical to SEQ ID NO: 5207
  source 1..80: mol_type = other DNA

SEQ ID NO: 189938 - DNA, 80 bp, synthetic construct; identical to SEQ ID NO: 5208
  source 1..80: mol_type = other DNA

SEQ ID NO: 189939 - DNA, 80 bp, synthetic construct; identical to SEQ ID NO: 5209
  source 1..80: mol_type = other DNA

SEQ ID NO: 189940 - DNA, 80 bp, synthetic construct; identical to SEQ ID NO: 5210
  source 1..80: mol_type = other DNA

SEQ ID NO: 189941 - DNA, 80 bp, synthetic construct; identical to SEQ ID NO: 5211
  source 1..80: mol_type = other DNA

SEQ ID NO: 189942 - DNA, 80 bp, synthetic construct; identical to SEQ ID NO: 5212
  source 1..80: mol_type = other DNA

SEQ ID NO: 189943 - DNA, 80 bp, synthetic construct; identical to SEQ ID NO: 5213
  source 1..80: mol_type = other DNA

SEQ ID NO: 189944 - DNA, 80 bp, synthetic construct; identical to SEQ ID NO: 5214
  source 1..80: mol_type = other DNA

SEQ ID NO: 189945 - DNA, 80 bp, synthetic construct; identical to SEQ ID NO: 5215
  source 1..80: mol_type = other DNA

SEQ ID NO: 189946 - DNA, 80 bp, synthetic construct; identical to SEQ ID NO: 5216
  source 1..80: mol_type = other DNA

SEQ ID NO: 189947 - DNA, 80 bp, synthetic construct; identical to SEQ ID NO: 5217
  source 1..80: mol_type = other DNA

SEQ ID NO: 189948 - DNA, 80 bp, synthetic construct; identical to SEQ ID NO: 5218
  source 1..80: mol_type = other DNA

SEQ ID NO: 189949 - DNA, 80 bp, synthetic construct; identical to SEQ ID NO: 5219
  source 1..80: mol_type = other DNA

SEQ ID NO: 189950 - DNA, 80 bp, synthetic construct; identical to SEQ ID NO: 5220
  source 1..80: mol_type = other DNA

SEQ ID NO: 189951 - DNA, 80 bp, synthetic construct; identical to SEQ ID NO: 5221
  source 1..80: mol_type = other DNA

SEQ ID NO: 189952 - DNA, 80 bp, synthetic construct; identical to SEQ ID NO: 5222
  source 1..80: mol_type = other DNA

SEQ ID NO: 189953 - DNA, 80 bp, synthetic construct; identical to SEQ ID NO: 5223
  source 1..80: mol_type = other DNA

SEQ ID NO: 189954 - DNA, 80 bp, synthetic construct; identical to SEQ ID NO: 5224
  source 1..80: mol_type = other DNA

SEQ ID NO: 189955 - DNA, 80 bp, synthetic construct; identical to SEQ ID NO: 5225
  source 1..80: mol_type = other DNA

SEQ ID NO: 189956 - DNA, 80 bp, synthetic construct; identical to SEQ ID NO: 5226
  source 1..80: mol_type = other DNA

SEQ ID NO: 189957 - DNA, 80 bp, synthetic construct; identical to SEQ ID NO: 5227
  source 1..80: mol_type = other DNA

SEQ ID NO: 189958 - DNA, 80 bp, synthetic construct; identical to SEQ ID NO: 5228
  source 1..80: mol_type = other DNA

SEQ ID NO: 189959 - DNA, 80 bp, synthetic construct; identical to SEQ ID NO: 5229
  source 1..80: mol_type = other DNA

SEQ ID NO: 189960 - DNA, 80 bp, synthetic construct; identical to SEQ ID NO: 5230
  source 1..80: mol_type = other DNA

SEQ ID NO: 189961 - DNA, 80 bp, synthetic construct; identical to SEQ ID NO: 5231
  source 1..80: mol_type = other DNA

SEQ ID NO: 189962 - DNA, 80 bp, synthetic construct; identical to SEQ ID NO: 5232
  source 1..80: mol_type = other DNA

SEQ ID NO: 189963 - DNA, 80 bp, synthetic construct; identical to SEQ ID NO: 5233
  source 1..80: mol_type = other DNA

SEQ ID NO: 189964 - DNA, 80 bp, synthetic construct; identical to SEQ ID NO: 5234
  source 1..80: mol_type = other DNA

SEQ ID NO: 189965 - DNA, 80 bp, synthetic construct; identical to SEQ ID NO: 5235
  source 1..80: mol_type = other DNA

SEQ ID NO: 189966 - DNA, 80 bp, synthetic construct; identical to SEQ ID NO: 5236
  source 1..80: mol_type = other DNA

SEQ ID NO: 189967 - DNA, 80 bp, synthetic construct; identical to SEQ ID NO: 5237
  source 1..80: mol_type = other DNA

SEQ ID NO: 189968 - DNA, 80 bp, synthetic construct; identical to SEQ ID NO: 5238
  source 1..80: mol_type = other DNA

SEQ ID NO: 189969 - DNA, 80 bp, synthetic construct; identical to SEQ ID NO: 5239
  source 1..80: mol_type = other DNA

SEQ ID NO: 189970 - DNA, 80 bp, synthetic construct; identical to SEQ ID NO: 5240
  source 1..80: mol_type = other DNA

SEQ ID NO: 189971 - DNA, 80 bp, synthetic construct; identical to SEQ ID NO: 5241
  source 1..80: mol_type = other DNA

SEQ ID NO: 189972 - DNA, 80 bp, synthetic construct; identical to SEQ ID NO: 5242
  source 1..80: mol_type = other DNA

SEQ ID NO: 189973 - DNA, 80 bp, synthetic construct; identical to SEQ ID NO: 5243
  source 1..80: mol_type = other DNA

SEQ ID NO: 189974 - DNA, 80 bp, synthetic construct; identical to SEQ ID NO: 5244
  source 1..80: mol_type = other DNA

SEQ ID NO: 189975 - DNA, 80 bp, synthetic construct; identical to SEQ ID NO: 5245
  source 1..80: mol_type = other DNA

SEQ ID NO: 189976 - DNA, 80 bp, synthetic construct; identical to SEQ ID NO: 5246
  source 1..80: mol_type = other DNA

SEQ ID NO: 189977 - DNA, 80 bp, synthetic construct; identical to SEQ ID NO: 5247
  source 1..80: mol_type = other DNA

SEQ ID NO: 189978 - DNA, 80 bp, synthetic construct; identical to SEQ ID NO: 5248
  source 1..80: mol_type = other DNA

SEQ ID NO: 189979 - DNA, 80 bp, synthetic construct; identical to SEQ ID NO: 5249
  source 1..80: mol_type = other DNA

SEQ ID NO: 189980 - DNA, 80 bp, synthetic construct; identical to SEQ ID NO: 5250
  source 1..80: mol_type = other DNA

SEQ ID NO: 189981 - DNA, 80 bp, synthetic construct; identical to SEQ ID NO: 5251
  source 1..80: mol_type = other DNA

SEQ ID NO: 189982 - DNA, 80 bp, synthetic construct; identical to SEQ ID NO: 5252
  source 1..80: mol_type = other DNA

SEQ ID NO: 189983 - DNA, 80 bp, synthetic construct; identical to SEQ ID NO: 5253
  source 1..80: mol_type = other DNA

SEQ ID NO: 189984 - DNA, 80 bp, synthetic construct; identical to SEQ ID NO: 5254
  source 1..80: mol_type = other DNA

SEQ ID NO: 189985 - DNA, 80 bp, synthetic construct; identical to SEQ ID NO: 5255
  source 1..80: mol_type = other DNA

SEQ ID NO: 189986 - DNA, 80 bp, synthetic construct; identical to SEQ ID NO: 5256
  source 1..80: mol_type = other DNA

SEQ ID NO: 189987 - DNA, 80 bp, synthetic construct; identical to SEQ ID NO: 5257
  source 1..80: mol_type = other DNA

SEQ ID NO: 189988 - DNA, 80 bp, synthetic construct; identical to SEQ ID NO: 5258
  source 1..80: mol_type = other DNA

SEQ ID NO: 189989 - DNA, 80 bp, synthetic construct; identical to SEQ ID NO: 5259
  source 1..80: mol_type = other DNA

SEQ ID NO: 189990 - DNA, 80 bp, synthetic construct; identical to SEQ ID NO: 5260
  source 1..80: mol_type = other DNA

SEQ ID NO: 189991 - DNA, 80 bp, synthetic construct; identical to SEQ ID NO: 5261
  source 1..80: mol_type = other DNA

SEQ ID NO: 189992 - DNA, 80 bp, synthetic construct; identical to SEQ ID NO: 5262
  source 1..80: mol_type = other DNA

SEQ ID NO: 189993 - DNA, 80 bp, synthetic construct; identical to SEQ ID NO: 5263
  source 1..80: mol_type = other DNA

SEQ ID NO: 189994 - DNA, 80 bp, synthetic construct; identical to SEQ ID NO: 5264
  source 1..80: mol_type = other DNA

SEQ ID NO: 189995 - DNA, 80 bp, synthetic construct; identical to SEQ ID NO: 5265
  source 1..80: mol_type = other DNA

SEQ ID NO: 189996 - DNA, 80 bp, synthetic construct; identical to SEQ ID NO: 5266
  source 1..80: mol_type = other DNA

SEQ ID NO: 189997 - DNA, 80 bp, synthetic construct; identical to SEQ ID NO: 5267
  source 1..80: mol_type = other DNA

SEQ ID NO: 189998 - DNA, 80 bp, synthetic construct; identical to SEQ ID NO: 5268
  source 1..80: mol_type = other DNA

SEQ ID NO: 189999 - DNA, 80 bp, synthetic construct; identical to SEQ ID NO: 5269
  source 1..80: mol_type = other DNA

SEQ ID NO: 190000 - DNA, 80 bp, synthetic construct; identical to SEQ ID NO: 5270
  source 1..80: mol_type = other DNA

SEQ ID NO: 190001 - DNA, 80 bp, synthetic construct; identical to SEQ ID NO: 5271
  source 1..80: mol_type = other DNA

SEQ ID NO: 190002 - DNA, 80 bp, synthetic construct; identical to SEQ ID NO: 5272
  source 1..80: mol_type = other DNA

SEQ ID NO: 190003 - DNA, 80 bp, synthetic construct; identical to SEQ ID NO: 5273
  source 1..80: mol_type = other DNA

SEQ ID NO: 190004 - DNA, 80 bp, synthetic construct; identical to SEQ ID NO: 5274
  source 1..80: mol_type = other DNA

SEQ ID NO: 190005 - DNA, 80 bp, synthetic construct; identical to SEQ ID NO: 5275
  source 1..80: mol_type = other DNA

SEQ ID NO: 190006 - DNA, 80 bp, synthetic construct; identical to SEQ ID NO: 5276
  source 1..80: mol_type = other DNA

SEQ ID NO: 190007 - DNA, 80 bp, synthetic construct; identical to SEQ ID NO: 5277
  source 1..80: mol_type = other DNA

SEQ ID NO: 190008 - DNA, 80 bp, synthetic construct; identical to SEQ ID NO: 5278
  source 1..80: mol_type = other DNA

SEQ ID NO: 190009 - DNA, 80 bp, synthetic construct; identical to SEQ ID NO: 5279
  source 1..80: mol_type = other DNA

SEQ ID NO: 190010 - DNA, 80 bp, synthetic construct; identical to SEQ ID NO: 5280
  source 1..80: mol_type = other DNA

SEQ ID NO: 190011 - DNA, 80 bp, synthetic construct; identical to SEQ ID NO: 5281
  source 1..80: mol_type = other DNA

SEQ ID NO: 190012 - DNA, 80 bp, synthetic construct; identical to SEQ ID NO: 5282
  source 1..80: mol_type = other DNA

SEQ ID NO: 190013 - DNA, 80 bp, synthetic construct; identical to SEQ ID NO: 5283
  source 1..80: mol_type = other DNA

SEQ ID NO: 190014 - DNA, 80 bp, synthetic construct; identical to SEQ ID NO: 5284
  source 1..80: mol_type = other DNA

SEQ ID NO: 190015 - DNA, 80 bp, synthetic construct; identical to SEQ ID NO: 5285
  source 1..80: mol_type = other DNA

SEQ ID NO: 190016 - DNA, 80 bp, synthetic construct; identical to SEQ ID NO: 5286
  source 1..80: mol_type = other DNA

SEQ ID NO: 190017 - DNA, 80 bp, synthetic construct; identical to SEQ ID NO: 5287
  source 1..80: mol_type = other DNA

SEQ ID NO: 190018 - DNA, 80 bp, synthetic construct; identical to SEQ ID NO: 5288
  source 1..80: mol_type = other DNA

SEQ ID NO: 190019 - DNA, 80 bp, synthetic construct; identical to SEQ ID NO: 5289
  source 1..80: mol_type = other DNA

SEQ ID NO: 190020 - DNA, 80 bp, synthetic construct; identical to SEQ ID NO: 5290
  source 1..80: mol_type = other DNA

SEQ ID NO: 190021 - DNA, 80 bp, synthetic construct; identical to SEQ ID NO: 5291
  source 1..80: mol_type = other DNA

SEQ ID NO: 190022 - DNA, 80 bp, synthetic construct; identical to SEQ ID NO: 5292
  source 1..80: mol_type = other DNA

SEQ ID NO: 190023 - DNA, 80 bp, synthetic construct; identical to SEQ ID NO: 5293
  source 1..80: mol_type = other DNA

SEQ ID NO: 190024 - DNA, 80 bp, synthetic construct; identical to SEQ ID NO: 5294
  source 1..80: mol_type = other DNA

SEQ ID NO: 190025 - DNA, 80 bp, synthetic construct; identical to SEQ ID NO: 5295
  source 1..80: mol_type = other DNA

SEQ ID NO: 190026 - DNA, 80 bp, synthetic construct; identical to SEQ ID NO: 5296
  source 1..80: mol_type = other DNA

SEQ ID NO: 190027 - DNA, 80 bp, synthetic construct; identical to SEQ ID NO: 5297
  source 1..80: mol_type = other DNA

SEQ ID NO: 190028 - DNA, 80 bp, synthetic construct; identical to SEQ ID NO: 5298
  source 1..80: mol_type = other DNA

SEQ ID NO: 190029 - DNA, 80 bp, synthetic construct; identical to SEQ ID NO: 5299
  source 1..80: mol_type = other DNA

SEQ ID NO: 190030 - DNA, 80 bp, synthetic construct; identical to SEQ ID NO: 5300
  source 1..80: mol_type = other DNA

SEQ ID NO: 190031 - DNA, 80 bp, synthetic construct; identical to SEQ ID NO: 5301
  source 1..80: mol_type = other DNA

SEQ ID NO: 190032 - DNA, 80 bp, synthetic construct; identical to SEQ ID NO: 5302
  source 1..80: mol_type = other DNA

SEQ ID NO: 190033 - DNA, 80 bp, synthetic construct; identical to SEQ ID NO: 5303
  source 1..80: mol_type = other DNA

SEQ ID NO: 190034 - DNA, 80 bp, synthetic construct; identical to SEQ ID NO: 5304
  source 1..80: mol_type = other DNA

SEQ ID NO: 190035 - DNA, 80 bp, synthetic construct; identical to SEQ ID NO: 5305
  source 1..80: mol_type = other DNA

SEQ ID NO: 190036 - DNA, 80 bp, synthetic construct; identical to SEQ ID NO: 5306
  source 1..80: mol_type = other DNA

SEQ ID NO: 190037 - DNA, 80 bp, synthetic construct; identical to SEQ ID NO: 5307
  source 1..80: mol_type = other DNA

SEQ ID NO: 190038 - DNA, 80 bp, synthetic construct; identical to SEQ ID NO: 5308
  source 1..80: mol_type = other DNA

SEQ ID NO: 190039 - DNA, 80 bp, synthetic construct; identical to SEQ ID NO: 5309
  source 1..80: mol_type = other DNA

SEQ ID NO: 190040 - DNA, 80 bp, synthetic construct; identical to SEQ ID NO: 5310
  source 1..80: mol_type = other DNA

SEQ ID NO: 190041 - DNA, 80 bp, synthetic construct; identical to SEQ ID NO: 5311
  source 1..80: mol_type = other DNA

SEQ ID NO: 190042 - DNA, 80 bp, synthetic construct; identical to SEQ ID NO: 5312
  source 1..80: mol_type = other DNA

SEQ ID NO: 190043 - DNA, 80 bp, synthetic construct; identical to SEQ ID NO: 5313
  source 1..80: mol_type = other DNA

SEQ ID NO: 190044 - DNA, 80 bp, synthetic construct; identical to SEQ ID NO: 5314
  source 1..80: mol_type = other DNA

SEQ ID NO: 190045 - DNA, 80 bp, synthetic construct; identical to SEQ ID NO: 5315
  source 1..80: mol_type = other DNA

SEQ ID NO: 190046 - DNA, 80 bp, synthetic construct; identical to SEQ ID NO: 5316
  source 1..80: mol_type = other DNA

SEQ ID NO: 190047 - DNA, 80 bp, synthetic construct; identical to SEQ ID NO: 5317
  source 1..80: mol_type = other DNA

SEQ ID NO: 190048 - DNA, 80 bp, synthetic construct; identical to SEQ ID NO: 5318
  source 1..80: mol_type = other DNA

SEQ ID NO: 190049 - DNA, 80 bp, synthetic construct; identical to SEQ ID NO: 5319
  source 1..80: mol_type = other DNA

SEQ ID NO: 190050 - DNA, 80 bp, synthetic construct; identical to SEQ ID NO: 5320
  source 1..80: mol_type = other DNA

SEQ ID NO: 190051 - DNA, 80 bp, synthetic construct; identical to SEQ ID NO: 5321
  source 1..80: mol_type = other DNA

SEQ ID NO: 190052 - DNA, 80 bp, synthetic construct; identical to SEQ ID NO: 5322
  source 1..80: mol_type = other DNA

SEQ ID NO: 190053 - DNA, 80 bp, synthetic construct; identical to SEQ ID NO: 5323
  source 1..80: mol_type = other DNA

SEQ ID NO: 190054 - DNA, 80 bp, synthetic construct; identical to SEQ ID NO: 5324
  source 1..80: mol_type = other DNA

SEQ ID NO: 190055 - DNA, 80 bp, synthetic construct; identical to SEQ ID NO: 5325
  source 1..80: mol_type = other DNA

SEQ ID NO: 190056 - DNA, 80 bp, synthetic construct; identical to SEQ ID NO: 5326
  source 1..80: mol_type = other DNA

SEQ ID NO: 190057 - DNA, 80 bp, synthetic construct; identical to SEQ ID NO: 5327
  source 1..80: mol_type = other DNA

SEQ ID NO: 190058 - DNA, 80 bp, synthetic construct; identical to SEQ ID NO: 5328
  source 1..80: mol_type = other DNA

SEQ ID NO: 190059 - DNA, 80 bp, synthetic construct; identical to SEQ ID NO: 5329
  source 1..80: mol_type = other DNA

SEQ ID NO: 190060 - DNA, 80 bp, synthetic construct; identical to SEQ ID NO: 5330
  source 1..80: mol_type = other DNA

SEQ ID NO: 190061 - DNA, 80 bp, synthetic construct; identical to SEQ ID NO: 5331
  source 1..80: mol_type = other DNA

SEQ ID NO: 190062 - DNA, 80 bp, synthetic construct; identical to SEQ ID NO: 5332
  source 1..80: mol_type = other DNA

SEQ ID NO: 190063 - DNA, 80 bp, synthetic construct; identical to SEQ ID NO: 5333
  source 1..80: mol_type = other DNA

SEQ ID NO: 190064 - DNA, 80 bp, synthetic construct; identical to SEQ ID NO: 5334
  source 1..80: mol_type = other DNA

SEQ ID NO: 190065 - DNA, 80 bp, synthetic construct; identical to SEQ ID NO: 5335
  source 1..80: mol_type = other DNA

SEQ ID NO: 190066 - DNA, 80 bp, synthetic construct; identical to SEQ ID NO: 5336
  source 1..80: mol_type = other DNA

SEQ ID NO: 190067 - DNA, 80 bp, synthetic construct; identical to SEQ ID NO: 5337
  source 1..80: mol_type = other DNA

SEQ ID NO: 190068 - DNA, 80 bp, synthetic construct; identical to SEQ ID NO: 5338
  source 1..80: mol_type = other DNA

SEQ ID NO: 190069 - DNA, 80 bp, synthetic construct; identical to SEQ ID NO: 5339
  source 1..80: mol_type = other DNA

SEQ ID NO: 190070 - DNA, 80 bp, synthetic construct; identical to SEQ ID NO: 5340
  source 1..80: mol_type = other DNA

SEQ ID NO: 190071 - DNA, 80 bp, synthetic construct; identical to SEQ ID NO: 5341
  source 1..80: mol_type = other DNA

SEQ ID NO: 190072 - DNA, 80 bp, synthetic construct; identical to SEQ ID NO: 5342
  source 1..80: mol_type = other DNA

SEQ ID NO: 190073 - DNA, 80 bp, synthetic construct; identical to SEQ ID NO: 5343
  source 1..80: mol_type = other DNA

SEQ ID NO: 190074 - DNA, 80 bp, synthetic construct; identical to SEQ ID NO: 5344
  source 1..80: mol_type = other DNA

SEQ ID NO: 190075 - DNA, 80 bp, synthetic construct; identical to SEQ ID NO: 5345
  source 1..80: mol_type = other DNA

SEQ ID NO: 190076 - DNA, 80 bp, synthetic construct; identical to SEQ ID NO: 5346
  source 1..80: mol_type = other DNA

SEQ ID NO: 190077 - DNA, 80 bp, synthetic construct; identical to SEQ ID NO: 5347
  source 1..80: mol_type = other DNA

SEQ ID NO: 190078 - DNA, 80 bp, synthetic construct; identical to SEQ ID NO: 5348
  source 1..80: mol_type = other DNA

SEQ ID NO: 190079 - DNA, 80 bp, synthetic construct; identical to SEQ ID NO: 5349
  source 1..80: mol_type = other DNA

SEQ ID NO: 190080 - DNA, 80 bp, synthetic construct; identical to SEQ ID NO: 5350
  source 1..80: mol_type = other DNA

SEQ ID NO: 190081 - DNA, 80 bp, synthetic construct; identical to SEQ ID NO: 5351
  source 1..80: mol_type = other DNA

SEQ ID NO: 190082 - DNA, 80 bp, synthetic construct; identical to SEQ ID NO: 5352
  source 1..80: mol_type = other DNA

SEQ ID NO: 190083 - DNA, 80 bp, synthetic construct; identical to SEQ ID NO: 5353
  source 1..80: mol_type = other DNA

SEQ ID NO: 190084 - DNA, 80 bp, synthetic construct; identical to SEQ ID NO: 5354
  source 1..80: mol_type = other DNA

SEQ ID NO: 190085 - DNA, 80 bp, synthetic construct; identical to SEQ ID NO: 5355
  source 1..80: mol_type = other DNA

SEQ ID NO: 190086 - DNA, 80 bp, synthetic construct; identical to SEQ ID NO: 5356
  source 1..80: mol_type = other DNA

SEQ ID NO: 190087 - DNA, 80 bp, synthetic construct; identical to SEQ ID NO: 5357
  source 1..80: mol_type = other DNA

SEQ ID NO: 190088 - DNA, 80 bp, synthetic construct; identical to SEQ ID NO: 5358
  source 1..80: mol_type = other DNA

SEQ ID NO: 190089 - DNA, 80 bp, synthetic construct; identical to SEQ ID NO: 5359
  source 1..80: mol_type = other DNA

SEQ ID NO: 190090 - DNA, 80 bp, synthetic construct; identical to SEQ ID NO: 5360
  source 1..80: mol_type = other DNA

SEQ ID NO: 190091 - DNA, 80 bp, synthetic construct; identical to SEQ ID NO: 5361
  source 1..80: mol_type = other DNA

SEQ ID NO: 190092 - DNA, 80 bp, synthetic construct; identical to SEQ ID NO: 5362
  source 1..80: mol_type = other DNA

SEQ ID NO: 190093 - DNA, 80 bp, synthetic construct; identical to SEQ ID NO: 5363
  source 1..80: mol_type = other DNA

SEQ ID NO: 190094 - DNA, 80 bp, synthetic construct; identical to SEQ ID NO: 5364
  source 1..80: mol_type = other DNA

SEQ ID NO: 190095 - DNA, 80 bp, synthetic construct; identical to SEQ ID NO: 5365
  source 1..80: mol_type = other DNA

SEQ ID NO: 190096 - DNA, 80 bp, synthetic construct; identical to SEQ ID NO: 5366
  source 1..80: mol_type = other DNA

SEQ ID NO: 190097 - DNA, 80 bp, synthetic construct; identical to SEQ ID NO: 5367
  source 1..80: mol_type = other DNA

SEQ ID NO: 190098 - DNA, 80 bp, synthetic construct; identical to SEQ ID NO: 5368
  source 1..80: mol_type = other DNA

SEQ ID NO: 190099 - DNA, 80 bp, synthetic construct; identical to SEQ ID NO: 5369
  source 1..80: mol_type = other DNA

SEQ ID NO: 190100 - DNA, 80 bp, synthetic construct; identical to SEQ ID NO: 5370
  source 1..80: mol_type = other DNA

SEQ ID NO: 190101 - DNA, 80 bp, synthetic construct; identical to SEQ ID NO: 5371
  source 1..80: mol_type = other DNA

SEQ ID NO: 190102 - DNA, 80 bp, synthetic construct; identical to SEQ ID NO: 5372
  source 1..80: mol_type = other DNA

SEQ ID NO: 190103 - DNA, 80 bp, synthetic construct; identical to SEQ ID NO: 5373
  source 1..80: mol_type = other DNA

SEQ ID NO: 190104 - DNA, 80 bp, synthetic construct; identical to SEQ ID NO: 5374
  source 1..80: mol_type = other DNA

SEQ ID NO: 190105 - DNA, 80 bp, synthetic construct; identical to SEQ ID NO: 5375
  source 1..80: mol_type = other DNA

SEQ ID NO: 190106 - DNA, 80 bp, synthetic construct; identical to SEQ ID NO: 5376
  source 1..80: mol_type = other DNA

SEQ ID NO: 190107 - DNA, 80 bp, synthetic construct; identical to SEQ ID NO: 5377
  source 1..80: mol_type = other DNA

SEQ ID NO: 190108 - DNA, 80 bp, synthetic construct; identical to SEQ ID NO: 5378
  source 1..80: mol_type = other DNA

SEQ ID NO: 190109 - DNA, 80 bp, synthetic construct; identical to SEQ ID NO: 5379
  source 1..80: mol_type = other DNA

SEQ ID NO: 190110 - DNA, 80 bp, synthetic construct; identical to SEQ ID NO: 5380
  source 1..80: mol_type = other DNA

SEQ ID NO: 190111 - DNA, 80 bp, synthetic construct; identical to SEQ ID NO: 5381
  source 1..80: mol_type = other DNA

SEQ ID NO: 190112 - DNA, 80 bp, synthetic construct; identical to SEQ ID NO: 5382
  source 1..80: mol_type = other DNA

SEQ ID NO: 190113 - DNA, 80 bp, synthetic construct; identical to SEQ ID NO: 5383
  source 1..80: mol_type = other DNA

SEQ ID NO: 190114 - DNA, 80 bp, synthetic construct; identical to SEQ ID NO: 5384
  source 1..80: mol_type = other DNA

SEQ ID NO: 190115 - DNA, 80 bp, synthetic construct; identical to SEQ ID NO: 5385
  source 1..80: mol_type = other DNA

SEQ ID NO: 190116 - DNA, 80 bp, synthetic construct; identical to SEQ ID NO: 5386
  source 1..80: mol_type = other DNA

SEQ ID NO: 190117 - DNA, 80 bp, synthetic construct; identical to SEQ ID NO: 5387
  source 1..80: mol_type = other DNA

SEQ ID NO: 190118 - DNA, 80 bp, synthetic construct; identical to SEQ ID NO: 5388
  source 1..80: mol_type = other DNA

SEQ ID NO: 190119 - DNA, 80 bp, synthetic construct; identical to SEQ ID NO: 5389
  source 1..80: mol_type = other DNA

SEQ ID NO: 190120 - DNA, 80 bp, synthetic construct; identical to SEQ ID NO: 5390
  source 1..80: mol_type = other DNA

SEQ ID NO: 190121 - DNA, 80 bp, synthetic construct; identical to SEQ ID NO: 5391
  source 1..80: mol_type = other DNA

SEQ ID NO: 190122 - DNA, 80 bp, synthetic construct; identical to SEQ ID NO: 5392
  source 1..80: mol_type = other DNA

SEQ ID NO: 190123 - DNA, 80 bp, synthetic construct; identical to SEQ ID NO: 5393
  source 1..80: mol_type = other DNA

SEQ ID NO: 190124 - DNA, 80 bp, synthetic construct; identical to SEQ ID NO: 5394
  source 1..80: mol_type = other DNA

SEQ ID NO: 190125 - DNA, 80 bp, synthetic construct; identical to SEQ ID NO: 5395
  source 1..80: mol_type = other DNA

SEQ ID NO: 190126 - DNA, 80 bp, synthetic construct; identical to SEQ ID NO: 5396
  source 1..80: mol_type = other DNA

SEQ ID NO: 190127 - DNA, 80 bp, synthetic construct; identical to SEQ ID NO: 5397
  source 1..80: mol_type = other DNA

SEQ ID NO: 190128 - DNA, 80 bp, synthetic construct; identical to SEQ ID NO: 5398
  source 1..80: mol_type = other DNA

SEQ ID NO: 190129 - DNA, 80 bp, synthetic construct; identical to SEQ ID NO: 5399
  source 1..80: mol_type = other DNA

SEQ ID NO: 190130 - DNA, 80 bp, synthetic construct; identical to SEQ ID NO: 5400
  source 1..80: mol_type = other DNA

SEQ ID NO: 190131 - DNA, 80 bp, synthetic construct; identical to SEQ ID NO: 5401
  source 1..80: mol_type = other DNA

SEQ ID NO: 190132 - DNA, 80 bp, synthetic construct; identical to SEQ ID NO: 5402
  source 1..80: mol_type = other DNA

SEQ ID NO: 190133 - DNA, 80 bp, synthetic construct; identical to SEQ ID NO: 5403
  source 1..80: mol_type = other DNA

SEQ ID NO: 190134 - DNA, 80 bp, synthetic construct; identical to SEQ ID NO: 5404
  source 1..80: mol_type = other DNA

SEQ ID NO: 190135 - DNA, 80 bp, synthetic construct; identical to SEQ ID NO: 5405
  source 1..80: mol_type = other DNA

SEQ ID NO: 190136 - DNA, 80 bp, synthetic construct; identical to SEQ ID NO: 5406
  source 1..80: mol_type = other DNA

SEQ ID NO: 190137 - DNA, 80 bp, synthetic construct; identical to SEQ ID NO: 5407
  source 1..80: mol_type = other DNA

SEQ ID NO: 190138 - DNA, 80 bp, synthetic construct; identical to SEQ ID NO: 5408
  source 1..80: mol_type = other DNA

SEQ ID NO: 190139 - DNA, 80 bp, synthetic construct; identical to SEQ ID NO: 5409
  source 1..80: mol_type = other DNA

SEQ ID NO: 190140 - DNA, 80 bp, synthetic construct; identical to SEQ ID NO: 5410
  source 1..80: mol_type = other DNA

SEQ ID NO: 190141 - DNA, 80 bp, synthetic construct; identical to SEQ ID NO: 5411
  source 1..80: mol_type = other DNA

SEQ ID NO: 190142 - DNA, 80 bp, synthetic construct; identical to SEQ ID NO: 5412
  source 1..80: mol_type = other DNA

SEQ ID NO: 190143 - DNA, 80 bp, synthetic construct; identical to SEQ ID NO: 5413
  source 1..80: mol_type = other DNA

SEQ ID NO: 190144 - DNA, 80 bp, synthetic construct; identical to SEQ ID NO: 5414
  source 1..80: mol_type = other DNA

SEQ ID NO: 190145 - DNA, 80 bp, synthetic construct; identical to SEQ ID NO: 5415
  source 1..80: mol_type = other DNA

SEQ ID NO: 190146 - DNA, 80 bp, synthetic construct; identical to SEQ ID NO: 5416
  source 1..80: mol_type = other DNA

SEQ ID NO: 190147 - DNA, 80 bp, synthetic construct; identical to SEQ ID NO: 5417
  source 1..80: mol_type = other DNA

SEQ ID NO: 190148 - DNA, 80 bp, synthetic construct; identical to SEQ ID NO: 5418
  source 1..80: mol_type = other DNA

SEQ ID NO: 190149 - DNA, 80 bp, synthetic construct; identical to SEQ ID NO: 5419
  source 1..80: mol_type = other DNA

SEQ ID NO: 190150 - DNA, 80 bp, synthetic construct; identical to SEQ ID NO: 5420
  source 1..80: mol_type = other DNA

SEQ ID NO: 190151 - DNA, 80 bp, synthetic construct; identical to SEQ ID NO: 5421
  source 1..80: mol_type = other DNA

SEQ ID NO: 190152 - DNA, 80 bp, synthetic construct; identical to SEQ ID NO: 5422
  source 1..80: mol_type = other DNA

SEQ ID NO: 190153 - DNA, 80 bp, synthetic construct; identical to SEQ ID NO: 5423
  source 1..80: mol_type = other DNA

SEQ ID NO: 190154 - DNA, 80 bp, synthetic construct; identical to SEQ ID NO: 5424
  source 1..80: mol_type = other DNA

SEQ ID NO: 190155 - DNA, 80 bp, synthetic construct; identical to SEQ ID NO: 5425
  source 1..80: mol_type = other DNA

SEQ ID NO: 190156 - DNA, 80 bp, synthetic construct; identical to SEQ ID NO: 5426
  source 1..80: mol_type = other DNA

SEQ ID NO: 190157 - DNA, 80 bp, synthetic construct; identical to SEQ ID NO: 5427
  source 1..80: mol_type = other DNA

SEQ ID NO: 190158 - DNA, 80 bp, synthetic construct; identical to SEQ ID NO: 5428
  source 1..80: mol_type = other DNA

SEQ ID NO: 190159 - DNA, 80 bp, synthetic construct; identical to SEQ ID NO: 5429
  source 1..80: mol_type = other DNA

SEQ ID NO: 190160 - DNA, 80 bp, synthetic construct; identical to SEQ ID NO: 5430
  source 1..80: mol_type = other DNA

SEQ ID NO: 190161 - DNA, 80 bp, synthetic construct; identical to SEQ ID NO: 5431
  source 1..80: mol_type = other DNA

SEQ ID NO: 190162 - DNA, 80 bp, synthetic construct; identical to SEQ ID NO: 5432
  source 1..80: mol_type = other DNA

SEQ ID NO: 190163 - DNA, 80 bp, synthetic construct; identical to SEQ ID NO: 5433
  source 1..80: mol_type = other DNA

SEQ ID NO: 190164 - DNA, 80 bp, synthetic construct; identical to SEQ ID NO: 5434
  source 1..80: mol_type = other DNA

SEQ ID NO: 190165 - DNA, 80 bp, synthetic construct; identical to SEQ ID NO: 5435
  source 1..80: mol_type = other DNA

SEQ ID NO: 190166 - DNA, 80 bp, synthetic construct; identical to SEQ ID NO: 5436
  source 1..80: mol_type = other DNA

SEQ ID NO: 190167 - DNA, 80 bp, synthetic construct; identical to SEQ ID NO: 5437
  source 1..80: mol_type = other DNA

SEQ ID NO: 190168 - DNA, 80 bp, synthetic construct; identical to SEQ ID NO: 5438
  source 1..80: mol_type = other DNA

SEQ ID NO: 190169 - DNA, 80 bp, synthetic construct; identical to SEQ ID NO: 5439
  source 1..80: mol_type = other DNA

SEQ ID NO: 190170 - DNA, 80 bp, synthetic construct; identical to SEQ ID NO: 5440
  source 1..80: mol_type = other DNA

SEQ ID NO: 190171 - DNA, 80 bp, synthetic construct; identical to SEQ ID NO: 5441
  source 1..80: mol_type = other DNA

SEQ ID NO: 190172 - DNA, 80 bp, synthetic construct; identical to SEQ ID NO: 5442
  source 1..80: mol_type = other DNA

SEQ ID NO: 190173 - DNA, 80 bp, synthetic construct; identical to SEQ ID NO: 5443
  source 1..80: mol_type = other DNA

SEQ ID NO: 190174 - DNA, 80 bp, synthetic construct; identical to SEQ ID NO: 5444
  source 1..80: mol_type = other DNA

SEQ ID NO: 190175 - DNA, 80 bp, synthetic construct; identical to SEQ ID NO: 5445
  source 1..80: mol_type = other DNA

SEQ ID NO: 190176 - DNA, 80 bp, synthetic construct; identical to SEQ ID NO: 5446
  source 1..80: mol_type = other DNA

SEQ ID NO: 190177 - DNA, 80 bp, synthetic construct; identical to SEQ ID NO: 5447
  source 1..80: mol_type = other DNA

SEQ ID NO: 190178 - DNA, 80 bp, synthetic construct; identical to SEQ ID NO: 5448
  source 1..80: mol_type = other DNA

SEQ ID NO: 190179 - DNA, 80 bp, synthetic construct; identical to SEQ ID NO: 5449
  source 1..80: mol_type = other DNA

SEQ ID NO: 190180 - DNA, 80 bp, synthetic construct; identical to SEQ ID NO: 5450
  source 1..80: mol_type = other DNA

SEQ ID NO: 190181 - DNA, 80 bp, synthetic construct; identical to SEQ ID NO: 5451
  source 1..80: mol_type = other DNA

SEQ ID NO: 190182 - DNA, 80 bp, synthetic construct; identical to SEQ ID NO: 5452
  source 1..80: mol_type = other DNA

SEQ ID NO: 190183 - DNA, 80 bp, synthetic construct; identical to SEQ ID NO: 5453
  source 1..80: mol_type = other DNA

SEQ ID NO: 190184 - DNA, 80 bp, synthetic construct; identical to SEQ ID NO: 5454
  source 1..80: mol_type = other DNA

SEQ ID NO: 190185 - DNA, 80 bp, synthetic construct; identical to SEQ ID NO: 5455
  source 1..80: mol_type = other DNA

SEQ ID NO: 190186 - DNA, 80 bp, synthetic construct; identical to SEQ ID NO: 5456
  source 1..80: mol_type = other DNA

SEQ ID NO: 190187 - DNA, 80 bp, synthetic construct; identical to SEQ ID NO: 5457
  source 1..80: mol_type = other DNA

SEQ ID NO: 190188 - DNA, 80 bp, synthetic construct; identical to SEQ ID NO: 5458
  source 1..80: mol_type = other DNA

SEQ ID NO: 190189 - DNA, 80 bp, synthetic construct; identical to SEQ ID NO: 5459
  source 1..80: mol_type = other DNA

SEQ ID NO: 190190 - DNA, 80 bp, synthetic construct; identical to SEQ ID NO: 5460
  source 1..80: mol_type = other DNA

SEQ ID NO: 190191 - DNA, 80 bp, synthetic construct; identical to SEQ ID NO: 5461
  source 1..80: mol_type = other DNA

SEQ ID NO: 190192 - DNA, 80 bp, synthetic construct; identical to SEQ ID NO: 5462
  source 1..80: mol_type = other DNA

SEQ ID NO: 190193 - DNA, 80 bp, synthetic construct; identical to SEQ ID NO: 5463
  source 1..80: mol_type = other DNA

SEQ ID NO: 190194 - DNA, 80 bp, synthetic construct; identical to SEQ ID NO: 5464
  source 1..80: mol_type = other DNA

SEQ ID NO: 190195 - DNA, 80 bp, synthetic construct; identical to SEQ ID NO: 5465
  source 1..80: mol_type = other DNA

SEQ ID NO: 190196 - DNA, 80 bp, synthetic construct; identical to SEQ ID NO: 5466
  source 1..80: mol_type = other DNA

SEQ ID NO: 190197 - DNA, 80 bp, synthetic construct; identical to SEQ ID NO: 5467
  source 1..80: mol_type = other DNA

SEQ ID NO: 190198 - DNA, 80 bp, synthetic construct; identical to SEQ ID NO: 5468
  source 1..80: mol_type = other DNA

SEQ ID NO: 190199 - DNA, 80 bp, synthetic construct; identical to SEQ ID NO: 5469
  source 1..80: mol_type = other DNA

SEQ ID NO: 190200 - DNA, 80 bp, synthetic construct; identical to SEQ ID NO: 5470
  source 1..80: mol_type = other DNA

SEQ ID NO: 190201 - DNA, 80 bp, synthetic construct; identical to SEQ ID NO: 5471
  source 1..80: mol_type = other DNA

SEQ ID NO: 190202 - DNA, 80 bp, synthetic construct; identical to SEQ ID NO: 5472
  source 1..80: mol_type = other DNA

SEQ ID NO: 190203 - DNA, 80 bp, synthetic construct; identical to SEQ ID NO: 5473
  source 1..80: mol_type = other DNA

SEQ ID NO: 190204 - DNA, 80 bp, synthetic construct; identical to SEQ ID NO: 5474
  source 1..80: mol_type = other DNA

SEQ ID NO: 190205 - DNA, 80 bp, synthetic construct; identical to SEQ ID NO: 5475
  source 1..80: mol_type = other DNA

SEQ ID NO: 190206 - DNA, 80 bp, synthetic construct; identical to SEQ ID NO: 5476
  source 1..80: mol_type = other DNA

SEQ ID NO: 190207 - DNA, 80 bp, synthetic construct; identical to SEQ ID NO: 5477
  source 1..80: mol_type = other DNA

SEQ ID NO: 190208 - DNA, 80 bp, synthetic construct; identical to SEQ ID NO: 5478
  source 1..80: mol_type = other DNA

SEQ ID NO: 190209 - DNA, 80 bp, synthetic construct; identical to SEQ ID NO: 5479
  source 1..80: mol_type = other DNA

SEQ ID NO: 190210 - DNA, 80 bp, synthetic construct; identical to SEQ ID NO: 5480
  source 1..80: mol_type = other DNA

SEQ ID NO: 190211 - DNA, 80 bp, synthetic construct; identical to SEQ ID NO: 5481
  source 1..80: mol_type = other DNA

SEQ ID NO: 190212 - DNA, 80 bp, synthetic construct; identical to SEQ ID NO: 5482
  source 1..80: mol_type = other DNA

SEQ ID NO: 190213 - DNA, 80 bp, synthetic construct; identical to SEQ ID NO: 5483
  source 1..80: mol_type = other DNA

SEQ ID NO: 190214 - DNA, 80 bp, synthetic construct; identical to SEQ ID NO: 5484
  source 1..80: mol_type = other DNA

SEQ ID NO: 190215 - DNA, 80 bp, synthetic construct; identical to SEQ ID NO: 5485
  source 1..80: mol_type = other DNA

SEQ ID NO: 190216 - DNA, 80 bp, synthetic construct; identical to SEQ ID NO: 5486
  source 1..80: mol_type = other DNA

SEQ ID NO: 190217 - DNA, 80 bp, synthetic construct; identical to SEQ ID NO: 5487
  source 1..80: mol_type = other DNA

SEQ ID NO: 190218 - DNA, 80 bp, synthetic construct; identical to SEQ ID NO: 5488
  source 1..80: mol_type = other DNA

SEQ ID NO: 190219 - DNA, 80 bp, synthetic construct; identical to SEQ ID NO: 5489
  source 1..80: mol_type = other DNA

SEQ ID NO: 190220 - DNA, 80 bp, synthetic construct; identical to SEQ ID NO: 5490
  source 1..80: mol_type = other DNA

SEQ ID NO: 190221 - DNA, 80 bp, synthetic construct; identical to SEQ ID NO: 5491
  source 1..80: mol_type = other DNA

SEQ ID NO: 190222 - DNA, 80 bp, synthetic construct; identical to SEQ ID NO: 5492
  source 1..80: mol_type = other DNA

SEQ ID NO: 190223 - DNA, 80 bp, synthetic construct; identical to SEQ ID NO: 5493
  source 1..80: mol_type = other DNA

SEQ ID NO: 190224 - DNA, 80 bp, synthetic construct; identical to SEQ ID NO: 5494
  source 1..80: mol_type = other DNA

SEQ ID NO: 190225 - DNA, 80 bp, synthetic construct; identical to SEQ ID NO: 5495
  source 1..80: mol_type = other DNA

SEQ ID NO: 190226 - DNA, 80 bp, synthetic construct; identical to SEQ ID NO: 5496
  source 1..80: mol_type = other DNA

SEQ ID NO: 190227 - DNA, 80 bp, synthetic construct; identical to SEQ ID NO: 5497
  source 1..80: mol_type = other DNA

SEQ ID NO: 190228 - DNA, 80 bp, synthetic construct; identical to SEQ ID NO: 5498
  source 1..80: mol_type = other DNA

SEQ ID NO: 190229 - DNA, 80 bp, synthetic construct; identical to SEQ ID NO: 5499
  source 1..80: mol_type = other DNA

SEQ ID NO: 190230 - DNA, 80 bp, synthetic construct; identical to SEQ ID NO: 5500
  source 1..80: mol_type = other DNA

SEQ ID NO: 190231 - DNA, 80 bp, synthetic construct; identical to SEQ ID NO: 5501
  source 1..80: mol_type = other DNA

SEQ ID NO: 190232 - DNA, 80 bp, synthetic construct; identical to SEQ ID NO: 5502
  source 1..80: mol_type = other DNA

SEQ ID NO: 190233 - DNA, 80 bp, synthetic construct; identical to SEQ ID NO: 5503
  source 1..80: mol_type = other DNA

SEQ ID NO: 190234 - DNA, 80 bp, synthetic construct; identical to SEQ ID NO: 5504
  source 1..80: mol_type = other DNA

SEQ ID NO: 190235 - DNA, 80 bp, synthetic construct; identical to SEQ ID NO: 5505
  source 1..80: mol_type = other DNA

SEQ ID NO: 190236 - DNA, 80 bp, synthetic construct; identical to SEQ ID NO: 5506
  source 1..80: mol_type = other DNA

SEQ ID NO: 190237 - DNA, 80 bp, synthetic construct; identical to SEQ ID NO: 5507
  source 1..80: mol_type = other DNA

SEQ ID NO: 190238 - DNA, 80 bp, synthetic construct; identical to SEQ ID NO: 5508
  source 1..80: mol_type = other DNA

SEQ ID NO: 190239 - DNA, 80 bp, synthetic construct; identical to SEQ ID NO: 5509
  source 1..80: mol_type = other DNA

SEQ ID NO: 190240 - DNA, 80 bp, synthetic construct; identical to SEQ ID NO: 5510
  source 1..80: mol_type = other DNA

SEQ ID NO: 190241 - DNA, 80 bp, synthetic construct; identical to SEQ ID NO: 5511
  source 1..80: mol_type = other DNA

SEQ ID NO: 190242 - DNA, 80 bp, synthetic construct; identical to SEQ ID NO: 5512
  source 1..80: mol_type = other DNA

SEQ ID NO: 190243 - DNA, 80 bp, synthetic construct; identical to SEQ ID NO: 5513
  source 1..80: mol_type = other DNA

SEQ ID NO: 190244 - DNA, 80 bp, synthetic construct; identical to SEQ ID NO: 5514
  source 1..80: mol_type = other DNA

SEQ ID NO: 190245 - DNA, 80 bp, synthetic construct; identical to SEQ ID NO: 5515
  source 1..80: mol_type = other DNA

SEQ ID NO: 190246 - DNA, 80 bp, synthetic construct; identical to SEQ ID NO: 5516
  source 1..80: mol_type = other DNA

SEQ ID NO: 190247 - DNA, 80 bp, synthetic construct; identical to SEQ ID NO: 5517
  source 1..80: mol_type = other DNA

SEQ ID NO: 190248 - DNA, 80 bp, synthetic construct; identical to SEQ ID NO: 5518
  source 1..80: mol_type = other DNA

SEQ ID NO: 190249 - DNA, 80 bp, synthetic construct; identical to SEQ ID NO: 5519
  source 1..80: mol_type = other DNA

SEQ ID NO: 190250 - DNA, 80 bp, synthetic construct; identical to SEQ ID NO: 5520
  source 1..80: mol_type = other DNA

SEQ ID NO: 190251 - DNA, 80 bp, synthetic construct; identical to SEQ ID NO: 5521
  source 1..80: mol_type = other DNA

SEQ ID NO: 190252 - DNA, 80 bp, synthetic construct; identical to SEQ ID NO: 5522
  source 1..80: mol_type = other DNA

SEQ ID NO: 190253 - DNA, 80 bp, synthetic construct; identical to SEQ ID NO: 5523
  source 1..80: mol_type = other DNA

SEQ ID NO: 190254 - DNA, 80 bp, synthetic construct; identical to SEQ ID NO: 5524
  source 1..80: mol_type = other DNA

SEQ ID NO: 190255 - DNA, 80 bp, synthetic construct; identical to SEQ ID NO: 5525
  source 1..80: mol_type = other DNA

SEQ ID NO: 190256 - DNA, 80 bp, synthetic construct; identical to SEQ ID NO: 5526
  source 1..80: mol_type = other DNA

SEQ ID NO: 190257 - DNA, 80 bp, synthetic construct; identical to SEQ ID NO: 5527
  source 1..80: mol_type = other DNA

SEQ ID NO: 190258 - DNA, 80 bp, synthetic construct; identical to SEQ ID NO: 5528
  source 1..80: mol_type = other DNA

SEQ ID NO: 190259 - DNA, 80 bp, synthetic construct; identical to SEQ ID NO: 5529
  source 1..80: mol_type = other DNA

SEQ ID NO: 190260 - DNA, 80 bp, synthetic construct; identical to SEQ ID NO: 5530
  source 1..80: mol_type = other DNA

SEQ ID NO: 190261 - DNA, 80 bp, synthetic construct; identical to SEQ ID NO: 5531
  source 1..80: mol_type = other DNA

SEQ ID NO: 190262 - DNA, 80 bp, synthetic construct; identical to SEQ ID NO: 5532
  source 1..80: mol_type = other DNA

SEQ ID NO: 190263 - DNA, 80 bp, synthetic construct; identical to SEQ ID NO: 5533
  source 1..80: mol_type = other DNA

SEQ ID NO: 190264 - DNA, 80 bp, synthetic construct; identical to SEQ ID NO: 5534
  source 1..80: mol_type = other DNA

SEQ ID NO: 190265 - DNA, 80 bp, synthetic construct; identical to SEQ ID NO: 5535
  source 1..80: mol_type = other DNA

SEQ ID NO: 190266 - DNA, 80 bp, synthetic construct; identical to SEQ ID NO: 5536
  source 1..80: mol_type = other DNA

SEQ ID NO: 190267 - DNA, 80 bp, synthetic construct; identical to SEQ ID NO: 5537
  source 1..80: mol_type = other DNA

SEQ ID NO: 190268 - DNA, 80 bp, synthetic construct; identical to SEQ ID NO: 5538
  source 1..80: mol_type = other DNA

SEQ ID NO: 190269 - DNA, 80 bp, synthetic construct; identical to SEQ ID NO: 5539
  source 1..80: mol_type = other DNA

SEQ ID NO: 190270 - DNA, 80 bp, synthetic construct; identical to SEQ ID NO: 5540
  source 1..80: mol_type = other DNA

SEQ ID NO: 190271 - DNA, 80 bp, synthetic construct; identical to SEQ ID NO: 5541
  source 1..80: mol_type = other DNA

SEQ ID NO: 190272 - DNA, 80 bp, synthetic construct; identical to SEQ ID NO: 5542
  source 1..80: mol_type = other DNA

SEQ ID NO: 190273 - DNA, 80 bp, synthetic construct; identical to SEQ ID NO: 5543
  source 1..80: mol_type = other DNA

SEQ ID NO: 190274 - DNA, 80 bp, synthetic construct; identical to SEQ ID NO: 5544
  source 1..80: mol_type = other DNA

SEQ ID NO: 190275 - DNA, 80 bp, synthetic construct; identical to SEQ ID NO: 5545
  source 1..80: mol_type = other DNA

SEQ ID NO: 190276 - DNA, 80 bp, synthetic construct; identical to SEQ ID NO: 5546
  source 1..80: mol_type = other DNA

SEQ ID NO: 190277 - DNA, 80 bp, synthetic construct; identical to SEQ ID NO: 5547
  source 1..80: mol_type = other DNA

SEQ ID NO: 190278 - DNA, 80 bp, synthetic construct; identical to SEQ ID NO: 5548
  source 1..80: mol_type = other DNA

SEQ ID NO: 190279 - DNA, 80 bp, synthetic construct; identical to SEQ ID NO: 5549
  source 1..80: mol_type = other DNA

SEQ ID NO: 190280 - DNA, 80 bp, synthetic construct; identical to SEQ ID NO: 5550
  source 1..80: mol_type = other DNA

SEQ ID NO: 190281 - DNA, 80 bp, synthetic construct; identical to SEQ ID NO: 5551
  source 1..80: mol_type = other DNA

SEQ ID NO: 190282 - DNA, 80 bp, synthetic construct; identical to SEQ ID NO: 5552
  source 1..80: mol_type = other DNA

SEQ ID NO: 190283 - DNA, 80 bp, synthetic construct; identical to SEQ ID NO: 5553
  source 1..80: mol_type = other DNA

SEQ ID NO: 190284 - DNA, 80 bp, synthetic construct; identical to SEQ ID NO: 5554
  source 1..80: mol_type = other DNA

SEQ ID NO: 190285 - DNA, 80 bp, synthetic construct; identical to SEQ ID NO: 5555
  source 1..80: mol_type = other DNA

SEQ ID NO: 190286 - DNA, 80 bp, synthetic construct; identical to SEQ ID NO: 5556
  source 1..80: mol_type = other DNA

SEQ ID NO: 190287 - DNA, 80 bp, synthetic construct; identical to SEQ ID NO: 5557
  source 1..80: mol_type = other DNA

SEQ ID NO: 190288 - DNA, 80 bp, synthetic construct; identical to SEQ ID NO: 5558
  source 1..80: mol_type = other DNA

SEQ ID NO: 190289 - DNA, 80 bp, synthetic construct; identical to SEQ ID NO: 5559
  source 1..80: mol_type = other DNA

SEQ ID NO: 190290 - DNA, 80 bp, synthetic construct; identical to SEQ ID NO: 5560
  source 1..80: mol_type = other DNA

SEQ ID NO: 190291 - DNA, 80 bp, synthetic construct; identical to SEQ ID NO: 5561
  source 1..80: mol_type = other DNA

SEQ ID NO: 190292 - DNA, 80 bp, synthetic construct; identical to SEQ ID NO: 5562
  source 1..80: mol_type = other DNA

SEQ ID NO: 190293 - DNA, 80 bp, synthetic construct; identical to SEQ ID NO: 5563
  source 1..80: mol_type = other DNA

SEQ ID NO: 190294 - DNA, 80 bp, synthetic construct; identical to SEQ ID NO: 5564
  source 1..80: mol_type = other DNA

SEQ ID NO: 190295 - DNA, 80 bp, synthetic construct; identical to SEQ ID NO: 5565
  source 1..80: mol_type = other DNA

SEQ ID NO: 190296 - DNA, 80 bp, synthetic construct; identical to SEQ ID NO: 5566
  source 1..80: mol_type = other DNA

SEQ ID NO: 190297 - DNA, 80 bp, synthetic construct; identical to SEQ ID NO: 5567
  source 1..80: mol_type = other DNA

SEQ ID NO: 190298 - DNA, 80 bp, synthetic construct; identical to SEQ ID NO: 5568
  source 1..80: mol_type = other DNA

SEQ ID NO: 190299 - DNA, 80 bp, synthetic construct; identical to SEQ ID NO: 5569
  source 1..80: mol_type = other DNA

SEQ ID NO: 190300 - DNA, 80 bp, synthetic construct; identical to SEQ ID NO: 5570
  source 1..80: mol_type = other DNA

SEQ ID NO: 190301 - DNA, 80 bp, synthetic construct; identical to SEQ ID NO: 5571
  source 1..80: mol_type = other DNA

SEQ ID NO: 190302 - DNA, 80 bp, synthetic construct; identical to SEQ ID NO: 5572
  source 1..80: mol_type = other DNA

SEQ ID NO: 190303 - DNA, 80 bp, synthetic construct; identical to SEQ ID NO: 5573
  source 1..80: mol_type = other DNA

SEQ ID NO: 190304 - DNA, 80 bp, synthetic construct; identical to SEQ ID NO: 5574
  source 1..80: mol_type = other DNA

SEQ ID NO: 190305 - DNA, 80 bp, synthetic construct; identical to SEQ ID NO: 5575
  source 1..80: mol_type = other DNA

SEQ ID NO: 190306 - DNA, 80 bp, synthetic construct; identical to SEQ ID NO: 5576
  source 1..80: mol_type = other DNA

SEQ ID NO: 190307 - DNA, 80 bp, synthetic construct; identical to SEQ ID NO: 5577
  source 1..80: mol_type = other DNA

SEQ ID NO: 190308 - DNA, 80 bp, synthetic construct; identical to SEQ ID NO: 5578
  source 1..80: mol_type = other DNA

SEQ ID NO: 190309 - DNA, 80 bp, synthetic construct; identical to SEQ ID NO: 5579
  source 1..80: mol_type = other DNA

SEQ ID NO: 190310 - DNA, 80 bp, synthetic construct; identical to SEQ ID NO: 5580
  source 1..80: mol_type = other DNA

SEQ ID NO: 190311 - DNA, 80 bp, synthetic construct; identical to SEQ ID NO: 5581
  source 1..80: mol_type = other DNA

SEQ ID NO: 190312 - DNA, 80 bp, synthetic construct; identical to SEQ ID NO: 5582
  source 1..80: mol_type = other DNA

SEQ ID NO: 190313 - DNA, 80 bp, synthetic construct; identical to SEQ ID NO: 5583
  source 1..80: mol_type = other DNA

SEQ ID NO: 190314 - DNA, 80 bp, synthetic construct; identical to SEQ ID NO: 5584
  source 1..80: mol_type = other DNA

SEQ ID NO: 190315 - DNA, 80 bp, synthetic construct; identical to SEQ ID NO: 5585
  source 1..80: mol_type = other DNA

SEQ ID NO: 190316 - DNA, 80 bp, synthetic construct; identical to SEQ ID NO: 5586
  source 1..80: mol_type = other DNA

SEQ ID NO: 190317 - DNA, 80 bp, synthetic construct; identical to SEQ ID NO: 5587
  source 1..80: mol_type = other DNA

SEQ ID NO: 190318 - DNA, 80 bp, synthetic construct; identical to SEQ ID NO: 5588
  source 1..80: mol_type = other DNA

SEQ ID NO: 190319 - DNA, 80 bp, synthetic construct; identical to SEQ ID NO: 5589
  source 1..80: mol_type = other DNA

SEQ ID NO: 190320 - DNA, 80 bp, synthetic construct; identical to SEQ ID NO: 5590
  source 1..80: mol_type = other DNA

SEQ ID NO: 190321 - DNA, 80 bp, synthetic construct; identical to SEQ ID NO: 5591
  source 1..80: mol_type = other DNA

SEQ ID NO: 190322 - DNA, 80 bp, synthetic construct; identical to SEQ ID NO: 5592
  source 1..80: mol_type = other DNA

SEQ ID NO: 190323 - DNA, 80 bp, synthetic construct; identical to SEQ ID NO: 5593
  source 1..80: mol_type = other DNA

SEQ ID NO: 190324 - DNA, 80 bp, synthetic construct; identical to SEQ ID NO: 5594
  source 1..80: mol_type = other DNA

SEQ ID NO: 190325 - DNA, 80 bp, synthetic construct; identical to SEQ ID NO: 5595
  source 1..80: mol_type = other DNA

SEQ ID NO: 190326 - DNA, 80 bp, synthetic construct; identical to SEQ ID NO: 5596
  source 1..80: mol_type = other DNA

SEQ ID NO: 190327 - DNA, 80 bp, synthetic construct; identical to SEQ ID NO: 5597
  source 1..80: mol_type = other DNA

SEQ ID NO: 190328 - DNA, 80 bp, synthetic construct; identical to SEQ ID NO: 5598
  source 1..80: mol_type = other DNA

SEQ ID NO: 190329 - DNA, 80 bp, synthetic construct; identical to SEQ ID NO: 5599
  source 1..80: mol_type = other DNA

SEQ ID NO: 190330 - DNA, 80 bp, synthetic construct; identical to SEQ ID NO: 5600
  source 1..80: mol_type = other DNA

SEQ ID NO: 190331 - DNA, 80 bp, synthetic construct; identical to SEQ ID NO: 5601
  source 1..80: mol_type = other DNA

SEQ ID NO: 190332 - DNA, 80 bp, synthetic construct; identical to SEQ ID NO: 5602
  source 1..80: mol_type = other DNA

SEQ ID NO: 190333 - DNA, 80 bp, synthetic construct; identical to SEQ ID NO: 5603
  source 1..80: mol_type = other DNA

SEQ ID NO: 190334 - DNA, 80 bp, synthetic construct; identical to SEQ ID NO: 5604
  source 1..80: mol_type = other DNA

SEQ ID NO: 190335 - DNA, 80 bp, synthetic construct; identical to SEQ ID NO: 5605
  source 1..80: mol_type = other DNA

SEQ ID NO: 190336 - DNA, 80 bp, synthetic construct; identical to SEQ ID NO: 5606
  source 1..80: mol_type = other DNA

SEQ ID NO: 190337 - DNA, 80 bp, synthetic construct; identical to SEQ ID NO: 5607
  source 1..80: mol_type = other DNA

SEQ ID NO: 190338 - DNA, 80 bp, synthetic construct; identical to SEQ ID NO: 5608
  source 1..80: mol_type = other DNA

SEQ ID NO: 190339 - DNA, 80 bp, synthetic construct; identical to SEQ ID NO: 5609
  source 1..80: mol_type = other DNA

SEQ ID NO: 190340 - DNA, 80 bp, synthetic construct; identical to SEQ ID NO: 5610
  source 1..80: mol_type = other DNA

SEQ ID NO: 190341 - DNA, 80 bp, synthetic construct; identical to SEQ ID NO: 5611
  source 1..80: mol_type = other DNA

SEQ ID NO: 190342 - DNA, 80 bp, synthetic construct; identical to SEQ ID NO: 5612
  source 1..80: mol_type = other DNA

SEQ ID NO: 190343 - DNA, 80 bp, synthetic construct; identical to SEQ ID NO: 5613
  source 1..80: mol_type = other DNA

SEQ ID NO: 190344 - DNA, 80 bp, synthetic construct; identical to SEQ ID NO: 5614
  source 1..80: mol_type = other DNA

SEQ ID NO: 190345 - DNA, 80 bp, synthetic construct; identical to SEQ ID NO: 5615
  source 1..80: mol_type = other DNA

SEQ ID NO: 190346 - DNA, 80 bp, synthetic construct; identical to SEQ ID NO: 5616
  source 1..80: mol_type = other DNA

SEQ ID NO: 190347 - DNA, 80 bp, synthetic construct; identical to SEQ ID NO: 5617
  source 1..80: mol_type = other DNA

SEQ ID NO: 190348 - DNA, 80 bp, synthetic construct; identical to SEQ ID NO: 5618
  source 1..80: mol_type = other DNA

SEQ ID NO: 190349 - DNA, 80 bp, synthetic construct; identical to SEQ ID NO: 5619
  source 1..80: mol_type = other DNA

SEQ ID NO: 190350 - DNA, 80 bp, synthetic construct; identical to SEQ ID NO: 5620
  source 1..80: mol_type = other DNA

SEQ ID NO: 190351 - DNA, 80 bp, synthetic construct; identical to SEQ ID NO: 5621
  source 1..80: mol_type = other DNA

SEQ ID NO: 190352 - DNA, 80 bp, synthetic construct; identical to SEQ ID NO: 5622
  source 1..80: mol_type = other DNA

SEQ ID NO: 190353 - DNA, 80 bp, synthetic construct; identical to SEQ ID NO: 5623
  source 1..80: mol_type = other DNA

SEQ ID NO: 190354 - DNA, 80 bp, synthetic construct; identical to SEQ ID NO: 5624
  source 1..80: mol_type = other DNA

SEQ ID NO: 190355 - DNA, 80 bp, synthetic construct; identical to SEQ ID NO: 5625
  source 1..80: mol_type = other DNA

SEQ ID NO: 190356 - DNA, 80 bp, synthetic construct; identical to SEQ ID NO: 5626
  source 1..80: mol_type = other DNA

SEQ ID NO: 190357 - DNA, 80 bp, synthetic construct; identical to SEQ ID NO: 5627
  source 1..80: mol_type = other DNA

SEQ ID NO: 190358 - DNA, 80 bp, synthetic construct; identical to SEQ ID NO: 5628
  source 1..80: mol_type = other DNA

SEQ ID NO: 190359 - DNA, 80 bp, synthetic construct; identical to SEQ ID NO: 5629
  source 1..80: mol_type = other DNA

SEQ ID NO: 190360 - DNA, 80 bp, synthetic construct; identical to SEQ ID NO: 5630
  source 1..80: mol_type = other DNA

SEQ ID NO: 190361 - DNA, 80 bp, synthetic construct; identical to SEQ ID NO: 5631
  source 1..80: mol_type = other DNA

SEQ ID NO: 190362 - DNA, 80 bp, synthetic construct; identical to SEQ ID NO: 5632
  source 1..80: mol_type = other DNA

SEQ ID NO: 190363 - DNA, 80 bp, synthetic construct; identical to SEQ ID NO: 5633
  source 1..80: mol_type = other DNA

SEQ ID NO: 190364 - DNA, 80 bp, synthetic construct; identical to SEQ ID NO: 5634
  source 1..80: mol_type = other DNA

SEQ ID NO: 190365 - DNA, 80 bp, synthetic construct; identical to SEQ ID NO: 5635
  source 1..80: mol_type = other DNA

SEQ ID NO: 190366 - DNA, 80 bp, synthetic construct; identical to SEQ ID NO: 5636
  source 1..80: mol_type = other DNA

SEQ ID NO: 190367 - DNA, 80 bp, synthetic construct; identical to SEQ ID NO: 5637
  source 1..80: mol_type = other DNA

SEQ ID NO: 190368 - DNA, 80 bp, synthetic construct; identical to SEQ ID NO: 5638
  source 1..80: mol_type = other DNA

SEQ ID NO: 190369 - DNA, 80 bp, synthetic construct; identical to SEQ ID NO: 5639
  source 1..80: mol_type = other DNA

SEQ ID NO: 190370 - DNA, 80 bp, synthetic construct; identical to SEQ ID NO: 5640
  source 1..80: mol_type = other DNA

SEQ ID NO: 190371 - DNA, 80 bp, synthetic construct; identical to SEQ ID NO: 5641
  source 1..80: mol_type = other DNA

SEQ ID NO: 190372 - DNA, 80 bp, synthetic construct; identical to SEQ ID NO: 5642
  source 1..80: mol_type = other DNA

SEQ ID NO: 190373 - DNA, 80 bp, synthetic construct; identical to SEQ ID NO: 5643
  source 1..80: mol_type = other DNA

SEQ ID NO: 190374 - DNA, 80 bp, synthetic construct; identical to SEQ ID NO: 5644
  source 1..80: mol_type = other DNA

SEQ ID NO: 190375 - DNA, 80 bp, synthetic construct; identical to SEQ ID NO: 5645
  source 1..80: mol_type = other DNA

SEQ ID NO: 190376 - DNA, 80 bp, synthetic construct; identical to SEQ ID NO: 5646
  source 1..80: mol_type = other DNA

SEQ ID NO: 190377 - DNA, 80 bp, synthetic construct; identical to SEQ ID NO: 5647
  source 1..80: mol_type = other DNA

SEQ ID NO: 190378 - DNA, 80 bp, synthetic construct; identical to SEQ ID NO: 5648
  source 1..80: mol_type = other DNA

SEQ ID NO: 190379 - DNA, 80 bp, synthetic construct; identical to SEQ ID NO: 5649
  source 1..80: mol_type = other DNA

SEQ ID NO: 190380 - DNA, 80 bp, synthetic construct; identical to SEQ ID NO: 5650
  source 1..80: mol_type = other DNA

SEQ ID NO: 190381 - DNA, 80 bp, synthetic construct; identical to SEQ ID NO: 5651
  source 1..80: mol_type = other DNA

SEQ ID NO: 190382 - DNA, 80 bp, synthetic construct; identical to SEQ ID NO: 5652
  source 1..80: mol_type = other DNA

SEQ ID NO: 190383 - DNA, 80 bp, synthetic construct; identical to SEQ ID NO: 5653
  source 1..80: mol_type = other DNA

SEQ ID NO: 190384 - DNA, 80 bp, synthetic construct; identical to SEQ ID NO: 5654
  source 1..80: mol_type = other DNA

SEQ ID NO: 190385 - DNA, 80 bp, synthetic construct; identical to SEQ ID NO: 5655
  source 1..80: mol_type = other DNA

SEQ ID NO: 190386 - DNA, 80 bp, synthetic construct; identical to SEQ ID NO: 5656
  source 1..80: mol_type = other DNA

SEQ ID NO: 190387 - DNA, 80 bp, synthetic construct; identical to SEQ ID NO: 5657
  source 1..80: mol_type = other DNA

SEQ ID NO: 190388 - DNA, 80 bp, synthetic construct; identical to SEQ ID NO: 5658
  source 1..80: mol_type = other DNA

SEQ ID NO: 190389 - DNA, 80 bp, synthetic construct; identical to SEQ ID NO: 5659
  source 1..80: mol_type = other DNA

SEQ ID NO: 190390 - DNA, 80 bp, synthetic construct; identical to SEQ ID NO: 5660
  source 1..80: mol_type = other DNA

SEQ ID NO: 190391 - DNA, 80 bp, synthetic construct; identical to SEQ ID NO: 5661
  source 1..80: mol_type = other DNA

SEQ ID NO: 190392 - DNA, 80 bp, synthetic construct; identical to SEQ ID NO: 5662
  source 1..80: mol_type = other DNA

SEQ ID NO: 190393 - DNA, 80 bp, synthetic construct; identical to SEQ ID NO: 5663
  source 1..80: mol_type = other DNA

SEQ ID NO: 190394 - DNA, 80 bp, synthetic construct; identical to SEQ ID NO: 5664
  source 1..80: mol_type = other DNA

SEQ ID NO: 190395 - DNA, 80 bp, synthetic construct; identical to SEQ ID NO: 5665
  source 1..80: mol_type = other DNA

SEQ ID NO: 190396 - DNA, 80 bp, synthetic construct; identical to SEQ ID NO: 5666
  source 1..80: mol_type = other DNA

SEQ ID NO: 190397 - DNA, 80 bp, synthetic construct; identical to SEQ ID NO: 5667
  source 1..80: mol_type = other DNA

SEQ ID NO: 190398 - DNA, 80 bp, synthetic construct; identical to SEQ ID NO: 5668
  source 1..80: mol_type = other DNA

SEQ ID NO: 190399 - DNA, 80 bp, synthetic construct; identical to SEQ ID NO: 5669
  source 1..80: mol_type = other DNA

SEQ ID NO: 190400 - DNA, 80 bp, synthetic construct; identical to SEQ ID NO: 5670
  source 1..80: mol_type = other DNA

SEQ ID NO: 190401 - DNA, 80 bp, synthetic construct; identical to SEQ ID NO: 5671
  source 1..80: mol_type = other DNA

SEQ ID NO: 190402 - DNA, 80 bp, synthetic construct; identical to SEQ ID NO: 5672
  source 1..80: mol_type = other DNA

SEQ ID NO: 190403 - DNA, 80 bp, synthetic construct; identical to SEQ ID NO: 5673
  source 1..80: mol_type = other DNA

SEQ ID NO: 190404 - DNA, 80 bp, synthetic construct; identical to SEQ ID NO: 5674
  source 1..80: mol_type = other DNA

SEQ ID NO: 190405 - DNA, 80 bp, synthetic construct; identical to SEQ ID NO: 5675
  source 1..80: mol_type = other DNA

SEQ ID NO: 190406 - DNA, 80 bp, synthetic construct; identical to SEQ ID NO: 5676
  source 1..80: mol_type = other DNA

SEQ ID NO: 190407 - DNA, 80 bp, synthetic construct; identical to SEQ ID NO: 5677
  source 1..80: mol_type = other DNA

SEQ ID NO: 190408 - DNA, 80 bp, synthetic construct; identical to SEQ ID NO: 5678
  source 1..80: mol_type = other DNA

SEQ ID NO: 190409 - DNA, 80 bp, synthetic construct; identical to SEQ ID NO: 5679
  source 1..80: mol_type = other DNA

SEQ ID NO: 190410 - DNA, 80 bp, synthetic construct; identical to SEQ ID NO: 5680
  source 1..80: mol_type = other DNA

SEQ ID NO: 190411 - DNA, 80 bp, synthetic construct; identical to SEQ ID NO: 5681
  source 1..80: mol_type = other DNA

SEQ ID NO: 190412 - DNA, 80 bp, synthetic construct; identical to SEQ ID NO: 5682
  source 1..80: mol_type = other DNA

SEQ ID NO: 190413 - DNA, 80 bp, synthetic construct; identical to SEQ ID NO: 5683
  source 1..80: mol_type = other DNA

SEQ ID NO: 190414 - DNA, 80 bp, synthetic construct; identical to SEQ ID NO: 5684
  source 1..80: mol_type = other DNA

SEQ ID NO: 190415 - DNA, 80 bp, synthetic construct; identical to SEQ ID NO: 5685
  source 1..80: mol_type = other DNA

SEQ ID NO: 190416 - DNA, 80 bp, synthetic construct; identical to SEQ ID NO: 5686
  source 1..80: mol_type = other DNA

SEQ ID NO: 190417 - DNA, 80 bp, synthetic construct; identical to SEQ ID NO: 5687
  source 1..80: mol_type = other DNA

SEQ ID NO: 190418 - DNA, 80 bp, synthetic construct; identical to SEQ ID NO: 5688
  source 1..80: mol_type = other DNA

SEQ ID NO: 190419 - DNA, 80 bp, synthetic construct; identical to SEQ ID NO: 5689
  source 1..80: mol_type = other DNA

SEQ ID NO: 190420 - DNA, 80 bp, synthetic construct; identical to SEQ ID NO: 5690
  source 1..80: mol_type = other DNA

SEQ ID NO: 190421 - DNA, 80 bp, synthetic construct; identical to SEQ ID NO: 5691
  source 1..80: mol_type = other DNA

SEQ ID NO: 190422 - DNA, 80 bp, synthetic construct; identical to SEQ ID NO: 5692
  source 1..80: mol_type = other DNA

SEQ ID NO: 190423 - DNA, 80 bp, synthetic construct; identical to SEQ ID NO: 5693
  source 1..80: mol_type = other DNA

SEQ ID NO: 190424 - DNA, 80 bp, synthetic construct; identical to SEQ ID NO: 5694
  source 1..80: mol_type = other DNA

SEQ ID NO: 190425 - DNA, 80 bp, synthetic construct; identical to SEQ ID NO: 5695
  source 1..80: mol_type = other DNA

SEQ ID NO: 190426 - DNA, 80 bp, synthetic construct; identical to SEQ ID NO: 5696
  source 1..80: mol_type = other DNA

SEQ ID NO: 190427 - DNA, 80 bp, synthetic construct; identical to SEQ ID NO: 5697
  source 1..80: mol_type = other DNA

SEQ ID NO: 190428 - DNA, 80 bp, synthetic construct; identical to SEQ ID NO: 5698
  source 1..80: mol_type = other DNA

SEQ ID NO: 190429 - DNA, 80 bp, synthetic construct; identical to SEQ ID NO: 5699
  source 1..80: mol_type = other DNA

SEQ ID NO: 190430 - DNA, 80 bp, synthetic construct; identical to SEQ ID NO: 5700
  source 1..80: mol_type = other DNA

SEQ ID NO: 190431 - DNA, 80 bp, synthetic construct; identical to SEQ ID NO: 5701
  source 1..80: mol_type = other DNA

SEQ ID NO: 190432 - DNA, 80 bp, synthetic construct; identical to SEQ ID NO: 5702
  source 1..80: mol_type = other DNA

SEQ ID NO: 190433 - DNA, 80 bp, synthetic construct; identical to SEQ ID NO: 5703
  source 1..80: mol_type = other DNA

SEQ ID NO: 190434 - DNA, 80 bp, synthetic construct; identical to SEQ ID NO: 5704
  source 1..80: mol_type = other DNA

SEQ ID NO: 190435 - DNA, 80 bp, synthetic construct; identical to SEQ ID NO: 5705
  source 1..80: mol_type = other DNA

SEQ ID NO: 190436 - DNA, 80 bp, synthetic construct; identical to SEQ ID NO: 5706
  source 1..80: mol_type = other DNA

SEQ ID NO: 190437 - DNA, 80 bp, synthetic construct; identical to SEQ ID NO: 5707
  source 1..80: mol_type = other DNA

SEQ ID NO: 190438 - DNA, 80 bp, synthetic construct; identical to SEQ ID NO: 5708
  source 1..80: mol_type = other DNA

SEQ ID NO: 190439 - DNA, 80 bp, synthetic construct; identical to SEQ ID NO: 5709
  source 1..80: mol_type = other DNA

SEQ ID NO: 190440 - DNA, 80 bp, synthetic construct; identical to SEQ ID NO: 5710
  source 1..80: mol_type = other DNA

SEQ ID NO: 190441 - DNA, 80 bp, synthetic construct; identical to SEQ ID NO: 5711
  source 1..80: mol_type = other DNA

SEQ ID NO: 190442 - DNA, 80 bp, synthetic construct; identical to SEQ ID NO: 5712
  source 1..80: mol_type = other DNA

SEQ ID NO: 190443 - DNA, 80 bp, synthetic construct; identical to SEQ ID NO: 5713
  source 1..80: mol_type = other DNA

SEQ ID NO: 190444 - DNA, 80 bp, synthetic construct; identical to SEQ ID NO: 5714
  source 1..80: mol_type = other DNA

SEQ ID NO: 190445 - DNA, 80 bp, synthetic construct; identical to SEQ ID NO: 5715
  source 1..80: mol_type = other DNA

SEQ ID NO: 190446 - DNA, 80 bp, synthetic construct; identical to SEQ ID NO: 5716
  source 1..80: mol_type = other DNA

SEQ ID NO: 190447 - DNA, 80 bp, synthetic construct; identical to SEQ ID NO: 5717
  source 1..80: mol_type = other DNA

SEQ ID NO: 190448 - DNA, 80 bp, synthetic construct; identical to SEQ ID NO: 5718
  source 1..80: mol_type = other DNA

SEQ ID NO: 190449 - DNA, 80 bp, synthetic construct; identical to SEQ ID NO: 5719
  source 1..80: mol_type = other DNA

SEQ ID NO: 190450 - DNA, 80 bp, synthetic construct; identical to SEQ ID NO: 5720
  source 1..80: mol_type = other DNA

SEQ ID NO: 190451 - DNA, 80 bp, synthetic construct; identical to SEQ ID NO: 5721
  source 1..80: mol_type = other DNA

SEQ ID NO: 190452 - DNA, 80 bp, synthetic construct; identical to SEQ ID NO: 5722
  source 1..80: mol_type = other DNA

SEQ ID NO: 190453 - DNA, 80 bp, synthetic construct; identical to SEQ ID NO: 5723
  source 1..80: mol_type = other DNA

SEQ ID NO: 190454 - DNA, 80 bp, synthetic construct; identical to SEQ ID NO: 5724
  source 1..80: mol_type = other DNA

SEQ ID NO: 190455 - DNA, 80 bp, synthetic construct; identical to SEQ ID NO: 5725
  source 1..80: mol_type = other DNA

SEQ ID NO: 190456 - DNA, 80 bp, synthetic construct; identical to SEQ ID NO: 5726
  source 1..80: mol_type = other DNA

SEQ ID NO: 190457 - DNA, 80 bp, synthetic construct; identical to SEQ ID NO: 5727
  source 1..80: mol_type = other DNA

SEQ ID NO: 190458 - DNA, 80 bp, synthetic construct; identical to SEQ ID NO: 5728
  source 1..80: mol_type = other DNA

SEQ ID NO: 190459 - DNA, 80 bp, synthetic construct; identical to SEQ ID NO: 5729
  source 1..80: mol_type = other DNA

SEQ ID NO: 190460 - DNA, 80 bp, synthetic construct; identical to SEQ ID NO: 5730
  source 1..80: mol_type = other DNA

SEQ ID NO: 190461 - DNA, 80 bp, synthetic construct; identical to SEQ ID NO: 5731
  source 1..80: mol_type = other DNA

SEQ ID NO: 190462 - DNA, 80 bp, synthetic construct; identical to SEQ ID NO: 5732
  source 1..80: mol_type = other DNA

SEQ ID NO: 190463 - DNA, 80 bp, synthetic construct; identical to SEQ ID NO: 5733
  source 1..80: mol_type = other DNA

SEQ ID NO: 190464 - DNA, 80 bp, synthetic construct; identical to SEQ ID NO: 5734
  source 1..80: mol_type = other DNA

SEQ ID NO: 190465 - DNA, 80 bp, synthetic construct; identical to SEQ ID NO: 5735
  source 1..80: mol_type = other DNA

SEQ ID NO: 190466 - DNA, 80 bp, synthetic construct; identical to SEQ ID NO: 5736
  source 1..80: mol_type = other DNA

SEQ ID NO: 190467 - DNA, 80 bp, synthetic construct; identical to SEQ ID NO: 5737
  source 1..80: mol_type = other DNA

SEQ ID NO: 190468 - DNA, 80 bp, synthetic construct; identical to SEQ ID NO: 5738
  source 1..80: mol_type = other DNA

SEQ ID NO: 190469 - DNA, 80 bp, synthetic construct; identical to SEQ ID NO: 5739
  source 1..80: mol_type = other DNA

SEQ ID NO: 190470 - DNA, 80 bp, synthetic construct; identical to SEQ ID NO: 5740
  source 1..80: mol_type = other DNA

SEQ ID NO: 190471 - DNA, 80 bp, synthetic construct; identical to SEQ ID NO: 5741
  source 1..80: mol_type = other DNA

SEQ ID NO: 190472 - DNA, 80 bp, synthetic construct; identical to SEQ ID NO: 5742
  source 1..80: mol_type = other DNA

SEQ ID NO: 190473 - DNA, 80 bp, synthetic construct; identical to SEQ ID NO: 5743
  source 1..80: mol_type = other DNA

SEQ ID NO: 190474 - DNA, 80 bp, synthetic construct; identical to SEQ ID NO: 5744
  source 1..80: mol_type = other DNA

SEQ ID NO: 190475 - DNA, 80 bp, synthetic construct; identical to SEQ ID NO: 5745
  source 1..80: mol_type = other DNA

SEQ ID NO: 190476 - DNA, 80 bp, synthetic construct; identical to SEQ ID NO: 5746
  source 1..80: mol_type = other DNA

SEQ ID NO: 190477 - DNA, 80 bp, synthetic construct; identical to SEQ ID NO: 5747
  source 1..80: mol_type = other DNA

SEQ ID NO: 190478 - DNA, 80 bp, synthetic construct; identical to SEQ ID NO: 5748
  source 1..80: mol_type = other DNA

SEQ ID NO: 190479 - DNA, 80 bp, synthetic construct; identical to SEQ ID NO: 5749
  source 1..80: mol_type = other DNA

SEQ ID NO: 190480 - DNA, 80 bp, synthetic construct; identical to SEQ ID NO: 5750
  source 1..80: mol_type = other DNA

SEQ ID NO: 190481 - DNA, 80 bp, synthetic construct; identical to SEQ ID NO: 5751
  source 1..80: mol_type = other DNA

SEQ ID NO: 190482 - DNA, 80 bp, synthetic construct; identical to SEQ ID NO: 5752
  source 1..80: mol_type = other DNA

SEQ ID NO: 190483 - DNA, 80 bp, synthetic construct; identical to SEQ ID NO: 5753
  source 1..80: mol_type = other DNA

SEQ ID NO: 190484 - DNA, 80 bp, synthetic construct; identical to SEQ ID NO: 5754
  source 1..80: mol_type = other DNA

SEQ ID NO: 190485 - DNA, 80 bp, synthetic construct; identical to SEQ ID NO: 5755
  source 1..80: mol_type = other DNA

SEQ ID NO: 190486 - DNA, 80 bp, synthetic construct; identical to SEQ ID NO: 5756
  source 1..80: mol_type = other DNA

SEQ ID NO: 190487 - DNA, 80 bp, synthetic construct; identical to SEQ ID NO: 5757
  source 1..80: mol_type = other DNA

SEQ ID NO: 190488 - DNA, 80 bp, synthetic construct; identical to SEQ ID NO: 5758
  source 1..80: mol_type = other DNA

SEQ ID NO: 190489 - DNA, 80 bp, synthetic construct; identical to SEQ ID NO: 5759
  source 1..80: mol_type = other DNA

SEQ ID NO: 190490 - DNA, 80 bp, synthetic construct; identical to SEQ ID NO: 5760
  source 1..80: mol_type = other DNA

SEQ ID NO: 190491 - DNA, 80 bp, synthetic construct; identical to SEQ ID NO: 5761
  source 1..80: mol_type = other DNA

SEQ ID NO: 190492 - DNA, 80 bp, synthetic construct; identical to SEQ ID NO: 5762
  source 1..80: mol_type = other DNA

SEQ ID NO: 190493 - DNA, 80 bp, synthetic construct; identical to SEQ ID NO: 5763
  source 1..80: mol_type = other DNA

SEQ ID NO: 190494 - DNA, 80 bp, synthetic construct; identical to SEQ ID NO: 5764
  source 1..80: mol_type = other DNA

SEQ ID NO: 190495 - DNA, 80 bp, synthetic construct; identical to SEQ ID NO: 5765
  source 1..80: mol_type = other DNA

SEQ ID NO: 190496 - DNA, 80 bp, synthetic construct; identical to SEQ ID NO: 5766
  source 1..80: mol_type = other DNA

SEQ ID NO: 190497 - DNA, 80 bp, synthetic construct; identical to SEQ ID NO: 5767
  source 1..80: mol_type = other DNA

SEQ ID NO: 190498 - DNA, 80 bp, synthetic construct; identical to SEQ ID NO: 5768
  source 1..80: mol_type = other DNA

SEQ ID NO: 190499 - DNA, 80 bp, synthetic construct; identical to SEQ ID NO: 5769
  source 1..80: mol_type = other DNA

SEQ ID NO: 190500 - DNA, 80 bp, synthetic construct; identical to SEQ ID NO: 5770
  source 1..80: mol_type = other DNA

SEQ ID NO: 190501 - DNA, 80 bp, synthetic construct; identical to SEQ ID NO: 5771
  source 1..80: mol_type = other DNA

SEQ ID NO: 190502 - DNA, 80 bp, synthetic construct; identical to SEQ ID NO: 5772
  source 1..80: mol_type = other DNA

SEQ ID NO: 190503 - DNA, 80 bp, synthetic construct; identical to SEQ ID NO: 5773
  source 1..80: mol_type = other DNA

SEQ ID NO: 190504 - DNA, 80 bp, synthetic construct; identical to SEQ ID NO: 5774
  source 1..80: mol_type = other DNA

SEQ ID NO: 190505 - DNA, 80 bp, synthetic construct; identical to SEQ ID NO: 5775
  source 1..80: mol_type = other DNA

SEQ ID NO: 190506 - DNA, 80 bp, synthetic construct; identical to SEQ ID NO: 5776
  source 1..80: mol_type = other DNA

SEQ ID NO: 190507 - DNA, 80 bp, synthetic construct; identical to SEQ ID NO: 5777
  source 1..80: mol_type = other DNA

SEQ ID NO: 190508 - DNA, 80 bp, synthetic construct; identical to SEQ ID NO: 5778
  source 1..80: mol_type = other DNA

SEQ ID NO: 190509 - DNA, 80 bp, synthetic construct; identical to SEQ ID NO: 5779
  source 1..80: mol_type = other DNA

SEQ ID NO: 190510 - DNA, 80 bp, synthetic construct; identical to SEQ ID NO: 5780
  source 1..80: mol_type = other DNA

SEQ ID NO: 190511 - DNA, 80 bp, synthetic construct; identical to SEQ ID NO: 5781
  source 1..80: mol_type = other DNA

SEQ ID NO: 190512 - DNA, 80 bp, synthetic construct; identical to SEQ ID NO: 5782
  source 1..80: mol_type = other DNA

SEQ ID NO: 190513 - DNA, 80 bp, synthetic construct; identical to SEQ ID NO: 5783
  source 1..80: mol_type = other DNA

SEQ ID NO: 190514 - DNA, 80 bp, synthetic construct; identical to SEQ ID NO: 5784
  source 1..80: mol_type = other DNA

SEQ ID NO: 190515 - DNA, 80 bp, synthetic construct; identical to SEQ ID NO: 5785
  source 1..80: mol_type = other DNA

SEQ ID NO: 190516 - DNA, 80 bp, synthetic construct; identical to SEQ ID NO: 5786
  source 1..80: mol_type = other DNA

SEQ ID NO: 190517 - DNA, 80 bp, synthetic construct; identical to SEQ ID NO: 5787
  source 1..80: mol_type = other DNA

SEQ ID NO: 190518 - DNA, 80 bp, synthetic construct; identical to SEQ ID NO: 5788
  source 1..80: mol_type = other DNA

SEQ ID NO: 190519 - DNA, 80 bp, synthetic construct; identical to SEQ ID NO: 5789
  source 1..80: mol_type = other DNA

SEQ ID NO: 190520 - DNA, 80 bp, synthetic construct; identical to SEQ ID NO: 5790
  source 1..80: mol_type = other DNA

SEQ ID NO: 190521 - DNA, 80 bp, synthetic construct; identical to SEQ ID NO: 5791
  source 1..80: mol_type = other DNA

SEQ ID NO: 190522 - DNA, 80 bp, synthetic construct; identical to SEQ ID NO: 5792
  source 1..80: mol_type = other DNA

SEQ ID NO: 190523 - DNA, 80 bp, synthetic construct; identical to SEQ ID NO: 5793
  source 1..80: mol_type = other DNA

SEQ ID NO: 190524 - DNA, 80 bp, synthetic construct; identical to SEQ ID NO: 5794
  source 1..80: mol_type = other DNA

SEQ ID NO: 190525 - DNA, 80 bp, synthetic construct; identical to SEQ ID NO: 5795
  source 1..80: mol_type = other DNA

SEQ ID NO: 190526 - DNA, 80 bp, synthetic construct; identical to SEQ ID NO: 5796
  source 1..80: mol_type = other DNA

SEQ ID NO: 190527 - DNA, 80 bp, synthetic construct; identical to SEQ ID NO: 5797
  source 1..80: mol_type = other DNA

SEQ ID NO: 190528 - DNA, 80 bp, synthetic construct; identical to SEQ ID NO: 5798
  source 1..80: mol_type = other DNA

SEQ ID NO: 190529 - DNA, 80 bp, synthetic construct; identical to SEQ ID NO: 5799
  source 1..80: mol_type = other DNA

SEQ ID NO: 190530 - DNA, 80 bp, synthetic construct; identical to SEQ ID NO: 5800
  source 1..80: mol_type = other DNA

SEQ ID NO: 190531 - DNA, 80 bp, synthetic construct; identical to SEQ ID NO: 5801
  source 1..80: mol_type = other DNA

SEQ ID NO: 190532 - DNA, 80 bp, synthetic construct; identical to SEQ ID NO: 5802
  source 1..80: mol_type = other DNA

SEQ ID NO: 190533 - DNA, 80 bp, synthetic construct; identical to SEQ ID NO: 5803
  source 1..80: mol_type = other DNA

SEQ ID NO: 190534 - DNA, 80 bp, synthetic construct; identical to SEQ ID NO: 5804
  source 1..80: mol_type = other DNA

SEQ ID NO: 190535 - DNA, 80 bp, synthetic construct; identical to SEQ ID NO: 5805
  source 1..80: mol_type = other DNA

SEQ ID NO: 190536 - DNA, 80 bp, synthetic construct; identical to SEQ ID NO: 5806
  source 1..80: mol_type = other DNA

SEQ ID NO: 190537 - DNA, 80 bp, synthetic construct; identical to SEQ ID NO: 5807
  source 1..80: mol_type = other DNA

SEQ ID NO: 190538 - DNA, 80 bp, synthetic construct; identical to SEQ ID NO: 5808
  source 1..80: mol_type = other DNA

SEQ ID NO: 190539 - DNA, 80 bp, synthetic construct; identical to SEQ ID NO: 5809
  source 1..80: mol_type = other DNA

SEQ ID NO: 190540 - DNA, 80 bp, synthetic construct; identical to SEQ ID NO: 5810
  source 1..80: mol_type = other DNA

SEQ ID NO: 190541 - DNA, 80 bp, synthetic construct; identical to SEQ ID NO: 5811
  source 1..80: mol_type = other DNA

SEQ ID NO: 190542 - DNA, 80 bp, synthetic construct; identical to SEQ ID NO: 5812
  source 1..80: mol_type = other DNA

SEQ ID NO: 190543 - DNA, 80 bp, synthetic construct; identical to SEQ ID NO: 5813
  source 1..80: mol_type = other DNA

SEQ ID NO: 190544 - DNA, 80 bp, synthetic construct; identical to SEQ ID NO: 5814
  source 1..80: mol_type = other DNA

SEQ ID NO: 190545 - DNA, 80 bp, synthetic construct; identical to SEQ ID NO: 5815
  source 1..80: mol_type = other DNA

SEQ ID NO: 190546 - DNA, 80 bp, synthetic construct; identical to SEQ ID NO: 5816
  source 1..80: mol_type = other DNA

SEQ ID NO: 190547 - DNA, 80 bp, synthetic construct; identical to SEQ ID NO: 5817
  source 1..80: mol_type = other DNA

SEQ ID NO: 190548 - DNA, 80 bp, synthetic construct; identical to SEQ ID NO: 5818
  source 1..80: mol_type = other DNA

SEQ ID NO: 190549 - DNA, 80 bp, synthetic construct; identical to SEQ ID NO: 5819
  source 1..80: mol_type = other DNA

SEQ ID NO: 190550 - DNA, 80 bp, synthetic construct; identical to SEQ ID NO: 5820
  source 1..80: mol_type = other DNA

SEQ ID NO: 190551 - DNA, 80 bp, synthetic construct; identical to SEQ ID NO: 5821
  source 1..80: mol_type = other DNA

SEQ ID NO: 190552 - DNA, 80 bp, synthetic construct; identical to SEQ ID NO: 5822
  source 1..80: mol_type = other DNA

SEQ ID NO: 190553 - DNA, 80 bp, synthetic construct; identical to SEQ ID NO: 5823
  source 1..80: mol_type = other DNA

SEQ ID NO: 190554 - DNA, 80 bp, synthetic construct; identical to SEQ ID NO: 5824
  source 1..80: mol_type = other DNA

SEQ ID NO: 190555 - DNA, 80 bp, synthetic construct; identical to SEQ ID NO: 5825
  source 1..80: mol_type = other DNA

SEQ ID NO: 190556 - DNA, 80 bp, synthetic construct; identical to SEQ ID NO: 5826
  source 1..80: mol_type = other DNA

SEQ ID NO: 190557 - DNA, 80 bp, synthetic construct; identical to SEQ ID NO: 5827
  source 1..80: mol_type = other DNA

SEQ ID NO: 190558 - DNA, 80 bp, synthetic construct; identical to SEQ ID NO: 5828
  source 1..80: mol_type = other DNA

SEQ ID NO: 190559 - DNA, 80 bp, synthetic construct; identical to SEQ ID NO: 5829
  source 1..80: mol_type = other DNA

SEQ ID NO: 190560 - DNA, 80 bp, synthetic construct; identical to SEQ ID NO: 5830
  source 1..80: mol_type = other DNA

SEQ ID NO: 190561 - DNA, 80 bp, synthetic construct; identical to SEQ ID NO: 5831
  source 1..80: mol_type = other DNA

SEQ ID NO: 190562 - DNA, 80 bp, synthetic construct; identical to SEQ ID NO: 5832
  source 1..80: mol_type = other DNA

SEQ ID NO: 190563 - DNA, 80 bp, synthetic construct; identical to SEQ ID NO: 5833
  source 1..80: mol_type = other DNA

SEQ ID NO: 190564 - DNA, 80 bp, synthetic construct; identical to SEQ ID NO: 5834
  source 1..80: mol_type = other DNA

SEQ ID NO: 190565 - DNA, 80 bp, synthetic construct; identical to SEQ ID NO: 5835
  source 1..80: mol_type = other DNA

SEQ ID NO: 190566 - DNA, 80 bp, synthetic construct; identical to SEQ ID NO: 5836
  source 1..80: mol_type = other DNA

SEQ ID NO: 190567 - DNA, 80 bp, synthetic construct; identical to SEQ ID NO: 5837
  source 1..80: mol_type = other DNA

SEQ ID NO: 190568 - DNA, 80 bp, synthetic construct; identical to SEQ ID NO: 5838
  source 1..80: mol_type = other DNA

SEQ ID NO: 190569 - DNA, 80 bp, synthetic construct; identical to SEQ ID NO: 5839
  source 1..80: mol_type = other DNA

SEQ ID NO: 190570 - DNA, 80 bp, synthetic construct; identical to SEQ ID NO: 5840
  source 1..80: mol_type = other DNA

SEQ ID NO: 190571 - DNA, 80 bp, synthetic construct; identical to SEQ ID NO: 5841
  source 1..80: mol_type = other DNA

SEQ ID NO: 190572 - DNA, 80 bp, synthetic construct; identical to SEQ ID NO: 5842
  source 1..80: mol_type = other DNA

SEQ ID NO: 190573 - DNA, 80 bp, synthetic construct; identical to SEQ ID NO: 5843
  source 1..80: mol_type = other DNA

SEQ ID NO: 190574 - DNA, 80 bp, synthetic construct; identical to SEQ ID NO: 5844
  source 1..80: mol_type = other DNA

SEQ ID NO: 190575 - DNA, 80 bp, synthetic construct; identical to SEQ ID NO: 5845
  source 1..80: mol_type = other DNA

SEQ ID NO: 190576 - DNA, 80 bp, synthetic construct; identical to SEQ ID NO: 5846
  source 1..80: mol_type = other DNA

SEQ ID NO: 190577 - DNA, 80 bp, synthetic construct; identical to SEQ ID NO: 5847
  source 1..80: mol_type = other DNA

SEQ ID NO: 190578 - DNA, 80 bp, synthetic construct; identical to SEQ ID NO: 5848
  source 1..80: mol_type = other DNA

SEQ ID NO: 190579 - DNA, 80 bp, synthetic construct; identical to SEQ ID NO: 5849
  source 1..80: mol_type = other DNA

SEQ ID NO: 190580 - DNA, 80 bp, synthetic construct; identical to SEQ ID NO: 5850
  source 1..80: mol_type = other DNA

SEQ ID NO: 190581 - DNA, 80 bp, synthetic construct; identical to SEQ ID NO: 5851
  source 1..80: mol_type = other DNA

SEQ ID NO: 190582 - DNA, 80 bp, synthetic construct; identical to SEQ ID NO: 5852
  source 1..80: mol_type = other DNA

SEQ ID NO: 190583 - DNA, 80 bp, synthetic construct; identical to SEQ ID NO: 5853
  source 1..80: mol_type = other DNA

SEQ ID NO: 190584 - DNA, 80 bp, synthetic construct; identical to SEQ ID NO: 5854
  source 1..80: mol_type = other DNA

SEQ ID NO: 190585 - DNA, 80 bp, synthetic construct; identical to SEQ ID NO: 5855
  source 1..80: mol_type = other DNA

SEQ ID NO: 190586 - DNA, 80 bp, synthetic construct; identical to SEQ ID NO: 5856
  source 1..80: mol_type = other DNA

SEQ ID NO: 190587 - DNA, 80 bp, synthetic construct; identical to SEQ ID NO: 5857
  source 1..80: mol_type = other DNA

SEQ ID NO: 190588 - DNA, 80 bp, synthetic construct; identical to SEQ ID NO: 5858
  source 1..80: mol_type = other DNA

SEQ ID NO: 190589 - DNA, 80 bp, synthetic construct; identical to SEQ ID NO: 5859
  source 1..80: mol_type = other DNA

SEQ ID NO: 190590 - DNA, 80 bp, synthetic construct; identical to SEQ ID NO: 5860
  source 1..80: mol_type = other DNA

SEQ ID NO: 190591 - DNA, 80 bp, synthetic construct; identical to SEQ ID NO: 5861
  source 1..80: mol_type = other DNA

SEQ ID NO: 190592 - DNA, 80 bp, synthetic construct; identical to SEQ ID NO: 5862
  source 1..80: mol_type = other DNA

SEQ ID NO: 190593 - DNA, 80 bp, synthetic construct; identical to SEQ ID NO: 5863
  source 1..80: mol_type = other DNA

SEQ ID NO: 190594 - DNA, 80 bp, synthetic construct; identical to SEQ ID NO: 5864
  source 1..80: mol_type = other DNA

SEQ ID NO: 190595 - DNA, 80 bp, synthetic construct; identical to SEQ ID NO: 5865
  source 1..80: mol_type = other DNA

SEQ ID NO: 190596 - DNA, 80 bp, synthetic construct; identical to SEQ ID NO: 5866
  source 1..80: mol_type = other DNA

SEQ ID NO: 190597 - DNA, 80 bp, synthetic construct; identical to SEQ ID NO: 5867
  source 1..80: mol_type = other DNA

SEQ ID NO: 190598 - DNA, 80 bp, synthetic construct; identical to SEQ ID NO: 5868
  source 1..80: mol_type = other DNA

SEQ ID NO: 190599 - DNA, 80 bp, synthetic construct; identical to SEQ ID NO: 5869
  source 1..80: mol_type = other DNA

SEQ ID NO: 190600 - DNA, 80 bp, synthetic construct; identical to SEQ ID NO: 5870
  source 1..80: mol_type = other DNA

SEQ ID NO: 190601 - DNA, 80 bp, synthetic construct; identical to SEQ ID NO: 5871
  source 1..80: mol_type = other DNA

SEQ ID NO: 190602 - DNA, 80 bp, synthetic construct; identical to SEQ ID NO: 5872
  source 1..80: mol_type = other DNA

SEQ ID NO: 190603 - DNA, 80 bp, synthetic construct; identical to SEQ ID NO: 5873
  source 1..80: mol_type = other DNA

SEQ ID NO: 190604 - DNA, 80 bp, synthetic construct; identical to SEQ ID NO: 5874
  source 1..80: mol_type = other DNA

SEQ ID NO: 190605 - DNA, 80 bp, synthetic construct; identical to SEQ ID NO: 5875
  source 1..80: mol_type = other DNA

SEQ ID NO: 190606 - DNA, 80 bp, synthetic construct; identical to SEQ ID NO: 5876
  source 1..80: mol_type = other DNA

SEQ ID NO: 190607 - DNA, 80 bp, synthetic construct; identical to SEQ ID NO: 5877
  source 1..80: mol_type = other DNA

SEQ ID NO: 190608 - DNA, 80 bp, synthetic construct; identical to SEQ ID NO: 5878
  source 1..80: mol_type = other DNA

SEQ ID NO: 190609 - DNA, 80 bp, synthetic construct; identical to SEQ ID NO: 5879
  source 1..80: mol_type = other DNA

SEQ ID NO: 190610 - DNA, 80 bp, synthetic construct; identical to SEQ ID NO: 5880
  source 1..80: mol_type = other DNA

SEQ ID NO: 190611 - DNA, 80 bp, synthetic construct; identical to SEQ ID NO: 5881
  source 1..80: mol_type = other DNA

SEQ ID NO: 190612 - DNA, 80 bp, synthetic construct; identical to SEQ ID NO: 5882
  source 1..80: mol_type = other DNA

SEQ ID NO: 190613 - DNA, 80 bp, synthetic construct; identical to SEQ ID NO: 5883
  source 1..80: mol_type = other DNA

SEQ ID NO: 190614 - DNA, 80 bp, synthetic construct; identical to SEQ ID NO: 5884
  source 1..80: mol_type = other DNA

SEQ ID NO: 190615 - DNA, 80 bp, synthetic construct; identical to SEQ ID NO: 5885
  source 1..80: mol_type = other DNA

SEQ ID NO: 190616 - DNA, 80 bp, synthetic construct; identical to SEQ ID NO: 5886
  source 1..80: mol_type = other DNA

SEQ ID NO: 190617 - DNA, 80 bp, synthetic construct; identical to SEQ ID NO: 5887
  source 1..80: mol_type = other DNA

SEQ ID NO: 190618 - DNA, 80 bp, synthetic construct; identical to SEQ ID NO: 5888
  source 1..80: mol_type = other DNA

SEQ ID NO: 190619 - DNA, 80 bp, synthetic construct; identical to SEQ ID NO: 5889
  source 1..80: mol_type = other DNA

SEQ ID NO: 190620 - DNA, 80 bp, synthetic construct; identical to SEQ ID NO: 5890
  source 1..80: mol_type = other DNA

SEQ ID NO: 190621 - DNA, 80 bp, synthetic construct; identical to SEQ ID NO: 5891
  source 1..80: mol_type = other DNA

SEQ ID NO: 190622 - DNA, 80 bp, synthetic construct; identical to SEQ ID NO: 5892
  source 1..80: mol_type = other DNA

SEQ ID NO: 190623 - DNA, 80 bp, synthetic construct; identical to SEQ ID NO: 5893
  source 1..80: mol_type = other DNA

SEQ ID NO: 190624 - DNA, 80 bp, synthetic construct; identical to SEQ ID NO: 5894
  source 1..80: mol_type = other DNA

SEQ ID NO: 190625 - DNA, 80 bp, synthetic construct; identical to SEQ ID NO: 5895
  source 1..80: mol_type = other DNA

SEQ ID NO: 190626 - DNA, 80 bp, synthetic construct; identical to SEQ ID NO: 5896
  source 1..80: mol_type = other DNA

SEQ ID NO: 190627 - DNA, 80 bp, synthetic construct; identical to SEQ ID NO: 5897
  source 1..80: mol_type = other DNA

SEQ ID NO: 190628 - DNA, 80 bp, synthetic construct; identical to SEQ ID NO: 5898
  source 1..80: mol_type = other DNA

SEQ ID NO: 190629 - DNA, 80 bp, synthetic construct; identical to SEQ ID NO: 5899
  source 1..80: mol_type = other DNA

SEQ ID NO: 190630 - DNA, 80 bp, synthetic construct; identical to SEQ ID NO: 5900
  source 1..80: mol_type = other DNA

SEQ ID NO: 190631 - DNA, 80 bp, synthetic construct; identical to SEQ ID NO: 5901
  source 1..80: mol_type = other DNA

SEQ ID NO: 190632 - DNA, 80 bp, synthetic construct; identical to SEQ ID NO: 5902
  source 1..80: mol_type = other DNA

SEQ ID NO: 190633 - DNA, 80 bp, synthetic construct; identical to SEQ ID NO: 5903
  source 1..80: mol_type = other DNA

SEQ ID NO: 190634 - DNA, 80 bp, synthetic construct; identical to SEQ ID NO: 5904
  source 1..80: mol_type = other DNA

SEQ ID NO: 190635 - DNA, 80 bp, synthetic construct; identical to SEQ ID NO: 5905
  source 1..80: mol_type = other DNA

SEQ ID NO: 190636 - DNA, 80 bp, synthetic construct; identical to SEQ ID NO: 5906
  source 1..80: mol_type = other DNA

SEQ ID NO: 190637 - DNA, 80 bp, synthetic construct; identical to SEQ ID NO: 5907
  source 1..80: mol_type = other DNA

SEQ ID NO: 190638 - DNA, 80 bp, synthetic construct; identical to SEQ ID NO: 5908
  source 1..80: mol_type = other DNA

SEQ ID NO: 190639 - DNA, 80 bp, synthetic construct; identical to SEQ ID NO: 5909
  source 1..80: mol_type = other DNA

SEQ ID NO: 190640 - DNA, 80 bp, synthetic construct; identical to SEQ ID NO: 5910
  source 1..80: mol_type = other DNA

SEQ ID NO: 190641 - DNA, 80 bp, synthetic construct; identical to SEQ ID NO: 5911
  source 1..80: mol_type = other DNA

SEQ ID NO: 190642 - DNA, 80 bp, synthetic construct; identical to SEQ ID NO: 5912
  source 1..80: mol_type = other DNA

SEQ ID NO: 190643 - DNA, 80 bp, synthetic construct; identical to SEQ ID NO: 5913
  source 1..80: mol_type = other DNA

SEQ ID NO: 190644 - DNA, 80 bp, synthetic construct; identical to SEQ ID NO: 5914
  source 1..80: mol_type = other DNA

SEQ ID NO: 190645 - DNA, 80 bp, synthetic construct; identical to SEQ ID NO: 5915
  source 1..80: mol_type = other DNA

SEQ ID NO: 190646 - DNA, 80 bp, synthetic construct; identical to SEQ ID NO: 5916
  source 1..80: mol_type = other DNA

SEQ ID NO: 190647 - DNA, 80 bp, synthetic construct; identical to SEQ ID NO: 5917
  source 1..80: mol_type = other DNA

SEQ ID NO: 190648 - DNA, 80 bp, synthetic construct; identical to SEQ ID NO: 5918
  source 1..80: mol_type = other DNA

SEQ ID NO: 190649 - DNA, 80 bp, synthetic construct; identical to SEQ ID NO: 5919
  source 1..80: mol_type = other DNA

SEQ ID NO: 190650 - DNA, 80 bp, synthetic construct; identical to SEQ ID NO: 5920
  source 1..80: mol_type = other DNA

SEQ ID NO: 190651 - DNA, 80 bp, synthetic construct; identical to SEQ ID NO: 5921
  source 1..80: mol_type = other DNA

SEQ ID NO: 190652 - DNA, 80 bp, synthetic construct; identical to SEQ ID NO: 5922
  source 1..80: mol_type = other DNA

SEQ ID NO: 190653 - DNA, 80 bp, synthetic construct; identical to SEQ ID NO: 5923
  source 1..80: mol_type = other DNA

SEQ ID NO: 190654 - DNA, 80 bp, synthetic construct; identical to SEQ ID NO: 5924
  source 1..80: mol_type = other DNA

SEQ ID NO: 190655 - DNA, 80 bp, synthetic construct; identical to SEQ ID NO: 5925
  source 1..80: mol_type = other DNA

SEQ ID NO: 190656 - DNA, 80 bp, synthetic construct; identical to SEQ ID NO: 5926
  source 1..80: mol_type = other DNA

SEQ ID NO: 190657 - DNA, 80 bp, synthetic construct; identical to SEQ ID NO: 5927
  source 1..80: mol_type = other DNA

SEQ ID NO: 190658 - DNA, 80 bp, synthetic construct; identical to SEQ ID NO: 5928
  source 1..80: mol_type = other DNA

SEQ ID NO: 190659 - DNA, 80 bp, synthetic construct; identical to SEQ ID NO: 5929
  source 1..80: mol_type = other DNA

SEQ ID NO: 190660 - DNA, 80 bp, synthetic construct; identical to SEQ ID NO: 5930
  source 1..80: mol_type = other DNA

SEQ ID NO: 190661 - DNA, 80 bp, synthetic construct; identical to SEQ ID NO: 5931
  source 1..80: mol_type = other DNA

SEQ ID NO: 190662 - DNA, 80 bp, synthetic construct; identical to SEQ ID NO: 5932
  source 1..80: mol_type = other DNA

SEQ ID NO: 190663 - DNA, 80 bp, synthetic construct; identical to SEQ ID NO: 5933
  source 1..80: mol_type = other DNA

SEQ ID NO: 190664 - DNA, 80 bp, synthetic construct; identical to SEQ ID NO: 5934
  source 1..80: mol_type = other DNA

SEQ ID NO: 190665 - DNA, 80 bp, synthetic construct; identical to SEQ ID NO: 5935
  source 1..80: mol_type = other DNA

SEQ ID NO: 190666 - DNA, 80 bp, synthetic construct; identical to SEQ ID NO: 5936
  source 1..80: mol_type = other DNA

SEQ ID NO: 190667 - DNA, 80 bp, synthetic construct; identical to SEQ ID NO: 5937
  source 1..80: mol_type = other DNA

SEQ ID NO: 190668 - DNA, 80 bp, synthetic construct; identical to SEQ ID NO: 5938
  source 1..80: mol_type = other DNA

SEQ ID NO: 190669 - DNA, 80 bp, synthetic construct; identical to SEQ ID NO: 5939
  source 1..80: mol_type = other DNA

SEQ ID NO: 190670 - DNA, 80 bp, synthetic construct; identical to SEQ ID NO: 5940
  source 1..80: mol_type = other DNA

SEQ ID NO: 190671 - DNA, 80 bp, synthetic construct; identical to SEQ ID NO: 5941
  source 1..80: mol_type = other DNA

SEQ ID NO: 190672 - DNA, 80 bp, synthetic construct; identical to SEQ ID NO: 5942
  source 1..80: mol_type = other DNA

SEQ ID NO: 190673 - DNA, 80 bp, synthetic construct; identical to SEQ ID NO: 5943
  source 1..80: mol_type = other DNA

SEQ ID NO: 190674 - DNA, 80 bp, synthetic construct; identical to SEQ ID NO: 5944
  source 1..80: mol_type = other DNA

SEQ ID NO: 190675 - DNA, 80 bp, synthetic construct; identical to SEQ ID NO: 5945
  source 1..80: mol_type = other DNA

SEQ ID NO: 190676 - DNA, 80 bp, synthetic construct; identical to SEQ ID NO: 5946
  source 1..80: mol_type = other DNA

SEQ ID NO: 190677 - DNA, 80 bp, synthetic construct; identical to SEQ ID NO: 5947
  source 1..80: mol_type = other DNA

SEQ ID NO: 190678 - DNA, 80 bp, synthetic construct; identical to SEQ ID NO: 5948
  source 1..80: mol_type = other DNA

SEQ ID NO: 190679 - DNA, 80 bp, synthetic construct; identical to SEQ ID NO: 5949
  source 1..80: mol_type = other DNA

SEQ ID NO: 190680 - DNA, 80 bp, synthetic construct; identical to SEQ ID NO: 5950
  source 1..80: mol_type = other DNA

SEQ ID NO: 190681 - DNA, 80 bp, synthetic construct; identical to SEQ ID NO: 5951
  source 1..80: mol_type = other DNA

SEQ ID NO: 190682 - DNA, 80 bp, synthetic construct; identical to SEQ ID NO: 5952
  source 1..80: mol_type = other DNA

SEQ ID NO: 190683 - DNA, 80 bp, synthetic construct; identical to SEQ ID NO: 5953
  source 1..80: mol_type = other DNA

SEQ ID NO: 190684 - DNA, 80 bp, synthetic construct; identical to SEQ ID NO: 5954
  source 1..80: mol_type = other DNA

SEQ ID NO: 190685 - DNA, 80 bp, synthetic construct; identical to SEQ ID NO: 5955
  source 1..80: mol_type = other DNA

SEQ ID NO: 190686 - DNA, 80 bp, synthetic construct; identical to SEQ ID NO: 5956
  source 1..80: mol_type = other DNA

SEQ ID NO: 190687 - DNA, 80 bp, synthetic construct; identical to SEQ ID NO: 5957
  source 1..80: mol_type = other DNA

SEQ ID NO: 190688 - DNA, 80 bp, synthetic construct; identical to SEQ ID NO: 5958
  source 1..80: mol_type = other DNA

SEQ ID NO: 190689 - DNA, 80 bp, synthetic construct; identical to SEQ ID NO: 5959
  source 1..80: mol_type = other DNA

SEQ ID NO: 190690 - DNA, 80 bp, synthetic construct; identical to SEQ ID NO: 5960
  source 1..80: mol_type = other DNA

SEQ ID NO: 190691 - DNA, 80 bp, synthetic construct; identical to SEQ ID NO: 5961
  source 1..80: mol_type = other DNA

SEQ ID NO: 190692 - DNA, 80 bp, synthetic construct; identical to SEQ ID NO: 5962
  source 1..80: mol_type = other DNA

SEQ ID NO: 190693 - DNA, 80 bp, synthetic construct; identical to SEQ ID NO: 5963
  source 1..80: mol_type = other DNA

SEQ ID NO: 190694 - DNA, 80 bp, synthetic construct; identical to SEQ ID NO: 5964
  source 1..80: mol_type = other DNA

SEQ ID NO: 190695 - DNA, 80 bp, synthetic construct; identical to SEQ ID NO: 5965
  source 1..80: mol_type = other DNA

SEQ ID NO: 190696 - DNA, 80 bp, synthetic construct; identical to SEQ ID NO: 5966
  source 1..80: mol_type = other DNA

SEQ ID NO: 190697 - DNA, 80 bp, synthetic construct; identical to SEQ ID NO: 5967
  source 1..80: mol_type = other DNA

SEQ ID NO: 190698 - DNA, 80 bp, synthetic construct; identical to SEQ ID NO: 5968
  source 1..80: mol_type = other DNA

SEQ ID NO: 190699 - DNA, 80 bp, synthetic construct; identical to SEQ ID NO: 5969
  source 1..80: mol_type = other DNA

SEQ ID NO: 190700 - DNA, 80 bp, synthetic construct; identical to SEQ ID NO: 5970
  source 1..80: mol_type = other DNA

SEQ ID NO: 190701 - DNA, 80 bp, synthetic construct; identical to SEQ ID NO: 5971
  source 1..80: mol_type = other DNA

SEQ ID NO: 190702 - DNA, 80 bp, synthetic construct; identical to SEQ ID NO: 5972
  source 1..80: mol_type = other DNA

SEQ ID NO: 190703 - DNA, 80 bp, synthetic construct; identical to SEQ ID NO: 5973
  source 1..80: mol_type = other DNA

SEQ ID NO: 190704 - DNA, 80 bp, synthetic construct; identical to SEQ ID NO: 5974
  source 1..80: mol_type = other DNA

SEQ ID NO: 190705 - DNA, 80 bp, synthetic construct; identical to SEQ ID NO: 5975
  source 1..80: mol_type = other DNA

SEQ ID NO: 190706 - DNA, 80 bp, synthetic construct; identical to SEQ ID NO: 5976
  source 1..80: mol_type = other DNA

SEQ ID NO: 190707 - DNA, 80 bp, synthetic construct; identical to SEQ ID NO: 5977
  source 1..80: mol_type = other DNA

SEQ ID NO: 190708 - DNA, 80 bp, synthetic construct; identical to SEQ ID NO: 5978
  source 1..80: mol_type = other DNA

SEQ ID NO: 190709 - DNA, 80 bp, synthetic construct; identical to SEQ ID NO: 5979
  source 1..80: mol_type = other DNA

SEQ ID NO: 190710 - DNA, 80 bp, synthetic construct; identical to SEQ ID NO: 5980
  source 1..80: mol_type = other DNA

SEQ ID NO: 190711 - DNA, 80 bp, synthetic construct; identical to SEQ ID NO: 5981
  source 1..80: mol_type = other DNA

SEQ ID NO: 190712 - DNA, 80 bp, synthetic construct; identical to SEQ ID NO: 5982
  source 1..80: mol_type = other DNA

SEQ ID NO: 190713 - DNA, 80 bp, synthetic construct; identical to SEQ ID NO: 5983
  source 1..80: mol_type = other DNA

SEQ ID NO: 190714 - DNA, 80 bp, synthetic construct; identical to SEQ ID NO: 5984
  source 1..80: mol_type = other DNA

SEQ ID NO: 190715 - DNA, 80 bp, synthetic construct; identical to SEQ ID NO: 5985
  source 1..80: mol_type = other DNA

SEQ ID NO: 190716 - DNA, 80 bp, synthetic construct; identical to SEQ ID NO: 5986
  source 1..80: mol_type = other DNA

SEQ ID NO: 190717 - DNA, 80 bp, synthetic construct; identical to SEQ ID NO: 5987
  source 1..80: mol_type = other DNA

SEQ ID NO: 190718 - DNA, 80 bp, synthetic construct; identical to SEQ ID NO: 5988
  source 1..80: mol_type = other DNA

SEQ ID NO: 190719 - DNA, 80 bp, synthetic construct; identical to SEQ ID NO: 5989
  source 1..80: mol_type = other DNA

SEQ ID NO: 190720 - DNA, 80 bp, synthetic construct; identical to SEQ ID NO: 5990
  source 1..80: mol_type = other DNA

SEQ ID NO: 190721 - DNA, 80 bp, synthetic construct; identical to SEQ ID NO: 5991
  source 1..80: mol_type = other DNA

SEQ ID NO: 190722 - DNA, 80 bp, synthetic construct; identical to SEQ ID NO: 5992
  source 1..80: mol_type = other DNA

SEQ ID NO: 190723 - DNA, 80 bp, synthetic construct; identical to SEQ ID NO: 5993
  source 1..80: mol_type = other DNA

SEQ ID NO: 190724 - DNA, 80 bp, synthetic construct; identical to SEQ ID NO: 5994
  source 1..80: mol_type = other DNA

SEQ ID NO: 190725 - DNA, 80 bp, synthetic construct; identical to SEQ ID NO: 5995
  source 1..80: mol_type = other DNA

SEQ ID NO: 190726 - DNA, 80 bp, synthetic construct; identical to SEQ ID NO: 5996
  source 1..80: mol_type = other DNA

SEQ ID NO: 190727 - DNA, 80 bp, synthetic construct; identical to SEQ ID NO: 5997
  source 1..80: mol_type = other DNA

SEQ ID NO: 190728 - DNA, 80 bp, synthetic construct; identical to SEQ ID NO: 5998
  source 1..80: mol_type = other DNA

SEQ ID NO: 190729 - DNA, 80 bp, synthetic construct; identical to SEQ ID NO: 5999
  source 1..80: mol_type = other DNA

SEQ ID NO: 190730 - DNA, 80 bp, synthetic construct; identical to SEQ ID NO: 6000
  source 1..80: mol_type = other DNA

SEQ ID NO: 190731 - DNA, 80 bp, synthetic construct; identical to SEQ ID NO: 6001
  source 1..80: mol_type = other DNA

SEQ ID NO: 190732 - DNA, 80 bp, synthetic construct; identical to SEQ ID NO: 6002
  source 1..80: mol_type = other DNA

SEQ ID NO: 190733 - DNA, 80 bp, synthetic construct; identical to SEQ ID NO: 6003
  source 1..80: mol_type = other DNA

SEQ ID NO: 190734 - DNA, 80 bp, synthetic construct; identical to SEQ ID NO: 6004
  source 1..80: mol_type = other DNA

SEQ ID NO: 190735 - DNA, 80 bp, synthetic construct; identical to SEQ ID NO: 6005
  source 1..80: mol_type = other DNA

SEQ ID NO: 190736 - DNA, 80 bp, synthetic construct; identical to SEQ ID NO: 6006
  source 1..80: mol_type = other DNA

SEQ ID NO: 190737 - DNA, 80 bp, synthetic construct; identical to SEQ ID NO: 6007
  source 1..80: mol_type = other DNA

SEQ ID NO: 190738 - DNA, 80 bp, synthetic construct; identical to SEQ ID NO: 6008
  source 1..80: mol_type = other DNA

SEQ ID NO: 190739 - DNA, 80 bp, synthetic construct; identical to SEQ ID NO: 6009
  source 1..80: mol_type = other DNA

SEQ ID NO: 190740 - DNA, 80 bp, synthetic construct; identical to SEQ ID NO: 6010
  source 1..80: mol_type = other DNA

SEQ ID NO: 190741 - DNA, 80 bp, synthetic construct; identical to SEQ ID NO: 6011
  source 1..80: mol_type = other DNA

SEQ ID NO: 190742 - DNA, 80 bp, synthetic construct; identical to SEQ ID NO: 6012
  source 1..80: mol_type = other DNA

SEQ ID NO: 190743 - DNA, 80 bp, synthetic construct; identical to SEQ ID NO: 6013
  source 1..80: mol_type = other DNA

SEQ ID NO: 190744 - DNA, 80 bp, synthetic construct; identical to SEQ ID NO: 6014
  source 1..80: mol_type = other DNA

SEQ ID NO: 190745 - DNA, 80 bp, synthetic construct; identical to SEQ ID NO: 6015
  source 1..80: mol_type = other DNA

SEQ ID NO: 190746 - DNA, 80 bp, synthetic construct; identical to SEQ ID NO: 6016
  source 1..80: mol_type = other DNA

SEQ ID NO: 190747 - DNA, 80 bp, synthetic construct; identical to SEQ ID NO: 6017
  source 1..80: mol_type = other DNA

SEQ ID NO: 190748 - DNA, 80 bp, synthetic construct; identical to SEQ ID NO: 6018
  source 1..80: mol_type = other DNA

SEQ ID NO: 190749 - DNA, 80 bp, synthetic construct; identical to SEQ ID NO: 6019
  source 1..80: mol_type = other DNA

SEQ ID NO: 190750 - DNA, 80 bp, synthetic construct; identical to SEQ ID NO: 6020
  source 1..80: mol_type = other DNA

SEQ ID NO: 190751 - DNA, 80 bp, synthetic construct; identical to SEQ ID NO: 6021
  source 1..80: mol_type = other DNA

SEQ ID NO: 190752 - DNA, 80 bp, synthetic construct; identical to SEQ ID NO: 6022
  source 1..80: mol_type = other DNA

SEQ ID NO: 190753 - DNA, 80 bp, synthetic construct; identical to SEQ ID NO: 6023
  source 1..80: mol_type = other DNA

SEQ ID NO: 190754 - DNA, 80 bp, synthetic construct; identical to SEQ ID NO: 6024
  source 1..80: mol_type = other DNA

SEQ ID NO: 190755 - DNA, 80 bp, synthetic construct; identical to SEQ ID NO: 6025
  source 1..80: mol_type = other DNA

SEQ ID NO: 190756 - DNA, 80 bp, synthetic construct; identical to SEQ ID NO: 6026
  source 1..80: mol_type = other DNA

SEQ ID NO: 190757 - DNA, 80 bp, synthetic construct; identical to SEQ ID NO: 6027
  source 1..80: mol_type = other DNA

SEQ ID NO: 190758 - DNA, 80 bp, synthetic construct; identical to SEQ ID NO: 6028
  source 1..80: mol_type = other DNA

SEQ ID NO: 190759 - DNA, 80 bp, synthetic construct; identical to SEQ ID NO: 6029
  source 1..80: mol_type = other DNA

SEQ ID NO: 190760 - DNA, 80 bp, synthetic construct; identical to SEQ ID NO: 6030
  source 1..80: mol_type = other DNA

SEQ ID NO: 190761 - DNA, 80 bp, synthetic construct; identical to SEQ ID NO: 6031
  source 1..80: mol_type = other DNA

SEQ ID NO: 190762 - DNA, 80 bp, synthetic construct; identical to SEQ ID NO: 6032
  source 1..80: mol_type = other DNA

SEQ ID NO: 190763 - DNA, 80 bp, synthetic construct; identical to SEQ ID NO: 6033
  source 1..80: mol_type = other DNA

SEQ ID NO: 190764 - DNA, 80 bp, synthetic construct; identical to SEQ ID NO: 6034
  source 1..80: mol_type = other DNA

SEQ ID NO: 190765 - DNA, 80 bp, synthetic construct; identical to SEQ ID NO: 6035
  source 1..80: mol_type = other DNA

SEQ ID NO: 190766 - DNA, 80 bp, synthetic construct; identical to SEQ ID NO: 6036
  source 1..80: mol_type = other DNA

SEQ ID NO: 190767 - DNA, 80 bp, synthetic construct; identical to SEQ ID NO: 6037
  source 1..80: mol_type = other DNA

SEQ ID NO: 190768 - DNA, 80 bp, synthetic construct; identical to SEQ ID NO: 6038
  source 1..80: mol_type = other DNA

SEQ ID NO: 190769 - DNA, 80 bp, synthetic construct; identical to SEQ ID NO: 6039
  source 1..80: mol_type = other DNA

SEQ ID NO: 190770 - DNA, 80 bp, synthetic construct; identical to SEQ ID NO: 6040
  source 1..80: mol_type = other DNA

SEQ ID NO: 190771 - DNA, 80 bp, synthetic construct; identical to SEQ ID NO: 6041
  source 1..80: mol_type = other DNA

SEQ ID NO: 190772 - DNA, 80 bp, synthetic construct; identical to SEQ ID NO: 6042
  source 1..80: mol_type = other DNA

SEQ ID NO: 190773 - DNA, 80 bp, synthetic construct; identical to SEQ ID NO: 6043
  source 1..80: mol_type = other DNA

SEQ ID NO: 190774 - DNA, 80 bp, synthetic construct; identical to SEQ ID NO: 6044
  source 1..80: mol_type = other DNA

SEQ ID NO: 190775 - DNA, 80 bp, synthetic construct; identical to SEQ ID NO: 6045
  source 1..80: mol_type = other DNA

SEQ ID NO: 190776 - DNA, 80 bp, synthetic construct; identical to SEQ ID NO: 6046
  source 1..80: mol_type = other DNA

SEQ ID NO: 190777 - DNA, 80 bp, synthetic construct; identical to SEQ ID NO: 6047
  source 1..80: mol_type = other DNA

SEQ ID NO: 190778 - DNA, 80 bp, synthetic construct; identical to SEQ ID NO: 6048
  source 1..80: mol_type = other DNA

SEQ ID NO: 190779 - DNA, 80 bp, synthetic construct; identical to SEQ ID NO: 6049
  source 1..80: mol_type = other DNA

SEQ ID NO: 190780 - DNA, 80 bp, synthetic construct; identical to SEQ ID NO: 6050
  source 1..80: mol_type = other DNA

SEQ ID NO: 190781 - DNA, 80 bp, synthetic construct; identical to SEQ ID NO: 6051
  source 1..80: mol_type = other DNA

SEQ ID NO: 190782 - DNA, 80 bp, synthetic construct; identical to SEQ ID NO: 6052
  source 1..80: mol_type = other DNA

SEQ ID NO: 190783 - DNA, 80 bp, synthetic construct; identical to SEQ ID NO: 6053
  source 1..80: mol_type = other DNA

SEQ ID NO: 190784 - DNA, 80 bp, synthetic construct; identical to SEQ ID NO: 6054
  source 1..80: mol_type = other DNA

SEQ ID NO: 190785 - DNA, 80 bp, synthetic construct; identical to SEQ ID NO: 6055
  source 1..80: mol_type = other DNA

SEQ ID NO: 190786 - DNA, 80 bp, synthetic construct; identical to SEQ ID NO: 6056
  source 1..80: mol_type = other DNA

SEQ ID NO: 190787 - DNA, 80 bp, synthetic construct; identical to SEQ ID NO: 6057
  source 1..80: mol_type = other DNA

SEQ ID NO: 190788 - DNA, 80 bp, synthetic construct; identical to SEQ ID NO: 6058
  source 1..80: mol_type = other DNA

SEQ ID NO: 190789 - DNA, 80 bp, synthetic construct; identical to SEQ ID NO: 6059
  source 1..80: mol_type = other DNA

SEQ ID NO: 190790 - DNA, 80 bp, synthetic construct; identical to SEQ ID NO: 6060
  source 1..80: mol_type = other DNA

SEQ ID NO: 190791 - DNA, 80 bp, synthetic construct; identical to SEQ ID NO: 6061
  source 1..80: mol_type = other DNA

SEQ ID NO: 190792 - DNA, 80 bp, synthetic construct; identical to SEQ ID NO: 6062
  source 1..80: mol_type = other DNA

SEQ ID NO: 190793 - DNA, 80 bp, synthetic construct; identical to SEQ ID NO: 6063
  source 1..80: mol_type = other DNA

SEQ ID NO: 190794 - DNA, 80 bp, synthetic construct; identical to SEQ ID NO: 6064
  source 1..80: mol_type = other DNA

SEQ ID NO: 190795 - DNA, 80 bp, synthetic construct; identical to SEQ ID NO: 6065
  source 1..80: mol_type = other DNA

SEQ ID NO: 190796 - DNA, 80 bp, synthetic construct; identical to SEQ ID NO: 6066
  source 1..80: mol_type = other DNA

SEQ ID NO: 190797 - DNA, 80 bp, synthetic construct; identical to SEQ ID NO: 6067
  source 1..80: mol_type = other DNA

SEQ ID NO: 190798 - DNA, 80 bp, synthetic construct; identical to SEQ ID NO: 6068
  source 1..80: mol_type = other DNA

SEQ ID NO: 190799 - DNA, 80 bp, synthetic construct; identical to SEQ ID NO: 6069
  source 1..80: mol_type = other DNA

SEQ ID NO: 190800 - DNA, 80 bp, synthetic construct; identical to SEQ ID NO: 6070
  source 1..80: mol_type = other DNA

SEQ ID NO: 190801 - DNA, 80 bp, synthetic construct; identical to SEQ ID NO: 6071
  source 1..80: mol_type = other DNA

SEQ ID NO: 190802 - DNA, 80 bp, synthetic construct; identical to SEQ ID NO: 6072
  source 1..80: mol_type = other DNA

SEQ ID NO: 190803 - DNA, 80 bp, synthetic construct; identical to SEQ ID NO: 6073
  source 1..80: mol_type = other DNA

SEQ ID NO: 190804 - DNA, 80 bp, synthetic construct; identical to SEQ ID NO: 6074
  source 1..80: mol_type = other DNA

SEQ ID NO: 190805 - DNA, 80 bp, synthetic construct; identical to SEQ ID NO: 6075
  source 1..80: mol_type = other DNA

SEQ ID NO: 190806 - DNA, 80 bp, synthetic construct; identical to SEQ ID NO: 6076
  source 1..80: mol_type = other DNA

SEQ ID NO: 190807 - DNA, 80 bp, synthetic construct; identical to SEQ ID NO: 6077
  source 1..80: mol_type = other DNA

SEQ ID NO: 190808 - DNA, 80 bp, synthetic construct; identical to SEQ ID NO: 6078
  source 1..80: mol_type = other DNA

SEQ ID NO: 190809 - DNA, 80 bp, synthetic construct; identical to SEQ ID NO: 6079
  source 1..80: mol_type = other DNA

SEQ ID NO: 190810 - DNA, 80 bp, synthetic construct; identical to SEQ ID NO: 6080
  source 1..80: mol_type = other DNA

SEQ ID NO: 190811 - DNA, 80 bp, synthetic construct; identical to SEQ ID NO: 6081
  source 1..80: mol_type = other DNA

SEQ ID NO: 190812 - DNA, 80 bp, synthetic construct; identical to SEQ ID NO: 6082
  source 1..80: mol_type = other DNA

SEQ ID NO: 190813 - DNA, 80 bp, synthetic construct; identical to SEQ ID NO: 6083
  source 1..80: mol_type = other DNA

SEQ ID NO: 190814 - DNA, 80 bp, synthetic construct; identical to SEQ ID NO: 6084
  source 1..80: mol_type = other DNA

SEQ ID NO: 190815 - DNA, 80 bp, synthetic construct; identical to SEQ ID NO: 6085
  source 1..80: mol_type = other DNA

SEQ ID NO: 190816 - DNA, 80 bp, synthetic construct; identical to SEQ ID NO: 6086
  source 1..80: mol_type = other DNA

SEQ ID NO: 190817 - DNA, 80 bp, synthetic construct; identical to SEQ ID NO: 6087
  source 1..80: mol_type = other DNA

SEQ ID NO: 190818 - DNA, 80 bp, synthetic construct; identical to SEQ ID NO: 6088
  source 1..80: mol_type = other DNA

SEQ ID NO: 190819 - DNA, 80 bp, synthetic construct; identical to SEQ ID NO: 6089
  source 1..80: mol_type = other DNA

SEQ ID NO: 190820 - DNA, 80 bp, synthetic construct; identical to SEQ ID NO: 6090
  source 1..80: mol_type = other DNA

SEQ ID NO: 190821 - DNA, 80 bp, synthetic construct; identical to SEQ ID NO: 6091
  source 1..80: mol_type = other DNA

SEQ ID NO: 190822 - DNA, 80 bp, synthetic construct; identical to SEQ ID NO: 6092
  source 1..80: mol_type = other DNA

SEQ ID NO: 190823 - DNA, 80 bp, synthetic construct; identical to SEQ ID NO: 6093
  source 1..80: mol_type = other DNA

SEQ ID NO: 190824 - DNA, 80 bp, synthetic construct; identical to SEQ ID NO: 6094
  source 1..80: mol_type = other DNA

SEQ ID NO: 190825 - DNA, 80 bp, synthetic construct; identical to SEQ ID NO: 6095
  source 1..80: mol_type = other DNA

SEQ ID NO: 190826 - DNA, 80 bp, synthetic construct; identical to SEQ ID NO: 6096
  source 1..80: mol_type = other DNA

SEQ ID NO: 190827 - DNA, 80 bp, synthetic construct; identical to SEQ ID NO: 6097
  source 1..80: mol_type = other DNA

SEQ ID NO: 190828 - DNA, 80 bp, synthetic construct; identical to SEQ ID NO: 6098
  source 1..80: mol_type = other DNA

SEQ ID NO: 190829 - DNA, 80 bp, synthetic construct; identical to SEQ ID NO: 6099
  source 1..80: mol_type = other DNA

SEQ ID NO: 190830 - DNA, 80 bp, synthetic construct; identical to SEQ ID NO: 6100
  source 1..80: mol_type = other DNA

SEQ ID NO: 190831 - DNA, 80 bp, synthetic construct; identical to SEQ ID NO: 6101
  source 1..80: mol_type = other DNA

SEQ ID NO: 190832 - DNA, 80 bp, synthetic construct; identical to SEQ ID NO: 6102
  source 1..80: mol_type = other DNA

SEQ ID NO: 190833 - DNA, 80 bp, synthetic construct; identical to SEQ ID NO: 6103
  source 1..80: mol_type = other DNA

SEQ ID NO: 190834 - DNA, 80 bp, synthetic construct; identical to SEQ ID NO: 6104
  source 1..80: mol_type = other DNA

SEQ ID NO: 190835 - DNA, 80 bp, synthetic construct; identical to SEQ ID NO: 6105
  source 1..80: mol_type = other DNA

SEQ ID NO: 190836 - DNA, 80 bp, synthetic construct; identical to SEQ ID NO: 6106
  source 1..80: mol_type = other DNA

SEQ ID NO: 190837 - DNA, 80 bp, synthetic construct; identical to SEQ ID NO: 6107
  source 1..80: mol_type = other DNA

SEQ ID NO: 190838 - DNA, 80 bp, synthetic construct; identical to SEQ ID NO: 6108
  source 1..80: mol_type = other DNA

SEQ ID NO: 190839 - DNA, 80 bp, synthetic construct; identical to SEQ ID NO: 6109
  source 1..80: mol_type = other DNA

SEQ ID NO: 190840 - DNA, 80 bp, synthetic construct; identical to SEQ ID NO: 6110
  source 1..80: mol_type = other DNA

SEQ ID NO: 190841 - DNA, 80 bp, synthetic construct; identical to SEQ ID NO: 6111
  source 1..80: mol_type = other DNA

SEQ ID NO: 190842 - DNA, 80 bp, synthetic construct; identical to SEQ ID NO: 6112
  source 1..80: mol_type = other DNA

SEQ ID NO: 190843 - DNA, 80 bp, synthetic construct; identical to SEQ ID NO: 6113
  source 1..80: mol_type = other DNA

SEQ ID NO: 190844 - DNA, 80 bp, synthetic construct; identical to SEQ ID NO: 6114
  source 1..80: mol_type = other DNA

SEQ ID NO: 190845 - DNA, 80 bp, synthetic construct; identical to SEQ ID NO: 6115
  source 1..80: mol_type = other DNA

SEQ ID NO: 190846 - DNA, 80 bp, synthetic construct; identical to SEQ ID NO: 6116
  source 1..80: mol_type = other DNA

SEQ ID NO: 190847 - DNA, 80 bp, synthetic construct; identical to SEQ ID NO: 6117
  source 1..80: mol_type = other DNA

SEQ ID NO: 190848 - DNA, 80 bp, synthetic construct; identical to SEQ ID NO: 6118
  source 1..80: mol_type = other DNA

SEQ ID NO: 190849 - DNA, 80 bp, synthetic construct; identical to SEQ ID NO: 6119
  source 1..80: mol_type = other DNA

SEQ ID NO: 190850 - DNA, 80 bp, synthetic construct; identical to SEQ ID NO: 6120
  source 1..80: mol_type = other DNA

SEQ ID NO: 190851 - DNA, 80 bp, synthetic construct; identical to SEQ ID NO: 6121
  source 1..80: mol_type = other DNA

SEQ ID NO: 190852 - DNA, 80 bp, synthetic construct; identical to SEQ ID NO: 6122
  source 1..80: mol_type = other DNA

SEQ ID NO: 190853 - DNA, 80 bp, synthetic construct; identical to SEQ ID NO: 6123
  source 1..80: mol_type = other DNA

SEQ ID NO: 190854 - DNA, 80 bp, synthetic construct; identical to SEQ ID NO: 6124
  source 1..80: mol_type = other DNA

SEQ ID NO: 190855 - DNA, 80 bp, synthetic construct; identical to SEQ ID NO: 6125
  source 1..80: mol_type = other DNA

SEQ ID NO: 190856 - DNA, 80 bp, synthetic construct; identical to SEQ ID NO: 6126
  source 1..80: mol_type = other DNA

SEQ ID NO: 190857 - DNA, 80 bp, synthetic construct; identical to SEQ ID NO: 6127
  source 1..80: mol_type = other DNA

SEQ ID NO: 190858 - DNA, 80 bp, synthetic construct; identical to SEQ ID NO: 6128
  source 1..80: mol_type = other DNA

SEQ ID NO: 190859 - DNA, 80 bp, synthetic construct; identical to SEQ ID NO: 6129
  source 1..80: mol_type = other DNA

SEQ ID NO: 190860 - DNA, 80 bp, synthetic construct; identical to SEQ ID NO: 6130
  source 1..80: mol_type = other DNA

SEQ ID NO: 190861 - DNA, 80 bp, synthetic construct; identical to SEQ ID NO: 6131
  source 1..80: mol_type = other DNA

SEQ ID NO: 190862 - DNA, 80 bp, synthetic construct; identical to SEQ ID NO: 6132
  source 1..80: mol_type = other DNA

SEQ ID NO: 190863 - DNA, 80 bp, synthetic construct; identical to SEQ ID NO: 6133
  source 1..80: mol_type = other DNA

SEQ ID NO: 190864 - DNA, 80 bp, synthetic construct; identical to SEQ ID NO: 6134
  source 1..80: mol_type = other DNA

SEQ ID NO: 190865 - DNA, 80 bp, synthetic construct; identical to SEQ ID NO: 6135
  source 1..80: mol_type = other DNA

SEQ ID NO: 190866 - DNA, 80 bp, synthetic construct; identical to SEQ ID NO: 6136
  source 1..80: mol_type = other DNA

SEQ ID NO: 190867 - DNA, 80 bp, synthetic construct; identical to SEQ ID NO: 6137
  source 1..80: mol_type = other DNA

SEQ ID NO: 190868 - DNA, 80 bp, synthetic construct; identical to SEQ ID NO: 6138
  source 1..80: mol_type = other DNA

SEQ ID NO: 190869 - DNA, 80 bp, synthetic construct; identical to SEQ ID NO: 6139
  source 1..80: mol_type = other DNA

SEQ ID NO: 190870 - DNA, 80 bp, synthetic construct; identical to SEQ ID NO: 6140
  source 1..80: mol_type = other DNA

SEQ ID NO: 190871 - DNA, 80 bp, synthetic construct; identical to SEQ ID NO: 6141
  source 1..80: mol_type = other DNA

SEQ ID NO: 190872 - DNA, 80 bp, synthetic construct; identical to SEQ ID NO: 6142
  source 1..80: mol_type = other DNA

SEQ ID NO: 190873 - DNA, 80 bp, synthetic construct; identical to SEQ ID NO: 6143
  source 1..80: mol_type = other DNA

SEQ ID NO: 190874 - DNA, 80 bp, synthetic construct; identical to SEQ ID NO: 6144
  source 1..80: mol_type = other DNA

SEQ ID NO: 190875 - DNA, 80 bp, synthetic construct; identical to SEQ ID NO: 6145
  source 1..80: mol_type = other DNA

SEQ ID NO: 190876 - DNA, 80 bp, synthetic construct; identical to SEQ ID NO: 6146
  source 1..80: mol_type = other DNA

SEQ ID NO: 190877 - DNA, 80 bp, synthetic construct; identical to SEQ ID NO: 6147
  source 1..80: mol_type = other DNA

SEQ ID NO: 190878 - DNA, 80 bp, synthetic construct; identical to SEQ ID NO: 6148
  source 1..80: mol_type = other DNA

SEQ ID NO: 190879 - DNA, 80 bp, synthetic construct; identical to SEQ ID NO: 6149
  source 1..80: mol_type = other DNA

SEQ ID NO: 190880 - DNA, 80 bp, synthetic construct; identical to SEQ ID NO: 6150
  source 1..80: mol_type = other DNA

SEQ ID NO: 190881 - DNA, 80 bp, synthetic construct; identical to SEQ ID NO: 6151
  source 1..80: mol_type = other DNA

SEQ ID NO: 190882 - DNA, 80 bp, synthetic construct; identical to SEQ ID NO: 6152
  source 1..80: mol_type = other DNA

SEQ ID NO: 190883 - DNA, 80 bp, synthetic construct; identical to SEQ ID NO: 6153
  source 1..80: mol_type = other DNA

SEQ ID NO: 190884 - DNA, 80 bp, synthetic construct; identical to SEQ ID NO: 6154
  source 1..80: mol_type = other DNA

SEQ ID NO: 190885 - DNA, 80 bp, synthetic construct; identical to SEQ ID NO: 6155
  source 1..80: mol_type = other DNA

SEQ ID NO: 190886 - DNA, 80 bp, synthetic construct; identical to SEQ ID NO: 6156
  source 1..80: mol_type = other DNA

SEQ ID NO: 190887 - DNA, 80 bp, synthetic construct; identical to SEQ ID NO: 6157
  source 1..80: mol_type = other DNA

SEQ ID NO: 190888 - DNA, 80 bp, synthetic construct; identical to SEQ ID NO: 6158
  source 1..80: mol_type = other DNA

SEQ ID NO: 190889 - DNA, 80 bp, synthetic construct; identical to SEQ ID NO: 6159
  source 1..80: mol_type = other DNA

SEQ ID NO: 190890 - DNA, 80 bp, synthetic construct; identical to SEQ ID NO: 6160
  source 1..80: mol_type = other DNA

SEQ ID NO: 190891 - DNA, 80 bp, synthetic construct; identical to SEQ ID NO: 6161
  source 1..80: mol_type = other DNA

SEQ ID NO: 190892 - DNA, 80 bp, synthetic construct; identical to SEQ ID NO: 6162
  source 1..80: mol_type = other DNA

SEQ ID NO: 190893 - DNA, 80 bp, synthetic construct; identical to SEQ ID NO: 6163
  source 1..80: mol_type = other DNA

SEQ ID NO: 190894 - DNA, 80 bp, synthetic construct; identical to SEQ ID NO: 6164
  source 1..80: mol_type = other DNA

SEQ ID NO: 190895 - DNA, 80 bp, synthetic construct; identical to SEQ ID NO: 6165
  source 1..80: mol_type = other DNA

SEQ ID NO: 190896 - DNA, 80 bp, synthetic construct; identical to SEQ ID NO: 6166
  source 1..80: mol_type = other DNA

SEQ ID NO: 190897 - DNA, 80 bp, synthetic construct; identical to SEQ ID NO: 6167
  source 1..80: mol_type = other DNA

SEQ ID NO: 190898 - DNA, 80 bp, synthetic construct; identical to SEQ ID NO: 6168
  source 1..80: mol_type = other DNA

SEQ ID NO: 190899 - DNA, 80 bp, synthetic construct; identical to SEQ ID NO: 6169
  source 1..80: mol_type = other DNA

SEQ ID NO: 190900 - DNA, 80 bp, synthetic construct; identical to SEQ ID NO: 6170
  source 1..80: mol_type = other DNA

SEQ ID NO: 190901 - DNA, 80 bp, synthetic construct; identical to SEQ ID NO: 6171
  source 1..80: mol_type = other DNA

SEQ ID NO: 190902 - DNA, 80 bp, synthetic construct; identical to SEQ ID NO: 6172
  source 1..80: mol_type = other DNA

SEQ ID NO: 190903 - DNA, 80 bp, synthetic construct; identical to SEQ ID NO: 6173
  source 1..80: mol_type = other DNA

SEQ ID NO: 190904 - DNA, 80 bp, synthetic construct; identical to SEQ ID NO: 6174
  source 1..80: mol_type = other DNA

SEQ ID NO: 190905 - DNA, 80 bp, synthetic construct; identical to SEQ ID NO: 6175
  source 1..80: mol_type = other DNA

SEQ ID NO: 190906 - DNA, 80 bp, synthetic construct; identical to SEQ ID NO: 6176
  source 1..80: mol_type = other DNA

SEQ ID NO: 190907 - DNA, 80 bp, synthetic construct; identical to SEQ ID NO: 6177
  source 1..80: mol_type = other DNA

SEQ ID NO: 190908 - DNA, 80 bp, synthetic construct; identical to SEQ ID NO: 6178
  source 1..80: mol_type = other DNA

SEQ ID NO: 190909 - DNA, 80 bp, synthetic construct; identical to SEQ ID NO: 6179
  source 1..80: mol_type = other DNA

SEQ ID NO: 190910 - DNA, 80 bp, synthetic construct; identical to SEQ ID NO: 6180
  source 1..80: mol_type = other DNA

SEQ ID NO: 190911 - DNA, 80 bp, synthetic construct; identical to SEQ ID NO: 6181
  source 1..80: mol_type = other DNA

SEQ ID NO: 190912 - DNA, 80 bp, synthetic construct; identical to SEQ ID NO: 6182
  source 1..80: mol_type = other DNA

SEQ ID NO: 190913 - DNA, 80 bp, synthetic construct; identical to SEQ ID NO: 6183
  source 1..80: mol_type = other DNA

SEQ ID NO: 190914 - DNA, 80 bp, synthetic construct; identical to SEQ ID NO: 6184
  source 1..80: mol_type = other DNA

SEQ ID NO: 190915 - DNA, 80 bp, synthetic construct; identical to SEQ ID NO: 6185
  source 1..80: mol_type = other DNA

SEQ ID NO: 190916 - DNA, 80 bp, synthetic construct; identical to SEQ ID NO: 6186
  source 1..80: mol_type = other DNA

SEQ ID NO: 190917 - DNA, 80 bp, synthetic construct; identical to SEQ ID NO: 6187
  source 1..80: mol_type = other DNA

SEQ ID NO: 190918 - DNA, 80 bp, synthetic construct; identical to SEQ ID NO: 6188
  source 1..80: mol_type = other DNA

SEQ ID NO: 190919 - DNA, 80 bp, synthetic construct; identical to SEQ ID NO: 6189
  source 1..80: mol_type = other DNA

SEQ ID NO: 190920 - DNA, 80 bp, synthetic construct; identical to SEQ ID NO: 6190
  source 1..80: mol_type = other DNA

SEQ ID NO: 190921 - DNA, 80 bp, synthetic construct; identical to SEQ ID NO: 6191
  source 1..80: mol_type = other DNA

SEQ ID NO: 190922 - DNA, 80 bp, synthetic construct; identical to SEQ ID NO: 6192
  source 1..80: mol_type = other DNA

SEQ ID NO: 190923 - DNA, 80 bp, synthetic construct; identical to SEQ ID NO: 6193
  source 1..80: mol_type = other DNA

SEQ ID NO: 190924 - DNA, 80 bp, synthetic construct; identical to SEQ ID NO: 6194
  source 1..80: mol_type = other DNA

SEQ ID NO: 190925 - DNA, 80 bp, synthetic construct; identical to SEQ ID NO: 6195
  source 1..80: mol_type = other DNA

SEQ ID NO: 190926 - DNA, 80 bp, synthetic construct; identical to SEQ ID NO: 6196
  source 1..80: mol_type = other DNA

SEQ ID NO: 190927 - DNA, 80 bp, synthetic construct; identical to SEQ ID NO: 6197
  source 1..80: mol_type = other DNA

SEQ ID NO: 190928 - DNA, 80 bp, synthetic construct; identical to SEQ ID NO: 6198
  source 1..80: mol_type = other DNA

SEQ ID NO: 190929 - DNA, 80 bp, synthetic construct; identical to SEQ ID NO: 6199
  source 1..80: mol_type = other DNA

SEQ ID NO: 190930 - DNA, 80 bp, synthetic construct; identical to SEQ ID NO: 6200
  source 1..80: mol_type = other DNA

SEQ ID NO: 190931 - DNA, 80 bp, synthetic construct; identical to SEQ ID NO: 6201
  source 1..80: mol_type = other DNA

SEQ ID NO: 190932 - DNA, 80 bp, synthetic construct; identical to SEQ ID NO: 6202
  source 1..80: mol_type = other DNA

SEQ ID NO: 190933 - DNA, 80 bp, synthetic construct; identical to SEQ ID NO: 6203
  source 1..80: mol_type = other DNA

SEQ ID NO: 190934 - DNA, 80 bp, synthetic construct; identical to SEQ ID NO: 6204
  source 1..80: mol_type = other DNA

SEQ ID NO: 190935 - DNA, 80 bp, synthetic construct; identical to SEQ ID NO: 6205
  source 1..80: mol_type = other DNA

SEQ ID NO: 190936 - DNA, 80 bp, synthetic construct; identical to SEQ ID NO: 6206
  source 1..80: mol_type = other DNA

SEQ ID NO: 190937 - DNA, 80 bp, synthetic construct; identical to SEQ ID NO: 6207
  source 1..80: mol_type = other DNA

SEQ ID NO: 190938 - DNA, 80 bp, synthetic construct; identical to SEQ ID NO: 6208
  source 1..80: mol_type = other DNA

SEQ ID NO: 190939 - DNA, 80 bp, synthetic construct; identical to SEQ ID NO: 6209
  source 1..80: mol_type = other DNA

SEQ ID NO: 190940 - DNA, 80 bp, synthetic construct; identical to SEQ ID NO: 6210
  source 1..80: mol_type = other DNA

SEQ ID NO: 190941 - DNA, 80 bp, synthetic construct; identical to SEQ ID NO: 6211
  source 1..80: mol_type = other DNA

SEQ ID NO: 190942 - DNA, 80 bp, synthetic construct; identical to SEQ ID NO: 6212
  source 1..80: mol_type = other DNA

SEQ ID NO: 190943 - DNA, 80 bp, synthetic construct; identical to SEQ ID NO: 6213
  source 1..80: mol_type = other DNA

SEQ ID NO: 190944 - DNA, 80 bp, synthetic construct; identical to SEQ ID NO: 6214
  source 1..80: mol_type = other DNA

SEQ ID NO: 190945 - DNA, 80 bp, synthetic construct; identical to SEQ ID NO: 6215
  source 1..80: mol_type = other DNA

SEQ ID NO: 190946 - DNA, 80 bp, synthetic construct; identical to SEQ ID NO: 6216
  source 1..80: mol_type = other DNA

SEQ ID NO: 190947 - DNA, 80 bp, synthetic construct; identical to SEQ ID NO: 6217
  source 1..80: mol_type = other DNA

SEQ ID NO: 190948 - DNA, 80 bp, synthetic construct; identical to SEQ ID NO: 6218
  source 1..80: mol_type = other DNA

SEQ ID NO: 190949 - DNA, 80 bp, synthetic construct; identical to SEQ ID NO: 6219
  source 1..80: mol_type = other DNA

SEQ ID NO: 190950 - DNA, 80 bp, synthetic construct; identical to SEQ ID NO: 6220
  source 1..80: mol_type = other DNA

SEQ ID NO: 190951 - DNA, 80 bp, synthetic construct; identical to SEQ ID NO: 6221
  source 1..80: mol_type = other DNA

SEQ ID NO: 190952 - DNA, 80 bp, synthetic construct; identical to SEQ ID NO: 6222
  source 1..80: mol_type = other DNA

SEQ ID NO: 190953 - DNA, 80 bp, synthetic construct; identical to SEQ ID NO: 6223
  source 1..80: mol_type = other DNA

SEQ ID NO: 190954 - DNA, 80 bp, synthetic construct; identical to SEQ ID NO: 6224
  source 1..80: mol_type = other DNA

SEQ ID NO: 190955 - DNA, 80 bp, synthetic construct; identical to SEQ ID NO: 6225
  source 1..80: mol_type = other DNA

SEQ ID NO: 190956 - DNA, 80 bp, synthetic construct; identical to SEQ ID NO: 6226
  source 1..80: mol_type = other DNA

SEQ ID NO: 190957 - DNA, 80 bp, synthetic construct; identical to SEQ ID NO: 6227
  source 1..80: mol_type = other DNA

SEQ ID NO: 190958 - DNA, 80 bp, synthetic construct; identical to SEQ ID NO: 6228
  source 1..80: mol_type = other DNA

SEQ ID NO: 190959 - DNA, 80 bp, synthetic construct; identical to SEQ ID NO: 6229
  source 1..80: mol_type = other DNA

SEQ ID NO: 190960 - DNA, 80 bp, synthetic construct; identical to SEQ ID NO: 6230
  source 1..80: mol_type = other DNA

SEQ ID NO: 190961 - DNA, 80 bp, synthetic construct; identical to SEQ ID NO: 6231
  source 1..80: mol_type = other DNA

SEQ ID NO: 190962 - DNA, 80 bp, synthetic construct; identical to SEQ ID NO: 6232
  source 1..80: mol_type = other DNA

SEQ ID NO: 190963 - DNA, 80 bp, synthetic construct; identical to SEQ ID NO: 6233
  source 1..80: mol_type = other DNA

SEQ ID NO: 190964 - DNA, 80 bp, synthetic construct; identical to SEQ ID NO: 6234
  source 1..80: mol_type = other DNA

SEQ ID NO: 190965 - DNA, 80 bp, synthetic construct; identical to SEQ ID NO: 6235
  source 1..80: mol_type = other DNA

SEQ ID NO: 190966 - DNA, 80 bp, synthetic construct; identical to SEQ ID NO: 6236
  source 1..80: mol_type = other DNA

SEQ ID NO: 190967 - DNA, 80 bp, synthetic construct; identical to SEQ ID NO: 6237
  source 1..80: mol_type = other DNA

SEQ ID NO: 190968 - DNA, 80 bp, synthetic construct; identical to SEQ ID NO: 6238
  source 1..80: mol_type = other DNA

SEQ ID NO: 190969 - DNA, 80 bp, synthetic construct; identical to SEQ ID NO: 6239
  source 1..80: mol_type = other DNA

SEQ ID NO: 190970 - DNA, 80 bp, synthetic construct; identical to SEQ ID NO: 6240
  source 1..80: mol_type = other DNA

SEQ ID NO: 190971 - DNA, 80 bp, synthetic construct; identical to SEQ ID NO: 6241
  source 1..80: mol_type = other DNA

SEQ ID NO: 190972 - DNA, 80 bp, synthetic construct; identical to SEQ ID NO: 6242
  source 1..80: mol_type = other DNA

SEQ ID NO: 190973 - DNA, 80 bp, synthetic construct; identical to SEQ ID NO: 6243
  source 1..80: mol_type = other DNA

SEQ ID NO: 190974 - DNA, 80 bp, synthetic construct; identical to SEQ ID NO: 6244
  source 1..80: mol_type = other DNA

SEQ ID NO: 190975 - DNA, 80 bp, synthetic construct; identical to SEQ ID NO: 6245
  source 1..80: mol_type = other DNA

SEQ ID NO: 190976 - DNA, 80 bp, synthetic construct; identical to SEQ ID NO: 6246
  source 1..80: mol_type = other DNA

SEQ ID NO: 190977 - DNA, 80 bp, synthetic construct; identical to SEQ ID NO: 6247
  source 1..80: mol_type = other DNA

SEQ ID NO: 190978 - DNA, 80 bp, synthetic construct; identical to SEQ ID NO: 6248
  source 1..80: mol_type = other DNA

SEQ ID NO: 190979 - DNA, 80 bp, synthetic construct; identical to SEQ ID NO: 6249
  source 1..80: mol_type = other DNA

SEQ ID NO: 190980 - DNA, 80 bp, synthetic construct; identical to SEQ ID NO: 6250
  source 1..80: mol_type = other DNA

SEQ ID NO: 190981 - DNA, 80 bp, synthetic construct; identical to SEQ ID NO: 6251
  source 1..80: mol_type = other DNA

SEQ ID NO: 190982 - DNA, 80 bp, synthetic construct; identical to SEQ ID NO: 6252
  source 1..80: mol_type = other DNA

SEQ ID NO: 190983 - DNA, 80 bp, synthetic construct; identical to SEQ ID NO: 6253
  source 1..80: mol_type = other DNA

SEQ ID NO: 190984 - DNA, 80 bp, synthetic construct; identical to SEQ ID NO: 6254
  source 1..80: mol_type = other DNA

SEQ ID NO: 190985 - DNA, 80 bp, synthetic construct; identical to SEQ ID NO: 6255
  source 1..80: mol_type = other DNA

SEQ ID NO: 190986 - DNA, 80 bp, synthetic construct; identical to SEQ ID NO: 6256
  source 1..80: mol_type = other DNA

SEQ ID NO: 190987 - DNA, 80 bp, synthetic construct; identical to SEQ ID NO: 6257
  source 1..80: mol_type = other DNA

SEQ ID NO: 190988 - DNA, 80 bp, synthetic construct; identical to SEQ ID NO: 6258
  source 1..80: mol_type = other DNA

SEQ ID NO: 190989 - DNA, 80 bp, synthetic construct; identical to SEQ ID NO: 6259
  source 1..80: mol_type = other DNA

SEQ ID NO: 190990 - DNA, 80 bp, synthetic construct; identical to SEQ ID NO: 6260
  source 1..80: mol_type = other DNA

SEQ ID NO: 190991 - DNA, 80 bp, synthetic construct; identical to SEQ ID NO: 6261
  source 1..80: mol_type = other DNA

SEQ ID NO: 190992 - DNA, 80 bp, synthetic construct; identical to SEQ ID NO: 6262
  source 1..80: mol_type = other DNA

SEQ ID NO: 190993 - DNA, 80 bp, synthetic construct; identical to SEQ ID NO: 6263
  source 1..80: mol_type = other DNA

SEQ ID NO: 190994 - DNA, 80 bp, synthetic construct; identical to SEQ ID NO: 6264
  source 1..80: mol_type = other DNA

SEQ ID NO: 190995 - DNA, 80 bp, synthetic construct; identical to SEQ ID NO: 6265
  source 1..80: mol_type = other DNA

SEQ ID NO: 190996 - DNA, 80 bp, synthetic construct; identical to SEQ ID NO: 6266
  source 1..80: mol_type = other DNA

SEQ ID NO: 190997 - DNA, 80 bp, synthetic construct; identical to SEQ ID NO: 6267
  source 1..80: mol_type = other DNA

SEQ ID NO: 190998 - DNA, 80 bp, synthetic construct; identical to SEQ ID NO: 6268
  source 1..80: mol_type = other DNA

SEQ ID NO: 190999 - DNA, 80 bp, synthetic construct; identical to SEQ ID NO: 6269
  source 1..80: mol_type = other DNA

SEQ ID NO: 191000 - DNA, 80 bp, synthetic construct; identical to SEQ ID NO: 6270
  source 1..80: mol_type = other DNA

SEQ ID NO: 191001 - DNA, 80 bp, synthetic construct; identical to SEQ ID NO: 6271
  source 1..80: mol_type = other DNA

SEQ ID NO: 191002 - DNA, 80 bp, synthetic construct; identical to SEQ ID NO: 6272
  source 1..80: mol_type = other DNA

SEQ ID NO: 191003 - DNA, 80 bp, synthetic construct; identical to SEQ ID NO: 6273
  source 1..80: mol_type = other DNA

SEQ ID NO: 191004 - DNA, 80 bp, synthetic construct; identical to SEQ ID NO: 6274
  source 1..80: mol_type = other DNA

SEQ ID NO: 191005 - DNA, 80 bp, synthetic construct; identical to SEQ ID NO: 6275
  source 1..80: mol_type = other DNA

SEQ ID NO: 191006 - DNA, 80 bp, synthetic construct; identical to SEQ ID NO: 6276
  source 1..80: mol_type = other DNA

SEQ ID NO: 191007 - DNA, 80 bp, synthetic construct; identical to SEQ ID NO: 6277
  source 1..80: mol_type = other DNA

SEQ ID NO: 191008 - DNA, 80 bp, synthetic construct; identical to SEQ ID NO: 6278
  source 1..80: mol_type = other DNA

SEQ ID NO: 191009 - DNA, 80 bp, synthetic construct; identical to SEQ ID NO: 6279
  source 1..80: mol_type = other DNA

SEQ ID NO: 191010 - DNA, 80 bp, synthetic construct; identical to SEQ ID NO: 6280
  source 1..80: mol_type = other DNA

SEQ ID NO: 191011 - DNA, 80 bp, synthetic construct; identical to SEQ ID NO: 6281
  source 1..80: mol_type = other DNA

SEQ ID NO: 191012 - DNA, 80 bp, synthetic construct; identical to SEQ ID NO: 6282
  source 1..80: mol_type = other DNA

SEQ ID NO: 191013 - DNA, 80 bp, synthetic construct; identical to SEQ ID NO: 6283
  source 1..80: mol_type = other DNA

SEQ ID NO: 191014 - DNA, 80 bp, synthetic construct; identical to SEQ ID NO: 6284
  source 1..80: mol_type = other DNA

SEQ ID NO: 191015 - DNA, 80 bp, synthetic construct; identical to SEQ ID NO: 6285
  source 1..80: mol_type = other DNA

SEQ ID NO: 191016 - DNA, 80 bp, synthetic construct; identical to SEQ ID NO: 6286
  source 1..80: mol_type = other DNA

SEQ ID NO: 191017 - DNA, 80 bp, synthetic construct; identical to SEQ ID NO: 6287
  source 1..80: mol_type = other DNA

SEQ ID NO: 191018 - DNA, 80 bp, synthetic construct; identical to SEQ ID NO: 6288
  source 1..80: mol_type = other DNA

SEQ ID NO: 191019 - DNA, 80 bp, synthetic construct; identical to SEQ ID NO: 6289
  source 1..80: mol_type = other DNA

SEQ ID NO: 191020 - DNA, 80 bp, synthetic construct; identical to SEQ ID NO: 6290
  source 1..80: mol_type = other DNA

SEQ ID NO: 191021 - DNA, 80 bp, synthetic construct; identical to SEQ ID NO: 6291
  source 1..80: mol_type = other DNA

SEQ ID NO: 191022 - DNA, 80 bp, synthetic construct; identical to SEQ ID NO: 6292
  source 1..80: mol_type = other DNA

SEQ ID NO: 191023 - DNA, 80 bp, synthetic construct; identical to SEQ ID NO: 6293
  source 1..80: mol_type = other DNA

SEQ ID NO: 191024 - DNA, 80 bp, synthetic construct; identical to SEQ ID NO: 6294
  source 1..80: mol_type = other DNA

SEQ ID NO: 191025 - DNA, 80 bp, synthetic construct; identical to SEQ ID NO: 6295
  source 1..80: mol_type = other DNA

SEQ ID NO: 191026 - DNA, 80 bp, synthetic construct; identical to SEQ ID NO: 6296
  source 1..80: mol_type = other DNA

SEQ ID NO: 191027 - DNA, 80 bp, synthetic construct; identical to SEQ ID NO: 6297
  source 1..80: mol_type = other DNA

SEQ ID NO: 191028 - DNA, 80 bp, synthetic construct; identical to SEQ ID NO: 6298
  source 1..80: mol_type = other DNA

SEQ ID NO: 191029 - DNA, 80 bp, synthetic construct; identical to SEQ ID NO: 6299
  source 1..80: mol_type = other DNA

SEQ ID NO: 191030 - DNA, 80 bp, synthetic construct; identical to SEQ ID NO: 6300
  source 1..80: mol_type = other DNA

SEQ ID NO: 191031 - DNA, 80 bp, synthetic construct; identical to SEQ ID NO: 6301
  source 1..80: mol_type = other DNA

SEQ ID NO: 191032 - DNA, 80 bp, synthetic construct; identical to SEQ ID NO: 6302
  source 1..80: mol_type = other DNA

SEQ ID NO: 191033 - DNA, 80 bp, synthetic construct; identical to SEQ ID NO: 6303
  source 1..80: mol_type = other DNA

SEQ ID NO: 191034 - DNA, 80 bp, synthetic construct; identical to SEQ ID NO: 6304
  source 1..80: mol_type = other DNA

SEQ ID NO: 191035 - DNA, 80 bp, synthetic construct; identical to SEQ ID NO: 6305
  source 1..80: mol_type = other DNA

SEQ ID NO: 191036 - DNA, 80 bp, synthetic construct; identical to SEQ ID NO: 6306
  source 1..80: mol_type = other DNA

SEQ ID NO: 191037 - DNA, 80 bp, synthetic construct; identical to SEQ ID NO: 6307
  source 1..80: mol_type = other DNA

SEQ ID NO: 191038 - DNA, 80 bp, synthetic construct; identical to SEQ ID NO: 6308
  source 1..80: mol_type = other DNA

SEQ ID NO: 191039 - DNA, 80 bp, synthetic construct; identical to SEQ ID NO: 6309
  source 1..80: mol_type = other DNA

SEQ ID NO: 191040 - DNA, 80 bp, synthetic construct; identical to SEQ ID NO: 6310
  source 1..80: mol_type = other DNA

SEQ ID NO: 191041 - DNA, 80 bp, synthetic construct; identical to SEQ ID NO: 6311
  source 1..80: mol_type = other DNA

SEQ ID NO: 191042 - DNA, 80 bp, synthetic construct; identical to SEQ ID NO: 6312
  source 1..80: mol_type = other DNA

SEQ ID NO: 191043 - DNA, 80 bp, synthetic construct; identical to SEQ ID NO: 6313
  source 1..80: mol_type = other DNA

SEQ ID NO: 191044 - DNA, 80 bp, synthetic construct; identical to SEQ ID NO: 6314
  source 1..80: mol_type = other DNA

SEQ ID NO: 191045 - DNA, 80 bp, synthetic construct; identical to SEQ ID NO: 6315
  source 1..80: mol_type = other DNA

SEQ ID NO: 191046 - DNA, 80 bp, synthetic construct; identical to SEQ ID NO: 6316
  source 1..80: mol_type = other DNA

SEQ ID NO: 191047 - DNA, 80 bp, synthetic construct; identical to SEQ ID NO: 6317
  source 1..80: mol_type = other DNA

SEQ ID NO: 191048 - DNA, 80 bp, synthetic construct; identical to SEQ ID NO: 6318
  source 1..80: mol_type = other DNA

SEQ ID NO: 191049 - DNA, 80 bp, synthetic construct; identical to SEQ ID NO: 6319
  source 1..80: mol_type = other DNA

SEQ ID NO: 191050 - DNA, 80 bp, synthetic construct; identical to SEQ ID NO: 6320
  source 1..80: mol_type = other DNA

SEQ ID NO: 191051 - DNA, 80 bp, synthetic construct; identical to SEQ ID NO: 6321
  source 1..80: mol_type = other DNA

SEQ ID NO: 191052 - DNA, 80 bp, synthetic construct; identical to SEQ ID NO: 6322
  source 1..80: mol_type = other DNA

SEQ ID NO: 191053 - DNA, 80 bp, synthetic construct; identical to SEQ ID NO: 6323
  source 1..80: mol_type = other DNA

SEQ ID NO: 191054 - DNA, 80 bp, synthetic construct; identical to SEQ ID NO: 6324
  source 1..80: mol_type = other DNA

SEQ ID NO: 191055 - DNA, 80 bp, synthetic construct; identical to SEQ ID NO: 6325
  source 1..80: mol_type = other DNA

SEQ ID NO: 191056 - DNA, 80 bp, synthetic construct; identical to SEQ ID NO: 6326
  source 1..80: mol_type = other DNA

SEQ ID NO: 191057 - DNA, 80 bp, synthetic construct; identical to SEQ ID NO: 6327
  source 1..80: mol_type = other DNA

SEQ ID NO: 191058 - DNA, 80 bp, synthetic construct; identical to SEQ ID NO: 6328
  source 1..80: mol_type = other DNA

SEQ ID NO: 191059 - DNA, 80 bp, synthetic construct; identical to SEQ ID NO: 6329
  source 1..80: mol_type = other DNA

SEQ ID NO: 191060 - DNA, 80 bp, synthetic construct; identical to SEQ ID NO: 6330
  source 1..80: mol_type = other DNA

SEQ ID NO: 191061 - DNA, 80 bp, synthetic construct; identical to SEQ ID NO: 6331
  source 1..80: mol_type = other DNA

SEQ ID NO: 191062 - DNA, 80 bp, synthetic construct; identical to SEQ ID NO: 6332
  source 1..80: mol_type = other DNA

SEQ ID NO: 191063 - DNA, 80 bp, synthetic construct; identical to SEQ ID NO: 6333
  source 1..80: mol_type = other DNA

SEQ ID NO: 191064 - DNA, 80 bp, synthetic construct; identical to SEQ ID NO: 6334
  source 1..80: mol_type = other DNA

SEQ ID NO: 191065 - DNA, 80 bp, synthetic construct; identical to SEQ ID NO: 6335
  source 1..80: mol_type = other DNA

SEQ ID NO: 191066 - DNA, 80 bp, synthetic construct; identical to SEQ ID NO: 6336
  source 1..80: mol_type = other DNA

SEQ ID NO: 191067 - DNA, 80 bp, synthetic construct; identical to SEQ ID NO: 6337
  source 1..80: mol_type = other DNA

SEQ ID NO: 191068 - DNA, 80 bp, synthetic construct; identical to SEQ ID NO: 6338
  source 1..80: mol_type = other DNA

SEQ ID NO: 191069 - DNA, 80 bp, synthetic construct; identical to SEQ ID NO: 6339
  source 1..80: mol_type = other DNA

SEQ ID NO: 191070 - DNA, 80 bp, synthetic construct; identical to SEQ ID NO: 6340
  source 1..80: mol_type = other DNA

SEQ ID NO: 191071 - DNA, 80 bp, synthetic construct; identical to SEQ ID NO: 6341
  source 1..80: mol_type = other DNA

SEQ ID NO: 191072 - DNA, 80 bp, synthetic construct; identical to SEQ ID NO: 6342
  source 1..80: mol_type = other DNA

SEQ ID NO: 191073 - DNA, 80 bp, synthetic construct; identical to SEQ ID NO: 6343
  source 1..80: mol_type = other DNA

SEQ ID NO: 191074 - DNA, 80 bp, synthetic construct; identical to SEQ ID NO: 6344
  source 1..80: mol_type = other DNA

SEQ ID NO: 191075 - DNA, 80 bp, synthetic construct; identical to SEQ ID NO: 6345
  source 1..80: mol_type = other DNA

SEQ ID NO: 191076 - DNA, 80 bp, synthetic construct; identical to SEQ ID NO: 6346
  source 1..80: mol_type = other DNA

SEQ ID NO: 191077 - DNA, 80 bp, synthetic construct; identical to SEQ ID NO: 6347
  source 1..80: mol_type = other DNA

SEQ ID NO: 191078 - DNA, 80 bp, synthetic construct; identical to SEQ ID NO: 6348
  source 1..80: mol_type = other DNA

SEQ ID NO: 191079 - DNA, 80 bp, synthetic construct; identical to SEQ ID NO: 6349
  source 1..80: mol_type = other DNA

SEQ ID NO: 191080 - DNA, 80 bp, synthetic construct; identical to SEQ ID NO: 6350
  source 1..80: mol_type = other DNA

SEQ ID NO: 191081 - DNA, 80 bp, synthetic construct; identical to SEQ ID NO: 6351
  source 1..80: mol_type = other DNA

SEQ ID NO: 191082 - DNA, 80 bp, synthetic construct; identical to SEQ ID NO: 6352
  source 1..80: mol_type = other DNA

SEQ ID NO: 191083 - DNA, 80 bp, synthetic construct; identical to SEQ ID NO: 6353
  source 1..80: mol_type = other DNA

SEQ ID NO: 191084 - DNA, 80 bp, synthetic construct; identical to SEQ ID NO: 6354
  source 1..80: mol_type = other DNA

SEQ ID NO: 191085 - DNA, 80 bp, synthetic construct; identical to SEQ ID NO: 6355
  source 1..80: mol_type = other DNA

SEQ ID NO: 191086 - DNA, 80 bp, synthetic construct; identical to SEQ ID NO: 6356
  source 1..80: mol_type = other DNA

SEQ ID NO: 191087 - DNA, 80 bp, synthetic construct; identical to SEQ ID NO: 6357
  source 1..80: mol_type = other DNA

SEQ ID NO: 191088 - DNA, 80 bp, synthetic construct; identical to SEQ ID NO: 6358
  source 1..80: mol_type = other DNA

SEQ ID NO: 191089 - DNA, 80 bp, synthetic construct; identical to SEQ ID NO: 6359
  source 1..80: mol_type = other DNA

SEQ ID NO: 191090 - DNA, 80 bp, synthetic construct; identical to SEQ ID NO: 6360
  source 1..80: mol_type = other DNA

SEQ ID NO: 191091 - DNA, 80 bp, synthetic construct; identical to SEQ ID NO: 6361
  source 1..80: mol_type = other DNA

SEQ ID NO: 191092 - DNA, 80 bp, synthetic construct; identical to SEQ ID NO: 6362
  source 1..80: mol_type = other DNA

SEQ ID NO: 191093 - DNA, 80 bp, synthetic construct; identical to SEQ ID NO: 6363
  source 1..80: mol_type = other DNA

SEQ ID NO: 191094 - DNA, 80 bp, synthetic construct; identical to SEQ ID NO: 6364
  source 1..80: mol_type = other DNA

SEQ ID NO: 191095 - DNA, 80 bp, synthetic construct; identical to SEQ ID NO: 6365
  source 1..80: mol_type = other DNA

SEQ ID NO: 191096 - DNA, 80 bp, synthetic construct; identical to SEQ ID NO: 6366
  source 1..80: mol_type = other DNA

SEQ ID NO: 191097 - DNA, 80 bp, synthetic construct; identical to SEQ ID NO: 6367
  source 1..80: mol_type = other DNA

SEQ ID NO: 191098 - DNA, 80 bp, synthetic construct; identical to SEQ ID NO: 6368
  source 1..80: mol_type = other DNA

SEQ ID NO: 191099 - DNA, 80 bp, synthetic construct; identical to SEQ ID NO: 6369
  source 1..80: mol_type = other DNA

SEQ ID NO: 191100 - DNA, 80 bp, synthetic construct; identical to SEQ ID NO: 6370
  source 1..80: mol_type = other DNA

SEQ ID NO: 191101 - DNA, 80 bp, synthetic construct; identical to SEQ ID NO: 6371
  source 1..80: mol_type = other DNA

SEQ ID NO: 191102 - DNA, 80 bp, synthetic construct; identical to SEQ ID NO: 6372
  source 1..80: mol_type = other DNA

SEQ ID NO: 191103 - DNA, 80 bp, synthetic construct; identical to SEQ ID NO: 6373
  source 1..80: mol_type = other DNA

SEQ ID NO: 191104 - DNA, 80 bp, synthetic construct; identical to SEQ ID NO: 6374
  source 1..80: mol_type = other DNA

SEQ ID NO: 191105 - DNA, 80 bp, synthetic construct; identical to SEQ ID NO: 6375
  source 1..80: mol_type = other DNA

SEQ ID NO: 191106 - DNA, 80 bp, synthetic construct; identical to SEQ ID NO: 6376
  source 1..80: mol_type = other DNA

SEQ ID NO: 191107 - DNA, 80 bp, synthetic construct; identical to SEQ ID NO: 6377
  source 1..80: mol_type = other DNA

SEQ ID NO: 191108 - DNA, 80 bp, synthetic construct; identical to SEQ ID NO: 6378
  source 1..80: mol_type = other DNA

SEQ ID NO: 191109 - DNA, 80 bp, synthetic construct; identical to SEQ ID NO: 6379
  source 1..80: mol_type = other DNA

SEQ ID NO: 191110 - DNA, 80 bp, synthetic construct; identical to SEQ ID NO: 6380
  source 1..80: mol_type = other DNA

SEQ ID NO: 191111 - DNA, 80 bp, synthetic construct; identical to SEQ ID NO: 6381
  source 1..80: mol_type = other DNA

SEQ ID NO: 191112 - DNA, 80 bp, synthetic construct; identical to SEQ ID NO: 6382
  source 1..80: mol_type = other DNA

SEQ ID NO: 191113 - DNA, 80 bp, synthetic construct; identical to SEQ ID NO: 6383
  source 1..80: mol_type = other DNA

SEQ ID NO: 191114 - DNA, 80 bp, synthetic construct; identical to SEQ ID NO: 6384
  source 1..80: mol_type = other DNA

SEQ ID NO: 191115 - DNA, 80 bp, synthetic construct; identical to SEQ ID NO: 6385
  source 1..80: mol_type = other DNA

SEQ ID NO: 191116 - DNA, 80 bp, synthetic construct; identical to SEQ ID NO: 6386
  source 1..80: mol_type = other DNA

SEQ ID NO: 191117 - DNA, 80 bp, synthetic construct; identical to SEQ ID NO: 6387
  source 1..80: mol_type = other DNA

SEQ ID NO: 191118 - DNA, 80 bp, synthetic construct; identical to SEQ ID NO: 6388
  source 1..80: mol_type = other DNA

SEQ ID NO: 191119 - DNA, 80 bp, synthetic construct; identical to SEQ ID NO: 6389
  source 1..80: mol_type = other DNA

SEQ ID NO: 191120 - DNA, 80 bp, synthetic construct; identical to SEQ ID NO: 6390
  source 1..80: mol_type = other DNA

SEQ ID NO: 191121 - DNA, 80 bp, synthetic construct; identical to SEQ ID NO: 6391
  source 1..80: mol_type = other DNA

SEQ ID NO: 191122 - DNA, 80 bp, synthetic construct; identical to SEQ ID NO: 6392
  source 1..80: mol_type = other DNA

SEQ ID NO: 191123 - DNA, 80 bp, synthetic construct; identical to SEQ ID NO: 6393
  source 1..80: mol_type = other DNA

SEQ ID NO: 191124 - DNA, 80 bp, synthetic construct; identical to SEQ ID NO: 6394
  source 1..80: mol_type = other DNA

SEQ ID NO: 191125 - DNA, 80 bp, synthetic construct; identical to SEQ ID NO: 6395
  source 1..80: mol_type = other DNA

SEQ ID NO: 191126 - DNA, 80 bp, synthetic construct; identical to SEQ ID NO: 6396
  source 1..80: mol_type = other DNA

SEQ ID NO: 191127 - DNA, 80 bp, synthetic construct; identical to SEQ ID NO: 6397
  source 1..80: mol_type = other DNA

SEQ ID NO: 191128 - DNA, 80 bp, synthetic construct; identical to SEQ ID NO: 6398
  source 1..80: mol_type = other DNA

SEQ ID NO: 191129 - DNA, 80 bp, synthetic construct; identical to SEQ ID NO: 6399
  source 1..80: mol_type = other DNA

SEQ ID NO: 191130 - DNA, 80 bp, synthetic construct; identical to SEQ ID NO: 6400
  source 1..80: mol_type = other DNA

SEQ ID NO: 191131 - DNA, 80 bp, synthetic construct; identical to SEQ ID NO: 6401
  source 1..80: mol_type = other DNA

SEQ ID NO: 191132 - DNA, 80 bp, synthetic construct; identical to SEQ ID NO: 6402
  source 1..80: mol_type = other DNA

SEQ ID NO: 191133 - DNA, 80 bp, synthetic construct; identical to SEQ ID NO: 6403
  source 1..80: mol_type = other DNA

SEQ ID NO: 191134 - DNA, 80 bp, synthetic construct; identical to SEQ ID NO: 6404
  source 1..80: mol_type = other DNA

SEQ ID NO: 191135 - DNA, 80 bp, synthetic construct; identical to SEQ ID NO: 6405
  source 1..80: mol_type = other DNA

SEQ ID NO: 191136 - DNA, 80 bp, synthetic construct; identical to SEQ ID NO: 6406
  source 1..80: mol_type = other DNA

SEQ ID NO: 191137 - DNA, 80 bp, synthetic construct; identical to SEQ ID NO: 6407
  source 1..80: mol_type = other DNA

SEQ ID NO: 191138 - DNA, 80 bp, synthetic construct; identical to SEQ ID NO: 6408
  source 1..80: mol_type = other DNA

SEQ ID NO: 191139 - DNA, 80 bp, synthetic construct; identical to SEQ ID NO: 6409
  source 1..80: mol_type = other DNA

SEQ ID NO: 191140 - DNA, 80 bp, synthetic construct; identical to SEQ ID NO: 6410
  source 1..80: mol_type = other DNA

SEQ ID NO: 191141 - DNA, 80 bp, synthetic construct; identical to SEQ ID NO: 6411
  source 1..80: mol_type = other DNA

SEQ ID NO: 191142 - DNA, 80 bp, synthetic construct; identical to SEQ ID NO: 6412
  source 1..80: mol_type = other DNA

SEQ ID NO: 191143 - DNA, 80 bp, synthetic construct; identical to SEQ ID NO: 6413
  source 1..80: mol_type = other DNA

SEQ ID NO: 191144 - DNA, 80 bp, synthetic construct; identical to SEQ ID NO: 6414
  source 1..80: mol_type = other DNA

SEQ ID NO: 191145 - DNA, 80 bp, synthetic construct; identical to SEQ ID NO: 6415
  source 1..80: mol_type = other DNA

SEQ ID NO: 191146 - DNA, 80 bp, synthetic construct; identical to SEQ ID NO: 6416
  source 1..80: mol_type = other DNA

SEQ ID NO: 191147 - DNA, 80 bp, synthetic construct; identical to SEQ ID NO: 6417
  source 1..80: mol_type = other DNA

SEQ ID NO: 191148 - DNA, 80 bp, synthetic construct; identical to SEQ ID NO: 6418
  source 1..80: mol_type = other DNA

SEQ ID NO: 191149 - DNA, 80 bp, synthetic construct; identical to SEQ ID NO: 6419
  source 1..80: mol_type = other DNA

SEQ ID NO: 191150 - DNA, 80 bp, synthetic construct; identical to SEQ ID NO: 6420
  source 1..80: mol_type = other DNA

SEQ ID NO: 191151 - DNA, 80 bp, synthetic construct; identical to SEQ ID NO: 6421
  source 1..80: mol_type = other DNA

SEQ ID NO: 191152 - DNA, 80 bp, synthetic construct; identical to SEQ ID NO: 6422
  source 1..80: mol_type = other DNA

SEQ ID NO: 191153 - DNA, 80 bp, synthetic construct; identical to SEQ ID NO: 6423
  source 1..80: mol_type = other DNA

SEQ ID NO: 191154 - DNA, 80 bp, synthetic construct; identical to SEQ ID NO: 6424
  source 1..80: mol_type = other DNA

SEQ ID NO: 191155 - DNA, 80 bp, synthetic construct; identical to SEQ ID NO: 6425
  source 1..80: mol_type = other DNA

SEQ ID NO: 191156 - DNA, 80 bp, synthetic construct; identical to SEQ ID NO: 6426
  source 1..80: mol_type = other DNA

SEQ ID NO: 191157 - DNA, 80 bp, synthetic construct; identical to SEQ ID NO: 6427
  source 1..80: mol_type = other DNA

SEQ ID NO: 191158 - DNA, 80 bp, synthetic construct; identical to SEQ ID NO: 6428
  source 1..80: mol_type = other DNA

SEQ ID NO: 191159 - DNA, 80 bp, synthetic construct; identical to SEQ ID NO: 6429
  source 1..80: mol_type = other DNA

SEQ ID NO: 191160 - DNA, 80 bp, synthetic construct; identical to SEQ ID NO: 6430
  source 1..80: mol_type = other DNA

SEQ ID NO: 191161 - DNA, 80 bp, synthetic construct; identical to SEQ ID NO: 6431
  source 1..80: mol_type = other DNA

SEQ ID NO: 191162 - DNA, 80 bp, synthetic construct; identical to SEQ ID NO: 6432
  source 1..80: mol_type = other DNA

SEQ ID NO: 191163 - DNA, 80 bp, synthetic construct; identical to SEQ ID NO: 6433
  source 1..80: mol_type = other DNA

SEQ ID NO: 191164 - DNA, 80 bp, synthetic construct; identical to SEQ ID NO: 6434
  source 1..80: mol_type = other DNA

SEQ ID NO: 191165 - DNA, 80 bp, synthetic construct; identical to SEQ ID NO: 6435
  source 1..80: mol_type = other DNA

SEQ ID NO: 191166 - DNA, 80 bp, synthetic construct; identical to SEQ ID NO: 6436
  source 1..80: mol_type = other DNA

SEQ ID NO: 191167 - DNA, 80 bp, synthetic construct; identical to SEQ ID NO: 6437
  source 1..80: mol_type = other DNA

SEQ ID NO: 191168 - DNA, 80 bp, synthetic construct; identical to SEQ ID NO: 6438
  source 1..80: mol_type = other DNA

SEQ ID NO: 191169 - DNA, 80 bp, synthetic construct; identical to SEQ ID NO: 6439
  source 1..80: mol_type = other DNA

SEQ ID NO: 191170 - DNA, 80 bp, synthetic construct; identical to SEQ ID NO: 6440
  source 1..80: mol_type = other DNA

SEQ ID NO: 191171 - DNA, 80 bp, synthetic construct; identical to SEQ ID NO: 6441
  source 1..80: mol_type = other DNA

SEQ ID NO: 191172 - DNA, 80 bp, synthetic construct; identical to SEQ ID NO: 6442
  source 1..80: mol_type = other DNA

SEQ ID NO: 191173 - DNA, 80 bp, synthetic construct; identical to SEQ ID NO: 6443
  source 1..80: mol_type = other DNA

SEQ ID NO: 191174 - DNA, 80 bp, synthetic construct; identical to SEQ ID NO: 6444
  source 1..80: mol_type = other DNA

SEQ ID NO: 191175 - DNA, 80 bp, synthetic construct; identical to SEQ ID NO: 6445
  source 1..80: mol_type = other DNA

SEQ ID NO: 191176 - DNA, 80 bp, synthetic construct; identical to SEQ ID NO: 6446
  source 1..80: mol_type = other DNA

SEQ ID NO: 191177 - DNA, 80 bp, synthetic construct; identical to SEQ ID NO: 6447
  source 1..80: mol_type = other DNA

SEQ ID NO: 191178 - DNA, 80 bp, synthetic construct; identical to SEQ ID NO: 6448
  source 1..80: mol_type = other DNA

SEQ ID NO: 191179 - DNA, 80 bp, synthetic construct; identical to SEQ ID NO: 6449
  source 1..80: mol_type = other DNA

SEQ ID NO: 191180 - DNA, 80 bp, synthetic construct; identical to SEQ ID NO: 6450
  source 1..80: mol_type = other DNA

SEQ ID NO: 191181 - DNA, 80 bp, synthetic construct; identical to SEQ ID NO: 6451
  source 1..80: mol_type = other DNA

SEQ ID NO: 191182 - DNA, 80 bp, synthetic construct; identical to SEQ ID NO: 6452
  source 1..80: mol_type = other DNA

SEQ ID NO: 191183 - DNA, 80 bp, synthetic construct; identical to SEQ ID NO: 6453
  source 1..80: mol_type = other DNA

SEQ ID NO: 191184 - DNA, 80 bp, synthetic construct; identical to SEQ ID NO: 6454
  source 1..80: mol_type = other DNA

SEQ ID NO: 191185 - DNA, 80 bp, synthetic construct; identical to SEQ ID NO: 6455
  source 1..80: mol_type = other DNA

SEQ ID NO: 191186 - DNA, 80 bp, synthetic construct; identical to SEQ ID NO: 6456
  source 1..80: mol_type = other DNA

SEQ ID NO: 191187 - DNA, 80 bp, synthetic construct; identical to SEQ ID NO: 6457
  source 1..80: mol_type = other DNA

SEQ ID NO: 191188 - DNA, 80 bp, synthetic construct; identical to SEQ ID NO: 6458
  source 1..80: mol_type = other DNA

SEQ ID NO: 191189 - DNA, 80 bp, synthetic construct; identical to SEQ ID NO: 6459
  source 1..80: mol_type = other DNA

SEQ ID NO: 191190 - DNA, 80 bp, synthetic construct; identical to SEQ ID NO: 6460
  source 1..80: mol_type = other DNA

SEQ ID NO: 191191 - DNA, 80 bp, synthetic construct; identical to SEQ ID NO: 6461
  source 1..80: mol_type = other DNA

SEQ ID NO: 191192 - DNA, 80 bp, synthetic construct; identical to SEQ ID NO: 6462
  source 1..80: mol_type = other DNA

SEQ ID NO: 191193 - DNA, 80 bp, synthetic construct; identical to SEQ ID NO: 6463
  source 1..80: mol_type = other DNA

SEQ ID NO: 191194 - DNA, 80 bp, synthetic construct; identical to SEQ ID NO: 6464
  source 1..80: mol_type = other DNA

SEQ ID NO: 191195 - DNA, 80 bp, synthetic construct; identical to SEQ ID NO: 6465
  source 1..80: mol_type = other DNA

SEQ ID NO: 191196 - DNA, 80 bp, synthetic construct; identical to SEQ ID NO: 6466
  source 1..80: mol_type = other DNA

SEQ ID NO: 191197 - DNA, 80 bp, synthetic construct; identical to SEQ ID NO: 6467
  source 1..80: mol_type = other DNA

SEQ ID NO: 191198 - DNA, 80 bp, synthetic construct; identical to SEQ ID NO: 6468
  source 1..80: mol_type = other DNA

SEQ ID NO: 191199 - DNA, 80 bp, synthetic construct; identical to SEQ ID NO: 6469
  source 1..80: mol_type = other DNA

SEQ ID NO: 191200 - DNA, 80 bp, synthetic construct; identical to SEQ ID NO: 6470
  source 1..80: mol_type = other DNA

SEQ ID NO: 191201 - DNA, 80 bp, synthetic construct; identical to SEQ ID NO: 6471
  source 1..80: mol_type = other DNA

SEQ ID NO: 191202 - DNA, 80 bp, synthetic construct; identical to SEQ ID NO: 6472
  source 1..80: mol_type = other DNA

SEQ ID NO: 191203 - DNA, 80 bp, synthetic construct; identical to SEQ ID NO: 6473
  source 1..80: mol_type = other DNA

SEQ ID NO: 191204 - DNA, 80 bp, synthetic construct; identical to SEQ ID NO: 6474
  source 1..80: mol_type = other DNA

SEQ ID NO: 191205 - DNA, 80 bp, synthetic construct; identical to SEQ ID NO: 6475
  source 1..80: mol_type = other DNA

SEQ ID NO: 191206 - DNA, 80 bp, synthetic construct; identical to SEQ ID NO: 6476
  source 1..80: mol_type = other DNA

SEQ ID NO: 191207 - DNA, 80 bp, synthetic construct; identical to SEQ ID NO: 6477
  source 1..80: mol_type = other DNA

SEQ ID NO: 191208 - DNA, 80 bp, synthetic construct; identical to SEQ ID NO: 6478
  source 1..80: mol_type = other DNA

SEQ ID NO: 191209 - DNA, 80 bp, synthetic construct; identical to SEQ ID NO: 6479
  source 1..80: mol_type = other DNA

SEQ ID NO: 191210 - DNA, 80 bp, synthetic construct; identical to SEQ ID NO: 6480
  source 1..80: mol_type = other DNA

SEQ ID NO: 191211 - DNA, 80 bp, synthetic construct; identical to SEQ ID NO: 6481
  source 1..80: mol_type = other DNA

SEQ ID NO: 191212 - DNA, 80 bp, synthetic construct; identical to SEQ ID NO: 6482
  source 1..80: mol_type = other DNA

SEQ ID NO: 191213 - DNA, 80 bp, synthetic construct; identical to SEQ ID NO: 6483
  source 1..80: mol_type = other DNA

SEQ ID NO: 191214 - DNA, 80 bp, synthetic construct; identical to SEQ ID NO: 6484
  source 1..80: mol_type = other DNA

SEQ ID NO: 191215 - DNA, 80 bp, synthetic construct; identical to SEQ ID NO: 6485
  source 1..80: mol_type = other DNA

SEQ ID NO: 191216 - DNA, 80 bp, synthetic construct; identical to SEQ ID NO: 6486
  source 1..80: mol_type = other DNA

SEQ ID NO: 191217 - DNA, 80 bp, synthetic construct; identical to SEQ ID NO: 6487
  source 1..80: mol_type = other DNA

SEQ ID NO: 191218 - DNA, 80 bp, synthetic construct; identical to SEQ ID NO: 6488
  source 1..80: mol_type = other DNA

SEQ ID NO: 191219 - DNA, 80 bp, synthetic construct; identical to SEQ ID NO: 6489
  source 1..80: mol_type = other DNA

SEQ ID NO: 191220 - DNA, 80 bp, synthetic construct; identical to SEQ ID NO: 6490
  source 1..80: mol_type = other DNA

SEQ ID NO: 191221 - DNA, 80 bp, synthetic construct; identical to SEQ ID NO: 6491
  source 1..80: mol_type = other DNA

SEQ ID NO: 191222 - DNA, 80 bp, synthetic construct; identical to SEQ ID NO: 6492
  source 1..80: mol_type = other DNA

SEQ ID NO: 191223 - DNA, 80 bp, synthetic construct; identical to SEQ ID NO: 6493
  source 1..80: mol_type = other DNA

SEQ ID NO: 191224 - DNA, 80 bp, synthetic construct; identical to SEQ ID NO: 6494
  source 1..80: mol_type = other DNA

SEQ ID NO: 191225 - DNA, 80 bp, synthetic construct; identical to SEQ ID NO: 6495
  source 1..80: mol_type = other DNA

SEQ ID NO: 191226 - DNA, 80 bp, synthetic construct; identical to SEQ ID NO: 6496
  source 1..80: mol_type = other DNA

SEQ ID NO: 191227 - DNA, 80 bp, synthetic construct; identical to SEQ ID NO: 6497
  source 1..80: mol_type = other DNA

SEQ ID NO: 191228 - DNA, 80 bp, synthetic construct; identical to SEQ ID NO: 6498
  source 1..80: mol_type = other DNA

SEQ ID NO: 191229 - DNA, 80 bp, synthetic construct; identical to SEQ ID NO: 6499
  source 1..80: mol_type = other DNA

SEQ ID NO: 191230 - DNA, 80 bp, synthetic construct; identical to SEQ ID NO: 6500
  source 1..80: mol_type = other DNA

SEQ ID NO: 191231 - DNA, 80 bp, synthetic construct; identical to SEQ ID NO: 6501
  source 1..80: mol_type = other DNA

SEQ ID NO: 191232 - DNA, 80 bp, synthetic construct; identical to SEQ ID NO: 6502
  source 1..80: mol_type = other DNA

SEQ ID NO: 191233 - DNA, 80 bp, synthetic construct; identical to SEQ ID NO: 6503
  source 1..80: mol_type = other DNA

SEQ ID NO: 191234 - DNA, 80 bp, synthetic construct; identical to SEQ ID NO: 6504
  source 1..80: mol_type = other DNA

SEQ ID NO: 191235 - DNA, 80 bp, synthetic construct; identical to SEQ ID NO: 6505
  source 1..80: mol_type = other DNA

SEQ ID NO: 191236 - DNA, 80 bp, synthetic construct; identical to SEQ ID NO: 6506
  source 1..80: mol_type = other DNA

SEQ ID NO: 191237 - DNA, 80 bp, synthetic construct; identical to SEQ ID NO: 6507
  source 1..80: mol_type = other DNA

SEQ ID NO: 191238 - DNA, 80 bp, synthetic construct; identical to SEQ ID NO: 6508
  source 1..80: mol_type = other DNA

SEQ ID NO: 191239 - DNA, 80 bp, synthetic construct; identical to SEQ ID NO: 6509
  source 1..80: mol_type = other DNA

SEQ ID NO: 191240 - DNA, 80 bp, synthetic construct; identical to SEQ ID NO: 6510
  source 1..80: mol_type = other DNA

SEQ ID NO: 191241 - DNA, 80 bp, synthetic construct; identical to SEQ ID NO: 6511
  source 1..80: mol_type = other DNA

SEQ ID NO: 191242 - DNA, 80 bp, synthetic construct; identical to SEQ ID NO: 6512
  source 1..80: mol_type = other DNA

SEQ ID NO: 191243 - DNA, 80 bp, synthetic construct; identical to SEQ ID NO: 6513
  source 1..80: mol_type = other DNA

SEQ ID NO: 191244 - DNA, 80 bp, synthetic construct; identical to SEQ ID NO: 6514
  source 1..80: mol_type = other DNA

SEQ ID NO: 191245 - DNA, 80 bp, synthetic construct; identical to SEQ ID NO: 6515
  source 1..80: mol_type = other DNA

SEQ ID NO: 191246 - DNA, 80 bp, synthetic construct; identical to SEQ ID NO: 6516
  source 1..80: mol_type = other DNA

SEQ ID NO: 191247 - DNA, 80 bp, synthetic construct; identical to SEQ ID NO: 6517
  source 1..80: mol_type = other DNA

SEQ ID NO: 191248 - DNA, 80 bp, synthetic construct; identical to SEQ ID NO: 6518
  source 1..80: mol_type = other DNA

SEQ ID NO: 191249 - DNA, 80 bp, synthetic construct; identical to SEQ ID NO: 6519
  source 1..80: mol_type = other DNA

SEQ ID NO: 191250 - DNA, 80 bp, synthetic construct; identical to SEQ ID NO: 6520
  source 1..80: mol_type = other DNA

SEQ ID NO: 191251 - DNA, 80 bp, synthetic construct; identical to SEQ ID NO: 6521
  source 1..80: mol_type = other DNA

SEQ ID NO: 191252 - DNA, 80 bp, synthetic construct; identical to SEQ ID NO: 6522
  source 1..80: mol_type = other DNA

SEQ ID NO: 191253 - DNA, 80 bp, synthetic construct; identical to SEQ ID NO: 6523
  source 1..80: mol_type = other DNA

SEQ ID NO: 191254 - DNA, 80 bp, synthetic construct; identical to SEQ ID NO: 6524
  source 1..80: mol_type = other DNA

SEQ ID NO: 191255 - DNA, 80 bp, synthetic construct; identical to SEQ ID NO: 6525
  source 1..80: mol_type = other DNA

SEQ ID NO: 191256 - DNA, 80 bp, synthetic construct; identical to SEQ ID NO: 6526
  source 1..80: mol_type = other DNA

SEQ ID NO: 191257 - DNA, 80 bp, synthetic construct; identical to SEQ ID NO: 6527
  source 1..80: mol_type = other DNA

SEQ ID NO: 191258 - DNA, 80 bp, synthetic construct; identical to SEQ ID NO: 6528
  source 1..80: mol_type = other DNA

SEQ ID NO: 191259 - DNA, 80 bp, synthetic construct; identical to SEQ ID NO: 6529
  source 1..80: mol_type = other DNA

SEQ ID NO: 191260 - DNA, 80 bp, synthetic construct; identical to SEQ ID NO: 6530
  source 1..80: mol_type = other DNA

SEQ ID NO: 191261 - DNA, 80 bp, synthetic construct; identical to SEQ ID NO: 6531
  source 1..80: mol_type = other DNA

SEQ ID NO: 191262 - DNA, 80 bp, synthetic construct; identical to SEQ ID NO: 6532
  source 1..80: mol_type = other DNA

SEQ ID NO: 191263 - DNA, 80 bp, synthetic construct; identical to SEQ ID NO: 6533
  source 1..80: mol_type = other DNA

SEQ ID NO: 191264 - DNA, 80 bp, synthetic construct; identical to SEQ ID NO: 6534
  source 1..80: mol_type = other DNA

SEQ ID NO: 191265 - DNA, 80 bp, synthetic construct; identical to SEQ ID NO: 6535
  source 1..80: mol_type = other DNA

SEQ ID NO: 191266 - DNA, 80 bp, synthetic construct; identical to SEQ ID NO: 6536
  source 1..80: mol_type = other DNA

SEQ ID NO: 191267 - DNA, 80 bp, synthetic construct; identical to SEQ ID NO: 6537
  source 1..80: mol_type = other DNA

SEQ ID NO: 191268 - DNA, 80 bp, synthetic construct; identical to SEQ ID NO: 6538
  source 1..80: mol_type = other DNA

SEQ ID NO: 191269 - DNA, 80 bp, synthetic construct; identical to SEQ ID NO: 6539
  source 1..80: mol_type = other DNA

SEQ ID NO: 191270 - DNA, 80 bp, synthetic construct; identical to SEQ ID NO: 6540
  source 1..80: mol_type = other DNA

SEQ ID NO: 191271 - DNA, 80 bp, synthetic construct; identical to SEQ ID NO: 6541
  source 1..80: mol_type = other DNA

SEQ ID NO: 191272 - DNA, 80 bp, synthetic construct; identical to SEQ ID NO: 6542
  source 1..80: mol_type = other DNA

SEQ ID NO: 191273 - DNA, 80 bp, synthetic construct; identical to SEQ ID NO: 6543
  source 1..80: mol_type = other DNA

SEQ ID NO: 191274 - DNA, 80 bp, synthetic construct; identical to SEQ ID NO: 6544
  source 1..80: mol_type = other DNA

SEQ ID NO: 191275 - DNA, 80 bp, synthetic construct; identical to SEQ ID NO: 6545
  source 1..80: mol_type = other DNA

SEQ ID NO: 191276 - DNA, 80 bp, synthetic construct; identical to SEQ ID NO: 6546
  source 1..80: mol_type = other DNA

SEQ ID NO: 191277 - DNA, 80 bp, synthetic construct; identical to SEQ ID NO: 6547
  source 1..80: mol_type = other DNA

SEQ ID NO: 191278 - DNA, 80 bp, synthetic construct; identical to SEQ ID NO: 6548
  source 1..80: mol_type = other DNA

SEQ ID NO: 191279 - DNA, 80 bp, synthetic construct; identical to SEQ ID NO: 6549
  source 1..80: mol_type = other DNA

SEQ ID NO: 191280 - DNA, 80 bp, synthetic construct; identical to SEQ ID NO: 6550
  source 1..80: mol_type = other DNA

SEQ ID NO: 191281 - DNA, 80 bp, synthetic construct; identical to SEQ ID NO: 6551
  source 1..80: mol_type = other DNA

SEQ ID NO: 191282 - DNA, 80 bp, synthetic construct; identical to SEQ ID NO: 6552
  source 1..80: mol_type = other DNA

SEQ ID NO: 191283 - DNA, 80 bp, synthetic construct; identical to SEQ ID NO: 6553
  source 1..80: mol_type = other DNA

SEQ ID NO: 191284 - DNA, 80 bp, synthetic construct; identical to SEQ ID NO: 6554
  source 1..80: mol_type = other DNA

SEQ ID NO: 191285 - DNA, 80 bp, synthetic construct; identical to SEQ ID NO: 6555
  source 1..80: mol_type = other DNA

SEQ ID NO: 191286 - DNA, 80 bp, synthetic construct; identical to SEQ ID NO: 6556
  source 1..80: mol_type = other DNA

SEQ ID NO: 191287 - DNA, 80 bp, synthetic construct; identical to SEQ ID NO: 6557
  source 1..80: mol_type = other DNA

SEQ ID NO: 191288 - DNA, 80 bp, synthetic construct; identical to SEQ ID NO: 6558
  source 1..80: mol_type = other DNA

SEQ ID NO: 191289 - DNA, 80 bp, synthetic construct; identical to SEQ ID NO: 6559
  source 1..80: mol_type = other DNA

SEQ ID NO: 191290 - DNA, 80 bp, synthetic construct; identical to SEQ ID NO: 6560
  source 1..80: mol_type = other DNA

SEQ ID NO: 191291 - DNA, 80 bp, synthetic construct; identical to SEQ ID NO: 6561
  source 1..80: mol_type = other DNA

SEQ ID NO: 191292 - DNA, 80 bp, synthetic construct; identical to SEQ ID NO: 6562
  source 1..80: mol_type = other DNA

SEQ ID NO: 191293 - DNA, 80 bp, synthetic construct; identical to SEQ ID NO: 6563
  source 1..80: mol_type = other DNA

SEQ ID NO: 191294 - DNA, 80 bp, synthetic construct; identical to SEQ ID NO: 6564
  source 1..80: mol_type = other DNA

SEQ ID NO: 191295 - DNA, 80 bp, synthetic construct; identical to SEQ ID NO: 6565
  source 1..80: mol_type = other DNA

SEQ ID NO: 191296 - DNA, 80 bp, synthetic construct; identical to SEQ ID NO: 6566
  source 1..80: mol_type = other DNA

SEQ ID NO: 191297 - DNA, 80 bp, synthetic construct; identical to SEQ ID NO: 6567
  source 1..80: mol_type = other DNA

SEQ ID NO: 191298 - DNA, 80 bp, synthetic construct; identical to SEQ ID NO: 6568
  source 1..80: mol_type = other DNA

SEQ ID NO: 191299 - DNA, 80 bp, synthetic construct; identical to SEQ ID NO: 6569
  source 1..80: mol_type = other DNA

SEQ ID NO: 191300 - DNA, 80 bp, synthetic construct; identical to SEQ ID NO: 6570
  source 1..80: mol_type = other DNA

SEQ ID NO: 191301 - DNA, 80 bp, synthetic construct; identical to SEQ ID NO: 6571
  source 1..80: mol_type = other DNA

SEQ ID NO: 191302 - DNA, 80 bp, synthetic construct; identical to SEQ ID NO: 6572
  source 1..80: mol_type = other DNA

SEQ ID NO: 191303 - DNA, 80 bp, synthetic construct; identical to SEQ ID NO: 6573
  source 1..80: mol_type = other DNA

SEQ ID NO: 191304 - DNA, 80 bp, synthetic construct; identical to SEQ ID NO: 6574
  source 1..80: mol_type = other DNA

SEQ ID NO: 191305 - DNA, 80 bp, synthetic construct; identical to SEQ ID NO: 6575
  source 1..80: mol_type = other DNA

SEQ ID NO: 191306 - DNA, 80 bp, synthetic construct; identical to SEQ ID NO: 6576
  source 1..80: mol_type = other DNA

SEQ ID NO: 191307 - DNA, 80 bp, synthetic construct; identical to SEQ ID NO: 6577
  source 1..80: mol_type = other DNA

SEQ ID NO: 191308 - DNA, 80 bp, synthetic construct; identical to SEQ ID NO: 6578
  source 1..80: mol_type = other DNA

SEQ ID NO: 191309 - DNA, 80 bp, synthetic construct; identical to SEQ ID NO: 6579
  source 1..80: mol_type = other DNA

SEQ ID NO: 191310 - DNA, 80 bp, synthetic construct; identical to SEQ ID NO: 6580
  source 1..80: mol_type = other DNA

SEQ ID NO: 191311 - DNA, 80 bp, synthetic construct; identical to SEQ ID NO: 6581
  source 1..80: mol_type = other DNA

SEQ ID NO: 191312 - DNA, 80 bp, synthetic construct; identical to SEQ ID NO: 6582
  source 1..80: mol_type = other DNA

SEQ ID NO: 191313 - DNA, 80 bp, synthetic construct; identical to SEQ ID NO: 6583
  source 1..80: mol_type = other DNA

SEQ ID NO: 191314 - DNA, 80 bp, synthetic construct; identical to SEQ ID NO: 6584
  source 1..80: mol_type = other DNA

SEQ ID NO: 191315 - DNA, 80 bp, synthetic construct; identical to SEQ ID NO: 6585
  source 1..80: mol_type = other DNA

SEQ ID NO: 191316 - DNA, 80 bp, synthetic construct; identical to SEQ ID NO: 6586
  source 1..80: mol_type = other DNA

SEQ ID NO: 191317 - DNA, 80 bp, synthetic construct; identical to SEQ ID NO: 6587
  source 1..80: mol_type = other DNA

SEQ ID NO: 191318 - DNA, 80 bp, synthetic construct; identical to SEQ ID NO: 6588
  source 1..80: mol_type = other DNA

SEQ ID NO: 191319 - DNA, 80 bp, synthetic construct; identical to SEQ ID NO: 6589
  source 1..80: mol_type = other DNA

SEQ ID NO: 191320 - DNA, 80 bp, synthetic construct; identical to SEQ ID NO: 6590
  source 1..80: mol_type = other DNA

SEQ ID NO: 191321 - DNA, 80 bp, synthetic construct; identical to SEQ ID NO: 6591
  source 1..80: mol_type = other DNA

SEQ ID NO: 191322 - DNA, 80 bp, synthetic construct; identical to SEQ ID NO: 6592
  source 1..80: mol_type = other DNA

SEQ ID NO: 191323 - DNA, 80 bp, synthetic construct; identical to SEQ ID NO: 6593
  source 1..80: mol_type = other DNA

SEQ ID NO: 191324 - DNA, 80 bp, synthetic construct; identical to SEQ ID NO: 6594
  source 1..80: mol_type = other DNA

SEQ ID NO: 191325 - DNA, 80 bp, synthetic construct; identical to SEQ ID NO: 6595
  source 1..80: mol_type = other DNA

SEQ ID NO: 191326 - DNA, 80 bp, synthetic construct; identical to SEQ ID NO: 6596
  source 1..80: mol_type = other DNA

SEQ ID NO: 191327 - DNA, 80 bp, synthetic construct; identical to SEQ ID NO: 6597
  source 1..80: mol_type = other DNA

SEQ ID NO: 191328 - DNA, 80 bp, synthetic construct; identical to SEQ ID NO: 6598
  source 1..80: mol_type = other DNA

SEQ ID NO: 191329 - DNA, 80 bp, synthetic construct; identical to SEQ ID NO: 6599
  source 1..80: mol_type = other DNA

SEQ ID NO: 191330 - DNA, 80 bp, synthetic construct; identical to SEQ ID NO: 6600
  source 1..80: mol_type = other DNA

SEQ ID NO: 191331 - DNA, 80 bp, synthetic construct; identical to SEQ ID NO: 6601
  source 1..80: mol_type = other DNA

SEQ ID NO: 191332 - DNA, 80 bp, synthetic construct; identical to SEQ ID NO: 6602
  source 1..80: mol_type = other DNA

SEQ ID NO: 191333 - DNA, 80 bp, synthetic construct; identical to SEQ ID NO: 6603
  source 1..80: mol_type = other DNA

SEQ ID NO: 191334 - DNA, 80 bp, synthetic construct; identical to SEQ ID NO: 6604
  source 1..80: mol_type = other DNA

SEQ ID NO: 191335 - DNA, 80 bp, synthetic construct; identical to SEQ ID NO: 6605
  source 1..80: mol_type = other DNA

SEQ ID NO: 191336 - DNA, 80 bp, synthetic construct; identical to SEQ ID NO: 6606
  source 1..80: mol_type = other DNA

SEQ ID NO: 191337 - DNA, 80 bp, synthetic construct; identical to SEQ ID NO: 6607
  source 1..80: mol_type = other DNA

SEQ ID NO: 191338 - DNA, 80 bp, synthetic construct; identical to SEQ ID NO: 6608
  source 1..80: mol_type = other DNA

SEQ ID NO: 191339 - DNA, 80 bp, synthetic construct; identical to SEQ ID NO: 6609
  source 1..80: mol_type = other DNA

SEQ ID NO: 191340 - DNA, 80 bp, synthetic construct; identical to SEQ ID NO: 6610
  source 1..80: mol_type = other DNA

SEQ ID NO: 191341 - DNA, 80 bp, synthetic construct; identical to SEQ ID NO: 6611
  source 1..80: mol_type = other DNA

SEQ ID NO: 191342 - DNA, 80 bp, synthetic construct; identical to SEQ ID NO: 6612
  source 1..80: mol_type = other DNA

SEQ ID NO: 191343 - DNA, 80 bp, synthetic construct; identical to SEQ ID NO: 6613
  source 1..80: mol_type = other DNA

SEQ ID NO: 191344 - DNA, 80 bp, synthetic construct; identical to SEQ ID NO: 6614
  source 1..80: mol_type = other DNA

SEQ ID NO: 191345 - DNA, 80 bp, synthetic construct; identical to SEQ ID NO: 6615
  source 1..80: mol_type = other DNA

SEQ ID NO: 191346 - DNA, 80 bp, synthetic construct; identical to SEQ ID NO: 6616
  source 1..80: mol_type = other DNA

SEQ ID NO: 191347 - DNA, 80 bp, synthetic construct; identical to SEQ ID NO: 6617
  source 1..80: mol_type = other DNA

SEQ ID NO: 191348 - DNA, 80 bp, synthetic construct; identical to SEQ ID NO: 6618
  source 1..80: mol_type = other DNA

SEQ ID NO: 191349 - DNA, 80 bp, synthetic construct; identical to SEQ ID NO: 6619
  source 1..80: mol_type = other DNA

SEQ ID NO: 191350 - DNA, 80 bp, synthetic construct; identical to SEQ ID NO: 6620
  source 1..80: mol_type = other DNA

SEQ ID NO: 191351 - DNA, 80 bp, synthetic construct; identical to SEQ ID NO: 6621
  source 1..80: mol_type = other DNA

SEQ ID NO: 191352 - DNA, 80 bp, synthetic construct; identical to SEQ ID NO: 6622
  source 1..80: mol_type = other DNA

SEQ ID NO: 191353 - DNA, 80 bp, synthetic construct; identical to SEQ ID NO: 6623
  source 1..80: mol_type = other DNA

SEQ ID NO: 191354 - DNA, 80 bp, synthetic construct; identical to SEQ ID NO: 6624
  source 1..80: mol_type = other DNA

SEQ ID NO: 191355 - DNA, 80 bp, synthetic construct; identical to SEQ ID NO: 6625
  source 1..80: mol_type = other DNA

SEQ ID NO: 191356 - DNA, 80 bp, synthetic construct; identical to SEQ ID NO: 6626
  source 1..80: mol_type = other DNA

SEQ ID NO: 191357 - DNA, 80 bp, synthetic construct; identical to SEQ ID NO: 6627
  source 1..80: mol_type = other DNA

SEQ ID NO: 191358 - DNA, 80 bp, synthetic construct; identical to SEQ ID NO: 6628
  source 1..80: mol_type = other DNA

SEQ ID NO: 191359 - DNA, 80 bp, synthetic construct; identical to SEQ ID NO: 6629
  source 1..80: mol_type = other DNA

SEQ ID NO: 191360 - DNA, 80 bp, synthetic construct; identical to SEQ ID NO: 6630
  source 1..80: mol_type = other DNA

SEQ ID NO: 191361 - DNA, 80 bp, synthetic construct; identical to SEQ ID NO: 6631
  source 1..80: mol_type = other DNA

SEQ ID NO: 191362 - DNA, 80 bp, synthetic construct; identical to SEQ ID NO: 6632
  source 1..80: mol_type = other DNA

SEQ ID NO: 191363 - DNA, 80 bp, synthetic construct; identical to SEQ ID NO: 6633
  source 1..80: mol_type = other DNA

SEQ ID NO: 191364 - DNA, 80 bp, synthetic construct; identical to SEQ ID NO: 6634
  source 1..80: mol_type = other DNA

SEQ ID NO: 191365 - DNA, 80 bp, synthetic construct; identical to SEQ ID NO: 6635
  source 1..80: mol_type = other DNA

SEQ ID NO: 191366 - DNA, 80 bp, synthetic construct; identical to SEQ ID NO: 6636
  source 1..80: mol_type = other DNA

SEQ ID NO: 191367 - DNA, 80 bp, synthetic construct; identical to SEQ ID NO: 6637
  source 1..80: mol_type = other DNA

SEQ ID NO: 191368 - DNA, 80 bp, synthetic construct; identical to SEQ ID NO: 6638
  source 1..80: mol_type = other DNA

SEQ ID NO: 191369 - DNA, 80 bp, synthetic construct; identical to SEQ ID NO: 6639
  source 1..80: mol_type = other DNA

SEQ ID NO: 191370 - DNA, 80 bp, synthetic construct; identical to SEQ ID NO: 6640
  source 1..80: mol_type = other DNA

SEQ ID NO: 191371 - DNA, 80 bp, synthetic construct; identical to SEQ ID NO: 6641
  source 1..80: mol_type = other DNA

SEQ ID NO: 191372 - DNA, 80 bp, synthetic construct; identical to SEQ ID NO: 6642
  source 1..80: mol_type = other DNA

SEQ ID NO: 191373 - DNA, 80 bp, synthetic construct; identical to SEQ ID NO: 6643
  source 1..80: mol_type = other DNA

SEQ ID NO: 191374 - DNA, 80 bp, synthetic construct; identical to SEQ ID NO: 6644
  source 1..80: mol_type = other DNA

SEQ ID NO: 191375 - DNA, 80 bp, synthetic construct; identical to SEQ ID NO: 6645
  source 1..80: mol_type = other DNA

SEQ ID NO: 191376 - DNA, 80 bp, synthetic construct; identical to SEQ ID NO: 6646
  source 1..80: mol_type = other DNA

SEQ ID NO: 191377 - DNA, 80 bp, synthetic construct; identical to SEQ ID NO: 6647
  source 1..80: mol_type = other DNA

SEQ ID NO: 191378 - DNA, 80 bp, synthetic construct; identical to SEQ ID NO: 6648
  source 1..80: mol_type = other DNA

SEQ ID NO: 191379 - DNA, 80 bp, synthetic construct; identical to SEQ ID NO: 6649
  source 1..80: mol_type = other DNA

SEQ ID NO: 191380 - DNA, 80 bp, synthetic construct; identical to SEQ ID NO: 6650
  source 1..80: mol_type = other DNA

SEQ ID NO: 191381 - DNA, 80 bp, synthetic construct; identical to SEQ ID NO: 6651
  source 1..80: mol_type = other DNA

SEQ ID NO: 191382 - DNA, 80 bp, synthetic construct; identical to SEQ ID NO: 6652
  source 1..80: mol_type = other DNA

SEQ ID NO: 191383 - DNA, 80 bp, synthetic construct; identical to SEQ ID NO: 6653
  source 1..80: mol_type = other DNA

SEQ ID NO: 191384 - DNA, 80 bp, synthetic construct; identical to SEQ ID NO: 6654
  source 1..80: mol_type = other DNA

SEQ ID NO: 191385 - DNA, 80 bp, synthetic construct; identical to SEQ ID NO: 6655
  source 1..80: mol_type = other DNA

SEQ ID NO: 191386 - DNA, 80 bp, synthetic construct; identical to SEQ ID NO: 6656
  source 1..80: mol_type = other DNA

SEQ ID NO: 191387 - DNA, 80 bp, synthetic construct; identical to SEQ ID NO: 6657
  source 1..80: mol_type = other DNA

SEQ ID NO: 191388 - DNA, 80 bp, synthetic construct; identical to SEQ ID NO: 6658
  source 1..80: mol_type = other DNA

SEQ ID NO: 191389 - DNA, 80 bp, synthetic construct; identical to SEQ ID NO: 6659
  source 1..80: mol_type = other DNA

SEQ ID NO: 191390 - DNA, 80 bp, synthetic construct; identical to SEQ ID NO: 6660
  source 1..80: mol_type = other DNA

SEQ ID NO: 191391 - DNA, 80 bp, synthetic construct; identical to SEQ ID NO: 6661
  source 1..80: mol_type = other DNA

SEQ ID NO: 191392 - DNA, 80 bp, synthetic construct; identical to SEQ ID NO: 6662
  source 1..80: mol_type = other DNA

SEQ ID NO: 191393 - DNA, 80 bp, synthetic construct; identical to SEQ ID NO: 6663
  source 1..80: mol_type = other DNA

SEQ ID NO: 191394 - DNA, 80 bp, synthetic construct; identical to SEQ ID NO: 6664
  source 1..80: mol_type = other DNA

SEQ ID NO: 191395 - DNA, 80 bp, synthetic construct; identical to SEQ ID NO: 6665
  source 1..80: mol_type = other DNA

SEQ ID NO: 191396 - DNA, 80 bp, synthetic construct; identical to SEQ ID NO: 6666
  source 1..80: mol_type = other DNA

SEQ ID NO: 191397 - DNA, 80 bp, synthetic construct; identical to SEQ ID NO: 6667
  source 1..80: mol_type = other DNA

SEQ ID NO: 191398 - DNA, 80 bp, synthetic construct; identical to SEQ ID NO: 6668
  source 1..80: mol_type = other DNA

SEQ ID NO: 191399 - DNA, 80 bp, synthetic construct; identical to SEQ ID NO: 6669
  source 1..80: mol_type = other DNA

SEQ ID NO: 191400 - DNA, 80 bp, synthetic construct; identical to SEQ ID NO: 6670
  source 1..80: mol_type = other DNA

SEQ ID NO: 191401 - DNA, 80 bp, synthetic construct; identical to SEQ ID NO: 6671
  source 1..80: mol_type = other DNA

SEQ ID NO: 191402 - DNA, 80 bp, synthetic construct; identical to SEQ ID NO: 6672
  source 1..80: mol_type = other DNA

SEQ ID NO: 191403 - DNA, 80 bp, synthetic construct; identical to SEQ ID NO: 6673
  source 1..80: mol_type = other DNA

SEQ ID NO: 191404 - DNA, 80 bp, synthetic construct; identical to SEQ ID NO: 6674
  source 1..80: mol_type = other DNA

SEQ ID NO: 191405 - DNA, 80 bp, synthetic construct; identical to SEQ ID NO: 6675
  source 1..80: mol_type = other DNA

SEQ ID NO: 191406 - DNA, 80 bp, synthetic construct; identical to SEQ ID NO: 6676
  source 1..80: mol_type = other DNA

SEQ ID NO: 191407 - DNA, 80 bp, synthetic construct; identical to SEQ ID NO: 6677
  source 1..80: mol_type = other DNA

SEQ ID NO: 191408 - DNA, 80 bp, synthetic construct; identical to SEQ ID NO: 6678
  source 1..80: mol_type = other DNA

SEQ ID NO: 191409 - DNA, 80 bp, synthetic construct; identical to SEQ ID NO: 6679
  source 1..80: mol_type = other DNA

SEQ ID NO: 191410 - DNA, 80 bp, synthetic construct; identical to SEQ ID NO: 6680
  source 1..80: mol_type = other DNA

SEQ ID NO: 191411 - DNA, 80 bp, synthetic construct; identical to SEQ ID NO: 6681
  source 1..80: mol_type = other DNA

SEQ ID NO: 191412 - DNA, 80 bp, synthetic construct; identical to SEQ ID NO: 6682
  source 1..80: mol_type = other DNA

SEQ ID NO: 191413 - DNA, 80 bp, synthetic construct; identical to SEQ ID NO: 6683
  source 1..80: mol_type = other DNA

SEQ ID NO: 191414 - DNA, 80 bp, synthetic construct; identical to SEQ ID NO: 6684
  source 1..80: mol_type = other DNA

SEQ ID NO: 191415 - DNA, 80 bp, synthetic construct; identical to SEQ ID NO: 6685
  source 1..80: mol_type = other DNA

SEQ ID NO: 191416 - DNA, 80 bp, synthetic construct; identical to SEQ ID NO: 6686
  source 1..80: mol_type = other DNA

SEQ ID NO: 191417 - DNA, 80 bp, synthetic construct; identical to SEQ ID NO: 6687
  source 1..80: mol_type = other DNA

SEQ ID NO: 191418 - DNA, 80 bp, synthetic construct; identical to SEQ ID NO: 6688
  source 1..80: mol_type = other DNA

SEQ ID NO: 191419 - DNA, 80 bp, synthetic construct; identical to SEQ ID NO: 6689
  source 1..80: mol_type = other DNA

SEQ ID NO: 191420 - DNA, 80 bp, synthetic construct; identical to SEQ ID NO: 6690
  source 1..80: mol_type = other DNA

SEQ ID NO: 191421 - DNA, 80 bp, synthetic construct; identical to SEQ ID NO: 6691
  source 1..80: mol_type = other DNA

SEQ ID NO: 191422 - DNA, 80 bp, synthetic construct; identical to SEQ ID NO: 6692
  source 1..80: mol_type = other DNA

SEQ ID NO: 191423 - DNA, 80 bp, synthetic construct; identical to SEQ ID NO: 6693
  source 1..80: mol_type = other DNA

SEQ ID NO: 191424 - DNA, 80 bp, synthetic construct; identical to SEQ ID NO: 6694
  source 1..80: mol_type = other DNA

SEQ ID NO: 191425 - DNA, 80 bp, synthetic construct; identical to SEQ ID NO: 6695
  source 1..80: mol_type = other DNA

SEQ ID NO: 191426 - DNA, 80 bp, synthetic construct; identical to SEQ ID NO: 6696
  source 1..80: mol_type = other DNA

SEQ ID NO: 191427 - DNA, 80 bp, synthetic construct; identical to SEQ ID NO: 6697
  source 1..80: mol_type = other DNA

SEQ ID NO: 191428 - DNA, 80 bp, synthetic construct; identical to SEQ ID NO: 6698
  source 1..80: mol_type = other DNA

SEQ ID NO: 191429 - DNA, 80 bp, synthetic construct; identical to SEQ ID NO: 6699
  source 1..80: mol_type = other DNA

SEQ ID NO: 191430 - DNA, 80 bp, synthetic construct; identical to SEQ ID NO: 6700
  source 1..80: mol_type = other DNA

SEQ ID NO: 191431 - DNA, 80 bp, synthetic construct; identical to SEQ ID NO: 6701
  source 1..80: mol_type = other DNA

SEQ ID NO: 191432 - DNA, 80 bp, synthetic construct; identical to SEQ ID NO: 6702
  source 1..80: mol_type = other DNA

SEQ ID NO: 191433 - DNA, 80 bp, synthetic construct; identical to SEQ ID NO: 6703
  source 1..80: mol_type = other DNA

SEQ ID NO: 191434 - DNA, 80 bp, synthetic construct; identical to SEQ ID NO: 6704
  source 1..80: mol_type = other DNA

SEQ ID NO: 191435 - DNA, 80 bp, synthetic construct; identical to SEQ ID NO: 6705
  source 1..80: mol_type = other DNA

SEQ ID NO: 191436 - DNA, 80 bp, synthetic construct; identical to SEQ ID NO: 6706
  source 1..80: mol_type = other DNA

SEQ ID NO: 191437 - DNA, 80 bp, synthetic construct; identical to SEQ ID NO: 6707
  source 1..80: mol_type = other DNA

SEQ ID NO: 191438 - DNA, 80 bp, synthetic construct; identical to SEQ ID NO: 6708
  source 1..80: mol_type = other DNA

SEQ ID NO: 191439 - DNA, 80 bp, synthetic construct; identical to SEQ ID NO: 6709
  source 1..80: mol_type = other DNA

SEQ ID NO: 191440 - DNA, 80 bp, synthetic construct; identical to SEQ ID NO: 6710
  source 1..80: mol_type = other DNA

SEQ ID NO: 191441 - DNA, 80 bp, synthetic construct; identical to SEQ ID NO: 6711
  source 1..80: mol_type = other DNA

SEQ ID NO: 191442 - DNA, 80 bp, synthetic construct; identical to SEQ ID NO: 6712
  source 1..80: mol_type = other DNA

SEQ ID NO: 191443 - DNA, 80 bp, synthetic construct; identical to SEQ ID NO: 6713
  source 1..80: mol_type = other DNA

SEQ ID NO: 191444 - DNA, 80 bp, synthetic construct; identical to SEQ ID NO: 6714
  source 1..80: mol_type = other DNA

SEQ ID NO: 191445 - DNA, 80 bp, synthetic construct; identical to SEQ ID NO: 6715
  source 1..80: mol_type = other DNA

SEQ ID NO: 191446 - DNA, 80 bp, synthetic construct; identical to SEQ ID NO: 6716
  source 1..80: mol_type = other DNA

SEQ ID NO: 191447 - DNA, 80 bp, synthetic construct; identical to SEQ ID NO: 6717
  source 1..80: mol_type = other DNA

SEQ ID NO: 191448 - DNA, 80 bp, synthetic construct; identical to SEQ ID NO: 6718
  source 1..80: mol_type = other DNA

SEQ ID NO: 191449 - DNA, 80 bp, synthetic construct; identical to SEQ ID NO: 6719
  source 1..80: mol_type = other DNA

SEQ ID NO: 191450 - DNA, 80 bp, synthetic construct; identical to SEQ ID NO: 6720
  source 1..80: mol_type = other DNA

SEQ ID NO: 191451 - DNA, 80 bp, synthetic construct; identical to SEQ ID NO: 6721
  source 1..80: mol_type = other DNA

SEQ ID NO: 191452 - DNA, 80 bp, synthetic construct; identical to SEQ ID NO: 6722
  source 1..80: mol_type = other DNA

SEQ ID NO: 191453 - DNA, 80 bp, synthetic construct; identical to SEQ ID NO: 6723
  source 1..80: mol_type = other DNA

SEQ ID NO: 191454 - DNA, 80 bp, synthetic construct; identical to SEQ ID NO: 6724
  source 1..80: mol_type = other DNA

SEQ ID NO: 191455 - DNA, 80 bp, synthetic construct; identical to SEQ ID NO: 6725
  source 1..80: mol_type = other DNA

SEQ ID NO: 191456 - DNA, 80 bp, synthetic construct; identical to SEQ ID NO: 6726
  source 1..80: mol_type = other DNA

SEQ ID NO: 191457 - DNA, 80 bp, synthetic construct; identical to SEQ ID NO: 6727
  source 1..80: mol_type = other DNA

SEQ ID NO: 191458 - DNA, 80 bp, synthetic construct; identical to SEQ ID NO: 6728
  source 1..80: mol_type = other DNA

SEQ ID NO: 191459 - DNA, 80 bp, synthetic construct; identical to SEQ ID NO: 6729
  source 1..80: mol_type = other DNA

SEQ ID NO: 191460 - DNA, 80 bp, synthetic construct; identical to SEQ ID NO: 6730
  source 1..80: mol_type = other DNA

SEQ ID NO: 191461 - DNA, 80 bp, synthetic construct; identical to SEQ ID NO: 6731
  source 1..80: mol_type = other DNA

SEQ ID NO: 191462 - DNA, 80 bp, synthetic construct; identical to SEQ ID NO: 6732
  source 1..80: mol_type = other DNA

SEQ ID NO: 191463 - DNA, 80 bp, synthetic construct; identical to SEQ ID NO: 6733
  source 1..80: mol_type = other DNA

SEQ ID NO: 191464 - DNA, 80 bp, synthetic construct; identical to SEQ ID NO: 6734
  source 1..80: mol_type = other DNA

SEQ ID NO: 191465 - DNA, 80 bp, synthetic construct; identical to SEQ ID NO: 6735
  source 1..80: mol_type = other DNA

SEQ ID NO: 191466 - DNA, 80 bp, synthetic construct; identical to SEQ ID NO: 6736
  source 1..80: mol_type = other DNA

SEQ ID NO: 191467 - DNA, 80 bp, synthetic construct; identical to SEQ ID NO: 6737
  source 1..80: mol_type = other DNA

SEQ ID NO: 191468 - DNA, 80 bp, synthetic construct; identical to SEQ ID NO: 6738
  source 1..80: mol_type = other DNA

SEQ ID NO: 191469 - DNA, 80 bp, synthetic construct; identical to SEQ ID NO: 6739
  source 1..80: mol_type = other DNA

SEQ ID NO: 191470 - DNA, 80 bp, synthetic construct; identical to SEQ ID NO: 6740
  source 1..80: mol_type = other DNA

SEQ ID NO: 191471 - DNA, 80 bp, synthetic construct; identical to SEQ ID NO: 6741
  source 1..80: mol_type = other DNA

SEQ ID NO: 191472 - DNA, 80 bp, synthetic construct; identical to SEQ ID NO: 6742
  source 1..80: mol_type = other DNA

SEQ ID NO: 191473 - DNA, 80 bp, synthetic construct; identical to SEQ ID NO: 6743
  source 1..80: mol_type = other DNA

SEQ ID NO: 191474 - DNA, 80 bp, synthetic construct; identical to SEQ ID NO: 6744
  source 1..80: mol_type = other DNA

SEQ ID NO: 191475 - DNA, 80 bp, synthetic construct; identical to SEQ ID NO: 6745
  source 1..80: mol_type = other DNA

SEQ ID NO: 191476 - DNA, 80 bp, synthetic construct; identical to SEQ ID NO: 6746
  source 1..80: mol_type = other DNA

SEQ ID NO: 191477 - DNA, 80 bp, synthetic construct; identical to SEQ ID NO: 6747
  source 1..80: mol_type = other DNA

SEQ ID NO: 191478 - DNA, 80 bp, synthetic construct; identical to SEQ ID NO: 6748
  source 1..80: mol_type = other DNA

SEQ ID NO: 191479 - DNA, 80 bp, synthetic construct; identical to SEQ ID NO: 6749
  source 1..80: mol_type = other DNA

SEQ ID NO: 191480 - DNA, 80 bp, synthetic construct; identical to SEQ ID NO: 6750
  source 1..80: mol_type = other DNA

SEQ ID NO: 191481 - DNA, 80 bp, synthetic construct; identical to SEQ ID NO: 6751
  source 1..80: mol_type = other DNA

SEQ ID NO: 191482 - DNA, 80 bp, synthetic construct; identical to SEQ ID NO: 6752
  source 1..80: mol_type = other DNA

SEQ ID NO: 191483 - DNA, 80 bp, synthetic construct; identical to SEQ ID NO: 6753
  source 1..80: mol_type = other DNA

SEQ ID NO: 191484 - DNA, 80 bp, synthetic construct; identical to SEQ ID NO: 6754
  source 1..80: mol_type = other DNA

SEQ ID NO: 191485 - DNA, 80 bp, synthetic construct; identical to SEQ ID NO: 6755
  source 1..80: mol_type = other DNA

SEQ ID NO: 191486 - DNA, 80 bp, synthetic construct; identical to SEQ ID NO: 6756
  source 1..80: mol_type = other DNA

SEQ ID NO: 191487 - DNA, 80 bp, synthetic construct; identical to SEQ ID NO: 6757
  source 1..80: mol_type = other DNA

SEQ ID NO: 191488 - DNA, 80 bp, synthetic construct; identical to SEQ ID NO: 6758
  source 1..80: mol_type = other DNA

SEQ ID NO: 191489 - DNA, 80 bp, synthetic construct; identical to SEQ ID NO: 6759
  source 1..80: mol_type = other DNA

SEQ ID NO: 191490 - DNA, 80 bp, synthetic construct; identical to SEQ ID NO: 6760
  source 1..80: mol_type = other DNA

SEQ ID NO: 191491 - DNA, 80 bp, synthetic construct; identical to SEQ ID NO: 6761
  source 1..80: mol_type = other DNA

SEQ ID NO: 191492 - DNA, 80 bp, synthetic construct; identical to SEQ ID NO: 6762
  source 1..80: mol_type = other DNA

SEQ ID NO: 191493 - DNA, 80 bp, synthetic construct; identical to SEQ ID NO: 6763
  source 1..80: mol_type = other DNA

SEQ ID NO: 191494 - DNA, 80 bp, synthetic construct; identical to SEQ ID NO: 6764
  source 1..80: mol_type = other DNA

SEQ ID NO: 191495 - DNA, 80 bp, synthetic construct; identical to SEQ ID NO: 6765
  source 1..80: mol_type = other DNA

SEQ ID NO: 191496 - DNA, 80 bp, synthetic construct; identical to SEQ ID NO: 6766
  source 1..80: mol_type = other DNA

SEQ ID NO: 191497 - DNA, 80 bp, synthetic construct; identical to SEQ ID NO: 6767
  source 1..80: mol_type = other DNA

SEQ ID NO: 191498 - DNA, 80 bp, synthetic construct; identical to SEQ ID NO: 6768
  source 1..80: mol_type = other DNA

SEQ ID NO: 191499 - DNA, 80 bp, synthetic construct; identical to SEQ ID NO: 6769
  source 1..80: mol_type = other DNA

SEQ ID NO: 191500 - DNA, 80 bp, synthetic construct; identical to SEQ ID NO: 6770
  source 1..80: mol_type = other DNA

SEQ ID NO: 191501 - DNA, 80 bp, synthetic construct; identical to SEQ ID NO: 6771
  source 1..80: mol_type = other DNA

SEQ ID NO: 191502 - DNA, 80 bp, synthetic construct; identical to SEQ ID NO: 6772
  source 1..80: mol_type = other DNA

SEQ ID NO: 191503 - DNA, 80 bp, synthetic construct; identical to SEQ ID NO: 6773
  source 1..80: mol_type = other DNA

SEQ ID NO: 191504 - DNA, 80 bp, synthetic construct; identical to SEQ ID NO: 6774
  source 1..80: mol_type = other DNA

SEQ ID NO: 191505 - DNA, 80 bp, synthetic construct; identical to SEQ ID NO: 6775
  source 1..80: mol_type = other DNA

SEQ ID NO: 191506 - DNA, 80 bp, synthetic construct; identical to SEQ ID NO: 6776
  source 1..80: mol_type = other DNA

SEQ ID NO: 191507 - DNA, 80 bp, synthetic construct; identical to SEQ ID NO: 6777
  source 1..80: mol_type = other DNA

SEQ ID NO: 191508 - DNA, 80 bp, synthetic construct; identical to SEQ ID NO: 6778
  source 1..80: mol_type = other DNA

SEQ ID NO: 191509 - DNA, 80 bp, synthetic construct; identical to SEQ ID NO: 6779
  source 1..80: mol_type = other DNA

SEQ ID NO: 191510 - DNA, 80 bp, synthetic construct; identical to SEQ ID NO: 6780
  source 1..80: mol_type = other DNA

SEQ ID NO: 191511 - DNA, 80 bp, synthetic construct; identical to SEQ ID NO: 6781
  source 1..80: mol_type = other DNA

SEQ ID NO: 191512 - DNA, 80 bp, synthetic construct; identical to SEQ ID NO: 6782
  source 1..80: mol_type = other DNA

SEQ ID NO: 191513 - DNA, 80 bp, synthetic construct; identical to SEQ ID NO: 6783
  source 1..80: mol_type = other DNA

SEQ ID NO: 191514 - DNA, 80 bp, synthetic construct; identical to SEQ ID NO: 6784
  source 1..80: mol_type = other DNA

SEQ ID NO: 191515 - DNA, 80 bp, synthetic construct; identical to SEQ ID NO: 6785
  source 1..80: mol_type = other DNA

SEQ ID NO: 191516 - DNA, 80 bp, synthetic construct; identical to SEQ ID NO: 6786
  source 1..80: mol_type = other DNA

SEQ ID NO: 191517 - DNA, 80 bp, synthetic construct; identical to SEQ ID NO: 6787
  source 1..80: mol_type = other DNA

SEQ ID NO: 191518 - DNA, 80 bp, synthetic construct; identical to SEQ ID NO: 6788
  source 1..80: mol_type = other DNA

SEQ ID NO: 191519 - DNA, 80 bp, synthetic construct; identical to SEQ ID NO: 6789
  source 1..80: mol_type = other DNA

SEQ ID NO: 191520 - DNA, 80 bp, synthetic construct; identical to SEQ ID NO: 6790
  source 1..80: mol_type = other DNA

SEQ ID NO: 191521 - DNA, 80 bp, synthetic construct; identical to SEQ ID NO: 6791
  source 1..80: mol_type = other DNA

SEQ ID NO: 191522 - DNA, 80 bp, synthetic construct; identical to SEQ ID NO: 6792
  source 1..80: mol_type = other DNA

SEQ ID NO: 191523 - DNA, 80 bp, synthetic construct; identical to SEQ ID NO: 6793
  source 1..80: mol_type = other DNA

SEQ ID NO: 191524 - DNA, 80 bp, synthetic construct; identical to SEQ ID NO: 6794
  source 1..80: mol_type = other DNA

SEQ ID NO: 191525 - DNA, 80 bp, synthetic construct; identical to SEQ ID NO: 6795
  source 1..80: mol_type = other DNA

SEQ ID NO: 191526 - DNA, 80 bp, synthetic construct; identical to SEQ ID NO: 6796
  source 1..80: mol_type = other DNA

SEQ ID NO: 191527 - DNA, 80 bp, synthetic construct; identical to SEQ ID NO: 6797
  source 1..80: mol_type = other DNA

SEQ ID NO: 191528 - DNA, 80 bp, synthetic construct; identical to SEQ ID NO: 6798
  source 1..80: mol_type = other DNA

SEQ ID NO: 191529 - DNA, 80 bp, synthetic construct; identical to SEQ ID NO: 6799
  source 1..80: mol_type = other DNA

SEQ ID NO: 191530 - DNA, 80 bp, synthetic construct; identical to SEQ ID NO: 6800
  source 1..80: mol_type = other DNA

SEQ ID NO: 191531 - DNA, 80 bp, synthetic construct; identical to SEQ ID NO: 6801
  source 1..80: mol_type = other DNA

SEQ ID NO: 191532 - DNA, 80 bp, synthetic construct; identical to SEQ ID NO: 6802
  source 1..80: mol_type = other DNA

SEQ ID NO: 191533 - DNA, 80 bp, synthetic construct; identical to SEQ ID NO: 6803
  source 1..80: mol_type = other DNA

SEQ ID NO: 191534 - DNA, 80 bp, synthetic construct; identical to SEQ ID NO: 6804
  source 1..80: mol_type = other DNA

SEQ ID NO: 191535 - DNA, 80 bp, synthetic construct; identical to SEQ ID NO: 6805
  source 1..80: mol_type = other DNA

SEQ ID NO: 191536 - DNA, 80 bp, synthetic construct; identical to SEQ ID NO: 6806
  source 1..80: mol_type = other DNA

SEQ ID NO: 191537 - DNA, 80 bp, synthetic construct; identical to SEQ ID NO: 6807
  source 1..80: mol_type = other DNA

SEQ ID NO: 191538 - DNA, 80 bp, synthetic construct; identical to SEQ ID NO: 6808
  source 1..80: mol_type = other DNA

SEQ ID NO: 191539 - DNA, 80 bp, synthetic construct; identical to SEQ ID NO: 6809
  source 1..80: mol_type = other DNA

SEQ ID NO: 191540 - DNA, 80 bp, synthetic construct; identical to SEQ ID NO: 6810
  source 1..80: mol_type = other DNA

SEQ ID NO: 191541 - DNA, 80 bp, synthetic construct; identical to SEQ ID NO: 6811
  source 1..80: mol_type = other DNA

SEQ ID NO: 191542 - DNA, 80 bp, synthetic construct; identical to SEQ ID NO: 6812
  source 1..80: mol_type = other DNA

SEQ ID NO: 191543 - DNA, 80 bp, synthetic construct; identical to SEQ ID NO: 6813
  source 1..80: mol_type = other DNA

SEQ ID NO: 191544 - DNA, 80 bp, synthetic construct; identical to SEQ ID NO: 6814
  source 1..80: mol_type = other DNA

SEQ ID NO: 191545 - DNA, 80 bp, synthetic construct; identical to SEQ ID NO: 6815
  source 1..80: mol_type = other DNA

SEQ ID NO: 191546 - DNA, 80 bp, synthetic construct; identical to SEQ ID NO: 6816
  source 1..80: mol_type = other DNA

SEQ ID NO: 191547 - DNA, 80 bp, synthetic construct; identical to SEQ ID NO: 6817
  source 1..80: mol_type = other DNA

SEQ ID NO: 191548 - DNA, 80 bp, synthetic construct; identical to SEQ ID NO: 6818
  source 1..80: mol_type = other DNA

SEQ ID NO: 191549 - DNA, 80 bp, synthetic construct; identical to SEQ ID NO: 6819
  source 1..80: mol_type = other DNA

SEQ ID NO: 191550 - DNA, 80 bp, synthetic construct; identical to SEQ ID NO: 6820
  source 1..80: mol_type = other DNA

SEQ ID NO: 191551 - DNA, 80 bp, synthetic construct; identical to SEQ ID NO: 6821
  source 1..80: mol_type = other DNA

SEQ ID NO: 191552 - DNA, 80 bp, synthetic construct; identical to SEQ ID NO: 6822
  source 1..80: mol_type = other DNA

SEQ ID NO: 191553 - DNA, 80 bp, synthetic construct; identical to SEQ ID NO: 6823
  source 1..80: mol_type = other DNA

SEQ ID NO: 191554 - DNA, 80 bp, synthetic construct; identical to SEQ ID NO: 6824
  source 1..80: mol_type = other DNA

SEQ ID NO: 191555 - DNA, 80 bp, synthetic construct; identical to SEQ ID NO: 6825
  source 1..80: mol_type = other DNA

SEQ ID NO: 191556 - DNA, 80 bp, synthetic construct; identical to SEQ ID NO: 6826
  source 1..80: mol_type = other DNA

SEQ ID NO: 191557 - DNA, 80 bp, synthetic construct; identical to SEQ ID NO: 6827
  source 1..80: mol_type = other DNA

SEQ ID NO: 191558 - DNA, 80 bp, synthetic construct; identical to SEQ ID NO: 6828
  source 1..80: mol_type = other DNA

SEQ ID NO: 191559 - DNA, 80 bp, synthetic construct; identical to SEQ ID NO: 6829
  source 1..80: mol_type = other DNA

SEQ ID NO: 191560 - DNA, 80 bp, synthetic construct; identical to SEQ ID NO: 6830
  source 1..80: mol_type = other DNA

SEQ ID NO: 191561 - DNA, 80 bp, synthetic construct; identical to SEQ ID NO: 6831
  source 1..80: mol_type = other DNA

SEQ ID NO: 191562 - DNA, 80 bp, synthetic construct; identical to SEQ ID NO: 6832
  source 1..80: mol_type = other DNA

SEQ ID NO: 191563 - DNA, 80 bp, synthetic construct; identical to SEQ ID NO: 6833
  source 1..80: mol_type = other DNA

SEQ ID NO: 191564 - DNA, 80 bp, synthetic construct; identical to SEQ ID NO: 6834
  source 1..80: mol_type = other DNA

SEQ ID NO: 191565 - DNA, 80 bp, synthetic construct; identical to SEQ ID NO: 6835
  source 1..80: mol_type = other DNA

SEQ ID NO: 191566 - DNA, 80 bp, synthetic construct; identical to SEQ ID NO: 6836
  source 1..80: mol_type = other DNA

SEQ ID NO: 191567 - DNA, 80 bp, synthetic construct; identical to SEQ ID NO: 6837
  source 1..80: mol_type = other DNA

SEQ ID NO: 191568 - DNA, 80 bp, synthetic construct; identical to SEQ ID NO: 6838
  source 1..80: mol_type = other DNA

SEQ ID NO: 191569 - DNA, 80 bp, synthetic construct; identical to SEQ ID NO: 6839
  source 1..80: mol_type = other DNA

SEQ ID NO: 191570 - DNA, 80 bp, synthetic construct; identical to SEQ ID NO: 6840
  source 1..80: mol_type = other DNA

SEQ ID NO: 191571 - DNA, 80 bp, synthetic construct; identical to SEQ ID NO: 6841
  source 1..80: mol_type = other DNA

SEQ ID NO: 191572 - DNA, 80 bp, synthetic construct; identical to SEQ ID NO: 6842
  source 1..80: mol_type = other DNA

SEQ ID NO: 191573 - DNA, 80 bp, synthetic construct; identical to SEQ ID NO: 6843
  source 1..80: mol_type = other DNA

SEQ ID NO: 191574 - DNA, 80 bp, synthetic construct; identical to SEQ ID NO: 6844
  source 1..80: mol_type = other DNA

SEQ ID NO: 191575 - DNA, 80 bp, synthetic construct; identical to SEQ ID NO: 6845
  source 1..80: mol_type = other DNA

SEQ ID NO: 191576 - DNA, 80 bp, synthetic construct; identical to SEQ ID NO: 6846
  source 1..80: mol_type = other DNA

SEQ ID NO: 191577 - DNA, 80 bp, synthetic construct; identical to SEQ ID NO: 6847
  source 1..80: mol_type = other DNA

SEQ ID NO: 191578 - DNA, 80 bp, synthetic construct; identical to SEQ ID NO: 6848
  source 1..80: mol_type = other DNA

SEQ ID NO: 191579 - DNA, 80 bp, synthetic construct; identical to SEQ ID NO: 6849
  source 1..80: mol_type = other DNA

SEQ ID NO: 191580 - DNA, 80 bp, synthetic construct; identical to SEQ ID NO: 6850
  source 1..80: mol_type = other DNA

SEQ ID NO: 191581 - DNA, 80 bp, synthetic construct; identical to SEQ ID NO: 6851
  source 1..80: mol_type = other DNA

SEQ ID NO: 191582 - DNA, 80 bp, synthetic construct; identical to SEQ ID NO: 6852
  source 1..80: mol_type = other DNA

SEQ ID NO: 191583 - DNA, 80 bp, synthetic construct; identical to SEQ ID NO: 6853
  source 1..80: mol_type = other DNA

SEQ ID NO: 191584 - DNA, 80 bp, synthetic construct; identical to SEQ ID NO: 6854
  source 1..80: mol_type = other DNA

SEQ ID NO: 191585 - DNA, 80 bp, synthetic construct; identical to SEQ ID NO: 6855
  source 1..80: mol_type = other DNA

SEQ ID NO: 191586 - DNA, 80 bp, synthetic construct; identical to SEQ ID NO: 6856
  source 1..80: mol_type = other DNA

SEQ ID NO: 191587 - DNA, 80 bp, synthetic construct; identical to SEQ ID NO: 6857
  source 1..80: mol_type = other DNA

SEQ ID NO: 191588 - DNA, 80 bp, synthetic construct; identical to SEQ ID NO: 6858
  source 1..80: mol_type = other DNA

SEQ ID NO: 191589 - DNA, 80 bp, synthetic construct; identical to SEQ ID NO: 6859
  source 1..80: mol_type = other DNA

SEQ ID NO: 191590 - DNA, 80 bp, synthetic construct; identical to SEQ ID NO: 6860
  source 1..80: mol_type = other DNA

SEQ ID NO: 191591 - DNA, 80 bp, synthetic construct; identical to SEQ ID NO: 6861
  source 1..80: mol_type = other DNA

SEQ ID NO: 191592 - DNA, 80 bp, synthetic construct; identical to SEQ ID NO: 6862
  source 1..80: mol_type = other DNA

SEQ ID NO: 191593 - DNA, 80 bp, synthetic construct; identical to SEQ ID NO: 6863
  source 1..80: mol_type = other DNA

SEQ ID NO: 191594 - DNA, 80 bp, synthetic construct; identical to SEQ ID NO: 6864
  source 1..80: mol_type = other DNA

SEQ ID NO: 191595 - DNA, 80 bp, synthetic construct; identical to SEQ ID NO: 6865
  source 1..80: mol_type = other DNA

SEQ ID NO: 191596 - DNA, 80 bp, synthetic construct; identical to SEQ ID NO: 6866
  source 1..80: mol_type = other DNA

SEQ ID NO: 191597 - DNA, 80 bp, synthetic construct; identical to SEQ ID NO: 6867
  source 1..80: mol_type = other DNA

SEQ ID NO: 191598 - DNA, 80 bp, synthetic construct; identical to SEQ ID NO: 6868
  source 1..80: mol_type = other DNA

SEQ ID NO: 191599 - DNA, 80 bp, synthetic construct; identical to SEQ ID NO: 6869
  source 1..80: mol_type = other DNA

SEQ ID NO: 191600 - DNA, 80 bp, synthetic construct; identical to SEQ ID NO: 6870
  source 1..80: mol_type = other DNA

SEQ ID NO: 191601 - DNA, 80 bp, synthetic construct; identical to SEQ ID NO: 6871
  source 1..80: mol_type = other DNA

SEQ ID NO: 191602 - DNA, 80 bp, synthetic construct; identical to SEQ ID NO: 6872
  source 1..80: mol_type = other DNA

SEQ ID NO: 191603 - DNA, 80 bp, synthetic construct; identical to SEQ ID NO: 6873
  source 1..80: mol_type = other DNA

SEQ ID NO: 191604 - DNA, 80 bp, synthetic construct; identical to SEQ ID NO: 6874
  source 1..80: mol_type = other DNA

SEQ ID NO: 191605 - DNA, 80 bp, synthetic construct; identical to SEQ ID NO: 6875
  source 1..80: mol_type = other DNA

SEQ ID NO: 191606 - DNA, 80 bp, synthetic construct; identical to SEQ ID NO: 6876
  source 1..80: mol_type = other DNA

SEQ ID NO: 191607 - DNA, 80 bp, synthetic construct; identical to SEQ ID NO: 6877
  source 1..80: mol_type = other DNA

SEQ ID NO: 191608 - DNA, 80 bp, synthetic construct; identical to SEQ ID NO: 6878
  source 1..80: mol_type = other DNA

SEQ ID NO: 191609 - DNA, 80 bp, synthetic construct; identical to SEQ ID NO: 6879
  source 1..80: mol_type = other DNA

SEQ ID NO: 191610 - DNA, 80 bp, synthetic construct; identical to SEQ ID NO: 6880
  source 1..80: mol_type = other DNA

SEQ ID NO: 191611 - DNA, 80 bp, synthetic construct; identical to SEQ ID NO: 6881
  source 1..80: mol_type = other DNA

SEQ ID NO: 191612 - DNA, 80 bp, synthetic construct; identical to SEQ ID NO: 6882
  source 1..80: mol_type = other DNA

SEQ ID NO: 191613 - DNA, 80 bp, synthetic construct; identical to SEQ ID NO: 6883
  source 1..80: mol_type = other DNA

SEQ ID NO: 191614 - DNA, 80 bp, synthetic construct; identical to SEQ ID NO: 6884
  source 1..80: mol_type = other DNA

SEQ ID NO: 191615 - DNA, 80 bp, synthetic construct; identical to SEQ ID NO: 6885
  source 1..80: mol_type = other DNA

SEQ ID NO: 191616 - DNA, 80 bp, synthetic construct; identical to SEQ ID NO: 6886
  source 1..80: mol_type = other DNA

SEQ ID NO: 191617 - DNA, 80 bp, synthetic construct; identical to SEQ ID NO: 6887
  source 1..80: mol_type = other DNA

SEQ ID NO: 191618 - DNA, 80 bp, synthetic construct; identical to SEQ ID NO: 6888
  source 1..80: mol_type = other DNA

SEQ ID NO: 191619 - DNA, 80 bp, synthetic construct; identical to SEQ ID NO: 6889
  source 1..80: mol_type = other DNA

SEQ ID NO: 191620 - DNA, 80 bp, synthetic construct; identical to SEQ ID NO: 6890
  source 1..80: mol_type = other DNA

SEQ ID NO: 191621 - DNA, 80 bp, synthetic construct; identical to SEQ ID NO: 6891
  source 1..80: mol_type = other DNA

SEQ ID NO: 191622 - DNA, 80 bp, synthetic construct; identical to SEQ ID NO: 6892
  source 1..80: mol_type = other DNA

SEQ ID NO: 191623 - DNA, 80 bp, synthetic construct; identical to SEQ ID NO: 6893
  source 1..80: mol_type = other DNA

SEQ ID NO: 191624 - DNA, 80 bp, synthetic construct; identical to SEQ ID NO: 6894
  source 1..80: mol_type = other DNA

SEQ ID NO: 191625 - DNA, 80 bp, synthetic construct; identical to SEQ ID NO: 6895
  source 1..80: mol_type = other DNA

SEQ ID NO: 191626 - DNA, 80 bp, synthetic construct; identical to SEQ ID NO: 6896
  source 1..80: mol_type = other DNA

SEQ ID NO: 191627 - DNA, 80 bp, synthetic construct; identical to SEQ ID NO: 6897
  source 1..80: mol_type = other DNA

SEQ ID NO: 191628 - DNA, 80 bp, synthetic construct; identical to SEQ ID NO: 6898
  source 1..80: mol_type = other DNA

SEQ ID NO: 191629 - DNA, 80 bp, synthetic construct; identical to SEQ ID NO: 6899
  source 1..80: mol_type = other DNA

SEQ ID NO: 191630 - DNA, 80 bp, synthetic construct; identical to SEQ ID NO: 6900
  source 1..80: mol_type = other DNA

SEQ ID NO: 191631 - DNA, 80 bp, synthetic construct; identical to SEQ ID NO: 6901
  source 1..80: mol_type = other DNA

SEQ ID NO: 191632 - DNA, 80 bp, synthetic construct; identical to SEQ ID NO: 6902
  source 1..80: mol_type = other DNA

SEQ ID NO: 191633 - DNA, 80 bp, synthetic construct; identical to SEQ ID NO: 6903
  source 1..80: mol_type = other DNA

SEQ ID NO: 191634 - DNA, 80 bp, synthetic construct; identical to SEQ ID NO: 6904
  source 1..80: mol_type = other DNA

SEQ ID NO: 191635 - DNA, 80 bp, synthetic construct; identical to SEQ ID NO: 6905
  source 1..80: mol_type = other DNA

SEQ ID NO: 191636 - DNA, 80 bp, synthetic construct; identical to SEQ ID NO: 6906
  source 1..80: mol_type = other DNA

SEQ ID NO: 191637 - DNA, 80 bp, synthetic construct; identical to SEQ ID NO: 6907
  source 1..80: mol_type = other DNA

SEQ ID NO: 191638 - DNA, 80 bp, synthetic construct; identical to SEQ ID NO: 6908
  source 1..80: mol_type = other DNA

SEQ ID NO: 191639 - DNA, 80 bp, synthetic construct; identical to SEQ ID NO: 6909
  source 1..80: mol_type = other DNA

SEQ ID NO: 191640 - DNA, 80 bp, synthetic construct; identical to SEQ ID NO: 6910
  source 1..80: mol_type = other DNA

SEQ ID NO: 191641 - DNA, 80 bp, synthetic construct; identical to SEQ ID NO: 6911
  source 1..80: mol_type = other DNA

SEQ ID NO: 191642 - DNA, 80 bp, synthetic construct; identical to SEQ ID NO: 6912
  source 1..80: mol_type = other DNA

SEQ ID NO: 191643 - DNA, 80 bp, synthetic construct; identical to SEQ ID NO: 6913
  source 1..80: mol_type = other DNA

SEQ ID NO: 191644 - DNA, 80 bp, synthetic construct; identical to SEQ ID NO: 6914
  source 1..80: mol_type = other DNA

SEQ ID NO: 191645 - DNA, 80 bp, synthetic construct; identical to SEQ ID NO: 6915
  source 1..80: mol_type = other DNA

SEQ ID NO: 191646 - DNA, 80 bp, synthetic construct; identical to SEQ ID NO: 6916
  source 1..80: mol_type = other DNA

SEQ ID NO: 191647 - DNA, 80 bp, synthetic construct; identical to SEQ ID NO: 6917
  source 1..80: mol_type = other DNA

SEQ ID NO: 191648 - DNA, 80 bp, synthetic construct; identical to SEQ ID NO: 6918
  source 1..80: mol_type = other DNA

SEQ ID NO: 191649 - DNA, 80 bp, synthetic construct; identical to SEQ ID NO: 6919
  source 1..80: mol_type = other DNA

SEQ ID NO: 191650 - DNA, 80 bp, synthetic construct; identical to SEQ ID NO: 6920
  source 1..80: mol_type = other DNA

SEQ ID NO: 191651 - DNA, 80 bp, synthetic construct; identical to SEQ ID NO: 6921
  source 1..80: mol_type = other DNA

SEQ ID NO: 191652 - DNA, 80 bp, synthetic construct; identical to SEQ ID NO: 6922
  source 1..80: mol_type = other DNA

SEQ ID NO: 191653 - DNA, 80 bp, synthetic construct; identical to SEQ ID NO: 6923
  source 1..80: mol_type = other DNA

SEQ ID NO: 191654 - DNA, 80 bp, synthetic construct; identical to SEQ ID NO: 6924
  source 1..80: mol_type = other DNA

SEQ ID NO: 191655 - DNA, 80 bp, synthetic construct; identical to SEQ ID NO: 6925
  source 1..80: mol_type = other DNA

SEQ ID NO: 191656 - DNA, 80 bp, synthetic construct; identical to SEQ ID NO: 6926
  source 1..80: mol_type = other DNA

SEQ ID NO: 191657 - DNA, 80 bp, synthetic construct; identical to SEQ ID NO: 6927
  source 1..80: mol_type = other DNA

SEQ ID NO: 191658 - DNA, 80 bp, synthetic construct; identical to SEQ ID NO: 6928
  source 1..80: mol_type = other DNA

SEQ ID NO: 191659 - DNA, 80 bp, synthetic construct; identical to SEQ ID NO: 6929
  source 1..80: mol_type = other DNA

SEQ ID NO: 191660 - DNA, 80 bp, synthetic construct; identical to SEQ ID NO: 6930
  source 1..80: mol_type = other DNA

SEQ ID NO: 191661 - DNA, 80 bp, synthetic construct; identical to SEQ ID NO: 6931
  source 1..80: mol_type = other DNA

SEQ ID NO: 191662 - DNA, 80 bp, synthetic construct; identical to SEQ ID NO: 6932
  source 1..80: mol_type = other DNA

SEQ ID NO: 191663 - DNA, 80 bp, synthetic construct; identical to SEQ ID NO: 6933
  source 1..80: mol_type = other DNA

SEQ ID NO: 191664 - DNA, 80 bp, synthetic construct; identical to SEQ ID NO: 6934
  source 1..80: mol_type = other DNA

SEQ ID NO: 191665 - DNA, 80 bp, synthetic construct; identical to SEQ ID NO: 6935
  source 1..80: mol_type = other DNA

SEQ ID NO: 191666 - DNA, 80 bp, synthetic construct; identical to SEQ ID NO: 6936
  source 1..80: mol_type = other DNA

SEQ ID NO: 191667 - DNA, 80 bp, synthetic construct; identical to SEQ ID NO: 6937
  source 1..80: mol_type = other DNA

SEQ ID NO: 191668 - DNA, 80 bp, synthetic construct; identical to SEQ ID NO: 6938
  source 1..80: mol_type = other DNA

SEQ ID NO: 191669 - DNA, 80 bp, synthetic construct; identical to SEQ ID NO: 6939
  source 1..80: mol_type = other DNA

SEQ ID NO: 191670 - DNA, 80 bp, synthetic construct; identical to SEQ ID NO: 6940
  source 1..80: mol_type = other DNA

SEQ ID NO: 191671 - DNA, 80 bp, synthetic construct; identical to SEQ ID NO: 6941
  source 1..80: mol_type = other DNA

SEQ ID NO: 191672 - DNA, 80 bp, synthetic construct; identical to SEQ ID NO: 6942
  source 1..80: mol_type = other DNA

SEQ ID NO: 191673 - DNA, 80 bp, synthetic construct; identical to SEQ ID NO: 6943
  source 1..80: mol_type = other DNA

SEQ ID NO: 191674 - DNA, 80 bp, synthetic construct; identical to SEQ ID NO: 6944
  source 1..80: mol_type = other DNA

SEQ ID NO: 191675 - DNA, 80 bp, synthetic construct; identical to SEQ ID NO: 6945
  source 1..80: mol_type = other DNA

SEQ ID NO: 191676 - DNA, 80 bp, synthetic construct; identical to SEQ ID NO: 6946
  source 1..80: mol_type = other DNA

SEQ ID NO: 191677 - DNA, 80 bp, synthetic construct; identical to SEQ ID NO: 6947
  source 1..80: mol_type = other DNA

SEQ ID NO: 191678 - DNA, 80 bp, synthetic construct; identical to SEQ ID NO: 6948
  source 1..80: mol_type = other DNA

SEQ ID NO: 191679 - DNA, 80 bp, synthetic construct; identical to SEQ ID NO: 6949
  source 1..80: mol_type = other DNA

SEQ ID NO: 191680 - DNA, 80 bp, synthetic construct; identical to SEQ ID NO: 6950
  source 1..80: mol_type = other DNA

SEQ ID NO: 191681 - DNA, 80 bp, synthetic construct; identical to SEQ ID NO: 6951
  source 1..80: mol_type = other DNA

SEQ ID NO: 191682 - DNA, 80 bp, synthetic construct; identical to SEQ ID NO: 6952
  source 1..80: mol_type = other DNA

SEQ ID NO: 191683 - DNA, 80 bp, synthetic construct; identical to SEQ ID NO: 6953
  source 1..80: mol_type = other DNA

SEQ ID NO: 191684 - DNA, 80 bp, synthetic construct; identical to SEQ ID NO: 6954
  source 1..80: mol_type = other DNA

SEQ ID NO: 191685 - DNA, 80 bp, synthetic construct; identical to SEQ ID NO: 6955
  source 1..80: mol_type = other DNA

SEQ ID NO: 191686 - DNA, 80 bp, synthetic construct; identical to SEQ ID NO: 6956
  source 1..80: mol_type = other DNA

SEQ ID NO: 191687 - DNA, 80 bp, synthetic construct; identical to SEQ ID NO: 6957
  source 1..80: mol_type = other DNA

SEQ ID NO: 191688 - DNA, 80 bp, synthetic construct; identical to SEQ ID NO: 6958
  source 1..80: mol_type = other DNA

SEQ ID NO: 191689 - DNA, 80 bp, synthetic construct; identical to SEQ ID NO: 6959
  source 1..80: mol_type = other DNA

SEQ ID NO: 191690 - DNA, 80 bp, synthetic construct; identical to SEQ ID NO: 6960
  source 1..80: mol_type = other DNA

SEQ ID NO: 191691 - DNA, 80 bp, synthetic construct; identical to SEQ ID NO: 6961
  source 1..80: mol_type = other DNA

SEQ ID NO: 191692 - DNA, 80 bp, synthetic construct; identical to SEQ ID NO: 6962
  source 1..80: mol_type = other DNA

SEQ ID NO: 191693 - DNA, 80 bp, synthetic construct; identical to SEQ ID NO: 6963
  source 1..80: mol_type = other DNA

SEQ ID NO: 191694 - DNA, 80 bp, synthetic construct; identical to SEQ ID NO: 6964
  source 1..80: mol_type = other DNA

SEQ ID NO: 191695 - DNA, 80 bp, synthetic construct; identical to SEQ ID NO: 6965
  source 1..80: mol_type = other DNA

SEQ ID NO: 191696 - DNA, 80 bp, synthetic construct; identical to SEQ ID NO: 6966
  source 1..80: mol_type = other DNA

SEQ ID NO: 191697 - DNA, 80 bp, synthetic construct; identical to SEQ ID NO: 6967
  source 1..80: mol_type = other DNA

SEQ ID NO: 191698 - DNA, 80 bp, synthetic construct; identical to SEQ ID NO: 6968
  source 1..80: mol_type = other DNA

SEQ ID NO: 191699 - DNA, 80 bp, synthetic construct; identical to SEQ ID NO: 6969
  source 1..80: mol_type = other DNA

SEQ ID NO: 191700 - DNA, 80 bp, synthetic construct; identical to SEQ ID NO: 6970
  source 1..80: mol_type = other DNA

SEQ ID NO: 191701 - DNA, 80 bp, synthetic construct; identical to SEQ ID NO: 6971
  source 1..80: mol_type = other DNA

SEQ ID NO: 191702 - DNA, 80 bp, synthetic construct; identical to SEQ ID NO: 6972
  source 1..80: mol_type = other DNA

SEQ ID NO: 191703 - DNA, 80 bp, synthetic construct; identical to SEQ ID NO: 6973
  source 1..80: mol_type = other DNA

SEQ ID NO: 191704 - DNA, 80 bp, synthetic construct; identical to SEQ ID NO: 6974
  source 1..80: mol_type = other DNA

SEQ ID NO: 191705 - DNA, 80 bp, synthetic construct; identical to SEQ ID NO: 6975
  source 1..80: mol_type = other DNA

SEQ ID NO: 191706 - DNA, 80 bp, synthetic construct; identical to SEQ ID NO: 6976
  source 1..80: mol_type = other DNA

SEQ ID NO: 191707 - DNA, 80 bp, synthetic construct; identical to SEQ ID NO: 6977
  source 1..80: mol_type = other DNA

SEQ ID NO: 191708 - DNA, 80 bp, synthetic construct; identical to SEQ ID NO: 6978
  source 1..80: mol_type = other DNA

SEQ ID NO: 191709 - DNA, 80 bp, synthetic construct; identical to SEQ ID NO: 6979
  source 1..80: mol_type = other DNA

SEQ ID NO: 191710 - DNA, 80 bp, synthetic construct; identical to SEQ ID NO: 6980
  source 1..80: mol_type = other DNA

SEQ ID NO: 191711 - DNA, 80 bp, synthetic construct; identical to SEQ ID NO: 6981
  source 1..80: mol_type = other DNA

SEQ ID NO: 191712 - DNA, 80 bp, synthetic construct; identical to SEQ ID NO: 6982
  source 1..80: mol_type = other DNA

SEQ ID NO: 191713 - DNA, 80 bp, synthetic construct; identical to SEQ ID NO: 6983
  source 1..80: mol_type = other DNA

SEQ ID NO: 191714 - DNA, 80 bp, synthetic construct; identical to SEQ ID NO: 6984
  source 1..80: mol_type = other DNA

SEQ ID NO: 191715 - DNA, 80 bp, synthetic construct; identical to SEQ ID NO: 6985
  source 1..80: mol_type = other DNA

SEQ ID NO: 191716 - DNA, 80 bp, synthetic construct; identical to SEQ ID NO: 6986
  source 1..80: mol_type = other DNA

SEQ ID NO: 191717 - DNA, 80 bp, synthetic construct; identical to SEQ ID NO: 6987
  source 1..80: mol_type = other DNA

SEQ ID NO: 191718 - DNA, 80 bp, synthetic construct; identical to SEQ ID NO: 6988
  source 1..80: mol_type = other DNA

SEQ ID NO: 191719 - DNA, 80 bp, synthetic construct; identical to SEQ ID NO: 6989
  source 1..80: mol_type = other DNA

SEQ ID NO: 191720 - DNA, 80 bp, synthetic construct; identical to SEQ ID NO: 6990
  source 1..80: mol_type = other DNA

SEQ ID NO: 191721 - DNA, 80 bp, synthetic construct; identical to SEQ ID NO: 6991
  source 1..80: mol_type = other DNA

SEQ ID NO: 191722 - DNA, 80 bp, synthetic construct; identical to SEQ ID NO: 6992
  source 1..80: mol_type = other DNA

SEQ ID NO: 191723 - DNA, 80 bp, synthetic construct; identical to SEQ ID NO: 6993
  source 1..80: mol_type = other DNA

SEQ ID NO: 191724 - DNA, 80 bp, synthetic construct; identical to SEQ ID NO: 6994
  source 1..80: mol_type = other DNA

SEQ ID NO: 191725 - DNA, 80 bp, synthetic construct; identical to SEQ ID NO: 6995
  source 1..80: mol_type = other DNA

SEQ ID NO: 191726 - DNA, 80 bp, synthetic construct; identical to SEQ ID NO: 6996
  source 1..80: mol_type = other DNA

SEQ ID NO: 191727 - DNA, 80 bp, synthetic construct; identical to SEQ ID NO: 6997
  source 1..80: mol_type = other DNA

SEQ ID NO: 191728 - DNA, 80 bp, synthetic construct; identical to SEQ ID NO: 6998
  source 1..80: mol_type = other DNA

SEQ ID NO: 191729 - DNA, 80 bp, synthetic construct; identical to SEQ ID NO: 6999
  source 1..80: mol_type = other DNA

SEQ ID NO: 191730 - DNA, 80 bp, synthetic construct; identical to SEQ ID NO: 7000
  source 1..80: mol_type = other DNA

SEQ ID NO: 191731 - DNA, 80 bp, synthetic construct; identical to SEQ ID NO: 7001
  source 1..80: mol_type = other DNA

SEQ ID NO: 191732 - DNA, 80 bp, synthetic construct; identical to SEQ ID NO: 7002
  source 1..80: mol_type = other DNA

SEQ ID NO: 191733 - DNA, 80 bp, synthetic construct; identical to SEQ ID NO: 7003
  source 1..80: mol_type = other DNA

SEQ ID NO: 191734 - DNA, 80 bp, synthetic construct; identical to SEQ ID NO: 7004
  source 1..80: mol_type = other DNA

SEQ ID NO: 191735 - DNA, 80 bp, synthetic construct; identical to SEQ ID NO: 7005
  source 1..80: mol_type = other DNA

SEQ ID NO: 191736 - DNA, 80 bp, synthetic construct; identical to SEQ ID NO: 7006
  source 1..80: mol_type = other DNA

SEQ ID NO: 191737 - DNA, 80 bp, synthetic construct; identical to SEQ ID NO: 7007
  source 1..80: mol_type = other DNA

SEQ ID NO: 191738 - DNA, 80 bp, synthetic construct; identical to SEQ ID NO: 7008
  source 1..80: mol_type = other DNA

SEQ ID NO: 191739 - DNA, 80 bp, synthetic construct; identical to SEQ ID NO: 7009
  source 1..80: mol_type = other DNA

SEQ ID NO: 191740 - DNA, 80 bp, synthetic construct; identical to SEQ ID NO: 7010
  source 1..80: mol_type = other DNA

SEQ ID NO: 191741 - DNA, 80 bp, synthetic construct; identical to SEQ ID NO: 7011
  source 1..80: mol_type = other DNA

SEQ ID NO: 191742 - DNA, 80 bp, synthetic construct; identical to SEQ ID NO: 7012
  source 1..80: mol_type = other DNA

SEQ ID NO: 191743 - DNA, 80 bp, synthetic construct; identical to SEQ ID NO: 7013
  source 1..80: mol_type = other DNA

SEQ ID NO: 191744 - DNA, 80 bp, synthetic construct; identical to SEQ ID NO: 7014
  source 1..80: mol_type = other DNA

SEQ ID NO: 191745 - DNA, 80 bp, synthetic construct; identical to SEQ ID NO: 7015
  source 1..80: mol_type = other DNA

SEQ ID NO: 191746 - DNA, 80 bp, synthetic construct; identical to SEQ ID NO: 7016
  source 1..80: mol_type = other DNA

SEQ ID NO: 191747 - DNA, 80 bp, synthetic construct; identical to SEQ ID NO: 7017
  source 1..80: mol_type = other DNA

SEQ ID NO: 191748 - DNA, 80 bp, synthetic construct; identical to SEQ ID NO: 7018
  source 1..80: mol_type = other DNA

SEQ ID NO: 191749 - DNA, 80 bp, synthetic construct; identical to SEQ ID NO: 7019
  source 1..80: mol_type = other DNA

SEQ ID NO: 191750 - DNA, 80 bp, synthetic construct; identical to SEQ ID NO: 7020
  source 1..80: mol_type = other DNA

SEQ ID NO: 191751 - DNA, 80 bp, synthetic construct; identical to SEQ ID NO: 7021
  source 1..80: mol_type = other DNA

SEQ ID NO: 191752 - DNA, 80 bp, synthetic construct; identical to SEQ ID NO: 7022
  source 1..80: mol_type = other DNA

SEQ ID NO: 191753 - DNA, 80 bp, synthetic construct; identical to SEQ ID NO: 7023
  source 1..80: mol_type = other DNA

SEQ ID NO: 191754 - DNA, 80 bp, synthetic construct; identical to SEQ ID NO: 7024
  source 1..80: mol_type = other DNA

SEQ ID NO: 191755 - DNA, 80 bp, synthetic construct; identical to SEQ ID NO: 7025
  source 1..80: mol_type = other DNA

SEQ ID NO: 191756 - DNA, 80 bp, synthetic construct; identical to SEQ ID NO: 7026
  source 1..80: mol_type = other DNA

SEQ ID NO: 191757 - DNA, 80 bp, synthetic construct; identical to SEQ ID NO: 7027
  source 1..80: mol_type = other DNA

SEQ ID NO: 191758 - DNA, 80 bp, synthetic construct; identical to SEQ ID NO: 7028
  source 1..80: mol_type = other DNA

SEQ ID NO: 191759 - DNA, 80 bp, synthetic construct; identical to SEQ ID NO: 7029
  source 1..80: mol_type = other DNA

SEQ ID NO: 191760 - DNA, 80 bp, synthetic construct; identical to SEQ ID NO: 7030
  source 1..80: mol_type = other DNA

SEQ ID NO: 191761 - DNA, 80 bp, synthetic construct; identical to SEQ ID NO: 7031
  source 1..80: mol_type = other DNA

SEQ ID NO: 191762 - DNA, 80 bp, synthetic construct; identical to SEQ ID NO: 7032
  source 1..80: mol_type = other DNA

SEQ ID NO: 191763 - DNA, 80 bp, synthetic construct; identical to SEQ ID NO: 7033
  source 1..80: mol_type = other DNA

SEQ ID NO: 191764 - DNA, 80 bp, synthetic construct; identical to SEQ ID NO: 7034
  source 1..80: mol_type = other DNA

SEQ ID NO: 191765 - DNA, 80 bp, synthetic construct; identical to SEQ ID NO: 7035
  source 1..80: mol_type = other DNA

SEQ ID NO: 191766 - DNA, 80 bp, synthetic construct; identical to SEQ ID NO: 7036
  source 1..80: mol_type = other DNA

SEQ ID NO: 191767 - DNA, 80 bp, synthetic construct; identical to SEQ ID NO: 7037
  source 1..80: mol_type = other DNA

SEQ ID NO: 191768 - DNA, 80 bp, synthetic construct; identical to SEQ ID NO: 7038
  source 1..80: mol_type = other DNA

SEQ ID NO: 191769 - DNA, 80 bp, synthetic construct; identical to SEQ ID NO: 7039
  source 1..80: mol_type = other DNA

SEQ ID NO: 191770 - DNA, 80 bp, synthetic construct; identical to SEQ ID NO: 7040
  source 1..80: mol_type = other DNA

SEQ ID NO: 191771 - DNA, 80 bp, synthetic construct; identical to SEQ ID NO: 7041
  source 1..80: mol_type = other DNA

SEQ ID NO: 191772 - DNA, 80 bp, synthetic construct; identical to SEQ ID NO: 7042
  source 1..80: mol_type = other DNA

SEQ ID NO: 191773 - DNA, 80 bp, synthetic construct; identical to SEQ ID NO: 7043
  source 1..80: mol_type = other DNA

SEQ ID NO: 191774 - DNA, 80 bp, synthetic construct; identical to SEQ ID NO: 7044
  source 1..80: mol_type = other DNA

SEQ ID NO: 191775 - DNA, 80 bp, synthetic construct; identical to SEQ ID NO: 7045
  source 1..80: mol_type = other DNA

SEQ ID NO: 191776 - DNA, 80 bp, synthetic construct; identical to SEQ ID NO: 7046
  source 1..80: mol_type = other DNA

SEQ ID NO: 191777 - DNA, 80 bp, synthetic construct; identical to SEQ ID NO: 7047
  source 1..80: mol_type = other DNA

SEQ ID NO: 191778 - DNA, 80 bp, synthetic construct; identical to SEQ ID NO: 7048
  source 1..80: mol_type = other DNA

SEQ ID NO: 191779 - DNA, 80 bp, synthetic construct; identical to SEQ ID NO: 7049
  source 1..80: mol_type = other DNA

SEQ ID NO: 191780 - DNA, 80 bp, synthetic construct; identical to SEQ ID NO: 7050
  source 1..80: mol_type = other DNA

SEQ ID NO: 191781 - DNA, 80 bp, synthetic construct; identical to SEQ ID NO: 7051
  source 1..80: mol_type = other DNA

SEQ ID NO: 191782 - DNA, 80 bp, synthetic construct; identical to SEQ ID NO: 7052
  source 1..80: mol_type = other DNA

SEQ ID NO: 191783 - DNA, 80 bp, synthetic construct; identical to SEQ ID NO: 7053
  source 1..80: mol_type = other DNA

SEQ ID NO: 191784 - DNA, 80 bp, synthetic construct; identical to SEQ ID NO: 7054
  source 1..80: mol_type = other DNA

SEQ ID NO: 191785 - DNA, 80 bp, synthetic construct; identical to SEQ ID NO: 7055
  source 1..80: mol_type = other DNA

SEQ ID NO: 191786 - DNA, 80 bp, synthetic construct; identical to SEQ ID NO: 7056
  source 1..80: mol_type = other DNA

SEQ ID NO: 191787 - DNA, 80 bp, synthetic construct; identical to SEQ ID NO: 7057
  source 1..80: mol_type = other DNA

SEQ ID NO: 191788 - DNA, 80 bp, synthetic construct; identical to SEQ ID NO: 7058
  source 1..80: mol_type = other DNA

SEQ ID NO: 191789 - DNA, 80 bp, synthetic construct; identical to SEQ ID NO: 7059
  source 1..80: mol_type = other DNA

SEQ ID NO: 191790 - DNA, 80 bp, synthetic construct; identical to SEQ ID NO: 7060
  source 1..80: mol_type = other DNA

SEQ ID NO: 191791 - DNA, 80 bp, synthetic construct; identical to SEQ ID NO: 7061
  source 1..80: mol_type = other DNA

SEQ ID NO: 191792 - DNA, 80 bp, synthetic construct; identical to SEQ ID NO: 7062
  source 1..80: mol_type = other DNA

SEQ ID NO: 191793 - DNA, 80 bp, synthetic construct; identical to SEQ ID NO: 7063
  source 1..80: mol_type = other DNA

SEQ ID NO: 191794 - DNA, 80 bp, synthetic construct; identical to SEQ ID NO: 7064
  source 1..80: mol_type = other DNA

SEQ ID NO: 191795 - DNA, 80 bp, synthetic construct; identical to SEQ ID NO: 7065
  source 1..80: mol_type = other DNA

SEQ ID NO: 191796 - DNA, 80 bp, synthetic construct; identical to SEQ ID NO: 7066
  source 1..80: mol_type = other DNA

SEQ ID NO: 191797 - DNA, 80 bp, synthetic construct; identical to SEQ ID NO: 7067
  source 1..80: mol_type = other DNA

SEQ ID NO: 191798 - DNA, 80 bp, synthetic construct; identical to SEQ ID NO: 7068
  source 1..80: mol_type = other DNA

SEQ ID NO: 191799 - DNA, 80 bp, synthetic construct; identical to SEQ ID NO: 7069
  source 1..80: mol_type = other DNA

SEQ ID NO: 191800 - DNA, 80 bp, synthetic construct; identical to SEQ ID NO: 7070
  source 1..80: mol_type = other DNA

SEQ ID NO: 191801 - DNA, 80 bp, synthetic construct; identical to SEQ ID NO: 7071
  source 1..80: mol_type = other DNA

SEQ ID NO: 191802 - DNA, 80 bp, synthetic construct; identical to SEQ ID NO: 7072
  source 1..80: mol_type = other DNA

SEQ ID NO: 191803 - DNA, 80 bp, synthetic construct; identical to SEQ ID NO: 7073
  source 1..80: mol_type = other DNA

SEQ ID NO: 191804 - DNA, 80 bp, synthetic construct; identical to SEQ ID NO: 7074
  source 1..80: mol_type = other DNA

SEQ ID NO: 191805 - DNA, 80 bp, synthetic construct; identical to SEQ ID NO: 7075
  source 1..80: mol_type = other DNA

SEQ ID NO: 191806 - DNA, 80 bp, synthetic construct; identical to SEQ ID NO: 7076
  source 1..80: mol_type = other DNA

SEQ ID NO: 191807 - DNA, 80 bp, synthetic construct; identical to SEQ ID NO: 7077
  source 1..80: mol_type = other DNA

SEQ ID NO: 191808 - DNA, 80 bp, synthetic construct; identical to SEQ ID NO: 7078
  source 1..80: mol_type = other DNA

SEQ ID NO: 191809 - DNA, 80 bp, synthetic construct; identical to SEQ ID NO: 7079
  source 1..80: mol_type = other DNA

SEQ ID NO: 191810 - DNA, 80 bp, synthetic construct; identical to SEQ ID NO: 7080
  source 1..80: mol_type = other DNA

SEQ ID NO: 191811 - DNA, 80 bp, synthetic construct; identical to SEQ ID NO: 7081
  source 1..80: mol_type = other DNA

SEQ ID NO: 191812 - DNA, 80 bp, synthetic construct; identical to SEQ ID NO: 7082
  source 1..80: mol_type = other DNA

SEQ ID NO: 191813 - DNA, 80 bp, synthetic construct; identical to SEQ ID NO: 7083
  source 1..80: mol_type = other DNA

SEQ ID NO: 191814 - DNA, 80 bp, synthetic construct; identical to SEQ ID NO: 7084
  source 1..80: mol_type = other DNA

SEQ ID NO: 191815 - DNA, 80 bp, synthetic construct; identical to SEQ ID NO: 7085
  source 1..80: mol_type = other DNA

SEQ ID NO: 191816 - DNA, 80 bp, synthetic construct; identical to SEQ ID NO: 7086
  source 1..80: mol_type = other DNA

SEQ ID NO: 191817 - DNA, 80 bp, synthetic construct; identical to SEQ ID NO: 7087
  source 1..80: mol_type = other DNA

SEQ ID NO: 191818 - DNA, 80 bp, synthetic construct; identical to SEQ ID NO: 7088
  source 1..80: mol_type = other DNA

SEQ ID NO: 191819 - DNA, 80 bp, synthetic construct; identical to SEQ ID NO: 7089
  source 1..80: mol_type = other DNA

SEQ ID NO: 191820 - DNA, 80 bp, synthetic construct; identical to SEQ ID NO: 7090
  source 1..80: mol_type = other DNA

SEQ ID NO: 191821 - DNA, 80 bp, synthetic construct; identical to SEQ ID NO: 7091
  source 1..80: mol_type = other DNA

SEQ ID NO: 191822 - DNA, 80 bp, synthetic construct; identical to SEQ ID NO: 7092
  source 1..80: mol_type = other DNA

SEQ ID NO: 191823 - DNA, 80 bp, synthetic construct; identical to SEQ ID NO: 7093
  source 1..80: mol_type = other DNA

SEQ ID NO: 191824 - DNA, 80 bp, synthetic construct; identical to SEQ ID NO: 7094
  source 1..80: mol_type = other DNA

SEQ ID NO: 191825 - DNA, 80 bp, synthetic construct; identical to SEQ ID NO: 7095
  source 1..80: mol_type = other DNA

SEQ ID NO: 191826 - DNA, 80 bp, synthetic construct; identical to SEQ ID NO: 7096
  source 1..80: mol_type = other DNA

SEQ ID NO: 191827 - DNA, 80 bp, synthetic construct; identical to SEQ ID NO: 7097
  source 1..80: mol_type = other DNA

SEQ ID NO: 191828 - DNA, 80 bp, synthetic construct; identical to SEQ ID NO: 7098
  source 1..80: mol_type = other DNA

SEQ ID NO: 191829 - DNA, 80 bp, synthetic construct; identical to SEQ ID NO: 7099
  source 1..80: mol_type = other DNA

SEQ ID NO: 191830 - DNA, 80 bp, synthetic construct; identical to SEQ ID NO: 7100
  source 1..80: mol_type = other DNA

SEQ ID NO: 191831 - DNA, 80 bp, synthetic construct; identical to SEQ ID NO: 7101
  source 1..80: mol_type = other DNA

SEQ ID NO: 191832 - DNA, 80 bp, synthetic construct; identical to SEQ ID NO: 7102
  source 1..80: mol_type = other DNA

SEQ ID NO: 191833 - DNA, 80 bp, synthetic construct; identical to SEQ ID NO: 7103
  source 1..80: mol_type = other DNA

SEQ ID NO: 191834 - DNA, 80 bp, synthetic construct; identical to SEQ ID NO: 7104
  source 1..80: mol_type = other DNA

SEQ ID NO: 191835 - DNA, 80 bp, synthetic construct; identical to SEQ ID NO: 7105
  source 1..80: mol_type = other DNA

SEQ ID NO: 191836 - DNA, 80 bp, synthetic construct; identical to SEQ ID NO: 7106
  source 1..80: mol_type = other DNA

SEQ ID NO: 191837 - DNA, 80 bp, synthetic construct; identical to SEQ ID NO: 7107
  source 1..80: mol_type = other DNA

SEQ ID NO: 191838 - DNA, 80 bp, synthetic construct; identical to SEQ ID NO: 7108
  source 1..80: mol_type = other DNA

SEQ ID NO: 191839 - DNA, 80 bp, synthetic construct; identical to SEQ ID NO: 7109
  source 1..80: mol_type = other DNA

SEQ ID NO: 191840 - DNA, 80 bp, synthetic construct; identical to SEQ ID NO: 7110
  source 1..80: mol_type = other DNA

SEQ ID NO: 191841 - DNA, 80 bp, synthetic construct; identical to SEQ ID NO: 7111
  source 1..80: mol_type = other DNA

SEQ ID NO: 191842 - DNA, 80 bp, synthetic construct; identical to SEQ ID NO: 7112
  source 1..80: mol_type = other DNA

SEQ ID NO: 191843 - DNA, 80 bp, synthetic construct; identical to SEQ ID NO: 7113
  source 1..80: mol_type = other DNA

SEQ ID NO: 191844 - DNA, 80 bp, synthetic construct; identical to SEQ ID NO: 7114
  source 1..80: mol_type = other DNA

SEQ ID NO: 191845 - DNA, 80 bp, synthetic construct; identical to SEQ ID NO: 7115
  source 1..80: mol_type = other DNA

SEQ ID NO: 191846 - DNA, 80 bp, synthetic construct; identical to SEQ ID NO: 7116
  source 1..80: mol_type = other DNA

SEQ ID NO: 191847 - DNA, 80 bp, synthetic construct; identical to SEQ ID NO: 7117
  source 1..80: mol_type = other DNA

SEQ ID NO: 191848 - DNA, 80 bp, synthetic construct; identical to SEQ ID NO: 7118
  source 1..80: mol_type = other DNA

SEQ ID NO: 191849 - DNA, 80 bp, synthetic construct; identical to SEQ ID NO: 7119
  source 1..80: mol_type = other DNA

SEQ ID NO: 191850 - DNA, 80 bp, synthetic construct; identical to SEQ ID NO: 7120
  source 1..80: mol_type = other DNA

SEQ ID NO: 191851 - DNA, 80 bp, synthetic construct; identical to SEQ ID NO: 7121
  source 1..80: mol_type = other DNA

SEQ ID NO: 191852 - DNA, 80 bp, synthetic construct; identical to SEQ ID NO: 7122
  source 1..80: mol_type = other DNA

SEQ ID NO: 191853 - DNA, 80 bp, synthetic construct; identical to SEQ ID NO: 7123
  source 1..80: mol_type = other DNA

SEQ ID NO: 191854 - DNA, 80 bp, synthetic construct; identical to SEQ ID NO: 7124
  source 1..80: mol_type = other DNA

SEQ ID NO: 191855 - DNA, 80 bp, synthetic construct; identical to SEQ ID NO: 7125
  source 1..80: mol_type = other DNA

SEQ ID NO: 191856 - DNA, 80 bp, synthetic construct; identical to SEQ ID NO: 7126
  source 1..80: mol_type = other DNA

SEQ ID NO: 191857 - DNA, 80 bp, synthetic construct; identical to SEQ ID NO: 7127
  source 1..80: mol_type = other DNA

SEQ ID NO: 191858 - DNA, 80 bp, synthetic construct; identical to SEQ ID NO: 7128
  source 1..80: mol_type = other DNA

SEQ ID NO: 191859 - DNA, 80 bp, synthetic construct; identical to SEQ ID NO: 7129
  source 1..80: mol_type = other DNA

SEQ ID NO: 191860 - DNA, 80 bp, synthetic construct; identical to SEQ ID NO: 7130
  source 1..80: mol_type = other DNA

SEQ ID NO: 191861 - DNA, 80 bp, synthetic construct; identical to SEQ ID NO: 7131
  source 1..80: mol_type = other DNA

SEQ ID NO: 191862 - DNA, 80 bp, synthetic construct; identical to SEQ ID NO: 7132
  source 1..80: mol_type = other DNA

SEQ ID NO: 191863 - DNA, 80 bp, synthetic construct; identical to SEQ ID NO: 7133
  source 1..80: mol_type = other DNA

SEQ ID NO: 191864 - DNA, 80 bp, synthetic construct; identical to SEQ ID NO: 7134
  source 1..80: mol_type = other DNA

SEQ ID NO: 191865 - DNA, 80 bp, synthetic construct; identical to SEQ ID NO: 7135
  source 1..80: mol_type = other DNA

SEQ ID NO: 191866 - DNA, 80 bp, synthetic construct; identical to SEQ ID NO: 7136
  source 1..80: mol_type = other DNA

SEQ ID NO: 191867 - DNA, 80 bp, synthetic construct; identical to SEQ ID NO: 7137
  source 1..80: mol_type = other DNA

SEQ ID NO: 191868 - DNA, 80 bp, synthetic construct; identical to SEQ ID NO: 7138
  source 1..80: mol_type = other DNA

SEQ ID NO: 191869 - DNA, 80 bp, synthetic construct; identical to SEQ ID NO: 7139
  source 1..80: mol_type = other DNA

SEQ ID NO: 191870 - DNA, 80 bp, synthetic construct; identical to SEQ ID NO: 7140
  source 1..80: mol_type = other DNA

SEQ ID NO: 191871 - DNA, 80 bp, synthetic construct; identical to SEQ ID NO: 7141
  source 1..80: mol_type = other DNA

SEQ ID NO: 191872 - DNA, 80 bp, synthetic construct; identical to SEQ ID NO: 7142
  source 1..80: mol_type = other DNA

SEQ ID NO: 191873 - DNA, 80 bp, synthetic construct; identical to SEQ ID NO: 7143
  source 1..80: mol_type = other DNA

SEQ ID NO: 191874 - DNA, 80 bp, synthetic construct; identical to SEQ ID NO: 7144
  source 1..80: mol_type = other DNA

SEQ ID NO: 191875 - DNA, 80 bp, synthetic construct; identical to SEQ ID NO: 7145
  source 1..80: mol_type = other DNA

SEQ ID NO: 191876 - DNA, 80 bp, synthetic construct; identical to SEQ ID NO: 7146
  source 1..80: mol_type = other DNA

SEQ ID NO: 191877 - DNA, 80 bp, synthetic construct; identical to SEQ ID NO: 7147
  source 1..80: mol_type = other DNA

SEQ ID NO: 191878 - DNA, 80 bp, synthetic construct; identical to SEQ ID NO: 7148
  source 1..80: mol_type = other DNA

SEQ ID NO: 191879 - DNA, 80 bp, synthetic construct; identical to SEQ ID NO: 7149
  source 1..80: mol_type = other DNA

SEQ ID NO: 191880 - DNA, 80 bp, synthetic construct; identical to SEQ ID NO: 7150
  source 1..80: mol_type = other DNA

SEQ ID NO: 191881 - DNA, 80 bp, synthetic construct; identical to SEQ ID NO: 7151
  source 1..80: mol_type = other DNA

SEQ ID NO: 191882 - DNA, 80 bp, synthetic construct; identical to SEQ ID NO: 7152
  source 1..80: mol_type = other DNA

SEQ ID NO: 191883 - DNA, 80 bp, synthetic construct; identical to SEQ ID NO: 7153
  source 1..80: mol_type = other DNA

SEQ ID NO: 191884 - DNA, 80 bp, synthetic construct; identical to SEQ ID NO: 7154
  source 1..80: mol_type = other DNA

SEQ ID NO: 191885 - DNA, 80 bp, synthetic construct; identical to SEQ ID NO: 7155
  source 1..80: mol_type = other DNA

SEQ ID NO: 191886 - DNA, 80 bp, synthetic construct; identical to SEQ ID NO: 7156
  source 1..80: mol_type = other DNA

SEQ ID NO: 191887 - DNA, 80 bp, synthetic construct; identical to SEQ ID NO: 7157
  source 1..80: mol_type = other DNA

SEQ ID NO: 191888 - DNA, 80 bp, synthetic construct; identical to SEQ ID NO: 7158
  source 1..80: mol_type = other DNA

SEQ ID NO: 191889 - DNA, 80 bp, synthetic construct; identical to SEQ ID NO: 7159
  source 1..80: mol_type = other DNA

SEQ ID NO: 191890 - DNA, 80 bp, synthetic construct; identical to SEQ ID NO: 7160
  source 1..80: mol_type = other DNA

SEQ ID NO: 191891 - DNA, 80 bp, synthetic construct; identical to SEQ ID NO: 7161
  source 1..80: mol_type = other DNA

SEQ ID NO: 191892 - DNA, 80 bp, synthetic construct; identical to SEQ ID NO: 7162
  source 1..80: mol_type = other DNA

SEQ ID NO: 191893 - DNA, 80 bp, synthetic construct; identical to SEQ ID NO: 7163
  source 1..80: mol_type = other DNA

SEQ ID NO: 191894 - DNA, 80 bp, synthetic construct; identical to SEQ ID NO: 7164
  source 1..80: mol_type = other DNA

SEQ ID NO: 191895 - DNA, 80 bp, synthetic construct; identical to SEQ ID NO: 7165
  source 1..80: mol_type = other DNA

SEQ ID NO: 191896 - DNA, 80 bp, synthetic construct; identical to SEQ ID NO: 7166
  source 1..80: mol_type = other DNA

SEQ ID NO: 191897 - DNA, 80 bp, synthetic construct; identical to SEQ ID NO: 7167
  source 1..80: mol_type = other DNA

SEQ ID NO: 191898 - DNA, 80 bp, synthetic construct; identical to SEQ ID NO: 7168
  source 1..80: mol_type = other DNA

SEQ ID NO: 191899 - DNA, 80 bp, synthetic construct; identical to SEQ ID NO: 7169
  source 1..80: mol_type = other DNA

SEQ ID NO: 191900 - DNA, 80 bp, synthetic construct; identical to SEQ ID NO: 7170
  source 1..80: mol_type = other DNA

SEQ ID NO: 191901 - DNA, 80 bp, synthetic construct; identical to SEQ ID NO: 7171
  source 1..80: mol_type = other DNA

SEQ ID NO: 191902 - DNA, 80 bp, synthetic construct; identical to SEQ ID NO: 7172
  source 1..80: mol_type = other DNA

SEQ ID NO: 191903 - DNA, 80 bp, synthetic construct; identical to SEQ ID NO: 7173
  source 1..80: mol_type = other DNA

SEQ ID NO: 191904 - DNA, 80 bp, synthetic construct; identical to SEQ ID NO: 7174
  source 1..80: mol_type = other DNA

SEQ ID NO: 191905 - DNA, 80 bp, synthetic construct; identical to SEQ ID NO: 7175
  source 1..80: mol_type = other DNA

SEQ ID NO: 191906 - DNA, 80 bp, synthetic construct; identical to SEQ ID NO: 7176
  source 1..80: mol_type = other DNA

SEQ ID NO: 191907 - DNA, 80 bp, synthetic construct; identical to SEQ ID NO: 7177
  source 1..80: mol_type = other DNA

SEQ ID NO: 191908 - DNA, 80 bp, synthetic construct; identical to SEQ ID NO: 7178
  source 1..80: mol_type = other DNA

SEQ ID NO: 191909 - DNA, 80 bp, synthetic construct; identical to SEQ ID NO: 7179
  source 1..80: mol_type = other DNA

SEQ ID NO: 191910 - DNA, 80 bp, synthetic construct; identical to SEQ ID NO: 7180
  source 1..80: mol_type = other DNA

SEQ ID NO: 191911 - DNA, 80 bp, synthetic construct; identical to SEQ ID NO: 7181
  source 1..80: mol_type = other DNA

SEQ ID NO: 191912 - DNA, 80 bp, synthetic construct; identical to SEQ ID NO: 7182
  source 1..80: mol_type = other DNA

SEQ ID NO: 191913 - DNA, 80 bp, synthetic construct; identical to SEQ ID NO: 7183
  source 1..80: mol_type = other DNA

SEQ ID NO: 191914 - DNA, 80 bp, synthetic construct; identical to SEQ ID NO: 7184
  source 1..80: mol_type = other DNA

SEQ ID NO: 191915 - DNA, 80 bp, synthetic construct; identical to SEQ ID NO: 7185
  source 1..80: mol_type = other DNA

SEQ ID NO: 191916 - DNA, 80 bp, synthetic construct; identical to SEQ ID NO: 7186
  source 1..80: mol_type = other DNA

SEQ ID NO: 191917 - DNA, 80 bp, synthetic construct; identical to SEQ ID NO: 7187
  source 1..80: mol_type = other DNA

SEQ ID NO: 191918 - DNA, 80 bp, synthetic construct; identical to SEQ ID NO: 7188
  source 1..80: mol_type = other DNA

SEQ ID NO: 191919 - DNA, 80 bp, synthetic construct; identical to SEQ ID NO: 7189
  source 1..80: mol_type = other DNA

SEQ ID NO: 191920 - DNA, 80 bp, synthetic construct; identical to SEQ ID NO: 7190
  source 1..80: mol_type = other DNA

SEQ ID NO: 191921 - DNA, 80 bp, synthetic construct; identical to SEQ ID NO: 7191
  source 1..80: mol_type = other DNA

SEQ ID NO: 191922 - DNA, 80 bp, synthetic construct; identical to SEQ ID NO: 7192
  source 1..80: mol_type = other DNA

SEQ ID NO: 191923 - DNA, 80 bp, synthetic construct; identical to SEQ ID NO: 7193
  source 1..80: mol_type = other DNA

SEQ ID NO: 191924 - DNA, 80 bp, synthetic construct; identical to SEQ ID NO: 7194
  source 1..80: mol_type = other DNA

SEQ ID NO: 191925 - DNA, 80 bp, synthetic construct; identical to SEQ ID NO: 7195
  source 1..80: mol_type = other DNA

SEQ ID NO: 191926 - DNA, 80 bp, synthetic construct; identical to SEQ ID NO: 7196
  source 1..80: mol_type = other DNA

SEQ ID NO: 191927 - DNA, 80 bp, synthetic construct; identical to SEQ ID NO: 7197
  source 1..80: mol_type = other DNA

SEQ ID NO: 191928 - DNA, 80 bp, synthetic construct; identical to SEQ ID NO: 7198
  source 1..80: mol_type = other DNA

SEQ ID NO: 191929 - DNA, 80 bp, synthetic construct; identical to SEQ ID NO: 7199
  source 1..80: mol_type = other DNA

SEQ ID NO: 191930 - DNA, 80 bp, synthetic construct; identical to SEQ ID NO: 7200
  source 1..80: mol_type = other DNA

SEQ ID NO: 191931 - DNA, 80 bp, synthetic construct; identical to SEQ ID NO: 7201
  source 1..80: mol_type = other DNA

SEQ ID NO: 191932 - DNA, 80 bp, synthetic construct; identical to SEQ ID NO: 7202
  source 1..80: mol_type = other DNA

SEQ ID NO: 191933 - DNA, 80 bp, synthetic construct; identical to SEQ ID NO: 7203
  source 1..80: mol_type = other DNA

SEQ ID NO: 191934 - DNA, 80 bp, synthetic construct; identical to SEQ ID NO: 7204
  source 1..80: mol_type = other DNA

SEQ ID NO: 191935 - DNA, 80 bp, synthetic construct; identical to SEQ ID NO: 7205
  source 1..80: mol_type = other DNA

SEQ ID NO: 191936 - DNA, 80 bp, synthetic construct; identical to SEQ ID NO: 7206
  source 1..80: mol_type = other DNA

SEQ ID NO: 191937 - DNA, 80 bp, synthetic construct; identical to SEQ ID NO: 7207
  source 1..80: mol_type = other DNA

SEQ ID NO: 191938 - DNA, 80 bp, synthetic construct; identical to SEQ ID NO: 7208
  source 1..80: mol_type = other DNA

SEQ ID NO: 191939 - DNA, 80 bp, synthetic construct; identical to SEQ ID NO: 7209
  source 1..80: mol_type = other DNA

SEQ ID NO: 191940 - DNA, 80 bp, synthetic construct; identical to SEQ ID NO: 7210
  source 1..80: mol_type = other DNA

SEQ ID NO: 191941 - DNA, 80 bp, synthetic construct; identical to SEQ ID NO: 7211
  source 1..80: mol_type = other DNA

SEQ ID NO: 191942 - DNA, 80 bp, synthetic construct; identical to SEQ ID NO: 7212
  source 1..80: mol_type = other DNA

SEQ ID NO: 191943 - DNA, 80 bp, synthetic construct; identical to SEQ ID NO: 7213
  source 1..80: mol_type = other DNA

SEQ ID NO: 191944 - DNA, 80 bp, synthetic construct; identical to SEQ ID NO: 7214
  source 1..80: mol_type = other DNA

SEQ ID NO: 191945 - DNA, 80 bp, synthetic construct; identical to SEQ ID NO: 7215
  source 1..80: mol_type = other DNA

SEQ ID NO: 191946 - DNA, 80 bp, synthetic construct; identical to SEQ ID NO: 7216
  source 1..80: mol_type = other DNA

SEQ ID NO: 191947 - DNA, 80 bp, synthetic construct; identical to SEQ ID NO: 7217
  source 1..80: mol_type = other DNA

SEQ ID NO: 191948 - DNA, 80 bp, synthetic construct; identical to SEQ ID NO: 7218
  source 1..80: mol_type = other DNA

SEQ ID NO: 191949 - DNA, 80 bp, synthetic construct; identical to SEQ ID NO: 7219
  source 1..80: mol_type = other DNA

SEQ ID NO: 191950 - DNA, 80 bp, synthetic construct; identical to SEQ ID NO: 7220
  source 1..80: mol_type = other DNA

SEQ ID NO: 191951 - DNA, 80 bp, synthetic construct; identical to SEQ ID NO: 7221
  source 1..80: mol_type = other DNA

SEQ ID NO: 191952 - DNA, 80 bp, synthetic construct; identical to SEQ ID NO: 7222
  source 1..80: mol_type = other DNA

SEQ ID NO: 191953 - DNA, 80 bp, synthetic construct; identical to SEQ ID NO: 7223
  source 1..80: mol_type = other DNA

SEQ ID NO: 191954 - DNA, 80 bp, synthetic construct; identical to SEQ ID NO: 7224
  source 1..80: mol_type = other DNA

SEQ ID NO: 191955 - DNA, 80 bp, synthetic construct; identical to SEQ ID NO: 7225
  source 1..80: mol_type = other DNA

SEQ ID NO: 191956 - DNA, 80 bp, synthetic construct; identical to SEQ ID NO: 7226
  source 1..80: mol_type = other DNA

SEQ ID NO: 191957 - DNA, 80 bp, synthetic construct; identical to SEQ ID NO: 7227
  source 1..80: mol_type = other DNA

SEQ ID NO: 191958 - DNA, 80 bp, synthetic construct; identical to SEQ ID NO: 7228
  source 1..80: mol_type = other DNA

SEQ ID NO: 191959 - DNA, 80 bp, synthetic construct; identical to SEQ ID NO: 7229
  source 1..80: mol_type = other DNA

SEQ ID NO: 191960 - DNA, 80 bp, synthetic construct; identical to SEQ ID NO: 7230
  source 1..80: mol_type = other DNA

SEQ ID NO: 191961 - DNA, 80 bp, synthetic construct; identical to SEQ ID NO: 7231
  source 1..80: mol_type = other DNA

SEQ ID NO: 191962 - DNA, 80 bp, synthetic construct; identical to SEQ ID NO: 7232
  source 1..80: mol_type = other DNA

SEQ ID NO: 191963 - DNA, 80 bp, synthetic construct; identical to SEQ ID NO: 7233
  source 1..80: mol_type = other DNA

SEQ ID NO: 191964 - DNA, 80 bp, synthetic construct; identical to SEQ ID NO: 7234
  source 1..80: mol_type = other DNA

SEQ ID NO: 191965 - DNA, 80 bp, synthetic construct; identical to SEQ ID NO: 7235
  source 1..80: mol_type = other DNA

SEQ ID NO: 191966 - DNA, 80 bp, synthetic construct; identical to SEQ ID NO: 7236
  source 1..80: mol_type = other DNA

SEQ ID NO: 191967 - DNA, 80 bp, synthetic construct; identical to SEQ ID NO: 7237
  source 1..80: mol_type = other DNA

SEQ ID NO: 191968 - DNA, 80 bp, synthetic construct; identical to SEQ ID NO: 7238
  source 1..80: mol_type = other DNA

SEQ ID NO: 191969 - DNA, 80 bp, synthetic construct; identical to SEQ ID NO: 7239
  source 1..80: mol_type = other DNA

SEQ ID NO: 191970 - DNA, 80 bp, synthetic construct; identical to SEQ ID NO: 7240
  source 1..80: mol_type = other DNA

SEQ ID NO: 191971 - DNA, 80 bp, synthetic construct; identical to SEQ ID NO: 7241
  source 1..80: mol_type = other DNA

SEQ ID NO: 191972 - DNA, 80 bp, synthetic construct; identical to SEQ ID NO: 7242
  source 1..80: mol_type = other DNA

SEQ ID NO: 191973 - DNA, 80 bp, synthetic construct; identical to SEQ ID NO: 7243
  source 1..80: mol_type = other DNA

SEQ ID NO: 191974 - DNA, 80 bp, synthetic construct; identical to SEQ ID NO: 7244
  source 1..80: mol_type = other DNA

SEQ ID NO: 191975 - DNA, 80 bp, synthetic construct; identical to SEQ ID NO: 7245
  source 1..80: mol_type = other DNA

SEQ ID NO: 191976 - DNA, 80 bp, synthetic construct; identical to SEQ ID NO: 7246
  source 1..80: mol_type = other DNA

SEQ ID NO: 191977 - DNA, 80 bp, synthetic construct; identical to SEQ ID NO: 7247
  source 1..80: mol_type = other DNA

SEQ ID NO: 191978 - DNA, 80 bp, synthetic construct; identical to SEQ ID NO: 7248
  source 1..80: mol_type = other DNA

SEQ ID NO: 191979 - DNA, 80 bp, synthetic construct; identical to SEQ ID NO: 7249
  source 1..80: mol_type = other DNA

SEQ ID NO: 191980 - DNA, 80 bp, synthetic construct; identical to SEQ ID NO: 7250
  source 1..80: mol_type = other DNA

SEQ ID NO: 191981 - DNA, 80 bp, synthetic construct; identical to SEQ ID NO: 7251
  source 1..80: mol_type = other DNA

SEQ ID NO: 191982 - DNA, 80 bp, synthetic construct; identical to SEQ ID NO: 7252
  source 1..80: mol_type = other DNA

SEQ ID NO: 191983 - DNA, 80 bp, synthetic construct; identical to SEQ ID NO: 7253
  source 1..80: mol_type = other DNA

SEQ ID NO: 191984 - DNA, 80 bp, synthetic construct; identical to SEQ ID NO: 7254
  source 1..80: mol_type = other DNA

SEQ ID NO: 191985 - DNA, 80 bp, synthetic construct; identical to SEQ ID NO: 7255
  source 1..80: mol_type = other DNA

SEQ ID NO: 191986 - DNA, 80 bp, synthetic construct; identical to SEQ ID NO: 7256
  source 1..80: mol_type = other DNA

SEQ ID NO: 191987 - DNA, 80 bp, synthetic construct; identical to SEQ ID NO: 7257
  source 1..80: mol_type = other DNA

SEQ ID NO: 191988 - DNA, 80 bp, synthetic construct; identical to SEQ ID NO: 7258
  source 1..80: mol_type = other DNA

SEQ ID NO: 191989 - DNA, 80 bp, synthetic construct; identical to SEQ ID NO: 7259
  source 1..80: mol_type = other DNA

SEQ ID NO: 191990 - DNA, 80 bp, synthetic construct; identical to SEQ ID NO: 7260
  source 1..80: mol_type = other DNA

SEQ ID NO: 191991 - DNA, 80 bp, synthetic construct; identical to SEQ ID NO: 7261
  source 1..80: mol_type = other DNA

SEQ ID NO: 191992 - DNA, 80 bp, synthetic construct; identical to SEQ ID NO: 7262
  source 1..80: mol_type = other DNA

SEQ ID NO: 191993 - DNA, 80 bp, synthetic construct; identical to SEQ ID NO: 7263
  source 1..80: mol_type = other DNA

SEQ ID NO: 191994 - DNA, 80 bp, synthetic construct; identical to SEQ ID NO: 7264
  source 1..80: mol_type = other DNA

SEQ ID NO: 191995 - DNA, 80 bp, synthetic construct; identical to SEQ ID NO: 7265
  source 1..80: mol_type = other DNA

SEQ ID NO: 191996 - DNA, 80 bp, synthetic construct; identical to SEQ ID NO: 7266
  source 1..80: mol_type = other DNA

SEQ ID NO: 191997 - DNA, 80 bp, synthetic construct; identical to SEQ ID NO: 7267
  source 1..80: mol_type = other DNA

SEQ ID NO: 191998 - DNA, 80 bp, synthetic construct; identical to SEQ ID NO: 7268
  source 1..80: mol_type = other DNA

SEQ ID NO: 191999 - DNA, 80 bp, synthetic construct; identical to SEQ ID NO: 7269
  source 1..80: mol_type = other DNA

SEQ ID NO: 192000 - DNA, 80 bp, synthetic construct; identical to SEQ ID NO: 7270
  source 1..80: mol_type = other DNA

SEQ ID NO: 192001 - DNA, 80 bp, synthetic construct; identical to SEQ ID NO: 7271
  source 1..80: mol_type = other DNA

SEQ ID NO: 192002 - DNA, 80 bp, synthetic construct; identical to SEQ ID NO: 7272
  source 1..80: mol_type = other DNA

SEQ ID NO: 192003 - DNA, 80 bp, synthetic construct; identical to SEQ ID NO: 7273
  source 1..80: mol_type = other DNA

SEQ ID NO: 192004 - DNA, 80 bp, synthetic construct; identical to SEQ ID NO: 7274
  source 1..80: mol_type = other DNA

SEQ ID NO: 192005 - DNA, 80 bp, synthetic construct; identical to SEQ ID NO: 7275
  source 1..80: mol_type = other DNA

SEQ ID NO: 192006 - DNA, 80 bp, synthetic construct; identical to SEQ ID NO: 7276
  source 1..80: mol_type = other DNA

SEQ ID NO: 192007 - DNA, 80 bp, synthetic construct; identical to SEQ ID NO: 7277
  source 1..80: mol_type = other DNA

SEQ ID NO: 192008 - DNA, 80 bp, synthetic construct; identical to SEQ ID NO: 7278
  source 1..80: mol_type = other DNA

SEQ ID NO: 192009 - DNA, 80 bp, synthetic construct; identical to SEQ ID NO: 7279
  source 1..80: mol_type = other DNA

SEQ ID NO: 192010 - DNA, 80 bp, synthetic construct; identical to SEQ ID NO: 7280
  source 1..80: mol_type = other DNA

SEQ ID NO: 192011 - DNA, 80 bp, synthetic construct; identical to SEQ ID NO: 7281
  source 1..80: mol_type = other DNA

SEQ ID NO: 192012 - DNA, 80 bp, synthetic construct; identical to SEQ ID NO: 7282
  source 1..80: mol_type = other DNA

SEQ ID NO: 192013 - DNA, 80 bp, synthetic construct; identical to SEQ ID NO: 7283
  source 1..80: mol_type = other DNA

SEQ ID NO: 192014 - DNA, 80 bp, synthetic construct; identical to SEQ ID NO: 7284
  source 1..80: mol_type = other DNA

SEQ ID NO: 192015 - DNA, 80 bp, synthetic construct; identical to SEQ ID NO: 7285
  source 1..80: mol_type = other DNA

SEQ ID NO: 192016 - DNA, 80 bp, synthetic construct; identical to SEQ ID NO: 7286
  source 1..80: mol_type = other DNA

SEQ ID NO: 192017 - DNA, 80 bp, synthetic construct; identical to SEQ ID NO: 7287
  source 1..80: mol_type = other DNA

SEQ ID NO: 192018 - DNA, 80 bp, synthetic construct; identical to SEQ ID NO: 7288
  source 1..80: mol_type = other DNA

SEQ ID NO: 192019 - DNA, 80 bp, synthetic construct; identical to SEQ ID NO: 7289
  source 1..80: mol_type = other DNA

SEQ ID NO: 192020 - DNA, 80 bp, synthetic construct; identical to SEQ ID NO: 7290
  source 1..80: mol_type = other DNA

SEQ ID NO: 192021 - DNA, 80 bp, synthetic construct; identical to SEQ ID NO: 7291
  source 1..80: mol_type = other DNA

SEQ ID NO: 192022 - DNA, 80 bp, synthetic construct; identical to SEQ ID NO: 7292
  source 1..80: mol_type = other DNA

SEQ ID NO: 192023 - DNA, 80 bp, synthetic construct; identical to SEQ ID NO: 7293
  source 1..80: mol_type = other DNA

SEQ ID NO: 192024 - DNA, 80 bp, synthetic construct; identical to SEQ ID NO: 7294
  source 1..80: mol_type = other DNA

SEQ ID NO: 192025 - DNA, 80 bp, synthetic construct; identical to SEQ ID NO: 7295
  source 1..80: mol_type = other DNA

SEQ ID NO: 192026 - DNA, 80 bp, synthetic construct; identical to SEQ ID NO: 7296
  source 1..80: mol_type = other DNA

SEQ ID NO: 192027 - DNA, 80 bp, synthetic construct; identical to SEQ ID NO: 7297
  source 1..80: mol_type = other DNA

SEQ ID NO: 192028 - DNA, 80 bp, synthetic construct; identical to SEQ ID NO: 7298
  source 1..80: mol_type = other DNA

SEQ ID NO: 192029 - DNA, 80 bp, synthetic construct; identical to SEQ ID NO: 7299
  source 1..80: mol_type = other DNA

SEQ ID NO: 192030 - DNA, 80 bp, synthetic construct; identical to SEQ ID NO: 7300
  source 1..80: mol_type = other DNA

SEQ ID NO: 192031 - DNA, 80 bp, synthetic construct; identical to SEQ ID NO: 7301
  source 1..80: mol_type = other DNA

SEQ ID NO: 192032 - DNA, 80 bp, synthetic construct; identical to SEQ ID NO: 7302
  source 1..80: mol_type = other DNA

SEQ ID NO: 192033 - DNA, 80 bp, synthetic construct; identical to SEQ ID NO: 7303
  source 1..80: mol_type = other DNA

SEQ ID NO: 192034 - DNA, 80 bp, synthetic construct; identical to SEQ ID NO: 7304
  source 1..80: mol_type = other DNA

SEQ ID NO: 192035 - DNA, 80 bp, synthetic construct; identical to SEQ ID NO: 7305
  source 1..80: mol_type = other DNA

SEQ ID NO: 192036 - DNA, 80 bp, synthetic construct; identical to SEQ ID NO: 7306
  source 1..80: mol_type = other DNA

SEQ ID NO: 192037 - DNA, 80 bp, synthetic construct; identical to SEQ ID NO: 7307
  source 1..80: mol_type = other DNA

SEQ ID NO: 192038 - DNA, 80 bp, synthetic construct; identical to SEQ ID NO: 7308
  source 1..80: mol_type = other DNA

SEQ ID NO: 192039 - DNA, 80 bp, synthetic construct; identical to SEQ ID NO: 7309
  source 1..80: mol_type = other DNA

SEQ ID NO: 192040 - DNA, 80 bp, synthetic construct; identical to SEQ ID NO: 7310
  source 1..80: mol_type = other DNA

SEQ ID NO: 192041 - DNA, 80 bp, synthetic construct; identical to SEQ ID NO: 7311
  source 1..80: mol_type = other DNA

SEQ ID NO: 192042 - DNA, 80 bp, synthetic construct; identical to SEQ ID NO: 7312
  source 1..80: mol_type = other DNA

SEQ ID NO: 192043 - DNA, 80 bp, synthetic construct; identical to SEQ ID NO: 7313
  source 1..80: mol_type = other DNA

SEQ ID NO: 192044 - DNA, 80 bp, synthetic construct; identical to SEQ ID NO: 7314
  source 1..80: mol_type = other DNA

SEQ ID NO: 192045 - DNA, 80 bp, synthetic construct; identical to SEQ ID NO: 7315
  source 1..80: mol_type = other DNA

SEQ ID NO: 192046 - DNA, 80 bp, synthetic construct; identical to SEQ ID NO: 7316
  source 1..80: mol_type = other DNA

SEQ ID NO: 192047 - DNA, 80 bp, synthetic construct; identical to SEQ ID NO: 7317
  source 1..80: mol_type = other DNA

SEQ ID NO: 192048 - DNA, 80 bp, synthetic construct; identical to SEQ ID NO: 7318
  source 1..80: mol_type = other DNA

SEQ ID NO: 192049 - DNA, 80 bp, synthetic construct; identical to SEQ ID NO: 7319
  source 1..80: mol_type = other DNA

SEQ ID NO: 192050 - DNA, 80 bp, synthetic construct; identical to SEQ ID NO: 7320
  source 1..80: mol_type = other DNA

SEQ ID NO: 192051 - DNA, 80 bp, synthetic construct; identical to SEQ ID NO: 7321
  source 1..80: mol_type = other DNA

SEQ ID NO: 192052 - DNA, 80 bp, synthetic construct; identical to SEQ ID NO: 7322
  source 1..80: mol_type = other DNA

SEQ ID NO: 192053 - DNA, 80 bp, synthetic construct; identical to SEQ ID NO: 7323
  source 1..80: mol_type = other DNA

SEQ ID NO: 192054 - DNA, 80 bp, synthetic construct; identical to SEQ ID NO: 7324
  source 1..80: mol_type = other DNA

SEQ ID NO: 192055 - DNA, 80 bp, synthetic construct; identical to SEQ ID NO: 7325
  source 1..80: mol_type = other DNA

SEQ ID NO: 192056 - DNA, 80 bp, synthetic construct; identical to SEQ ID NO: 7326
  source 1..80: mol_type = other DNA

SEQ ID NO: 192057 - DNA, 80 bp, synthetic construct; identical to SEQ ID NO: 7327
  source 1..80: mol_type = other DNA

SEQ ID NO: 192058 - DNA, 80 bp, synthetic construct; identical to SEQ ID NO: 7328
  source 1..80: mol_type = other DNA

SEQ ID NO: 192059 - DNA, 80 bp, synthetic construct; identical to SEQ ID NO: 7329
  source 1..80: mol_type = other DNA

SEQ ID NO: 192060 - DNA, 80 bp, synthetic construct; identical to SEQ ID NO: 7330
  source 1..80: mol_type = other DNA

SEQ ID NO: 192061 - DNA, 80 bp, synthetic construct; identical to SEQ ID NO: 7331
  source 1..80: mol_type = other DNA

SEQ ID NO: 192062 - DNA, 80 bp, synthetic construct; identical to SEQ ID NO: 7332
  source 1..80: mol_type = other DNA

SEQ ID NO: 192063 - DNA, 80 bp, synthetic construct; identical to SEQ ID NO: 7333
  source 1..80: mol_type = other DNA

SEQ ID NO: 192064 - DNA, 80 bp, synthetic construct; identical to SEQ ID NO: 7334
  source 1..80: mol_type = other DNA

SEQ ID NO: 192065 - DNA, 80 bp, synthetic construct; identical to SEQ ID NO: 7335
  source 1..80: mol_type = other DNA

SEQ ID NO: 192066 - DNA, 80 bp, synthetic construct; identical to SEQ ID NO: 7336
  source 1..80: mol_type = other DNA

SEQ ID NO: 192067 - DNA, 80 bp, synthetic construct; identical to SEQ ID NO: 7337
  source 1..80: mol_type = other DNA

SEQ ID NO: 192068 - DNA, 80 bp, synthetic construct; identical to SEQ ID NO: 7338
  source 1..80: mol_type = other DNA

SEQ ID NO: 192069 - DNA, 80 bp, synthetic construct; identical to SEQ ID NO: 7339
  source 1..80: mol_type = other DNA

SEQ ID NO: 192070 - DNA, 80 bp, synthetic construct; identical to SEQ ID NO: 7340
  source 1..80: mol_type = other DNA

SEQ ID NO: 192071 - DNA, 80 bp, synthetic construct; identical to SEQ ID NO: 7341
  source 1..80: mol_type = other DNA

SEQ ID NO: 192072 - DNA, 80 bp, synthetic construct; identical to SEQ ID NO: 7342
  source 1..80: mol_type = other DNA

SEQ ID NO: 192073 - DNA, 80 bp, synthetic construct; identical to SEQ ID NO: 7343
  source 1..80: mol_type = other DNA

SEQ ID NO: 192074 - DNA, 80 bp, synthetic construct; identical to SEQ ID NO: 7344
  source 1..80: mol_type = other DNA

SEQ ID NO: 192075 - DNA, 80 bp, synthetic construct; identical to SEQ ID NO: 7345
  source 1..80: mol_type = other DNA

SEQ ID NO: 192076 - DNA, 80 bp, synthetic construct; identical to SEQ ID NO: 7346
  source 1..80: mol_type = other DNA

SEQ ID NO: 192077 - DNA, 80 bp, synthetic construct; identical to SEQ ID NO: 7347
  source 1..80: mol_type = other DNA

SEQ ID NO: 192078 - DNA, 80 bp, synthetic construct; identical to SEQ ID NO: 7348
  source 1..80: mol_type = other DNA

SEQ ID NO: 192079 - DNA, 80 bp, synthetic construct; identical to SEQ ID NO: 7349
  source 1..80: mol_type = other DNA

SEQ ID NO: 192080 - DNA, 80 bp, synthetic construct; identical to SEQ ID NO: 7350
  source 1..80: mol_type = other DNA

SEQ ID NO: 192081 - DNA, 80 bp, synthetic construct; identical to SEQ ID NO: 7351
  source 1..80: mol_type = other DNA

SEQ ID NO: 192082 - DNA, 80 bp, synthetic construct; identical to SEQ ID NO: 7352
  source 1..80: mol_type = other DNA

SEQ ID NO: 192083 - DNA, 80 bp, synthetic construct; identical to SEQ ID NO: 7353
  source 1..80: mol_type = other DNA

SEQ ID NO: 192084 - DNA, 80 bp, synthetic construct; identical to SEQ ID NO: 7354
  source 1..80: mol_type = other DNA

SEQ ID NO: 192085 - DNA, 80 bp, synthetic construct; identical to SEQ ID NO: 7355
  source 1..80: mol_type = other DNA

SEQ ID NO: 192086 - DNA, 80 bp, synthetic construct; identical to SEQ ID NO: 7356
  source 1..80: mol_type = other DNA

SEQ ID NO: 192087 - DNA, 80 bp, synthetic construct; identical to SEQ ID NO: 7357
  source 1..80: mol_type = other DNA

SEQ ID NO: 192088 - DNA, 80 bp, synthetic construct; identical to SEQ ID NO: 7358
  source 1..80: mol_type = other DNA

SEQ ID NO: 192089 - DNA, 80 bp, synthetic construct; identical to SEQ ID NO: 7359
  source 1..80: mol_type = other DNA

SEQ ID NO: 192090 - DNA, 80 bp, synthetic construct; identical to SEQ ID NO: 7360
  source 1..80: mol_type = other DNA

SEQ ID NO: 192091 - DNA, 80 bp, synthetic construct; identical to SEQ ID NO: 7361
  source 1..80: mol_type = other DNA

SEQ ID NO: 192092 - DNA, 80 bp, synthetic construct; identical to SEQ ID NO: 7362
  source 1..80: mol_type = other DNA

SEQ ID NO: 192093 - DNA, 80 bp, synthetic construct; identical to SEQ ID NO: 7363
  source 1..80: mol_type = other DNA

SEQ ID NO: 192094 - DNA, 80 bp, synthetic construct; identical to SEQ ID NO: 7364
  source 1..80: mol_type = other DNA

SEQ ID NO: 192095 - DNA, 80 bp, synthetic construct; identical to SEQ ID NO: 7365
  source 1..80: mol_type = other DNA

SEQ ID NO: 192096 - DNA, 80 bp, synthetic construct; identical to SEQ ID NO: 7366
  source 1..80: mol_type = other DNA

SEQ ID NO: 192097 - DNA, 80 bp, synthetic construct; identical to SEQ ID NO: 7367
  source 1..80: mol_type = other DNA

SEQ ID NO: 192098 - DNA, 80 bp, synthetic construct; identical to SEQ ID NO: 7368
  source 1..80: mol_type = other DNA

SEQ ID NO: 192099 - DNA, 80 bp, synthetic construct; identical to SEQ ID NO: 7369
  source 1..80: mol_type = other DNA

SEQ ID NO: 192100 - DNA, 80 bp, synthetic construct; identical to SEQ ID NO: 7370
  source 1..80: mol_type = other DNA

SEQ ID NO: 192101 - DNA, 80 bp, synthetic construct; identical to SEQ ID NO: 7371
  source 1..80: mol_type = other DNA

SEQ ID NO: 192102 - DNA, 80 bp, synthetic construct; identical to SEQ ID NO: 7372
  source 1..80: mol_type = other DNA

SEQ ID NO: 192103 - DNA, 80 bp, synthetic construct; identical to SEQ ID NO: 7373
  source 1..80: mol_type = other DNA

SEQ ID NO: 192104 - DNA, 80 bp, synthetic construct; identical to SEQ ID NO: 7374
  source 1..80: mol_type = other DNA

SEQ ID NO: 192105 - DNA, 80 bp, synthetic construct; identical to SEQ ID NO: 7375
  source 1..80: mol_type = other DNA

SEQ ID NO: 192106 - DNA, 80 bp, synthetic construct; identical to SEQ ID NO: 7376
  source 1..80: mol_type = other DNA

SEQ ID NO: 192107 - DNA, 80 bp, synthetic construct; identical to SEQ ID NO: 7377
  source 1..80: mol_type = other DNA

SEQ ID NO: 192108 - DNA, 80 bp, synthetic construct; identical to SEQ ID NO: 7378
  source 1..80: mol_type = other DNA

SEQ ID NO: 192109 - DNA, 80 bp, synthetic construct; identical to SEQ ID NO: 7379
  source 1..80: mol_type = other DNA

SEQ ID NO: 192110 - DNA, 80 bp, synthetic construct; identical to SEQ ID NO: 7380
  source 1..80: mol_type = other DNA

SEQ ID NO: 192111 - DNA, 80 bp, synthetic construct; identical to SEQ ID NO: 7381
  source 1..80: mol_type = other DNA

SEQ ID NO: 192112 - DNA, 80 bp, synthetic construct; identical to SEQ ID NO: 7382
  source 1..80: mol_type = other DNA

SEQ ID NO: 192113 - DNA, 80 bp, synthetic construct; identical to SEQ ID NO: 7383
  source 1..80: mol_type = other DNA

SEQ ID NO: 192114 - DNA, 80 bp, synthetic construct; identical to SEQ ID NO: 7384
  source 1..80: mol_type = other DNA

SEQ ID NO: 192115 - DNA, 80 bp, synthetic construct; identical to SEQ ID NO: 7385
  source 1..80: mol_type = other DNA

SEQ ID NO: 192116 - DNA, 80 bp, synthetic construct; identical to SEQ ID NO: 7386
  source 1..80: mol_type = other DNA

SEQ ID NO: 192117 - DNA, 80 bp, synthetic construct; identical to SEQ ID NO: 7387
  source 1..80: mol_type = other DNA

SEQ ID NO: 192118 - DNA, 80 bp, synthetic construct; identical to SEQ ID NO: 7388
  source 1..80: mol_type = other DNA

SEQ ID NO: 192119 - DNA, 80 bp, synthetic construct; identical to SEQ ID NO: 7389
  source 1..80: mol_type = other DNA

SEQ ID NO: 192120 - DNA, 80 bp, synthetic construct; identical to SEQ ID NO: 7390
  source 1..80: mol_type = other DNA

SEQ ID NO: 192121 - DNA, 80 bp, synthetic construct; identical to SEQ ID NO: 7391
  source 1..80: mol_type = other DNA

SEQ ID NO: 192122 - DNA, 80 bp, synthetic construct; identical to SEQ ID NO: 7392
  source 1..80: mol_type = other DNA

SEQ ID NO: 192123 - DNA, 80 bp, synthetic construct; identical to SEQ ID NO: 7393
  source 1..80: mol_type = other DNA

SEQ ID NO: 192124 - DNA, 80 bp, synthetic construct; identical to SEQ ID NO: 7394
  source 1..80: mol_type = other DNA

SEQ ID NO: 192125 - DNA, 80 bp, synthetic construct; identical to SEQ ID NO: 7395
  source 1..80: mol_type = other DNA

SEQ ID NO: 192126 - DNA, 80 bp, synthetic construct; identical to SEQ ID NO: 7396
  source 1..80: mol_type = other DNA

SEQ ID NO: 192127 - DNA, 80 bp, synthetic construct; identical to SEQ ID NO: 7397
  source 1..80: mol_type = other DNA

SEQ ID NO: 192128 - DNA, 80 bp, synthetic construct; identical to SEQ ID NO: 7398
  source 1..80: mol_type = other DNA

SEQ ID NO: 192129 - DNA, 80 bp, synthetic construct; identical to SEQ ID NO: 7399
  source 1..80: mol_type = other DNA

SEQ ID NO: 192130 - DNA, 80 bp, synthetic construct; identical to SEQ ID NO: 7400
  source 1..80: mol_type = other DNA

SEQ ID NO: 192131 - DNA, 80 bp, synthetic construct; identical to SEQ ID NO: 7401
  source 1..80: mol_type = other DNA

SEQ ID NO: 192132 - DNA, 80 bp, synthetic construct; identical to SEQ ID NO: 7402
  source 1..80: mol_type = other DNA

SEQ ID NO: 192133 - DNA, 80 bp, synthetic construct; identical to SEQ ID NO: 7403
  source 1..80: mol_type = other DNA

SEQ ID NO: 192134 - DNA, 80 bp, synthetic construct; identical to SEQ ID NO: 7404
  source 1..80: mol_type = other DNA

SEQ ID NO: 192135 - DNA, 80 bp, synthetic construct; identical to SEQ ID NO: 7405
  source 1..80: mol_type = other DNA

SEQ ID NO: 192136 - DNA, 80 bp, synthetic construct; identical to SEQ ID NO: 7406
  source 1..80: mol_type = other DNA

SEQ ID NO: 192137 - DNA, 80 bp, synthetic construct; identical to SEQ ID NO: 7407
  source 1..80: mol_type = other DNA

SEQ ID NO: 192138 - DNA, 80 bp, synthetic construct; identical to SEQ ID NO: 7408
  source 1..80: mol_type = other DNA

SEQ ID NO: 192139 - DNA, 80 bp, synthetic construct; identical to SEQ ID NO: 7409
  source 1..80: mol_type = other DNA

SEQ ID NO: 192140 - DNA, 80 bp, synthetic construct; identical to SEQ ID NO: 7410
  source 1..80: mol_type = other DNA

SEQ ID NO: 192141 - DNA, 80 bp, synthetic construct; identical to SEQ ID NO: 7411
  source 1..80: mol_type = other DNA

SEQ ID NO: 192142 - DNA, 80 bp, synthetic construct; identical to SEQ ID NO: 7412
  source 1..80: mol_type = other DNA

SEQ ID NO: 192143 - DNA, 80 bp, synthetic construct; identical to SEQ ID NO: 7413
  source 1..80: mol_type = other DNA

SEQ ID NO: 192144 - DNA, 80 bp, synthetic construct; identical to SEQ ID NO: 7414
  source 1..80: mol_type = other DNA

SEQ ID NO: 192145 - DNA, 80 bp, synthetic construct; identical to SEQ ID NO: 7415
  source 1..80: mol_type = other DNA

SEQ ID NO: 192146 - DNA, 80 bp, synthetic construct; identical to SEQ ID NO: 7416
  source 1..80: mol_type = other DNA

SEQ ID NO: 192147 - DNA, 80 bp, synthetic construct; identical to SEQ ID NO: 7417
  source 1..80: mol_type = other DNA

SEQ ID NO: 192148 - DNA, 80 bp, synthetic construct; identical to SEQ ID NO: 7418
  source 1..80: mol_type = other DNA

SEQ ID NO: 192149 - DNA, 80 bp, synthetic construct; identical to SEQ ID NO: 7419
  source 1..80: mol_type = other DNA

SEQ ID NO: 192150 - DNA, 80 bp, synthetic construct; identical to SEQ ID NO: 7420
  source 1..80: mol_type = other DNA

SEQ ID NO: 192151 - DNA, 80 bp, synthetic construct; identical to SEQ ID NO: 7421
  source 1..80: mol_type = other DNA

SEQ ID NO: 192152 - DNA, 80 bp, synthetic construct; identical to SEQ ID NO: 7422
  source 1..80: mol_type = other DNA

SEQ ID NO: 192153 - DNA, 80 bp, synthetic construct; identical to SEQ ID NO: 7423
  source 1..80: mol_type = other DNA

SEQ ID NO: 192154 - DNA, 80 bp, synthetic construct; identical to SEQ ID NO: 7424
  source 1..80: mol_type = other DNA

SEQ ID NO: 192155 - DNA, 80 bp, synthetic construct; identical to SEQ ID NO: 7425
  source 1..80: mol_type = other DNA

SEQ ID NO: 192156 - DNA, 80 bp, synthetic construct; identical to SEQ ID NO: 7426
  source 1..80: mol_type = other DNA

SEQ ID NO: 192157 - DNA, 80 bp, synthetic construct; identical to SEQ ID NO: 7427
  source 1..80: mol_type = other DNA

SEQ ID NO: 192158 - DNA, 80 bp, synthetic construct; identical to SEQ ID NO: 7428
  source 1..80: mol_type = other DNA

SEQ ID NO: 192159 - DNA, 80 bp, synthetic construct; identical to SEQ ID NO: 7429
  source 1..80: mol_type = other DNA

SEQ ID NO: 192160 - DNA, 80 bp, synthetic construct; identical to SEQ ID NO: 7430
  source 1..80: mol_type = other DNA

SEQ ID NO: 192161 - DNA, 80 bp, synthetic construct; identical to SEQ ID NO: 7431
  source 1..80: mol_type = other DNA

SEQ ID NO: 192162 - DNA, 80 bp, synthetic construct; identical to SEQ ID NO: 7432
  source 1..80: mol_type = other DNA

SEQ ID NO: 192163 - DNA, 80 bp, synthetic construct; identical to SEQ ID NO: 7433
  source 1..80: mol_type = other DNA

SEQ ID NO: 192164 - DNA, 80 bp, synthetic construct; identical to SEQ ID NO: 7434
  source 1..80: mol_type = other DNA

SEQ ID NO: 192165 - DNA, 80 bp, synthetic construct; identical to SEQ ID NO: 7435
  source 1..80: mol_type = other DNA

SEQ ID NO: 192166 - DNA, 80 bp, synthetic construct; identical to SEQ ID NO: 7436
  source 1..80: mol_type = other DNA

SEQ ID NO: 192167 - DNA, 80 bp, synthetic construct; identical to SEQ ID NO: 7437
  source 1..80: mol_type = other DNA

SEQ ID NO: 192168 - DNA, 80 bp, synthetic construct; identical to SEQ ID NO: 7438
  source 1..80: mol_type = other DNA

SEQ ID NO: 192169 - DNA, 80 bp, synthetic construct; identical to SEQ ID NO: 7439
  source 1..80: mol_type = other DNA

SEQ ID NO: 192170 - DNA, 80 bp, synthetic construct; identical to SEQ ID NO: 7440
  source 1..80: mol_type = other DNA

SEQ ID NO: 192171 - DNA, 80 bp, synthetic construct; identical to SEQ ID NO: 7441
  source 1..80: mol_type = other DNA

SEQ ID NO: 192172 - DNA, 80 bp, synthetic construct; identical to SEQ ID NO: 7442
  source 1..80: mol_type = other DNA

SEQ ID NO: 192173 - DNA, 80 bp, synthetic construct; identical to SEQ ID NO: 7443
  source 1..80: mol_type = other DNA

SEQ ID NO: 192174 - DNA, 80 bp, synthetic construct; identical to SEQ ID NO: 7444
  source 1..80: mol_type = other DNA

SEQ ID NO: 192175 - DNA, 80 bp, synthetic construct; identical to SEQ ID NO: 7445
  source 1..80: mol_type = other DNA

SEQ ID NO: 192176 - DNA, 80 bp, synthetic construct; identical to SEQ ID NO: 7446
  source 1..80: mol_type = other DNA

SEQ ID NO: 192177 - DNA, 80 bp, synthetic construct; identical to SEQ ID NO: 7447
  source 1..80: mol_type = other DNA

SEQ ID NO: 192178 - DNA, 80 bp, synthetic construct; identical to SEQ ID NO: 7448
  source 1..80: mol_type = other DNA

SEQ ID NO: 192179 - DNA, 80 bp, synthetic construct; identical to SEQ ID NO: 7449
  source 1..80: mol_type = other DNA

SEQ ID NO: 192180 - DNA, 80 bp, synthetic construct; identical to SEQ ID NO: 7450
  source 1..80: mol_type = other DNA

SEQ ID NO: 192181 - DNA, 80 bp, synthetic construct; identical to SEQ ID NO: 7451
  source 1..80: mol_type = other DNA

SEQ ID NO: 192182 - DNA, 80 bp, synthetic construct; identical to SEQ ID NO: 7452
  source 1..80: mol_type = other DNA

SEQ ID NO: 192183 - DNA, 80 bp, synthetic construct; identical to SEQ ID NO: 7453
  source 1..80: mol_type = other DNA

SEQ ID NO: 192184 - DNA, 80 bp, synthetic construct; identical to SEQ ID NO: 7454
  source 1..80: mol_type = other DNA

SEQ ID NO: 192185 - DNA, 80 bp, synthetic construct; identical to SEQ ID NO: 7455
  source 1..80: mol_type = other DNA

SEQ ID NO: 192186 - DNA, 80 bp, synthetic construct; identical to SEQ ID NO: 7456
  source 1..80: mol_type = other DNA

SEQ ID NO: 192187 - DNA, 80 bp, synthetic construct; identical to SEQ ID NO: 7457
  source 1..80: mol_type = other DNA

SEQ ID NO: 192188 - DNA, 80 bp, synthetic construct; identical to SEQ ID NO: 7458
  source 1..80: mol_type = other DNA

SEQ ID NO: 192189 - DNA, 80 bp, synthetic construct; identical to SEQ ID NO: 7459
  source 1..80: mol_type = other DNA

SEQ ID NO: 192190 - DNA, 80 bp, synthetic construct; identical to SEQ ID NO: 7460
  source 1..80: mol_type = other DNA

SEQ ID NO: 192191 - DNA, 80 bp, synthetic construct; identical to SEQ ID NO: 7461
  source 1..80: mol_type = other DNA

SEQ ID NO: 192192 - DNA, 80 bp, synthetic construct; identical to SEQ ID NO: 7462
  source 1..80: mol_type = other DNA

SEQ ID NO: 192193 - DNA, 80 bp, synthetic construct; identical to SEQ ID NO: 7463
  source 1..80: mol_type = other DNA

SEQ ID NO: 192194 - DNA, 80 bp, synthetic construct; identical to SEQ ID NO: 7464
  source 1..80: mol_type = other DNA

SEQ ID NO: 192195 - DNA, 80 bp, synthetic construct; identical to SEQ ID NO: 7465
  source 1..80: mol_type = other DNA

SEQ ID NO: 192196 - DNA, 80 bp, synthetic construct; identical to SEQ ID NO: 7466
  source 1..80: mol_type = other DNA

SEQ ID NO: 192197 - DNA, 80 bp, synthetic construct; identical to SEQ ID NO: 7467
  source 1..80: mol_type = other DNA

SEQ ID NO: 192198 - DNA, 80 bp, synthetic construct; identical to SEQ ID NO: 7468
  source 1..80: mol_type = other DNA

SEQ ID NO: 192199 - DNA, 80 bp, synthetic construct; identical to SEQ ID NO: 7469
  source 1..80: mol_type = other DNA

SEQ ID NO: 192200 - DNA, 80 bp, synthetic construct; identical to SEQ ID NO: 7470
  source 1..80: mol_type = other DNA

SEQ ID NO: 192201 - DNA, 80 bp, synthetic construct; identical to SEQ ID NO: 7471
  source 1..80: mol_type = other DNA

SEQ ID NO: 192202 - DNA, 80 bp, synthetic construct; identical to SEQ ID NO: 7472
  source 1..80: mol_type = other DNA

SEQ ID NO: 192203 - DNA, 80 bp, synthetic construct; identical to SEQ ID NO: 7473
  source 1..80: mol_type = other DNA

SEQ ID NO: 192204 - DNA, 80 bp, synthetic construct; identical to SEQ ID NO: 7474
  source 1..80: mol_type = other DNA

SEQ ID NO: 192205 - DNA, 80 bp, synthetic construct; identical to SEQ ID NO: 7475
  source 1..80: mol_type = other DNA

SEQ ID NO: 192206 - DNA, 80 bp, synthetic construct; identical to SEQ ID NO: 7476
  source 1..80: mol_type = other DNA

SEQ ID NO: 192207 - DNA, 80 bp, synthetic construct; identical to SEQ ID NO: 7477
  source 1..80: mol_type = other DNA

SEQ ID NO: 192208 - DNA, 80 bp, synthetic construct; identical to SEQ ID NO: 7478
  source 1..80: mol_type = other DNA

SEQ ID NO: 192209 - DNA, 80 bp, synthetic construct; identical to SEQ ID NO: 7479
  source 1..80: mol_type = other DNA

SEQ ID NO: 192210 - DNA, 80 bp, synthetic construct; identical to SEQ ID NO: 7480
  source 1..80: mol_type = other DNA

SEQ ID NO: 192211 - DNA, 80 bp, synthetic construct; identical to SEQ ID NO: 7481
  source 1..80: mol_type = other DNA

SEQ ID NO: 192212 - DNA, 80 bp, synthetic construct; identical to SEQ ID NO: 7482
  source 1..80: mol_type = other DNA

SEQ ID NO: 192213 - DNA, 80 bp, synthetic construct; identical to SEQ ID NO: 7483
  source 1..80: mol_type = other DNA

SEQ ID NO: 192214 - DNA, 80 bp, synthetic construct; identical to SEQ ID NO: 7484
  source 1..80: mol_type = other DNA

SEQ ID NO: 192215 - DNA, 80 bp, synthetic construct; identical to SEQ ID NO: 7485
  source 1..80: mol_type = other DNA

SEQ ID NO: 192216 - DNA, 80 bp, synthetic construct; identical to SEQ ID NO: 7486
  source 1..80: mol_type = other DNA

SEQ ID NO: 192217 - DNA, 80 bp, synthetic construct; identical to SEQ ID NO: 7487
  source 1..80: mol_type = other DNA

SEQ ID NO: 192218 - DNA, 80 bp, synthetic construct; identical to SEQ ID NO: 7488
  source 1..80: mol_type = other DNA

SEQ ID NO: 192219 - DNA, 80 bp, synthetic construct; identical to SEQ ID NO: 7489
  source 1..80: mol_type = other DNA

SEQ ID NO: 192220 - DNA, 80 bp, synthetic construct; identical to SEQ ID NO: 7490
  source 1..80: mol_type = other DNA

SEQ ID NO: 192221 - DNA, 80 bp, synthetic construct; identical to SEQ ID NO: 7491
  source 1..80: mol_type = other DNA

SEQ ID NO: 192222 - DNA, 80 bp, synthetic construct; identical to SEQ ID NO: 7492
  source 1..80: mol_type = other DNA

SEQ ID NO: 192223 - DNA, 80 bp, synthetic construct; identical to SEQ ID NO: 7493
  source 1..80: mol_type = other DNA

SEQ ID NO: 192224 - DNA, 80 bp, synthetic construct; identical to SEQ ID NO: 7494
  source 1..80: mol_type = other DNA

SEQ ID NO: 192225 - DNA, 80 bp, synthetic construct; identical to SEQ ID NO: 7495
  source 1..80: mol_type = other DNA

SEQ ID NO: 192226 - DNA, 80 bp, synthetic construct; identical to SEQ ID NO: 7496
  source 1..80: mol_type = other DNA

SEQ ID NO: 192227 - DNA, 80 bp, synthetic construct; identical to SEQ ID NO: 7497
  source 1..80: mol_type = other DNA

SEQ ID NO: 192228 - DNA, 80 bp, synthetic construct; identical to SEQ ID NO: 7498
  source 1..80: mol_type = other DNA

SEQ ID NO: 192229 - DNA, 80 bp, synthetic construct; identical to SEQ ID NO: 7499
  source 1..80: mol_type = other DNA

SEQ ID NO: 192230 - DNA, 80 bp, synthetic construct; identical to SEQ ID NO: 7500
  source 1..80: mol_type = other DNA

SEQ ID NO: 192231 - DNA, 80 bp, synthetic construct; identical to SEQ ID NO: 7501
  source 1..80: mol_type = other DNA

SEQ ID NO: 192232 - DNA, 80 bp, synthetic construct; identical to SEQ ID NO: 7502
  source 1..80: mol_type = other DNA

SEQ ID NO: 192233 - DNA, 80 bp, synthetic construct; identical to SEQ ID NO: 7503
  source 1..80: mol_type = other DNA

SEQ ID NO: 192234 - DNA, 80 bp, synthetic construct; identical to SEQ ID NO: 7504
  source 1..80: mol_type = other DNA

SEQ ID NO: 192235 - DNA, 80 bp, synthetic construct; identical to SEQ ID NO: 7505
  source 1..80: mol_type = other DNA

SEQ ID NO: 192236 - DNA, 80 bp, synthetic construct; identical to SEQ ID NO: 7506
  source 1..80: mol_type = other DNA

SEQ ID NO: 192237 - DNA, 80 bp, synthetic construct; identical to SEQ ID NO: 7507
  source 1..80: mol_type = other DNA

SEQ ID NO: 192238 - DNA, 80 bp, synthetic construct; identical to SEQ ID NO: 7508
  source 1..80: mol_type = other DNA

SEQ ID NO: 192239 - DNA, 80 bp, synthetic construct; identical to SEQ ID NO: 7509
  source 1..80: mol_type = other DNA

SEQ ID NO: 192240 - DNA, 80 bp, synthetic construct; identical to SEQ ID NO: 7510
  source 1..80: mol_type = other DNA

SEQ ID NO: 192241 - DNA, 80 bp, synthetic construct; identical to SEQ ID NO: 7511
  source 1..80: mol_type = other DNA

SEQ ID NO: 192242 - DNA, 80 bp, synthetic construct; identical to SEQ ID NO: 7512
  source 1..80: mol_type = other DNA

SEQ ID NO: 192243 - DNA, 80 bp, synthetic construct; identical to SEQ ID NO: 7513
  source 1..80: mol_type = other DNA

SEQ ID NO: 192244 - DNA, 80 bp, synthetic construct; identical to SEQ ID NO: 7514
  source 1..80: mol_type = other DNA

SEQ ID NO: 192245 - DNA, 80 bp, synthetic construct; identical to SEQ ID NO: 7515
  source 1..80: mol_type = other DNA

SEQ ID NO: 192246 - DNA, 80 bp, synthetic construct; identical to SEQ ID NO: 7516
  source 1..80: mol_type = other DNA

SEQ ID NO: 192247 - DNA, 80 bp, synthetic construct; identical to SEQ ID NO: 7517
  source 1..80: mol_type = other DNA

SEQ ID NO: 192248 - DNA, 80 bp, synthetic construct; identical to SEQ ID NO: 7518
  source 1..80: mol_type = other DNA

SEQ ID NO: 192249 - DNA, 80 bp, synthetic construct; identical to SEQ ID NO: 7519
  source 1..80: mol_type = other DNA

SEQ ID NO: 192250 - DNA, 80 bp, synthetic construct; identical to SEQ ID NO: 7520
  source 1..80: mol_type = other DNA

SEQ ID NO: 192251 - DNA, 80 bp, synthetic construct; identical to SEQ ID NO: 7521
  source 1..80: mol_type = other DNA

SEQ ID NO: 192252 - DNA, 80 bp, synthetic construct; identical to SEQ ID NO: 7522
  source 1..80: mol_type = other DNA

SEQ ID NO: 192253 - DNA, 80 bp, synthetic construct; identical to SEQ ID NO: 7523
  source 1..80: mol_type = other DNA

SEQ ID NO: 192254 - DNA, 80 bp, synthetic construct; identical to SEQ ID NO: 7524
  source 1..80: mol_type = other DNA

SEQ ID NO: 192255 - DNA, 80 bp, synthetic construct; identical to SEQ ID NO: 7525
  source 1..80: mol_type = other DNA

SEQ ID NO: 192256 - DNA, 80 bp, synthetic construct; identical to SEQ ID NO: 7526
  source 1..80: mol_type = other DNA

SEQ ID NO: 192257 - DNA, 80 bp, synthetic construct; identical to SEQ ID NO: 7527
  source 1..80: mol_type = other DNA

SEQ ID NO: 192258 - DNA, 80 bp, synthetic construct; identical to SEQ ID NO: 7528
  source 1..80: mol_type = other DNA

SEQ ID NO: 192259 - DNA, 80 bp, synthetic construct; identical to SEQ ID NO: 7529
  source 1..80: mol_type = other DNA

SEQ ID NO: 192260 - DNA, 80 bp, synthetic construct; identical to SEQ ID NO: 7530
  source 1..80: mol_type = other DNA

SEQ ID NO: 192261 - DNA, 80 bp, synthetic construct; identical to SEQ ID NO: 7531
  source 1..80: mol_type = other DNA

SEQ ID NO: 192262 - DNA, 80 bp, synthetic construct; identical to SEQ ID NO: 7532
  source 1..80: mol_type = other DNA

SEQ ID NO: 192263 - DNA, 80 bp, synthetic construct; identical to SEQ ID NO: 7533
  source 1..80: mol_type = other DNA

SEQ ID NO: 192264 - DNA, 80 bp, synthetic construct; identical to SEQ ID NO: 7534
  source 1..80: mol_type = other DNA

SEQ ID NO: 192265 - DNA, 80 bp, synthetic construct; identical to SEQ ID NO: 7535
  source 1..80: mol_type = other DNA

SEQ ID NO: 192266 - DNA, 80 bp, synthetic construct; identical to SEQ ID NO: 7536
  source 1..80: mol_type = other DNA

SEQ ID NO: 192267 - DNA, 80 bp, synthetic construct; identical to SEQ ID NO: 7537
  source 1..80: mol_type = other DNA

SEQ ID NO: 192268 - DNA, 80 bp, synthetic construct; identical to SEQ ID NO: 7538
  source 1..80: mol_type = other DNA

SEQ ID NO: 192269 - DNA, 80 bp, synthetic construct; identical to SEQ ID NO: 7539
  source 1..80: mol_type = other DNA

SEQ ID NO: 192270 - DNA, 80 bp, synthetic construct; identical to SEQ ID NO: 7540
  source 1..80: mol_type = other DNA

SEQ ID NO: 192271 - DNA, 80 bp, synthetic construct; identical to SEQ ID NO: 7541
  source 1..80: mol_type = other DNA

SEQ ID NO: 192272 - DNA, 80 bp, synthetic construct; identical to SEQ ID NO: 7542
  source 1..80: mol_type = other DNA

SEQ ID NO: 192273 - DNA, 80 bp, synthetic construct; identical to SEQ ID NO: 7543
  source 1..80: mol_type = other DNA

SEQ ID NO: 192274 - DNA, 80 bp, synthetic construct; identical to SEQ ID NO: 7544
  source 1..80: mol_type = other DNA

SEQ ID NO: 192275 - DNA, 80 bp, synthetic construct; identical to SEQ ID NO: 7545
  source 1..80: mol_type = other DNA

SEQ ID NO: 192276 - DNA, 80 bp, synthetic construct; identical to SEQ ID NO: 7546
  source 1..80: mol_type = other DNA

SEQ ID NO: 192277 - DNA, 80 bp, synthetic construct; identical to SEQ ID NO: 7547
  source 1..80: mol_type = other DNA

SEQ ID NO: 192278 - DNA, 80 bp, synthetic construct; identical to SEQ ID NO: 7548
  source 1..80: mol_type = other DNA

SEQ ID NO: 192279 - DNA, 80 bp, synthetic construct; identical to SEQ ID NO: 7549
  source 1..80: mol_type = other DNA

SEQ ID NO: 192280 - DNA, 80 bp, synthetic construct; identical to SEQ ID NO: 7550
  source 1..80: mol_type = other DNA

SEQ ID NO: 192281 - DNA, 80 bp, synthetic construct; identical to SEQ ID NO: 7551
  source 1..80: mol_type = other DNA

SEQ ID NO: 192282 - DNA, 80 bp, synthetic construct; identical to SEQ ID NO: 7552
  source 1..80: mol_type = other DNA

SEQ ID NO: 192283 - DNA, 80 bp, synthetic construct; identical to SEQ ID NO: 7553
  source 1..80: mol_type = other DNA

SEQ ID NO: 192284 - DNA, 80 bp, synthetic construct; identical to SEQ ID NO: 7554
  source 1..80: mol_type = other DNA

SEQ ID NO: 192285 - DNA, 80 bp, synthetic construct; identical to SEQ ID NO: 7555
  source 1..80: mol_type = other DNA

SEQ ID NO: 192286 - DNA, 80 bp, synthetic construct; identical to SEQ ID NO: 7556
  source 1..80: mol_type = other DNA

SEQ ID NO: 192287 - DNA, 80 bp, synthetic construct; identical to SEQ ID NO: 7557
  source 1..80: mol_type = other DNA

SEQ ID NO: 192288 - DNA, 80 bp, synthetic construct; identical to SEQ ID NO: 7558
  source 1..80: mol_type = other DNA

SEQ ID NO: 192289 - DNA, 80 bp, synthetic construct; identical to SEQ ID NO: 7559
  source 1..80: mol_type = other DNA

SEQ ID NO: 192290 - DNA, 80 bp, synthetic construct; identical to SEQ ID NO: 7560
  source 1..80: mol_type = other DNA

SEQ ID NO: 192291 - DNA, 80 bp, synthetic construct; identical to SEQ ID NO: 7561
  source 1..80: mol_type = other DNA

SEQ ID NO: 192292 - DNA, 80 bp, synthetic construct; identical to SEQ ID NO: 7562
  source 1..80: mol_type = other DNA

SEQ ID NO: 192293 - DNA, 80 bp, synthetic construct; identical to SEQ ID NO: 7563
  source 1..80: mol_type = other DNA

SEQ ID NO: 192294 - DNA, 80 bp, synthetic construct; identical to SEQ ID NO: 7564
  source 1..80: mol_type = other DNA

SEQ ID NO: 192295 - DNA, 80 bp, synthetic construct; identical to SEQ ID NO: 7565
  source 1..80: mol_type = other DNA

SEQ ID NO: 192296 - DNA, 80 bp, synthetic construct; identical to SEQ ID NO: 7566
  source 1..80: mol_type = other DNA

SEQ ID NO: 192297 - DNA, 80 bp, synthetic construct; identical to SEQ ID NO: 7567
  source 1..80: mol_type = other DNA

SEQ ID NO: 192298 - DNA, 80 bp, synthetic construct; identical to SEQ ID NO: 7568
  source 1..80: mol_type = other DNA

SEQ ID NO: 192299 - DNA, 80 bp, synthetic construct; identical to SEQ ID NO: 7569
  source 1..80: mol_type = other DNA

SEQ ID NO: 192300 - DNA, 80 bp, synthetic construct; identical to SEQ ID NO: 7570
  source 1..80: mol_type = other DNA

SEQ ID NO: 192301 - DNA, 80 bp, synthetic construct; identical to SEQ ID NO: 7571
  source 1..80: mol_type = other DNA

SEQ ID NO: 192302 - DNA, 80 bp, synthetic construct; identical to SEQ ID NO: 7572
  source 1..80: mol_type = other DNA

SEQ ID NO: 192303 - DNA, 80 bp, synthetic construct; identical to SEQ ID NO: 7573
  source 1..80: mol_type = other DNA

SEQ ID NO: 192304 - DNA, 80 bp, synthetic construct; identical to SEQ ID NO: 7574
  source 1..80: mol_type = other DNA

SEQ ID NO: 192305 - DNA, 80 bp, synthetic construct; identical to SEQ ID NO: 7575
  source 1..80: mol_type = other DNA

SEQ ID NO: 192306 - DNA, 80 bp, synthetic construct; identical to SEQ ID NO: 7576
  source 1..80: mol_type = other DNA

SEQ ID NO: 192307 - DNA, 80 bp, synthetic construct; identical to SEQ ID NO: 7577
  source 1..80: mol_type = other DNA

SEQ ID NO: 192308 - DNA, 80 bp, synthetic construct; identical to SEQ ID NO: 7578
  source 1..80: mol_type = other DNA

SEQ ID NO: 192309 - DNA, 80 bp, synthetic construct; identical to SEQ ID NO: 7579
  source 1..80: mol_type = other DNA

SEQ ID NO: 192310 - DNA, 80 bp, synthetic construct; identical to SEQ ID NO: 7580
  source 1..80: mol_type = other DNA

SEQ ID NO: 192311 - DNA, 80 bp, synthetic construct; identical to SEQ ID NO: 7581
  source 1..80: mol_type = other DNA

SEQ ID NO: 192312 - DNA, 80 bp, synthetic construct; identical to SEQ ID NO: 7582
  source 1..80: mol_type = other DNA

SEQ ID NO: 192313 - DNA, 80 bp, synthetic construct; identical to SEQ ID NO: 7583
  source 1..80: mol_type = other DNA

SEQ ID NO: 192314 - DNA, 80 bp, synthetic construct; identical to SEQ ID NO: 7584
  source 1..80: mol_type = other DNA

SEQ ID NO: 192315 - DNA, 80 bp, synthetic construct; identical to SEQ ID NO: 7585
  source 1..80: mol_type = other DNA

SEQ ID NO: 192316 - DNA, 80 bp, synthetic construct; identical to SEQ ID NO: 7586
  source 1..80: mol_type = other DNA

SEQ ID NO: 192317 - DNA, 80 bp, synthetic construct; identical to SEQ ID NO: 7587
  source 1..80: mol_type = other DNA

SEQ ID NO: 192318 - DNA, 80 bp, synthetic construct; identical to SEQ ID NO: 7588
  source 1..80: mol_type = other DNA

SEQ ID NO: 192319 - DNA, 80 bp, synthetic construct; identical to SEQ ID NO: 7589
  source 1..80: mol_type = other DNA

SEQ ID NO: 192320 - DNA, 80 bp, synthetic construct; identical to SEQ ID NO: 7590
  source 1..80: mol_type = other DNA

SEQ ID NO: 192321 - DNA, 80 bp, synthetic construct; identical to SEQ ID NO: 7591
  source 1..80: mol_type = other DNA

SEQ ID NO: 192322 - DNA, 80 bp, synthetic construct; identical to SEQ ID NO: 7592
  source 1..80: mol_type = other DNA

SEQ ID NO: 192323 - DNA, 80 bp, synthetic construct; identical to SEQ ID NO: 7593
  source 1..80: mol_type = other DNA

SEQ ID NO: 192324 - DNA, 80 bp, synthetic construct; identical to SEQ ID NO: 7594
  source 1..80: mol_type = other DNA

SEQ ID NO: 192325 - DNA, 80 bp, synthetic construct; identical to SEQ ID NO: 7595
  source 1..80: mol_type = other DNA

SEQ ID NO: 192326 - DNA, 80 bp, synthetic construct; identical to SEQ ID NO: 7596
  source 1..80: mol_type = other DNA

SEQ ID NO: 192327 - DNA, 80 bp, synthetic construct; identical to SEQ ID NO: 7597
  source 1..80: mol_type = other DNA

SEQ ID NO: 192328 - DNA, 80 bp, synthetic construct; identical to SEQ ID NO: 7598
  source 1..80: mol_type = other DNA

SEQ ID NO: 192329 - DNA, 80 bp, synthetic construct; identical to SEQ ID NO: 7599
  source 1..80: mol_type = other DNA

SEQ ID NO: 192330 - DNA, 80 bp, synthetic construct; identical to SEQ ID NO: 7600
  source 1..80: mol_type = other DNA

SEQ ID NO: 192331 - DNA, 80 bp, synthetic construct; identical to SEQ ID NO: 7601
  source 1..80: mol_type = other DNA

SEQ ID NO: 192332 - DNA, 80 bp, synthetic construct; identical to SEQ ID NO: 7602
  source 1..80: mol_type = other DNA

SEQ ID NO: 192333 - DNA, 80 bp, synthetic construct; identical to SEQ ID NO: 7603
  source 1..80: mol_type = other DNA

SEQ ID NO: 192334 - DNA, 80 bp, synthetic construct; identical to SEQ ID NO: 7604
  source 1..80: mol_type = other DNA

SEQ ID NO: 192335 - DNA, 80 bp, synthetic construct; identical to SEQ ID NO: 7605
  source 1..80: mol_type = other DNA

SEQ ID NO: 192336 - DNA, 80 bp, synthetic construct; identical to SEQ ID NO: 7606
  source 1..80: mol_type = other DNA

SEQ ID NO: 192337 - DNA, 80 bp, synthetic construct; identical to SEQ ID NO: 7607
  source 1..80: mol_type = other DNA

SEQ ID NO: 192338 - DNA, 80 bp, synthetic construct; identical to SEQ ID NO: 7608
  source 1..80: mol_type = other DNA

SEQ ID NO: 192339 - DNA, 80 bp, synthetic construct; identical to SEQ ID NO: 7609
  source 1..80: mol_type = other DNA

SEQ ID NO: 192340 - DNA, 80 bp, synthetic construct; identical to SEQ ID NO: 7610
  source 1..80: mol_type = other DNA

SEQ ID NO: 192341 - DNA, 80 bp, synthetic construct; identical to SEQ ID NO: 7611
  source 1..80: mol_type = other DNA

SEQ ID NO: 192342 - DNA, 80 bp, synthetic construct; identical to SEQ ID NO: 7612
  source 1..80: mol_type = other DNA

SEQ ID NO: 192343 - DNA, 80 bp, synthetic construct; identical to SEQ ID NO: 7613
  source 1..80: mol_type = other DNA

SEQ ID NO: 192344 - DNA, 80 bp, synthetic construct; identical to SEQ ID NO: 7614
  source 1..80: mol_type = other DNA

SEQ ID NO: 192345 - DNA, 80 bp, synthetic construct; identical to SEQ ID NO: 7615
  source 1..80: mol_type = other DNA

SEQ ID NO: 192346 - DNA, 80 bp, synthetic construct; identical to SEQ ID NO: 7616
  source 1..80: mol_type = other DNA

SEQ ID NO: 192347 - DNA, 80 bp, synthetic construct; identical to SEQ ID NO: 7617
  source 1..80: mol_type = other DNA

SEQ ID NO: 192348 - DNA, 80 bp, synthetic construct; identical to SEQ ID NO: 7618
  source 1..80: mol_type = other DNA

SEQ ID NO: 192349 - DNA, 80 bp, synthetic construct; identical to SEQ ID NO: 7619
  source 1..80: mol_type = other DNA

SEQ ID NO: 192350 - DNA, 80 bp, synthetic construct; identical to SEQ ID NO: 7620
  source 1..80: mol_type = other DNA

SEQ ID NO: 192351 - DNA, 80 bp, synthetic construct; identical to SEQ ID NO: 7621
  source 1..80: mol_type = other DNA

SEQ ID NO: 192352 - DNA, 80 bp, synthetic construct; identical to SEQ ID NO: 7622
  source 1..80: mol_type = other DNA

SEQ ID NO: 192353 - DNA, 80 bp, synthetic construct; identical to SEQ ID NO: 7623
  source 1..80: mol_type = other DNA

SEQ ID NO: 192354 - DNA, 80 bp, synthetic construct; identical to SEQ ID NO: 7624
  source 1..80: mol_type = other DNA

SEQ ID NO: 192355 - DNA, 80 bp, synthetic construct; identical to SEQ ID NO: 7625
  source 1..80: mol_type = other DNA

SEQ ID NO: 192356 - DNA, 80 bp, synthetic construct; identical to SEQ ID NO: 7626
  source 1..80: mol_type = other DNA

SEQ ID NO: 192357 - DNA, 80 bp, synthetic construct; identical to SEQ ID NO: 7627
  source 1..80: mol_type = other DNA

SEQ ID NO: 192358 - DNA, 80 bp, synthetic construct; identical to SEQ ID NO: 7628
  source 1..80: mol_type = other DNA

SEQ ID NO: 192359 - DNA, 80 bp, synthetic construct; identical to SEQ ID NO: 7629
  source 1..80: mol_type = other DNA

SEQ ID NO: 192360 - DNA, 80 bp, synthetic construct; identical to SEQ ID NO: 7630
  source 1..80: mol_type = other DNA

SEQ ID NO: 192361 - DNA, 80 bp, synthetic construct; identical to SEQ ID NO: 7631
  source 1..80: mol_type = other DNA

SEQ ID NO: 192362 - DNA, 80 bp, synthetic construct; identical to SEQ ID NO: 7632
  source 1..80: mol_type = other DNA

SEQ ID NO: 192363 - DNA, 80 bp, synthetic construct; identical to SEQ ID NO: 7633
  source 1..80: mol_type = other DNA

SEQ ID NO: 192364 - DNA, 80 bp, synthetic construct; identical to SEQ ID NO: 7634
  source 1..80: mol_type = other DNA

SEQ ID NO: 192365 - DNA, 80 bp, synthetic construct; identical to SEQ ID NO: 7635
  source 1..80: mol_type = other DNA

SEQ ID NO: 192366 - DNA, 80 bp, synthetic construct; identical to SEQ ID NO: 7636
  source 1..80: mol_type = other DNA

SEQ ID NO: 192367 - DNA, 80 bp, synthetic construct; identical to SEQ ID NO: 7637
  source 1..80: mol_type = other DNA

SEQ ID NO: 192368 - DNA, 80 bp, synthetic construct; identical to SEQ ID NO: 7638
  source 1..80: mol_type = other DNA

SEQ ID NO: 192369 - DNA, 80 bp, synthetic construct; identical to SEQ ID NO: 7639
  source 1..80: mol_type = other DNA

SEQ ID NO: 192370 - DNA, 80 bp, synthetic construct; identical to SEQ ID NO: 7640
  source 1..80: mol_type = other DNA

SEQ ID NO: 192371 - DNA, 80 bp, synthetic construct; identical to SEQ ID NO: 7641
  source 1..80: mol_type = other DNA

SEQ ID NO: 192372 - DNA, 80 bp, synthetic construct; identical to SEQ ID NO: 7642
  source 1..80: mol_type = other DNA

SEQ ID NO: 192373 - DNA, 80 bp, synthetic construct; identical to SEQ ID NO: 7643
  source 1..80: mol_type = other DNA

SEQ ID NO: 192374 - DNA, 80 bp, synthetic construct; identical to SEQ ID NO: 7644
  source 1..80: mol_type = other DNA

SEQ ID NO: 192375 - DNA, 80 bp, synthetic construct; identical to SEQ ID NO: 7645
  source 1..80: mol_type = other DNA

SEQ ID NO: 192376 - DNA, 80 bp, synthetic construct; identical to SEQ ID NO: 7646
  source 1..80: mol_type = other DNA

SEQ ID NO: 192377 - DNA, 80 bp, synthetic construct; identical to SEQ ID NO: 7647
  source 1..80: mol_type = other DNA

SEQ ID NO: 192378 - DNA, 80 bp, synthetic construct; identical to SEQ ID NO: 7648
  source 1..80: mol_type = other DNA

SEQ ID NO: 192379 - DNA, 80 bp, synthetic construct; identical to SEQ ID NO: 7649
  source 1..80: mol_type = other DNA

SEQ ID NO: 192380 - DNA, 80 bp, synthetic construct; identical to SEQ ID NO: 7650
  source 1..80: mol_type = other DNA

SEQ ID NO: 192381 - DNA, 80 bp, synthetic construct; identical to SEQ ID NO: 7651
  source 1..80: mol_type = other DNA

SEQ ID NO: 192382 - DNA, 80 bp, synthetic construct; identical to SEQ ID NO: 7652
  source 1..80: mol_type = other DNA

SEQ ID NO: 192383 - DNA, 80 bp, synthetic construct; identical to SEQ ID NO: 7653
  source 1..80: mol_type = other DNA

SEQ ID NO: 192384 - DNA, 80 bp, synthetic construct; identical to SEQ ID NO: 7654
  source 1..80: mol_type = other DNA

SEQ ID NO: 192385 - DNA, 80 bp, synthetic construct; identical to SEQ ID NO: 7655
  source 1..80: mol_type = other DNA

SEQ ID NO: 192386 - DNA, 80 bp, synthetic construct; identical to SEQ ID NO: 7656
  source 1..80: mol_type = other DNA

SEQ ID NO: 192387 - DNA, 80 bp, synthetic construct; identical to SEQ ID NO: 7657
  source 1..80: mol_type = other DNA

SEQ ID NO: 192388 - DNA, 80 bp, synthetic construct; identical to SEQ ID NO: 7658
  source 1..80: mol_type = other DNA

SEQ ID NO: 192389 - DNA, 80 bp, synthetic construct; identical to SEQ ID NO: 7659
  source 1..80: mol_type = other DNA

SEQ ID NO: 192390 - DNA, 80 bp, synthetic construct; identical to SEQ ID NO: 7660
  source 1..80: mol_type = other DNA

SEQ ID NO: 192391 - DNA, 80 bp, synthetic construct; identical to SEQ ID NO: 7661
  source 1..80: mol_type = other DNA

SEQ ID NO: 192392 - DNA, 80 bp, synthetic construct; identical to SEQ ID NO: 7662
  source 1..80: mol_type = other DNA

SEQ ID NO: 192393 - DNA, 80 bp, synthetic construct; identical to SEQ ID NO: 7663
  source 1..80: mol_type = other DNA

SEQ ID NO: 192394 - DNA, 80 bp, synthetic construct; identical to SEQ ID NO: 7664
  source 1..80: mol_type = other DNA

SEQ ID NO: 192395 - DNA, 80 bp, synthetic construct; identical to SEQ ID NO: 7665
  source 1..80: mol_type = other DNA

SEQ ID NO: 192396 - DNA, 80 bp, synthetic construct; identical to SEQ ID NO: 7666
  source 1..80: mol_type = other DNA

SEQ ID NO: 192397 - DNA, 80 bp, synthetic construct; identical to SEQ ID NO: 7667
  source 1..80: mol_type = other DNA

SEQ ID NO: 192398 - DNA, 80 bp, synthetic construct; identical to SEQ ID NO: 7668
  source 1..80: mol_type = other DNA

SEQ ID NO: 192399 - DNA, 80 bp, synthetic construct; identical to SEQ ID NO: 7669
  source 1..80: mol_type = other DNA

SEQ ID NO: 192400 - DNA, 80 bp, synthetic construct; identical to SEQ ID NO: 7670
  source 1..80: mol_type = other DNA

SEQ ID NO: 192401 - DNA, 80 bp, synthetic construct; identical to SEQ ID NO: 7671
  source 1..80: mol_type = other DNA

SEQ ID NO: 192402 - DNA, 80 bp, synthetic construct; identical to SEQ ID NO: 7672
  source 1..80: mol_type = other DNA

SEQ ID NO: 192403 - DNA, 80 bp, synthetic construct; identical to SEQ ID NO: 7673
  source 1..80: mol_type = other DNA

SEQ ID NO: 192404 - DNA, 80 bp, synthetic construct; identical to SEQ ID NO: 7674
  source 1..80: mol_type = other DNA

SEQ ID NO: 192405 - DNA, 80 bp, synthetic construct; identical to SEQ ID NO: 7675
  source 1..80: mol_type = other DNA

SEQ ID NO: 192406 - DNA, 80 bp, synthetic construct; identical to SEQ ID NO: 7676
  source 1..80: mol_type = other DNA

SEQ ID NO: 192407 - DNA, 80 bp, synthetic construct; identical to SEQ ID NO: 7677
  source 1..80: mol_type = other DNA

SEQ ID NO: 192408 - DNA, 80 bp, synthetic construct; identical to SEQ ID NO: 7678
  source 1..80: mol_type = other DNA

SEQ ID NO: 192409 - DNA, 80 bp, synthetic construct; identical to SEQ ID NO: 7679
  source 1..80: mol_type = other DNA

SEQ ID NO: 192410 - DNA, 80 bp, synthetic construct; identical to SEQ ID NO: 7680
  source 1..80: mol_type = other DNA

SEQ ID NO: 192411 - DNA, 80 bp, synthetic construct; identical to SEQ ID NO: 7681
  source 1..80: mol_type = other DNA

SEQ ID NO: 192412 - DNA, 80 bp, synthetic construct; identical to SEQ ID NO: 7682
  source 1..80: mol_type = other DNA

SEQ ID NO: 192413 - DNA, 80 bp, synthetic construct; identical to SEQ ID NO: 7683
  source 1..80: mol_type = other DNA

SEQ ID NO: 192414 - DNA, 80 bp, synthetic construct; identical to SEQ ID NO: 7684
  source 1..80: mol_type = other DNA

SEQ ID NO: 192415 - DNA, 80 bp, synthetic construct; identical to SEQ ID NO: 7685
  source 1..80: mol_type = other DNA

SEQ ID NO: 192416 - DNA, 80 bp, synthetic construct; identical to SEQ ID NO: 7686
  source 1..80: mol_type = other DNA

SEQ ID NO: 192417 - DNA, 80 bp, synthetic construct; identical to SEQ ID NO: 7687
  source 1..80: mol_type = other DNA

SEQ ID NO: 192418 - DNA, 80 bp, synthetic construct; identical to SEQ ID NO: 7688
  source 1..80: mol_type = other DNA

SEQ ID NO: 192419 - DNA, 80 bp, synthetic construct; identical to SEQ ID NO: 7689
  source 1..80: mol_type = other DNA

SEQ ID NO: 192420 - DNA, 80 bp, synthetic construct; identical to SEQ ID NO: 7690
  source 1..80: mol_type = other DNA

SEQ ID NO: 192421 - DNA, 80 bp, synthetic construct; identical to SEQ ID NO: 7691
  source 1..80: mol_type = other DNA

SEQ ID NO: 192422 - DNA, 80 bp, synthetic construct; identical to SEQ ID NO: 7692
  source 1..80: mol_type = other DNA

SEQ ID NO: 192423 - DNA, 80 bp, synthetic construct; identical to SEQ ID NO: 7693
  source 1..80: mol_type = other DNA

SEQ ID NO: 192424 - DNA, 80 bp, synthetic construct; identical to SEQ ID NO: 7694
  source 1..80: mol_type = other DNA

SEQ ID NO: 192425 - DNA, 80 bp, synthetic construct; identical to SEQ ID NO: 7695
  source 1..80: mol_type = other DNA

SEQ ID NO: 192426 - DNA, 80 bp, synthetic construct; identical to SEQ ID NO: 7696
  source 1..80: mol_type = other DNA

SEQ ID NO: 192427 - DNA, 80 bp, synthetic construct; identical to SEQ ID NO: 7697
  source 1..80: mol_type = other DNA

SEQ ID NO: 192428 - DNA, 80 bp, synthetic construct; identical to SEQ ID NO: 7698
  source 1..80: mol_type = other DNA

SEQ ID NO: 192429 - DNA, 80 bp, synthetic construct; identical to SEQ ID NO: 7699
  source 1..80: mol_type = other DNA

SEQ ID NO: 192430 - DNA, 80 bp, synthetic construct; identical to SEQ ID NO: 7700
  source 1..80: mol_type = other DNA

SEQ ID NO: 192431 - DNA, 80 bp, synthetic construct; identical to SEQ ID NO: 7701
  source 1..80: mol_type = other DNA

SEQ ID NO: 192432 - DNA, 80 bp, synthetic construct; identical to SEQ ID NO: 7702
  source 1..80: mol_type = other DNA

SEQ ID NO: 192433 - DNA, 80 bp, synthetic construct; identical to SEQ ID NO: 7703
  source 1..80: mol_type = other DNA

SEQ ID NO: 192434 - DNA, 80 bp, synthetic construct; identical to SEQ ID NO: 7704
  source 1..80: mol_type = other DNA

SEQ ID NO: 192435 - DNA, 80 bp, synthetic construct; identical to SEQ ID NO: 7705
  source 1..80: mol_type = other DNA

SEQ ID NO: 192436 - DNA, 80 bp, synthetic construct; identical to SEQ ID NO: 7706
  source 1..80: mol_type = other DNA

SEQ ID NO: 192437 - DNA, 80 bp, synthetic construct; identical to SEQ ID NO: 7707
  source 1..80: mol_type = other DNA

SEQ ID NO: 192438 - DNA, 80 bp, synthetic construct; identical to SEQ ID NO: 7708
  source 1..80: mol_type = other DNA

SEQ ID NO: 192439 - DNA, 80 bp, synthetic construct; identical to SEQ ID NO: 7709
  source 1..80: mol_type = other DNA

SEQ ID NO: 192440 - DNA, 80 bp, synthetic construct; identical to SEQ ID NO: 7710
  source 1..80: mol_type = other DNA

SEQ ID NO: 192441 - DNA, 80 bp, synthetic construct; identical to SEQ ID NO: 7711
  source 1..80: mol_type = other DNA

SEQ ID NO: 192442 - DNA, 80 bp, synthetic construct; identical to SEQ ID NO: 7712
  source 1..80: mol_type = other DNA

SEQ ID NO: 192443 - DNA, 80 bp, synthetic construct; identical to SEQ ID NO: 7713
  source 1..80: mol_type = other DNA

SEQ ID NO: 192444 - DNA, 80 bp, synthetic construct; identical to SEQ ID NO: 7714
  source 1..80: mol_type = other DNA

SEQ ID NO: 192445 - DNA, 80 bp, synthetic construct; identical to SEQ ID NO: 7715
  source 1..80: mol_type = other DNA

SEQ ID NO: 192446 - DNA, 80 bp, synthetic construct; identical to SEQ ID NO: 7716
  source 1..80: mol_type = other DNA

SEQ ID NO: 192447 - DNA, 80 bp, synthetic construct; identical to SEQ ID NO: 7717
  source 1..80: mol_type = other DNA

SEQ ID NO: 192448 - DNA, 80 bp, synthetic construct; identical to SEQ ID NO: 7718
  source 1..80: mol_type = other DNA

SEQ ID NO: 192449 - DNA, 80 bp, synthetic construct; identical to SEQ ID NO: 7719
  source 1..80: mol_type = other DNA

SEQ ID NO: 192450 - DNA, 80 bp, synthetic construct; identical to SEQ ID NO: 7720
  source 1..80: mol_type = other DNA

SEQ ID NO: 192451 - DNA, 80 bp, synthetic construct; identical to SEQ ID NO: 7721
  source 1..80: mol_type = other DNA

SEQ ID NO: 192452 - DNA, 80 bp, synthetic construct; identical to SEQ ID NO: 7722
  source 1..80: mol_type = other DNA

SEQ ID NO: 192453 - DNA, 80 bp, synthetic construct; identical to SEQ ID NO: 7723
  source 1..80: mol_type = other DNA

SEQ ID NO: 192454 - DNA, 80 bp, synthetic construct; identical to SEQ ID NO: 7724
  source 1..80: mol_type = other DNA

SEQ ID NO: 192455 - DNA, 80 bp, synthetic construct; identical to SEQ ID NO: 7725
  source 1..80: mol_type = other DNA

SEQ ID NO: 192456 - DNA, 80 bp, synthetic construct; identical to SEQ ID NO: 7726
  source 1..80: mol_type = other DNA

SEQ ID NO: 192457 - DNA, 80 bp, synthetic construct; identical to SEQ ID NO: 7727
  source 1..80: mol_type = other DNA

SEQ ID NO: 192458 - DNA, 80 bp, synthetic construct; identical to SEQ ID NO: 7728
  source 1..80: mol_type = other DNA

SEQ ID NO: 192459 - DNA, 80 bp, synthetic construct; identical to SEQ ID NO: 7729
  source 1..80: mol_type = other DNA

SEQ ID NO: 192460 - DNA, 80 bp, synthetic construct; identical to SEQ ID NO: 7730
  source 1..80: mol_type = other DNA

SEQ ID NO: 192461 - DNA, 80 bp, synthetic construct; identical to SEQ ID NO: 7731
  source 1..80: mol_type = other DNA

SEQ ID NO: 192462 - DNA, 80 bp, synthetic construct; identical to SEQ ID NO: 7732
  source 1..80: mol_type = other DNA

SEQ ID NO: 192463 - DNA, 80 bp, synthetic construct; identical to SEQ ID NO: 7733
  source 1..80: mol_type = other DNA

SEQ ID NO: 192464 - DNA, 80 bp, synthetic construct; identical to SEQ ID NO: 7734
  source 1..80: mol_type = other DNA

SEQ ID NO: 192465 - DNA, 80 bp, synthetic construct; identical to SEQ ID NO: 7735
  source 1..80: mol_type = other DNA

SEQ ID NO: 192466 - DNA, 80 bp, synthetic construct; identical to SEQ ID NO: 7736
  source 1..80: mol_type = other DNA

SEQ ID NO: 192467 - DNA, 80 bp, synthetic construct; identical to SEQ ID NO: 7737
  source 1..80: mol_type = other DNA

SEQ ID NO: 192468 - DNA, 80 bp, synthetic construct; identical to SEQ ID NO: 7738
  source 1..80: mol_type = other DNA

SEQ ID NO: 192469 - DNA, 80 bp, synthetic construct; identical to SEQ ID NO: 7739
  source 1..80: mol_type = other DNA

SEQ ID NO: 192470 - DNA, 80 bp, synthetic construct; identical to SEQ ID NO: 7740
  source 1..80: mol_type = other DNA

SEQ ID NO: 192471 - DNA, 80 bp, synthetic construct; identical to SEQ ID NO: 7741
  source 1..80: mol_type = other DNA

SEQ ID NO: 192472 - DNA, 80 bp, synthetic construct; identical to SEQ ID NO: 7742
  source 1..80: mol_type = other DNA

SEQ ID NO: 192473 - DNA, 80 bp, synthetic construct; identical to SEQ ID NO: 7743
  source 1..80: mol_type = other DNA

SEQ ID NO: 192474 - DNA, 80 bp, synthetic construct; identical to SEQ ID NO: 7744
  source 1..80: mol_type = other DNA

SEQ ID NO: 192475 - DNA, 80 bp, synthetic construct; identical to SEQ ID NO: 7745
  source 1..80: mol_type = other DNA

SEQ ID NO: 192476 - DNA, 80 bp, synthetic construct; identical to SEQ ID NO: 7746
  source 1..80: mol_type = other DNA

SEQ ID NO: 192477 - DNA, 80 bp, synthetic construct; identical to SEQ ID NO: 7747
  source 1..80: mol_type = other DNA

SEQ ID NO: 192478 - DNA, 80 bp, synthetic construct; identical to SEQ ID NO: 7748
  source 1..80: mol_type = other DNA

SEQ ID NO: 192479 - DNA, 80 bp, synthetic construct; identical to SEQ ID NO: 7749
  source 1..80: mol_type = other DNA

SEQ ID NO: 192480 - DNA, 80 bp, synthetic construct; identical to SEQ ID NO: 7750
  source 1..80: mol_type = other DNA

SEQ ID NO: 192481 - DNA, 80 bp, synthetic construct; identical to SEQ ID NO: 7751
  source 1..80: mol_type = other DNA

SEQ ID NO: 192482 - DNA, 80 bp, synthetic construct; identical to SEQ ID NO: 7752
  source 1..80: mol_type = other DNA

SEQ ID NO: 192483 - DNA, 80 bp, synthetic construct; identical to SEQ ID NO: 7753
  source 1..80: mol_type = other DNA

SEQ ID NO: 192484 - DNA, 80 bp, synthetic construct; identical to SEQ ID NO: 7754
  source 1..80: mol_type = other DNA

SEQ ID NO: 192485 - DNA, 80 bp, synthetic construct; identical to SEQ ID NO: 7755
  source 1..80: mol_type = other DNA

SEQ ID NO: 192486 - DNA, 80 bp, synthetic construct; identical to SEQ ID NO: 7756
  source 1..80: mol_type = other DNA

SEQ ID NO: 192487 - DNA, 80 bp, synthetic construct; identical to SEQ ID NO: 7757
  source 1..80: mol_type = other DNA

SEQ ID NO: 192488 - DNA, 80 bp, synthetic construct; identical to SEQ ID NO: 7758
  source 1..80: mol_type = other DNA

SEQ ID NO: 192489 - DNA, 80 bp, synthetic construct; identical to SEQ ID NO: 7759
  source 1..80: mol_type = other DNA

SEQ ID NO: 192490 - DNA, 80 bp, synthetic construct; identical to SEQ ID NO: 7760
  source 1..80: mol_type = other DNA

SEQ ID NO: 192491 - DNA, 80 bp, synthetic construct; identical to SEQ ID NO: 7761
  source 1..80: mol_type = other DNA

SEQ ID NO: 192492 - DNA, 80 bp, synthetic construct; identical to SEQ ID NO: 7762
  source 1..80: mol_type = other DNA

SEQ ID NO: 192493 - DNA, 80 bp, synthetic construct; identical to SEQ ID NO: 7763
  source 1..80: mol_type = other DNA

SEQ ID NO: 192494 - DNA, 80 bp, synthetic construct; identical to SEQ ID NO: 7764
  source 1..80: mol_type = other DNA

SEQ ID NO: 192495 - DNA, 80 bp, synthetic construct; identical to SEQ ID NO: 7765
  source 1..80: mol_type = other DNA

SEQ ID NO: 192496 - DNA, 80 bp, synthetic construct; identical to SEQ ID NO: 7766
  source 1..80: mol_type = other DNA

SEQ ID NO: 192497 - DNA, 80 bp, synthetic construct; identical to SEQ ID NO: 7767
  source 1..80: mol_type = other DNA

SEQ ID NO: 192498 - DNA, 80 bp, synthetic construct; identical to SEQ ID NO: 7768
  source 1..80: mol_type = other DNA

SEQ ID NO: 192499 - DNA, 80 bp, synthetic construct; identical to SEQ ID NO: 7769
  source 1..80: mol_type = other DNA

SEQ ID NO: 192500 - DNA, 80 bp, synthetic construct; identical to SEQ ID NO: 7770
  source 1..80: mol_type = other DNA

SEQ ID NO: 192501 - DNA, 80 bp, synthetic construct; identical to SEQ ID NO: 7771
  source 1..80: mol_type = other DNA

SEQ ID NO: 192502 - DNA, 80 bp, synthetic construct; identical to SEQ ID NO: 7772
  source 1..80: mol_type = other DNA

SEQ ID NO: 192503 - DNA, 80 bp, synthetic construct; identical to SEQ ID NO: 7773
  source 1..80: mol_type = other DNA

SEQ ID NO: 192504 - DNA, 80 bp, synthetic construct; identical to SEQ ID NO: 7774
  source 1..80: mol_type = other DNA

SEQ ID NO: 192505 - DNA, 80 bp, synthetic construct; identical to SEQ ID NO: 7775
  source 1..80: mol_type = other DNA

SEQ ID NO: 192506 - DNA, 80 bp, synthetic construct; identical to SEQ ID NO: 7776
  source 1..80: mol_type = other DNA

SEQ ID NO: 192507 - DNA, 80 bp, synthetic construct; identical to SEQ ID NO: 7777
  source 1..80: mol_type = other DNA

SEQ ID NO: 192508 - DNA, 80 bp, synthetic construct; identical to SEQ ID NO: 7778
  source 1..80: mol_type = other DNA

SEQ ID NO: 192509 - DNA, 80 bp, synthetic construct; identical to SEQ ID NO: 7779
  source 1..80: mol_type = other DNA

SEQ ID NO: 192510 - DNA, 80 bp, synthetic construct; identical to SEQ ID NO: 7780
  source 1..80: mol_type = other DNA

SEQ ID NO: 192511 - DNA, 80 bp, synthetic construct; identical to SEQ ID NO: 7781
  source 1..80: mol_type = other DNA

SEQ ID NO: 192512 - DNA, 80 bp, synthetic construct; identical to SEQ ID NO: 7782
  source 1..80: mol_type = other DNA

SEQ ID NO: 192513 - DNA, 80 bp, synthetic construct; identical to SEQ ID NO: 7783
  source 1..80: mol_type = other DNA

SEQ ID NO: 192514 - DNA, 80 bp, synthetic construct; identical to SEQ ID NO: 7784
  source 1..80: mol_type = other DNA

SEQ ID NO: 192515 - DNA, 80 bp, synthetic construct; identical to SEQ ID NO: 7785
  source 1..80: mol_type = other DNA

SEQ ID NO: 192516 - DNA, 80 bp, synthetic construct; identical to SEQ ID NO: 7786
  source 1..80: mol_type = other DNA

SEQ ID NO: 192517 - DNA, 80 bp, synthetic construct; identical to SEQ ID NO: 7787
  source 1..80: mol_type = other DNA

SEQ ID NO: 192518 - DNA, 80 bp, synthetic construct; identical to SEQ ID NO: 7788
  source 1..80: mol_type = other DNA

SEQ ID NO: 192519 - DNA, 80 bp, synthetic construct; identical to SEQ ID NO: 7789
  source 1..80: mol_type = other DNA

SEQ ID NO: 192520 - DNA, 80 bp, synthetic construct; identical to SEQ ID NO: 7790
  source 1..80: mol_type = other DNA

SEQ ID NO: 192521 - DNA, 80 bp, synthetic construct; identical to SEQ ID NO: 7791
  source 1..80: mol_type = other DNA

SEQ ID NO: 192522 - DNA, 80 bp, synthetic construct; identical to SEQ ID NO: 7792
  source 1..80: mol_type = other DNA

SEQ ID NO: 192523 - DNA, 80 bp, synthetic construct; identical to SEQ ID NO: 7793
  source 1..80: mol_type = other DNA

SEQ ID NO: 192524 - DNA, 80 bp, synthetic construct; identical to SEQ ID NO: 7794
  source 1..80: mol_type = other DNA

SEQ ID NO: 192525 - DNA, 80 bp, synthetic construct; identical to SEQ ID NO: 7795
  source 1..80: mol_type = other DNA

SEQ ID NO: 192526 - DNA, 80 bp, synthetic construct; identical to SEQ ID NO: 7796
  source 1..80: mol_type = other DNA

SEQ ID NO: 192527 - DNA, 80 bp, synthetic construct; identical to SEQ ID NO: 7797
  source 1..80: mol_type = other DNA

SEQ ID NO: 192528 - DNA, 80 bp, synthetic construct; identical to SEQ ID NO: 7798
  source 1..80: mol_type = other DNA

SEQ ID NO: 192529 - DNA, 80 bp, synthetic construct; identical to SEQ ID NO: 7799
  source 1..80: mol_type = other DNA

SEQ ID NO: 192530 - DNA, 80 bp, synthetic construct; identical to SEQ ID NO: 7800
  source 1..80: mol_type = other DNA

SEQ ID NO: 192531 - DNA, 80 bp, synthetic construct; identical to SEQ ID NO: 7801
  source 1..80: mol_type = other DNA

SEQ ID NO: 192532 - DNA, 80 bp, synthetic construct; identical to SEQ ID NO: 7802
  source 1..80: mol_type = other DNA

SEQ ID NO: 192533 - DNA, 80 bp, synthetic construct; identical to SEQ ID NO: 7803
  source 1..80: mol_type = other DNA

SEQ ID NO: 192534 - DNA, 80 bp, synthetic construct; identical to SEQ ID NO: 7804
  source 1..80: mol_type = other DNA

SEQ ID NO: 192535 - DNA, 80 bp, synthetic construct; identical to SEQ ID NO: 7805
  source 1..80: mol_type = other DNA

SEQ ID NO: 192536 - DNA, 80 bp, synthetic construct; identical to SEQ ID NO: 7806
  source 1..80: mol_type = other DNA

SEQ ID NO: 192537 - DNA, 80 bp, synthetic construct; identical to SEQ ID NO: 7807
  source 1..80: mol_type = other DNA

SEQ ID NO: 192538 - DNA, 80 bp, synthetic construct; identical to SEQ ID NO: 7808
  source 1..80: mol_type = other DNA

SEQ ID NO: 192539 - DNA, 80 bp, synthetic construct; identical to SEQ ID NO: 7809
  source 1..80: mol_type = other DNA

SEQ ID NO: 192540 - DNA, 80 bp, synthetic construct; identical to SEQ ID NO: 7810
  source 1..80: mol_type = other DNA

SEQ ID NO: 192541 - DNA, 80 bp, synthetic construct; identical to SEQ ID NO: 7811
  source 1..80: mol_type = other DNA

SEQ ID NO: 192542 - DNA, 80 bp, synthetic construct; identical to SEQ ID NO: 7812
  source 1..80: mol_type = other DNA

SEQ ID NO: 192543 - DNA, 80 bp, synthetic construct; identical to SEQ ID NO: 7813
  source 1..80: mol_type = other DNA

SEQ ID NO: 192544 - DNA, 80 bp, synthetic construct; identical to SEQ ID NO: 7814
  source 1..80: mol_type = other DNA

SEQ ID NO: 192545 - DNA, 80 bp, synthetic construct; identical to SEQ ID NO: 7815
  source 1..80: mol_type = other DNA

SEQ ID NO: 192546 - DNA, 80 bp, synthetic construct; identical to SEQ ID NO: 7816
  source 1..80: mol_type = other DNA

SEQ ID NO: 192547 - DNA, 80 bp, synthetic construct; identical to SEQ ID NO: 7817
  source 1..80: mol_type = other DNA

SEQ ID NO: 192548 - DNA, 80 bp, synthetic construct; identical to SEQ ID NO: 7818
  source 1..80: mol_type = other DNA

SEQ ID NO: 192549 - DNA, 80 bp, synthetic construct; identical to SEQ ID NO: 7819
  source 1..80: mol_type = other DNA

SEQ ID NO: 192550 - DNA, 80 bp, synthetic construct; identical to SEQ ID NO: 7820
  source 1..80: mol_type = other DNA

SEQ ID NO: 192551 - DNA, 80 bp, synthetic construct; identical to SEQ ID NO: 7821
  source 1..80: mol_type = other DNA

SEQ ID NO: 192552 - DNA, 80 bp, synthetic construct; identical to SEQ ID NO: 7822
  source 1..80: mol_type = other DNA

SEQ ID NO: 192553 - DNA, 80 bp, synthetic construct; identical to SEQ ID NO: 7823
  source 1..80: mol_type = other DNA

SEQ ID NO: 192554 - DNA, 80 bp, synthetic construct; identical to SEQ ID NO: 7824
  source 1..80: mol_type = other DNA

SEQ ID NO: 192555 - DNA, 80 bp, synthetic construct; identical to SEQ ID NO: 7825
  source 1..80: mol_type = other DNA

SEQ ID NO: 192556 - DNA, 80 bp, synthetic construct; identical to SEQ ID NO: 7826
  source 1..80: mol_type = other DNA

SEQ ID NO: 192557 - DNA, 80 bp, synthetic construct; identical to SEQ ID NO: 7827
  source 1..80: mol_type = other DNA

SEQ ID NO: 192558 - DNA, 80 bp, synthetic construct; identical to SEQ ID NO: 7828
  source 1..80: mol_type = other DNA

SEQ ID NO: 192559 - DNA, 80 bp, synthetic construct; identical to SEQ ID NO: 7829
  source 1..80: mol_type = other DNA

SEQ ID NO: 192560 - DNA, 80 bp, synthetic construct; identical to SEQ ID NO: 7830
  source 1..80: mol_type = other DNA

SEQ ID NO: 192561 - DNA, 80 bp, synthetic construct; identical to SEQ ID NO: 7831
  source 1..80: mol_type = other DNA

SEQ ID NO: 192562 - DNA, 80 bp, synthetic construct; identical to SEQ ID NO: 7832
  source 1..80: mol_type = other DNA

SEQ ID NO: 192563 - DNA, 80 bp, synthetic construct; identical to SEQ ID NO: 7833
  source 1..80: mol_type = other DNA

SEQ ID NO: 192564 - DNA, 80 bp, synthetic construct; identical to SEQ ID NO: 7834
  source 1..80: mol_type = other DNA

SEQ ID NO: 192565 - DNA, 80 bp, synthetic construct; identical to SEQ ID NO: 7835
  source 1..80: mol_type = other DNA

SEQ ID NO: 192566 - DNA, 80 bp, synthetic construct; identical to SEQ ID NO: 7836
  source 1..80: mol_type = other DNA

SEQ ID NO: 192567 - DNA, 80 bp, synthetic construct; identical to SEQ ID NO: 7837
  source 1..80: mol_type = other DNA

SEQ ID NO: 192568 - DNA, 80 bp, synthetic construct; identical to SEQ ID NO: 7838
  source 1..80: mol_type = other DNA

SEQ ID NO: 192569 - DNA, 80 bp, synthetic construct; identical to SEQ ID NO: 7839
  source 1..80: mol_type = other DNA

SEQ ID NO: 192570 - DNA, 80 bp, synthetic construct; identical to SEQ ID NO: 7840
  source 1..80: mol_type = other DNA

SEQ ID NO: 192571 - DNA, 80 bp, synthetic construct; identical to SEQ ID NO: 7841
  source 1..80: mol_type = other DNA

SEQ ID NO: 192572 - DNA, 80 bp, synthetic construct; identical to SEQ ID NO: 7842
  source 1..80: mol_type = other DNA

SEQ ID NO: 192573 - DNA, 80 bp, synthetic construct; identical to SEQ ID NO: 7843
  source 1..80: mol_type = other DNA

SEQ ID NO: 192574 - DNA, 80 bp, synthetic construct; identical to SEQ ID NO: 7844
  source 1..80: mol_type = other DNA

SEQ ID NO: 192575 - DNA, 80 bp, synthetic construct; identical to SEQ ID NO: 7845
  source 1..80: mol_type = other DNA

SEQ ID NO: 192576 - DNA, 80 bp, synthetic construct; identical to SEQ ID NO: 7846
  source 1..80: mol_type = other DNA

SEQ ID NO: 192577 - DNA, 80 bp, synthetic construct; identical to SEQ ID NO: 7847
  source 1..80: mol_type = other DNA

SEQ ID NO: 192578 - DNA, 80 bp, synthetic construct; identical to SEQ ID NO: 7848
  source 1..80: mol_type = other DNA

SEQ ID NO: 192579 - DNA, 80 bp, synthetic construct; identical to SEQ ID NO: 7849
  source 1..80: mol_type = other DNA

SEQ ID NO: 192580 - DNA, 80 bp, synthetic construct; identical to SEQ ID NO: 7850
  source 1..80: mol_type = other DNA

SEQ ID NO: 192581 - DNA, 80 bp, synthetic construct; identical to SEQ ID NO: 7851
  source 1..80: mol_type = other DNA

SEQ ID NO: 192582 - DNA, 80 bp, synthetic construct; identical to SEQ ID NO: 7852
  source 1..80: mol_type = other DNA

SEQ ID NO: 192583 - DNA, 80 bp, synthetic construct; identical to SEQ ID NO: 7853
  source 1..80: mol_type = other DNA

SEQ ID NO: 192584 - DNA, 80 bp, synthetic construct; identical to SEQ ID NO: 7854
  source 1..80: mol_type = other DNA

SEQ ID NO: 192585 - DNA, 80 bp, synthetic construct; identical to SEQ ID NO: 7855
  source 1..80: mol_type = other DNA

SEQ ID NO: 192586 - DNA, 80 bp, synthetic construct; identical to SEQ ID NO: 7856
  source 1..80: mol_type = other DNA

SEQ ID NO: 192587 - DNA, 80 bp, synthetic construct; identical to SEQ ID NO: 7857
  source 1..80: mol_type = other DNA

SEQ ID NO: 192588 - DNA, 80 bp, synthetic construct; identical to SEQ ID NO: 7858
  source 1..80: mol_type = other DNA

SEQ ID NO: 192589 - DNA, 80 bp, synthetic construct; identical to SEQ ID NO: 7859
  source 1..80: mol_type = other DNA

SEQ ID NO: 192590 - DNA, 80 bp, synthetic construct; identical to SEQ ID NO: 7860
  source 1..80: mol_type = other DNA

SEQ ID NO: 192591 - DNA, 80 bp, synthetic construct; identical to SEQ ID NO: 7861
  source 1..80: mol_type = other DNA

SEQ ID NO: 192592 - DNA, 80 bp, synthetic construct; identical to SEQ ID NO: 7862
  source 1..80: mol_type = other DNA

SEQ ID NO: 192593 - DNA, 80 bp, synthetic construct; identical to SEQ ID NO: 7863
  source 1..80: mol_type = other DNA

SEQ ID NO: 192594 - DNA, 80 bp, synthetic construct; identical to SEQ ID NO: 7864
  source 1..80: mol_type = other DNA

SEQ ID NO: 192595 - DNA, 80 bp, synthetic construct; identical to SEQ ID NO: 7865
  source 1..80: mol_type = other DNA

SEQ ID NO: 192596 - DNA, 80 bp, synthetic construct; identical to SEQ ID NO: 7866
  source 1..80: mol_type = other DNA

SEQ ID NO: 192597 - DNA, 80 bp, synthetic construct; identical to SEQ ID NO: 7867
  source 1..80: mol_type = other DNA

SEQ ID NO: 192598 - DNA, 80 bp, synthetic construct; identical to SEQ ID NO: 7868
  source 1..80: mol_type = other DNA

SEQ ID NO: 192599 - DNA, 80 bp, synthetic construct; identical to SEQ ID NO: 7869
  source 1..80: mol_type = other DNA

SEQ ID NO: 192600 - DNA, 80 bp, synthetic construct; identical to SEQ ID NO: 7870
  source 1..80: mol_type = other DNA

SEQ ID NO: 192601 - DNA, 80 bp, synthetic construct; identical to SEQ ID NO: 7871
  source 1..80: mol_type = other DNA

SEQ ID NO: 192602 - DNA, 80 bp, synthetic construct; identical to SEQ ID NO: 7872
  source 1..80: mol_type = other DNA

SEQ ID NO: 192603 - DNA, 80 bp, synthetic construct; identical to SEQ ID NO: 7873
  source 1..80: mol_type = other DNA

SEQ ID NO: 192604 - DNA, 80 bp, synthetic construct; identical to SEQ ID NO: 7874
  source 1..80: mol_type = other DNA

SEQ ID NO: 192605 - DNA, 80 bp, synthetic construct; identical to SEQ ID NO: 7875
  source 1..80: mol_type = other DNA

SEQ ID NO: 192606 - DNA, 80 bp, synthetic construct; identical to SEQ ID NO: 7876
  source 1..80: mol_type = other DNA

SEQ ID NO: 192607 - DNA, 80 bp, synthetic construct; identical to SEQ ID NO: 7877
  source 1..80: mol_type = other DNA

SEQ ID NO: 192608 - DNA, 80 bp, synthetic construct; identical to SEQ ID NO: 7878
  source 1..80: mol_type = other DNA

SEQ ID NO: 192609 - DNA, 80 bp, synthetic construct; identical to SEQ ID NO: 7879
  source 1..80: mol_type = other DNA

SEQ ID NO: 192610 - DNA, 80 bp, synthetic construct; identical to SEQ ID NO: 7880
  source 1..80: mol_type = other DNA

SEQ ID NO: 192611 - DNA, 80 bp, synthetic construct; identical to SEQ ID NO: 7881
  source 1..80: mol_type = other DNA

SEQ ID NO: 192612 - DNA, 80 bp, synthetic construct; identical to SEQ ID NO: 7882
  source 1..80: mol_type = other DNA

SEQ ID NO: 192613 - DNA, 80 bp, synthetic construct; identical to SEQ ID NO: 7883
  source 1..80: mol_type = other DNA

SEQ ID NO: 192614 - DNA, 80 bp, synthetic construct; identical to SEQ ID NO: 7884
  source 1..80: mol_type = other DNA

SEQ ID NO: 192615 - DNA, 80 bp, synthetic construct; identical to SEQ ID NO: 7885
  source 1..80: mol_type = other DNA

SEQ ID NO: 192616 - DNA, 80 bp, synthetic construct; identical to SEQ ID NO: 7886
  source 1..80: mol_type = other DNA

SEQ ID NO: 192617 - DNA, 80 bp, synthetic construct; identical to SEQ ID NO: 7887
  source 1..80: mol_type = other DNA

SEQ ID NO: 192618 - DNA, 80 bp, synthetic construct; identical to SEQ ID NO: 7888
  source 1..80: mol_type = other DNA

SEQ ID NO: 192619 - DNA, 80 bp, synthetic construct; identical to SEQ ID NO: 7889
  source 1..80: mol_type = other DNA

SEQ ID NO: 192620 - DNA, 80 bp, synthetic construct; identical to SEQ ID NO: 7890
  source 1..80: mol_type = other DNA

SEQ ID NO: 192621 - DNA, 80 bp, synthetic construct; identical to SEQ ID NO: 7891
  source 1..80: mol_type = other DNA

SEQ ID NO: 192622 - DNA, 80 bp, synthetic construct; identical to SEQ ID NO: 7892
  source 1..80: mol_type = other DNA

SEQ ID NO: 192623 - DNA, 80 bp, synthetic construct; identical to SEQ ID NO: 7893
  source 1..80: mol_type = other DNA

SEQ ID NO: 192624 - DNA, 80 bp, synthetic construct; identical to SEQ ID NO: 7894
  source 1..80: mol_type = other DNA

SEQ ID NO: 192625 - DNA, 80 bp, synthetic construct; identical to SEQ ID NO: 7895
  source 1..80: mol_type = other DNA

SEQ ID NO: 192626 - DNA, 80 bp, synthetic construct; identical to SEQ ID NO: 7896
  source 1..80: mol_type = other DNA

SEQ ID NO: 192627 - DNA, 80 bp, synthetic construct; identical to SEQ ID NO: 7897
  source 1..80: mol_type = other DNA

SEQ ID NO: 192628 - DNA, 80 bp, synthetic construct; identical to SEQ ID NO: 7898
  source 1..80: mol_type = other DNA

SEQ ID NO: 192629 - DNA, 80 bp, synthetic construct; identical to SEQ ID NO: 7899
  source 1..80: mol_type = other DNA

SEQ ID NO: 192630 - DNA, 80 bp, synthetic construct; identical to SEQ ID NO: 7900
  source 1..80: mol_type = other DNA

SEQ ID NO: 192631 - DNA, 80 bp, synthetic construct; identical to SEQ ID NO: 7901
  source 1..80: mol_type = other DNA

SEQ ID NO: 192632 - DNA, 80 bp, synthetic construct; identical to SEQ ID NO: 7902
  source 1..80: mol_type = other DNA

SEQ ID NO: 192633 - DNA, 80 bp, synthetic construct; identical to SEQ ID NO: 7903
  source 1..80: mol_type = other DNA

SEQ ID NO: 192634 - DNA, 80 bp, synthetic construct; identical to SEQ ID NO: 7904
  source 1..80: mol_type = other DNA

SEQ ID NO: 192635 - DNA, 80 bp, synthetic construct; identical to SEQ ID NO: 7905
  source 1..80: mol_type = other DNA

SEQ ID NO: 192636 - DNA, 80 bp, synthetic construct; identical to SEQ ID NO: 7906
  source 1..80: mol_type = other DNA

SEQ ID NO: 192637 - DNA, 80 bp, synthetic construct; identical to SEQ ID NO: 7907
  source 1..80: mol_type = other DNA

SEQ ID NO: 192638 - DNA, 80 bp, synthetic construct; identical to SEQ ID NO: 7908
  source 1..80: mol_type = other DNA

SEQ ID NO: 192639 - DNA, 80 bp, synthetic construct; identical to SEQ ID NO: 7909
  source 1..80: mol_type = other DNA

SEQ ID NO: 192640 - DNA, 80 bp, synthetic construct; identical to SEQ ID NO: 7910
  source 1..80: mol_type = other DNA

SEQ ID NO: 192641 - DNA, 80 bp, synthetic construct; identical to SEQ ID NO: 7911
  source 1..80: mol_type = other DNA

SEQ ID NO: 192642 - DNA, 80 bp, synthetic construct; identical to SEQ ID NO: 7912
  source 1..80: mol_type = other DNA

SEQ ID NO: 192643 - DNA, 80 bp, synthetic construct; identical to SEQ ID NO: 7913
  source 1..80: mol_type = other DNA

SEQ ID NO: 192644 - DNA, 80 bp, synthetic construct; identical to SEQ ID NO: 7914
  source 1..80: mol_type = other DNA

SEQ ID NO: 192645 - DNA, 80 bp, synthetic construct; identical to SEQ ID NO: 7915
  source 1..80: mol_type = other DNA

SEQ ID NO: 192646 - DNA, 80 bp, synthetic construct; identical to SEQ ID NO: 7916
  source 1..80: mol_type = other DNA

SEQ ID NO: 192647 - DNA, 80 bp, synthetic construct; identical to SEQ ID NO: 7917
  source 1..80: mol_type = other DNA

SEQ ID NO: 192648 - DNA, 80 bp, synthetic construct; identical to SEQ ID NO: 7918
  source 1..80: mol_type = other DNA

SEQ ID NO: 192649 - DNA, 80 bp, synthetic construct; identical to SEQ ID NO: 7919
  source 1..80: mol_type = other DNA

SEQ ID NO: 192650 - DNA, 80 bp, synthetic construct; identical to SEQ ID NO: 7920
  source 1..80: mol_type = other DNA

SEQ ID NO: 192651 - DNA, 80 bp, synthetic construct; identical to SEQ ID NO: 7921
  source 1..80: mol_type = other DNA

SEQ ID NO: 192652 - DNA, 80 bp, synthetic construct; identical to SEQ ID NO: 7922
  source 1..80: mol_type = other DNA

SEQ ID NO: 192653 - DNA, 80 bp, synthetic construct; identical to SEQ ID NO: 7923
  source 1..80: mol_type = other DNA

SEQ ID NO: 192654 - DNA, 80 bp, synthetic construct; identical to SEQ ID NO: 7924
  source 1..80: mol_type = other DNA

SEQ ID NO: 192655 - DNA, 80 bp, synthetic construct; identical to SEQ ID NO: 7925
  source 1..80: mol_type = other DNA

SEQ ID NO: 192656 - DNA, 80 bp, synthetic construct; identical to SEQ ID NO: 7926
  source 1..80: mol_type = other DNA

SEQ ID NO: 192657 - DNA, 80 bp, synthetic construct; identical to SEQ ID NO: 7927
  source 1..80: mol_type = other DNA

SEQ ID NO: 192658 - DNA, 80 bp, synthetic construct; identical to SEQ ID NO: 7928
  source 1..80: mol_type = other DNA

SEQ ID NO: 192659 - DNA, 80 bp, synthetic construct; identical to SEQ ID NO: 7929
  source 1..80: mol_type = other DNA

SEQ ID NO: 192660 - DNA, 80 bp, synthetic construct; identical to SEQ ID NO: 7930
  source 1..80: mol_type = other DNA

SEQ ID NO: 192661 - DNA, 80 bp, synthetic construct; identical to SEQ ID NO: 7931
  source 1..80: mol_type = other DNA

SEQ ID NO: 192662 - DNA, 80 bp, synthetic construct; identical to SEQ ID NO: 7932
  source 1..80: mol_type = other DNA

SEQ ID NO: 192663 - DNA, 80 bp, synthetic construct; identical to SEQ ID NO: 7933
  source 1..80: mol_type = other DNA

SEQ ID NO: 192664 - DNA, 80 bp, synthetic construct; identical to SEQ ID NO: 7934
  source 1..80: mol_type = other DNA

SEQ ID NO: 192665 - DNA, 80 bp, synthetic construct; identical to SEQ ID NO: 7935
  source 1..80: mol_type = other DNA

SEQ ID NO: 192666 - DNA, 80 bp, synthetic construct; identical to SEQ ID NO: 7936
  source 1..80: mol_type = other DNA

SEQ ID NO: 192667 - DNA, 80 bp, synthetic construct; identical to SEQ ID NO: 7937
  source 1..80: mol_type = other DNA

SEQ ID NO: 192668 - DNA, 80 bp, synthetic construct; identical to SEQ ID NO: 7938
  source 1..80: mol_type = other DNA

SEQ ID NO: 192669 - DNA, 80 bp, synthetic construct; identical to SEQ ID NO: 7939
  source 1..80: mol_type = other DNA

SEQ ID NO: 192670 - DNA, 80 bp, synthetic construct; identical to SEQ ID NO: 7940
  source 1..80: mol_type = other DNA

SEQ ID NO: 192671 - DNA, 80 bp, synthetic construct; identical to SEQ ID NO: 7941
  source 1..80: mol_type = other DNA

SEQ ID NO: 192672 - DNA, 80 bp, synthetic construct; identical to SEQ ID NO: 7942
  source 1..80: mol_type = other DNA

SEQ ID NO: 192673 - DNA, 80 bp, synthetic construct; identical to SEQ ID NO: 7943
  source 1..80: mol_type = other DNA

SEQ ID NO: 192674 - DNA, 80 bp, synthetic construct; identical to SEQ ID NO: 7944
  source 1..80: mol_type = other DNA

SEQ ID NO: 192675 - DNA, 80 bp, synthetic construct; identical to SEQ ID NO: 7945
  source 1..80: mol_type = other DNA

SEQ ID NO: 192676 - DNA, 80 bp, synthetic construct; identical to SEQ ID NO: 7946
  source 1..80: mol_type = other DNA

SEQ ID NO: 192677 - DNA, 80 bp, synthetic construct; identical to SEQ ID NO: 7947
  source 1..80: mol_type = other DNA

SEQ ID NO: 192678 - DNA, 80 bp, synthetic construct; identical to SEQ ID NO: 7948
  source 1..80: mol_type = other DNA

SEQ ID NO: 192679 - DNA, 80 bp, synthetic construct; identical to SEQ ID NO: 7949
  source 1..80: mol_type = other DNA

SEQ ID NO: 192680 - DNA, 80 bp, synthetic construct; identical to SEQ ID NO: 7950
  source 1..80: mol_type = other DNA

SEQ ID NO: 192681 - DNA, 80 bp, synthetic construct; identical to SEQ ID NO: 7951
  source 1..80: mol_type = other DNA

SEQ ID NO: 192682 - DNA, 80 bp, synthetic construct; identical to SEQ ID NO: 7952
  source 1..80: mol_type = other DNA

SEQ ID NO: 192683 - DNA, 80 bp, synthetic construct; identical to SEQ ID NO: 7953
  source 1..80: mol_type = other DNA

SEQ ID NO: 192684 - DNA, 80 bp, synthetic construct; identical to SEQ ID NO: 7954
  source 1..80: mol_type = other DNA

SEQ ID NO: 192685 - DNA, 80 bp, synthetic construct; identical to SEQ ID NO: 7955
  source 1..80: mol_type = other DNA

SEQ ID NO: 192686 - DNA, 80 bp, synthetic construct; identical to SEQ ID NO: 7956
  source 1..80: mol_type = other DNA

SEQ ID NO: 192687 - DNA, 80 bp, synthetic construct; identical to SEQ ID NO: 7957
  source 1..80: mol_type = other DNA

SEQ ID NO: 192688 - DNA, 80 bp, synthetic construct; identical to SEQ ID NO: 7958
  source 1..80: mol_type = other DNA

SEQ ID NO: 192689 - DNA, 80 bp, synthetic construct; identical to SEQ ID NO: 7959
  source 1..80: mol_type = other DNA

SEQ ID NO: 192690 - DNA, 80 bp, synthetic construct; identical to SEQ ID NO: 7960
  source 1..80: mol_type = other DNA

SEQ ID NO: 192691 - DNA, 80 bp, synthetic construct; identical to SEQ ID NO: 7961
  source 1..80: mol_type = other DNA

SEQ ID NO: 192692 - DNA, 80 bp, synthetic construct; identical to SEQ ID NO: 7962
  source 1..80: mol_type = other DNA

SEQ ID NO: 192693 - DNA, 80 bp, synthetic construct; identical to SEQ ID NO: 7963
  source 1..80: mol_type = other DNA

SEQ ID NO: 192694 - DNA, 80 bp, synthetic construct; identical to SEQ ID NO: 7964
  source 1..80: mol_type = other DNA

SEQ ID NO: 192695 - DNA, 80 bp, synthetic construct; identical to SEQ ID NO: 7965
  source 1..80: mol_type = other DNA

SEQ ID NO: 192696 - DNA, 80 bp, synthetic construct; identical to SEQ ID NO: 7966
  source 1..80: mol_type = other DNA

SEQ ID NO: 192697 - DNA, 80 bp, synthetic construct; identical to SEQ ID NO: 7967
  source 1..80: mol_type = other DNA

SEQ ID NO: 192698 - DNA, 80 bp, synthetic construct; identical to SEQ ID NO: 7968
  source 1..80: mol_type = other DNA

SEQ ID NO: 192699 - DNA, 80 bp, synthetic construct; identical to SEQ ID NO: 7969
  source 1..80: mol_type = other DNA

SEQ ID NO: 192700 - DNA, 80 bp, synthetic construct; identical to SEQ ID NO: 7970
  source 1..80: mol_type = other DNA

SEQ ID NO: 192701 - DNA, 80 bp, synthetic construct; identical to SEQ ID NO: 7971
  source 1..80: mol_type = other DNA

SEQ ID NO: 192702 - DNA, 80 bp, synthetic construct; identical to SEQ ID NO: 7972
  source 1..80: mol_type = other DNA

SEQ ID NO: 192703 - DNA, 80 bp, synthetic construct; identical to SEQ ID NO: 7973
  source 1..80: mol_type = other DNA

SEQ ID NO: 192704 - DNA, 80 bp, synthetic construct; identical to SEQ ID NO: 7974
  source 1..80: mol_type = other DNA

SEQ ID NO: 192705 - DNA, 80 bp, synthetic construct; identical to SEQ ID NO: 7975
  source 1..80: mol_type = other DNA

SEQ ID NO: 192706 - DNA, 80 bp, synthetic construct; identical to SEQ ID NO: 7976
  source 1..80: mol_type = other DNA

SEQ ID NO: 192707 - DNA, 80 bp, synthetic construct; identical to SEQ ID NO: 7977
  source 1..80: mol_type = other DNA

SEQ ID NO: 192708 - DNA, 80 bp, synthetic construct; identical to SEQ ID NO: 7978
  source 1..80: mol_type = other DNA

SEQ ID NO: 192709 - DNA, 80 bp, synthetic construct; identical to SEQ ID NO: 7979
  source 1..80: mol_type = other DNA

SEQ ID NO: 192710 - DNA, 80 bp, synthetic construct; identical to SEQ ID NO: 7980
  source 1..80: mol_type = other DNA

SEQ ID NO: 192711 - DNA, 80 bp, synthetic construct; identical to SEQ ID NO: 7981
  source 1..80: mol_type = other DNA

SEQ ID NO: 192712 - DNA, 80 bp, synthetic construct; identical to SEQ ID NO: 7982
  source 1..80: mol_type = other DNA

SEQ ID NO: 192713 - DNA, 80 bp, synthetic construct; identical to SEQ ID NO: 7983
  source 1..80: mol_type = other DNA

SEQ ID NO: 192714 - DNA, 80 bp, synthetic construct; identical to SEQ ID NO: 7984
  source 1..80: mol_type = other DNA

SEQ ID NO: 192715 - DNA, 80 bp, synthetic construct; identical to SEQ ID NO: 7985
  source 1..80: mol_type = other DNA

SEQ ID NO: 192716 - DNA, 80 bp, synthetic construct; identical to SEQ ID NO: 7986
  source 1..80: mol_type = other DNA

SEQ ID NO: 192717 - DNA, 80 bp, synthetic construct; identical to SEQ ID NO: 7987
  source 1..80: mol_type = other DNA

SEQ ID NO: 192718 - DNA, 80 bp, synthetic construct; identical to SEQ ID NO: 7988
  source 1..80: mol_type = other DNA

SEQ ID NO: 192719 - DNA, 80 bp, synthetic construct; identical to SEQ ID NO: 7989
  source 1..80: mol_type = other DNA

SEQ ID NO: 192720 - DNA, 80 bp, synthetic construct; identical to SEQ ID NO: 7990
  source 1..80: mol_type = other DNA

SEQ ID NO: 192721 - DNA, 80 bp, synthetic construct; identical to SEQ ID NO: 7991
  source 1..80: mol_type = other DNA

SEQ ID NO: 192722 - DNA, 80 bp, synthetic construct; identical to SEQ ID NO: 7992
  source 1..80: mol_type = other DNA

SEQ ID NO: 192723 - DNA, 80 bp, synthetic construct; identical to SEQ ID NO: 7993
  source 1..80: mol_type = other DNA

SEQ ID NO: 192724 - DNA, 80 bp, synthetic construct; identical to SEQ ID NO: 7994
  source 1..80: mol_type = other DNA

SEQ ID NO: 192725 - DNA, 80 bp, synthetic construct; identical to SEQ ID NO: 7995
  source 1..80: mol_type = other DNA

SEQ ID NO: 192726 - DNA, 80 bp, synthetic construct; identical to SEQ ID NO: 7996
  source 1..80: mol_type = other DNA

SEQ ID NO: 192727 - DNA, 80 bp, synthetic construct; identical to SEQ ID NO: 7997
  source 1..80: mol_type = other DNA

SEQ ID NO: 192728 - DNA, 80 bp, synthetic construct; identical to SEQ ID NO: 7998
  source 1..80: mol_type = other DNA

SEQ ID NO: 192729 - DNA, 80 bp, synthetic construct; identical to SEQ ID NO: 7999
  source 1..80: mol_type = other DNA

SEQ ID NO: 192730 - DNA, 80 bp, synthetic construct; identical to SEQ ID NO: 8000
  source 1..80: mol_type = other DNA

SEQ ID NO: 192731 - DNA, 80 bp, synthetic construct; identical to SEQ ID NO: 8001
  source 1..80: mol_type = other DNA

SEQ ID NO: 192732 - DNA, 80 bp, synthetic construct; identical to SEQ ID NO: 8002
  source 1..80: mol_type = other DNA

SEQ ID NO: 192733 - DNA, 80 bp, synthetic construct; identical to SEQ ID NO: 8003
  source 1..80: mol_type = other DNA

SEQ ID NO: 192734 - DNA, 80 bp, synthetic construct; identical to SEQ ID NO: 8004
  source 1..80: mol_type = other DNA

SEQ ID NO: 192735 - DNA, 80 bp, synthetic construct; identical to SEQ ID NO: 8005
  source 1..80: mol_type = other DNA

SEQ ID NO: 192736 - DNA, 80 bp, synthetic construct; identical to SEQ ID NO: 8006
  source 1..80: mol_type = other DNA

SEQ ID NO: 192737 - DNA, 80 bp, synthetic construct; identical to SEQ ID NO: 8007
  source 1..80: mol_type = other DNA

SEQ ID NO: 192738 - DNA, 80 bp, synthetic construct; identical to SEQ ID NO: 8008
  source 1..80: mol_type = other DNA

SEQ ID NO: 192739 - DNA, 80 bp, synthetic construct; identical to SEQ ID NO: 8009
  source 1..80: mol_type = other DNA

SEQ ID NO: 192740 - DNA, 80 bp, synthetic construct; identical to SEQ ID NO: 8010
  source 1..80: mol_type = other DNA

SEQ ID NO: 192741 - DNA, 80 bp, synthetic construct; identical to SEQ ID NO: 8011
  source 1..80: mol_type = other DNA

SEQ ID NO: 192742 - DNA, 80 bp, synthetic construct; identical to SEQ ID NO: 8012
  source 1..80: mol_type = other DNA

SEQ ID NO: 192743 - DNA, 80 bp, synthetic construct; identical to SEQ ID NO: 8013
  source 1..80: mol_type = other DNA

SEQ ID NO: 192744 - DNA, 80 bp, synthetic construct; identical to SEQ ID NO: 8014
  source 1..80: mol_type = other DNA

SEQ ID NO: 192745 - DNA, 80 bp, synthetic construct; identical to SEQ ID NO: 8015
  source 1..80: mol_type = other DNA

SEQ ID NO: 192746 - DNA, 80 bp, synthetic construct; identical to SEQ ID NO: 8016
  source 1..80: mol_type = other DNA

SEQ ID NO: 192747 - DNA, 80 bp, synthetic construct; identical to SEQ ID NO: 8017
  source 1..80: mol_type = other DNA

SEQ ID NO: 192748 - DNA, 80 bp, synthetic construct; identical to SEQ ID NO: 8018
  source 1..80: mol_type = other DNA

SEQ ID NO: 192749 - DNA, 80 bp, synthetic construct; identical to SEQ ID NO: 8019
  source 1..80: mol_type = other DNA

SEQ ID NO: 192750 - DNA, 80 bp, synthetic construct; identical to SEQ ID NO: 8020
  source 1..80: mol_type = other DNA

SEQ ID NO: 192751 - DNA, 80 bp, synthetic construct; identical to SEQ ID NO: 8021
  source 1..80: mol_type = other DNA

SEQ ID NO: 192752 - DNA, 80 bp, synthetic construct; identical to SEQ ID NO: 8022
  source 1..80: mol_type = other DNA

SEQ ID NO: 192753 - DNA, 80 bp, synthetic construct; identical to SEQ ID NO: 8023
  source 1..80: mol_type = other DNA

SEQ ID NO: 192754 - DNA, 80 bp, synthetic construct; identical to SEQ ID NO: 8024
  source 1..80: mol_type = other DNA

SEQ ID NO: 192755 - DNA, 80 bp, synthetic construct; identical to SEQ ID NO: 8025
  source 1..80: mol_type = other DNA

SEQ ID NO: 192756 - DNA, 80 bp, synthetic construct; identical to SEQ ID NO: 8026
  source 1..80: mol_type = other DNA

SEQ ID NO: 192757 - DNA, 80 bp, synthetic construct; identical to SEQ ID NO: 8027
  source 1..80: mol_type = other DNA

SEQ ID NO: 192758 - DNA, 80 bp, synthetic construct; identical to SEQ ID NO: 8028
  source 1..80: mol_type = other DNA

SEQ ID NO: 192759 - DNA, 80 bp, synthetic construct; identical to SEQ ID NO: 8029
  source 1..80: mol_type = other DNA

SEQ ID NO: 192760 - DNA, 80 bp, synthetic construct; identical to SEQ ID NO: 8030
  source 1..80: mol_type = other DNA

SEQ ID NO: 192761 - DNA, 80 bp, synthetic construct; identical to SEQ ID NO: 8031
  source 1..80: mol_type = other DNA

SEQ ID NO: 192762 - DNA, 80 bp, synthetic construct; identical to SEQ ID NO: 8032
  source 1..80: mol_type = other DNA

SEQ ID NO: 192763 - DNA, 80 bp, synthetic construct; identical to SEQ ID NO: 8033
  source 1..80: mol_type = other DNA

SEQ ID NO: 192764 - DNA, 80 bp, synthetic construct; identical to SEQ ID NO: 8034
  source 1..80: mol_type = other DNA

SEQ ID NO: 192765 - DNA, 80 bp, synthetic construct; identical to SEQ ID NO: 8035
  source 1..80: mol_type = other DNA

SEQ ID NO: 192766 - DNA, 80 bp, synthetic construct; identical to SEQ ID NO: 8036
  source 1..80: mol_type = other DNA

SEQ ID NO: 192767 - DNA, 80 bp, synthetic construct; identical to SEQ ID NO: 8037
  source 1..80: mol_type = other DNA

SEQ ID NO: 192768 - DNA, 80 bp, synthetic construct; identical to SEQ ID NO: 8038
  source 1..80: mol_type = other DNA

SEQ ID NO: 192769 - DNA, 80 bp, synthetic construct; identical to SEQ ID NO: 8039
  source 1..80: mol_type = other DNA

SEQ ID NO: 192770 - DNA, 80 bp, synthetic construct; identical to SEQ ID NO: 8040
  source 1..80: mol_type = other DNA

SEQ ID NO: 192771 - DNA, 80 bp, synthetic construct; identical to SEQ ID NO: 8041
  source 1..80: mol_type = other DNA

SEQ ID NO: 192772 - DNA, 80 bp, synthetic construct; identical to SEQ ID NO: 8042
  source 1..80: mol_type = other DNA

SEQ ID NO: 192773 - DNA, 80 bp, synthetic construct; identical to SEQ ID NO: 8043
  source 1..80: mol_type = other DNA

SEQ ID NO: 192774 - DNA, 80 bp, synthetic construct; identical to SEQ ID NO: 8044
  source 1..80: mol_type = other DNA

SEQ ID NO: 192775 - DNA, 80 bp, synthetic construct; identical to SEQ ID NO: 8045
  source 1..80: mol_type = other DNA

SEQ ID NO: 192776 - DNA, 80 bp, synthetic construct; identical to SEQ ID NO: 8046
  source 1..80: mol_type = other DNA

SEQ ID NO: 192777 - DNA, 80 bp, synthetic construct; identical to SEQ ID NO: 8047
  source 1..80: mol_type = other DNA

SEQ ID NO: 192778 - DNA, 80 bp, synthetic construct; identical to SEQ ID NO: 8048
  source 1..80: mol_type = other DNA

SEQ ID NO: 192779 - DNA, 80 bp, synthetic construct; identical to SEQ ID NO: 8049
  source 1..80: mol_type = other DNA

SEQ ID NO: 192780 - DNA, 80 bp, synthetic construct; identical to SEQ ID NO: 8050
  source 1..80: mol_type = other DNA

SEQ ID NO: 192781 - DNA, 80 bp, synthetic construct; identical to SEQ ID NO: 8051
  source 1..80: mol_type = other DNA

SEQ ID NO: 192782 - DNA, 80 bp, synthetic construct; identical to SEQ ID NO: 8052
  source 1..80: mol_type = other DNA

SEQ ID NO: 192783 - DNA, 80 bp, synthetic construct; identical to SEQ ID NO: 8053
  source 1..80: mol_type = other DNA

SEQ ID NO: 192784 - DNA, 80 bp, synthetic construct; identical to SEQ ID NO: 8054
  source 1..80: mol_type = other DNA

SEQ ID NO: 192785 - DNA, 80 bp, synthetic construct; identical to SEQ ID NO: 8055
  source 1..80: mol_type = other DNA

SEQ ID NO: 192786 - DNA, 80 bp, synthetic construct; identical to SEQ ID NO: 8056
  source 1..80: mol_type = other DNA

SEQ ID NO: 192787 - DNA, 80 bp, synthetic construct; identical to SEQ ID NO: 8057
  source 1..80: mol_type = other DNA

SEQ ID NO: 192788 - DNA, 80 bp, synthetic construct; identical to SEQ ID NO: 8058
  source 1..80: mol_type = other DNA

SEQ ID NO: 192789 - DNA, 80 bp, synthetic construct; identical to SEQ ID NO: 8059
  source 1..80: mol_type = other DNA

SEQ ID NO: 192790 - DNA, 80 bp, synthetic construct; identical to SEQ ID NO: 8060
  source 1..80: mol_type = other DNA

SEQ ID NO: 192791 - DNA, 80 bp, synthetic construct; identical to SEQ ID NO: 8061
  source 1..80: mol_type = other DNA

SEQ ID NO: 192792 - DNA, 80 bp, synthetic construct; identical to SEQ ID NO: 8062
  source 1..80: mol_type = other DNA

SEQ ID NO: 192793 - DNA, 80 bp, synthetic construct; identical to SEQ ID NO: 8063
  source 1..80: mol_type = other DNA

SEQ ID NO: 192794 - DNA, 80 bp, synthetic construct; identical to SEQ ID NO: 8064
  source 1..80: mol_type = other DNA

SEQ ID NO: 192795 - DNA, 80 bp, synthetic construct; identical to SEQ ID NO: 8065
  source 1..80: mol_type = other DNA

SEQ ID NO: 192796 - DNA, 80 bp, synthetic construct; identical to SEQ ID NO: 8066
  source 1..80: mol_type = other DNA

SEQ ID NO: 192797 - DNA, 80 bp, synthetic construct; identical to SEQ ID NO: 8067
  source 1..80: mol_type = other DNA

SEQ ID NO: 192798 - DNA, 80 bp, synthetic construct; identical to SEQ ID NO: 8068
  source 1..80: mol_type = other DNA

SEQ ID NO: 192799 - DNA, 80 bp, synthetic construct; identical to SEQ ID NO: 8069
  source 1..80: mol_type = other DNA

SEQ ID NO: 192800 - DNA, 80 bp, synthetic construct; identical to SEQ ID NO: 8070
  source 1..80: mol_type = other DNA

SEQ ID NO: 192801 - DNA, 80 bp, synthetic construct; identical to SEQ ID NO: 8071
  source 1..80: mol_type = other DNA

SEQ ID NO: 192802 - DNA, 80 bp, synthetic construct; identical to SEQ ID NO: 8072
  source 1..80: mol_type = other DNA

SEQ ID NO: 192803 - DNA, 80 bp, synthetic construct; identical to SEQ ID NO: 8073
  source 1..80: mol_type = other DNA

SEQ ID NO: 192804 - DNA, 80 bp, synthetic construct; identical to SEQ ID NO: 8074
  source 1..80: mol_type = other DNA

SEQ ID NO: 192805 - DNA, 80 bp, synthetic construct; identical to SEQ ID NO: 8075
  source 1..80: mol_type = other DNA

SEQ ID NO: 192806 - DNA, 80 bp, synthetic construct; identical to SEQ ID NO: 8076
  source 1..80: mol_type = other DNA

SEQ ID NO: 192807 - DNA, 80 bp, synthetic construct; identical to SEQ ID NO: 8077
  source 1..80: mol_type = other DNA

SEQ ID NO: 192808 - DNA, 80 bp, synthetic construct; identical to SEQ ID NO: 8078
  source 1..80: mol_type = other DNA

SEQ ID NO: 192809 - DNA, 80 bp, synthetic construct; identical to SEQ ID NO: 8079
  source 1..80: mol_type = other DNA

SEQ ID NO: 192810 - DNA, 80 bp, synthetic construct; identical to SEQ ID NO: 8080
  source 1..80: mol_type = other DNA

SEQ ID NO: 192811 - DNA, 80 bp, synthetic construct; identical to SEQ ID NO: 8081
  source 1..80: mol_type = other DNA

SEQ ID NO: 192812 - DNA, 80 bp, synthetic construct; identical to SEQ ID NO: 8082
  source 1..80: mol_type = other DNA

SEQ ID NO: 192813 - DNA, 80 bp, synthetic construct; identical to SEQ ID NO: 8083
  source 1..80: mol_type = other DNA

SEQ ID NO: 192814 - DNA, 80 bp, synthetic construct; identical to SEQ ID NO: 8084
  source 1..80: mol_type = other DNA

SEQ ID NO: 192815 - DNA, 80 bp, synthetic construct; identical to SEQ ID NO: 8085
  source 1..80: mol_type = other DNA

SEQ ID NO: 192816 - DNA, 80 bp, synthetic construct; identical to SEQ ID NO: 8086
  source 1..80: mol_type = other DNA

SEQ ID NO: 192817 - DNA, 80 bp, synthetic construct; identical to SEQ ID NO: 8087
  source 1..80: mol_type = other DNA

SEQ ID NO: 192818 - DNA, 80 bp, synthetic construct; identical to SEQ ID NO: 8088
  source 1..80: mol_type = other DNA

SEQ ID NO: 192819 - DNA, 80 bp, synthetic construct; identical to SEQ ID NO: 8089
  source 1..80: mol_type = other DNA

SEQ ID NO: 192820 - DNA, 80 bp, synthetic construct; identical to SEQ ID NO: 8090
  source 1..80: mol_type = other DNA

SEQ ID NO: 192821 - DNA, 80 bp, synthetic construct; identical to SEQ ID NO: 8091
  source 1..80: mol_type = other DNA

SEQ ID NO: 192822 - DNA, 80 bp, synthetic construct; identical to SEQ ID NO: 8092
  source 1..80: mol_type = other DNA

SEQ ID NO: 192823 - DNA, 80 bp, synthetic construct; identical to SEQ ID NO: 8093
  source 1..80: mol_type = other DNA

SEQ ID NO: 192824 - DNA, 80 bp, synthetic construct; identical to SEQ ID NO: 8094
  source 1..80: mol_type = other DNA

SEQ ID NO: 192825 - DNA, 80 bp, synthetic construct; identical to SEQ ID NO: 8095
  source 1..80: mol_type = other DNA

SEQ ID NO: 192826 - DNA, 80 bp, synthetic construct; identical to SEQ ID NO: 8096
  source 1..80: mol_type = other DNA

SEQ ID NO: 192827 - DNA, 80 bp, synthetic construct; identical to SEQ ID NO: 8097
  source 1..80: mol_type = other DNA

SEQ ID NO: 192828 - DNA, 80 bp, synthetic construct; identical to SEQ ID NO: 8098
  source 1..80: mol_type = other DNA

SEQ ID NO: 192829 - DNA, 80 bp, synthetic construct; identical to SEQ ID NO: 8099
  source 1..80: mol_type = other DNA

SEQ ID NO: 192830 - DNA, 80 bp, synthetic construct; identical to SEQ ID NO: 8100
  source 1..80: mol_type = other DNA

SEQ ID NO: 192831 - DNA, 80 bp, synthetic construct; identical to SEQ ID NO: 8101
  source 1..80: mol_type = other DNA

SEQ ID NO: 192832 - DNA, 80 bp, synthetic construct; identical to SEQ ID NO: 8102
  source 1..80: mol_type = other DNA

SEQ ID NO: 192833 - DNA, 80 bp, synthetic construct; identical to SEQ ID NO: 8103
  source 1..80: mol_type = other DNA

SEQ ID NO: 192834 - DNA, 80 bp, synthetic construct; identical to SEQ ID NO: 8104
  source 1..80: mol_type = other DNA

SEQ ID NO: 192835 - DNA, 80 bp, synthetic construct; identical to SEQ ID NO: 8105
  source 1..80: mol_type = other DNA

SEQ ID NO: 192836 - DNA, 80 bp, synthetic construct; identical to SEQ ID NO: 8106
  source 1..80: mol_type = other DNA

SEQ ID NO: 192837 - DNA, 80 bp, synthetic construct; identical to SEQ ID NO: 8107
  source 1..80: mol_type = other DNA

SEQ ID NO: 192838 - DNA, 80 bp, synthetic construct; identical to SEQ ID NO: 8108
  source 1..80: mol_type = other DNA

SEQ ID NO: 192839 - DNA, 80 bp, synthetic construct; identical to SEQ ID NO: 8109
  source 1..80: mol_type = other DNA

SEQ ID NO: 192840 - DNA, 80 bp, synthetic construct; identical to SEQ ID NO: 8110
  source 1..80: mol_type = other DNA

SEQ ID NO: 192841 - DNA, 80 bp, synthetic construct; identical to SEQ ID NO: 8111
  source 1..80: mol_type = other DNA

SEQ ID NO: 192842 - DNA, 80 bp, synthetic construct; identical to SEQ ID NO: 8112
  source 1..80: mol_type = other DNA

SEQ ID NO: 192843 - DNA, 80 bp, synthetic construct; identical to SEQ ID NO: 8113
  source 1..80: mol_type = other DNA

SEQ ID NO: 192844 - DNA, 80 bp, synthetic construct; identical to SEQ ID NO: 8114
  source 1..80: mol_type = other DNA

SEQ ID NO: 192845 - DNA, 80 bp, synthetic construct; identical to SEQ ID NO: 8115
  source 1..80: mol_type = other DNA

SEQ ID NO: 192846 - DNA, 80 bp, synthetic construct; identical to SEQ ID NO: 8116
  source 1..80: mol_type = other DNA

SEQ ID NO: 192847 - DNA, 80 bp, synthetic construct; identical to SEQ ID NO: 8117
  source 1..80: mol_type = other DNA

SEQ ID NO: 192848 - DNA, 80 bp, synthetic construct; identical to SEQ ID NO: 8118
  source 1..80: mol_type = other DNA

SEQ ID NO: 192849 - DNA, 80 bp, synthetic construct; identical to SEQ ID NO: 8119
  source 1..80: mol_type = other DNA

SEQ ID NO: 192850 - DNA, 80 bp, synthetic construct; identical to SEQ ID NO: 8120
  source 1..80: mol_type = other DNA

SEQ ID NO: 192851 - DNA, 80 bp, synthetic construct; identical to SEQ ID NO: 8121
  source 1..80: mol_type = other DNA

SEQ ID NO: 192852 - DNA, 80 bp, synthetic construct; identical to SEQ ID NO: 8122
  source 1..80: mol_type = other DNA

SEQ ID NO: 192853 - DNA, 80 bp, synthetic construct; identical to SEQ ID NO: 8123
  source 1..80: mol_type = other DNA

SEQ ID NO: 192854 - DNA, 80 bp, synthetic construct; identical to SEQ ID NO: 8124
  source 1..80: mol_type = other DNA

SEQ ID NO: 192855 - DNA, 80 bp, synthetic construct; identical to SEQ ID NO: 8125
  source 1..80: mol_type = other DNA

SEQ ID NO: 192856 - DNA, 80 bp, synthetic construct; identical to SEQ ID NO: 8126
  source 1..80: mol_type = other DNA

SEQ ID NO: 192857 - DNA, 80 bp, synthetic construct; identical to SEQ ID NO: 8127
  source 1..80: mol_type = other DNA

SEQ ID NO: 192858 - DNA, 80 bp, synthetic construct; identical to SEQ ID NO: 8128
  source 1..80: mol_type = other DNA

SEQ ID NO: 192859 - DNA, 80 bp, synthetic construct; identical to SEQ ID NO: 8129
  source 1..80: mol_type = other DNA

SEQ ID NO: 192860 - DNA, 80 bp, synthetic construct; identical to SEQ ID NO: 8130
  source 1..80: mol_type = other DNA

SEQ ID NO: 192861 - DNA, 80 bp, synthetic construct; identical to SEQ ID NO: 8131
  source 1..80: mol_type = other DNA

SEQ ID NO: 192862 - DNA, 80 bp, synthetic construct; identical to SEQ ID NO: 8132
  source 1..80: mol_type = other DNA

SEQ ID NO: 192863 - DNA, 80 bp, synthetic construct; identical to SEQ ID NO: 8133
  source 1..80: mol_type = other DNA

SEQ ID NO: 192864 - DNA, 80 bp, synthetic construct; identical to SEQ ID NO: 8134
  source 1..80: mol_type = other DNA

SEQ ID NO: 192865 - DNA, 80 bp, synthetic construct; identical to SEQ ID NO: 8135
  source 1..80: mol_type = other DNA

SEQ ID NO: 192866 - DNA, 80 bp, synthetic construct; identical to SEQ ID NO: 8136
  source 1..80: mol_type = other DNA

SEQ ID NO: 192867 - DNA, 80 bp, synthetic construct; identical to SEQ ID NO: 8137
  source 1..80: mol_type = other DNA

SEQ ID NO: 192868 - DNA, 80 bp, synthetic construct; identical to SEQ ID NO: 8138
  source 1..80: mol_type = other DNA

SEQ ID NO: 192869 - DNA, 80 bp, synthetic construct; identical to SEQ ID NO: 8139
  source 1..80: mol_type = other DNA

SEQ ID NO: 192870 - DNA, 80 bp, synthetic construct; identical to SEQ ID NO: 8140
  source 1..80: mol_type = other DNA

SEQ ID NO: 192871 - DNA, 80 bp, synthetic construct; identical to SEQ ID NO: 8141
  source 1..80: mol_type = other DNA

SEQ ID NO: 192872 - DNA, 80 bp, synthetic construct; identical to SEQ ID NO: 8142
  source 1..80: mol_type = other DNA

SEQ ID NO: 192873 - DNA, 80 bp, synthetic construct; identical to SEQ ID NO: 8143
  source 1..80: mol_type = other DNA

SEQ ID NO: 192874 - DNA, 80 bp, synthetic construct; identical to SEQ ID NO: 8144
  source 1..80: mol_type = other DNA

SEQ ID NO: 192875 - DNA, 80 bp, synthetic construct; identical to SEQ ID NO: 8145
  source 1..80: mol_type = other DNA

SEQ ID NO: 192876 - DNA, 80 bp, synthetic construct; identical to SEQ ID NO: 8146
  source 1..80: mol_type = other DNA

SEQ ID NO: 192877 - DNA, 80 bp, synthetic construct; identical to SEQ ID NO: 8147
  source 1..80: mol_type = other DNA

SEQ ID NO: 192878 - DNA, 80 bp, synthetic construct; identical to SEQ ID NO: 8148
  source 1..80: mol_type = other DNA

SEQ ID NO: 192879 - DNA, 80 bp, synthetic construct; identical to SEQ ID NO: 8149
  source 1..80: mol_type = other DNA

SEQ ID NO: 192880 - DNA, 80 bp, synthetic construct; identical to SEQ ID NO: 8150
  source 1..80: mol_type = other DNA

SEQ ID NO: 192881 - DNA, 80 bp, synthetic construct; identical to SEQ ID NO: 8151
  source 1..80: mol_type = other DNA

SEQ ID NO: 192882 - DNA, 80 bp, synthetic construct; identical to SEQ ID NO: 8152
  source 1..80: mol_type = other DNA

SEQ ID NO: 192883 - DNA, 80 bp, synthetic construct; identical to SEQ ID NO: 8153
  source 1..80: mol_type = other DNA

SEQ ID NO: 192884 - DNA, 80 bp, synthetic construct; identical to SEQ ID NO: 8154
  source 1..80: mol_type = other DNA

SEQ ID NO: 192885 - DNA, 80 bp, synthetic construct; identical to SEQ ID NO: 8155
  source 1..80: mol_type = other DNA

SEQ ID NO: 192886 - DNA, 80 bp, synthetic construct; identical to SEQ ID NO: 8156
  source 1..80: mol_type = other DNA

SEQ ID NO: 192887 - DNA, 80 bp, synthetic construct; identical to SEQ ID NO: 8157
  source 1..80: mol_type = other DNA

SEQ ID NO: 192888 - DNA, 80 bp, synthetic construct; identical to SEQ ID NO: 8158
  source 1..80: mol_type = other DNA

SEQ ID NO: 192889 - DNA, 80 bp, synthetic construct; identical to SEQ ID NO: 8159
  source 1..80: mol_type = other DNA

SEQ ID NO: 192890 - DNA, 80 bp, synthetic construct; identical to SEQ ID NO: 8160
  source 1..80: mol_type = other DNA

SEQ ID NO: 192891 - DNA, 80 bp, synthetic construct; identical to SEQ ID NO: 8161
  source 1..80: mol_type = other DNA

SEQ ID NO: 192892 - DNA, 80 bp, synthetic construct; identical to SEQ ID NO: 8162
  source 1..80: mol_type = other DNA

SEQ ID NO: 192893 - DNA, 80 bp, synthetic construct; identical to SEQ ID NO: 8163
  source 1..80: mol_type = other DNA

SEQ ID NO: 192894 - DNA, 80 bp, synthetic construct; identical to SEQ ID NO: 8164
  source 1..80: mol_type = other DNA

SEQ ID NO: 192895 - DNA, 80 bp, synthetic construct; identical to SEQ ID NO: 8165
  source 1..80: mol_type = other DNA

SEQ ID NO: 192896 - DNA, 80 bp, synthetic construct; identical to SEQ ID NO: 8166
  source 1..80: mol_type = other DNA

SEQ ID NO: 192897 - DNA, 80 bp, synthetic construct; identical to SEQ ID NO: 8167
  source 1..80: mol_type = other DNA

SEQ ID NO: 192898 - DNA, 80 bp, synthetic construct; identical to SEQ ID NO: 8168
  source 1..80: mol_type = other DNA

SEQ ID NO: 192899 - DNA, 80 bp, synthetic construct; identical to SEQ ID NO: 8169
  source 1..80: mol_type = other DNA

SEQ ID NO: 192900 - DNA, 80 bp, synthetic construct; identical to SEQ ID NO: 8170
  source 1..80: mol_type = other DNA

SEQ ID NO: 192901 - DNA, 80 bp, synthetic construct; identical to SEQ ID NO: 8171
  source 1..80: mol_type = other DNA

SEQ ID NO: 192902 - DNA, 80 bp, synthetic construct; identical to SEQ ID NO: 8172
  source 1..80: mol_type = other DNA

SEQ ID NO: 192903 - DNA, 80 bp, synthetic construct; identical to SEQ ID NO: 8173
  source 1..80: mol_type = other DNA

SEQ ID NO: 192904 - DNA, 80 bp, synthetic construct; identical to SEQ ID NO: 8174
  source 1..80: mol_type = other DNA

SEQ ID NO: 192905 - DNA, 80 bp, synthetic construct; identical to SEQ ID NO: 8175
  source 1..80: mol_type = other DNA

SEQ ID NO: 192906 - DNA, 80 bp, synthetic construct; identical to SEQ ID NO: 8176
  source 1..80: mol_type = other DNA

SEQ ID NO: 192907 - DNA, 80 bp, synthetic construct; identical to SEQ ID NO: 8177
  source 1..80: mol_type = other DNA

SEQ ID NO: 192908 - DNA, 80 bp, synthetic construct; identical to SEQ ID NO: 8178
  source 1..80: mol_type = other DNA

SEQ ID NO: 192909 - DNA, 80 bp, synthetic construct; identical to SEQ ID NO: 8179
  source 1..80: mol_type = other DNA

SEQ ID NO: 192910 - DNA, 80 bp, synthetic construct; identical to SEQ ID NO: 8180
  source 1..80: mol_type = other DNA

SEQ ID NO: 192911 - DNA, 80 bp, synthetic construct; identical to SEQ ID NO: 8181
  source 1..80: mol_type = other DNA

SEQ ID NO: 192912 - DNA, 80 bp, synthetic construct; identical to SEQ ID NO: 8182
  source 1..80: mol_type = other DNA

SEQ ID NO: 192913 - DNA, 80 bp, synthetic construct; identical to SEQ ID NO: 8183
  source 1..80: mol_type = other DNA

SEQ ID NO: 192914 - DNA, 80 bp, synthetic construct; identical to SEQ ID NO: 8184
  source 1..80: mol_type = other DNA

SEQ ID NO: 192915 - DNA, 80 bp, synthetic construct; identical to SEQ ID NO: 8185
  source 1..80: mol_type = other DNA

SEQ ID NO: 192916 - DNA, 80 bp, synthetic construct; identical to SEQ ID NO: 8186
  source 1..80: mol_type = other DNA

SEQ ID NO: 192917 - DNA, 80 bp, synthetic construct; identical to SEQ ID NO: 8187
  source 1..80: mol_type = other DNA

SEQ ID NO: 192918 - DNA, 80 bp, synthetic construct; identical to SEQ ID NO: 8188
  source 1..80: mol_type = other DNA

SEQ ID NO: 192919 - DNA, 80 bp, synthetic construct; identical to SEQ ID NO: 8189
  source 1..80: mol_type = other DNA

SEQ ID NO: 192920 - DNA, 80 bp, synthetic construct; identical to SEQ ID NO: 8190
  source 1..80: mol_type = other DNA

SEQ ID NO: 192921 - DNA, 80 bp, synthetic construct; identical to SEQ ID NO: 8191
  source 1..80: mol_type = other DNA

SEQ ID NO: 192922 - DNA, 80 bp, synthetic construct; identical to SEQ ID NO: 8192
  source 1..80: mol_type = other DNA

SEQ ID NO: 192923 - DNA, 80 bp, synthetic construct; identical to SEQ ID NO: 8193
  source 1..80: mol_type = other DNA

SEQ ID NO: 192924 - DNA, 80 bp, synthetic construct; identical to SEQ ID NO: 8194
  source 1..80: mol_type = other DNA

SEQ ID NO: 192925 - DNA, 80 bp, synthetic construct; identical to SEQ ID NO: 8195
  source 1..80: mol_type = other DNA

SEQ ID NO: 192926 - DNA, 80 bp, synthetic construct; identical to SEQ ID NO: 8196
  source 1..80: mol_type = other DNA

SEQ ID NO: 192927 - DNA, 80 bp, synthetic construct; identical to SEQ ID NO: 8197
  source 1..80: mol_type = other DNA

SEQ ID NO: 192928 - DNA, 80 bp, synthetic construct; identical to SEQ ID NO: 8198
  source 1..80: mol_type = other DNA

SEQ ID NO: 192929 - DNA, 80 bp, synthetic construct; identical to SEQ ID NO: 8199
  source 1..80: mol_type = other DNA

SEQ ID NO: 192930 - DNA, 80 bp, synthetic construct; identical to SEQ ID NO: 8200
  source 1..80: mol_type = other DNA

SEQ ID NO: 192931 - DNA, 80 bp, synthetic construct; identical to SEQ ID NO: 8201
  source 1..80: mol_type = other DNA

SEQ ID NO: 192932 - DNA, 80 bp, synthetic construct; identical to SEQ ID NO: 8202
  source 1..80: mol_type = other DNA

SEQ ID NO: 192933 - DNA, 80 bp, synthetic construct; identical to SEQ ID NO: 8203
  source 1..80: mol_type = other DNA

SEQ ID NO: 192934 - DNA, 80 bp, synthetic construct; identical to SEQ ID NO: 8204
  source 1..80: mol_type = other DNA

SEQ ID NO: 192935 - DNA, 80 bp, synthetic construct; identical to SEQ ID NO: 8205
  source 1..80: mol_type = other DNA

SEQ ID NO: 192936 - DNA, 80 bp, synthetic construct; identical to SEQ ID NO: 8206
  source 1..80: mol_type = other DNA

SEQ ID NO: 192937 - DNA, 80 bp, synthetic construct; identical to SEQ ID NO: 8207
  source 1..80: mol_type = other DNA

SEQ ID NO: 192938 - DNA, 80 bp, synthetic construct; identical to SEQ ID NO: 8208
  source 1..80: mol_type = other DNA

SEQ ID NO: 192939 - DNA, 80 bp, synthetic construct; identical to SEQ ID NO: 8209
  source 1..80: mol_type = other DNA

SEQ ID NO: 192940 - DNA, 80 bp, synthetic construct; identical to SEQ ID NO: 8210
  source 1..80: mol_type = other DNA

SEQ ID NO: 192941 - DNA, 80 bp, synthetic construct; identical to SEQ ID NO: 8211
  source 1..80: mol_type = other DNA

SEQ ID NO: 192942 - DNA, 80 bp, synthetic construct; identical to SEQ ID NO: 8212
  source 1..80: mol_type = other DNA

SEQ ID NO: 192943 - DNA, 80 bp, synthetic construct; identical to SEQ ID NO: 8213
  source 1..80: mol_type = other DNA

SEQ ID NO: 192944 - DNA, 80 bp, synthetic construct; identical to SEQ ID NO: 8214
  source 1..80: mol_type = other DNA

SEQ ID NO: 192945 - DNA, 80 bp, synthetic construct; identical to SEQ ID NO: 8215
  source 1..80: mol_type = other DNA

SEQ ID NO: 192946 - DNA, 80 bp, synthetic construct; identical to SEQ ID NO: 8216
  source 1..80: mol_type = other DNA

SEQ ID NO: 192947 - DNA, 80 bp, synthetic construct; identical to SEQ ID NO: 8217
  source 1..80: mol_type = other DNA

SEQ ID NO: 192948 - DNA, 80 bp, synthetic construct; identical to SEQ ID NO: 8218
  source 1..80: mol_type = other DNA

SEQ ID NO: 192949 - DNA, 80 bp, synthetic construct; identical to SEQ ID NO: 8219
  source 1..80: mol_type = other DNA

SEQ ID NO: 192950 - DNA, 80 bp, synthetic construct; identical to SEQ ID NO: 8220
  source 1..80: mol_type = other DNA

SEQ ID NO: 192951 - DNA, 80 bp, synthetic construct; identical to SEQ ID NO: 8221
  source 1..80: mol_type = other DNA

SEQ ID NO: 192952 - DNA, 80 bp, synthetic construct; identical to SEQ ID NO: 8222
  source 1..80: mol_type = other DNA

SEQ ID NO: 192953 - DNA, 80 bp, synthetic construct; identical to SEQ ID NO: 8223
  source 1..80: mol_type = other DNA

SEQ ID NO: 192954 - DNA, 80 bp, synthetic construct; identical to SEQ ID NO: 8224
  source 1..80: mol_type = other DNA

SEQ ID NO: 192955 - DNA, 80 bp, synthetic construct; identical to SEQ ID NO: 8225
  source 1..80: mol_type = other DNA

SEQ ID NO: 192956 - DNA, 80 bp, synthetic construct; identical to SEQ ID NO: 8226
  source 1..80: mol_type = other DNA

SEQ ID NO: 192957 - DNA, 80 bp, synthetic construct; identical to SEQ ID NO: 8227
  source 1..80: mol_type = other DNA

SEQ ID NO: 192958 - DNA, 80 bp, synthetic construct; identical to SEQ ID NO: 8228
  source 1..80: mol_type = other DNA

SEQ ID NO: 192959 - DNA, 80 bp, synthetic construct; identical to SEQ ID NO: 8229
  source 1..80: mol_type = other DNA

SEQ ID NO: 192960 - DNA, 80 bp, synthetic construct; identical to SEQ ID NO: 8230
  source 1..80: mol_type = other DNA

SEQ ID NO: 192961 - DNA, 80 bp, synthetic construct; identical to SEQ ID NO: 8231
  source 1..80: mol_type = other DNA

SEQ ID NO: 192962 - DNA, 80 bp, synthetic construct; identical to SEQ ID NO: 8232
  source 1..80: mol_type = other DNA

SEQ ID NO: 192963 - DNA, 80 bp, synthetic construct; identical to SEQ ID NO: 8233
  source 1..80: mol_type = other DNA

SEQ ID NO: 192964 - DNA, 80 bp, synthetic construct; identical to SEQ ID NO: 8234
  source 1..80: mol_type = other DNA

SEQ ID NO: 192965 - DNA, 80 bp, synthetic construct; identical to SEQ ID NO: 8235
  source 1..80: mol_type = other DNA

SEQ ID NO: 192966 - DNA, 80 bp, synthetic construct; identical to SEQ ID NO: 8236
  source 1..80: mol_type = other DNA

SEQ ID NO: 192967 - DNA, 80 bp, synthetic construct; identical to SEQ ID NO: 8237
  source 1..80: mol_type = other DNA

SEQ ID NO: 192968 - DNA, 80 bp, synthetic construct; identical to SEQ ID NO: 8238
  source 1..80: mol_type = other DNA

SEQ ID NO: 192969 - DNA, 80 bp, synthetic construct; identical to SEQ ID NO: 8239
  source 1..80: mol_type = other DNA

SEQ ID NO: 192970 - DNA, 80 bp, synthetic construct; identical to SEQ ID NO: 8240
  source 1..80: mol_type = other DNA

SEQ ID NO: 192971 - DNA, 80 bp, synthetic construct; identical to SEQ ID NO: 8241
  source 1..80: mol_type = other DNA

SEQ ID NO: 192972 - DNA, 80 bp, synthetic construct; identical to SEQ ID NO: 8242
  source 1..80: mol_type = other DNA

SEQ ID NO: 192973 - DNA, 80 bp, synthetic construct; identical to SEQ ID NO: 8243
  source 1..80: mol_type = other DNA

SEQ ID NO: 192974 - DNA, 80 bp, synthetic construct; identical to SEQ ID NO: 8244
  source 1..80: mol_type = other DNA

SEQ ID NO: 192975 - DNA, 80 bp, synthetic construct; identical to SEQ ID NO: 8245
  source 1..80: mol_type = other DNA

SEQ ID NO: 192976 - DNA, 80 bp, synthetic construct; identical to SEQ ID NO: 8246
  source 1..80: mol_type = other DNA

SEQ ID NO: 192977 - DNA, 80 bp, synthetic construct; identical to SEQ ID NO: 8247
  source 1..80: mol_type = other DNA

SEQ ID NO: 192978 - DNA, 80 bp, synthetic construct; identical to SEQ ID NO: 8248
  source 1..80: mol_type = other DNA

SEQ ID NO: 192979 - DNA, 80 bp, synthetic construct; identical to SEQ ID NO: 8249
  source 1..80: mol_type = other DNA

SEQ ID NO: 192980 - DNA, 80 bp, synthetic construct; identical to SEQ ID NO: 8250
  source 1..80: mol_type = other DNA

SEQ ID NO: 192981 - DNA, 80 bp, synthetic construct; identical to SEQ ID NO: 8251
  source 1..80: mol_type = other DNA

SEQ ID NO: 192982 - DNA, 80 bp, synthetic construct; identical to SEQ ID NO: 8252
  source 1..80: mol_type = other DNA

SEQ ID NO: 192983 - DNA, 80 bp, synthetic construct; identical to SEQ ID NO: 8253
  source 1..80: mol_type = other DNA

SEQ ID NO: 192984 - DNA, 80 bp, synthetic construct; identical to SEQ ID NO: 8254
  source 1..80: mol_type = other DNA

SEQ ID NO: 192985 - DNA, 80 bp, synthetic construct; identical to SEQ ID NO: 8255
  source 1..80: mol_type = other DNA

SEQ ID NO: 192986 - DNA, 80 bp, synthetic construct; identical to SEQ ID NO: 8256
  source 1..80: mol_type = other DNA

SEQ ID NO: 192987 - DNA, 80 bp, synthetic construct; identical to SEQ ID NO: 8257
  source 1..80: mol_type = other DNA

SEQ ID NO: 192988 - DNA, 80 bp, synthetic construct; identical to SEQ ID NO: 8258
  source 1..80: mol_type = other DNA

SEQ ID NO: 192989 - DNA, 80 bp, synthetic construct; identical to SEQ ID NO: 8259
  source 1..80: mol_type = other DNA

SEQ ID NO: 192990 - DNA, 80 bp, synthetic construct; identical to SEQ ID NO: 8260
  source 1..80: mol_type = other DNA

SEQ ID NO: 192991 - DNA, 80 bp, synthetic construct; identical to SEQ ID NO: 8261
  source 1..80: mol_type = other DNA

SEQ ID NO: 192992 - DNA, 80 bp, synthetic construct; identical to SEQ ID NO: 8262
  source 1..80: mol_type = other DNA

SEQ ID NO: 192993 - DNA, 80 bp, synthetic construct; identical to SEQ ID NO: 8263
  source 1..80: mol_type = other DNA

SEQ ID NO: 192994 - DNA, 80 bp, synthetic construct; identical to SEQ ID NO: 8264
  source 1..80: mol_type = other DNA

SEQ ID NO: 192995 - DNA, 80 bp, synthetic construct; identical to SEQ ID NO: 8265
  source 1..80: mol_type = other DNA

SEQ ID NO: 192996 - DNA, 80 bp, synthetic construct; identical to SEQ ID NO: 8266
  source 1..80: mol_type = other DNA

SEQ ID NO: 192997 - DNA, 80 bp, synthetic construct; identical to SEQ ID NO: 8267
  source 1..80: mol_type = other DNA

SEQ ID NO: 192998 - DNA, 80 bp, synthetic construct; identical to SEQ ID NO: 8268
  source 1..80: mol_type = other DNA

SEQ ID NO: 192999 - DNA, 80 bp, synthetic construct; identical to SEQ ID NO: 8269
  source 1..80: mol_type = other DNA

SEQ ID NO: 193000 - DNA, 80 bp, synthetic construct; identical to SEQ ID NO: 8270
  source 1..80: mol_type = other DNA

SEQ ID NO: 193001 - DNA, 80 bp, synthetic construct; identical to SEQ ID NO: 8271
  source 1..80: mol_type = other DNA

SEQ ID NO: 193002 - DNA, 80 bp, synthetic construct; identical to SEQ ID NO: 8272
  source 1..80: mol_type = other DNA

SEQ ID NO: 193003 - DNA, 80 bp, synthetic construct; identical to SEQ ID NO: 8273
  source 1..80: mol_type = other DNA

SEQ ID NO: 193004 - DNA, 80 bp, synthetic construct; identical to SEQ ID NO: 8274
  source 1..80: mol_type = other DNA

SEQ ID NO: 193005 - DNA, 80 bp, synthetic construct; identical to SEQ ID NO: 8275
  source 1..80: mol_type = other DNA

SEQ ID NO: 193006 - DNA, 80 bp, synthetic construct; identical to SEQ ID NO: 8276
  source 1..80: mol_type = other DNA

SEQ ID NO: 193007 - DNA, 80 bp, synthetic construct; identical to SEQ ID NO: 8277
  source 1..80: mol_type = other DNA

SEQ ID NO: 193008 - DNA, 80 bp, synthetic construct; identical to SEQ ID NO: 8278
  source 1..80: mol_type = other DNA

SEQ ID NO: 193009 - DNA, 80 bp, synthetic construct; identical to SEQ ID NO: 8279
  source 1..80: mol_type = other DNA

SEQ ID NO: 193010 - DNA, 80 bp, synthetic construct; identical to SEQ ID NO: 8280
  source 1..80: mol_type = other DNA

SEQ ID NO: 193011 - DNA, 80 bp, synthetic construct; identical to SEQ ID NO: 8281
  source 1..80: mol_type = other DNA

SEQ ID NO: 193012 - DNA, 80 bp, synthetic construct; identical to SEQ ID NO: 8282
  source 1..80: mol_type = other DNA

SEQ ID NO: 193013 - DNA, 80 bp, synthetic construct; identical to SEQ ID NO: 8283
  source 1..80: mol_type = other DNA

SEQ ID NO: 193014 - DNA, 80 bp, synthetic construct; identical to SEQ ID NO: 8284
  source 1..80: mol_type = other DNA

SEQ ID NO: 193015 - DNA, 80 bp, synthetic construct; identical to SEQ ID NO: 8285
  source 1..80: mol_type = other DNA

SEQ ID NO: 193016 - DNA, 80 bp, synthetic construct; identical to SEQ ID NO: 8286
  source 1..80: mol_type = other DNA

SEQ ID NO: 193017 - DNA, 80 bp, synthetic construct; identical to SEQ ID NO: 8287
  source 1..80: mol_type = other DNA

SEQ ID NO: 193018 - DNA, 80 bp, synthetic construct; identical to SEQ ID NO: 8288
  source 1..80: mol_type = other DNA

SEQ ID NO: 193019 - DNA, 80 bp, synthetic construct; identical to SEQ ID NO: 8289
  source 1..80: mol_type = other DNA

SEQ ID NO: 193020 - DNA, 80 bp, synthetic construct; identical to SEQ ID NO: 8290
  source 1..80: mol_type = other DNA

SEQ ID NO: 193021 - DNA, 80 bp, synthetic construct; identical to SEQ ID NO: 8291
  source 1..80: mol_type = other DNA

SEQ ID NO: 193022 - DNA, 80 bp, synthetic construct; identical to SEQ ID NO: 8292
  source 1..80: mol_type = other DNA

SEQ ID NO: 193023 - DNA, 80 bp, synthetic construct; identical to SEQ ID NO: 8293
  source 1..80: mol_type = other DNA

SEQ ID NO: 193024 - DNA, 80 bp, synthetic construct; identical to SEQ ID NO: 8294
  source 1..80: mol_type = other DNA

SEQ ID NO: 193025 - DNA, 80 bp, synthetic construct; identical to SEQ ID NO: 8295
  source 1..80: mol_type = other DNA

SEQ ID NO: 193026 - DNA, 80 bp, synthetic construct; identical to SEQ ID NO: 8296
  source 1..80: mol_type = other DNA

SEQ ID NO: 193027 - DNA, 80 bp, synthetic construct; identical to SEQ ID NO: 8297
  source 1..80: mol_type = other DNA

SEQ ID NO: 193028 - DNA, 80 bp, synthetic construct; identical to SEQ ID NO: 8298
  source 1..80: mol_type = other DNA

SEQ ID NO: 193029 - DNA, 80 bp, synthetic construct; identical to SEQ ID NO: 8299
  source 1..80: mol_type = other DNA

SEQ ID NO: 193030 - DNA, 80 bp, synthetic construct; identical to SEQ ID NO: 8300
  source 1..80: mol_type = other DNA

SEQ ID NO: 193031 - DNA, 80 bp, synthetic construct; identical to SEQ ID NO: 8301
  source 1..80: mol_type = other DNA

SEQ ID NO: 193032 - DNA, 80 bp, synthetic construct; identical to SEQ ID NO: 8302
  source 1..80: mol_type = other DNA

SEQ ID NO: 193033 - DNA, 80 bp, synthetic construct; identical to SEQ ID NO: 8303
  source 1..80: mol_type = other DNA

SEQ ID NO: 193034 - DNA, 80 bp, synthetic construct; identical to SEQ ID NO: 8304
  source 1..80: mol_type = other DNA

SEQ ID NO: 193035 - DNA, 80 bp, synthetic construct; identical to SEQ ID NO: 8305
  source 1..80: mol_type = other DNA

SEQ ID NO: 193036 - DNA, 80 bp, synthetic construct; identical to SEQ ID NO: 8306
  source 1..80: mol_type = other DNA

SEQ ID NO: 193037 - DNA, 80 bp, synthetic construct; identical to SEQ ID NO: 8307
  source 1..80: mol_type = other DNA

SEQ ID NO: 193038 - DNA, 80 bp, synthetic construct; identical to SEQ ID NO: 8308
  source 1..80: mol_type = other DNA

SEQ ID NO: 193039 - DNA, 80 bp, synthetic construct; identical to SEQ ID NO: 8309
  source 1..80: mol_type = other DNA

SEQ ID NO: 193040 - DNA, 80 bp, synthetic construct; identical to SEQ ID NO: 8310
  source 1..80: mol_type = other DNA

SEQ ID NO: 193041 - DNA, 80 bp, synthetic construct; identical to SEQ ID NO: 8311
  source 1..80: mol_type = other DNA

SEQ ID NO: 193042 - DNA, 80 bp, synthetic construct; identical to SEQ ID NO: 8312
  source 1..80: mol_type = other DNA

SEQ ID NO: 193043 - DNA, 80 bp, synthetic construct; identical to SEQ ID NO: 8313
  source 1..80: mol_type = other DNA

SEQ ID NO: 193044 - DNA, 80 bp, synthetic construct; identical to SEQ ID NO: 8314
  source 1..80: mol_type = other DNA

SEQ ID NO: 193045 - DNA, 80 bp, synthetic construct; identical to SEQ ID NO: 8315
  source 1..80: mol_type = other DNA

SEQ ID NO: 193046 - DNA, 80 bp, synthetic construct; identical to SEQ ID NO: 8316
  source 1..80: mol_type = other DNA

SEQ ID NO: 193047 - DNA, 80 bp, synthetic construct; identical to SEQ ID NO: 8317
  source 1..80: mol_type = other DNA

SEQ ID NO: 193048 - DNA, 80 bp, synthetic construct; identical to SEQ ID NO: 8318
  source 1..80: mol_type = other DNA

SEQ ID NO: 193049 - DNA, 80 bp, synthetic construct; identical to SEQ ID NO: 8319
  source 1..80: mol_type = other DNA

SEQ ID NO: 193050 - DNA, 80 bp, synthetic construct; identical to SEQ ID NO: 8320
  source 1..80: mol_type = other DNA

SEQ ID NO: 193051 - DNA, 80 bp, synthetic construct; identical to SEQ ID NO: 8321
  source 1..80: mol_type = other DNA

SEQ ID NO: 193052 - DNA, 80 bp, synthetic construct; identical to SEQ ID NO: 8322
  source 1..80: mol_type = other DNA

SEQ ID NO: 193053 - DNA, 80 bp, synthetic construct; identical to SEQ ID NO: 8323
  source 1..80: mol_type = other DNA

SEQ ID NO: 193054 - DNA, 80 bp, synthetic construct; identical to SEQ ID NO: 8324
  source 1..80: mol_type = other DNA

SEQ ID NO: 193055 - DNA, 80 bp, synthetic construct; identical to SEQ ID NO: 8325
  source 1..80: mol_type = other DNA

SEQ ID NO: 193056 - DNA, 80 bp, synthetic construct; identical to SEQ ID NO: 8326
  source 1..80: mol_type = other DNA

SEQ ID NO: 193057 - DNA, 80 bp, synthetic construct; identical to SEQ ID NO: 8327
  source 1..80: mol_type = other DNA

SEQ ID NO: 193058 - DNA, 80 bp, synthetic construct; identical to SEQ ID NO: 8328
  source 1..80: mol_type = other DNA

SEQ ID NO: 193059 - DNA, 80 bp, synthetic construct; identical to SEQ ID NO: 8329
  source 1..80: mol_type = other DNA

SEQ ID NO: 193060 - DNA, 80 bp, synthetic construct; identical to SEQ ID NO: 8330
  source 1..80: mol_type = other DNA

SEQ ID NO: 193061 - DNA, 80 bp, synthetic construct; identical to SEQ ID NO: 8331
  source 1..80: mol_type = other DNA

SEQ ID NO: 193062 - DNA, 80 bp, synthetic construct; identical to SEQ ID NO: 8332
  source 1..80: mol_type = other DNA

SEQ ID NO: 193063 - DNA, 80 bp, synthetic construct; identical to SEQ ID NO: 8333
  source 1..80: mol_type = other DNA

SEQ ID NO: 193064 - DNA, 80 bp, synthetic construct; identical to SEQ ID NO: 8334
  source 1..80: mol_type = other DNA

SEQ ID NO: 193065 - DNA, 80 bp, synthetic construct; identical to SEQ ID NO: 8335
  source 1..80: mol_type = other DNA

SEQ ID NO: 193066 - DNA, 80 bp, synthetic construct; identical to SEQ ID NO: 8336
  source 1..80: mol_type = other DNA

SEQ ID NO: 193067 - DNA, 80 bp, synthetic construct; identical to SEQ ID NO: 8337
  source 1..80: mol_type = other DNA

SEQ ID NO: 193068 - DNA, 80 bp, synthetic construct; identical to SEQ ID NO: 8338
  source 1..80: mol_type = other DNA

SEQ ID NO: 193069 - DNA, 80 bp, synthetic construct; identical to SEQ ID NO: 8339
  source 1..80: mol_type = other DNA

SEQ ID NO: 193070 - DNA, 80 bp, synthetic construct; identical to SEQ ID NO: 8340
  source 1..80: mol_type = other DNA

SEQ ID NO: 193071 - DNA, 80 bp, synthetic construct; identical to SEQ ID NO: 8341
  source 1..80: mol_type = other DNA

SEQ ID NO: 193072 - DNA, 80 bp, synthetic construct; identical to SEQ ID NO: 8342
  source 1..80: mol_type = other DNA

SEQ ID NO: 193073 - DNA, 80 bp, synthetic construct; identical to SEQ ID NO: 8343
  source 1..80: mol_type = other DNA

SEQ ID NO: 193074 - DNA, 80 bp, synthetic construct; identical to SEQ ID NO: 8344
  source 1..80: mol_type = other DNA

SEQ ID NO: 193075 - DNA, 80 bp, synthetic construct; identical to SEQ ID NO: 8345
  source 1..80: mol_type = other DNA

SEQ ID NO: 193076 - DNA, 80 bp, synthetic construct; identical to SEQ ID NO: 8346
  source 1..80: mol_type = other DNA

SEQ ID NO: 193077 - DNA, 80 bp, synthetic construct; identical to SEQ ID NO: 8347
  source 1..80: mol_type = other DNA

SEQ ID NO: 193078 - DNA, 80 bp, synthetic construct; identical to SEQ ID NO: 8348
  source 1..80: mol_type = other DNA

SEQ ID NO: 193079 - DNA, 80 bp, synthetic construct; identical to SEQ ID NO: 8349
  source 1..80: mol_type = other DNA

SEQ ID NO: 193080 - DNA, 80 bp, synthetic construct; identical to SEQ ID NO: 8350
  source 1..80: mol_type = other DNA

SEQ ID NO: 193081 - DNA, 80 bp, synthetic construct; identical to SEQ ID NO: 8351
  source 1..80: mol_type = other DNA

SEQ ID NO: 193082 - DNA, 80 bp, synthetic construct; identical to SEQ ID NO: 8352
  source 1..80: mol_type = other DNA

SEQ ID NO: 193083 - DNA, 80 bp, synthetic construct; identical to SEQ ID NO: 8353
  source 1..80: mol_type = other DNA

SEQ ID NO: 193084 - DNA, 80 bp, synthetic construct; identical to SEQ ID NO: 8354
  source 1..80: mol_type = other DNA

SEQ ID NO: 193085 - DNA, 80 bp, synthetic construct; identical to SEQ ID NO: 8355
  source 1..80: mol_type = other DNA

SEQ ID NO: 193086 - DNA, 80 bp, synthetic construct; identical to SEQ ID NO: 8356
  source 1..80: mol_type = other DNA

SEQ ID NO: 193087 - DNA, 80 bp, synthetic construct; identical to SEQ ID NO: 8357
  source 1..80: mol_type = other DNA

SEQ ID NO: 193088 - DNA, 80 bp, synthetic construct; identical to SEQ ID NO: 8358
  source 1..80: mol_type = other DNA

SEQ ID NO: 193089 - DNA, 80 bp, synthetic construct; identical to SEQ ID NO: 8359
  source 1..80: mol_type = other DNA

SEQ ID NO: 193090 - DNA, 80 bp, synthetic construct; identical to SEQ ID NO: 8360
  source 1..80: mol_type = other DNA

SEQ ID NO: 193091 - DNA, 80 bp, synthetic construct; identical to SEQ ID NO: 8361
  source 1..80: mol_type = other DNA

SEQ ID NO: 193092 - DNA, 80 bp, synthetic construct; identical to SEQ ID NO: 8362
  source 1..80: mol_type = other DNA

SEQ ID NO: 193093 - DNA, 80 bp, synthetic construct; identical to SEQ ID NO: 8363
  source 1..80: mol_type = other DNA

SEQ ID NO: 193094 - DNA, 80 bp, synthetic construct; identical to SEQ ID NO: 8364
  source 1..80: mol_type = other DNA

SEQ ID NO: 193095 - DNA, 80 bp, synthetic construct; identical to SEQ ID NO: 8365
  source 1..80: mol_type = other DNA

SEQ ID NO: 193096 - DNA, 80 bp, synthetic construct; identical to SEQ ID NO: 8366
  source 1..80: mol_type = other DNA

SEQ ID NO: 193097 - DNA, 80 bp, synthetic construct; identical to SEQ ID NO: 8367
  source 1..80: mol_type = other DNA

SEQ ID NO: 193098 - DNA, 80 bp, synthetic construct; identical to SEQ ID NO: 8368
  source 1..80: mol_type = other DNA

SEQ ID NO: 193099 - DNA, 80 bp, synthetic construct; identical to SEQ ID NO: 8369
  source 1..80: mol_type = other DNA

SEQ ID NO: 193100 - DNA, 80 bp, synthetic construct; identical to SEQ ID NO: 8370
  source 1..80: mol_type = other DNA

SEQ ID NO: 193101 - DNA, 80 bp, synthetic construct; identical to SEQ ID NO: 8371
  source 1..80: mol_type = other DNA

SEQ ID NO: 193102 - DNA, 80 bp, synthetic construct; identical to SEQ ID NO: 8372
  source 1..80: mol_type = other DNA

SEQ ID NO: 193103 - DNA, 80 bp, synthetic construct; identical to SEQ ID NO: 8373
  source 1..80: mol_type = other DNA

SEQ ID NO: 193104 - DNA, 80 bp, synthetic construct; identical to SEQ ID NO: 8374
  source 1..80: mol_type = other DNA

SEQ ID NO: 193105 - DNA, 80 bp, synthetic construct; identical to SEQ ID NO: 8375
  source 1..80: mol_type = other DNA

SEQ ID NO: 193106 - DNA, 80 bp, synthetic construct; identical to SEQ ID NO: 8376
  source 1..80: mol_type = other DNA

SEQ ID NO: 193107 - DNA, 80 bp, synthetic construct; identical to SEQ ID NO: 8377
  source 1..80: mol_type = other DNA

SEQ ID NO: 193108 - DNA, 80 bp, synthetic construct; identical to SEQ ID NO: 8378
  source 1..80: mol_type = other DNA

SEQ ID NO: 193109 - DNA, 80 bp, synthetic construct; identical to SEQ ID NO: 8379
  source 1..80: mol_type = other DNA

SEQ ID NO: 193110 - DNA, 80 bp, synthetic construct; identical to SEQ ID NO: 8380
  source 1..80: mol_type = other DNA

SEQ ID NO: 193111 - DNA, 80 bp, synthetic construct; identical to SEQ ID NO: 8381
  source 1..80: mol_type = other DNA

SEQ ID NO: 193112 - DNA, 80 bp, synthetic construct; identical to SEQ ID NO: 8382
  source 1..80: mol_type = other DNA

SEQ ID NO: 193113 - DNA, 80 bp, synthetic construct; identical to SEQ ID NO: 8383
  source 1..80: mol_type = other DNA

SEQ ID NO: 193114 - DNA, 80 bp, synthetic construct; identical to SEQ ID NO: 8384
  source 1..80: mol_type = other DNA

SEQ ID NO: 193115 - DNA, 80 bp, synthetic construct; identical to SEQ ID NO: 8385
  source 1..80: mol_type = other DNA

SEQ ID NO: 193116 - DNA, 80 bp, synthetic construct; identical to SEQ ID NO: 8386
  source 1..80: mol_type = other DNA

SEQ ID NO: 193117 - DNA, 80 bp, synthetic construct; identical to SEQ ID NO: 8387
  source 1..80: mol_type = other DNA

SEQ ID NO: 193118 - DNA, 80 bp, synthetic construct; identical to SEQ ID NO: 8388
  source 1..80: mol_type = other DNA

SEQ ID NO: 193119 - DNA, 80 bp, synthetic construct; identical to SEQ ID NO: 8389
  source 1..80: mol_type = other DNA

SEQ ID NO: 193120 - DNA, 80 bp, synthetic construct; identical to SEQ ID NO: 8390
  source 1..80: mol_type = other DNA

SEQ ID NO: 193121 - DNA, 80 bp, synthetic construct; identical to SEQ ID NO: 8391
  source 1..80: mol_type = other DNA

SEQ ID NO: 193122 - DNA, 80 bp, synthetic construct; identical to SEQ ID NO: 8392
  source 1..80: mol_type = other DNA

SEQ ID NO: 193123 - DNA, 80 bp, synthetic construct; identical to SEQ ID NO: 8393
  source 1..80: mol_type = other DNA

SEQ ID NO: 193124 - DNA, 80 bp, synthetic construct; identical to SEQ ID NO: 8394
  source 1..80: mol_type = other DNA

SEQ ID NO: 193125 - DNA, 80 bp, synthetic construct; identical to SEQ ID NO: 8395
  source 1..80: mol_type = other DNA

SEQ ID NO: 193126 - DNA, 80 bp, synthetic construct; identical to SEQ ID NO: 8396
  source 1..80: mol_type = other DNA

SEQ ID NO: 193127 - DNA, 80 bp, synthetic construct; identical to SEQ ID NO: 8397
  source 1..80: mol_type = other DNA

SEQ ID NO: 193128 - DNA, 80 bp, synthetic construct; identical to SEQ ID NO: 8398
  source 1..80: mol_type = other DNA

SEQ ID NO: 193129 - DNA, 80 bp, synthetic construct; identical to SEQ ID NO: 8399
  source 1..80: mol_type = other DNA

SEQ ID NO: 193130 - DNA, 80 bp, synthetic construct; identical to SEQ ID NO: 8400
  source 1..80: mol_type = other DNA

SEQ ID NO: 193131 - DNA, 80 bp, synthetic construct; identical to SEQ ID NO: 8401
  source 1..80: mol_type = other DNA

SEQ ID NO: 193132 - DNA, 80 bp, synthetic construct; identical to SEQ ID NO: 8402
  source 1..80: mol_type = other DNA

SEQ ID NO: 193133 - DNA, 80 bp, synthetic construct; identical to SEQ ID NO: 8403
  source 1..80: mol_type = other DNA

SEQ ID NO: 193134 - DNA, 80 bp, synthetic construct; identical to SEQ ID NO: 8404
  source 1..80: mol_type = other DNA

SEQ ID NO: 193135 - DNA, 80 bp, synthetic construct; identical to SEQ ID NO: 8405
  source 1..80: mol_type = other DNA

SEQ ID NO: 193136 - DNA, 80 bp, synthetic construct; identical to SEQ ID NO: 8406
  source 1..80: mol_type = other DNA

SEQ ID NO: 193137 - DNA, 80 bp, synthetic construct; identical to SEQ ID NO: 8407
  source 1..80: mol_type = other DNA

SEQ ID NO: 193138 - DNA, 80 bp, synthetic construct; identical to SEQ ID NO: 8408
  source 1..80: mol_type = other DNA

SEQ ID NO: 193139 - DNA, 80 bp, synthetic construct; identical to SEQ ID NO: 8409
  source 1..80: mol_type = other DNA

SEQ ID NO: 193140 - DNA, 80 bp, synthetic construct; identical to SEQ ID NO: 8410
  source 1..80: mol_type = other DNA

SEQ ID NO: 193141 - DNA, 80 bp, synthetic construct; identical to SEQ ID NO: 8411
  source 1..80: mol_type = other DNA

SEQ ID NO: 193142 - DNA, 80 bp, synthetic construct; identical to SEQ ID NO: 8412
  source 1..80: mol_type = other DNA

SEQ ID NO: 193143 - DNA, 80 bp, synthetic construct; identical to SEQ ID NO: 8413
  source 1..80: mol_type = other DNA

SEQ ID NO: 193144 - DNA, 80 bp, synthetic construct; identical to SEQ ID NO: 8414
  source 1..80: mol_type = other DNA

SEQ ID NO: 193145 - DNA, 80 bp, synthetic construct; identical to SEQ ID NO: 8415
  source 1..80: mol_type = other DNA

SEQ ID NO: 193146 - DNA, 80 bp, synthetic construct; identical to SEQ ID NO: 8416
  source 1..80: mol_type = other DNA

SEQ ID NO: 193147 - DNA, 80 bp, synthetic construct; identical to SEQ ID NO: 8417
  source 1..80: mol_type = other DNA

SEQ ID NO: 193148 - DNA, 80 bp, synthetic construct; identical to SEQ ID NO: 8418
  source 1..80: mol_type = other DNA

SEQ ID NO: 193149 - DNA, 80 bp, synthetic construct; identical to SEQ ID NO: 8419
  source 1..80: mol_type = other DNA

SEQ ID NO: 193150 - DNA, 80 bp, synthetic construct; identical to SEQ ID NO: 8420
  source 1..80: mol_type = other DNA

SEQ ID NO: 193151 - DNA, 80 bp, synthetic construct; identical to SEQ ID NO: 8421
  source 1..80: mol_type = other DNA

SEQ ID NO: 193152 - DNA, 80 bp, synthetic construct; identical to SEQ ID NO: 8422
  source 1..80: mol_type = other DNA

SEQ ID NO: 193153 - DNA, 80 bp, synthetic construct; identical to SEQ ID NO: 8423
  source 1..80: mol_type = other DNA

SEQ ID NO: 193154 - DNA, 80 bp, synthetic construct; identical to SEQ ID NO: 8424
  source 1..80: mol_type = other DNA

SEQ ID NO: 193155 - DNA, 80 bp, synthetic construct; identical to SEQ ID NO: 8425
  source 1..80: mol_type = other DNA

SEQ ID NO: 193156 - DNA, 80 bp, synthetic construct; identical to SEQ ID NO: 8426
  source 1..80: mol_type = other DNA

SEQ ID NO: 193157 - DNA, 80 bp, synthetic construct; identical to SEQ ID NO: 8427
  source 1..80: mol_type = other DNA

SEQ ID NO: 193158 - DNA, 80 bp, synthetic construct; identical to SEQ ID NO: 8428
  source 1..80: mol_type = other DNA

SEQ ID NO: 193159 - DNA, 80 bp, synthetic construct; identical to SEQ ID NO: 8429
  source 1..80: mol_type = other DNA

SEQ ID NO: 193160 - DNA, 80 bp, synthetic construct; identical to SEQ ID NO: 8430
  source 1..80: mol_type = other DNA

SEQ ID NO: 193161 - DNA, 80 bp, synthetic construct; identical to SEQ ID NO: 8431
  source 1..80: mol_type = other DNA

SEQ ID NO: 193162 - DNA, 80 bp, synthetic construct; identical to SEQ ID NO: 8432
  source 1..80: mol_type = other DNA

SEQ ID NO: 193163 - DNA, 80 bp, synthetic construct; identical to SEQ ID NO: 8433
  source 1..80: mol_type = other DNA

SEQ ID NO: 193164 - DNA, 80 bp, synthetic construct; identical to SEQ ID NO: 8434
  source 1..80: mol_type = other DNA

SEQ ID NO: 193165 - DNA, 80 bp, synthetic construct; identical to SEQ ID NO: 8435
  source 1..80: mol_type = other DNA

SEQ ID NO: 193166 - DNA, 80 bp, synthetic construct; identical to SEQ ID NO: 8436
  source 1..80: mol_type = other DNA

SEQ ID NO: 193167 - DNA, 80 bp, synthetic construct; identical to SEQ ID NO: 8437
  source 1..80: mol_type = other DNA

SEQ ID NO: 193168 - DNA, 80 bp, synthetic construct; identical to SEQ ID NO: 8438
  source 1..80: mol_type = other DNA

SEQ ID NO: 193169 - DNA, 80 bp, synthetic construct; identical to SEQ ID NO: 8439
  source 1..80: mol_type = other DNA

SEQ ID NO: 193170 - DNA, 80 bp, synthetic construct; identical to SEQ ID NO: 8440
  source 1..80: mol_type = other DNA

SEQ ID NO: 193171 - DNA, 80 bp, synthetic construct; identical to SEQ ID NO: 8441
  source 1..80: mol_type = other DNA

SEQ ID NO: 193172 - DNA, 80 bp, synthetic construct; identical to SEQ ID NO: 8442
  source 1..80: mol_type = other DNA

SEQ ID NO: 193173 - DNA, 80 bp, synthetic construct; identical to SEQ ID NO: 8443
  source 1..80: mol_type = other DNA

SEQ ID NO: 193174 - DNA, 80 bp, synthetic construct; identical to SEQ ID NO: 8444
  source 1..80: mol_type = other DNA

SEQ ID NO: 193175 - DNA, 80 bp, synthetic construct; identical to SEQ ID NO: 8445
  source 1..80: mol_type = other DNA

SEQ ID NO: 193176 - DNA, 80 bp, synthetic construct; identical to SEQ ID NO: 8446
  source 1..80: mol_type = other DNA

SEQ ID NO: 193177 - DNA, 80 bp, synthetic construct; identical to SEQ ID NO: 8447
  source 1..80: mol_type = other DNA

SEQ ID NO: 193178 - DNA, 80 bp, synthetic construct; identical to SEQ ID NO: 8448
  source 1..80: mol_type = other DNA

SEQ ID NO: 193179 - DNA, 80 bp, synthetic construct; identical to SEQ ID NO: 8449
  source 1..80: mol_type = other DNA

SEQ ID NO: 193180 - DNA, 80 bp, synthetic construct; identical to SEQ ID NO: 8450
  source 1..80: mol_type = other DNA

SEQ ID NO: 193181 - DNA, 80 bp, synthetic construct; identical to SEQ ID NO: 8451
  source 1..80: mol_type = other DNA

SEQ ID NO: 193182 - DNA, 80 bp, synthetic construct; identical to SEQ ID NO: 8452
  source 1..80: mol_type = other DNA

SEQ ID NO: 193183 - DNA, 80 bp, synthetic construct; identical to SEQ ID NO: 8453
  source 1..80: mol_type = other DNA

SEQ ID NO: 193184 - DNA, 80 bp, synthetic construct; identical to SEQ ID NO: 8454
  source 1..80: mol_type = other DNA

SEQ ID NO: 193185 - DNA, 80 bp, synthetic construct; identical to SEQ ID NO: 8455
  source 1..80: mol_type = other DNA

SEQ ID NO: 193186 - DNA, 80 bp, synthetic construct; identical to SEQ ID NO: 8456
  source 1..80: mol_type = other DNA

SEQ ID NO: 193187 - DNA, 80 bp, synthetic construct; identical to SEQ ID NO: 8457
  source 1..80: mol_type = other DNA

SEQ ID NO: 193188 - DNA, 80 bp, synthetic construct; identical to SEQ ID NO: 8458
  source 1..80: mol_type = other DNA

SEQ ID NO: 193189 - DNA, 80 bp, synthetic construct; identical to SEQ ID NO: 8459
  source 1..80: mol_type = other DNA

SEQ ID NO: 193190 - DNA, 80 bp, synthetic construct; identical to SEQ ID NO: 8460
  source 1..80: mol_type = other DNA

SEQ ID NO: 193191 - DNA, 80 bp, synthetic construct; identical to SEQ ID NO: 8461
  source 1..80: mol_type = other DNA

SEQ ID NO: 193192 - DNA, 80 bp, synthetic construct; identical to SEQ ID NO: 8462
  source 1..80: mol_type = other DNA

SEQ ID NO: 193193 - DNA, 80 bp, synthetic construct; identical to SEQ ID NO: 8463
  source 1..80: mol_type = other DNA

SEQ ID NO: 193194 - DNA, 80 bp, synthetic construct; identical to SEQ ID NO: 8464
  source 1..80: mol_type = other DNA

SEQ ID NO: 193195 - DNA, 80 bp, synthetic construct; identical to SEQ ID NO: 8465
  source 1..80: mol_type = other DNA

SEQ ID NO: 193196 - DNA, 80 bp, synthetic construct; identical to SEQ ID NO: 8466
  source 1..80: mol_type = other DNA

SEQ ID NO: 193197 - DNA, 80 bp, synthetic construct; identical to SEQ ID NO: 8467
  source 1..80: mol_type = other DNA

SEQ ID NO: 193198 - DNA, 80 bp, synthetic construct; identical to SEQ ID NO: 8468
  source 1..80: mol_type = other DNA

SEQ ID NO: 193199 - DNA, 80 bp, synthetic construct; identical to SEQ ID NO: 8469
  source 1..80: mol_type = other DNA

SEQ ID NO: 193200 - DNA, 80 bp, synthetic construct; identical to SEQ ID NO: 8470
  source 1..80: mol_type = other DNA

SEQ ID NO: 193201 - DNA, 80 bp, synthetic construct; identical to SEQ ID NO: 8471
  source 1..80: mol_type = other DNA

SEQ ID NO: 193202 - DNA, 80 bp, synthetic construct; identical to SEQ ID NO: 8472
  source 1..80: mol_type = other DNA

SEQ ID NO: 193203 - DNA, 80 bp, synthetic construct; identical to SEQ ID NO: 8473
  source 1..80: mol_type = other DNA

SEQ ID NO: 193204 - DNA, 80 bp, synthetic construct; identical to SEQ ID NO: 8474
  source 1..80: mol_type = other DNA

SEQ ID NO: 193205 - DNA, 80 bp, synthetic construct; identical to SEQ ID NO: 8475
  source 1..80: mol_type = other DNA

SEQ ID NO: 193206 - DNA, 80 bp, synthetic construct; identical to SEQ ID NO: 8476
  source 1..80: mol_type = other DNA

SEQ ID NO: 193207 - DNA, 80 bp, synthetic construct; identical to SEQ ID NO: 8477
  source 1..80: mol_type = other DNA

SEQ ID NO: 193208 - DNA, 80 bp, synthetic construct; identical to SEQ ID NO: 8478
  source 1..80: mol_type = other DNA

SEQ ID NO: 193209 - DNA, 80 bp, synthetic construct; identical to SEQ ID NO: 8479
  source 1..80: mol_type = other DNA

SEQ ID NO: 193210 - DNA, 80 bp, synthetic construct; identical to SEQ ID NO: 8480
  source 1..80: mol_type = other DNA

SEQ ID NO: 193211 - DNA, 80 bp, synthetic construct; identical to SEQ ID NO: 8481
  source 1..80: mol_type = other DNA

SEQ ID NO: 193212 - DNA, 80 bp, synthetic construct; identical to SEQ ID NO: 8482
  source 1..80: mol_type = other DNA

SEQ ID NO: 193213 - DNA, 80 bp, synthetic construct; identical to SEQ ID NO: 8483
  source 1..80: mol_type = other DNA

SEQ ID NO: 193214 - DNA, 80 bp, synthetic construct; identical to SEQ ID NO: 8484
  source 1..80: mol_type = other DNA

SEQ ID NO: 193215 - DNA, 80 bp, synthetic construct; identical to SEQ ID NO: 8485
  source 1..80: mol_type = other DNA

SEQ ID NO: 193216 - DNA, 80 bp, synthetic construct; identical to SEQ ID NO: 8486
  source 1..80: mol_type = other DNA

SEQ ID NO: 193217 - DNA, 80 bp, synthetic construct; identical to SEQ ID NO: 8487
  source 1..80: mol_type = other DNA

SEQ ID NO: 193218 - DNA, 80 bp, synthetic construct; identical to SEQ ID NO: 8488
  source 1..80: mol_type = other DNA

SEQ ID NO: 193219 - DNA, 80 bp, synthetic construct; identical to SEQ ID NO: 8489
  source 1..80: mol_type = other DNA

SEQ ID NO: 193220 - DNA, 80 bp, synthetic construct; identical to SEQ ID NO: 8490
  source 1..80: mol_type = other DNA

SEQ ID NO: 193221 - DNA, 80 bp, synthetic construct; identical to SEQ ID NO: 8491
  source 1..80: mol_type = other DNA

SEQ ID NO: 193222 - DNA, 80 bp, synthetic construct; identical to SEQ ID NO: 8492
  source 1..80: mol_type = other DNA

SEQ ID NO: 193223 - DNA, 80 bp, synthetic construct; identical to SEQ ID NO: 8493
  source 1..80: mol_type = other DNA

SEQ ID NO: 193224 - DNA, 80 bp, synthetic construct; identical to SEQ ID NO: 8494
  source 1..80: mol_type = other DNA

SEQ ID NO: 193225 - DNA, 80 bp, synthetic construct; identical to SEQ ID NO: 8495
  source 1..80: mol_type = other DNA

SEQ ID NO: 193226 - DNA, 80 bp, synthetic construct; identical to SEQ ID NO: 8496
  source 1..80: mol_type = other DNA

SEQ ID NO: 193227 - DNA, 80 bp, synthetic construct; identical to SEQ ID NO: 8497
  source 1..80: mol_type = other DNA

SEQ ID NO: 193228 - DNA, 80 bp, synthetic construct; identical to SEQ ID NO: 8498
  source 1..80: mol_type = other DNA

SEQ ID NO: 193229 - DNA, 80 bp, synthetic construct; identical to SEQ ID NO: 8499
  source 1..80: mol_type = other DNA

SEQ ID NO: 193230 - DNA, 80 bp, synthetic construct; identical to SEQ ID NO: 8500
  source 1..80: mol_type = other DNA

SEQ ID NO: 193231 - DNA, 80 bp, synthetic construct; identical to SEQ ID NO: 8501
  source 1..80: mol_type = other DNA

SEQ ID NO: 193232 - DNA, 80 bp, synthetic construct; identical to SEQ ID NO: 8502
  source 1..80: mol_type = other DNA

SEQ ID NO: 193233 - DNA, 80 bp, synthetic construct; identical to SEQ ID NO: 8503
  source 1..80: mol_type = other DNA

SEQ ID NO: 193234 - DNA, 80 bp, synthetic construct; identical to SEQ ID NO: 8504
  source 1..80: mol_type = other DNA

SEQ ID NO: 193235 - DNA, 80 bp, synthetic construct; identical to SEQ ID NO: 8505
  source 1..80: mol_type = other DNA

SEQ ID NO: 193236 - DNA, 80 bp, synthetic construct; identical to SEQ ID NO: 8506
  source 1..80: mol_type = other DNA

SEQ ID NO: 193237 - DNA, 80 bp, synthetic construct; identical to SEQ ID NO: 8507
  source 1..80: mol_type = other DNA

SEQ ID NO: 193238 - DNA, 80 bp, synthetic construct; identical to SEQ ID NO: 8508
  source 1..80: mol_type = other DNA

SEQ ID NO: 193239 - DNA, 80 bp, synthetic construct; identical to SEQ ID NO: 8509
  source 1..80: mol_type = other DNA

SEQ ID NO: 193240 - DNA, 80 bp, synthetic construct; identical to SEQ ID NO: 8510
  source 1..80: mol_type = other DNA

SEQ ID NO: 193241 - DNA, 80 bp, synthetic construct; identical to SEQ ID NO: 8511
  source 1..80: mol_type = other DNA

SEQ ID NO: 193242 - DNA, 80 bp, synthetic construct; identical to SEQ ID NO: 8512
  source 1..80: mol_type = other DNA

SEQ ID NO: 193243 - DNA, 80 bp, synthetic construct; identical to SEQ ID NO: 8513
  source 1..80: mol_type = other DNA

SEQ ID NO: 193244 - DNA, 80 bp, synthetic construct; identical to SEQ ID NO: 8514
  source 1..80: mol_type = other DNA

SEQ ID NO: 193245 - DNA, 80 bp, synthetic construct; identical to SEQ ID NO: 8515
  source 1..80: mol_type = other DNA

SEQ ID NO: 193246 - DNA, 80 bp, synthetic construct; identical to SEQ ID NO: 8516
  source 1..80: mol_type = other DNA

SEQ ID NO: 193247 - DNA, 80 bp, synthetic construct; identical to SEQ ID NO: 8517
  source 1..80: mol_type = other DNA

SEQ ID NO: 193248 - DNA, 80 bp, synthetic construct; identical to SEQ ID NO: 8518
  source 1..80: mol_type = other DNA

SEQ ID NO: 193249 - DNA, 80 bp, synthetic construct; identical to SEQ ID NO: 8519
  source 1..80: mol_type = other DNA

SEQ ID NO: 193250 - DNA, 80 bp, synthetic construct; identical to SEQ ID NO: 8520
  source 1..80: mol_type = other DNA

SEQ ID NO: 193251 - DNA, 80 bp, synthetic construct; identical to SEQ ID NO: 8521
  source 1..80: mol_type = other DNA

SEQ ID NO: 193252 - DNA, 80 bp, synthetic construct; identical to SEQ ID NO: 8522
  source 1..80: mol_type = other DNA

SEQ ID NO: 193253 - DNA, 80 bp, synthetic construct; identical to SEQ ID NO: 8523
  source 1..80: mol_type = other DNA

SEQ ID NO: 193254 - DNA, 80 bp, synthetic construct; identical to SEQ ID NO: 8524
  source 1..80: mol_type = other DNA

SEQ ID NO: 193255 - DNA, 80 bp, synthetic construct; identical to SEQ ID NO: 8525
  source 1..80: mol_type = other DNA

SEQ ID NO: 193256 - DNA, 80 bp, synthetic construct; identical to SEQ ID NO: 8526
  source 1..80: mol_type = other DNA

SEQ ID NO: 193257 - DNA, 80 bp, synthetic construct; identical to SEQ ID NO: 8527
  source 1..80: mol_type = other DNA

SEQ ID NO: 193258 - DNA, 80 bp, synthetic construct; identical to SEQ ID NO: 8528
  source 1..80: mol_type = other DNA

SEQ ID NO: 193259 - DNA, 80 bp, synthetic construct; identical to SEQ ID NO: 8529
  source 1..80: mol_type = other DNA

SEQ ID NO: 193260 - DNA, 80 bp, synthetic construct; identical to SEQ ID NO: 8530
  source 1..80: mol_type = other DNA

SEQ ID NO: 193261 - DNA, 80 bp, synthetic construct; identical to SEQ ID NO: 8531
  source 1..80: mol_type = other DNA

SEQ ID NO: 193262 - DNA, 80 bp, synthetic construct; identical to SEQ ID NO: 8532
  source 1..80: mol_type = other DNA

SEQ ID NO: 193263 - DNA, 80 bp, synthetic construct; identical to SEQ ID NO: 8533
  source 1..80: mol_type = other DNA

SEQ ID NO: 193264 - DNA, 80 bp, synthetic construct; identical to SEQ ID NO: 8534
  source 1..80: mol_type = other DNA

SEQ ID NO: 193265 - DNA, 80 bp, synthetic construct; identical to SEQ ID NO: 8535
  source 1..80: mol_type = other DNA

SEQ ID NO: 193266 - DNA, 80 bp, synthetic construct; identical to SEQ ID NO: 8536
  source 1..80: mol_type = other DNA

SEQ ID NO: 193267 - DNA, 80 bp, synthetic construct; identical to SEQ ID NO: 8537
  source 1..80: mol_type = other DNA

SEQ ID NO: 193268 - DNA, 80 bp, synthetic construct; identical to SEQ ID NO: 8538
  source 1..80: mol_type = other DNA

SEQ ID NO: 193269 - DNA, 80 bp, synthetic construct; identical to SEQ ID NO: 8539
  source 1..80: mol_type = other DNA

SEQ ID NO: 193270 - DNA, 80 bp, synthetic construct; identical to SEQ ID NO: 8540
  source 1..80: mol_type = other DNA

SEQ ID NO: 193271 - DNA, 80 bp, synthetic construct; identical to SEQ ID NO: 8541
  source 1..80: mol_type = other DNA

SEQ ID NO: 193272 - DNA, 80 bp, synthetic construct; identical to SEQ ID NO: 8542
  source 1..80: mol_type = other DNA

SEQ ID NO: 193273 - DNA, 80 bp, synthetic construct; identical to SEQ ID NO: 8543
  source 1..80: mol_type = other DNA

SEQ ID NO: 193274 - DNA, 80 bp, synthetic construct; identical to SEQ ID NO: 8544
  source 1..80: mol_type = other DNA

SEQ ID NO: 193275 - DNA, 80 bp, synthetic construct; identical to SEQ ID NO: 8545
  source 1..80: mol_type = other DNA

SEQ ID NO: 193276 - DNA, 80 bp, synthetic construct; identical to SEQ ID NO: 8546
  source 1..80: mol_type = other DNA

SEQ ID NO: 193277 - DNA, 80 bp, synthetic construct; identical to SEQ ID NO: 8547
  source 1..80: mol_type = other DNA

SEQ ID NO: 193278 - DNA, 80 bp, synthetic construct; identical to SEQ ID NO: 8548
  source 1..80: mol_type = other DNA

SEQ ID NO: 193279 - DNA, 80 bp, synthetic construct; identical to SEQ ID NO: 8549
  source 1..80: mol_type = other DNA

SEQ ID NO: 193280 - DNA, 80 bp, synthetic construct; identical to SEQ ID NO: 8550
  source 1..80: mol_type = other DNA

SEQ ID NO: 193281 - DNA, 80 bp, synthetic construct; identical to SEQ ID NO: 8551
  source 1..80: mol_type = other DNA

SEQ ID NO: 193282 - DNA, 80 bp, synthetic construct; identical to SEQ ID NO: 8552
  source 1..80: mol_type = other DNA

SEQ ID NO: 193283 - DNA, 80 bp, synthetic construct; identical to SEQ ID NO: 8553
  source 1..80: mol_type = other DNA

SEQ ID NO: 193284 - DNA, 80 bp, synthetic construct; identical to SEQ ID NO: 8554
  source 1..80: mol_type = other DNA

SEQ ID NO: 193285 - DNA, 80 bp, synthetic construct; identical to SEQ ID NO: 8555
  source 1..80: mol_type = other DNA

SEQ ID NO: 193286 - DNA, 80 bp, synthetic construct; identical to SEQ ID NO: 8556
  source 1..80: mol_type = other DNA

SEQ ID NO: 193287 - DNA, 80 bp, synthetic construct; identical to SEQ ID NO: 8557
  source 1..80: mol_type = other DNA

SEQ ID NO: 193288 - DNA, 80 bp, synthetic construct; identical to SEQ ID NO: 8558
  source 1..80: mol_type = other DNA

SEQ ID NO: 193289 - DNA, 80 bp, synthetic construct; identical to SEQ ID NO: 8559
  source 1..80: mol_type = other DNA

SEQ ID NO: 193290 - DNA, 80 bp, synthetic construct; identical to SEQ ID NO: 8560
  source 1..80: mol_type = other DNA

SEQ ID NO: 193291 - DNA, 80 bp, synthetic construct; identical to SEQ ID NO: 8561
  source 1..80: mol_type = other DNA

SEQ ID NO: 193292 - DNA, 80 bp, synthetic construct; identical to SEQ ID NO: 8562
  source 1..80: mol_type = other DNA

SEQ ID NO: 193293 - DNA, 80 bp, synthetic construct; identical to SEQ ID NO: 8563
  source 1..80: mol_type = other DNA

SEQ ID NO: 193294 - DNA, 80 bp, synthetic construct; identical to SEQ ID NO: 8564
  source 1..80: mol_type = other DNA

SEQ ID NO: 193295 - DNA, 80 bp, synthetic construct; identical to SEQ ID NO: 8565
  source 1..80: mol_type = other DNA

SEQ ID NO: 193296 - DNA, 80 bp, synthetic construct; identical to SEQ ID NO: 8566
  source 1..80: mol_type = other DNA

SEQ ID NO: 193297 - DNA, 80 bp, synthetic construct; identical to SEQ ID NO: 8567
  source 1..80: mol_type = other DNA

SEQ ID NO: 193298 - DNA, 80 bp, synthetic construct; identical to SEQ ID NO: 8568
  source 1..80: mol_type = other DNA

SEQ ID NO: 193299 - DNA, 80 bp, synthetic construct; identical to SEQ ID NO: 8569
  source 1..80: mol_type = other DNA

SEQ ID NO: 193300 - DNA, 80 bp, synthetic construct; identical to SEQ ID NO: 8570
  source 1..80: mol_type = other DNA

SEQ ID NO: 193301 - DNA, 80 bp, synthetic construct; identical to SEQ ID NO: 8571
  source 1..80: mol_type = other DNA

SEQ ID NO: 193302 - DNA, 80 bp, synthetic construct; identical to SEQ ID NO: 8572
  source 1..80: mol_type = other DNA

SEQ ID NO: 193303 - DNA, 80 bp, synthetic construct; identical to SEQ ID NO: 8573
  source 1..80: mol_type = other DNA

SEQ ID NO: 193304 - DNA, 80 bp, synthetic construct; identical to SEQ ID NO: 8574
  source 1..80: mol_type = other DNA

SEQ ID NO: 193305 - DNA, 80 bp, synthetic construct; identical to SEQ ID NO: 8575
  source 1..80: mol_type = other DNA

SEQ ID NO: 193306 - DNA, 80 bp, synthetic construct; identical to SEQ ID NO: 8576
  source 1..80: mol_type = other DNA

SEQ ID NO: 193307 - DNA, 80 bp, synthetic construct; identical to SEQ ID NO: 8577
  source 1..80: mol_type = other DNA

SEQ ID NO: 193308 - DNA, 80 bp, synthetic construct; identical to SEQ ID NO: 8578
  source 1..80: mol_type = other DNA

SEQ ID NO: 193309 - DNA, 80 bp, synthetic construct; identical to SEQ ID NO: 8579
  source 1..80: mol_type = other DNA

SEQ ID NO: 193310 - DNA, 80 bp, synthetic construct; identical to SEQ ID NO: 8580
  source 1..80: mol_type = other DNA

SEQ ID NO: 193311 - DNA, 80 bp, synthetic construct; identical to SEQ ID NO: 8581
  source 1..80: mol_type = other DNA

SEQ ID NO: 193312 - DNA, 80 bp, synthetic construct; identical to SEQ ID NO: 8582
  source 1..80: mol_type = other DNA

SEQ ID NO: 193313 - DNA, 80 bp, synthetic construct; identical to SEQ ID NO: 8583
  source 1..80: mol_type = other DNA

SEQ ID NO: 193314 - DNA, 80 bp, synthetic construct; identical to SEQ ID NO: 8584
  source 1..80: mol_type = other DNA

SEQ ID NO: 193315 - DNA, 80 bp, synthetic construct; identical to SEQ ID NO: 8585
  source 1..80: mol_type = other DNA

SEQ ID NO: 193316 - DNA, 80 bp, synthetic construct; identical to SEQ ID NO: 8586
  source 1..80: mol_type = other DNA

SEQ ID NO: 193317 - DNA, 80 bp, synthetic construct; identical to SEQ ID NO: 8587
  source 1..80: mol_type = other DNA

SEQ ID NO: 193318 - DNA, 80 bp, synthetic construct; identical to SEQ ID NO: 8588
  source 1..80: mol_type = other DNA

SEQ ID NO: 193319 - DNA, 80 bp, synthetic construct; identical to SEQ ID NO: 8589
  source 1..80: mol_type = other DNA

SEQ ID NO: 193320 - DNA, 80 bp, synthetic construct; identical to SEQ ID NO: 8590
  source 1..80: mol_type = other DNA

SEQ ID NO: 193321 - DNA, 80 bp, synthetic construct; identical to SEQ ID NO: 8591
  source 1..80: mol_type = other DNA

SEQ ID NO: 193322 - DNA, 80 bp, synthetic construct; identical to SEQ ID NO: 8592
  source 1..80: mol_type = other DNA

SEQ ID NO: 193323 - DNA, 80 bp, synthetic construct; identical to SEQ ID NO: 8593
  source 1..80: mol_type = other DNA

SEQ ID NO: 193324 - DNA, 80 bp, synthetic construct; identical to SEQ ID NO: 8594
  source 1..80: mol_type = other DNA

SEQ ID NO: 193325 - DNA, 80 bp, synthetic construct; identical to SEQ ID NO: 8595
  source 1..80: mol_type = other DNA

SEQ ID NO: 193326 - DNA, 80 bp, synthetic construct; identical to SEQ ID NO: 8596
  source 1..80: mol_type = other DNA

SEQ ID NO: 193327 - DNA, 80 bp, synthetic construct; identical to SEQ ID NO: 8597
  source 1..80: mol_type = other DNA

SEQ ID NO: 193328 - DNA, 80 bp, synthetic construct; identical to SEQ ID NO: 8598
  source 1..80: mol_type = other DNA

SEQ ID NO: 193329 - DNA, 80 bp, synthetic construct; identical to SEQ ID NO: 8599
  source 1..80: mol_type = other DNA

SEQ ID NO: 193330 - DNA, 80 bp, synthetic construct; identical to SEQ ID NO: 8600
  source 1..80: mol_type = other DNA

SEQ ID NO: 193331 - DNA, 80 bp, synthetic construct; identical to SEQ ID NO: 8601
  source 1..80: mol_type = other DNA

SEQ ID NO: 193332 - DNA, 80 bp, synthetic construct; identical to SEQ ID NO: 8602
  source 1..80: mol_type = other DNA

SEQ ID NO: 193333 - DNA, 80 bp, synthetic construct; identical to SEQ ID NO: 8603
  source 1..80: mol_type = other DNA

SEQ ID NO: 193334 - DNA, 80 bp, synthetic construct; identical to SEQ ID NO: 8604
  source 1..80: mol_type = other DNA

SEQ ID NO: 193335 - DNA, 80 bp, synthetic construct; identical to SEQ ID NO: 8605
  source 1..80: mol_type = other DNA

SEQ ID NO: 193336 - DNA, 80 bp, synthetic construct; identical to SEQ ID NO: 8606
  source 1..80: mol_type = other DNA

SEQ ID NO: 193337 - DNA, 80 bp, synthetic construct; identical to SEQ ID NO: 8607
  source 1..80: mol_type = other DNA

SEQ ID NO: 193338 - DNA, 80 bp, synthetic construct; identical to SEQ ID NO: 8608
  source 1..80: mol_type = other DNA

SEQ ID NO: 193339 - DNA, 80 bp, synthetic construct; identical to SEQ ID NO: 8609
  source 1..80: mol_type = other DNA

SEQ ID NO: 193340 - DNA, 80 bp, synthetic construct; identical to SEQ ID NO: 8610
  source 1..80: mol_type = other DNA

SEQ ID NO: 193341 - DNA, 80 bp, synthetic construct; identical to SEQ ID NO: 8611
  source 1..80: mol_type = other DNA

SEQ ID NO: 193342 - DNA, 80 bp, synthetic construct; identical to SEQ ID NO: 8612
  source 1..80: mol_type = other DNA

SEQ ID NO: 193343 - DNA, 80 bp, synthetic construct; identical to SEQ ID NO: 8613
  source 1..80: mol_type = other DNA

SEQ ID NO: 193344 - DNA, 80 bp, synthetic construct; identical to SEQ ID NO: 8614
  source 1..80: mol_type = other DNA

SEQ ID NO: 193345 - DNA, 80 bp, synthetic construct; identical to SEQ ID NO: 8615
  source 1..80: mol_type = other DNA

SEQ ID NO: 193346 - DNA, 80 bp, synthetic construct; identical to SEQ ID NO: 8616
  source 1..80: mol_type = other DNA

SEQ ID NO: 193347 - DNA, 80 bp, synthetic construct; identical to SEQ ID NO: 8617
  source 1..80: mol_type = other DNA

SEQ ID NO: 193348 - DNA, 80 bp, synthetic construct; identical to SEQ ID NO: 8618
  source 1..80: mol_type = other DNA

SEQ ID NO: 193349 - DNA, 80 bp, synthetic construct; identical to SEQ ID NO: 8619
  source 1..80: mol_type = other DNA

SEQ ID NO: 193350 - DNA, 80 bp, synthetic construct; identical to SEQ ID NO: 8620
  source 1..80: mol_type = other DNA

SEQ ID NO: 193351 - DNA, 80 bp, synthetic construct; identical to SEQ ID NO: 8621
  source 1..80: mol_type = other DNA

SEQ ID NO: 193352 - DNA, 80 bp, synthetic construct; identical to SEQ ID NO: 8622
  source 1..80: mol_type = other DNA

SEQ ID NO: 193353 - DNA, 80 bp, synthetic construct; identical to SEQ ID NO: 8623
  source 1..80: mol_type = other DNA

SEQ ID NO: 193354 - DNA, 80 bp, synthetic construct; identical to SEQ ID NO: 8624
  source 1..80: mol_type = other DNA

SEQ ID NO: 193355 - DNA, 80 bp, synthetic construct; identical to SEQ ID NO: 8625
  source 1..80: mol_type = other DNA

SEQ ID NO: 193356 - DNA, 80 bp, synthetic construct; identical to SEQ ID NO: 8626
  source 1..80: mol_type = other DNA

SEQ ID NO: 193357 - DNA, 80 bp, synthetic construct; identical to SEQ ID NO: 8627
  source 1..80: mol_type = other DNA

SEQ ID NO: 193358 - DNA, 80 bp, synthetic construct; identical to SEQ ID NO: 8628
  source 1..80: mol_type = other DNA

SEQ ID NO: 193359 - DNA, 80 bp, synthetic construct; identical to SEQ ID NO: 8629
  source 1..80: mol_type = other DNA

SEQ ID NO: 193360 - DNA, 80 bp, synthetic construct; identical to SEQ ID NO: 8630
  source 1..80: mol_type = other DNA

SEQ ID NO: 193361 - DNA, 80 bp, synthetic construct; identical to SEQ ID NO: 8631
  source 1..80: mol_type = other DNA

SEQ ID NO: 193362 - DNA, 80 bp, synthetic construct; identical to SEQ ID NO: 8632
  source 1..80: mol_type = other DNA

SEQ ID NO: 193363 - DNA, 80 bp, synthetic construct; identical to SEQ ID NO: 8633
  source 1..80: mol_type = other DNA

SEQ ID NO: 193364 - DNA, 80 bp, synthetic construct; identical to SEQ ID NO: 8634
  source 1..80: mol_type = other DNA

SEQ ID NO: 193365 - DNA, 80 bp, synthetic construct; identical to SEQ ID NO: 8635
  source 1..80: mol_type = other DNA

SEQ ID NO: 193366 - DNA, 80 bp, synthetic construct; identical to SEQ ID NO: 8636
  source 1..80: mol_type = other DNA

SEQ ID NO: 193367 - DNA, 80 bp, synthetic construct; identical to SEQ ID NO: 8637
  source 1..80: mol_type = other DNA

SEQ ID NO: 193368 - DNA, 80 bp, synthetic construct; identical to SEQ ID NO: 8638
  source 1..80: mol_type = other DNA

SEQ ID NO: 193369 - DNA, 80 bp, synthetic construct; identical to SEQ ID NO: 8639
  source 1..80: mol_type = other DNA

SEQ ID NO: 193370 - DNA, 80 bp, synthetic construct; identical to SEQ ID NO: 8640
  source 1..80: mol_type = other DNA

SEQ ID NO: 193371 - DNA, 80 bp, synthetic construct; identical to SEQ ID NO: 8641
  source 1..80: mol_type = other DNA

SEQ ID NO: 193372 - DNA, 80 bp, synthetic construct; identical to SEQ ID NO: 8642
  source 1..80: mol_type = other DNA

SEQ ID NO: 193373 - DNA, 80 bp, synthetic construct; identical to SEQ ID NO: 8643
  source 1..80: mol_type = other DNA

SEQ ID NO: 193374 - DNA, 80 bp, synthetic construct; identical to SEQ ID NO: 8644
  source 1..80: mol_type = other DNA

SEQ ID NO: 193375 - DNA, 80 bp, synthetic construct; identical to SEQ ID NO: 8645
  source 1..80: mol_type = other DNA

SEQ ID NO: 193376 - DNA, 80 bp, synthetic construct; identical to SEQ ID NO: 8646
  source 1..80: mol_type = other DNA

SEQ ID NO: 193377 - DNA, 80 bp, synthetic construct; identical to SEQ ID NO: 8647
  source 1..80: mol_type = other DNA

SEQ ID NO: 193378 - DNA, 80 bp, synthetic construct; identical to SEQ ID NO: 8648
  source 1..80: mol_type = other DNA

SEQ ID NO: 193379 - DNA, 80 bp, synthetic construct; identical to SEQ ID NO: 8649
  source 1..80: mol_type = other DNA

SEQ ID NO: 193380 - DNA, 80 bp, synthetic construct; identical to SEQ ID NO: 8650
  source 1..80: mol_type = other DNA

SEQ ID NO: 193381 - DNA, 80 bp, synthetic construct; identical to SEQ ID NO: 8651
  source 1..80: mol_type = other DNA

SEQ ID NO: 193382 - DNA, 80 bp, synthetic construct; identical to SEQ ID NO: 8652
  source 1..80: mol_type = other DNA

SEQ ID NO: 193383 - DNA, 80 bp, synthetic construct; identical to SEQ ID NO: 8653
  source 1..80: mol_type = other DNA

SEQ ID NO: 193384 - DNA, 80 bp, synthetic construct; identical to SEQ ID NO: 8654
  source 1..80: mol_type = other DNA

SEQ ID NO: 193385 - DNA, 80 bp, synthetic construct; identical to SEQ ID NO: 8655
  source 1..80: mol_type = other DNA

SEQ ID NO: 193386 - DNA, 80 bp, synthetic construct; identical to SEQ ID NO: 8656
  source 1..80: mol_type = other DNA

SEQ ID NO: 193387 - DNA, 80 bp, synthetic construct; identical to SEQ ID NO: 8657
  source 1..80: mol_type = other DNA

SEQ ID NO: 193388 - DNA, 80 bp, synthetic construct; identical to SEQ ID NO: 8658
  source 1..80: mol_type = other DNA

SEQ ID NO: 193389 - DNA, 80 bp, synthetic construct; identical to SEQ ID NO: 8659
  source 1..80: mol_type = other DNA

SEQ ID NO: 193390 - DNA, 80 bp, synthetic construct; identical to SEQ ID NO: 8660
  source 1..80: mol_type = other DNA

SEQ ID NO: 193391 - DNA, 80 bp, synthetic construct; identical to SEQ ID NO: 8661
  source 1..80: mol_type = other DNA

SEQ ID NO: 193392 - DNA, 80 bp, synthetic construct; identical to SEQ ID NO: 8662
  source 1..80: mol_type = other DNA

SEQ ID NO: 193393 - DNA, 80 bp, synthetic construct; identical to SEQ ID NO: 8663
  source 1..80: mol_type = other DNA

SEQ ID NO: 193394 - DNA, 80 bp, synthetic construct; identical to SEQ ID NO: 8664
  source 1..80: mol_type = other DNA

SEQ ID NO: 193395 - DNA, 80 bp, synthetic construct; identical to SEQ ID NO: 8665
  source 1..80: mol_type = other DNA

SEQ ID NO: 193396 - DNA, 80 bp, synthetic construct; identical to SEQ ID NO: 8666
  source 1..80: mol_type = other DNA

SEQ ID NO: 193397 - DNA, 80 bp, synthetic construct; identical to SEQ ID NO: 8667
  source 1..80: mol_type = other DNA

SEQ ID NO: 193398 - DNA, 80 bp, synthetic construct; identical to SEQ ID NO: 8668
  source 1..80: mol_type = other DNA

SEQ ID NO: 193399 - DNA, 80 bp, synthetic construct; identical to SEQ ID NO: 8669
  source 1..80: mol_type = other DNA

SEQ ID NO: 193400 - DNA, 80 bp, synthetic construct; identical to SEQ ID NO: 8670
  source 1..80: mol_type = other DNA

SEQ ID NO: 193401 - DNA, 80 bp, synthetic construct; identical to SEQ ID NO: 8671
  source 1..80: mol_type = other DNA

SEQ ID NO: 193402 - DNA, 80 bp, synthetic construct; identical to SEQ ID NO: 8672
  source 1..80: mol_type = other DNA

SEQ ID NO: 193403 - DNA, 80 bp, synthetic construct; identical to SEQ ID NO: 8673
  source 1..80: mol_type = other DNA

SEQ ID NO: 193404 - DNA, 80 bp, synthetic construct; identical to SEQ ID NO: 8674
  source 1..80: mol_type = other DNA

SEQ ID NO: 193405 - DNA, 80 bp, synthetic construct; identical to SEQ ID NO: 8675
  source 1..80: mol_type = other DNA

SEQ ID NO: 193406 - DNA, 80 bp, synthetic construct; identical to SEQ ID NO: 8676
  source 1..80: mol_type = other DNA

SEQ ID NO: 193407 - DNA, 80 bp, synthetic construct; identical to SEQ ID NO: 8677
  source 1..80: mol_type = other DNA

SEQ ID NO: 193408 - DNA, 80 bp, synthetic construct; identical to SEQ ID NO: 8678
  source 1..80: mol_type = other DNA

SEQ ID NO: 193409 - DNA, 80 bp, synthetic construct; identical to SEQ ID NO: 8679
  source 1..80: mol_type = other DNA

SEQ ID NO: 193410 - DNA, 80 bp, synthetic construct; identical to SEQ ID NO: 8680
  source 1..80: mol_type = other DNA

SEQ ID NO: 193411 - DNA, 80 bp, synthetic construct; identical to SEQ ID NO: 8681
  source 1..80: mol_type = other DNA

SEQ ID NO: 193412 - DNA, 80 bp, synthetic construct; identical to SEQ ID NO: 8682
  source 1..80: mol_type = other DNA

SEQ ID NO: 193413 - DNA, 80 bp, synthetic construct; identical to SEQ ID NO: 8683
  source 1..80: mol_type = other DNA

SEQ ID NO: 193414 - DNA, 80 bp, synthetic construct; identical to SEQ ID NO: 8684
  source 1..80: mol_type = other DNA

SEQ ID NO: 193415 - DNA, 80 bp, synthetic construct; identical to SEQ ID NO: 8685
  source 1..80: mol_type = other DNA

SEQ ID NO: 193416 - DNA, 80 bp, synthetic construct; identical to SEQ ID NO: 8686
  source 1..80: mol_type = other DNA

SEQ ID NO: 193417 - DNA, 80 bp, synthetic construct; identical to SEQ ID NO: 8687
  source 1..80: mol_type = other DNA

SEQ ID NO: 193418 - DNA, 80 bp, synthetic construct; identical to SEQ ID NO: 8688
  source 1..80: mol_type = other DNA

SEQ ID NO: 193419 - DNA, 80 bp, synthetic construct; identical to SEQ ID NO: 8689
  source 1..80: mol_type = other DNA

SEQ ID NO: 193420 - DNA, 80 bp, synthetic construct; identical to SEQ ID NO: 8690
  source 1..80: mol_type = other DNA

SEQ ID NO: 193421 - DNA, 80 bp, synthetic construct; identical to SEQ ID NO: 8691
  source 1..80: mol_type = other DNA

SEQ ID NO: 193422 - DNA, 80 bp, synthetic construct; identical to SEQ ID NO: 8692
  source 1..80: mol_type = other DNA

SEQ ID NO: 193423 - DNA, 80 bp, synthetic construct; identical to SEQ ID NO: 8693
  source 1..80: mol_type = other DNA

SEQ ID NO: 193424 - DNA, 80 bp, synthetic construct; identical to SEQ ID NO: 8694
  source 1..80: mol_type = other DNA

SEQ ID NO: 193425 - DNA, 80 bp, synthetic construct; identical to SEQ ID NO: 8695
  source 1..80: mol_type = other DNA

SEQ ID NO: 193426 - DNA, 80 bp, synthetic construct; identical to SEQ ID NO: 8696
  source 1..80: mol_type = other DNA

SEQ ID NO: 193427 - DNA, 80 bp, synthetic construct; identical to SEQ ID NO: 8697
  source 1..80: mol_type = other DNA

SEQ ID NO: 193428 - DNA, 80 bp, synthetic construct; identical to SEQ ID NO: 8698
  source 1..80: mol_type = other DNA

SEQ ID NO: 193429 - DNA, 80 bp, synthetic construct; identical to SEQ ID NO: 8699
  source 1..80: mol_type = other DNA

SEQ ID NO: 193430 - DNA, 80 bp, synthetic construct; identical to SEQ ID NO: 8700
  source 1..80: mol_type = other DNA

SEQ ID NO: 193431 - DNA, 80 bp, synthetic construct; identical to SEQ ID NO: 8701
  source 1..80: mol_type = other DNA

SEQ ID NO: 193432 - DNA, 80 bp, synthetic construct; identical to SEQ ID NO: 8702
  source 1..80: mol_type = other DNA

SEQ ID NO: 193433 - DNA, 80 bp, synthetic construct; identical to SEQ ID NO: 8703
  source 1..80: mol_type = other DNA

SEQ ID NO: 193434 - DNA, 80 bp, synthetic construct; identical to SEQ ID NO: 8704
  source 1..80: mol_type = other DNA

SEQ ID NO: 193435 - DNA, 80 bp, synthetic construct; identical to SEQ ID NO: 8705
  source 1..80: mol_type = other DNA

SEQ ID NO: 193436 - DNA, 80 bp, synthetic construct; identical to SEQ ID NO: 8706
  source 1..80: mol_type = other DNA

SEQ ID NO: 193437 - DNA, 80 bp, synthetic construct; identical to SEQ ID NO: 8707
  source 1..80: mol_type = other DNA

SEQ ID NO: 193438 - DNA, 80 bp, synthetic construct; identical to SEQ ID NO: 8708
  source 1..80: mol_type = other DNA

SEQ ID NO: 193439 - DNA, 80 bp, synthetic construct; identical to SEQ ID NO: 8709
  source 1..80: mol_type = other DNA

SEQ ID NO: 193440 - DNA, 80 bp, synthetic construct; identical to SEQ ID NO: 8710
  source 1..80: mol_type = other DNA

SEQ ID NO: 193441 - DNA, 80 bp, synthetic construct; identical to SEQ ID NO: 8711
  source 1..80: mol_type = other DNA

SEQ ID NO: 193442 - DNA, 80 bp, synthetic construct; identical to SEQ ID NO: 8712
  source 1..80: mol_type = other DNA

SEQ ID NO: 193443 - DNA, 80 bp, synthetic construct; identical to SEQ ID NO: 8713
  source 1..80: mol_type = other DNA

SEQ ID NO: 193444 - DNA, 80 bp, synthetic construct; identical to SEQ ID NO: 8714
  source 1..80: mol_type = other DNA

SEQ ID NO: 193445 - DNA, 80 bp, synthetic construct; identical to SEQ ID NO: 8715
  source 1..80: mol_type = other DNA

SEQ ID NO: 193446 - DNA, 80 bp, synthetic construct; identical to SEQ ID NO: 8716
  source 1..80: mol_type = other DNA

SEQ ID NO: 193447 - DNA, 80 bp, synthetic construct; identical to SEQ ID NO: 8717
  source 1..80: mol_type = other DNA

SEQ ID NO: 193448 - DNA, 80 bp, synthetic construct; identical to SEQ ID NO: 8718
  source 1..80: mol_type = other DNA

SEQ ID NO: 193449 - DNA, 80 bp, synthetic construct; identical to SEQ ID NO: 8719
  source 1..80: mol_type = other DNA

SEQ ID NO: 193450 - DNA, 80 bp, synthetic construct; identical to SEQ ID NO: 8720
  source 1..80: mol_type = other DNA

SEQ ID NO: 193451 - DNA, 80 bp, synthetic construct; identical to SEQ ID NO: 8721
  source 1..80: mol_type = other DNA

SEQ ID NO: 193452 - DNA, 80 bp, synthetic construct; identical to SEQ ID NO: 8722
  source 1..80: mol_type = other DNA

SEQ ID NO: 193453 - DNA, 80 bp, synthetic construct; identical to SEQ ID NO: 8723
  source 1..80: mol_type = other DNA

SEQ ID NO: 193454 - DNA, 80 bp, synthetic construct; identical to SEQ ID NO: 8724
  source 1..80: mol_type = other DNA

SEQ ID NO: 193455 - DNA, 80 bp, synthetic construct; identical to SEQ ID NO: 8725
  source 1..80: mol_type = other DNA

SEQ ID NO: 193456 - DNA, 80 bp, synthetic construct; identical to SEQ ID NO: 8726
  source 1..80: mol_type = other DNA

SEQ ID NO: 193457 - DNA, 80 bp, synthetic construct; identical to SEQ ID NO: 8727
  source 1..80: mol_type = other DNA

SEQ ID NO: 193458 - DNA, 80 bp, synthetic construct; identical to SEQ ID NO: 8728
  source 1..80: mol_type = other DNA

SEQ ID NO: 193459 - DNA, 80 bp, synthetic construct; identical to SEQ ID NO: 8729
  source 1..80: mol_type = other DNA

SEQ ID NO: 193460 - DNA, 80 bp, synthetic construct; identical to SEQ ID NO: 8730
  source 1..80: mol_type = other DNA

SEQ ID NO: 193461 - DNA, 80 bp, synthetic construct; identical to SEQ ID NO: 8731
  source 1..80: mol_type = other DNA

SEQ ID NO: 193462 - DNA, 80 bp, synthetic construct; identical to SEQ ID NO: 8732
  source 1..80: mol_type = other DNA

SEQ ID NO: 193463 - DNA, 80 bp, synthetic construct; identical to SEQ ID NO: 8733
  source 1..80: mol_type = other DNA

SEQ ID NO: 193464 - DNA, 80 bp, synthetic construct; identical to SEQ ID NO: 8734
  source 1..80: mol_type = other DNA

SEQ ID NO: 193465 - DNA, 80 bp, synthetic construct; identical to SEQ ID NO: 8735
  source 1..80: mol_type = other DNA

SEQ ID NO: 193466 - DNA, 80 bp, synthetic construct; identical to SEQ ID NO: 8736
  source 1..80: mol_type = other DNA

SEQ ID NO: 193467 - DNA, 80 bp, synthetic construct; identical to SEQ ID NO: 8737
  source 1..80: mol_type = other DNA

SEQ ID NO: 193468 - DNA, 80 bp, synthetic construct; identical to SEQ ID NO: 8738
  source 1..80: mol_type = other DNA

SEQ ID NO: 193469 - DNA, 80 bp, synthetic construct; identical to SEQ ID NO: 8739
  source 1..80: mol_type = other DNA

SEQ ID NO: 193470 - DNA, 80 bp, synthetic construct; identical to SEQ ID NO: 8740
  source 1..80: mol_type = other DNA

SEQ ID NO: 193471 - DNA, 80 bp, synthetic construct; identical to SEQ ID NO: 8741
  source 1..80: mol_type = other DNA

SEQ ID NO: 193472 - DNA, 80 bp, synthetic construct; identical to SEQ ID NO: 8742
  source 1..80: mol_type = other DNA

SEQ ID NO: 193473 - DNA, 80 bp, synthetic construct; identical to SEQ ID NO: 8743
  source 1..80: mol_type = other DNA

SEQ ID NO: 193474 - DNA, 80 bp, synthetic construct; identical to SEQ ID NO: 8744
  source 1..80: mol_type = other DNA

SEQ ID NO: 193475 - DNA, 80 bp, synthetic construct; identical to SEQ ID NO: 8745
  source 1..80: mol_type = other DNA

SEQ ID NO: 193476 - DNA, 80 bp, synthetic construct; identical to SEQ ID NO: 8746
  source 1..80: mol_type = other DNA

SEQ ID NO: 193477 - DNA, 80 bp, synthetic construct; identical to SEQ ID NO: 8747
  source 1..80: mol_type = other DNA

SEQ ID NO: 193478 - DNA, 80 bp, synthetic construct; identical to SEQ ID NO: 8748
  source 1..80: mol_type = other DNA

SEQ ID NO: 193479 - DNA, 80 bp, synthetic construct; identical to SEQ ID NO: 8749
  source 1..80: mol_type = other DNA

SEQ ID NO: 193480 - DNA, 80 bp, synthetic construct; identical to SEQ ID NO: 8750
  source 1..80: mol_type = other DNA

SEQ ID NO: 193481 - DNA, 80 bp, synthetic construct; identical to SEQ ID NO: 8751
  source 1..80: mol_type = other DNA

SEQ ID NO: 193482 - DNA, 80 bp, synthetic construct; identical to SEQ ID NO: 8752
  source 1..80: mol_type = other DNA

SEQ ID NO: 193483 - DNA, 80 bp, synthetic construct; identical to SEQ ID NO: 8753
  source 1..80: mol_type = other DNA

SEQ ID NO: 193484 - DNA, 80 bp, synthetic construct; identical to SEQ ID NO: 8754
  source 1..80: mol_type = other DNA

SEQ ID NO: 193485 - DNA, 80 bp, synthetic construct; identical to SEQ ID NO: 8755
  source 1..80: mol_type = other DNA

SEQ ID NO: 193486 - DNA, 80 bp, synthetic construct; identical to SEQ ID NO: 8756
  source 1..80: mol_type = other DNA

SEQ ID NO: 193487 - DNA, 80 bp, synthetic construct; identical to SEQ ID NO: 8757
  source 1..80: mol_type = other DNA

SEQ ID NO: 193488 - DNA, 80 bp, synthetic construct; identical to SEQ ID NO: 8758
  source 1..80: mol_type = other DNA

SEQ ID NO: 193489 - DNA, 80 bp, synthetic construct; identical to SEQ ID NO: 8759
  source 1..80: mol_type = other DNA

SEQ ID NO: 193490 - DNA, 80 bp, synthetic construct; identical to SEQ ID NO: 8760
  source 1..80: mol_type = other DNA

SEQ ID NO: 193491 - DNA, 80 bp, synthetic construct; identical to SEQ ID NO: 8761
  source 1..80: mol_type = other DNA

SEQ ID NO: 193492 - DNA, 80 bp, synthetic construct; identical to SEQ ID NO: 8762
  source 1..80: mol_type = other DNA

SEQ ID NO: 193493 - DNA, 80 bp, synthetic construct; identical to SEQ ID NO: 8763
  source 1..80: mol_type = other DNA

SEQ ID NO: 193494 - DNA, 80 bp, synthetic construct; identical to SEQ ID NO: 8764
  source 1..80: mol_type = other DNA

SEQ ID NO: 193495 - DNA, 80 bp, synthetic construct; identical to SEQ ID NO: 8765
  source 1..80: mol_type = other DNA

SEQ ID NO: 193496 - DNA, 80 bp, synthetic construct; identical to SEQ ID NO: 8766
  source 1..80: mol_type = other DNA

SEQ ID NO: 193497 - DNA, 80 bp, synthetic construct; identical to SEQ ID NO: 8767
  source 1..80: mol_type = other DNA

SEQ ID NO: 193498 - DNA, 80 bp, synthetic construct; identical to SEQ ID NO: 8768
  source 1..80: mol_type = other DNA

SEQ ID NO: 193499 - DNA, 80 bp, synthetic construct; identical to SEQ ID NO: 8769
  source 1..80: mol_type = other DNA

SEQ ID NO: 193500 - DNA, 80 bp, synthetic construct; identical to SEQ ID NO: 8770
  source 1..80: mol_type = other DNA

SEQ ID NO: 193501 - DNA, 80 bp, synthetic construct; identical to SEQ ID NO: 8771
  source 1..80: mol_type = other DNA

SEQ ID NO: 193502 - DNA, 80 bp, synthetic construct; identical to SEQ ID NO: 8772
  source 1..80: mol_type = other DNA

SEQ ID NO: 193503 - DNA, 80 bp, synthetic construct; identical to SEQ ID NO: 8773
  source 1..80: mol_type = other DNA

SEQ ID NO: 193504 - DNA, 80 bp, synthetic construct; identical to SEQ ID NO: 8774
  source 1..80: mol_type = other DNA

SEQ ID NO: 193505 - DNA, 80 bp, synthetic construct; identical to SEQ ID NO: 8775
  source 1..80: mol_type = other DNA

SEQ ID NO: 193506 - DNA, 80 bp, synthetic construct; identical to SEQ ID NO: 8776
  source 1..80: mol_type = other DNA

SEQ ID NO: 193507 - DNA, 80 bp, synthetic construct; identical to SEQ ID NO: 8777
  source 1..80: mol_type = other DNA

SEQ ID NO: 193508 - DNA, 80 bp, synthetic construct; identical to SEQ ID NO: 8778
  source 1..80: mol_type = other DNA

SEQ ID NO: 193509 - DNA, 80 bp, synthetic construct; identical to SEQ ID NO: 8779
  source 1..80: mol_type = other DNA

SEQ ID NO: 193510 - DNA, 80 bp, synthetic construct; identical to SEQ ID NO: 8780
  source 1..80: mol_type = other DNA

SEQ ID NO: 193511 - DNA, 80 bp, synthetic construct; identical to SEQ ID NO: 8781
  source 1..80: mol_type = other DNA

SEQ ID NO: 193512 - DNA, 80 bp, synthetic construct; identical to SEQ ID NO: 8782
  source 1..80: mol_type = other DNA

SEQ ID NO: 193513 - DNA, 80 bp, synthetic construct; identical to SEQ ID NO: 8783
  source 1..80: mol_type = other DNA

SEQ ID NO: 193514 - DNA, 80 bp, synthetic construct; identical to SEQ ID NO: 8784
  source 1..80: mol_type = other DNA

SEQ ID NO: 193515 - DNA, 80 bp, synthetic construct; identical to SEQ ID NO: 8785
  source 1..80: mol_type = other DNA

SEQ ID NO: 193516 - DNA, 80 bp, synthetic construct; identical to SEQ ID NO: 8786
  source 1..80: mol_type = other DNA

SEQ ID NO: 193517 - DNA, 80 bp, synthetic construct; identical to SEQ ID NO: 8787
  source 1..80: mol_type = other DNA

SEQ ID NO: 193518 - DNA, 80 bp, synthetic construct; identical to SEQ ID NO: 8788
  source 1..80: mol_type = other DNA

SEQ ID NO: 193519 - DNA, 80 bp, synthetic construct; identical to SEQ ID NO: 8789
  source 1..80: mol_type = other DNA

SEQ ID NO: 193520 - DNA, 80 bp, synthetic construct; identical to SEQ ID NO: 8790
  source 1..80: mol_type = other DNA

SEQ ID NO: 193521 - DNA, 80 bp, synthetic construct; identical to SEQ ID NO: 8791
  source 1..80: mol_type = other DNA

SEQ ID NO: 193522 - DNA, 80 bp, synthetic construct; identical to SEQ ID NO: 8792
  source 1..80: mol_type = other DNA

SEQ ID NO: 193523 - DNA, 80 bp, synthetic construct; identical to SEQ ID NO: 8793
  source 1..80: mol_type = other DNA

SEQ ID NO: 193524 - DNA, 80 bp, synthetic construct; identical to SEQ ID NO: 8794
  source 1..80: mol_type = other DNA

SEQ ID NO: 193525 - DNA, 80 bp, synthetic construct; identical to SEQ ID NO: 8795
  source 1..80: mol_type = other DNA

SEQ ID NO: 193526 - DNA, 80 bp, synthetic construct; identical to SEQ ID NO: 8796
  source 1..80: mol_type = other DNA

SEQ ID NO: 193527 - DNA, 80 bp, synthetic construct; identical to SEQ ID NO: 8797
  source 1..80: mol_type = other DNA

SEQ ID NO: 193528 - DNA, 80 bp, synthetic construct; identical to SEQ ID NO: 8798
  source 1..80: mol_type = other DNA

SEQ ID NO: 193529 - DNA, 80 bp, synthetic construct; identical to SEQ ID NO: 8799
  source 1..80: mol_type = other DNA

SEQ ID NO: 193530 - DNA, 80 bp, synthetic construct; identical to SEQ ID NO: 8800
  source 1..80: mol_type = other DNA

SEQ ID NO: 193531 - DNA, 80 bp, synthetic construct; identical to SEQ ID NO: 8801
  source 1..80: mol_type = other DNA

SEQ ID NO: 193532 - DNA, 80 bp, synthetic construct; identical to SEQ ID NO: 8802
  source 1..80: mol_type = other DNA

SEQ ID NO: 193533 - DNA, 80 bp, synthetic construct; identical to SEQ ID NO: 8803
  source 1..80: mol_type = other DNA

SEQ ID NO: 193534 - DNA, 80 bp, synthetic construct; identical to SEQ ID NO: 8804
  source 1..80: mol_type = other DNA

SEQ ID NO: 193535 - DNA, 80 bp, synthetic construct; identical to SEQ ID NO: 8805
  source 1..80: mol_type = other DNA

SEQ ID NO: 193536 - DNA, 80 bp, synthetic construct; identical to SEQ ID NO: 8806
  source 1..80: mol_type = other DNA

SEQ ID NO: 193537 - DNA, 80 bp, synthetic construct; identical to SEQ ID NO: 8807
  source 1..80: mol_type = other DNA

SEQ ID NO: 193538 - DNA, 80 bp, synthetic construct; identical to SEQ ID NO: 8808
  source 1..80: mol_type = other DNA

SEQ ID NO: 193539 - DNA, 80 bp, synthetic construct; identical to SEQ ID NO: 8809
  source 1..80: mol_type = other DNA

SEQ ID NO: 193540 - DNA, 80 bp, synthetic construct; identical to SEQ ID NO: 8810
  source 1..80: mol_type = other DNA

SEQ ID NO: 193541 - DNA, 80 bp, synthetic construct; identical to SEQ ID NO: 8811
  source 1..80: mol_type = other DNA

SEQ ID NO: 193542 - DNA, 80 bp, synthetic construct; identical to SEQ ID NO: 8812
  source 1..80: mol_type = other DNA

SEQ ID NO: 193543 - DNA, 80 bp, synthetic construct; identical to SEQ ID NO: 8813
  source 1..80: mol_type = other DNA

SEQ ID NO: 193544 - DNA, 80 bp, synthetic construct; identical to SEQ ID NO: 8814
  source 1..80: mol_type = other DNA

SEQ ID NO: 193545 - DNA, 80 bp, synthetic construct; identical to SEQ ID NO: 8815
  source 1..80: mol_type = other DNA

SEQ ID NO: 193546 - DNA, 80 bp, synthetic construct; identical to SEQ ID NO: 8816
  source 1..80: mol_type = other DNA

SEQ ID NO: 193547 - DNA, 80 bp, synthetic construct; identical to SEQ ID NO: 8817
  source 1..80: mol_type = other DNA

SEQ ID NO: 193548 - DNA, 80 bp, synthetic construct; identical to SEQ ID NO: 8818
  source 1..80: mol_type = other DNA

SEQ ID NO: 193549 - DNA, 80 bp, synthetic construct; identical to SEQ ID NO: 8819
  source 1..80: mol_type = other DNA

SEQ ID NO: 193550 - DNA, 80 bp, synthetic construct; identical to SEQ ID NO: 8820
  source 1..80: mol_type = other DNA

SEQ ID NO: 193551 - DNA, 80 bp, synthetic construct; identical to SEQ ID NO: 8821
  source 1..80: mol_type = other DNA

SEQ ID NO: 193552 - DNA, 80 bp, synthetic construct; identical to SEQ ID NO: 8822
  source 1..80: mol_type = other DNA

SEQ ID NO: 193553 - DNA, 80 bp, synthetic construct; identical to SEQ ID NO: 8823
  source 1..80: mol_type = other DNA

SEQ ID NO: 193554 - DNA, 80 bp, synthetic construct; identical to SEQ ID NO: 8824
  source 1..80: mol_type = other DNA

SEQ ID NO: 193555 - DNA, 80 bp, synthetic construct; identical to SEQ ID NO: 8825
  source 1..80: mol_type = other DNA

SEQ ID NO: 193556 - DNA, 80 bp, synthetic construct; identical to SEQ ID NO: 8826
  source 1..80: mol_type = other DNA

SEQ ID NO: 193557 - DNA, 80 bp, synthetic construct; identical to SEQ ID NO: 8827
  source 1..80: mol_type = other DNA

SEQ ID NO: 193558 - DNA, 80 bp, synthetic construct; identical to SEQ ID NO: 8828
  source 1..80: mol_type = other DNA

SEQ ID NO: 193559 - DNA, 80 bp, synthetic construct; identical to SEQ ID NO: 8829
  source 1..80: mol_type = other DNA

SEQ ID NO: 193560 - DNA, 80 bp, synthetic construct; identical to SEQ ID NO: 8830
  source 1..80: mol_type = other DNA

SEQ ID NO: 193561 - DNA, 80 bp, synthetic construct; identical to SEQ ID NO: 8831
  source 1..80: mol_type = other DNA

SEQ ID NO: 193562 - DNA, 80 bp, synthetic construct; identical to SEQ ID NO: 8832
  source 1..80: mol_type = other DNA

SEQ ID NO: 193563 - DNA, 80 bp, synthetic construct; identical to SEQ ID NO: 8833
  source 1..80: mol_type = other DNA

SEQ ID NO: 193564 - DNA, 80 bp, synthetic construct; identical to SEQ ID NO: 8834
  source 1..80: mol_type = other DNA

SEQ ID NO: 193565 - DNA, 80 bp, synthetic construct; identical to SEQ ID NO: 8835
  source 1..80: mol_type = other DNA

SEQ ID NO: 193566 - DNA, 80 bp, synthetic construct; identical to SEQ ID NO: 8836
  source 1..80: mol_type = other DNA

SEQ ID NO: 193567 - DNA, 80 bp, synthetic construct; identical to SEQ ID NO: 8837
  source 1..80: mol_type = other DNA

SEQ ID NO: 193568 - DNA, 80 bp, synthetic construct; identical to SEQ ID NO: 8838
  source 1..80: mol_type = other DNA

SEQ ID NO: 193569 - DNA, 80 bp, synthetic construct; identical to SEQ ID NO: 8839
  source 1..80: mol_type = other DNA

SEQ ID NO: 193570 - DNA, 80 bp, synthetic construct; identical to SEQ ID NO: 8840
  source 1..80: mol_type = other DNA

SEQ ID NO: 193571 - DNA, 80 bp, synthetic construct; identical to SEQ ID NO: 8841
  source 1..80: mol_type = other DNA

SEQ ID NO: 193572 - DNA, 80 bp, synthetic construct; identical to SEQ ID NO: 8842
  source 1..80: mol_type = other DNA

SEQ ID NO: 193573 - DNA, 80 bp, synthetic construct; identical to SEQ ID NO: 8843
  source 1..80: mol_type = other DNA

SEQ ID NO: 193574 - DNA, 80 bp, synthetic construct; identical to SEQ ID NO: 8844
  source 1..80: mol_type = other DNA

SEQ ID NO: 193575 - DNA, 80 bp, synthetic construct; identical to SEQ ID NO: 8845
  source 1..80: mol_type = other DNA

SEQ ID NO: 193576 - DNA, 80 bp, synthetic construct; identical to SEQ ID NO: 8846
  source 1..80: mol_type = other DNA

SEQ ID NO: 193577 - DNA, 80 bp, synthetic construct; identical to SEQ ID NO: 8847
  source 1..80: mol_type = other DNA

SEQ ID NO: 193578 - DNA, 80 bp, synthetic construct; identical to SEQ ID NO: 8848
  source 1..80: mol_type = other DNA

SEQ ID NO: 193579 - DNA, 80 bp, synthetic construct; identical to SEQ ID NO: 8849
  source 1..80: mol_type = other DNA

SEQ ID NO: 193580 - DNA, 80 bp, synthetic construct; identical to SEQ ID NO: 8850
  source 1..80: mol_type = other DNA

SEQ ID NO: 193581 - DNA, 80 bp, synthetic construct; identical to SEQ ID NO: 8851
  source 1..80: mol_type = other DNA

SEQ ID NO: 193582 - DNA, 80 bp, synthetic construct; identical to SEQ ID NO: 8852
  source 1..80: mol_type = other DNA

SEQ ID NO: 193583 - DNA, 80 bp, synthetic construct; identical to SEQ ID NO: 8853
  source 1..80: mol_type = other DNA

SEQ ID NO: 193584 - DNA, 80 bp, synthetic construct; identical to SEQ ID NO: 8854
  source 1..80: mol_type = other DNA

SEQ ID NO: 193585 - DNA, 80 bp, synthetic construct; identical to SEQ ID NO: 8855
  source 1..80: mol_type = other DNA

SEQ ID NO: 193586 - DNA, 80 bp, synthetic construct; identical to SEQ ID NO: 8856
  source 1..80: mol_type = other DNA

SEQ ID NO: 193587 - DNA, 80 bp, synthetic construct; identical to SEQ ID NO: 8857
  source 1..80: mol_type = other DNA

SEQ ID NO: 193588 - DNA, 80 bp, synthetic construct; identical to SEQ ID NO: 8858
  source 1..80: mol_type = other DNA

SEQ ID NO: 193589 - DNA, 80 bp, synthetic construct; identical to SEQ ID NO: 8859
  source 1..80: mol_type = other DNA

SEQ ID NO: 193590 - DNA, 80 bp, synthetic construct; identical to SEQ ID NO: 8860
  source 1..80: mol_type = other DNA

SEQ ID NO: 193591 - DNA, 80 bp, synthetic construct; identical to SEQ ID NO: 8861
  source 1..80: mol_type = other DNA

SEQ ID NO: 193592 - DNA, 80 bp, synthetic construct; identical to SEQ ID NO: 8862
  source 1..80: mol_type = other DNA

SEQ ID NO: 193593 - DNA, 80 bp, synthetic construct; identical to SEQ ID NO: 8863
  source 1..80: mol_type = other DNA

SEQ ID NO: 193594 - DNA, 80 bp, synthetic construct; identical to SEQ ID NO: 8864
  source 1..80: mol_type = other DNA

SEQ ID NO: 193595 - DNA, 80 bp, synthetic construct; identical to SEQ ID NO: 8865
  source 1..80: mol_type = other DNA

SEQ ID NO: 193596 - DNA, 80 bp, synthetic construct; identical to SEQ ID NO: 8866
  source 1..80: mol_type = other DNA

SEQ ID NO: 193597 - DNA, 80 bp, synthetic construct; identical to SEQ ID NO: 8867
  source 1..80: mol_type = other DNA

SEQ ID NO: 193598 - DNA, 80 bp, synthetic construct; identical to SEQ ID NO: 8868
  source 1..80: mol_type = other DNA

SEQ ID NO: 193599 - DNA, 80 bp, synthetic construct; identical to SEQ ID NO: 8869
  source 1..80: mol_type = other DNA

SEQ ID NO: 193600 - DNA, 80 bp, synthetic construct; identical to SEQ ID NO: 8870
  source 1..80: mol_type = other DNA

SEQ ID NO: 193601 - DNA, 80 bp, synthetic construct; identical to SEQ ID NO: 8871
  source 1..80: mol_type = other DNA

SEQ ID NO: 193602 - DNA, 80 bp, synthetic construct; identical to SEQ ID NO: 8872
  source 1..80: mol_type = other DNA

SEQ ID NO: 193603 - DNA, 80 bp, synthetic construct; identical to SEQ ID NO: 8873
  source 1..80: mol_type = other DNA

SEQ ID NO: 193604 - DNA, 80 bp, synthetic construct; identical to SEQ ID NO: 8874
  source 1..80: mol_type = other DNA

SEQ ID NO: 193605 - DNA, 80 bp, synthetic construct; identical to SEQ ID NO: 8875
  source 1..80: mol_type = other DNA

SEQ ID NO: 193606 - DNA, 80 bp, synthetic construct; identical to SEQ ID NO: 8876
  source 1..80: mol_type = other DNA

SEQ ID NO: 193607 - DNA, 80 bp, synthetic construct; identical to SEQ ID NO: 8877
  source 1..80: mol_type = other DNA

SEQ ID NO: 193608 - DNA, 80 bp, synthetic construct; identical to SEQ ID NO: 8878
  source 1..80: mol_type = other DNA

SEQ ID NO: 193609 - DNA, 80 bp, synthetic construct; identical to SEQ ID NO: 8879
  source 1..80: mol_type = other DNA

SEQ ID NO: 193610 - DNA, 80 bp, synthetic construct; identical to SEQ ID NO: 8880
  source 1..80: mol_type = other DNA

SEQ ID NO: 193611 - DNA, 80 bp, synthetic construct; identical to SEQ ID NO: 8881
  source 1..80: mol_type = other DNA

SEQ ID NO: 193612 - DNA, 80 bp, synthetic construct; identical to SEQ ID NO: 8882
  source 1..80: mol_type = other DNA

SEQ ID NO: 193613 - DNA, 80 bp, synthetic construct; identical to SEQ ID NO: 8883
  source 1..80: mol_type = other DNA

SEQ ID NO: 193614 - DNA, 80 bp, synthetic construct; identical to SEQ ID NO: 8884
  source 1..80: mol_type = other DNA

SEQ ID NO: 193615 - DNA, 80 bp, synthetic construct; identical to SEQ ID NO: 8885
  source 1..80: mol_type = other DNA

SEQ ID NO: 193616 - DNA, 80 bp, synthetic construct; identical to SEQ ID NO: 8886
  source 1..80: mol_type = other DNA

SEQ ID NO: 193617 - DNA, 80 bp, synthetic construct; identical to SEQ ID NO: 8887
  source 1..80: mol_type = other DNA

SEQ ID NO: 193618 - DNA, 80 bp, synthetic construct; identical to SEQ ID NO: 8888
  source 1..80: mol_type = other DNA

SEQ ID NO: 193619 - DNA, 80 bp, synthetic construct; identical to SEQ ID NO: 8889
  source 1..80: mol_type = other DNA

SEQ ID NO: 193620 - DNA, 80 bp, synthetic construct; identical to SEQ ID NO: 8890
  source 1..80: mol_type = other DNA

SEQ ID NO: 193621 - DNA, 80 bp, synthetic construct; identical to SEQ ID NO: 8891
  source 1..80: mol_type = other DNA

SEQ ID NO: 193622 - DNA, 80 bp, synthetic construct; identical to SEQ ID NO: 8892
  source 1..80: mol_type = other DNA

SEQ ID NO: 193623 - DNA, 80 bp, synthetic construct; identical to SEQ ID NO: 8893
  source 1..80: mol_type = other DNA

SEQ ID NO: 193624 - DNA, 80 bp, synthetic construct; identical to SEQ ID NO: 8894
  source 1..80: mol_type = other DNA

SEQ ID NO: 193625 - DNA, 80 bp, synthetic construct; identical to SEQ ID NO: 8895
  source 1..80: mol_type = other DNA

SEQ ID NO: 193626 - DNA, 80 bp, synthetic construct; identical to SEQ ID NO: 8896
  source 1..80: mol_type = other DNA

SEQ ID NO: 193627 - DNA, 80 bp, synthetic construct; identical to SEQ ID NO: 8897
  source 1..80: mol_type = other DNA

SEQ ID NO: 193628 - DNA, 80 bp, synthetic construct; identical to SEQ ID NO: 8898
  source 1..80: mol_type = other DNA

SEQ ID NO: 193629 - DNA, 80 bp, synthetic construct; identical to SEQ ID NO: 8899
  source 1..80: mol_type = other DNA

SEQ ID NO: 193630 - DNA, 80 bp, synthetic construct; identical to SEQ ID NO: 8900
  source 1..80: mol_type = other DNA

SEQ ID NO: 193631 - DNA, 80 bp, synthetic construct; identical to SEQ ID NO: 8901
  source 1..80: mol_type = other DNA

SEQ ID NO: 193632 - DNA, 80 bp, synthetic construct; identical to SEQ ID NO: 8902
  source 1..80: mol_type = other DNA

SEQ ID NO: 193633 - DNA, 80 bp, synthetic construct; identical to SEQ ID NO: 8903
  source 1..80: mol_type = other DNA

SEQ ID NO: 193634 - DNA, 80 bp, synthetic construct; identical to SEQ ID NO: 8904
  source 1..80: mol_type = other DNA

SEQ ID NO: 193635 - DNA, 80 bp, synthetic construct; identical to SEQ ID NO: 8905
  source 1..80: mol_type = other DNA

SEQ ID NO: 193636 - DNA, 80 bp, synthetic construct; identical to SEQ ID NO: 8906
  source 1..80: mol_type = other DNA

SEQ ID NO: 193637 - DNA, 80 bp, synthetic construct; identical to SEQ ID NO: 8907
  source 1..80: mol_type = other DNA

SEQ ID NO: 193638 - DNA, 80 bp, synthetic construct; identical to SEQ ID NO: 8908
  source 1..80: mol_type = other DNA

SEQ ID NO: 193639 - DNA, 80 bp, synthetic construct; identical to SEQ ID NO: 8909
  source 1..80: mol_type = other DNA

SEQ ID NO: 193640 - DNA, 80 bp, synthetic construct; identical to SEQ ID NO: 8910
  source 1..80: mol_type = other DNA

SEQ ID NO: 193641 - DNA, 80 bp, synthetic construct; identical to SEQ ID NO: 8911
  source 1..80: mol_type = other DNA

SEQ ID NO: 193642 - DNA, 80 bp, synthetic construct; identical to SEQ ID NO: 8912
  source 1..80: mol_type = other DNA

SEQ ID NO: 193643 - DNA, 80 bp, synthetic construct; identical to SEQ ID NO: 8913
  source 1..80: mol_type = other DNA

SEQ ID NO: 193644 - DNA, 80 bp, synthetic construct; identical to SEQ ID NO: 8914
  source 1..80: mol_type = other DNA

SEQ ID NO: 193645 - DNA, 80 bp, synthetic construct; identical to SEQ ID NO: 8915
  source 1..80: mol_type = other DNA

SEQ ID NO: 193646 - DNA, 80 bp, synthetic construct; identical to SEQ ID NO: 8916
  source 1..80: mol_type = other DNA

SEQ ID NO: 193647 - DNA, 80 bp, synthetic construct; identical to SEQ ID NO: 8917
  source 1..80: mol_type = other DNA

SEQ ID NO: 193648 - DNA, 80 bp, synthetic construct; identical to SEQ ID NO: 8918
  source 1..80: mol_type = other DNA

SEQ ID NO: 193649 - DNA, 80 bp, synthetic construct; identical to SEQ ID NO: 8919
  source 1..80: mol_type = other DNA

SEQ ID NO: 193650 - DNA, 80 bp, synthetic construct; identical to SEQ ID NO: 8920
  source 1..80: mol_type = other DNA

SEQ ID NO: 193651 - DNA, 80 bp, synthetic construct; identical to SEQ ID NO: 8921
  source 1..80: mol_type = other DNA

SEQ ID NO: 193652 - DNA, 80 bp, synthetic construct; identical to SEQ ID NO: 8922
  source 1..80: mol_type = other DNA

SEQ ID NO: 193653 - DNA, 80 bp, synthetic construct; identical to SEQ ID NO: 8923
  source 1..80: mol_type = other DNA

SEQ ID NO: 193654 - DNA, 80 bp, synthetic construct; identical to SEQ ID NO: 8924
  source 1..80: mol_type = other DNA

SEQ ID NO: 193655 - DNA, 80 bp, synthetic construct; identical to SEQ ID NO: 8925
  source 1..80: mol_type = other DNA

SEQ ID NO: 193656 - DNA, 80 bp, synthetic construct; identical to SEQ ID NO: 8926
  source 1..80: mol_type = other DNA

SEQ ID NO: 193657 - DNA, 80 bp, synthetic construct; identical to SEQ ID NO: 8927
  source 1..80: mol_type = other DNA

SEQ ID NO: 193658 - DNA, 80 bp, synthetic construct; identical to SEQ ID NO: 8928
  source 1..80: mol_type = other DNA

SEQ ID NO: 193659 - DNA, 80 bp, synthetic construct; identical to SEQ ID NO: 8929
  source 1..80: mol_type = other DNA

SEQ ID NO: 193660 - DNA, 80 bp, synthetic construct; identical to SEQ ID NO: 8930
  source 1..80: mol_type = other DNA

SEQ ID NO: 193661 - DNA, 80 bp, synthetic construct; identical to SEQ ID NO: 8931
  source 1..80: mol_type = other DNA

SEQ ID NO: 193662 - DNA, 80 bp, synthetic construct; identical to SEQ ID NO: 8932
  source 1..80: mol_type = other DNA

SEQ ID NO: 193663 - DNA, 80 bp, synthetic construct; identical to SEQ ID NO: 8933
  source 1..80: mol_type = other DNA

SEQ ID NO: 193664 - DNA, 80 bp, synthetic construct; identical to SEQ ID NO: 8934
  source 1..80: mol_type = other DNA

SEQ ID NO: 193665 - DNA, 80 bp, synthetic construct; identical to SEQ ID NO: 8935
  source 1..80: mol_type = other DNA

SEQ ID NO: 193666 - DNA, 80 bp, synthetic construct; identical to SEQ ID NO: 8936
  source 1..80: mol_type = other DNA

SEQ ID NO: 193667 - DNA, 80 bp, synthetic construct; identical to SEQ ID NO: 8937
  source 1..80: mol_type = other DNA

SEQ ID NO: 193668 - DNA, 80 bp, synthetic construct; identical to SEQ ID NO: 8938
  source 1..80: mol_type = other DNA

SEQ ID NO: 193669 - DNA, 80 bp, synthetic construct; identical to SEQ ID NO: 8939
  source 1..80: mol_type = other DNA

SEQ ID NO: 193670 - DNA, 80 bp, synthetic construct; identical to SEQ ID NO: 8940
  source 1..80: mol_type = other DNA

SEQ ID NO: 193671 - DNA, 80 bp, synthetic construct; identical to SEQ ID NO: 8941
  source 1..80: mol_type = other DNA

SEQ ID NO: 193672 - DNA, 80 bp, synthetic construct; identical to SEQ ID NO: 8942
  source 1..80: mol_type = other DNA

SEQ ID NO: 193673 - DNA, 80 bp, synthetic construct; identical to SEQ ID NO: 8943
  source 1..80: mol_type = other DNA

SEQ ID NO: 193674 - DNA, 80 bp, synthetic construct; identical to SEQ ID NO: 8944
  source 1..80: mol_type = other DNA

SEQ ID NO: 193675 - DNA, 80 bp, synthetic construct; identical to SEQ ID NO: 8945
  source 1..80: mol_type = other DNA

SEQ ID NO: 193676 - DNA, 80 bp, synthetic construct; identical to SEQ ID NO: 8946
  source 1..80: mol_type = other DNA

SEQ ID NO: 193677 - DNA, 80 bp, synthetic construct; identical to SEQ ID NO: 8947
  source 1..80: mol_type = other DNA

SEQ ID NO: 193678 - DNA, 80 bp, synthetic construct; identical to SEQ ID NO: 8948
  source 1..80: mol_type = other DNA

SEQ ID NO: 193679 - DNA, 80 bp, synthetic construct; identical to SEQ ID NO: 8949
  source 1..80: mol_type = other DNA

SEQ ID NO: 193680 - DNA, 80 bp, synthetic construct; identical to SEQ ID NO: 8950
  source 1..80: mol_type = other DNA

SEQ ID NO: 193681 - DNA, 80 bp, synthetic construct; identical to SEQ ID NO: 8951
  source 1..80: mol_type = other DNA

SEQ ID NO: 193682 - DNA, 80 bp, synthetic construct; identical to SEQ ID NO: 8952
  source 1..80: mol_type = other DNA

SEQ ID NO: 193683 - DNA, 80 bp, synthetic construct; identical to SEQ ID NO: 8953
  source 1..80: mol_type = other DNA

SEQ ID NO: 193684 - DNA, 80 bp, synthetic construct; identical to SEQ ID NO: 8954
  source 1..80: mol_type = other DNA

SEQ ID NO: 193685 - DNA, 80 bp, synthetic construct; identical to SEQ ID NO: 8955
  source 1..80: mol_type = other DNA

SEQ ID NO: 193686 - DNA, 80 bp, synthetic construct; identical to SEQ ID NO: 8956
  source 1..80: mol_type = other DNA

SEQ ID NO: 193687 - DNA, 80 bp, synthetic construct; identical to SEQ ID NO: 8957
  source 1..80: mol_type = other DNA

SEQ ID NO: 193688 - DNA, 80 bp, synthetic construct; identical to SEQ ID NO: 8958
  source 1..80: mol_type = other DNA

SEQ ID NO: 193689 - DNA, 80 bp, synthetic construct; identical to SEQ ID NO: 8959
  source 1..80: mol_type = other DNA

SEQ ID NO: 193690 - DNA, 80 bp, synthetic construct; identical to SEQ ID NO: 8960
  source 1..80: mol_type = other DNA

SEQ ID NO: 193691 - DNA, 80 bp, synthetic construct; identical to SEQ ID NO: 8961
  source 1..80: mol_type = other DNA

SEQ ID NO: 193692 - DNA, 80 bp, synthetic construct; identical to SEQ ID NO: 8962
  source 1..80: mol_type = other DNA

SEQ ID NO: 193693 - DNA, 80 bp, synthetic construct; identical to SEQ ID NO: 8963
  source 1..80: mol_type = other DNA

SEQ ID NO: 193694 - DNA, 80 bp, synthetic construct; identical to SEQ ID NO: 8964
  source 1..80: mol_type = other DNA

SEQ ID NO: 193695 - DNA, 80 bp, synthetic construct; identical to SEQ ID NO: 8965
  source 1..80: mol_type = other DNA

SEQ ID NO: 193696 - DNA, 80 bp, synthetic construct; identical to SEQ ID NO: 8966
  source 1..80: mol_type = other DNA

SEQ ID NO: 193697 - DNA, 80 bp, synthetic construct; identical to SEQ ID NO: 8967
  source 1..80: mol_type = other DNA

SEQ ID NO: 193698 - DNA, 80 bp, synthetic construct; identical to SEQ ID NO: 8968
  source 1..80: mol_type = other DNA

SEQ ID NO: 193699 - DNA, 80 bp, synthetic construct; identical to SEQ ID NO: 8969
  source 1..80: mol_type = other DNA

SEQ ID NO: 193700 - DNA, 80 bp, synthetic construct; identical to SEQ ID NO: 8970
  source 1..80: mol_type = other DNA

SEQ ID NO: 193701 - DNA, 80 bp, synthetic construct; identical to SEQ ID NO: 8971
  source 1..80: mol_type = other DNA

SEQ ID NO: 193702 - DNA, 80 bp, synthetic construct; identical to SEQ ID NO: 8972
  source 1..80: mol_type = other DNA

SEQ ID NO: 193703 - DNA, 80 bp, synthetic construct; identical to SEQ ID NO: 8973
  source 1..80: mol_type = other DNA

SEQ ID NO: 193704 - DNA, 80 bp, synthetic construct; identical to SEQ ID NO: 8974
  source 1..80: mol_type = other DNA

SEQ ID NO: 193705 - DNA, 80 bp, synthetic construct; identical to SEQ ID NO: 8975
  source 1..80: mol_type = other DNA

SEQ ID NO: 193706 - DNA, 80 bp, synthetic construct; identical to SEQ ID NO: 8976
  source 1..80: mol_type = other DNA

SEQ ID NO: 193707 - DNA, 80 bp, synthetic construct; identical to SEQ ID NO: 8977
  source 1..80: mol_type = other DNA

SEQ ID NO: 193708 - DNA, 80 bp, synthetic construct; identical to SEQ ID NO: 8978
  source 1..80: mol_type = other DNA

SEQ ID NO: 193709 - DNA, 80 bp, synthetic construct; identical to SEQ ID NO: 8979
  source 1..80: mol_type = other DNA

SEQ ID NO: 193710 - DNA, 80 bp, synthetic construct; identical to SEQ ID NO: 8980
  source 1..80: mol_type = other DNA

SEQ ID NO: 193711 - DNA, 80 bp, synthetic construct; identical to SEQ ID NO: 8981
  source 1..80: mol_type = other DNA

SEQ ID NO: 193712 - DNA, 80 bp, synthetic construct; identical to SEQ ID NO: 8982
  source 1..80: mol_type = other DNA

SEQ ID NO: 193713 - DNA, 80 bp, synthetic construct; identical to SEQ ID NO: 8983
  source 1..80: mol_type = other DNA

SEQ ID NO: 193714 - DNA, 80 bp, synthetic construct; identical to SEQ ID NO: 8984
  source 1..80: mol_type = other DNA

SEQ ID NO: 193715 - DNA, 80 bp, synthetic construct; identical to SEQ ID NO: 8985
  source 1..80: mol_type = other DNA

SEQ ID NO: 193716 - DNA, 80 bp, synthetic construct; identical to SEQ ID NO: 8986
  source 1..80: mol_type = other DNA

SEQ ID NO: 193717 - DNA, 80 bp, synthetic construct; identical to SEQ ID NO: 8987
  source 1..80: mol_type = other DNA

SEQ ID NO: 193718 - DNA, 80 bp, synthetic construct; identical to SEQ ID NO: 8988
  source 1..80: mol_type = other DNA

SEQ ID NO: 193719 - DNA, 80 bp, synthetic construct; identical to SEQ ID NO: 8989
  source 1..80: mol_type = other DNA

SEQ ID NO: 193720 - DNA, 80 bp, synthetic construct; identical to SEQ ID NO: 8990
  source 1..80: mol_type = other DNA

SEQ ID NO: 193721 - DNA, 80 bp, synthetic construct; identical to SEQ ID NO: 8991
  source 1..80: mol_type = other DNA

SEQ ID NO: 193722 - DNA, 80 bp, synthetic construct; identical to SEQ ID NO: 8992
  source 1..80: mol_type = other DNA

SEQ ID NO: 193723 - DNA, 80 bp, synthetic construct; identical to SEQ ID NO: 8993
  source 1..80: mol_type = other DNA

SEQ ID NO: 193724 - DNA, 80 bp, synthetic construct; identical to SEQ ID NO: 8994
  source 1..80: mol_type = other DNA

SEQ ID NO: 193725 - DNA, 80 bp, synthetic construct; identical to SEQ ID NO: 8995
  source 1..80: mol_type = other DNA

SEQ ID NO: 193726 - DNA, 80 bp, synthetic construct; identical to SEQ ID NO: 8996
  source 1..80: mol_type = other DNA

SEQ ID NO: 193727 - DNA, 80 bp, synthetic construct; identical to SEQ ID NO: 8997
  source 1..80: mol_type = other DNA

SEQ ID NO: 193728 - DNA, 80 bp, synthetic construct; identical to SEQ ID NO: 8998
  source 1..80: mol_type = other DNA

SEQ ID NO: 193729 - DNA, 80 bp, synthetic construct; identical to SEQ ID NO: 8999
  source 1..80: mol_type = other DNA

SEQ ID NO: 193730 - DNA, 80 bp, synthetic construct; identical to SEQ ID NO: 9000
  source 1..80: mol_type = other DNA

SEQ ID NO: 193731 - DNA, 80 bp, synthetic construct; identical to SEQ ID NO: 9001
  source 1..80: mol_type = other DNA

SEQ ID NO: 193732 - DNA, 80 bp, synthetic construct; identical to SEQ ID NO: 9002
  source 1..80: mol_type = other DNA

SEQ ID NO: 193733 - DNA, 80 bp, synthetic construct; identical to SEQ ID NO: 9003
  source 1..80: mol_type = other DNA

SEQ ID NO: 193734 - DNA, 80 bp, synthetic construct; identical to SEQ ID NO: 9004
  source 1..80: mol_type = other DNA

SEQ ID NO: 193735 - DNA, 80 bp, synthetic construct; identical to SEQ ID NO: 9005
  source 1..80: mol_type = other DNA

SEQ ID NO: 193736 - DNA, 80 bp, synthetic construct; identical to SEQ ID NO: 9006
  source 1..80: mol_type = other DNA

SEQ ID NO: 193737 - DNA, 80 bp, synthetic construct; identical to SEQ ID NO: 9007
  source 1..80: mol_type = other DNA

SEQ ID NO: 193738 - DNA, 80 bp, synthetic construct; identical to SEQ ID NO: 9008
  source 1..80: mol_type = other DNA

SEQ ID NO: 193739 - DNA, 80 bp, synthetic construct; identical to SEQ ID NO: 9009
  source 1..80: mol_type = other DNA

SEQ ID NO: 193740 - DNA, 80 bp, synthetic construct; identical to SEQ ID NO: 9010
  source 1..80: mol_type = other DNA

SEQ ID NO: 193741 - DNA, 80 bp, synthetic construct; identical to SEQ ID NO: 9011
  source 1..80: mol_type = other DNA

SEQ ID NO: 193742 - DNA, 80 bp, synthetic construct; identical to SEQ ID NO: 9012
  source 1..80: mol_type = other DNA

SEQ ID NO: 193743 - DNA, 80 bp, synthetic construct; identical to SEQ ID NO: 9013
  source 1..80: mol_type = other DNA

SEQ ID NO: 193744 - DNA, 80 bp, synthetic construct; identical to SEQ ID NO: 9014
  source 1..80: mol_type = other DNA

SEQ ID NO: 193745 - DNA, 80 bp, synthetic construct; identical to SEQ ID NO: 9015
  source 1..80: mol_type = other DNA

SEQ ID NO: 193746 - DNA, 80 bp, synthetic construct; identical to SEQ ID NO: 9016
  source 1..80: mol_type = other DNA

SEQ ID NO: 193747 - DNA, 80 bp, synthetic construct; identical to SEQ ID NO: 9017
  source 1..80: mol_type = other DNA

SEQ ID NO: 193748 - DNA, 80 bp, synthetic construct; identical to SEQ ID NO: 9018
  source 1..80: mol_type = other DNA

SEQ ID NO: 193749 - DNA, 80 bp, synthetic construct; identical to SEQ ID NO: 9019
  source 1..80: mol_type = other DNA

SEQ ID NO: 193750 - DNA, 80 bp, synthetic construct; identical to SEQ ID NO: 9020
  source 1..80: mol_type = other DNA

SEQ ID NO: 193751 - DNA, 80 bp, synthetic construct; identical to SEQ ID NO: 9021
  source 1..80: mol_type = other DNA

SEQ ID NO: 193752 - DNA, 80 bp, synthetic construct; identical to SEQ ID NO: 9022
  source 1..80: mol_type = other DNA

SEQ ID NO: 193753 - DNA, 80 bp, synthetic construct; identical to SEQ ID NO: 9023
  source 1..80: mol_type = other DNA

SEQ ID NO: 193754 - DNA, 80 bp, synthetic construct; identical to SEQ ID NO: 9024
  source 1..80: mol_type = other DNA

SEQ ID NO: 193755 - DNA, 80 bp, synthetic construct; identical to SEQ ID NO: 9025
  source 1..80: mol_type = other DNA

SEQ ID NO: 193756 - DNA, 80 bp, synthetic construct; identical to SEQ ID NO: 9026
  source 1..80: mol_type = other DNA

SEQ ID NO: 193757 - DNA, 80 bp, synthetic construct; identical to SEQ ID NO: 9027
  source 1..80: mol_type = other DNA

SEQ ID NO: 193758 - DNA, 80 bp, synthetic construct; identical to SEQ ID NO: 9028
  source 1..80: mol_type = other DNA

SEQ ID NO: 193759 - DNA, 80 bp, synthetic construct; identical to SEQ ID NO: 9029
  source 1..80: mol_type = other DNA

SEQ ID NO: 193760 - DNA, 80 bp, synthetic construct; identical to SEQ ID NO: 9030
  source 1..80: mol_type = other DNA

SEQ ID NO: 193761 - DNA, 80 bp, synthetic construct; identical to SEQ ID NO: 9031
  source 1..80: mol_type = other DNA

SEQ ID NO: 193762 - DNA, 80 bp, synthetic construct; identical to SEQ ID NO: 9032
  source 1..80: mol_type = other DNA

SEQ ID NO: 193763 - DNA, 80 bp, synthetic construct; identical to SEQ ID NO: 9033
  source 1..80: mol_type = other DNA

SEQ ID NO: 193764 - DNA, 80 bp, synthetic construct; identical to SEQ ID NO: 9034
  source 1..80: mol_type = other DNA

SEQ ID NO: 193765 - DNA, 80 bp, synthetic construct; identical to SEQ ID NO: 9035
  source 1..80: mol_type = other DNA

SEQ ID NO: 193766 - DNA, 80 bp, synthetic construct; identical to SEQ ID NO: 9036
  source 1..80: mol_type = other DNA

SEQ ID NO: 193767 - DNA, 80 bp, synthetic construct; identical to SEQ ID NO: 9037
  source 1..80: mol_type = other DNA

SEQ ID NO: 193768 - DNA, 80 bp, synthetic construct; identical to SEQ ID NO: 9038
  source 1..80: mol_type = other DNA

SEQ ID NO: 193769 - DNA, 80 bp, synthetic construct; identical to SEQ ID NO: 9039
  source 1..80: mol_type = other DNA

SEQ ID NO: 193770 - DNA, 80 bp, synthetic construct; identical to SEQ ID NO: 9040
  source 1..80: mol_type = other DNA

SEQ ID NO: 193771 - DNA, 80 bp, synthetic construct; identical to SEQ ID NO: 9041
  source 1..80: mol_type = other DNA

SEQ ID NO: 193772 - DNA, 80 bp, synthetic construct; identical to SEQ ID NO: 9042
  source 1..80: mol_type = other DNA

SEQ ID NO: 193773 - DNA, 80 bp, synthetic construct; identical to SEQ ID NO: 9043
  source 1..80: mol_type = other DNA

SEQ ID NO: 193774 - DNA, 80 bp, synthetic construct; identical to SEQ ID NO: 9044
  source 1..80: mol_type = other DNA

SEQ ID NO: 193775 - DNA, 80 bp, synthetic construct; identical to SEQ ID NO: 9045
  source 1..80: mol_type = other DNA

SEQ ID NO: 193776 - DNA, 80 bp, synthetic construct; identical to SEQ ID NO: 9046
  source 1..80: mol_type = other DNA

SEQ ID NO: 193777 - DNA, 80 bp, synthetic construct; identical to SEQ ID NO: 9047
  source 1..80: mol_type = other DNA

SEQ ID NO: 193778 - DNA, 80 bp, synthetic construct; identical to SEQ ID NO: 9048
  source 1..80: mol_type = other DNA

SEQ ID NO: 193779 - DNA, 80 bp, synthetic construct; identical to SEQ ID NO: 9049
  source 1..80: mol_type = other DNA

SEQ ID NO: 193780 - DNA, 80 bp, synthetic construct; identical to SEQ ID NO: 9050
  source 1..80: mol_type = other DNA

SEQ ID NO: 193781 - DNA, 80 bp, synthetic construct; identical to SEQ ID NO: 9051
  source 1..80: mol_type = other DNA

SEQ ID NO: 193782 - DNA, 80 bp, synthetic construct; identical to SEQ ID NO: 9052
  source 1..80: mol_type = other DNA

SEQ ID NO: 193783 - DNA, 80 bp, synthetic construct; identical to SEQ ID NO: 9053
  source 1..80: mol_type = other DNA

SEQ ID NO: 193784 - DNA, 80 bp, synthetic construct; identical to SEQ ID NO: 9054
  source 1..80: mol_type = other DNA

SEQ ID NO: 193785 - DNA, 80 bp, synthetic construct; identical to SEQ ID NO: 9055
  source 1..80: mol_type = other DNA

SEQ ID NO: 193786 - DNA, 80 bp, synthetic construct; identical to SEQ ID NO: 9056
  source 1..80: mol_type = other DNA

SEQ ID NO: 193787 - DNA, 80 bp, synthetic construct; identical to SEQ ID NO: 9057
  source 1..80: mol_type = other DNA

SEQ ID NO: 193788 - DNA, 80 bp, synthetic construct; identical to SEQ ID NO: 9058
  source 1..80: mol_type = other DNA

SEQ ID NO: 193789 - DNA, 80 bp, synthetic construct; identical to SEQ ID NO: 9059
  source 1..80: mol_type = other DNA

SEQ ID NO: 193790 - DNA, 80 bp, synthetic construct; identical to SEQ ID NO: 9060
  source 1..80: mol_type = other DNA

SEQ ID NO: 193791 - DNA, 80 bp, synthetic construct; identical to SEQ ID NO: 9061
  source 1..80: mol_type = other DNA

SEQ ID NO: 193792 - DNA, 80 bp, synthetic construct; identical to SEQ ID NO: 9062
  source 1..80: mol_type = other DNA

SEQ ID NO: 193793 - DNA, 80 bp, synthetic construct; identical to SEQ ID NO: 9063
  source 1..80: mol_type = other DNA

SEQ ID NO: 193794 - DNA, 80 bp, synthetic construct; identical to SEQ ID NO: 9064
  source 1..80: mol_type = other DNA

SEQ ID NO: 193795 - DNA, 80 bp, synthetic construct; identical to SEQ ID NO: 9065
  source 1..80: mol_type = other DNA

SEQ ID NO: 193796 - DNA, 80 bp, synthetic construct; identical to SEQ ID NO: 9066
  source 1..80: mol_type = other DNA

SEQ ID NO: 193797 - DNA, 80 bp, synthetic construct; identical to SEQ ID NO: 9067
  source 1..80: mol_type = other DNA

SEQ ID NO: 193798 - DNA, 80 bp, synthetic construct; identical to SEQ ID NO: 9068
  source 1..80: mol_type = other DNA

SEQ ID NO: 193799 - DNA, 80 bp, synthetic construct; identical to SEQ ID NO: 9069
  source 1..80: mol_type = other DNA

SEQ ID NO: 193800 - DNA, 80 bp, synthetic construct; identical to SEQ ID NO: 9070
  source 1..80: mol_type = other DNA

SEQ ID NO: 193801 - DNA, 80 bp, synthetic construct; identical to SEQ ID NO: 9071
  source 1..80: mol_type = other DNA

SEQ ID NO: 193802 - DNA, 80 bp, synthetic construct; identical to SEQ ID NO: 9072
  source 1..80: mol_type = other DNA

SEQ ID NO: 193803 - DNA, 80 bp, synthetic construct; identical to SEQ ID NO: 9073
  source 1..80: mol_type = other DNA

SEQ ID NO: 193804 - DNA, 80 bp, synthetic construct; identical to SEQ ID NO: 9074
  source 1..80: mol_type = other DNA

SEQ ID NO: 193805 - DNA, 80 bp, synthetic construct; identical to SEQ ID NO: 9075
  source 1..80: mol_type = other DNA

SEQ ID NO: 193806 - DNA, 80 bp, synthetic construct; identical to SEQ ID NO: 9076
  source 1..80: mol_type = other DNA

SEQ ID NO: 193807 - DNA, 80 bp, synthetic construct; identical to SEQ ID NO: 9077
  source 1..80: mol_type = other DNA

SEQ ID NO: 193808 - DNA, 80 bp, synthetic construct; identical to SEQ ID NO: 9078
  source 1..80: mol_type = other DNA

SEQ ID NO: 193809 - DNA, 80 bp, synthetic construct; identical to SEQ ID NO: 9079
  source 1..80: mol_type = other DNA

SEQ ID NO: 193810 - DNA, 80 bp, synthetic construct; identical to SEQ ID NO: 9080
  source 1..80: mol_type = other DNA

SEQ ID NO: 193811 - DNA, 80 bp, synthetic construct; identical to SEQ ID NO: 9081
  source 1..80: mol_type = other DNA

SEQ ID NO: 193812 - DNA, 80 bp, synthetic construct; identical to SEQ ID NO: 9082
  source 1..80: mol_type = other DNA

SEQ ID NO: 193813 - DNA, 80 bp, synthetic construct; identical to SEQ ID NO: 9083
  source 1..80: mol_type = other DNA

SEQ ID NO: 193814 - DNA, 80 bp, synthetic construct; identical to SEQ ID NO: 9084
  source 1..80: mol_type = other DNA

SEQ ID NO: 193815 - DNA, 80 bp, synthetic construct; identical to SEQ ID NO: 9085
  source 1..80: mol_type = other DNA

SEQ ID NO: 193816 - DNA, 80 bp, synthetic construct; identical to SEQ ID NO: 9086
  source 1..80: mol_type = other DNA

SEQ ID NO: 193817 - DNA, 80 bp, synthetic construct; identical to SEQ ID NO: 9087
  source 1..80: mol_type = other DNA

SEQ ID NO: 193818 - DNA, 80 bp, synthetic construct; identical to SEQ ID NO: 9088
  source 1..80: mol_type = other DNA

SEQ ID NO: 193819 - DNA, 80 bp, synthetic construct; identical to SEQ ID NO: 9089
  source 1..80: mol_type = other DNA

SEQ ID NO: 193820 - DNA, 80 bp, synthetic construct; identical to SEQ ID NO: 9090
  source 1..80: mol_type = other DNA

SEQ ID NO: 193821 - DNA, 80 bp, synthetic construct; identical to SEQ ID NO: 9091
  source 1..80: mol_type = other DNA

SEQ ID NO: 193822 - DNA, 80 bp, synthetic construct; identical to SEQ ID NO: 9092
  source 1..80: mol_type = other DNA

SEQ ID NO: 193823 - DNA, 80 bp, synthetic construct; identical to SEQ ID NO: 9093
  source 1..80: mol_type = other DNA

SEQ ID NO: 193824 - DNA, 80 bp, synthetic construct; identical to SEQ ID NO: 9094
  source 1..80: mol_type = other DNA

SEQ ID NO: 193825 - DNA, 80 bp, synthetic construct; identical to SEQ ID NO: 9095
  source 1..80: mol_type = other DNA

SEQ ID NO: 193826 - DNA, 80 bp, synthetic construct; identical to SEQ ID NO: 9096
  source 1..80: mol_type = other DNA

SEQ ID NO: 193827 - DNA, 80 bp, synthetic construct; identical to SEQ ID NO: 9097
  source 1..80: mol_type = other DNA

SEQ ID NO: 193828 - DNA, 80 bp, synthetic construct; identical to SEQ ID NO: 9098
  source 1..80: mol_type = other DNA

SEQ ID NO: 193829 - DNA, 80 bp, synthetic construct; identical to SEQ ID NO: 9099
  source 1..80: mol_type = other DNA

SEQ ID NO: 193830 - DNA, 80 bp, synthetic construct; identical to SEQ ID NO: 9100
  source 1..80: mol_type = other DNA

SEQ ID NO: 193831 - DNA, 80 bp, synthetic construct; identical to SEQ ID NO: 9101
  source 1..80: mol_type = other DNA

SEQ ID NO: 193832 - DNA, 80 bp, synthetic construct; identical to SEQ ID NO: 9102
  source 1..80: mol_type = other DNA

SEQ ID NO: 193833 - DNA, 80 bp, synthetic construct; identical to SEQ ID NO: 9103
  source 1..80: mol_type = other DNA

SEQ ID NO: 193834 - DNA, 80 bp, synthetic construct; identical to SEQ ID NO: 9104
  source 1..80: mol_type = other DNA

SEQ ID NO: 193835 - DNA, 80 bp, synthetic construct; identical to SEQ ID NO: 9105
  source 1..80: mol_type = other DNA

SEQ ID NO: 193836 - DNA, 80 bp, synthetic construct; identical to SEQ ID NO: 9106
  source 1..80: mol_type = other DNA

SEQ ID NO: 193837 - DNA, 80 bp, synthetic construct; identical to SEQ ID NO: 9107
  source 1..80: mol_type = other DNA

SEQ ID NO: 193838 - DNA, 80 bp, synthetic construct; identical to SEQ ID NO: 9108
  source 1..80: mol_type = other DNA

SEQ ID NO: 193839 - DNA, 80 bp, synthetic construct; identical to SEQ ID NO: 9109
  source 1..80: mol_type = other DNA

SEQ ID NO: 193840 - DNA, 80 bp, synthetic construct; identical to SEQ ID NO: 9110
  source 1..80: mol_type = other DNA

SEQ ID NO: 193841 - DNA, 80 bp, synthetic construct; identical to SEQ ID NO: 9111
  source 1..80: mol_type = other DNA

SEQ ID NO: 193842 - DNA, 80 bp, synthetic construct; identical to SEQ ID NO: 9112
  source 1..80: mol_type = other DNA

SEQ ID NO: 193843 - DNA, 80 bp, synthetic construct; identical to SEQ ID NO: 9113
  source 1..80: mol_type = other DNA

SEQ ID NO: 193844 - DNA, 80 bp, synthetic construct; identical to SEQ ID NO: 9114
  source 1..80: mol_type = other DNA

SEQ ID NO: 193845 - DNA, 80 bp, synthetic construct; identical to SEQ ID NO: 9115
  source 1..80: mol_type = other DNA

SEQ ID NO: 193846 - DNA, 80 bp, synthetic construct; identical to SEQ ID NO: 9116
  source 1..80: mol_type = other DNA

SEQ ID NO: 193847 - DNA, 80 bp, synthetic construct; identical to SEQ ID NO: 9117
  source 1..80: mol_type = other DNA

SEQ ID NO: 193848 - DNA, 80 bp, synthetic construct; identical to SEQ ID NO: 9118
  source 1..80: mol_type = other DNA

SEQ ID NO: 193849 - DNA, 80 bp, synthetic construct; identical to SEQ ID NO: 9119
  source 1..80: mol_type = other DNA

SEQ ID NO: 193850 - DNA, 80 bp, synthetic construct; identical to SEQ ID NO: 9120
  source 1..80: mol_type = other DNA

SEQ ID NO: 193851 - DNA, 80 bp, synthetic construct; identical to SEQ ID NO: 9121
  source 1..80: mol_type = other DNA

SEQ ID NO: 193852 - DNA, 80 bp, synthetic construct; identical to SEQ ID NO: 9122
  source 1..80: mol_type = other DNA

SEQ ID NO: 193853 - DNA, 80 bp, synthetic construct; identical to SEQ ID NO: 9123
  source 1..80: mol_type = other DNA

SEQ ID NO: 193854 - DNA, 80 bp, synthetic construct; identical to SEQ ID NO: 9124
  source 1..80: mol_type = other DNA

SEQ ID NO: 193855 - DNA, 80 bp, synthetic construct; identical to SEQ ID NO: 9125
  source 1..80: mol_type = other DNA

SEQ ID NO: 193856 - DNA, 80 bp, synthetic construct; identical to SEQ ID NO: 9126
  source 1..80: mol_type = other DNA

SEQ ID NO: 193857 - DNA, 80 bp, synthetic construct; identical to SEQ ID NO: 9127
  source 1..80: mol_type = other DNA

SEQ ID NO: 193858 - DNA, 80 bp, synthetic construct; identical to SEQ ID NO: 9128
  source 1..80: mol_type = other DNA

SEQ ID NO: 193859 - DNA, 80 bp, synthetic construct; identical to SEQ ID NO: 9129
  source 1..80: mol_type = other DNA

SEQ ID NO: 193860 - DNA, 80 bp, synthetic construct; identical to SEQ ID NO: 9130
  source 1..80: mol_type = other DNA

SEQ ID NO: 193861 - DNA, 80 bp, synthetic construct; identical to SEQ ID NO: 9131
  source 1..80: mol_type = other DNA

SEQ ID NO: 193862 - DNA, 80 bp, synthetic construct; identical to SEQ ID NO: 9132
  source 1..80: mol_type = other DNA

SEQ ID NO: 193863 - DNA, 80 bp, synthetic construct; identical to SEQ ID NO: 9133
  source 1..80: mol_type = other DNA

SEQ ID NO: 193864 - DNA, 80 bp, synthetic construct; identical to SEQ ID NO: 9134
  source 1..80: mol_type = other DNA

SEQ ID NO: 193865 - DNA, 80 bp, synthetic construct; identical to SEQ ID NO: 9135
  source 1..80: mol_type = other DNA

SEQ ID NO: 193866 - DNA, 80 bp, synthetic construct; identical to SEQ ID NO: 9136
  source 1..80: mol_type = other DNA

SEQ ID NO: 193867 - DNA, 80 bp, synthetic construct; identical to SEQ ID NO: 9137
  source 1..80: mol_type = other DNA

SEQ ID NO: 193868 - DNA, 80 bp, synthetic construct; identical to SEQ ID NO: 9138
  source 1..80: mol_type = other DNA

SEQ ID NO: 193869 - DNA, 80 bp, synthetic construct; identical to SEQ ID NO: 9139
  source 1..80: mol_type = other DNA

SEQ ID NO: 193870 - DNA, 80 bp, synthetic construct; identical to SEQ ID NO: 9140
  source 1..80: mol_type = other DNA

SEQ ID NO: 193871 - DNA, 80 bp, synthetic construct; identical to SEQ ID NO: 9141
  source 1..80: mol_type = other DNA

SEQ ID NO: 193872 - DNA, 80 bp, synthetic construct; identical to SEQ ID NO: 9142
  source 1..80: mol_type = other DNA

SEQ ID NO: 193873 - DNA, 80 bp, synthetic construct; identical to SEQ ID NO: 9143
  source 1..80: mol_type = other DNA

SEQ ID NO: 193874 - DNA, 80 bp, synthetic construct; identical to SEQ ID NO: 9144
  source 1..80: mol_type = other DNA

SEQ ID NO: 193875 - DNA, 80 bp, synthetic construct; identical to SEQ ID NO: 9145
  source 1..80: mol_type = other DNA

SEQ ID NO: 193876 - DNA, 80 bp, synthetic construct; identical to SEQ ID NO: 9146
  source 1..80: mol_type = other DNA

SEQ ID NO: 193877 - DNA, 80 bp, synthetic construct; identical to SEQ ID NO: 9147
  source 1..80: mol_type = other DNA

SEQ ID NO: 193878 - DNA, 80 bp, synthetic construct; identical to SEQ ID NO: 9148
  source 1..80: mol_type = other DNA

SEQ ID NO: 193879 - DNA, 80 bp, synthetic construct; identical to SEQ ID NO: 9149
  source 1..80: mol_type = other DNA

SEQ ID NO: 193880 - DNA, 80 bp, synthetic construct; identical to SEQ ID NO: 9150
  source 1..80: mol_type = other DNA

SEQ ID NO: 193881 - DNA, 80 bp, synthetic construct; identical to SEQ ID NO: 9151
  source 1..80: mol_type = other DNA

SEQ ID NO: 193882 - DNA, 80 bp, synthetic construct; identical to SEQ ID NO: 9152
  source 1..80: mol_type = other DNA

SEQ ID NO: 193883 - DNA, 80 bp, synthetic construct; identical to SEQ ID NO: 9153
  source 1..80: mol_type = other DNA

SEQ ID NO: 193884 - DNA, 80 bp, synthetic construct; identical to SEQ ID NO: 9154
  source 1..80: mol_type = other DNA

SEQ ID NO: 193885 - DNA, 80 bp, synthetic construct; identical to SEQ ID NO: 9155
  source 1..80: mol_type = other DNA

SEQ ID NO: 193886 - DNA, 80 bp, synthetic construct; identical to SEQ ID NO: 9156
  source 1..80: mol_type = other DNA

SEQ ID NO: 193887 - DNA, 80 bp, synthetic construct; identical to SEQ ID NO: 9157
  source 1..80: mol_type = other DNA

SEQ ID NO: 193888 - DNA, 80 bp, synthetic construct; identical to SEQ ID NO: 9158
  source 1..80: mol_type = other DNA

SEQ ID NO: 193889 - DNA, 80 bp, synthetic construct; identical to SEQ ID NO: 9159
  source 1..80: mol_type = other DNA

SEQ ID NO: 193890 - DNA, 80 bp, synthetic construct; identical to SEQ ID NO: 9160
  source 1..80: mol_type = other DNA

SEQ ID NO: 193891 - DNA, 80 bp, synthetic construct; identical to SEQ ID NO: 9161
  source 1..80: mol_type = other DNA

SEQ ID NO: 193892 - DNA, 80 bp, synthetic construct; identical to SEQ ID NO: 9162
  source 1..80: mol_type = other DNA

SEQ ID NO: 193893 - DNA, 80 bp, synthetic construct; identical to SEQ ID NO: 9163
  source 1..80: mol_type = other DNA

SEQ ID NO: 193894 - DNA, 80 bp, synthetic construct; identical to SEQ ID NO: 9164
  source 1..80: mol_type = other DNA

SEQ ID NO: 193895 - DNA, 80 bp, synthetic construct; identical to SEQ ID NO: 9165
  source 1..80: mol_type = other DNA

SEQ ID NO: 193896 - DNA, 80 bp, synthetic construct; identical to SEQ ID NO: 9166
  source 1..80: mol_type = other DNA

SEQ ID NO: 193897 - DNA, 80 bp, synthetic construct; identical to SEQ ID NO: 9167
  source 1..80: mol_type = other DNA

SEQ ID NO: 193898 - DNA, 80 bp, synthetic construct; identical to SEQ ID NO: 9168
  source 1..80: mol_type = other DNA

SEQ ID NO: 193899 - DNA, 80 bp, synthetic construct; identical to SEQ ID NO: 9169
  source 1..80: mol_type = other DNA

SEQ ID NO: 193900 - DNA, 80 bp, synthetic construct; identical to SEQ ID NO: 9170
  source 1..80: mol_type = other DNA

SEQ ID NO: 193901 - DNA, 80 bp, synthetic construct; identical to SEQ ID NO: 9171
  source 1..80: mol_type = other DNA

SEQ ID NO: 193902 - DNA, 80 bp, synthetic construct; identical to SEQ ID NO: 9172
  source 1..80: mol_type = other DNA

SEQ ID NO: 193903 - DNA, 80 bp, synthetic construct; identical to SEQ ID NO: 9173
  source 1..80: mol_type = other DNA

SEQ ID NO: 193904 - DNA, 80 bp, synthetic construct; identical to SEQ ID NO: 9174
  source 1..80: mol_type = other DNA

SEQ ID NO: 193905 - DNA, 80 bp, synthetic construct; identical to SEQ ID NO: 9175
  source 1..80: mol_type = other DNA

SEQ ID NO: 193906 - DNA, 80 bp, synthetic construct; identical to SEQ ID NO: 9176
  source 1..80: mol_type = other DNA

SEQ ID NO: 193907 - DNA, 80 bp, synthetic construct; identical to SEQ ID NO: 9177
  source 1..80: mol_type = other DNA

SEQ ID NO: 193908 - DNA, 80 bp, synthetic construct; identical to SEQ ID NO: 9178
  source 1..80: mol_type = other DNA

SEQ ID NO: 193909 - DNA, 80 bp, synthetic construct; identical to SEQ ID NO: 9179
  source 1..80: mol_type = other DNA

SEQ ID NO: 193910 - DNA, 80 bp, synthetic construct; identical to SEQ ID NO: 9180
  source 1..80: mol_type = other DNA

SEQ ID NO: 193911 - DNA, 80 bp, synthetic construct; identical to SEQ ID NO: 9181
  source 1..80: mol_type = other DNA

SEQ ID NO: 193912 - DNA, 80 bp, synthetic construct; identical to SEQ ID NO: 9182
  source 1..80: mol_type = other DNA

SEQ ID NO: 193913 - DNA, 80 bp, synthetic construct; identical to SEQ ID NO: 9183
  source 1..80: mol_type = other DNA

SEQ ID NO: 193914 - DNA, 80 bp, synthetic construct; identical to SEQ ID NO: 9184
  source 1..80: mol_type = other DNA

SEQ ID NO: 193915 - DNA, 80 bp, synthetic construct; identical to SEQ ID NO: 9185
  source 1..80: mol_type = other DNA

SEQ ID NO: 193916 - DNA, 80 bp, synthetic construct; identical to SEQ ID NO: 9186
  source 1..80: mol_type = other DNA

SEQ ID NO: 193917 - DNA, 80 bp, synthetic construct; identical to SEQ ID NO: 9187
  source 1..80: mol_type = other DNA

SEQ ID NO: 193918 - DNA, 80 bp, synthetic construct; identical to SEQ ID NO: 9188
  source 1..80: mol_type = other DNA

SEQ ID NO: 193919 - DNA, 80 bp, synthetic construct; identical to SEQ ID NO: 9189
  source 1..80: mol_type = other DNA

SEQ ID NO: 193920 - DNA, 80 bp, synthetic construct; identical to SEQ ID NO: 9190
  source 1..80: mol_type = other DNA

SEQ ID NO: 193921 - DNA, 80 bp, synthetic construct; identical to SEQ ID NO: 9191
  source 1..80: mol_type = other DNA

SEQ ID NO: 193922 - DNA, 80 bp, synthetic construct; identical to SEQ ID NO: 9192
  source 1..80: mol_type = other DNA

SEQ ID NO: 193923 - DNA, 80 bp, synthetic construct; identical to SEQ ID NO: 9193
  source 1..80: mol_type = other DNA

SEQ ID NO: 193924 - DNA, 80 bp, synthetic construct; identical to SEQ ID NO: 9194
  source 1..80: mol_type = other DNA

SEQ ID NO: 193925 - DNA, 80 bp, synthetic construct; identical to SEQ ID NO: 9195
  source 1..80: mol_type = other DNA

SEQ ID NO: 193926 - DNA, 80 bp, synthetic construct; identical to SEQ ID NO: 9196
  source 1..80: mol_type = other DNA

SEQ ID NO: 193927 - DNA, 80 bp, synthetic construct; identical to SEQ ID NO: 9197
  source 1..80: mol_type = other DNA

SEQ ID NO: 193928 - DNA, 80 bp, synthetic construct; identical to SEQ ID NO: 9198
  source 1..80: mol_type = other DNA

SEQ ID NO: 193929 - DNA, 80 bp, synthetic construct; identical to SEQ ID NO: 9199
  source 1..80: mol_type = other DNA

SEQ ID NO: 193930 - DNA, 80 bp, synthetic construct; identical to SEQ ID NO: 9200
  source 1..80: mol_type = other DNA

SEQ ID NO: 193931 - DNA, 80 bp, synthetic construct; identical to SEQ ID NO: 9201
  source 1..80: mol_type = other DNA

SEQ ID NO: 193932 - DNA, 80 bp, synthetic construct; identical to SEQ ID NO: 9202
  source 1..80: mol_type = other DNA

SEQ ID NO: 193933 - DNA, 80 bp, synthetic construct; identical to SEQ ID NO: 9203
  source 1..80: mol_type = other DNA

SEQ ID NO: 193934 - DNA, 80 bp, synthetic construct; identical to SEQ ID NO: 9204
  source 1..80: mol_type = other DNA

SEQ ID NO: 193935 - DNA, 80 bp, synthetic construct; identical to SEQ ID NO: 9205
  source 1..80: mol_type = other DNA

SEQ ID NO: 193936 - DNA, 80 bp, synthetic construct; identical to SEQ ID NO: 9206
  source 1..80: mol_type = other DNA

SEQ ID NO: 193937 - DNA, 80 bp, synthetic construct; identical to SEQ ID NO: 9207
  source 1..80: mol_type = other DNA

SEQ ID NO: 193938 - DNA, 80 bp, synthetic construct; identical to SEQ ID NO: 9208
  source 1..80: mol_type = other DNA

SEQ ID NO: 193939 - DNA, 80 bp, synthetic construct; identical to SEQ ID NO: 9209
  source 1..80: mol_type = other DNA

SEQ ID NO: 193940 - DNA, 80 bp, synthetic construct; identical to SEQ ID NO: 9210
  source 1..80: mol_type = other DNA

SEQ ID NO: 193941 - DNA, 80 bp, synthetic construct; identical to SEQ ID NO: 9211
  source 1..80: mol_type = other DNA

SEQ ID NO: 193942 - DNA, 80 bp, synthetic construct; identical to SEQ ID NO: 9212
  source 1..80: mol_type = other DNA

SEQ ID NO: 193943 - DNA, 80 bp, synthetic construct; identical to SEQ ID NO: 9213
  source 1..80: mol_type = other DNA

SEQ ID NO: 193944 - DNA, 80 bp, synthetic construct; identical to SEQ ID NO: 9214
  source 1..80: mol_type = other DNA

SEQ ID NO: 193945 - DNA, 80 bp, synthetic construct; identical to SEQ ID NO: 9215
  source 1..80: mol_type = other DNA

SEQ ID NO: 193946 - DNA, 80 bp, synthetic construct; identical to SEQ ID NO: 9216
  source 1..80: mol_type = other DNA

SEQ ID NO: 193947 - DNA, 80 bp, synthetic construct; identical to SEQ ID NO: 9217
  source 1..80: mol_type = other DNA

SEQ ID NO: 193948 - DNA, 80 bp, synthetic construct; identical to SEQ ID NO: 9218
  source 1..80: mol_type = other DNA

SEQ ID NO: 193949 - DNA, 80 bp, synthetic construct; identical to SEQ ID NO: 9219
  source 1..80: mol_type = other DNA

SEQ ID NO: 193950 - DNA, 80 bp, synthetic construct; identical to SEQ ID NO: 9220
  source 1..80: mol_type = other DNA

SEQ ID NO: 193951 - DNA, 80 bp, synthetic construct; identical to SEQ ID NO: 9221
  source 1..80: mol_type = other DNA

SEQ ID NO: 193952 - DNA, 80 bp, synthetic construct; identical to SEQ ID NO: 9222
  source 1..80: mol_type = other DNA

SEQ ID NO: 193953 - DNA, 80 bp, synthetic construct; identical to SEQ ID NO: 9223
  source 1..80: mol_type = other DNA

SEQ ID NO: 193954 - DNA, 80 bp, synthetic construct; identical to SEQ ID NO: 9224
  source 1..80: mol_type = other DNA

SEQ ID NO: 193955 - DNA, 80 bp, synthetic construct; identical to SEQ ID NO: 9225
  source 1..80: mol_type = other DNA

SEQ ID NO: 193956 - DNA, 80 bp, synthetic construct; identical to SEQ ID NO: 9226
  source 1..80: mol_type = other DNA

SEQ ID NO: 193957 - DNA, 80 bp, synthetic construct; identical to SEQ ID NO: 9227
  source 1..80: mol_type = other DNA

SEQ ID NO: 193958 - DNA, 80 bp, synthetic construct; identical to SEQ ID NO: 9228
  source 1..80: mol_type = other DNA

SEQ ID NO: 193959 - DNA, 80 bp, synthetic construct; identical to SEQ ID NO: 9229
  source 1..80: mol_type = other DNA

SEQ ID NO: 193960 - DNA, 80 bp, synthetic construct; identical to SEQ ID NO: 9230
  source 1..80: mol_type = other DNA

SEQ ID NO: 193961 - DNA, 80 bp, synthetic construct; identical to SEQ ID NO: 9231
  source 1..80: mol_type = other DNA

SEQ ID NO: 193962 - DNA, 80 bp, synthetic construct; identical to SEQ ID NO: 9232
  source 1..80: mol_type = other DNA

SEQ ID NO: 193963 - DNA, 80 bp, synthetic construct; identical to SEQ ID NO: 9233
  source 1..80: mol_type = other DNA

SEQ ID NO: 193964 - DNA, 80 bp, synthetic construct; identical to SEQ ID NO: 9234
  source 1..80: mol_type = other DNA

SEQ ID NO: 193965 - DNA, 80 bp, synthetic construct; identical to SEQ ID NO: 9235
  source 1..80: mol_type = other DNA

SEQ ID NO: 193966 - DNA, 80 bp, synthetic construct; identical to SEQ ID NO: 9236
  source 1..80: mol_type = other DNA

SEQ ID NO: 193967 - DNA, 80 bp, synthetic construct; identical to SEQ ID NO: 9237
  source 1..80: mol_type = other DNA

SEQ ID NO: 193968 - DNA, 80 bp, synthetic construct; identical to SEQ ID NO: 9238
  source 1..80: mol_type = other DNA

SEQ ID NO: 193969 - DNA, 80 bp, synthetic construct; identical to SEQ ID NO: 9239
  source 1..80: mol_type = other DNA

SEQ ID NO: 193970 - DNA, 80 bp, synthetic construct; identical to SEQ ID NO: 9240
  source 1..80: mol_type = other DNA

SEQ ID NO: 193971 - DNA, 80 bp, synthetic construct; identical to SEQ ID NO: 9241
  source 1..80: mol_type = other DNA

SEQ ID NO: 193972 - DNA, 80 bp, synthetic construct; identical to SEQ ID NO: 9242
  source 1..80: mol_type = other DNA

SEQ ID NO: 193973 - DNA, 80 bp, synthetic construct; identical to SEQ ID NO: 9243
  source 1..80: mol_type = other DNA

SEQ ID NO: 193974 - DNA, 80 bp, synthetic construct; identical to SEQ ID NO: 9244
  source 1..80: mol_type = other DNA

SEQ ID NO: 193975 - DNA, 80 bp, synthetic construct; identical to SEQ ID NO: 9245
  source 1..80: mol_type = other DNA

SEQ ID NO: 193976 - DNA, 80 bp, synthetic construct; identical to SEQ ID NO: 9246
  source 1..80: mol_type = other DNA

SEQ ID NO: 193977 - DNA, 80 bp, synthetic construct; identical to SEQ ID NO: 9247
  source 1..80: mol_type = other DNA

SEQ ID NO: 193978 - DNA, 80 bp, synthetic construct; identical to SEQ ID NO: 9248
  source 1..80: mol_type = other DNA

SEQ ID NO: 193979 - DNA, 80 bp, synthetic construct; identical to SEQ ID NO: 9249
  source 1..80: mol_type = other DNA

SEQ ID NO: 193980 - DNA, 80 bp, synthetic construct; identical to SEQ ID NO: 9250
  source 1..80: mol_type = other DNA

SEQ ID NO: 193981 - DNA, 80 bp, synthetic construct; identical to SEQ ID NO: 9251
  source 1..80: mol_type = other DNA

SEQ ID NO: 193982 - DNA, 80 bp, synthetic construct; identical to SEQ ID NO: 9252
  source 1..80: mol_type = other DNA

SEQ ID NO: 193983 - DNA, 80 bp, synthetic construct; identical to SEQ ID NO: 9253
  source 1..80: mol_type = other DNA

SEQ ID NO: 193984 - DNA, 80 bp, synthetic construct; identical to SEQ ID NO: 9254
  source 1..80: mol_type = other DNA

SEQ ID NO: 193985 - DNA, 80 bp, synthetic construct; identical to SEQ ID NO: 9255
  source 1..80: mol_type = other DNA

SEQ ID NO: 193986 - DNA, 80 bp, synthetic construct; identical to SEQ ID NO: 9256
  source 1..80: mol_type = other DNA

SEQ ID NO: 193987 - DNA, 80 bp, synthetic construct; identical to SEQ ID NO: 9257
  source 1..80: mol_type = other DNA

SEQ ID NO: 193988 - DNA, 80 bp, synthetic construct; identical to SEQ ID NO: 9258
  source 1..80: mol_type = other DNA

SEQ ID NO: 193989 - DNA, 80 bp, synthetic construct; identical to SEQ ID NO: 9259
  source 1..80: mol_type = other DNA

SEQ ID NO: 193990 - DNA, 80 bp, synthetic construct; identical to SEQ ID NO: 9260
  source 1..80: mol_type = other DNA

SEQ ID NO: 193991 - DNA, 80 bp, synthetic construct; identical to SEQ ID NO: 9261
  source 1..80: mol_type = other DNA

SEQ ID NO: 193992 - DNA, 80 bp, synthetic construct; identical to SEQ ID NO: 9262
  source 1..80: mol_type = other DNA

SEQ ID NO: 193993 - DNA, 80 bp, synthetic construct; identical to SEQ ID NO: 9263
  source 1..80: mol_type = other DNA

SEQ ID NO: 193994 - DNA, 80 bp, synthetic construct; identical to SEQ ID NO: 9264
  source 1..80: mol_type = other DNA

SEQ ID NO: 193995 - DNA, 80 bp, synthetic construct; identical to SEQ ID NO: 9265
  source 1..80: mol_type = other DNA

SEQ ID NO: 193996 - DNA, 80 bp, synthetic construct; identical to SEQ ID NO: 9266
  source 1..80: mol_type = other DNA

SEQ ID NO: 193997 - DNA, 80 bp, synthetic construct; identical to SEQ ID NO: 9267
  source 1..80: mol_type = other DNA

SEQ ID NO: 193998 - DNA, 80 bp, synthetic construct; identical to SEQ ID NO: 9268
  source 1..80: mol_type = other DNA

SEQ ID NO: 193999 - DNA, 80 bp, synthetic construct; identical to SEQ ID NO: 9269
  source 1..80: mol_type = other DNA

SEQ ID NO: 194000 - DNA, 80 bp, synthetic construct; identical to SEQ ID NO: 9270
  source 1..80: mol_type = other DNA

SEQ ID NO: 194001 - DNA, 80 bp, synthetic construct; identical to SEQ ID NO: 9271
  source 1..80: mol_type = other DNA

SEQ ID NO: 194002 - DNA, 80 bp, synthetic construct; identical to SEQ ID NO: 9272
  source 1..80: mol_type = other DNA

SEQ ID NO: 194003 - DNA, 80 bp, synthetic construct; identical to SEQ ID NO: 9273
  source 1..80: mol_type = other DNA

SEQ ID NO: 194004 - DNA, 80 bp, synthetic construct; identical to SEQ ID NO: 9274
  source 1..80: mol_type = other DNA

SEQ ID NO: 194005 - DNA, 80 bp, synthetic construct; identical to SEQ ID NO: 9275
  source 1..80: mol_type = other DNA

SEQ ID NO: 194006 - DNA, 80 bp, synthetic construct; identical to SEQ ID NO: 9276
  source 1..80: mol_type = other DNA

SEQ ID NO: 194007 - DNA, 80 bp, synthetic construct; identical to SEQ ID NO: 9277
  source 1..80: mol_type = other DNA

SEQ ID NO: 194008 - DNA, 80 bp, synthetic construct; identical to SEQ ID NO: 9278
  source 1..80: mol_type = other DNA

SEQ ID NO: 194009 - DNA, 80 bp, synthetic construct; identical to SEQ ID NO: 9279
  source 1..80: mol_type = other DNA

SEQ ID NO: 194010 - DNA, 80 bp, synthetic construct; identical to SEQ ID NO: 9280
  source 1..80: mol_type = other DNA

SEQ ID NO: 194011 - DNA, 80 bp, synthetic construct; identical to SEQ ID NO: 9281
  source 1..80: mol_type = other DNA

SEQ ID NO: 194012 - DNA, 80 bp, synthetic construct; identical to SEQ ID NO: 9282
  source 1..80: mol_type = other DNA

SEQ ID NO: 194013 - DNA, 80 bp, synthetic construct; identical to SEQ ID NO: 9283
  source 1..80: mol_type = other DNA

SEQ ID NO: 194014 - DNA, 80 bp, synthetic construct; identical to SEQ ID NO: 9284
  source 1..80: mol_type = other DNA

SEQ ID NO: 194015 - DNA, 80 bp, synthetic construct; identical to SEQ ID NO: 9285
  source 1..80: mol_type = other DNA

SEQ ID NO: 194016 - DNA, 80 bp, synthetic construct; identical to SEQ ID NO: 9286
  source 1..80: mol_type = other DNA

SEQ ID NO: 194017 - DNA, 80 bp, synthetic construct; identical to SEQ ID NO: 9287
  source 1..80: mol_type = other DNA

SEQ ID NO: 194018 - DNA, 80 bp, synthetic construct; identical to SEQ ID NO: 9288
  source 1..80: mol_type = other DNA

SEQ ID NO: 194019 - DNA, 80 bp, synthetic construct; identical to SEQ ID NO: 9289
  source 1..80: mol_type = other DNA

SEQ ID NO: 194020 - DNA, 80 bp, synthetic construct; identical to SEQ ID NO: 9290
  source 1..80: mol_type = other DNA

SEQ ID NO: 194021 - DNA, 80 bp, synthetic construct; identical to SEQ ID NO: 9291
  source 1..80: mol_type = other DNA

SEQ ID NO: 194022 - DNA, 80 bp, synthetic construct; identical to SEQ ID NO: 9292
  source 1..80: mol_type = other DNA

SEQ ID NO: 194023 - DNA, 80 bp, synthetic construct; identical to SEQ ID NO: 9293
  source 1..80: mol_type = other DNA

SEQ ID NO: 194024 - DNA, 80 bp, synthetic construct; identical to SEQ ID NO: 9294
  source 1..80: mol_type = other DNA

SEQ ID NO: 194025 - DNA, 80 bp, synthetic construct; identical to SEQ ID NO: 9295
  source 1..80: mol_type = other DNA

SEQ ID NO: 194026 - DNA, 80 bp, synthetic construct; identical to SEQ ID NO: 9296
  source 1..80: mol_type = other DNA

SEQ ID NO: 194027 - DNA, 80 bp, synthetic construct; identical to SEQ ID NO: 9297
  source 1..80: mol_type = other DNA

SEQ ID NO: 194028 - DNA, 80 bp, synthetic construct; identical to SEQ ID NO: 9298
  source 1..80: mol_type = other DNA

SEQ ID NO: 194029 - DNA, 80 bp, synthetic construct; identical to SEQ ID NO: 9299
  source 1..80: mol_type = other DNA

SEQ ID NO: 194030 - DNA, 80 bp, synthetic construct; identical to SEQ ID NO: 9300
  source 1..80: mol_type = other DNA

SEQ ID NO: 194031 - DNA, 80 bp, synthetic construct; identical to SEQ ID NO: 9301
  source 1..80: mol_type = other DNA

SEQ ID NO: 194032 - DNA, 80 bp, synthetic construct; identical to SEQ ID NO: 9302
  source 1..80: mol_type = other DNA

SEQ ID NO: 194033 - DNA, 80 bp, synthetic construct; identical to SEQ ID NO: 9303
  source 1..80: mol_type = other DNA

SEQ ID NO: 194034 - DNA, 80 bp, synthetic construct; identical to SEQ ID NO: 9304
  source 1..80: mol_type = other DNA

SEQ ID NO: 194035 - DNA, 80 bp, synthetic construct; identical to SEQ ID NO: 9305
  source 1..80: mol_type = other DNA

SEQ ID NO: 194036 - DNA, 80 bp, synthetic construct; identical to SEQ ID NO: 9306
  source 1..80: mol_type = other DNA

SEQ ID NO: 194037 - DNA, 80 bp, synthetic construct; identical to SEQ ID NO: 9307
  source 1..80: mol_type = other DNA

SEQ ID NO: 194038 - DNA, 80 bp, synthetic construct; identical to SEQ ID NO: 9308
  source 1..80: mol_type = other DNA

SEQ ID NO: 194039 - DNA, 80 bp, synthetic construct; identical to SEQ ID NO: 9309
  source 1..80: mol_type = other DNA

SEQ ID NO: 194040 - DNA, 80 bp, synthetic construct; identical to SEQ ID NO: 9310
  source 1..80: mol_type = other DNA

SEQ ID NO: 194041 - DNA, 80 bp, synthetic construct; identical to SEQ ID NO: 9311
  source 1..80: mol_type = other DNA

SEQ ID NO: 194042 - DNA, 80 bp, synthetic construct; identical to SEQ ID NO: 9312
  source 1..80: mol_type = other DNA

SEQ ID NO: 194043 - DNA, 80 bp, synthetic construct; identical to SEQ ID NO: 9313
  source 1..80: mol_type = other DNA

SEQ ID NO: 194044 - DNA, 80 bp, synthetic construct; identical to SEQ ID NO: 9314
  source 1..80: mol_type = other DNA

SEQ ID NO: 194045 - DNA, 80 bp, synthetic construct; identical to SEQ ID NO: 9315
  source 1..80: mol_type = other DNA

SEQ ID NO: 194046 - DNA, 80 bp, synthetic construct; identical to SEQ ID NO: 9316
  source 1..80: mol_type = other DNA

SEQ ID NO: 194047 - DNA, 80 bp, synthetic construct; identical to SEQ ID NO: 9317
  source 1..80: mol_type = other DNA

SEQ ID NO: 194048 - DNA, 80 bp, synthetic construct; identical to SEQ ID NO: 9318
  source 1..80: mol_type = other DNA

SEQ ID NO: 194049 - DNA, 80 bp, synthetic construct; identical to SEQ ID NO: 9319
  source 1..80: mol_type = other DNA

SEQ ID NO: 194050 - DNA, 80 bp, synthetic construct; identical to SEQ ID NO: 9320
  source 1..80: mol_type = other DNA

SEQ ID NO: 194051 - DNA, 80 bp, synthetic construct; identical to SEQ ID NO: 9321
  source 1..80: mol_type = other DNA

SEQ ID NO: 194052 - DNA, 80 bp, synthetic construct; identical to SEQ ID NO: 9322
  source 1..80: mol_type = other DNA

SEQ ID NO: 194053 - DNA, 80 bp, synthetic construct; identical to SEQ ID NO: 9323
  source 1..80: mol_type = other DNA

SEQ ID NO: 194054 - DNA, 80 bp, synthetic construct; identical to SEQ ID NO: 9324
  source 1..80: mol_type = other DNA

SEQ ID NO: 194055 - DNA, 80 bp, synthetic construct; identical to SEQ ID NO: 9325
  source 1..80: mol_type = other DNA

SEQ ID NO: 194056 - DNA, 80 bp, synthetic construct; identical to SEQ ID NO: 9326
  source 1..80: mol_type = other DNA

SEQ ID NO: 194057 - DNA, 80 bp, synthetic construct; identical to SEQ ID NO: 9327
  source 1..80: mol_type = other DNA

SEQ ID NO: 194058 - DNA, 80 bp, synthetic construct; identical to SEQ ID NO: 9328
  source 1..80: mol_type = other DNA

SEQ ID NO: 194059 - DNA, 80 bp, synthetic construct; identical to SEQ ID NO: 9329
  source 1..80: mol_type = other DNA

SEQ ID NO: 194060 - DNA, 80 bp, synthetic construct; identical to SEQ ID NO: 9330
  source 1..80: mol_type = other DNA

SEQ ID NO: 194061 - DNA, 80 bp, synthetic construct; identical to SEQ ID NO: 9331
  source 1..80: mol_type = other DNA

SEQ ID NO: 194062 - DNA, 80 bp, synthetic construct; identical to SEQ ID NO: 9332
  source 1..80: mol_type = other DNA

SEQ ID NO: 194063 - DNA, 80 bp, synthetic construct; identical to SEQ ID NO: 9333
  source 1..80: mol_type = other DNA

SEQ ID NO: 194064 - DNA, 80 bp, synthetic construct; identical to SEQ ID NO: 9334
  source 1..80: mol_type = other DNA

SEQ ID NO: 194065 - DNA, 80 bp, synthetic construct; identical to SEQ ID NO: 9335
  source 1..80: mol_type = other DNA

SEQ ID NO: 194066 - DNA, 80 bp, synthetic construct; identical to SEQ ID NO: 9336
  source 1..80: mol_type = other DNA

SEQ ID NO: 194067 - DNA, 80 bp, synthetic construct; identical to SEQ ID NO: 9337
  source 1..80: mol_type = other DNA

SEQ ID NO: 194068 - DNA, 80 bp, synthetic construct; identical to SEQ ID NO: 9338
  source 1..80: mol_type = other DNA

SEQ ID NO: 194069 - DNA, 80 bp, synthetic construct; identical to SEQ ID NO: 9339
  source 1..80: mol_type = other DNA

SEQ ID NO: 194070 - DNA, 80 bp, synthetic construct; identical to SEQ ID NO: 9340
  source 1..80: mol_type = other DNA

SEQ ID NO: 194071 - DNA, 80 bp, synthetic construct; identical to SEQ ID NO: 9341
  source 1..80: mol_type = other DNA

SEQ ID NO: 194072 - DNA, 80 bp, synthetic construct; identical to SEQ ID NO: 9342
  source 1..80: mol_type = other DNA

SEQ ID NO: 194073 - DNA, 80 bp, synthetic construct; identical to SEQ ID NO: 9343
  source 1..80: mol_type = other DNA

SEQ ID NO: 194074 - DNA, 80 bp, synthetic construct; identical to SEQ ID NO: 9344
  source 1..80: mol_type = other DNA

SEQ ID NO: 194075 - DNA, 80 bp, synthetic construct; identical to SEQ ID NO: 9345
  source 1..80: mol_type = other DNA

SEQ ID NO: 194076 - DNA, 80 bp, synthetic construct; identical to SEQ ID NO: 9346
  source 1..80: mol_type = other DNA

SEQ ID NO: 194077 - DNA, 80 bp, synthetic construct; identical to SEQ ID NO: 9347
  source 1..80: mol_type = other DNA

SEQ ID NO: 194078 - DNA, 80 bp, synthetic construct; identical to SEQ ID NO: 9348
  source 1..80: mol_type = other DNA

SEQ ID NO: 194079 - DNA, 80 bp, synthetic construct; identical to SEQ ID NO: 9349
  source 1..80: mol_type = other DNA

SEQ ID NO: 194080 - DNA, 80 bp, synthetic construct; identical to SEQ ID NO: 9350
  source 1..80: mol_type = other DNA

SEQ ID NO: 194081 - DNA, 80 bp, synthetic construct; identical to SEQ ID NO: 9351
  source 1..80: mol_type = other DNA

SEQ ID NO: 194082 - DNA, 80 bp, synthetic construct; identical to SEQ ID NO: 9352
  source 1..80: mol_type = other DNA

SEQ ID NO: 194083 - DNA, 80 bp, synthetic construct; identical to SEQ ID NO: 9353
  source 1..80: mol_type = other DNA

SEQ ID NO: 194084 - DNA, 80 bp, synthetic construct; identical to SEQ ID NO: 9354
  source 1..80: mol_type = other DNA

SEQ ID NO: 194085 - DNA, 80 bp, synthetic construct; identical to SEQ ID NO: 9355
  source 1..80: mol_type = other DNA

SEQ ID NO: 194086 - DNA, 80 bp, synthetic construct; identical to SEQ ID NO: 9356
  source 1..80: mol_type = other DNA

SEQ ID NO: 194087 - DNA, 80 bp, synthetic construct; identical to SEQ ID NO: 9357
  source 1..80: mol_type = other DNA

SEQ ID NO: 194088 - DNA, 80 bp, synthetic construct; identical to SEQ ID NO: 9358
  source 1..80: mol_type = other DNA

SEQ ID NO: 194089 - DNA, 80 bp, synthetic construct; identical to SEQ ID NO: 9359
  source 1..80: mol_type = other DNA

SEQ ID NO: 194090 - DNA, 80 bp, synthetic construct; identical to SEQ ID NO: 9360
  source 1..80: mol_type = other DNA

SEQ ID NO: 194091 - DNA, 80 bp, synthetic construct; identical to SEQ ID NO: 9361
  source 1..80: mol_type = other DNA

SEQ ID NO: 194092 - DNA, 80 bp, synthetic construct; identical to SEQ ID NO: 9362
  source 1..80: mol_type = other DNA

SEQ ID NO: 194093 - DNA, 80 bp, synthetic construct; identical to SEQ ID NO: 9363
  source 1..80: mol_type = other DNA

SEQ ID NO: 194094 - DNA, 80 bp, synthetic construct; identical to SEQ ID NO: 9364
  source 1..80: mol_type = other DNA

SEQ ID NO: 194095 - DNA, 80 bp, synthetic construct; identical to SEQ ID NO: 9365
  source 1..80: mol_type = other DNA

SEQ ID NO: 194096 - DNA, 80 bp, synthetic construct; identical to SEQ ID NO: 9366
  source 1..80: mol_type = other DNA

SEQ ID NO: 194097 - DNA, 80 bp, synthetic construct; identical to SEQ ID NO: 9367
  source 1..80: mol_type = other DNA

SEQ ID NO: 194098 - DNA, 80 bp, synthetic construct; identical to SEQ ID NO: 9368
  source 1..80: mol_type = other DNA

SEQ ID NO: 194099 - DNA, 80 bp, synthetic construct; identical to SEQ ID NO: 9369
  source 1..80: mol_type = other DNA

SEQ ID NO: 194100 - DNA, 80 bp, synthetic construct; identical to SEQ ID NO: 9370
  source 1..80: mol_type = other DNA

SEQ ID NO: 194101 - DNA, 80 bp, synthetic construct; identical to SEQ ID NO: 9371
  source 1..80: mol_type = other DNA

SEQ ID NO: 194102 - DNA, 80 bp, synthetic construct; identical to SEQ ID NO: 9372
  source 1..80: mol_type = other DNA

SEQ ID NO: 194103 - DNA, 80 bp, synthetic construct; identical to SEQ ID NO: 9373
  source 1..80: mol_type = other DNA

SEQ ID NO: 194104 - DNA, 80 bp, synthetic construct; identical to SEQ ID NO: 9374
  source 1..80: mol_type = other DNA

SEQ ID NO: 194105 - DNA, 80 bp, synthetic construct; identical to SEQ ID NO: 9375
  source 1..80: mol_type = other DNA

SEQ ID NO: 194106 - DNA, 80 bp, synthetic construct; identical to SEQ ID NO: 9376
  source 1..80: mol_type = other DNA

SEQ ID NO: 194107 - DNA, 80 bp, synthetic construct; identical to SEQ ID NO: 9377
  source 1..80: mol_type = other DNA

SEQ ID NO: 194108 - DNA, 80 bp, synthetic construct; identical to SEQ ID NO: 9378
  source 1..80: mol_type = other DNA

SEQ ID NO: 194109 - DNA, 80 bp, synthetic construct; identical to SEQ ID NO: 9379
  source 1..80: mol_type = other DNA

SEQ ID NO: 194110 - DNA, 80 bp, synthetic construct; identical to SEQ ID NO: 9380
  source 1..80: mol_type = other DNA

SEQ ID NO: 194111 - DNA, 80 bp, synthetic construct; identical to SEQ ID NO: 9381
  source 1..80: mol_type = other DNA

SEQ ID NO: 194112 - DNA, 80 bp, synthetic construct; identical to SEQ ID NO: 9382
  source 1..80: mol_type = other DNA

SEQ ID NO: 194113 - DNA, 80 bp, synthetic construct; identical to SEQ ID NO: 9383
  source 1..80: mol_type = other DNA

SEQ ID NO: 194114 - DNA, 80 bp, synthetic construct; identical to SEQ ID NO: 9384
  source 1..80: mol_type = other DNA

SEQ ID NO: 194115 - DNA, 80 bp, synthetic construct; identical to SEQ ID NO: 9385
  source 1..80: mol_type = other DNA

SEQ ID NO: 194116 - DNA, 80 bp, synthetic construct; identical to SEQ ID NO: 9386
  source 1..80: mol_type = other DNA

SEQ ID NO: 194117 - DNA, 80 bp, synthetic construct; identical to SEQ ID NO: 9387
  source 1..80: mol_type = other DNA

SEQ ID NO: 194118 - DNA, 80 bp, synthetic construct; identical to SEQ ID NO: 9388
  source 1..80: mol_type = other DNA

SEQ ID NO: 194119 - DNA, 80 bp, synthetic construct; identical to SEQ ID NO: 9389
  source 1..80: mol_type = other DNA

SEQ ID NO: 194120 - DNA, 80 bp, synthetic construct; identical to SEQ ID NO: 9390
  source 1..80: mol_type = other DNA

SEQ ID NO: 194121 - DNA, 80 bp, synthetic construct; identical to SEQ ID NO: 9391
  source 1..80: mol_type = other DNA

SEQ ID NO: 194122 - DNA, 80 bp, synthetic construct; identical to SEQ ID NO: 9392
  source 1..80: mol_type = other DNA

SEQ ID NO: 194123 - DNA, 80 bp, synthetic construct; identical to SEQ ID NO: 9393
  source 1..80: mol_type = other DNA

SEQ ID NO: 194124 - DNA, 80 bp, synthetic construct; identical to SEQ ID NO: 9394
  source 1..80: mol_type = other DNA

SEQ ID NO: 194125 - DNA, 80 bp, synthetic construct; identical to SEQ ID NO: 9395
  source 1..80: mol_type = other DNA

SEQ ID NO: 194126 - DNA, 80 bp, synthetic construct; identical to SEQ ID NO: 9396
  source 1..80: mol_type = other DNA

SEQ ID NO: 194127 - DNA, 80 bp, synthetic construct; identical to SEQ ID NO: 9397
  source 1..80: mol_type = other DNA

SEQ ID NO: 194128 - DNA, 80 bp, synthetic construct; identical to SEQ ID NO: 9398
  source 1..80: mol_type = other DNA

SEQ ID NO: 194129 - DNA, 80 bp, synthetic construct; identical to SEQ ID NO: 9399
  source 1..80: mol_type = other DNA

SEQ ID NO: 194130 - DNA, 80 bp, synthetic construct; identical to SEQ ID NO: 9400
  source 1..80: mol_type = other DNA

SEQ ID NO: 194131 - DNA, 80 bp, synthetic construct; identical to SEQ ID NO: 9401
  source 1..80: mol_type = other DNA

SEQ ID NO: 194132 - DNA, 80 bp, synthetic construct; identical to SEQ ID NO: 9402
  source 1..80: mol_type = other DNA

SEQ ID NO: 194133 - DNA, 80 bp, synthetic construct; identical to SEQ ID NO: 9403
  source 1..80: mol_type = other DNA

SEQ ID NO: 194134 - DNA, 80 bp, synthetic construct; identical to SEQ ID NO: 9404
  source 1..80: mol_type = other DNA

SEQ ID NO: 194135 - DNA, 80 bp, synthetic construct; identical to SEQ ID NO: 9405
  source 1..80: mol_type = other DNA

SEQ ID NO: 194136 - DNA, 80 bp, synthetic construct; identical to SEQ ID NO: 9406
  source 1..80: mol_type = other DNA

SEQ ID NO: 194137 - DNA, 80 bp, synthetic construct; identical to SEQ ID NO: 9407
  source 1..80: mol_type = other DNA

SEQ ID NO: 194138 - DNA, 80 bp, synthetic construct; identical to SEQ ID NO: 9408
  source 1..80: mol_type = other DNA

SEQ ID NO: 194139 - DNA, 80 bp, synthetic construct; identical to SEQ ID NO: 9409
  source 1..80: mol_type = other DNA

SEQ ID NO: 194140 - DNA, 80 bp, synthetic construct; identical to SEQ ID NO: 9410
  source 1..80: mol_type = other DNA

SEQ ID NO: 194141 - DNA, 80 bp, synthetic construct; identical to SEQ ID NO: 9411
  source 1..80: mol_type = other DNA

SEQ ID NO: 194142 - DNA, 80 bp, synthetic construct; identical to SEQ ID NO: 9412
  source 1..80: mol_type = other DNA

SEQ ID NO: 194143 - DNA, 80 bp, synthetic construct; identical to SEQ ID NO: 9413
  source 1..80: mol_type = other DNA

SEQ ID NO: 194144 - DNA, 80 bp, synthetic construct; identical to SEQ ID NO: 9414
  source 1..80: mol_type = other DNA

SEQ ID NO: 194145 - DNA, 80 bp, synthetic construct; identical to SEQ ID NO: 9415
  source 1..80: mol_type = other DNA

SEQ ID NO: 194146 - DNA, 80 bp, synthetic construct; identical to SEQ ID NO: 9416
  source 1..80: mol_type = other DNA

SEQ ID NO: 194147 - DNA, 80 bp, synthetic construct; identical to SEQ ID NO: 9417
  source 1..80: mol_type = other DNA

SEQ ID NO: 194148 - DNA, 80 bp, synthetic construct; identical to SEQ ID NO: 9418
  source 1..80: mol_type = other DNA

SEQ ID NO: 194149 - DNA, 80 bp, synthetic construct; identical to SEQ ID NO: 9419
  source 1..80: mol_type = other DNA

SEQ ID NO: 194150 - DNA, 80 bp, synthetic construct; identical to SEQ ID NO: 9420
  source 1..80: mol_type = other DNA

SEQ ID NO: 194151 - DNA, 80 bp, synthetic construct; identical to SEQ ID NO: 9421
  source 1..80: mol_type = other DNA

SEQ ID NO: 194152 - DNA, 80 bp, synthetic construct; identical to SEQ ID NO: 9422
  source 1..80: mol_type = other DNA

SEQ ID NO: 194153 - DNA, 80 bp, synthetic construct; identical to SEQ ID NO: 9423
  source 1..80: mol_type = other DNA

SEQ ID NO: 194154 - DNA, 80 bp, synthetic construct; identical to SEQ ID NO: 9424
  source 1..80: mol_type = other DNA

SEQ ID NO: 194155 - DNA, 80 bp, synthetic construct; identical to SEQ ID NO: 9425
  source 1..80: mol_type = other DNA

SEQ ID NO: 194156 - DNA, 80 bp, synthetic construct; identical to SEQ ID NO: 9426
  source 1..80: mol_type = other DNA

SEQ ID NO: 194157 - DNA, 80 bp, synthetic construct; identical to SEQ ID NO: 9427
  source 1..80: mol_type = other DNA

SEQ ID NO: 194158 - DNA, 80 bp, synthetic construct; identical to SEQ ID NO: 9428
  source 1..80: mol_type = other DNA

SEQ ID NO: 194159 - DNA, 80 bp, synthetic construct; identical to SEQ ID NO: 9429
  source 1..80: mol_type = other DNA

SEQ ID NO: 194160 - DNA, 80 bp, synthetic construct; identical to SEQ ID NO: 9430
  source 1..80: mol_type = other DNA

SEQ ID NO: 194161 - DNA, 80 bp, synthetic construct; identical to SEQ ID NO: 9431
  source 1..80: mol_type = other DNA

SEQ ID NO: 194162 - DNA, 80 bp, synthetic construct; identical to SEQ ID NO: 9432
  source 1..80: mol_type = other DNA

SEQ ID NO: 194163 - DNA, 80 bp, synthetic construct; identical to SEQ ID NO: 9433
  source 1..80: mol_type = other DNA

SEQ ID NO: 194164 - DNA, 80 bp, synthetic construct; identical to SEQ ID NO: 9434
  source 1..80: mol_type = other DNA

SEQ ID NO: 194165 - DNA, 80 bp, synthetic construct; identical to SEQ ID NO: 9435
  source 1..80: mol_type = other DNA

SEQ ID NO: 194166 - DNA, 80 bp, synthetic construct; identical to SEQ ID NO: 9436
  source 1..80: mol_type = other DNA

SEQ ID NO: 194167 - DNA, 80 bp, synthetic construct; identical to SEQ ID NO: 9437
  source 1..80: mol_type = other DNA

SEQ ID NO: 194168 - DNA, 80 bp, synthetic construct; identical to SEQ ID NO: 9438
  source 1..80: mol_type = other DNA

SEQ ID NO: 194169 - DNA, 80 bp, synthetic construct; identical to SEQ ID NO: 9439
  source 1..80: mol_type = other DNA

SEQ ID NO: 194170 - DNA, 80 bp, synthetic construct; identical to SEQ ID NO: 9440
  source 1..80: mol_type = other DNA

SEQ ID NO: 194171 - DNA, 80 bp, synthetic construct; identical to SEQ ID NO: 9441
  source 1..80: mol_type = other DNA

SEQ ID NO: 194172 - DNA, 80 bp, synthetic construct; identical to SEQ ID NO: 9442
  source 1..80: mol_type = other DNA

SEQ ID NO: 194173 - DNA, 80 bp, synthetic construct; identical to SEQ ID NO: 9443
  source 1..80: mol_type = other DNA

SEQ ID NO: 194174 - DNA, 80 bp, synthetic construct; identical to SEQ ID NO: 9444
  source 1..80: mol_type = other DNA

SEQ ID NO: 194175 - DNA, 80 bp, synthetic construct; identical to SEQ ID NO: 9445
  source 1..80: mol_type = other DNA

SEQ ID NO: 194176 - DNA, 80 bp, synthetic construct; identical to SEQ ID NO: 9446
  source 1..80: mol_type = other DNA

SEQ ID NO: 194177 - DNA, 80 bp, synthetic construct; identical to SEQ ID NO: 9447
  source 1..80: mol_type = other DNA

SEQ ID NO: 194178 - DNA, 80 bp, synthetic construct; identical to SEQ ID NO: 9448
  source 1..80: mol_type = other DNA

SEQ ID NO: 194179 - DNA, 80 bp, synthetic construct; identical to SEQ ID NO: 9449
  source 1..80: mol_type = other DNA

SEQ ID NO: 194180 - DNA, 80 bp, synthetic construct; identical to SEQ ID NO: 9450
  source 1..80: mol_type = other DNA

SEQ ID NO: 194181 - DNA, 80 bp, synthetic construct; identical to SEQ ID NO: 9451
  source 1..80: mol_type = other DNA

SEQ ID NO: 194182 - DNA, 80 bp, synthetic construct; identical to SEQ ID NO: 9452
  source 1..80: mol_type = other DNA

SEQ ID NO: 194183 - DNA, 80 bp, synthetic construct; identical to SEQ ID NO: 9453
  source 1..80: mol_type = other DNA

SEQ ID NO: 194184 - DNA, 80 bp, synthetic construct; identical to SEQ ID NO: 9454
  source 1..80: mol_type = other DNA

SEQ ID NO: 194185 - DNA, 80 bp, synthetic construct; identical to SEQ ID NO: 9455
  source 1..80: mol_type = other DNA

SEQ ID NO: 194186 - DNA, 80 bp, synthetic construct; identical to SEQ ID NO: 9456
  source 1..80: mol_type = other DNA

SEQ ID NO: 194187 - DNA, 80 bp, synthetic construct; identical to SEQ ID NO: 9457
  source 1..80: mol_type = other DNA

SEQ ID NO: 194188 - DNA, 80 bp, synthetic construct; identical to SEQ ID NO: 9458
  source 1..80: mol_type = other DNA

SEQ ID NO: 194189 - DNA, 80 bp, synthetic construct; identical to SEQ ID NO: 9459
  source 1..80: mol_type = other DNA

SEQ ID NO: 194190 - DNA, 80 bp, synthetic construct; identical to SEQ ID NO: 9460
  source 1..80: mol_type = other DNA

SEQ ID NO: 194191 - DNA, 80 bp, synthetic construct; identical to SEQ ID NO: 9461
  source 1..80: mol_type = other DNA

SEQ ID NO: 194192 - DNA, 80 bp, synthetic construct; identical to SEQ ID NO: 9462
  source 1..80: mol_type = other DNA

SEQ ID NO: 194193 - DNA, 80 bp, synthetic construct; identical to SEQ ID NO: 9463
  source 1..80: mol_type = other DNA

SEQ ID NO: 194194 - DNA, 80 bp, synthetic construct; identical to SEQ ID NO: 9464
  source 1..80: mol_type = other DNA

SEQ ID NO: 194195 - DNA, 80 bp, synthetic construct; identical to SEQ ID NO: 9465
  source 1..80: mol_type = other DNA

SEQ ID NO: 194196 - DNA, 80 bp, synthetic construct; identical to SEQ ID NO: 9466
  source 1..80: mol_type = other DNA

SEQ ID NO: 194197 - DNA, 80 bp, synthetic construct; identical to SEQ ID NO: 9467
  source 1..80: mol_type = other DNA

SEQ ID NO: 194198 - DNA, 80 bp, synthetic construct; identical to SEQ ID NO: 9468
  source 1..80: mol_type = other DNA

SEQ ID NO: 194199 - DNA, 80 bp, synthetic construct; identical to SEQ ID NO: 9469
  source 1..80: mol_type = other DNA

SEQ ID NO: 194200 - DNA, 80 bp, synthetic construct; identical to SEQ ID NO: 9470
  source 1..80: mol_type = other DNA

SEQ ID NO: 194201 - DNA, 80 bp, synthetic construct; identical to SEQ ID NO: 9471
  source 1..80: mol_type = other DNA

SEQ ID NO: 194202 - DNA, 80 bp, synthetic construct; identical to SEQ ID NO: 9472
  source 1..80: mol_type = other DNA

SEQ ID NO: 194203 - DNA, 80 bp, synthetic construct; identical to SEQ ID NO: 9473
  source 1..80: mol_type = other DNA

SEQ ID NO: 194204 - DNA, 80 bp, synthetic construct; identical to SEQ ID NO: 9474
  source 1..80: mol_type = other DNA

SEQ ID NO: 194205 - DNA, 80 bp, synthetic construct; identical to SEQ ID NO: 9475
  source 1..80: mol_type = other DNA

SEQ ID NO: 194206 - DNA, 80 bp, synthetic construct; identical to SEQ ID NO: 9476
  source 1..80: mol_type = other DNA

SEQ ID NO: 194207 - DNA, 80 bp, synthetic construct; identical to SEQ ID NO: 9477
  source 1..80: mol_type = other DNA

SEQ ID NO: 194208 - DNA, 80 bp, synthetic construct; identical to SEQ ID NO: 9478
  source 1..80: mol_type = other DNA

SEQ ID NO: 194209 - DNA, 80 bp, synthetic construct; identical to SEQ ID NO: 9479
  source 1..80: mol_type = other DNA

SEQ ID NO: 194210 - DNA, 80 bp, synthetic construct; identical to SEQ ID NO: 9480
  source 1..80: mol_type = other DNA

SEQ ID NO: 194211 - DNA, 80 bp, synthetic construct; identical to SEQ ID NO: 9481
  source 1..80: mol_type = other DNA

SEQ ID NO: 194212 - DNA, 80 bp, synthetic construct; identical to SEQ ID NO: 9482
  source 1..80: mol_type = other DNA

SEQ ID NO: 194213 - DNA, 80 bp, synthetic construct; identical to SEQ ID NO: 9483
  source 1..80: mol_type = other DNA

SEQ ID NO: 194214 - DNA, 80 bp, synthetic construct; identical to SEQ ID NO: 9484
  source 1..80: mol_type = other DNA

SEQ ID NO: 194215 - DNA, 80 bp, synthetic construct; identical to SEQ ID NO: 9485
  source 1..80: mol_type = other DNA

SEQ ID NO: 194216 - DNA, 80 bp, synthetic construct; identical to SEQ ID NO: 9486
  source 1..80: mol_type = other DNA

SEQ ID NO: 194217 - DNA, 80 bp, synthetic construct; identical to SEQ ID NO: 9487
  source 1..80: mol_type = other DNA

SEQ ID NO: 194218 - DNA, 80 bp, synthetic construct; identical to SEQ ID NO: 9488
  source 1..80: mol_type = other DNA

SEQ ID NO: 194219 - DNA, 80 bp, synthetic construct; identical to SEQ ID NO: 9489
  source 1..80: mol_type = other DNA

SEQ ID NO: 194220 - DNA, 80 bp, synthetic construct; identical to SEQ ID NO: 9490
  source 1..80: mol_type = other DNA

SEQ ID NO: 194221 - DNA, 80 bp, synthetic construct; identical to SEQ ID NO: 9491
  source 1..80: mol_type = other DNA

SEQ ID NO: 194222 - DNA, 80 bp, synthetic construct; identical to SEQ ID NO: 9492
  source 1..80: mol_type = other DNA

SEQ ID NO: 194223 - DNA, 80 bp, synthetic construct; identical to SEQ ID NO: 9493
  source 1..80: mol_type = other DNA

SEQ ID NO: 194224 - DNA, 80 bp, synthetic construct; identical to SEQ ID NO: 9494
  source 1..80: mol_type = other DNA

SEQ ID NO: 194225 - DNA, 80 bp, synthetic construct; identical to SEQ ID NO: 9495
  source 1..80: mol_type = other DNA

SEQ ID NO: 194226 - DNA, 80 bp, synthetic construct; identical to SEQ ID NO: 9496
  source 1..80: mol_type = other DNA

SEQ ID NO: 194227 - DNA, 80 bp, synthetic construct; identical to SEQ ID NO: 9497
  source 1..80: mol_type = other DNA

SEQ ID NO: 194228 - DNA, 80 bp, synthetic construct; identical to SEQ ID NO: 9498
  source 1..80: mol_type = other DNA

SEQ ID NO: 194229 - DNA, 80 bp, synthetic construct; identical to SEQ ID NO: 9499
  source 1..80: mol_type = other DNA

SEQ ID NO: 194230 - DNA, 80 bp, synthetic construct; identical to SEQ ID NO: 9500
  source 1..80: mol_type = other DNA

SEQ ID NO: 194231 - DNA, 80 bp, synthetic construct; identical to SEQ ID NO: 9501
  source 1..80: mol_type = other DNA

SEQ ID NO: 194232 - DNA, 80 bp, synthetic construct; identical to SEQ ID NO: 9502
  source 1..80: mol_type = other DNA

SEQ ID NO: 194233 - DNA, 80 bp, synthetic construct; identical to SEQ ID NO: 9503
  source 1..80: mol_type = other DNA

SEQ ID NO: 194234 - DNA, 80 bp, synthetic construct; identical to SEQ ID NO: 9504
  source 1..80: mol_type = other DNA

SEQ ID NO: 194235 - DNA, 80 bp, synthetic construct; identical to SEQ ID NO: 9505
  source 1..80: mol_type = other DNA

SEQ ID NO: 194236 - DNA, 80 bp, synthetic construct; identical to SEQ ID NO: 9506
  source 1..80: mol_type = other DNA

SEQ ID NO: 194237 - DNA, 80 bp, synthetic construct; identical to SEQ ID NO: 9507
  source 1..80: mol_type = other DNA

SEQ ID NO: 194238 - DNA, 80 bp, synthetic construct; identical to SEQ ID NO: 9508
  source 1..80: mol_type = other DNA

SEQ ID NO: 194239 - DNA, 80 bp, synthetic construct; identical to SEQ ID NO: 9509
  source 1..80: mol_type = other DNA

SEQ ID NO: 194240 - DNA, 80 bp, synthetic construct; identical to SEQ ID NO: 9510
  source 1..80: mol_type = other DNA

SEQ ID NO: 194241 - DNA, 80 bp, synthetic construct; identical to SEQ ID NO: 9511
  source 1..80: mol_type = other DNA

SEQ ID NO: 194242 - DNA, 80 bp, synthetic construct; identical to SEQ ID NO: 9512
  source 1..80: mol_type = other DNA

SEQ ID NO: 194243 - DNA, 80 bp, synthetic construct; identical to SEQ ID NO: 9513
  source 1..80: mol_type = other DNA

SEQ ID NO: 194244 - DNA, 80 bp, synthetic construct; identical to SEQ ID NO: 9514
  source 1..80: mol_type = other DNA

SEQ ID NO: 194245 - DNA, 80 bp, synthetic construct; identical to SEQ ID NO: 9515
  source 1..80: mol_type = other DNA

SEQ ID NO: 194246 - DNA, 80 bp, synthetic construct; identical to SEQ ID NO: 9516
  source 1..80: mol_type = other DNA

SEQ ID NO: 194247 - DNA, 80 bp, synthetic construct; identical to SEQ ID NO: 9517
  source 1..80: mol_type = other DNA

SEQ ID NO: 194248 - DNA, 80 bp, synthetic construct; identical to SEQ ID NO: 9518
  source 1..80: mol_type = other DNA

SEQ ID NO: 194249 - DNA, 80 bp, synthetic construct; identical to SEQ ID NO: 9519
  source 1..80: mol_type = other DNA

SEQ ID NO: 194250 - DNA, 80 bp, synthetic construct; identical to SEQ ID NO: 9520
  source 1..80: mol_type = other DNA

SEQ ID NO: 194251 - DNA, 80 bp, synthetic construct; identical to SEQ ID NO: 9521
  source 1..80: mol_type = other DNA

SEQ ID NO: 194252 - DNA, 80 bp, synthetic construct; identical to SEQ ID NO: 9522
  source 1..80: mol_type = other DNA

SEQ ID NO: 194253 - DNA, 80 bp, synthetic construct; identical to SEQ ID NO: 9523
  source 1..80: mol_type = other DNA

SEQ ID NO: 194254 - DNA, 80 bp, synthetic construct; identical to SEQ ID NO: 9524
  source 1..80: mol_type = other DNA

SEQ ID NO: 194255 - DNA, 80 bp, synthetic construct; identical to SEQ ID NO: 9525
  source 1..80: mol_type = other DNA

SEQ ID NO: 194256 - DNA, 80 bp, synthetic construct; identical to SEQ ID NO: 9526
  source 1..80: mol_type = other DNA

SEQ ID NO: 194257 - DNA, 80 bp, synthetic construct; identical to SEQ ID NO: 9527
  source 1..80: mol_type = other DNA

SEQ ID NO: 194258 - DNA, 80 bp, synthetic construct; identical to SEQ ID NO: 9528
  source 1..80: mol_type = other DNA

SEQ ID NO: 194259 - DNA, 80 bp, synthetic construct; identical to SEQ ID NO: 9529
  source 1..80: mol_type = other DNA

SEQ ID NO: 194260 - DNA, 80 bp, synthetic construct; identical to SEQ ID NO: 9530
  source 1..80: mol_type = other DNA

SEQ ID NO: 194261 - DNA, 80 bp, synthetic construct; identical to SEQ ID NO: 9531
  source 1..80: mol_type = other DNA

SEQ ID NO: 194262 - DNA, 80 bp, synthetic construct; identical to SEQ ID NO: 9532
  source 1..80: mol_type = other DNA

SEQ ID NO: 194263 - DNA, 80 bp, synthetic construct; identical to SEQ ID NO: 9533
  source 1..80: mol_type = other DNA

SEQ ID NO: 194264 - DNA, 80 bp, synthetic construct; identical to SEQ ID NO: 9534
  source 1..80: mol_type = other DNA

SEQ ID NO: 194265 - DNA, 80 bp, synthetic construct; identical to SEQ ID NO: 9535
  source 1..80: mol_type = other DNA

SEQ ID NO: 194266 - DNA, 80 bp, synthetic construct; identical to SEQ ID NO: 9536
  source 1..80: mol_type = other DNA

SEQ ID NO: 194267 - DNA, 80 bp, synthetic construct; identical to SEQ ID NO: 9537
  source 1..80: mol_type = other DNA

SEQ ID NO: 194268 - DNA, 80 bp, synthetic construct; identical to SEQ ID NO: 9538
  source 1..80: mol_type = other DNA

SEQ ID NO: 194269 - DNA, 80 bp, synthetic construct; identical to SEQ ID NO: 9539
  source 1..80: mol_type = other DNA

SEQ ID NO: 194270 - DNA, 80 bp, synthetic construct; identical to SEQ ID NO: 9540
  source 1..80: mol_type = other DNA

SEQ ID NO: 194271 - DNA, 80 bp, synthetic construct; identical to SEQ ID NO: 9541
  source 1..80: mol_type = other DNA

SEQ ID NO: 194272 - DNA, 80 bp, synthetic construct; identical to SEQ ID NO: 9542
  source 1..80: mol_type = other DNA

SEQ ID NO: 194273 - DNA, 80 bp, synthetic construct; identical to SEQ ID NO: 9543
  source 1..80: mol_type = other DNA

SEQ ID NO: 194274 - DNA, 80 bp, synthetic construct; identical to SEQ ID NO: 9544
  source 1..80: mol_type = other DNA

SEQ ID NO: 194275 - DNA, 80 bp, synthetic construct; identical to SEQ ID NO: 9545
  source 1..80: mol_type = other DNA

SEQ ID NO: 194276 - DNA, 80 bp, synthetic construct; identical to SEQ ID NO: 9546
  source 1..80: mol_type = other DNA

SEQ ID NO: 194277 - DNA, 80 bp, synthetic construct; identical to SEQ ID NO: 9547
  source 1..80: mol_type = other DNA

SEQ ID NO: 194278 - DNA, 80 bp, synthetic construct; identical to SEQ ID NO: 9548
  source 1..80: mol_type = other DNA

SEQ ID NO: 194279 - DNA, 80 bp, synthetic construct; identical to SEQ ID NO: 9549
  source 1..80: mol_type = other DNA

SEQ ID NO: 194280 - DNA, 80 bp, synthetic construct; identical to SEQ ID NO: 9550
  source 1..80: mol_type = other DNA

SEQ ID NO: 194281 - DNA, 80 bp, synthetic construct; identical to SEQ ID NO: 9551
  source 1..80: mol_type = other DNA

SEQ ID NO: 194282 - DNA, 80 bp, synthetic construct; identical to SEQ ID NO: 9552
  source 1..80: mol_type = other DNA

SEQ ID NO: 194283 - DNA, 80 bp, synthetic construct; identical to SEQ ID NO: 9553
  source 1..80: mol_type = other DNA

SEQ ID NO: 194284 - DNA, 80 bp, synthetic construct; identical to SEQ ID NO: 9554
  source 1..80: mol_type = other DNA

SEQ ID NO: 194285 - DNA, 80 bp, synthetic construct; identical to SEQ ID NO: 9555
  source 1..80: mol_type = other DNA

SEQ ID NO: 194286 - DNA, 80 bp, synthetic construct; identical to SEQ ID NO: 9556
  source 1..80: mol_type = other DNA

SEQ ID NO: 194287 - DNA, 80 bp, synthetic construct; identical to SEQ ID NO: 9557
  source 1..80: mol_type = other DNA

SEQ ID NO: 194288 - DNA, 80 bp, synthetic construct; identical to SEQ ID NO: 9558
  source 1..80: mol_type = other DNA

SEQ ID NO: 194289 - DNA, 80 bp, synthetic construct; identical to SEQ ID NO: 9559
  source 1..80: mol_type = other DNA

SEQ ID NO: 194290 - DNA, 80 bp, synthetic construct; identical to SEQ ID NO: 9560
  source 1..80: mol_type = other DNA

SEQ ID NO: 194291 - DNA, 80 bp, synthetic construct; identical to SEQ ID NO: 9561
  source 1..80: mol_type = other DNA

SEQ ID NO: 194292 - DNA, 80 bp, synthetic construct; identical to SEQ ID NO: 9562
  source 1..80: mol_type = other DNA

SEQ ID NO: 194293 - DNA, 80 bp, synthetic construct; identical to SEQ ID NO: 9563
  source 1..80: mol_type = other DNA

SEQ ID NO: 194294 - DNA, 80 bp, synthetic construct; identical to SEQ ID NO: 9564
  source 1..80: mol_type = other DNA

SEQ ID NO: 194295 - DNA, 80 bp, synthetic construct; identical to SEQ ID NO: 9565
  source 1..80: mol_type = other DNA

SEQ ID NO: 194296 - DNA, 80 bp, synthetic construct; identical to SEQ ID NO: 9566
  source 1..80: mol_type = other DNA

SEQ ID NO: 194297 - DNA, 80 bp, synthetic construct; identical to SEQ ID NO: 9567
  source 1..80: mol_type = other DNA

SEQ ID NO: 194298 - DNA, 80 bp, synthetic construct; identical to SEQ ID NO: 9568
  source 1..80: mol_type = other DNA

SEQ ID NO: 194299 - DNA, 80 bp, synthetic construct; identical to SEQ ID NO: 9569
  source 1..80: mol_type = other DNA

SEQ ID NO: 194300 - DNA, 80 bp, synthetic construct; identical to SEQ ID NO: 9570
  source 1..80: mol_type = other DNA

SEQ ID NO: 194301 - DNA, 80 bp, synthetic construct; identical to SEQ ID NO: 9571
  source 1..80: mol_type = other DNA

SEQ ID NO: 194302 - DNA, 80 bp, synthetic construct; identical to SEQ ID NO: 9572
  source 1..80: mol_type = other DNA

SEQ ID NO: 194303 - DNA, 80 bp, synthetic construct; identical to SEQ ID NO: 9573
  source 1..80: mol_type = other DNA

SEQ ID NO: 194304 - DNA, 80 bp, synthetic construct; identical to SEQ ID NO: 9574
  source 1..80: mol_type = other DNA

SEQ ID NO: 194305 - DNA, 80 bp, synthetic construct; identical to SEQ ID NO: 9575
  source 1..80: mol_type = other DNA

SEQ ID NO: 194306 - DNA, 80 bp, synthetic construct; identical to SEQ ID NO: 9576
  source 1..80: mol_type = other DNA

SEQ ID NO: 194307 - DNA, 80 bp, synthetic construct; identical to SEQ ID NO: 9577
  source 1..80: mol_type = other DNA

SEQ ID NO: 194308 - DNA, 80 bp, synthetic construct; identical to SEQ ID NO: 9578
  source 1..80: mol_type = other DNA

SEQ ID NO: 194309 - DNA, 80 bp, synthetic construct; identical to SEQ ID NO: 9579
  source 1..80: mol_type = other DNA

SEQ ID NO: 194310 - DNA, 80 bp, synthetic construct; identical to SEQ ID NO: 9580
  source 1..80: mol_type = other DNA

SEQ ID NO: 194311 - DNA, 80 bp, synthetic construct; identical to SEQ ID NO: 9581
  source 1..80: mol_type = other DNA

SEQ ID NO: 194312 - DNA, 80 bp, synthetic construct; identical to SEQ ID NO: 9582
  source 1..80: mol_type = other DNA

SEQ ID NO: 194313 - DNA, 80 bp, synthetic construct; identical to SEQ ID NO: 9583
  source 1..80: mol_type = other DNA

SEQ ID NO: 194314 - DNA, 80 bp, synthetic construct; identical to SEQ ID NO: 9584
  source 1..80: mol_type = other DNA

SEQ ID NO: 194315 - DNA, 80 bp, synthetic construct; identical to SEQ ID NO: 9585
  source 1..80: mol_type = other DNA

SEQ ID NO: 194316 - DNA, 80 bp, synthetic construct; identical to SEQ ID NO: 9586
  source 1..80: mol_type = other DNA

SEQ ID NO: 194317 - DNA, 80 bp, synthetic construct; identical to SEQ ID NO: 9587
  source 1..80: mol_type = other DNA

SEQ ID NO: 194318 - DNA, 80 bp, synthetic construct; identical to SEQ ID NO: 9588
  source 1..80: mol_type = other DNA

SEQ ID NO: 194319 - DNA, 80 bp, synthetic construct; identical to SEQ ID NO: 9589
  source 1..80: mol_type = other DNA

SEQ ID NO: 194320 - DNA, 80 bp, synthetic construct; identical to SEQ ID NO: 9590
  source 1..80: mol_type = other DNA

SEQ ID NO: 194321 - DNA, 80 bp, synthetic construct; identical to SEQ ID NO: 9591
  source 1..80: mol_type = other DNA

SEQ ID NO: 194322 - DNA, 80 bp, synthetic construct; identical to SEQ ID NO: 9592
  source 1..80: mol_type = other DNA

SEQ ID NO: 194323 - DNA, 80 bp, synthetic construct; identical to SEQ ID NO: 9593
  source 1..80: mol_type = other DNA

SEQ ID NO: 194324 - DNA, 80 bp, synthetic construct; identical to SEQ ID NO: 9594
  source 1..80: mol_type = other DNA

SEQ ID NO: 194325 - DNA, 80 bp, synthetic construct; identical to SEQ ID NO: 9595
  source 1..80: mol_type = other DNA

SEQ ID NO: 194326 - DNA, 80 bp, synthetic construct; identical to SEQ ID NO: 9596
  source 1..80: mol_type = other DNA

SEQ ID NO: 194327 - DNA, 80 bp, synthetic construct; identical to SEQ ID NO: 9597
  source 1..80: mol_type = other DNA

SEQ ID NO: 194328 - DNA, 80 bp, synthetic construct; identical to SEQ ID NO: 9598
  source 1..80: mol_type = other DNA

SEQ ID NO: 194329 - DNA, 80 bp, synthetic construct; identical to SEQ ID NO: 9599
  source 1..80: mol_type = other DNA

SEQ ID NO: 194330 - DNA, 80 bp, synthetic construct; identical to SEQ ID NO: 9600
  source 1..80: mol_type = other DNA

SEQ ID NO: 194331 - DNA, 80 bp, synthetic construct; identical to SEQ ID NO: 9601
  source 1..80: mol_type = other DNA

SEQ ID NO: 194332 - DNA, 80 bp, synthetic construct; identical to SEQ ID NO: 9602
  source 1..80: mol_type = other DNA

SEQ ID NO: 194333 - DNA, 80 bp, synthetic construct; identical to SEQ ID NO: 9603
  source 1..80: mol_type = other DNA

SEQ ID NO: 194334 - DNA, 80 bp, synthetic construct; identical to SEQ ID NO: 9604
  source 1..80: mol_type = other DNA

SEQ ID NO: 194335 - DNA, 80 bp, synthetic construct; identical to SEQ ID NO: 9605
  source 1..80: mol_type = other DNA

SEQ ID NO: 194336 - DNA, 80 bp, synthetic construct; identical to SEQ ID NO: 9606
  source 1..80: mol_type = other DNA

SEQ ID NO: 194337 - DNA, 80 bp, synthetic construct; identical to SEQ ID NO: 9607
  source 1..80: mol_type = other DNA

SEQ ID NO: 194338 - DNA, 80 bp, synthetic construct; identical to SEQ ID NO: 9608
  source 1..80: mol_type = other DNA

SEQ ID NO: 194339 - DNA, 80 bp, synthetic construct; identical to SEQ ID NO: 9609
  source 1..80: mol_type = other DNA

SEQ ID NO: 194340 - DNA, 80 bp, synthetic construct; identical to SEQ ID NO: 9610
  source 1..80: mol_type = other DNA

SEQ ID NO: 194341 - DNA, 80 bp, synthetic construct; identical to SEQ ID NO: 9611
  source 1..80: mol_type = other DNA

SEQ ID NO: 194342 - DNA, 80 bp, synthetic construct; identical to SEQ ID NO: 9612
  source 1..80: mol_type = other DNA

SEQ ID NO: 194343 - DNA, 80 bp, synthetic construct; identical to SEQ ID NO: 9613
  source 1..80: mol_type = other DNA

SEQ ID NO: 194344 - DNA, 80 bp, synthetic construct; identical to SEQ ID NO: 9614
  source 1..80: mol_type = other DNA

SEQ ID NO: 194345 - DNA, 80 bp, synthetic construct; identical to SEQ ID NO: 9615
  source 1..80: mol_type = other DNA

SEQ ID NO: 194346 - DNA, 80 bp, synthetic construct; identical to SEQ ID NO: 9616
  source 1..80: mol_type = other DNA

SEQ ID NO: 194347 - DNA, 80 bp, synthetic construct; identical to SEQ ID NO: 9617
  source 1..80: mol_type = other DNA

SEQ ID NO: 194348 - DNA, 80 bp, synthetic construct; identical to SEQ ID NO: 9618
  source 1..80: mol_type = other DNA

SEQ ID NO: 194349 - DNA, 80 bp, synthetic construct; identical to SEQ ID NO: 9619
  source 1..80: mol_type = other DNA

SEQ ID NO: 194350 - DNA, 80 bp, synthetic construct; identical to SEQ ID NO: 9620
  source 1..80: mol_type = other DNA

SEQ ID NO: 194351 - DNA, 80 bp, synthetic construct; identical to SEQ ID NO: 9621
  source 1..80: mol_type = other DNA

SEQ ID NO: 194352 - DNA, 80 bp, synthetic construct; identical to SEQ ID NO: 9622
  source 1..80: mol_type = other DNA

SEQ ID NO: 194353 - DNA, 80 bp, synthetic construct; identical to SEQ ID NO: 9623
  source 1..80: mol_type = other DNA

SEQ ID NO: 194354 - DNA, 80 bp, synthetic construct; identical to SEQ ID NO: 9624
  source 1..80: mol_type = other DNA

SEQ ID NO: 194355 - DNA, 80 bp, synthetic construct; identical to SEQ ID NO: 9625
  source 1..80: mol_type = other DNA

SEQ ID NO: 194356 - DNA, 80 bp, synthetic construct; identical to SEQ ID NO: 9626
  source 1..80: mol_type = other DNA

SEQ ID NO: 194357 - DNA, 80 bp, synthetic construct; identical to SEQ ID NO: 9627
  source 1..80: mol_type = other DNA

SEQ ID NO: 194358 - DNA, 80 bp, synthetic construct; identical to SEQ ID NO: 9628
  source 1..80: mol_type = other DNA

SEQ ID NO: 194359 - DNA, 80 bp, synthetic construct; identical to SEQ ID NO: 9629
  source 1..80: mol_type = other DNA

SEQ ID NO: 194360 - DNA, 80 bp, synthetic construct; identical to SEQ ID NO: 9630
  source 1..80: mol_type = other DNA

SEQ ID NO: 194361 - DNA, 80 bp, synthetic construct; identical to SEQ ID NO: 9631
  source 1..80: mol_type = other DNA

SEQ ID NO: 194362 - DNA, 80 bp, synthetic construct; identical to SEQ ID NO: 9632
  source 1..80: mol_type = other DNA

SEQ ID NO: 194363 - DNA, 80 bp, synthetic construct; identical to SEQ ID NO: 9633
  source 1..80: mol_type = other DNA

SEQ ID NO: 194364 - DNA, 80 bp, synthetic construct; identical to SEQ ID NO: 9634
  source 1..80: mol_type = other DNA

SEQ ID NO: 194365 - DNA, 80 bp, synthetic construct; identical to SEQ ID NO: 9635
  source 1..80: mol_type = other DNA

SEQ ID NO: 194366 - DNA, 80 bp, synthetic construct; identical to SEQ ID NO: 9636
  source 1..80: mol_type = other DNA

SEQ ID NO: 194367 - DNA, 80 bp, synthetic construct; identical to SEQ ID NO: 9637
  source 1..80: mol_type = other DNA

SEQ ID NO: 194368 - DNA, 80 bp, synthetic construct; identical to SEQ ID NO: 9638
  source 1..80: mol_type = other DNA

SEQ ID NO: 194369 - DNA, 80 bp, synthetic construct; identical to SEQ ID NO: 9639
  source 1..80: mol_type = other DNA

SEQ ID NO: 194370 - DNA, 80 bp, synthetic construct; identical to SEQ ID NO: 9640
  source 1..80: mol_type = other DNA

SEQ ID NO: 194371 - DNA, 80 bp, synthetic construct; identical to SEQ ID NO: 9641
  source 1..80: mol_type = other DNA

SEQ ID NO: 194372 - DNA, 80 bp, synthetic construct; identical to SEQ ID NO: 9642
  source 1..80: mol_type = other DNA

SEQ ID NO: 194373 - DNA, 80 bp, synthetic construct; identical to SEQ ID NO: 9643
  source 1..80: mol_type = other DNA

SEQ ID NO: 194374 - DNA, 80 bp, synthetic construct; identical to SEQ ID NO: 9644
  source 1..80: mol_type = other DNA

SEQ ID NO: 194375 - DNA, 80 bp, synthetic construct; identical to SEQ ID NO: 9645
  source 1..80: mol_type = other DNA

SEQ ID NO: 194376 - DNA, 80 bp, synthetic construct; identical to SEQ ID NO: 9646
  source 1..80: mol_type = other DNA

SEQ ID NO: 194377 - DNA, 80 bp, synthetic construct; identical to SEQ ID NO: 9647
  source 1..80: mol_type = other DNA

SEQ ID NO: 194378 - DNA, 80 bp, synthetic construct; identical to SEQ ID NO: 9648
  source 1..80: mol_type = other DNA

SEQ ID NO: 194379 - DNA, 80 bp, synthetic construct; identical to SEQ ID NO: 9649
  source 1..80: mol_type = other DNA

SEQ ID NO: 194380 - DNA, 80 bp, synthetic construct; identical to SEQ ID NO: 9650
  source 1..80: mol_type = other DNA

SEQ ID NO: 194381 - DNA, 80 bp, synthetic construct; identical to SEQ ID NO: 9651
  source 1..80: mol_type = other DNA

SEQ ID NO: 194382 - DNA, 80 bp, synthetic construct; identical to SEQ ID NO: 9652
  source 1..80: mol_type = other DNA

SEQ ID NO: 194383 - DNA, 80 bp, synthetic construct; identical to SEQ ID NO: 9653
  source 1..80: mol_type = other DNA

SEQ ID NO: 194384 - DNA, 80 bp, synthetic construct; identical to SEQ ID NO: 9654
  source 1..80: mol_type = other DNA

SEQ ID NO: 194385 - DNA, 80 bp, synthetic construct; identical to SEQ ID NO: 9655
  source 1..80: mol_type = other DNA

SEQ ID NO: 194386 - DNA, 80 bp, synthetic construct; identical to SEQ ID NO: 9656
  source 1..80: mol_type = other DNA

SEQ ID NO: 194387 - DNA, 80 bp, synthetic construct; identical to SEQ ID NO: 9657
  source 1..80: mol_type = other DNA

SEQ ID NO: 194388 - DNA, 80 bp, synthetic construct; identical to SEQ ID NO: 9658
  source 1..80: mol_type = other DNA

SEQ ID NO: 194389 - DNA, 80 bp, synthetic construct; identical to SEQ ID NO: 9659
  source 1..80: mol_type = other DNA

SEQ ID NO: 194390 - DNA, 80 bp, synthetic construct; identical to SEQ ID NO: 9660
  source 1..80: mol_type = other DNA

SEQ ID NO: 194391 - DNA, 80 bp, synthetic construct; identical to SEQ ID NO: 9661
  source 1..80: mol_type = other DNA

SEQ ID NO: 194392 - DNA, 80 bp, synthetic construct; identical to SEQ ID NO: 9662
  source 1..80: mol_type = other DNA

SEQ ID NO: 194393 - DNA, 80 bp, synthetic construct; identical to SEQ ID NO: 9663
  source 1..80: mol_type = other DNA

SEQ ID NO: 194394 - DNA, 80 bp, synthetic construct; identical to SEQ ID NO: 9664
  source 1..80: mol_type = other DNA

SEQ ID NO: 194395 - DNA, 80 bp, synthetic construct; identical to SEQ ID NO: 9665
  source 1..80: mol_type = other DNA

SEQ ID NO: 194396 - DNA, 80 bp, synthetic construct; identical to SEQ ID NO: 9666
  source 1..80: mol_type = other DNA

SEQ ID NO: 194397 - DNA, 80 bp, synthetic construct; identical to SEQ ID NO: 9667
  source 1..80: mol_type = other DNA

SEQ ID NO: 194398 - DNA, 80 bp, synthetic construct; identical to SEQ ID NO: 9668
  source 1..80: mol_type = other DNA

SEQ ID NO: 194399 - DNA, 80 bp, synthetic construct; identical to SEQ ID NO: 9669
  source 1..80: mol_type = other DNA

SEQ ID NO: 194400 - DNA, 80 bp, synthetic construct; identical to SEQ ID NO: 9670
  source 1..80: mol_type = other DNA

SEQ ID NO: 194401 - DNA, 80 bp, synthetic construct; identical to SEQ ID NO: 9671
  source 1..80: mol_type = other DNA

SEQ ID NO: 194402 - DNA, 80 bp, synthetic construct; identical to SEQ ID NO: 9672
  source 1..80: mol_type = other DNA

SEQ ID NO: 194403 - DNA, 80 bp, synthetic construct; identical to SEQ ID NO: 9673
  source 1..80: mol_type = other DNA

SEQ ID NO: 194404 - DNA, 80 bp, synthetic construct; identical to SEQ ID NO: 9674
  source 1..80: mol_type = other DNA

SEQ ID NO: 194405 - DNA, 80 bp, synthetic construct; identical to SEQ ID NO: 9675
  source 1..80: mol_type = other DNA

SEQ ID NO: 194406 - DNA, 80 bp, synthetic construct; identical to SEQ ID NO: 9676
  source 1..80: mol_type = other DNA

SEQ ID NO: 194407 - DNA, 80 bp, synthetic construct; identical to SEQ ID NO: 9677
  source 1..80: mol_type = other DNA

SEQ ID NO: 194408 - DNA, 80 bp, synthetic construct; identical to SEQ ID NO: 9678
  source 1..80: mol_type = other DNA

SEQ ID NO: 194409 - DNA, 80 bp, synthetic construct; identical to SEQ ID NO: 9679
  source 1..80: mol_type = other DNA

SEQ ID NO: 194410 - DNA, 80 bp, synthetic construct; identical to SEQ ID NO: 9680
  source 1..80: mol_type = other DNA

SEQ ID NO: 194411 - DNA, 80 bp, synthetic construct; identical to SEQ ID NO: 9681
  source 1..80: mol_type = other DNA

SEQ ID NO: 194412 - DNA, 80 bp, synthetic construct; identical to SEQ ID NO: 9682
  source 1..80: mol_type = other DNA

SEQ ID NO: 194413 - DNA, 80 bp, synthetic construct; identical to SEQ ID NO: 9683
  source 1..80: mol_type = other DNA

SEQ ID NO: 194414 - DNA, 80 bp, synthetic construct; identical to SEQ ID NO: 9684
  source 1..80: mol_type = other DNA

SEQ ID NO: 194415 - DNA, 80 bp, synthetic construct; identical to SEQ ID NO: 9685
  source 1..80: mol_type = other DNA

SEQ ID NO: 194416 - DNA, 80 bp, synthetic construct; identical to SEQ ID NO: 9686
  source 1..80: mol_type = other DNA

SEQ ID NO: 194417 - DNA, 80 bp, synthetic construct; identical to SEQ ID NO: 9687
  source 1..80: mol_type = other DNA

SEQ ID NO: 194418 - DNA, 80 bp, synthetic construct; identical to SEQ ID NO: 9688
  source 1..80: mol_type = other DNA

SEQ ID NO: 194419 - DNA, 80 bp, synthetic construct; identical to SEQ ID NO: 9689
  source 1..80: mol_type = other DNA

SEQ ID NO: 194420 - DNA, 80 bp, synthetic construct; identical to SEQ ID NO: 9690
  source 1..80: mol_type = other DNA

SEQ ID NO: 194421 - DNA, 80 bp, synthetic construct; identical to SEQ ID NO: 9691
  source 1..80: mol_type = other DNA

SEQ ID NO: 194422 - DNA, 80 bp, synthetic construct; identical to SEQ ID NO: 9692
  source 1..80: mol_type = other DNA

SEQ ID NO: 194423 - DNA, 80 bp, synthetic construct; identical to SEQ ID NO: 9693
  source 1..80: mol_type = other DNA

SEQ ID NO: 194424 - DNA, 80 bp, synthetic construct; identical to SEQ ID NO: 9694
  source 1..80: mol_type = other DNA

SEQ ID NO: 194425 - DNA, 80 bp, synthetic construct; identical to SEQ ID NO: 9695
  source 1..80: mol_type = other DNA

SEQ ID NO: 194426 - DNA, 80 bp, synthetic construct; identical to SEQ ID NO: 9696
  source 1..80: mol_type = other DNA

SEQ ID NO: 194427 - DNA, 80 bp, synthetic construct; identical to SEQ ID NO: 9697
  source 1..80: mol_type = other DNA

SEQ ID NO: 194428 - DNA, 80 bp, synthetic construct; identical to SEQ ID NO: 9698
  source 1..80: mol_type = other DNA

SEQ ID NO: 194429 - DNA, 80 bp, synthetic construct; identical to SEQ ID NO: 9699
  source 1..80: mol_type = other DNA

SEQ ID NO: 194430 - DNA, 80 bp, synthetic construct; identical to SEQ ID NO: 9700
  source 1..80: mol_type = other DNA

SEQ ID NO: 194431 - DNA, 80 bp, synthetic construct; identical to SEQ ID NO: 9701
  source 1..80: mol_type = other DNA

SEQ ID NO: 194432 - DNA, 80 bp, synthetic construct; identical to SEQ ID NO: 9702
  source 1..80: mol_type = other DNA

SEQ ID NO: 194433 - DNA, 80 bp, synthetic construct; identical to SEQ ID NO: 9703
  source 1..80: mol_type = other DNA

SEQ ID NO: 194434 - DNA, 80 bp, synthetic construct; identical to SEQ ID NO: 9704
  source 1..80: mol_type = other DNA

SEQ ID NO: 194435 - DNA, 80 bp, synthetic construct; identical to SEQ ID NO: 9705
  source 1..80: mol_type = other DNA

SEQ ID NO: 194436 - DNA, 80 bp, synthetic construct; identical to SEQ ID NO: 9706
  source 1..80: mol_type = other DNA

SEQ ID NO: 194437 - DNA, 80 bp, synthetic construct; identical to SEQ ID NO: 9707
  source 1..80: mol_type = other DNA

SEQ ID NO: 194438 - DNA, 80 bp, synthetic construct; identical to SEQ ID NO: 9708
  source 1..80: mol_type = other DNA

SEQ ID NO: 194439 - DNA, 80 bp, synthetic construct; identical to SEQ ID NO: 9709
  source 1..80: mol_type = other DNA

SEQ ID NO: 194440 - DNA, 80 bp, synthetic construct; identical to SEQ ID NO: 9710
  source 1..80: mol_type = other DNA

SEQ ID NO: 194441 - DNA, 80 bp, synthetic construct; identical to SEQ ID NO: 9711
  source 1..80: mol_type = other DNA

SEQ ID NO: 194442 - DNA, 80 bp, synthetic construct; identical to SEQ ID NO: 9712
  source 1..80: mol_type = other DNA

SEQ ID NO: 194443 - DNA, 80 bp, synthetic construct; identical to SEQ ID NO: 9713
  source 1..80: mol_type = other DNA

SEQ ID NO: 194444 - DNA, 80 bp, synthetic construct; identical to SEQ ID NO: 9714
  source 1..80: mol_type = other DNA

SEQ ID NO: 194445 - DNA, 80 bp, synthetic construct; identical to SEQ ID NO: 9715
  source 1..80: mol_type = other DNA

SEQ ID NO: 194446 - DNA, 80 bp, synthetic construct; identical to SEQ ID NO: 9716
  source 1..80: mol_type = other DNA

SEQ ID NO: 194447 - DNA, 80 bp, synthetic construct; identical to SEQ ID NO: 9717
  source 1..80: mol_type = other DNA

SEQ ID NO: 194448 - DNA, 80 bp, synthetic construct; identical to SEQ ID NO: 9718
  source 1..80: mol_type = other DNA

SEQ ID NO: 194449 - DNA, 80 bp, synthetic construct; identical to SEQ ID NO: 9719
  source 1..80: mol_type = other DNA

SEQ ID NO: 194450 - DNA, 80 bp, synthetic construct; identical to SEQ ID NO: 9720
  source 1..80: mol_type = other DNA

SEQ ID NO: 194451 - DNA, 80 bp, synthetic construct; identical to SEQ ID NO: 9721
  source 1..80: mol_type = other DNA

SEQ ID NO: 194452 - DNA, 80 bp, synthetic construct; identical to SEQ ID NO: 9722
  source 1..80: mol_type = other DNA

SEQ ID NO: 194453 - DNA, 80 bp, synthetic construct; identical to SEQ ID NO: 9723
  source 1..80: mol_type = other DNA

SEQ ID NO: 194454 - DNA, 80 bp, synthetic construct; identical to SEQ ID NO: 9724
  source 1..80: mol_type = other DNA

SEQ ID NO: 194455 - DNA, 80 bp, synthetic construct; identical to SEQ ID NO: 9725
  source 1..80: mol_type = other DNA

SEQ ID NO: 194456 - DNA, 80 bp, synthetic construct; identical to SEQ ID NO: 9726
  source 1..80: mol_type = other DNA

SEQ ID NO: 194457 - DNA, 80 bp, synthetic construct; identical to SEQ ID NO: 9727
  source 1..80: mol_type = other DNA

SEQ ID NO: 194458 - DNA, 80 bp, synthetic construct; identical to SEQ ID NO: 9728
  source 1..80: mol_type = other DNA

SEQ ID NO: 194459 - DNA, 80 bp, synthetic construct; identical to SEQ ID NO: 9729
  source 1..80: mol_type = other DNA

SEQ ID NO: 194460 - DNA, 80 bp, synthetic construct; identical to SEQ ID NO: 9730
  source 1..80: mol_type = other DNA

SEQ ID NO: 194461 - DNA, 80 bp, synthetic construct; identical to SEQ ID NO: 9731
  source 1..80: mol_type = other DNA

SEQ ID NO: 194462 - DNA, 80 bp, synthetic construct; identical to SEQ ID NO: 9732
  source 1..80: mol_type = other DNA

SEQ ID NO: 194463 - DNA, 80 bp, synthetic construct; identical to SEQ ID NO: 9733
  source 1..80: mol_type = other DNA

SEQ ID NO: 194464 - DNA, 80 bp, synthetic construct; identical to SEQ ID NO: 9734
  source 1..80: mol_type = other DNA

SEQ ID NO: 194465 - DNA, 80 bp, synthetic construct; identical to SEQ ID NO: 9735
  source 1..80: mol_type = other DNA

SEQ ID NO: 194466 - DNA, 80 bp, synthetic construct; identical to SEQ ID NO: 9736
  source 1..80: mol_type = other DNA

SEQ ID NO: 194467 - DNA, 80 bp, synthetic construct; identical to SEQ ID NO: 9737
  source 1..80: mol_type = other DNA

SEQ ID NO: 194468 - DNA, 80 bp, synthetic construct; identical to SEQ ID NO: 9738
  source 1..80: mol_type = other DNA

SEQ ID NO: 194469 - DNA, 80 bp, synthetic construct; identical to SEQ ID NO: 9739
  source 1..80: mol_type = other DNA

SEQ ID NO: 194470 - DNA, 80 bp, synthetic construct; identical to SEQ ID NO: 9740
  source 1..80: mol_type = other DNA

SEQ ID NO: 194471 - DNA, 80 bp, synthetic construct; identical to SEQ ID NO: 9741
  source 1..80: mol_type = other DNA

SEQ ID NO: 194472 - DNA, 80 bp, synthetic construct; identical to SEQ ID NO: 9742
  source 1..80: mol_type = other DNA

SEQ ID NO: 194473 - DNA, 80 bp, synthetic construct; identical to SEQ ID NO: 9743
  source 1..80: mol_type = other DNA

SEQ ID NO: 194474 - DNA, 80 bp, synthetic construct; identical to SEQ ID NO: 9744
  source 1..80: mol_type = other DNA

SEQ ID NO: 194475 - DNA, 80 bp, synthetic construct; identical to SEQ ID NO: 9745
  source 1..80: mol_type = other DNA

SEQ ID NO: 194476 - DNA, 80 bp, synthetic construct; identical to SEQ ID NO: 9746
  source 1..80: mol_type = other DNA

SEQ ID NO: 194477 - DNA, 80 bp, synthetic construct; identical to SEQ ID NO: 9747
  source 1..80: mol_type = other DNA

SEQ ID NO: 194478 - DNA, 80 bp, synthetic construct; identical to SEQ ID NO: 9748
  source 1..80: mol_type = other DNA

SEQ ID NO: 194479 - DNA, 80 bp, synthetic construct; identical to SEQ ID NO: 9749
  source 1..80: mol_type = other DNA

SEQ ID NO: 194480 - DNA, 80 bp, synthetic construct; identical to SEQ ID NO: 9750
  source 1..80: mol_type = other DNA

SEQ ID NO: 194481 - DNA, 80 bp, synthetic construct; identical to SEQ ID NO: 9751
  source 1..80: mol_type = other DNA

SEQ ID NO: 194482 - DNA, 80 bp, synthetic construct; identical to SEQ ID NO: 9752
  source 1..80: mol_type = other DNA

SEQ ID NO: 194483 - DNA, 80 bp, synthetic construct; identical to SEQ ID NO: 9753
  source 1..80: mol_type = other DNA

SEQ ID NO: 194484 - DNA, 80 bp, synthetic construct; identical to SEQ ID NO: 9754
  source 1..80: mol_type = other DNA

SEQ ID NO: 194485 - DNA, 80 bp, synthetic construct; identical to SEQ ID NO: 9755
  source 1..80: mol_type = other DNA

SEQ ID NO: 194486 - DNA, 80 bp, synthetic construct; identical to SEQ ID NO: 9756
  source 1..80: mol_type = other DNA

SEQ ID NO: 194487 - DNA, 80 bp, synthetic construct; identical to SEQ ID NO: 9757
  source 1..80: mol_type = other DNA

SEQ ID NO: 194488 - DNA, 80 bp, synthetic construct; identical to SEQ ID NO: 9758
  source 1..80: mol_type = other DNA

SEQ ID NO: 194489 - DNA, 80 bp, synthetic construct; identical to SEQ ID NO: 9759
  source 1..80: mol_type = other DNA

SEQ ID NO: 194490 - DNA, 80 bp, synthetic construct; identical to SEQ ID NO: 9760
  source 1..80: mol_type = other DNA

SEQ ID NO: 194491 - DNA, 80 bp, synthetic construct; identical to SEQ ID NO: 9761
  source 1..80: mol_type = other DNA

SEQ ID NO: 194492 - DNA, 80 bp, synthetic construct; identical to SEQ ID NO: 9762
  source 1..80: mol_type = other DNA

SEQ ID NO: 194493 - DNA, 80 bp, synthetic construct; identical to SEQ ID NO: 9763
  source 1..80: mol_type = other DNA

SEQ ID NO: 194494 - DNA, 80 bp, synthetic construct; identical to SEQ ID NO: 9764
  source 1..80: mol_type = other DNA

SEQ ID NO: 194495 - DNA, 80 bp, synthetic construct; identical to SEQ ID NO: 9765
  source 1..80: mol_type = other DNA

SEQ ID NO: 194496 - DNA, 80 bp, synthetic construct; identical to SEQ ID NO: 9766
  source 1..80: mol_type = other DNA

SEQ ID NO: 194497 - DNA, 80 bp, synthetic construct; identical to SEQ ID NO: 9767
  source 1..80: mol_type = other DNA

SEQ ID NO: 194498 - DNA, 80 bp, synthetic construct; identical to SEQ ID NO: 9768
  source 1..80: mol_type = other DNA

SEQ ID NO: 194499 - DNA, 80 bp, synthetic construct; identical to SEQ ID NO: 9769
  source 1..80: mol_type = other DNA

SEQ ID NO: 194500 - DNA, 80 bp, synthetic construct; identical to SEQ ID NO: 9770
  source 1..80: mol_type = other DNA

SEQ ID NO: 194501 - DNA, 80 bp, synthetic construct; identical to SEQ ID NO: 9771
  source 1..80: mol_type = other DNA

SEQ ID NO: 194502 - DNA, 80 bp, synthetic construct; identical to SEQ ID NO: 9772
  source 1..80: mol_type = other DNA

SEQ ID NO: 194503 - DNA, 80 bp, synthetic construct; identical to SEQ ID NO: 9773
  source 1..80: mol_type = other DNA

SEQ ID NO: 194504 - DNA, 80 bp, synthetic construct; identical to SEQ ID NO: 9774
  source 1..80: mol_type = other DNA

SEQ ID NO: 194505 - DNA, 80 bp, synthetic construct; identical to SEQ ID NO: 9775
  source 1..80: mol_type = other DNA

SEQ ID NO: 194506 - DNA, 80 bp, synthetic construct; identical to SEQ ID NO: 9776
  source 1..80: mol_type = other DNA

SEQ ID NO: 194507 - DNA, 80 bp, synthetic construct; identical to SEQ ID NO: 9777
  source 1..80: mol_type = other DNA

SEQ ID NO: 194508 - DNA, 80 bp, synthetic construct; identical to SEQ ID NO: 9778
  source 1..80: mol_type = other DNA

SEQ ID NO: 194509 - DNA, 80 bp, synthetic construct; identical to SEQ ID NO: 9779
  source 1..80: mol_type = other DNA

SEQ ID NO: 194510 - DNA, 80 bp, synthetic construct; identical to SEQ ID NO: 9780
  source 1..80: mol_type = other DNA

SEQ ID NO: 194511 - DNA, 80 bp, synthetic construct; identical to SEQ ID NO: 9781
  source 1..80: mol_type = other DNA

SEQ ID NO: 194512 - DNA, 80 bp, synthetic construct; identical to SEQ ID NO: 9782
  source 1..80: mol_type = other DNA

SEQ ID NO: 194513 - DNA, 80 bp, synthetic construct; identical to SEQ ID NO: 9783
  source 1..80: mol_type = other DNA

SEQ ID NO: 194514 - DNA, 80 bp, synthetic construct; identical to SEQ ID NO: 9784
  source 1..80: mol_type = other DNA

SEQ ID NO: 194515 - DNA, 80 bp, synthetic construct; identical to SEQ ID NO: 9785
  source 1..80: mol_type = other DNA

SEQ ID NO: 194516 - DNA, 80 bp, synthetic construct; identical to SEQ ID NO: 9786
  source 1..80: mol_type = other DNA

SEQ ID NO: 194517 - DNA, 80 bp, synthetic construct; identical to SEQ ID NO: 9787
  source 1..80: mol_type = other DNA

SEQ ID NO: 194518 - DNA, 80 bp, synthetic construct; identical to SEQ ID NO: 9788
  source 1..80: mol_type = other DNA

SEQ ID NO: 194519 - DNA, 80 bp, synthetic construct; identical to SEQ ID NO: 9789
  source 1..80: mol_type = other DNA

SEQ ID NO: 194520 - DNA, 80 bp, synthetic construct; identical to SEQ ID NO: 9790
  source 1..80: mol_type = other DNA

SEQ ID NO: 194521 - DNA, 80 bp, synthetic construct; identical to SEQ ID NO: 9791
  source 1..80: mol_type = other DNA

SEQ ID NO: 194522 - DNA, 80 bp, synthetic construct; identical to SEQ ID NO: 9792
  source 1..80: mol_type = other DNA

SEQ ID NO: 194523 - DNA, 80 bp, synthetic construct; identical to SEQ ID NO: 9793
  source 1..80: mol_type = other DNA

SEQ ID NO: 194524 - DNA, 80 bp, synthetic construct; identical to SEQ ID NO: 9794
  source 1..80: mol_type = other DNA

SEQ ID NO: 194525 - DNA, 80 bp, synthetic construct; identical to SEQ ID NO: 9795
  source 1..80: mol_type = other DNA

SEQ ID NO: 194526 - DNA, 80 bp, synthetic construct; identical to SEQ ID NO: 9796
  source 1..80: mol_type = other DNA

SEQ ID NO: 194527 - DNA, 80 bp, synthetic construct; identical to SEQ ID NO: 9797
  source 1..80: mol_type = other DNA

SEQ ID NO: 194528 - DNA, 80 bp, synthetic construct; identical to SEQ ID NO: 9798
  source 1..80: mol_type = other DNA

SEQ ID NO: 194529 - DNA, 80 bp, synthetic construct; identical to SEQ ID NO: 9799
  source 1..80: mol_type = other DNA

SEQ ID NO: 194530 - DNA, 80 bp, synthetic construct; identical to SEQ ID NO: 9800
  source 1..80: mol_type = other DNA

SEQ ID NO: 194531 - DNA, 80 bp, synthetic construct; identical to SEQ ID NO: 9801
  source 1..80: mol_type = other DNA

SEQ ID NO: 194532 - DNA, 80 bp, synthetic construct; identical to SEQ ID NO: 9802
  source 1..80: mol_type = other DNA

SEQ ID NO: 194533 - DNA, 80 bp, synthetic construct; identical to SEQ ID NO: 9803
  source 1..80: mol_type = other DNA

SEQ ID NO: 194534 - DNA, 80 bp, synthetic construct; identical to SEQ ID NO: 9804
  source 1..80: mol_type = other DNA

SEQ ID NO: 194535 - DNA, 80 bp, synthetic construct; identical to SEQ ID NO: 9805
  source 1..80: mol_type = other DNA

SEQ ID NO: 194536 - DNA, 80 bp, synthetic construct; identical to SEQ ID NO: 9806
  source 1..80: mol_type = other DNA

SEQ ID NO: 194537 - DNA, 80 bp, synthetic construct; identical to SEQ ID NO: 9807
  source 1..80: mol_type = other DNA

SEQ ID NO: 194538 - DNA, 80 bp, synthetic construct; identical to SEQ ID NO: 9808
  source 1..80: mol_type = other DNA

SEQ ID NO: 194539 - DNA, 80 bp, synthetic construct; identical to SEQ ID NO: 9809
  source 1..80: mol_type = other DNA

SEQ ID NO: 194540 - DNA, 80 bp, synthetic construct; identical to SEQ ID NO: 9810
  source 1..80: mol_type = other DNA

SEQ ID NO: 194541 - DNA, 80 bp, synthetic construct; identical to SEQ ID NO: 9811
  source 1..80: mol_type = other DNA

SEQ ID NO: 194542 - DNA, 80 bp, synthetic construct; identical to SEQ ID NO: 9812
  source 1..80: mol_type = other DNA

SEQ ID NO: 194543 - DNA, 80 bp, synthetic construct; identical to SEQ ID NO: 9813
  source 1..80: mol_type = other DNA

SEQ ID NO: 194544 - DNA, 80 bp, synthetic construct; identical to SEQ ID NO: 9814
  source 1..80: mol_type = other DNA

SEQ ID NO: 194545 - DNA, 80 bp, synthetic construct; identical to SEQ ID NO: 9815
  source 1..80: mol_type = other DNA

SEQ ID NO: 194546 - DNA, 80 bp, synthetic construct; identical to SEQ ID NO: 9816
  source 1..80: mol_type = other DNA

SEQ ID NO: 194547 - DNA, 80 bp, synthetic construct; identical to SEQ ID NO: 9817
  source 1..80: mol_type = other DNA

SEQ ID NO: 194548 - DNA, 80 bp, synthetic construct; identical to SEQ ID NO: 9818
  source 1..80: mol_type = other DNA

SEQ ID NO: 194549 - DNA, 80 bp, synthetic construct; identical to SEQ ID NO: 9819
  source 1..80: mol_type = other DNA

SEQ ID NO: 194550 - DNA, 80 bp, synthetic construct; identical to SEQ ID NO: 9820
  source 1..80: mol_type = other DNA

SEQ ID NO: 194551 - DNA, 80 bp, synthetic construct; identical to SEQ ID NO: 9821
  source 1..80: mol_type = other DNA

SEQ ID NO: 194552 - DNA, 80 bp, synthetic construct; identical to SEQ ID NO: 9822
  source 1..80: mol_type = other DNA

SEQ ID NO: 194553 - DNA, 80 bp, synthetic construct; identical to SEQ ID NO: 9823
  source 1..80: mol_type = other DNA

SEQ ID NO: 194554 - DNA, 80 bp, synthetic construct; identical to SEQ ID NO: 9824
  source 1..80: mol_type = other DNA

SEQ ID NO: 194555 - DNA, 80 bp, synthetic construct; identical to SEQ ID NO: 9825
  source 1..80: mol_type = other DNA

SEQ ID NO: 194556 - DNA, 80 bp, synthetic construct; identical to SEQ ID NO: 9826
  source 1..80: mol_type = other DNA

SEQ ID NO: 194557 - DNA, 80 bp, synthetic construct; identical to SEQ ID NO: 9827
  source 1..80: mol_type = other DNA

SEQ ID NO: 194558 - DNA, 80 bp, synthetic construct; identical to SEQ ID NO: 9828
  source 1..80: mol_type = other DNA

SEQ ID NO: 194559 - DNA, 80 bp, synthetic construct; identical to SEQ ID NO: 9829
  source 1..80: mol_type = other DNA

SEQ ID NO: 194560 - DNA, 80 bp, synthetic construct; identical to SEQ ID NO: 9830
  source 1..80: mol_type = other DNA

SEQ ID NO: 194561 - DNA, 80 bp, synthetic construct; identical to SEQ ID NO: 9831
  source 1..80: mol_type = other DNA

SEQ ID NO: 194562 - DNA, 80 bp, synthetic construct; identical to SEQ ID NO: 9832
  source 1..80: mol_type = other DNA

SEQ ID NO: 194563 - DNA, 80 bp, synthetic construct; identical to SEQ ID NO: 9833
  source 1..80: mol_type = other DNA

SEQ ID NO: 194564 - DNA, 80 bp, synthetic construct; identical to SEQ ID NO: 9834
  source 1..80: mol_type = other DNA

SEQ ID NO: 194565 - DNA, 80 bp, synthetic construct; identical to SEQ ID NO: 9835
  source 1..80: mol_type = other DNA

SEQ ID NO: 194566 - DNA, 80 bp, synthetic construct; identical to SEQ ID NO: 9836
  source 1..80: mol_type = other DNA

SEQ ID NO: 194567 - DNA, 80 bp, synthetic construct; identical to SEQ ID NO: 9837
  source 1..80: mol_type = other DNA

SEQ ID NO: 194568 - DNA, 80 bp, synthetic construct; identical to SEQ ID NO: 9838
  source 1..80: mol_type = other DNA

SEQ ID NO: 194569 - DNA, 80 bp, synthetic construct; identical to SEQ ID NO: 9839
  source 1..80: mol_type = other DNA

SEQ ID NO: 194570 - DNA, 80 bp, synthetic construct; identical to SEQ ID NO: 9840
  source 1..80: mol_type = other DNA

SEQ ID NO: 194571 - DNA, 80 bp, synthetic construct; identical to SEQ ID NO: 9841
  source 1..80: mol_type = other DNA

SEQ ID NO: 194572 - DNA, 80 bp, synthetic construct; identical to SEQ ID NO: 9842
  source 1..80: mol_type = other DNA

SEQ ID NO: 194573 - DNA, 80 bp, synthetic construct; identical to SEQ ID NO: 9843
  source 1..80: mol_type = other DNA

SEQ ID NO: 194574 - DNA, 80 bp, synthetic construct; identical to SEQ ID NO: 9844
  source 1..80: mol_type = other DNA

SEQ ID NO: 194575 - DNA, 80 bp, synthetic construct; identical to SEQ ID NO: 9845
  source 1..80: mol_type = other DNA

SEQ ID NO: 194576 - DNA, 80 bp, synthetic construct; identical to SEQ ID NO: 9846
  source 1..80: mol_type = other DNA

SEQ ID NO: 194577 - DNA, 80 bp, synthetic construct; identical to SEQ ID NO: 9847
  source 1..80: mol_type = other DNA

SEQ ID NO: 194578 - DNA, 80 bp, synthetic construct; identical to SEQ ID NO: 9848
  source 1..80: mol_type = other DNA

SEQ ID NO: 194579 - DNA, 80 bp, synthetic construct; identical to SEQ ID NO: 9849
  source 1..80: mol_type = other DNA

SEQ ID NO: 194580 - DNA, 80 bp, synthetic construct; identical to SEQ ID NO: 9850
  source 1..80: mol_type = other DNA

SEQ ID NO: 194581 - DNA, 80 bp, synthetic construct; identical to SEQ ID NO: 9851
  source 1..80: mol_type = other DNA

SEQ ID NO: 194582 - DNA, 80 bp, synthetic construct; identical to SEQ ID NO: 9852
  source 1..80: mol_type = other DNA

SEQ ID NO: 194583 - DNA, 80 bp, synthetic construct; identical to SEQ ID NO: 9853
  source 1..80: mol_type = other DNA

SEQ ID NO: 194584 - DNA, 80 bp, synthetic construct; identical to SEQ ID NO: 9854
  source 1..80: mol_type = other DNA

SEQ ID NO: 194585 - DNA, 80 bp, synthetic construct; identical to SEQ ID NO: 9855
  source 1..80: mol_type = other DNA

SEQ ID NO: 194586 - DNA, 80 bp, synthetic construct; identical to SEQ ID NO: 9856
  source 1..80: mol_type = other DNA

SEQ ID NO: 194587 - DNA, 80 bp, synthetic construct; identical to SEQ ID NO: 9857
  source 1..80: mol_type = other DNA

SEQ ID NO: 194588 - DNA, 80 bp, synthetic construct; identical to SEQ ID NO: 9858
  source 1..80: mol_type = other DNA

SEQ ID NO: 194589 - DNA, 80 bp, synthetic construct; identical to SEQ ID NO: 9859
  source 1..80: mol_type = other DNA

SEQ ID NO: 194590 - DNA, 80 bp, synthetic construct; identical to SEQ ID NO: 9860
  source 1..80: mol_type = other DNA

SEQ ID NO: 194591 - DNA, 80 bp, synthetic construct; identical to SEQ ID NO: 9861
  source 1..80: mol_type = other DNA

SEQ ID NO: 194592 - DNA, 80 bp, synthetic construct; identical to SEQ ID NO: 9862
  source 1..80: mol_type = other DNA

SEQ ID NO: 194593 - DNA, 80 bp, synthetic construct; identical to SEQ ID NO: 9863
  source 1..80: mol_type = other DNA

SEQ ID NO: 194594 - DNA, 80 bp, synthetic construct; identical to SEQ ID NO: 9864
  source 1..80: mol_type = other DNA

SEQ ID NO: 194595 - DNA, 80 bp, synthetic construct; identical to SEQ ID NO: 9865
  source 1..80: mol_type = other DNA

SEQ ID NO: 194596 - DNA, 80 bp, synthetic construct; identical to SEQ ID NO: 9866
  source 1..80: mol_type = other DNA

SEQ ID NO: 194597 - DNA, 80 bp, synthetic construct; identical to SEQ ID NO: 9867
  source 1..80: mol_type = other DNA

SEQ ID NO: 194598 - DNA, 80 bp, synthetic construct; identical to SEQ ID NO: 9868
  source 1..80: mol_type = other DNA

SEQ ID NO: 194599 - DNA, 80 bp, synthetic construct; identical to SEQ ID NO: 9869
  source 1..80: mol_type = other DNA

SEQ ID NO: 194600 - DNA, 80 bp, synthetic construct; identical to SEQ ID NO: 9870
  source 1..80: mol_type = other DNA

SEQ ID NO: 194601 - DNA, 80 bp, synthetic construct; identical to SEQ ID NO: 9871
  source 1..80: mol_type = other DNA

SEQ ID NO: 194602 - DNA, 80 bp, synthetic construct; identical to SEQ ID NO: 9872
  source 1..80: mol_type = other DNA

SEQ ID NO: 194603 - DNA, 80 bp, synthetic construct; identical to SEQ ID NO: 9873
  source 1..80: mol_type = other DNA

SEQ ID NO: 194604 - DNA, 80 bp, synthetic construct; identical to SEQ ID NO: 9874
  source 1..80: mol_type = other DNA

SEQ ID NO: 194605 - DNA, 80 bp, synthetic construct; identical to SEQ ID NO: 9875
  source 1..80: mol_type = other DNA

SEQ ID NO: 194606 - DNA, 80 bp, synthetic construct; identical to SEQ ID NO: 9876
  source 1..80: mol_type = other DNA

SEQ ID NO: 194607 - DNA, 80 bp, synthetic construct; identical to SEQ ID NO: 9877
  source 1..80: mol_type = other DNA

SEQ ID NO: 194608 - DNA, 80 bp, synthetic construct; identical to SEQ ID NO: 9878
  source 1..80: mol_type = other DNA

SEQ ID NO: 194609 - DNA, 80 bp, synthetic construct; identical to SEQ ID NO: 9879
  source 1..80: mol_type = other DNA

SEQ ID NO: 194610 - DNA, 80 bp, synthetic construct; identical to SEQ ID NO: 9880
  source 1..80: mol_type = other DNA

SEQ ID NO: 194611 - DNA, 80 bp, synthetic construct; identical to SEQ ID NO: 9881
  source 1..80: mol_type = other DNA

SEQ ID NO: 194612 - DNA, 80 bp, synthetic construct; identical to SEQ ID NO: 9882
  source 1..80: mol_type = other DNA

SEQ ID NO: 194613 - DNA, 80 bp, synthetic construct; identical to SEQ ID NO: 9883
  source 1..80: mol_type = other DNA

SEQ ID NO: 194614 - DNA, 80 bp, synthetic construct; identical to SEQ ID NO: 9884
  source 1..80: mol_type = other DNA

SEQ ID NO: 194615 - DNA, 80 bp, synthetic construct; identical to SEQ ID NO: 9885
  source 1..80: mol_type = other DNA

SEQ ID NO: 194616 - DNA, 80 bp, synthetic construct; identical to SEQ ID NO: 9886
  source 1..80: mol_type = other DNA

SEQ ID NO: 194617 - DNA, 80 bp, synthetic construct; identical to SEQ ID NO: 9887
  source 1..80: mol_type = other DNA

SEQ ID NO: 194618 - DNA, 80 bp, synthetic construct; identical to SEQ ID NO: 9888
  source 1..80: mol_type = other DNA

SEQ ID NO: 194619 - DNA, 80 bp, synthetic construct; identical to SEQ ID NO: 9889
  source 1..80: mol_type = other DNA

SEQ ID NO: 194620 - DNA, 80 bp, synthetic construct; identical to SEQ ID NO: 9890
  source 1..80: mol_type = other DNA

SEQ ID NO: 194621 - DNA, 80 bp, synthetic construct; identical to SEQ ID NO: 9891
  source 1..80: mol_type = other DNA

SEQ ID NO: 194622 - DNA, 80 bp, synthetic construct; identical to SEQ ID NO: 9892
  source 1..80: mol_type = other DNA

SEQ ID NO: 194623 - DNA, 80 bp, synthetic construct; identical to SEQ ID NO: 9893
  source 1..80: mol_type = other DNA

SEQ ID NO: 194624 - DNA, 80 bp, synthetic construct; identical to SEQ ID NO: 9894
  source 1..80: mol_type = other DNA

SEQ ID NO: 194625 - DNA, 80 bp, synthetic construct; identical to SEQ ID NO: 9895
  source 1..80: mol_type = other DNA

SEQ ID NO: 194626 - DNA, 80 bp, synthetic construct; identical to SEQ ID NO: 9896
  source 1..80: mol_type = other DNA

SEQ ID NO: 194627 - DNA, 80 bp, synthetic construct; identical to SEQ ID NO: 9897
  source 1..80: mol_type = other DNA

SEQ ID NO: 194628 - DNA, 80 bp, synthetic construct; identical to SEQ ID NO: 9898
  source 1..80: mol_type = other DNA

SEQ ID NO: 194629 - DNA, 80 bp, synthetic construct; identical to SEQ ID NO: 9899
  source 1..80: mol_type = other DNA

SEQ ID NO: 194630 - DNA, 80 bp, synthetic construct; identical to SEQ ID NO: 9900
  source 1..80: mol_type = other DNA

SEQ ID NO: 194631 - DNA, 80 bp, synthetic construct; identical to SEQ ID NO: 9901
  source 1..80: mol_type = other DNA

SEQ ID NO: 194632 - DNA, 80 bp, synthetic construct; identical to SEQ ID NO: 9902
  source 1..80: mol_type = other DNA

SEQ ID NO: 194633 - DNA, 80 bp, synthetic construct; identical to SEQ ID NO: 9903
  source 1..80: mol_type = other DNA

SEQ ID NO: 194634 - DNA, 80 bp, synthetic construct; identical to SEQ ID NO: 9904
  source 1..80: mol_type = other DNA

SEQ ID NO: 194635 - DNA, 80 bp, synthetic construct; identical to SEQ ID NO: 9905
  source 1..80: mol_type = other DNA

SEQ ID NO: 194636 - DNA, 80 bp, synthetic construct; identical to SEQ ID NO: 9906
  source 1..80: mol_type = other DNA

SEQ ID NO: 194637 - DNA, 80 bp, synthetic construct; identical to SEQ ID NO: 9907
  source 1..80: mol_type = other DNA

SEQ ID NO: 194638 - DNA, 80 bp, synthetic construct; identical to SEQ ID NO: 9908
  source 1..80: mol_type = other DNA

SEQ ID NO: 194639 - DNA, 80 bp, synthetic construct; identical to SEQ ID NO: 9909
  source 1..80: mol_type = other DNA

SEQ ID NO: 194640 - DNA, 80 bp, synthetic construct; identical to SEQ ID NO: 9910
  source 1..80: mol_type = other DNA

SEQ ID NO: 194641 - DNA, 80 bp, synthetic construct; identical to SEQ ID NO: 9911
  source 1..80: mol_type = other DNA

SEQ ID NO: 194642 - DNA, 80 bp, synthetic construct; identical to SEQ ID NO: 9912
  source 1..80: mol_type = other DNA

SEQ ID NO: 194643 - DNA, 80 bp, synthetic construct; identical to SEQ ID NO: 9913
  source 1..80: mol_type = other DNA

SEQ ID NO: 194644 - DNA, 80 bp, synthetic construct; identical to SEQ ID NO: 9914
  source 1..80: mol_type = other DNA

SEQ ID NO: 194645 - DNA, 80 bp, synthetic construct; identical to SEQ ID NO: 9915
  source 1..80: mol_type = other DNA

SEQ ID NO: 194646 - DNA, 80 bp, synthetic construct; identical to SEQ ID NO: 9916
  source 1..80: mol_type = other DNA

SEQ ID NO: 194647 - DNA, 80 bp, synthetic construct; identical to SEQ ID NO: 9917
  source 1..80: mol_type = other DNA

SEQ ID NO: 194648 - DNA, 80 bp, synthetic construct; identical to SEQ ID NO: 9918
  source 1..80: mol_type = other DNA

SEQ ID NO: 194649 - DNA, 80 bp, synthetic construct; identical to SEQ ID NO: 9919
  source 1..80: mol_type = other DNA

SEQ ID NO: 194650 - DNA, 80 bp, synthetic construct; identical to SEQ ID NO: 9920
  source 1..80: mol_type = other DNA

SEQ ID NO: 194651 - DNA, 80 bp, synthetic construct; identical to SEQ ID NO: 9921
  source 1..80: mol_type = other DNA

SEQ ID NO: 194652 - DNA, 80 bp, synthetic construct; identical to SEQ ID NO: 9922
  source 1..80: mol_type = other DNA

SEQ ID NO: 194653 - DNA, 80 bp, synthetic construct; identical to SEQ ID NO: 9923
  source 1..80: mol_type = other DNA

SEQ ID NO: 194654 - DNA, 80 bp, synthetic construct; identical to SEQ ID NO: 9924
  source 1..80: mol_type = other DNA

SEQ ID NO: 194655 - DNA, 80 bp, synthetic construct; identical to SEQ ID NO: 9925
  source 1..80: mol_type = other DNA

SEQ ID NO: 194656 - DNA, 80 bp, synthetic construct; identical to SEQ ID NO: 9926
  source 1..80: mol_type = other DNA

SEQ ID NO: 194657 - DNA, 80 bp, synthetic construct; identical to SEQ ID NO: 9927
  source 1..80: mol_type = other DNA

SEQ ID NO: 194658 - DNA, 80 bp, synthetic construct; identical to SEQ ID NO: 9928
  source 1..80: mol_type = other DNA

SEQ ID NO: 194659 - DNA, 80 bp, synthetic construct; identical to SEQ ID NO: 9929
  source 1..80: mol_type = other DNA

SEQ ID NO: 194660 - DNA, 80 bp, synthetic construct; identical to SEQ ID NO: 9930
  source 1..80: mol_type = other DNA

SEQ ID NO: 194661 - DNA, 80 bp, synthetic construct; identical to SEQ ID NO: 9931
  source 1..80: mol_type = other DNA

SEQ ID NO: 194662 - DNA, 80 bp, synthetic construct; identical to SEQ ID NO: 9932
  source 1..80: mol_type = other DNA

SEQ ID NO: 194663 - DNA, 80 bp, synthetic construct; identical to SEQ ID NO: 9933
  source 1..80: mol_type = other DNA

SEQ ID NO: 194664 - DNA, 80 bp, synthetic construct; identical to SEQ ID NO: 9934
  source 1..80: mol_type = other DNA

SEQ ID NO: 194665 - DNA, 80 bp, synthetic construct; identical to SEQ ID NO: 9935
  source 1..80: mol_type = other DNA

SEQ ID NO: 194666 - DNA, 80 bp, synthetic construct; identical to SEQ ID NO: 9936
  source 1..80: mol_type = other DNA

SEQ ID NO: 194667 - DNA, 80 bp, synthetic construct; identical to SEQ ID NO: 9937
  source 1..80: mol_type = other DNA

SEQ ID NO: 194668 - DNA, 80 bp, synthetic construct; identical to SEQ ID NO: 9938
  source 1..80: mol_type = other DNA

SEQ ID NO: 194669 - DNA, 80 bp, synthetic construct; identical to SEQ ID NO: 9939
  source 1..80: mol_type = other DNA

SEQ ID NO: 194670 - DNA, 80 bp, synthetic construct; identical to SEQ ID NO: 9940
  source 1..80: mol_type = other DNA

SEQ ID NO: 194671 - DNA, 80 bp, synthetic construct; identical to SEQ ID NO: 9941
  source 1..80: mol_type = other DNA

SEQ ID NO: 194672 - DNA, 80 bp, synthetic construct; identical to SEQ ID NO: 9942
  source 1..80: mol_type = other DNA

SEQ ID NO: 194673 - DNA, 80 bp, synthetic construct; identical to SEQ ID NO: 9943
  source 1..80: mol_type = other DNA

SEQ ID NO: 194674 - DNA, 80 bp, synthetic construct; identical to SEQ ID NO: 9944
  source 1..80: mol_type = other DNA

SEQ ID NO: 194675 - DNA, 80 bp, synthetic construct; identical to SEQ ID NO: 9945
  source 1..80: mol_type = other DNA

SEQ ID NO: 194676 - DNA, 80 bp, synthetic construct; identical to SEQ ID NO: 9946
  source 1..80: mol_type = other DNA

SEQ ID NO: 194677 - DNA, 80 bp, synthetic construct; identical to SEQ ID NO: 9947
  source 1..80: mol_type = other DNA

SEQ ID NO: 194678 - DNA, 80 bp, synthetic construct; identical to SEQ ID NO: 9948
  source 1..80: mol_type = other DNA

SEQ ID NO: 194679 - DNA, 80 bp, synthetic construct; identical to SEQ ID NO: 9949
  source 1..80: mol_type = other DNA

SEQ ID NO: 194680 - DNA, 80 bp, synthetic construct; identical to SEQ ID NO: 9950
  source 1..80: mol_type = other DNA

SEQ ID NO: 194681 - DNA, 80 bp, synthetic construct; identical to SEQ ID NO: 9951
  source 1..80: mol_type = other DNA

SEQ ID NO: 194682 - DNA, 80 bp, synthetic construct; identical to SEQ ID NO: 9952
  source 1..80: mol_type = other DNA

SEQ ID NO: 194683 - DNA, 80 bp, synthetic construct; identical to SEQ ID NO: 9953
  source 1..80: mol_type = other DNA

SEQ ID NO: 194684 - DNA, 80 bp, synthetic construct; identical to SEQ ID NO: 9954
  source 1..80: mol_type = other DNA

SEQ ID NO: 194685 - DNA, 80 bp, synthetic construct; identical to SEQ ID NO: 9955
  source 1..80: mol_type = other DNA

SEQ ID NO: 194686 - DNA, 80 bp, synthetic construct; identical to SEQ ID NO: 9956
  source 1..80: mol_type = other DNA

SEQ ID NO: 194687 - DNA, 80 bp, synthetic construct; identical to SEQ ID NO: 9957
  source 1..80: mol_type = other DNA

SEQ ID NO: 194688 - DNA, 80 bp, synthetic construct; identical to SEQ ID NO: 9958
  source 1..80: mol_type = other DNA

SEQ ID NO: 194689 - DNA, 80 bp, synthetic construct; identical to SEQ ID NO: 9959
  source 1..80: mol_type = other DNA

SEQ ID NO: 194690 - DNA, 80 bp, synthetic construct; identical to SEQ ID NO: 9960
  source 1..80: mol_type = other DNA

SEQ ID NO: 194691 - DNA, 80 bp, synthetic construct; identical to SEQ ID NO: 9961
  source 1..80: mol_type = other DNA

SEQ ID NO: 194692 - DNA, 80 bp, synthetic construct; identical to SEQ ID NO: 9962
  source 1..80: mol_type = other DNA

SEQ ID NO: 194693 - DNA, 80 bp, synthetic construct; identical to SEQ ID NO: 9963
  source 1..80: mol_type = other DNA

SEQ ID NO: 194694 - DNA, 80 bp, synthetic construct; identical to SEQ ID NO: 9964
  source 1..80: mol_type = other DNA

SEQ ID NO: 194695 - DNA, 80 bp, synthetic construct; identical to SEQ ID NO: 9965
  source 1..80: mol_type = other DNA

SEQ ID NO: 194696 - DNA, 80 bp, synthetic construct; identical to SEQ ID NO: 9966
  source 1..80: mol_type = other DNA

SEQ ID NO: 194697 - DNA, 80 bp, synthetic construct; identical to SEQ ID NO: 9967
  source 1..80: mol_type = other DNA

SEQ ID NO: 194698 - DNA, 80 bp, synthetic construct; identical to SEQ ID NO: 9968
  source 1..80: mol_type = other DNA

SEQ ID NO: 194699 - DNA, 80 bp, synthetic construct; identical to SEQ ID NO: 9969
  source 1..80: mol_type = other DNA

SEQ ID NO: 194700 - DNA, 80 bp, synthetic construct; identical to SEQ ID NO: 9970
  source 1..80: mol_type = other DNA

SEQ ID NO: 194701 - DNA, 80 bp, synthetic construct; identical to SEQ ID NO: 9971
  source 1..80: mol_type = other DNA

SEQ ID NO: 194702 - DNA, 80 bp, synthetic construct; identical to SEQ ID NO: 9972
  source 1..80: mol_type = other DNA

SEQ ID NO: 194703 - DNA, 80 bp, synthetic construct; identical to SEQ ID NO: 9973
  source 1..80: mol_type = other DNA

SEQ ID NO: 194704 - DNA, 80 bp, synthetic construct; identical to SEQ ID NO: 9974
  source 1..80: mol_type = other DNA

SEQ ID NO: 194705 - DNA, 80 bp, synthetic construct; identical to SEQ ID NO: 9975
  source 1..80: mol_type = other DNA

SEQ ID NO: 194706 - DNA, 80 bp, synthetic construct; identical to SEQ ID NO: 9976
  source 1..80: mol_type = other DNA

SEQ ID NO: 194707 - DNA, 80 bp, synthetic construct; identical to SEQ ID NO: 9977
  source 1..80: mol_type = other DNA

SEQ ID NO: 194708 - DNA, 80 bp, synthetic construct; identical to SEQ ID NO: 9978
  source 1..80: mol_type = other DNA

SEQ ID NO: 194709 - DNA, 80 bp, synthetic construct; identical to SEQ ID NO: 9979
  source 1..80: mol_type = other DNA

SEQ ID NO: 194710 - DNA, 80 bp, synthetic construct; identical to SEQ ID NO: 9980
  source 1..80: mol_type = other DNA

SEQ ID NO: 194711 - DNA, 80 bp, synthetic construct; identical to SEQ ID NO: 9981
  source 1..80: mol_type = other DNA

SEQ ID NO: 194712 - DNA, 80 bp, synthetic construct; identical to SEQ ID NO: 9982
  source 1..80: mol_type = other DNA

SEQ ID NO: 194713 - DNA, 80 bp, synthetic construct; identical to SEQ ID NO: 9983
  source 1..80: mol_type = other DNA

SEQ ID NO: 194714 - DNA, 80 bp, synthetic construct; identical to SEQ ID NO: 9984
  source 1..80: mol_type = other DNA

SEQ ID NO: 194715 - DNA, 80 bp, synthetic construct; identical to SEQ ID NO: 9985
  source 1..80: mol_type = other DNA

SEQ ID NO: 194716 - DNA, 80 bp, synthetic construct; identical to SEQ ID NO: 9986
  source 1..80: mol_type = other DNA

SEQ ID NO: 194717 - DNA, 80 bp, synthetic construct; identical to SEQ ID NO: 9987
  source 1..80: mol_type = other DNA

SEQ ID NO: 194718 - DNA, 80 bp, synthetic construct; identical to SEQ ID NO: 9988
  source 1..80: mol_type = other DNA

SEQ ID NO: 194719 - DNA, 80 bp, synthetic construct; identical to SEQ ID NO: 9989
  source 1..80: mol_type = other DNA

SEQ ID NO: 194720 - DNA, 80 bp, synthetic construct; identical to SEQ ID NO: 9990
  source 1..80: mol_type = other DNA

SEQ ID NO: 194721 - DNA, 80 bp, synthetic construct; identical to SEQ ID NO: 9991
  source 1..80: mol_type = other DNA

SEQ ID NO: 194722 - DNA, 80 bp, synthetic construct; identical to SEQ ID NO: 9992
  source 1..80: mol_type = other DNA

SEQ ID NO: 194723 - DNA, 80 bp, synthetic construct; identical to SEQ ID NO: 9993
  source 1..80: mol_type = other DNA

SEQ ID NO: 194724 - DNA, 80 bp, synthetic construct; identical to SEQ ID NO: 9994
  source 1..80: mol_type = other DNA

SEQ ID NO: 194725 - DNA, 80 bp, synthetic construct; identical to SEQ ID NO: 9995
  source 1..80: mol_type = other DNA

SEQ ID NO: 194726 - DNA, 80 bp, synthetic construct; identical to SEQ ID NO: 9996
  source 1..80: mol_type = other DNA

SEQ ID NO: 194727 - DNA, 80 bp, synthetic construct; identical to SEQ ID NO: 9997
  source 1..80: mol_type = other DNA

SEQ ID NO: 194728 - DNA, 80 bp, synthetic construct; identical to SEQ ID NO: 9998
  source 1..80: mol_type = other DNA

SEQ ID NO: 194729 - DNA, 80 bp, synthetic construct; identical to SEQ ID NO: 9999
  source 1..80: mol_type = other DNA

SEQ ID NO: 194730 - DNA, 80 bp, synthetic construct; identical to SEQ ID NO: 10000
  source 1..80: mol_type = other DNA

SEQ ID NO: 194731 - DNA, 80 bp, synthetic construct; identical to SEQ ID NO: 10001
  source 1..80: mol_type = other DNA

SEQ ID NO: 194732 - DNA, 80 bp, synthetic construct; identical to SEQ ID NO: 10002
  source 1..80: mol_type = other DNA

SEQ ID NO: 194733 - DNA, 80 bp, synthetic construct; identical to SEQ ID NO: 10003
  source 1..80: mol_type = other DNA

SEQ ID NO: 194734 - DNA, 80 bp, synthetic construct; identical to SEQ ID NO: 10004
  source 1..80: mol_type = other DNA

SEQ ID NO: 194735 - DNA, 80 bp, synthetic construct; identical to SEQ ID NO: 10005
  source 1..80: mol_type = other DNA

SEQ ID NO: 194736 - DNA, 80 bp, synthetic construct; identical to SEQ ID NO: 10006
  source 1..80: mol_type = other DNA

SEQ ID NO: 194737 - DNA, 80 bp, synthetic construct; identical to SEQ ID NO: 10007
  source 1..80: mol_type = other DNA

SEQ ID NO: 194738 - DNA, 80 bp, synthetic construct; identical to SEQ ID NO: 10008
  source 1..80: mol_type = other DNA

SEQ ID NO: 194739 - DNA, 80 bp, synthetic construct; identical to SEQ ID NO: 10009
  source 1..80: mol_type = other DNA

SEQ ID NO: 194740 - DNA, 80 bp, synthetic construct; identical to SEQ ID NO: 10010
  source 1..80: mol_type = other DNA

SEQ ID NO: 194741 - DNA, 80 bp, synthetic construct; identical to SEQ ID NO: 10011
  source 1..80: mol_type = other DNA

SEQ ID NO: 194742 - DNA, 80 bp, synthetic construct; identical to SEQ ID NO: 10012
  source 1..80: mol_type = other DNA

SEQ ID NO: 194743 - DNA, 80 bp, synthetic construct; identical to SEQ ID NO: 10013
  source 1..80: mol_type = other DNA

SEQ ID NO: 194744 - DNA, 80 bp, synthetic construct; identical to SEQ ID NO: 10014
  source 1..80: mol_type = other DNA

SEQ ID NO: 194745 - DNA, 80 bp, synthetic construct; identical to SEQ ID NO: 10015
  source 1..80: mol_type = other DNA

SEQ ID NO: 194746 - DNA, 80 bp, synthetic construct; identical to SEQ ID NO: 10016
  source 1..80: mol_type = other DNA

SEQ ID NO: 194747 - DNA, 80 bp, synthetic construct; identical to SEQ ID NO: 10017
  source 1..80: mol_type = other DNA

SEQ ID NO: 194748 - DNA, 80 bp, synthetic construct; identical to SEQ ID NO: 10018
  source 1..80: mol_type = other DNA

SEQ ID NO: 194749 - DNA, 80 bp, synthetic construct; identical to SEQ ID NO: 10019
  source 1..80: mol_type = other DNA

SEQ ID NO: 194750 - DNA, 80 bp, synthetic construct; identical to SEQ ID NO: 10020
  source 1..80: mol_type = other DNA

SEQ ID NO: 194751 - DNA, 80 bp, synthetic construct; identical to SEQ ID NO: 10021
  source 1..80: mol_type = other DNA

SEQ ID NO: 194752 - DNA, 80 bp, synthetic construct; identical to SEQ ID NO: 10022
  source 1..80: mol_type = other DNA

SEQ ID NO: 194753 - DNA, 80 bp, synthetic construct; identical to SEQ ID NO: 10023
  source 1..80: mol_type = other DNA

SEQ ID NO: 194754 - DNA, 80 bp, synthetic construct; identical to SEQ ID NO: 10024
  source 1..80: mol_type = other DNA

SEQ ID NO: 194755 - DNA, 80 bp, synthetic construct; identical to SEQ ID NO: 10025
  source 1..80: mol_type = other DNA

SEQ ID NO: 194756 - DNA, 80 bp, synthetic construct; identical to SEQ ID NO: 10026
  source 1..80: mol_type = other DNA

SEQ ID NO: 194757 - DNA, 80 bp, synthetic construct; identical to SEQ ID NO: 10027
  source 1..80: mol_type = other DNA

SEQ ID NO: 194758 - DNA, 80 bp, synthetic construct; identical to SEQ ID NO: 10028
  source 1..80: mol_type = other DNA

SEQ ID NO: 194759 - DNA, 80 bp, synthetic construct; identical to SEQ ID NO: 10029
  source 1..80: mol_type = other DNA

SEQ ID NO: 194760 - DNA, 80 bp, synthetic construct; identical to SEQ ID NO: 10030
  source 1..80: mol_type = other DNA

SEQ ID NO: 194761 - DNA, 80 bp, synthetic construct; identical to SEQ ID NO: 10031
  source 1..80: mol_type = other DNA

SEQ ID NO: 194762 - DNA, 80 bp, synthetic construct; identical to SEQ ID NO: 10032
  source 1..80: mol_type = other DNA

SEQ ID NO: 194763 - DNA, 80 bp, synthetic construct; identical to SEQ ID NO: 10033
  source 1..80: mol_type = other DNA

SEQ ID NO: 194764 - DNA, 80 bp, synthetic construct; identical to SEQ ID NO: 10034
  source 1..80: mol_type = other DNA

SEQ ID NO: 194765 - DNA, 80 bp, synthetic construct; identical to SEQ ID NO: 10035
  source 1..80: mol_type = other DNA

SEQ ID NO: 194766 - DNA, 80 bp, synthetic construct; identical to SEQ ID NO: 10036
  source 1..80: mol_type = other DNA

SEQ ID NO: 194767 - DNA, 80 bp, synthetic construct; identical to SEQ ID NO: 10037
  source 1..80: mol_type = other DNA

SEQ ID NO: 194768 - DNA, 80 bp, synthetic construct; identical to SEQ ID NO: 10038
  source 1..80: mol_type = other DNA

SEQ ID NO: 194769 - DNA, 80 bp, synthetic construct; identical to SEQ ID NO: 10039
  source 1..80: mol_type = other DNA

SEQ ID NO: 194770 - DNA, 80 bp, synthetic construct; identical to SEQ ID NO: 10040
  source 1..80: mol_type = other DNA

SEQ ID NO: 194771 - DNA, 80 bp, synthetic construct; identical to SEQ ID NO: 10041
  source 1..80: mol_type = other DNA

SEQ ID NO: 194772 - DNA, 80 bp, synthetic construct; identical to SEQ ID NO: 10042
  source 1..80: mol_type = other DNA

SEQ ID NO: 194773 - DNA, 80 bp, synthetic construct; identical to SEQ ID NO: 10043
  source 1..80: mol_type = other DNA

SEQ ID NO: 194774 - DNA, 80 bp, synthetic construct; identical to SEQ ID NO: 10044
  source 1..80: mol_type = other DNA

SEQ ID NO: 194775 - DNA, 80 bp, synthetic construct; identical to SEQ ID NO: 10045
  source 1..80: mol_type = other DNA

SEQ ID NO: 194776 - DNA, 80 bp, synthetic construct; identical to SEQ ID NO: 10046
  source 1..80: mol_type = other DNA

SEQ ID NO: 194777 - DNA, 80 bp, synthetic construct; identical to SEQ ID NO: 10047
  source 1..80: mol_type = other DNA

SEQ ID NO: 194778 - DNA, 80 bp, synthetic construct; identical to SEQ ID NO: 10048
  source 1..80: mol_type = other DNA

SEQ ID NO: 194779 - DNA, 80 bp, synthetic construct; identical to SEQ ID NO: 10049
  source 1..80: mol_type = other DNA

SEQ ID NO: 194780 - DNA, 80 bp, synthetic construct; identical to SEQ ID NO: 10050
  source 1..80: mol_type = other DNA

SEQ ID NO: 194781 - DNA, 80 bp, synthetic construct; identical to SEQ ID NO: 10051
  source 1..80: mol_type = other DNA

SEQ ID NO: 194782 - DNA, 80 bp, synthetic construct; identical to SEQ ID NO: 10052
  source 1..80: mol_type = other DNA

SEQ ID NO: 194783 - DNA, 80 bp, synthetic construct; identical to SEQ ID NO: 10053
  source 1..80: mol_type = other DNA

SEQ ID NO: 194784 - DNA, 80 bp, synthetic construct; identical to SEQ ID NO: 10054
  source 1..80: mol_type = other DNA

SEQ ID NO: 194785 - DNA, 80 bp, synthetic construct; identical to SEQ ID NO: 10055
  source 1..80: mol_type = other DNA

SEQ ID NO: 194786 - DNA, 80 bp, synthetic construct; identical to SEQ ID NO: 10056
  source 1..80: mol_type = other DNA

SEQ ID NO: 194787 - DNA, 80 bp, synthetic construct; identical to SEQ ID NO: 10057
  source 1..80: mol_type = other DNA

SEQ ID NO: 194788 - DNA, 80 bp, synthetic construct; identical to SEQ ID NO: 10058
  source 1..80: mol_type = other DNA

SEQ ID NO: 194789 - DNA, 80 bp, synthetic construct; identical to SEQ ID NO: 10059
  source 1..80: mol_type = other DNA

SEQ ID NO: 194790 - DNA, 80 bp, synthetic construct; identical to SEQ ID NO: 10060
  source 1..80: mol_type = other DNA

SEQ ID NO: 194791 - DNA, 80 bp, synthetic construct; identical to SEQ ID NO: 10061
  source 1..80: mol_type = other DNA

SEQ ID NO: 194792 - DNA, 80 bp, synthetic construct; identical to SEQ ID NO: 10062
  source 1..80: mol_type = other DNA

SEQ ID NO: 194793 - DNA, 80 bp, synthetic construct; identical to SEQ ID NO: 10063
  source 1..80: mol_type = other DNA

SEQ ID NO: 194794 - DNA, 80 bp, synthetic construct; identical to SEQ ID NO: 10064
  source 1..80: mol_type = other DNA

SEQ ID NO: 194795 - DNA, 80 bp, synthetic construct; identical to SEQ ID NO: 10065
  source 1..80: mol_type = other DNA

SEQ ID NO: 194796 - DNA, 80 bp, synthetic construct; identical to SEQ ID NO: 10066
  source 1..80: mol_type = other DNA

SEQ ID NO: 194797 - DNA, 80 bp, synthetic construct; identical to SEQ ID NO: 10067
  source 1..80: mol_type = other DNA

SEQ ID NO: 194798 - DNA, 80 bp, synthetic construct; identical to SEQ ID NO: 10068
  source 1..80: mol_type = other DNA

SEQ ID NO: 194799 - DNA, 80 bp, synthetic construct; identical to SEQ ID NO: 10069
  source 1..80: mol_type = other DNA

SEQ ID NO: 194800 - DNA, 80 bp, synthetic construct; identical to SEQ ID NO: 10070
  source 1..80: mol_type = other DNA

SEQ ID NO: 194801 - DNA, 80 bp, synthetic construct; identical to SEQ ID NO: 10071
  source 1..80: mol_type = other DNA

SEQ ID NO: 194802 - DNA, 80 bp, synthetic construct; identical to SEQ ID NO: 10072
  source 1..80: mol_type = other DNA

SEQ ID NO: 194803 - DNA, 80 bp, synthetic construct; identical to SEQ ID NO: 10073
  source 1..80: mol_type = other DNA

SEQ ID NO: 194804 - DNA, 80 bp, synthetic construct; identical to SEQ ID NO: 10074
  source 1..80: mol_type = other DNA

SEQ ID NO: 194805 - DNA, 80 bp, synthetic construct; identical to SEQ ID NO: 10075
  source 1..80: mol_type = other DNA

SEQ ID NO: 194806 - DNA, 80 bp, synthetic construct; identical to SEQ ID NO: 10076
  source 1..80: mol_type = other DNA

SEQ ID NO: 194807 - DNA, 80 bp, synthetic construct; identical to SEQ ID NO: 10077
  source 1..80: mol_type = other DNA

SEQ ID NO: 194808 - DNA, 80 bp, synthetic construct; identical to SEQ ID NO: 10078
  source 1..80: mol_type = other DNA

SEQ ID NO: 194809 - DNA, 80 bp, synthetic construct; identical to SEQ ID NO: 10079
  source 1..80: mol_type = other DNA

SEQ ID NO: 194810 - DNA, 80 bp, synthetic construct; identical to SEQ ID NO: 10080
  source 1..80: mol_type = other DNA

SEQ ID NO: 194811 - DNA, 80 bp, synthetic construct; identical to SEQ ID NO: 10081
  source 1..80: mol_type = other DNA

SEQ ID NO: 194812 - DNA, 80 bp, synthetic construct; identical to SEQ ID NO: 10082
  source 1..80: mol_type = other DNA

SEQ ID NO: 194813 - DNA, 80 bp, synthetic construct; identical to SEQ ID NO: 10083
  source 1..80: mol_type = other DNA

SEQ ID NO: 194814 - DNA, 80 bp, synthetic construct; identical to SEQ ID NO: 10084
  source 1..80: mol_type = other DNA

SEQ ID NO: 194815 - DNA, 80 bp, synthetic construct; identical to SEQ ID NO: 10085
  source 1..80: mol_type = other DNA

SEQ ID NO: 194816 - DNA, 80 bp, synthetic construct; identical to SEQ ID NO: 10086
  source 1..80: mol_type = other DNA

SEQ ID NO: 194817 - DNA, 80 bp, synthetic construct; identical to SEQ ID NO: 10087
  source 1..80: mol_type = other DNA

SEQ ID NO: 194818 - DNA, 80 bp, synthetic construct; identical to SEQ ID NO: 10088
  source 1..80: mol_type = other DNA

SEQ ID NO: 194819 - DNA, 80 bp, synthetic construct; identical to SEQ ID NO: 10089
  source 1..80: mol_type = other DNA

SEQ ID NO: 194820 - DNA, 80 bp, synthetic construct; identical to SEQ ID NO: 10090
  source 1..80: mol_type = other DNA

SEQ ID NO: 194821 - DNA, 80 bp, synthetic construct; identical to SEQ ID NO: 10091
  source 1..80: mol_type = other DNA

SEQ ID NO: 194822 - DNA, 80 bp, synthetic construct; identical to SEQ ID NO: 10092
  source 1..80: mol_type = other DNA

SEQ ID NO: 194823 - DNA, 80 bp, synthetic construct; identical to SEQ ID NO: 10093
  source 1..80: mol_type = other DNA

SEQ ID NO: 194824 - DNA, 80 bp, synthetic construct; identical to SEQ ID NO: 10094
  source 1..80: mol_type = other DNA

SEQ ID NO: 194825 - DNA, 80 bp, synthetic construct; identical to SEQ ID NO: 10095
  source 1..80: mol_type = other DNA

SEQ ID NO: 194826 - DNA, 80 bp, synthetic construct; identical to SEQ ID NO: 10096
  source 1..80: mol_type = other DNA

SEQ ID NO: 194827 - DNA, 80 bp, synthetic construct; identical to SEQ ID NO: 10097
  source 1..80: mol_type = other DNA

SEQ ID NO: 194828 - DNA, 80 bp, synthetic construct; identical to SEQ ID NO: 10098
  source 1..80: mol_type = other DNA

SEQ ID NO: 194829 - DNA, 80 bp, synthetic construct; identical to SEQ ID NO: 10099
  source 1..80: mol_type = other DNA

SEQ ID NO: 194830 - DNA, 80 bp, synthetic construct; identical to SEQ ID NO: 10100
  source 1..80: mol_type = other DNA

SEQ ID NO: 194831 - DNA, 80 bp, synthetic construct; identical to SEQ ID NO: 10101
  source 1..80: mol_type = other DNA

SEQ ID NO: 194832 - DNA, 80 bp, synthetic construct; identical to SEQ ID NO: 10102
  source 1..80: mol_type = other DNA

SEQ ID NO: 194833 - DNA, 80 bp, synthetic construct; identical to SEQ ID NO: 10103
  source 1..80: mol_type = other DNA

SEQ ID NO: 194834 - DNA, 80 bp, synthetic construct; identical to SEQ ID NO: 10104
  source 1..80: mol_type = other DNA

SEQ ID NO: 194835 - DNA, 80 bp, synthetic construct; identical to SEQ ID NO: 10105
  source 1..80: mol_type = other DNA

SEQ ID NO: 194836 - DNA, 80 bp, synthetic construct; identical to SEQ ID NO: 10106
  source 1..80: mol_type = other DNA

SEQ ID NO: 194837 - DNA, 80 bp, synthetic construct; identical to SEQ ID NO: 10107
  source 1..80: mol_type = other DNA

SEQ ID NO: 194838 - DNA, 80 bp, synthetic construct; identical to SEQ ID NO: 10108
  source 1..80: mol_type = other DNA

SEQ ID NO: 194839 - DNA, 80 bp, synthetic construct; identical to SEQ ID NO: 10109
  source 1..80: mol_type = other DNA

SEQ ID NO: 194840 - DNA, 80 bp, synthetic construct; identical to SEQ ID NO: 10110
  source 1..80: mol_type = other DNA

SEQ ID NO: 194841 - DNA, 80 bp, synthetic construct; identical to SEQ ID NO: 10111
  source 1..80: mol_type = other DNA

SEQ ID NO: 194842 - DNA, 80 bp, synthetic construct; identical to SEQ ID NO: 10112
  source 1..80: mol_type = other DNA

SEQ ID NO: 194843 - DNA, 80 bp, synthetic construct; identical to SEQ ID NO: 10113
  source 1..80: mol_type = other DNA

SEQ ID NO: 194844 - DNA, 80 bp, synthetic construct; identical to SEQ ID NO: 10114
  source 1..80: mol_type = other DNA

SEQ ID NO: 194845 - DNA, 80 bp, synthetic construct; identical to SEQ ID NO: 10115
  source 1..80: mol_type = other DNA

SEQ ID NO: 194846 - DNA, 80 bp, synthetic construct; identical to SEQ ID NO: 10116
  source 1..80: mol_type = other DNA

SEQ ID NO: 194847 - DNA, 80 bp, synthetic construct; identical to SEQ ID NO: 10117
  source 1..80: mol_type = other DNA

SEQ ID NO: 194848 - DNA, 80 bp, synthetic construct; identical to SEQ ID NO: 10118
  source 1..80: mol_type = other DNA

SEQ ID NO: 194849 - DNA, 80 bp, synthetic construct; identical to SEQ ID NO: 10119
  source 1..80: mol_type = other DNA

SEQ ID NO: 194850 - DNA, 80 bp, synthetic construct; identical to SEQ ID NO: 10120
  source 1..80: mol_type = other DNA

SEQ ID NO: 194851 - DNA, 80 bp, synthetic construct; identical to SEQ ID NO: 10121
  source 1..80: mol_type = other DNA

SEQ ID NO: 194852 - DNA, 80 bp, synthetic construct; identical to SEQ ID NO: 10122
  source 1..80: mol_type = other DNA

SEQ ID NO: 194853 - DNA, 80 bp, synthetic construct; identical to SEQ ID NO: 10123
  source 1..80: mol_type = other DNA

SEQ ID NO: 194854 - DNA, 80 bp, synthetic construct; identical to SEQ ID NO: 10124
  source 1..80: mol_type = other DNA

SEQ ID NO: 194855 - DNA, 80 bp, synthetic construct; identical to SEQ ID NO: 10125
  source 1..80: mol_type = other DNA

SEQ ID NO: 194856 - DNA, 80 bp, synthetic construct; identical to SEQ ID NO: 10126
  source 1..80: mol_type = other DNA

SEQ ID NO: 194857 - DNA, 80 bp, synthetic construct; identical to SEQ ID NO: 10127
  source 1..80: mol_type = other DNA

SEQ ID NO: 194858 - DNA, 80 bp, synthetic construct; identical to SEQ ID NO: 10128
  source 1..80: mol_type = other DNA

SEQ ID NO: 194859 - DNA, 80 bp, synthetic construct; identical to SEQ ID NO: 10129
  source 1..80: mol_type = other DNA

SEQ ID NO: 194860 - DNA, 80 bp, synthetic construct; identical to SEQ ID NO: 10130
  source 1..80: mol_type = other DNA

SEQ ID NO: 194861 - DNA, 80 bp, synthetic construct; identical to SEQ ID NO: 10131
  source 1..80: mol_type = other DNA

SEQ ID NO: 194862 - DNA, 80 bp, synthetic construct; identical to SEQ ID NO: 10132
  source 1..80: mol_type = other DNA

SEQ ID NO: 194863 - DNA, 80 bp, synthetic construct; identical to SEQ ID NO: 10133
  source 1..80: mol_type = other DNA

SEQ ID NO: 194864 - DNA, 80 bp, synthetic construct; identical to SEQ ID NO: 10134
  source 1..80: mol_type = other DNA

SEQ ID NO: 194865 - DNA, 80 bp, synthetic construct; identical to SEQ ID NO: 10135
  source 1..80: mol_type = other DNA

SEQ ID NO: 194866 - DNA, 80 bp, synthetic construct; identical to SEQ ID NO: 10136
  source 1..80: mol_type = other DNA

SEQ ID NO: 194867 - DNA, 80 bp, synthetic construct; identical to SEQ ID NO: 10137
  source 1..80: mol_type = other DNA

SEQ ID NO: 194868 - DNA, 80 bp, synthetic construct; identical to SEQ ID NO: 10138
  source 1..80: mol_type = other DNA

SEQ ID NO: 194869 - DNA, 80 bp, synthetic construct; identical to SEQ ID NO: 10139
  source 1..80: mol_type = other DNA

SEQ ID NO: 194870 - DNA, 80 bp, synthetic construct; identical to SEQ ID NO: 10140
  source 1..80: mol_type = other DNA

SEQ ID NO: 194871 - DNA, 80 bp, synthetic construct; identical to SEQ ID NO: 10141
  source 1..80: mol_type = other DNA

SEQ ID NO: 194872 - DNA, 80 bp, synthetic construct; identical to SEQ ID NO: 10142
  source 1..80: mol_type = other DNA

SEQ ID NO: 194873 - DNA, 80 bp, synthetic construct; identical to SEQ ID NO: 10143
  source 1..80: mol_type = other DNA

SEQ ID NO: 194874 - DNA, 80 bp, synthetic construct; identical to SEQ ID NO: 10144
  source 1..80: mol_type = other DNA

SEQ ID NO: 194875 - DNA, 80 bp, synthetic construct; identical to SEQ ID NO: 10145
  source 1..80: mol_type = other DNA

SEQ ID NO: 194876 - DNA, 80 bp, synthetic construct; identical to SEQ ID NO: 10146
  source 1..80: mol_type = other DNA

SEQ ID NO: 194877 - DNA, 80 bp, synthetic construct; identical to SEQ ID NO: 10147
  source 1..80: mol_type = other DNA

SEQ ID NO: 194878 - DNA, 80 bp, synthetic construct; identical to SEQ ID NO: 10148
  source 1..80: mol_type = other DNA

SEQ ID NO: 194879 - DNA, 80 bp, synthetic construct; identical to SEQ ID NO: 10149
  source 1..80: mol_type = other DNA

SEQ ID NO: 194880 - DNA, 80 bp, synthetic construct; identical to SEQ ID NO: 10150
  source 1..80: mol_type = other DNA

SEQ ID NO: 194881 - DNA, 80 bp, synthetic construct; identical to SEQ ID NO: 10151
  source 1..80: mol_type = other DNA

SEQ ID NO: 194882 - DNA, 80 bp, synthetic construct; identical to SEQ ID NO: 10152
  source 1..80: mol_type = other DNA

SEQ ID NO: 194883 - DNA, 80 bp, synthetic construct; identical to SEQ ID NO: 10153
  source 1..80: mol_type = other DNA

SEQ ID NO: 194884 - DNA, 80 bp, synthetic construct; identical to SEQ ID NO: 10154
  source 1..80: mol_type = other DNA

SEQ ID NO: 194885 - DNA, 80 bp, synthetic construct; identical to SEQ ID NO: 10155
  source 1..80: mol_type = other DNA

SEQ ID NO: 194886 - DNA, 80 bp, synthetic construct; identical to SEQ ID NO: 10156
  source 1..80: mol_type = other DNA

SEQ ID NO: 194887 - DNA, 80 bp, synthetic construct; identical to SEQ ID NO: 10157
  source 1..80: mol_type = other DNA

SEQ ID NO: 194888 - DNA, 80 bp, synthetic construct; identical to SEQ ID NO: 10158
  source 1..80: mol_type = other DNA

SEQ ID NO: 194889 - DNA, 80 bp, synthetic construct; identical to SEQ ID NO: 10159
  source 1..80: mol_type = other DNA

SEQ ID NO: 194890 - DNA, 80 bp, synthetic construct; identical to SEQ ID NO: 10160
  source 1..80: mol_type = other DNA

SEQ ID NO: 194891 - DNA, 80 bp, synthetic construct; identical to SEQ ID NO: 10161
  source 1..80: mol_type = other DNA

SEQ ID NO: 194892 - DNA, 80 bp, synthetic construct; identical to SEQ ID NO: 10162
  source 1..80: mol_type = other DNA

SEQ ID NO: 194893 - DNA, 80 bp, synthetic construct; identical to SEQ ID NO: 10163
  source 1..80: mol_type = other DNA

SEQ ID NO: 194894 - DNA, 80 bp, synthetic construct; identical to SEQ ID NO: 10164
  source 1..80: mol_type = other DNA

SEQ ID NO: 194895 - DNA, 80 bp, synthetic construct; identical to SEQ ID NO: 10165
  source 1..80: mol_type = other DNA

SEQ ID NO: 194896 - DNA, 80 bp, synthetic construct; identical to SEQ ID NO: 10166
  source 1..80: mol_type = other DNA

SEQ ID NO: 194897 - DNA, 80 bp, synthetic construct; identical to SEQ ID NO: 10167
  source 1..80: mol_type = other DNA

SEQ ID NO: 194898 - DNA, 80 bp, synthetic construct; identical to SEQ ID NO: 10168
  source 1..80: mol_type = other DNA

SEQ ID NO: 194899 - DNA, 80 bp, synthetic construct; identical to SEQ ID NO: 10169
  source 1..80: mol_type = other DNA

SEQ ID NO: 194900 - DNA, 80 bp, synthetic construct; identical to SEQ ID NO: 10170
  source 1..80: mol_type = other DNA

SEQ ID NO: 194901 - DNA, 80 bp, synthetic construct; identical to SEQ ID NO: 10171
  source 1..80: mol_type = other DNA

SEQ ID NO: 194902 - DNA, 80 bp, synthetic construct; identical to SEQ ID NO: 10172
  source 1..80: mol_type = other DNA

SEQ ID NO: 194903 - DNA, 80 bp, synthetic construct; identical to SEQ ID NO: 10173
  source 1..80: mol_type = other DNA

SEQ ID NO: 194904 - DNA, 80 bp, synthetic construct; identical to SEQ ID NO: 10174
  source 1..80: mol_type = other DNA

SEQ ID NO: 194905 - DNA, 80 bp, synthetic construct; identical to SEQ ID NO: 10175
  source 1..80: mol_type = other DNA

SEQ ID NO: 194906 - DNA, 80 bp, synthetic construct; identical to SEQ ID NO: 10176
  source 1..80: mol_type = other DNA

SEQ ID NO: 194907 - DNA, 80 bp, synthetic construct; identical to SEQ ID NO: 10177
  source 1..80: mol_type = other DNA

SEQ ID NO: 194908 - DNA, 80 bp, synthetic construct; identical to SEQ ID NO: 10178
  source 1..80: mol_type = other DNA

SEQ ID NO: 194909 - DNA, 80 bp, synthetic construct; identical to SEQ ID NO: 10179
  source 1..80: mol_type = other DNA

SEQ ID NO: 194910 - DNA, 80 bp, synthetic construct; identical to SEQ ID NO: 10180
  source 1..80: mol_type = other DNA

SEQ ID NO: 194911 - DNA, 80 bp, synthetic construct; identical to SEQ ID NO: 10181
  source 1..80: mol_type = other DNA

SEQ ID NO: 194912 - DNA, 80 bp, synthetic construct; identical to SEQ ID NO: 10182
  source 1..80: mol_type = other DNA

SEQ ID NO: 194913 - DNA, 80 bp, synthetic construct; identical to SEQ ID NO: 10183
  source 1..80: mol_type = other DNA

SEQ ID NO: 194914 - DNA, 80 bp, synthetic construct; identical to SEQ ID NO: 10184
  source 1..80: mol_type = other DNA

SEQ ID NO: 194915 - DNA, 80 bp, synthetic construct; identical to SEQ ID NO: 10185
  source 1..80: mol_type = other DNA

SEQ ID NO: 194916 - DNA, 80 bp, synthetic construct; identical to SEQ ID NO: 10186
  source 1..80: mol_type = other DNA

SEQ ID NO: 194917 - DNA, 80 bp, synthetic construct; identical to SEQ ID NO: 10187
  source 1..80: mol_type = other DNA

SEQ ID NO: 194918 - DNA, 80 bp, synthetic construct; identical to SEQ ID NO: 10188
  source 1..80: mol_type = other DNA

SEQ ID NO: 194919 - DNA, 80 bp, synthetic construct; identical to SEQ ID NO: 10189
  source 1..80: mol_type = other DNA

SEQ ID NO: 194920 - DNA, 80 bp, synthetic construct; identical to SEQ ID NO: 10190
  source 1..80: mol_type = other DNA

SEQ ID NO: 194921 - DNA, 80 bp, synthetic construct; identical to SEQ ID NO: 10191
  source 1..80: mol_type = other DNA

SEQ ID NO: 194922 - DNA, 80 bp, synthetic construct; identical to SEQ ID NO: 10192
  source 1..80: mol_type = other DNA

SEQ ID NO: 194923 - DNA, 80 bp, synthetic construct; identical to SEQ ID NO: 10193
  source 1..80: mol_type = other DNA

SEQ ID NO: 194924 - DNA, 80 bp, synthetic construct; identical to SEQ ID NO: 10194
  source 1..80: mol_type = other DNA

SEQ ID NO: 194925 - DNA, 80 bp, synthetic construct; identical to SEQ ID NO: 10195
  source 1..80: mol_type = other DNA

SEQ ID NO: 194926 - DNA, 80 bp, synthetic construct; identical to SEQ ID NO: 10196
  source 1..80: mol_type = other DNA

SEQ ID NO: 194927 - DNA, 80 bp, synthetic construct; identical to SEQ ID NO: 10197
  source 1..80: mol_type = other DNA

SEQ ID NO: 194928 - DNA, 80 bp, synthetic construct; identical to SEQ ID NO: 10198
  source 1..80: mol_type = other DNA

SEQ ID NO: 194929 - DNA, 80 bp, synthetic construct; identical to SEQ ID NO: 10199
  source 1..80: mol_type = other DNA

SEQ ID NO: 194930 - DNA, 80 bp, synthetic construct; identical to SEQ ID NO: 10200
  source 1..80: mol_type = other DNA

SEQ ID NO: 194931 - DNA, 80 bp, synthetic construct; identical to SEQ ID NO: 10201
  source 1..80: mol_type = other DNA

SEQ ID NO: 194932 - DNA, 80 bp, synthetic construct; identical to SEQ ID NO: 10202
  source 1..80: mol_type = other DNA

SEQ ID NO: 194933 - DNA, 80 bp, synthetic construct; identical to SEQ ID NO: 10203
  source 1..80: mol_type = other DNA

SEQ ID NO: 194934 - DNA, 80 bp, synthetic construct; identical to SEQ ID NO: 10204
  source 1..80: mol_type = other DNA

SEQ ID NO: 194935 - DNA, 80 bp, synthetic construct; identical to SEQ ID NO: 10205
  source 1..80: mol_type = other DNA

SEQ ID NO: 194936 - DNA, 80 bp, synthetic construct; identical to SEQ ID NO: 10206
  source 1..80: mol_type = other DNA

SEQ ID NO: 194937 - DNA, 80 bp, synthetic construct; identical to SEQ ID NO: 10207
  source 1..80: mol_type = other DNA

SEQ ID NO: 194938 - DNA, 80 bp, synthetic construct; identical to SEQ ID NO: 10208
  source 1..80: mol_type = other DNA

SEQ ID NO: 194939 - DNA, 80 bp, synthetic construct; identical to SEQ ID NO: 10209
  source 1..80: mol_type = other DNA

SEQ ID NO: 194940 - DNA, 80 bp, synthetic construct; identical to SEQ ID NO: 10210
  source 1..80: mol_type = other DNA

SEQ ID NO: 194941 - DNA, 80 bp, synthetic construct; identical to SEQ ID NO: 10211
  source 1..80: mol_type = other DNA

SEQ ID NO: 194942 - DNA, 80 bp, synthetic construct; identical to SEQ ID NO: 10212
  source 1..80: mol_type = other DNA

SEQ ID NO: 194943 - DNA, 80 bp, synthetic construct; identical to SEQ ID NO: 10213
  source 1..80: mol_type = other DNA

SEQ ID NO: 194944 - DNA, 80 bp, synthetic construct; identical to SEQ ID NO: 10214
  source 1..80: mol_type = other DNA

SEQ ID NO: 194945 - DNA, 80 bp, synthetic construct; identical to SEQ ID NO: 10215
  source 1..80: mol_type = other DNA

SEQ ID NO: 194946 - DNA, 80 bp, synthetic construct; identical to SEQ ID NO: 10216
  source 1..80: mol_type = other DNA

SEQ ID NO: 194947 - DNA, 80 bp, synthetic construct; identical to SEQ ID NO: 10217
  source 1..80: mol_type = other DNA

SEQ ID NO: 194948 - DNA, 80 bp, synthetic construct; identical to SEQ ID NO: 10218
  source 1..80: mol_type = other DNA

SEQ ID NO: 194949 - DNA, 80 bp, synthetic construct; identical to SEQ ID NO: 10219
  source 1..80: mol_type = other DNA

SEQ ID NO: 194950 - DNA, 80 bp, synthetic construct; identical to SEQ ID NO: 10220
  source 1..80: mol_type = other DNA

SEQ ID NO: 194951 - DNA, 80 bp, synthetic construct; identical to SEQ ID NO: 10221
  source 1..80: mol_type = other DNA

SEQ ID NO: 194952 - DNA, 80 bp, synthetic construct; identical to SEQ ID NO: 10222
  source 1..80: mol_type = other DNA

SEQ ID NO: 194953 - DNA, 80 bp, synthetic construct; identical to SEQ ID NO: 10223
  source 1..80: mol_type = other DNA

SEQ ID NO: 194954 - DNA, 80 bp, synthetic construct; identical to SEQ ID NO: 10224
  source 1..80: mol_type = other DNA

SEQ ID NO: 194955 - DNA, 80 bp, synthetic construct; identical to SEQ ID NO: 10225
  source 1..80: mol_type = other DNA

SEQ ID NO: 194956 - DNA, 80 bp, synthetic construct; identical to SEQ ID NO: 10226
  source 1..80: mol_type = other DNA

SEQ ID NO: 194957 - DNA, 80 bp, synthetic construct; identical to SEQ ID NO: 10227
  source 1..80: mol_type = other DNA

SEQ ID NO: 194958 - DNA, 80 bp, synthetic construct; identical to SEQ ID NO: 10228
  source 1..80: mol_type = other DNA

SEQ ID NO: 194959 - DNA, 80 bp, synthetic construct; identical to SEQ ID NO: 10229
  source 1..80: mol_type = other DNA

SEQ ID NO: 194960 - DNA, 80 bp, synthetic construct; identical to SEQ ID NO: 10230
  source 1..80: mol_type = other DNA

SEQ ID NO: 194961 - DNA, 80 bp, synthetic construct; identical to SEQ ID NO: 10231
  source 1..80: mol_type = other DNA

SEQ ID NO: 194962 - DNA, 80 bp, synthetic construct; identical to SEQ ID NO: 10232
  source 1..80: mol_type = other DNA

SEQ ID NO: 194963 - DNA, 80 bp, synthetic construct; identical to SEQ ID NO: 10233
  source 1..80: mol_type = other DNA

SEQ ID NO: 194964 - DNA, 80 bp, synthetic construct; identical to SEQ ID NO: 10234
  source 1..80: mol_type = other DNA

SEQ ID NO: 194965 - DNA, 80 bp, synthetic construct; identical to SEQ ID NO: 10235
  source 1..80: mol_type = other DNA

SEQ ID NO: 194966 - DNA, 80 bp, synthetic construct; identical to SEQ ID NO: 10236
  source 1..80: mol_type = other DNA

SEQ ID NO: 194967 - DNA, 80 bp, synthetic construct; identical to SEQ ID NO: 10237
  source 1..80: mol_type = other DNA

SEQ ID NO: 194968 - DNA, 80 bp, synthetic construct; identical to SEQ ID NO: 10238
  source 1..80: mol_type = other DNA

SEQ ID NO: 194969 - DNA, 80 bp, synthetic construct; identical to SEQ ID NO: 10239
  source 1..80: mol_type = other DNA

SEQ ID NO: 194970 - DNA, 80 bp, synthetic construct; identical to SEQ ID NO: 10240
  source 1..80: mol_type = other DNA

SEQ ID NO: 194971 - DNA, 80 bp, synthetic construct; identical to SEQ ID NO: 10241
  source 1..80: mol_type = other DNA

SEQ ID NO: 194972 - DNA, 80 bp, synthetic construct; identical to SEQ ID NO: 10242
  source 1..80: mol_type = other DNA

SEQ ID NO: 194973 - DNA, 80 bp, synthetic construct; identical to SEQ ID NO: 10243
  source 1..80: mol_type = other DNA

SEQ ID NO: 194974 - DNA, 80 bp, synthetic construct; identical to SEQ ID NO: 10244
  source 1..80: mol_type = other DNA

SEQ ID NO: 194975 - DNA, 80 bp, synthetic construct; identical to SEQ ID NO: 10245
  source 1..80: mol_type = other DNA

SEQ ID NO: 194976 - DNA, 80 bp, synthetic construct; identical to SEQ ID NO: 10246
  source 1..80: mol_type = other DNA

SEQ ID NO: 194977 - DNA, 80 bp, synthetic construct; identical to SEQ ID NO: 10247
  source 1..80: mol_type = other DNA

SEQ ID NO: 194978 - DNA, 80 bp, synthetic construct; identical to SEQ ID NO: 10248
  source 1..80: mol_type = other DNA

SEQ ID NO: 194979 - DNA, 80 bp, synthetic construct; identical to SEQ ID NO: 10249
  source 1..80: mol_type = other DNA

SEQ ID NO: 194980 - DNA, 80 bp, synthetic construct; identical to SEQ ID NO: 10250
  source 1..80: mol_type = other DNA

SEQ ID NO: 194981 - DNA, 80 bp, synthetic construct; identical to SEQ ID NO: 10251
  source 1..80: mol_type = other DNA

SEQ ID NO: 194982 - DNA, 80 bp, synthetic construct; identical to SEQ ID NO: 10252
  source 1..80: mol_type = other DNA

SEQ ID NO: 194983 - DNA, 80 bp, synthetic construct; identical to SEQ ID NO: 10253
  source 1..80: mol_type = other DNA

SEQ ID NO: 194984 - DNA, 80 bp, synthetic construct; identical to SEQ ID NO: 10254
  source 1..80: mol_type = other DNA

SEQ ID NO: 194985 - DNA, 80 bp, synthetic construct; identical to SEQ ID NO: 10255
  source 1..80: mol_type = other DNA

SEQ ID NO: 194986 - DNA, 80 bp, synthetic construct; identical to SEQ ID NO: 10256
  source 1..80: mol_type = other DNA

SEQ ID NO: 194987 - DNA, 80 bp, synthetic construct; identical to SEQ ID NO: 10257
  source 1..80: mol_type = other DNA

SEQ ID NO: 194988 - DNA, 80 bp, synthetic construct; identical to SEQ ID NO: 10258
  source 1..80: mol_type = other DNA

SEQ ID NO: 194989 - DNA, 80 bp, synthetic construct; identical to SEQ ID NO: 10259
  source 1..80: mol_type = other DNA

SEQ ID NO: 194990 - DNA, 80 bp, synthetic construct; identical to SEQ ID NO: 10260
  source 1..80: mol_type = other DNA

SEQ ID NO: 194991 - DNA, 80 bp, synthetic construct; identical to SEQ ID NO: 10261
  source 1..80: mol_type = other DNA

SEQ ID NO: 194992 - DNA, 80 bp, synthetic construct; identical to SEQ ID NO: 10262
  source 1..80: mol_type = other DNA

SEQ ID NO: 194993 - DNA, 80 bp, synthetic construct; identical to SEQ ID NO: 10263
  source 1..80: mol_type = other DNA

SEQ ID NO: 194994 - DNA, 80 bp, synthetic construct; identical to SEQ ID NO: 10264
  source 1..80: mol_type = other DNA

SEQ ID NO: 194995 - DNA, 80 bp, synthetic construct; identical to SEQ ID NO: 10265
  source 1..80: mol_type = other DNA

SEQ ID NO: 194996 - DNA, 80 bp, synthetic construct; identical to SEQ ID NO: 10266
  source 1..80: mol_type = other DNA

SEQ ID NO: 194997 - DNA, 80 bp, synthetic construct; identical to SEQ ID NO: 10267
  source 1..80: mol_type = other DNA

SEQ ID NO: 194998 - DNA, 80 bp, synthetic construct; identical to SEQ ID NO: 10268
  source 1..80: mol_type = other DNA

SEQ ID NO: 194999 - DNA, 80 bp, synthetic construct; identical to SEQ ID NO: 10269
  source 1..80: mol_type = other DNA

SEQ ID NO: 195000 - DNA, 80 bp, synthetic construct; identical to SEQ ID NO: 10270
  source 1..80: mol_type = other DNA

SEQ ID NO: 195001 - DNA, 80 bp, synthetic construct; identical to SEQ ID NO: 10271
  source 1..80: mol_type = other DNA

SEQ ID NO: 195002 - DNA, 80 bp, synthetic construct; identical to SEQ ID NO: 10272
  source 1..80: mol_type = other DNA

SEQ ID NO: 195003 - DNA, 80 bp, synthetic construct; identical to SEQ ID NO: 10273
  source 1..80: mol_type = other DNA

SEQ ID NO: 195004 - DNA, 80 bp, synthetic construct; identical to SEQ ID NO: 10274
  source 1..80: mol_type = other DNA

SEQ ID NO: 195005 - DNA, 80 bp, synthetic construct; identical to SEQ ID NO: 10275
  source 1..80: mol_type = other DNA

SEQ ID NO: 195006 - DNA, 80 bp, synthetic construct; identical to SEQ ID NO: 10276
  source 1..80: mol_type = other DNA

SEQ ID NO: 195007 - DNA, 80 bp, synthetic construct; identical to SEQ ID NO: 10277
  source 1..80: mol_type = other DNA

SEQ ID NO: 195008 - DNA, 80 bp, synthetic construct; identical to SEQ ID NO: 10278
  source 1..80: mol_type = other DNA

SEQ ID NO: 195009 - DNA, 80 bp, synthetic construct; identical to SEQ ID NO: 10279
  source 1..80: mol_type = other DNA

SEQ ID NO: 195010 - DNA, 80 bp, synthetic construct; identical to SEQ ID NO: 10280
  source 1..80: mol_type = other DNA

SEQ ID NO: 195011 - DNA, 80 bp, synthetic construct; identical to SEQ ID NO: 10281
  source 1..80: mol_type = other DNA

SEQ ID NO: 195012 - DNA, 80 bp, synthetic construct; identical to SEQ ID NO: 10282
  source 1..80: mol_type = other DNA

SEQ ID NO: 195013 - DNA, 80 bp, synthetic construct; identical to SEQ ID NO: 10283
  source 1..80: mol_type = other DNA

SEQ ID NO: 195014 - DNA, 80 bp, synthetic construct; identical to SEQ ID NO: 10284
  source 1..80: mol_type = other DNA

SEQ ID NO: 195015 - DNA, 80 bp, synthetic construct; identical to SEQ ID NO: 10285
  source 1..80: mol_type = other DNA

SEQ ID NO: 195016 - DNA, 80 bp, synthetic construct; identical to SEQ ID NO: 10286
  source 1..80: mol_type = other DNA

SEQ ID NO: 195017 - DNA, 80 bp, synthetic construct; identical to SEQ ID NO: 10287
  source 1..80: mol_type = other DNA

SEQ ID NO: 195018 - DNA, 80 bp, synthetic construct; identical to SEQ ID NO: 10288
  source 1..80: mol_type = other DNA

SEQ ID NO: 195019 - DNA, 80 bp, synthetic construct; identical to SEQ ID NO: 10289
  source 1..80: mol_type = other DNA

SEQ ID NO: 195020 - DNA, 80 bp, synthetic construct; identical to SEQ ID NO: 10290
  source 1..80: mol_type = other DNA

SEQ ID NO: 195021 - DNA, 80 bp, synthetic construct; identical to SEQ ID NO: 10291
  source 1..80: mol_type = other DNA

SEQ ID NO: 195022 - DNA, 80 bp, synthetic construct; identical to SEQ ID NO: 10292
  source 1..80: mol_type = other DNA

SEQ ID NO: 195023 - DNA, 80 bp, synthetic construct; identical to SEQ ID NO: 10293
  source 1..80: mol_type = other DNA

SEQ ID NO: 195024 - DNA, 80 bp, synthetic construct; identical to SEQ ID NO: 10294
  source 1..80: mol_type = other DNA

SEQ ID NO: 195025 - DNA, 80 bp, synthetic construct; identical to SEQ ID NO: 10295
  source 1..80: mol_type = other DNA

SEQ ID NO: 195026 - DNA, 80 bp, synthetic construct; identical to SEQ ID NO: 10296
  source 1..80: mol_type = other DNA

SEQ ID NO: 195027 - DNA, 80 bp, synthetic construct; identical to SEQ ID NO: 10297
  source 1..80: mol_type = other DNA

SEQ ID NO: 195028 - DNA, 80 bp, synthetic construct; identical to SEQ ID NO: 10298
  source 1..80: mol_type = other DNA

SEQ ID NO: 195029 - DNA, 80 bp, synthetic construct; identical to SEQ ID NO: 10299
  source 1..80: mol_type = other DNA

SEQ ID NO: 195030 - DNA, 80 bp, synthetic construct; identical to SEQ ID NO: 10300
  source 1..80: mol_type = other DNA

SEQ ID NO: 195031 - DNA, 80 bp, synthetic construct; identical to SEQ ID NO: 10301
  source 1..80: mol_type = other DNA

SEQ ID NO: 195032 - DNA, 80 bp, synthetic construct; identical to SEQ ID NO: 10302
  source 1..80: mol_type = other DNA

SEQ ID NO: 195033 - DNA, 80 bp, synthetic construct; identical to SEQ ID NO: 10303
  source 1..80: mol_type = other DNA

SEQ ID NO: 195034 - DNA, 80 bp, synthetic construct; identical to SEQ ID NO: 10304
  source 1..80: mol_type = other DNA

SEQ ID NO: 195035 - DNA, 80 bp, synthetic construct; identical to SEQ ID NO: 10305
  source 1..80: mol_type = other DNA

SEQ ID NO: 195036 - DNA, 80 bp, synthetic construct; identical to SEQ ID NO: 10306
  source 1..80: mol_type = other DNA

SEQ ID NO: 195037 - DNA, 80 bp, synthetic construct; identical to SEQ ID NO: 10307
  source 1..80: mol_type = other DNA

SEQ ID NO: 195038 - DNA, 80 bp, synthetic construct; identical to SEQ ID NO: 10308
  source 1..80: mol_type = other DNA

SEQ ID NO: 195039 - DNA, 80 bp, synthetic construct; identical to SEQ ID NO: 10309
  source 1..80: mol_type = other DNA

SEQ ID NO: 195040 - DNA, 80 bp, synthetic construct; identical to SEQ ID NO: 10310
  source 1..80: mol_type = other DNA

SEQ ID NO: 195041 - DNA, 80 bp, synthetic construct; identical to SEQ ID NO: 10311
  source 1..80: mol_type = other DNA

SEQ ID NO: 195042 - DNA, 80 bp, synthetic construct; identical to SEQ ID NO: 10312
  source 1..80: mol_type = other DNA

SEQ ID NO: 195043 - DNA, 80 bp, synthetic construct; identical to SEQ ID NO: 10313
  source 1..80: mol_type = other DNA

SEQ ID NO: 195044 - DNA, 80 bp, synthetic construct; identical to SEQ ID NO: 10314
  source 1..80: mol_type = other DNA

SEQ ID NO: 195045 - DNA, 80 bp, synthetic construct; identical to SEQ ID NO: 10315
  source 1..80: mol_type = other DNA

SEQ ID NO: 195046 - DNA, 80 bp, synthetic construct; identical to SEQ ID NO: 10316
  source 1..80: mol_type = other DNA

SEQ ID NO: 195047 - DNA, 80 bp, synthetic construct; identical to SEQ ID NO: 10317
  source 1..80: mol_type = other DNA

SEQ ID NO: 195048 - DNA, 80 bp, synthetic construct; identical to SEQ ID NO: 10318
  source 1..80: mol_type = other DNA

SEQ ID NO: 195049 - DNA, 80 bp, synthetic construct; identical to SEQ ID NO: 10319
  source 1..80: mol_type = other DNA

SEQ ID NO: 195050 - DNA, 80 bp, synthetic construct; identical to SEQ ID NO: 10320
  source 1..80: mol_type = other DNA

SEQ ID NO: 195051 - DNA, 80 bp, synthetic construct; identical to SEQ ID NO: 10321
  source 1..80: mol_type = other DNA

SEQ ID NO: 195052 - DNA, 80 bp, synthetic construct; identical to SEQ ID NO: 10322
  source 1..80: mol_type = other DNA

SEQ ID NO: 195053 - DNA, 80 bp, synthetic construct; identical to SEQ ID NO: 10323
  source 1..80: mol_type = other DNA

SEQ ID NO: 195054 - DNA, 80 bp, synthetic construct; identical to SEQ ID NO: 10324
  source 1..80: mol_type = other DNA

SEQ ID NO: 195055 - DNA, 80 bp, synthetic construct; identical to SEQ ID NO: 10325
  source 1..80: mol_type = other DNA

SEQ ID NO: 195056 - DNA, 80 bp, synthetic construct; identical to SEQ ID NO: 10326
  source 1..80: mol_type = other DNA

SEQ ID NO: 195057 - DNA, 80 bp, synthetic construct; identical to SEQ ID NO: 10327
  source 1..80: mol_type = other DNA

SEQ ID NO: 195058 - DNA, 80 bp, synthetic construct; identical to SEQ ID NO: 10328
  source 1..80: mol_type = other DNA

SEQ ID NO: 195059 - DNA, 80 bp, synthetic construct; identical to SEQ ID NO: 10329
  source 1..80: mol_type = other DNA

SEQ ID NO: 195060 - DNA, 80 bp, synthetic construct; identical to SEQ ID NO: 10330
  source 1..80: mol_type = other DNA

SEQ ID NO: 195061 - DNA, 80 bp, synthetic construct; identical to SEQ ID NO: 10331
  source 1..80: mol_type = other DNA

SEQ ID NO: 195062 - DNA, 80 bp, synthetic construct; identical to SEQ ID NO: 10332
  source 1..80: mol_type = other DNA

SEQ ID NO: 195063 - DNA, 80 bp, synthetic construct; identical to SEQ ID NO: 10333
  source 1..80: mol_type = other DNA

SEQ ID NO: 195064 - DNA, 80 bp, synthetic construct; identical to SEQ ID NO: 10334
  source 1..80: mol_type = other DNA

SEQ ID NO: 195065 - DNA, 80 bp, synthetic construct; identical to SEQ ID NO: 10335
  source 1..80: mol_type = other DNA

SEQ ID NO: 195066 - DNA, 80 bp, synthetic construct; identical to SEQ ID NO: 10336
  source 1..80: mol_type = other DNA

SEQ ID NO: 195067 - DNA, 80 bp, synthetic construct; identical to SEQ ID NO: 10337
  source 1..80: mol_type = other DNA

SEQ ID NO: 195068 - DNA, 80 bp, synthetic construct; identical to SEQ ID NO: 10338
  source 1..80: mol_type = other DNA

SEQ ID NO: 195069 - DNA, 80 bp, synthetic construct; identical to SEQ ID NO: 10339
  source 1..80: mol_type = other DNA

SEQ ID NO: 195070 - DNA, 80 bp, synthetic construct; identical to SEQ ID NO: 10340
  source 1..80: mol_type = other DNA

SEQ ID NO: 195071 - DNA, 80 bp, synthetic construct; identical to SEQ ID NO: 10341
  source 1..80: mol_type = other DNA

SEQ ID NO: 195072 - DNA, 80 bp, synthetic construct; identical to SEQ ID NO: 10342
  source 1..80: mol_type = other DNA

SEQ ID NO: 195073 - DNA, 80 bp, synthetic construct; identical to SEQ ID NO: 10343
  source 1..80: mol_type = other DNA

SEQ ID NO: 195074 - DNA, 80 bp, synthetic construct; identical to SEQ ID NO: 10344
  source 1..80: mol_type = other DNA

SEQ ID NO: 195075 - DNA, 80 bp, synthetic construct; identical to SEQ ID NO: 10345
  source 1..80: mol_type = other DNA

SEQ ID NO: 195076 - DNA, 80 bp, synthetic construct; identical to SEQ ID NO: 10346
  source 1..80: mol_type = other DNA

SEQ ID NO: 195077 - DNA, 80 bp, synthetic construct; identical to SEQ ID NO: 10347
  source 1..80: mol_type = other DNA

SEQ ID NO: 195078 - DNA, 80 bp, synthetic construct; identical to SEQ ID NO: 10348
  source 1..80: mol_type = other DNA

SEQ ID NO: 195079 - DNA, 80 bp, synthetic construct; identical to SEQ ID NO: 10349
  source 1..80: mol_type = other DNA

SEQ ID NO: 195080 - DNA, 80 bp, synthetic construct; identical to SEQ ID NO: 10350
  source 1..80: mol_type = other DNA

SEQ ID NO: 195081 - DNA, 80 bp, synthetic construct; identical to SEQ ID NO: 10351
  source 1..80: mol_type = other DNA

SEQ ID NO: 195082 - DNA, 80 bp, synthetic construct; identical to SEQ ID NO: 10352
  source 1..80: mol_type = other DNA

SEQ ID NO: 195083 - DNA, 80 bp, synthetic construct; identical to SEQ ID NO: 10353
  source 1..80: mol_type = other DNA

SEQ ID NO: 195084 - DNA, 80 bp, synthetic construct; identical to SEQ ID NO: 10354
  source 1..80: mol_type = other DNA

SEQ ID NO: 195085 - DNA, 80 bp, synthetic construct; identical to SEQ ID NO: 10355
  source 1..80: mol_type = other DNA

SEQ ID NO: 195086 - DNA, 80 bp, synthetic construct; identical to SEQ ID NO: 10356
  source 1..80: mol_type = other DNA

SEQ ID NO: 195087 - DNA, 80 bp, synthetic construct; identical to SEQ ID NO: 10357
  source 1..80: mol_type = other DNA

SEQ ID NO: 195088 - DNA, 80 bp, synthetic construct; identical to SEQ ID NO: 10358
  source 1..80: mol_type = other DNA

SEQ ID NO: 195089 - DNA, 80 bp, synthetic construct; identical to SEQ ID NO: 10359
  source 1..80: mol_type = other DNA

SEQ ID NO: 195090 - DNA, 80 bp, synthetic construct; identical to SEQ ID NO: 10360
  source 1..80: mol_type = other DNA

SEQ ID NO: 195091 - DNA, 80 bp, synthetic construct; identical to SEQ ID NO: 10361
  source 1..80: mol_type = other DNA

SEQ ID NO: 195092 - DNA, 80 bp, synthetic construct; identical to SEQ ID NO: 10362
  source 1..80: mol_type = other DNA

SEQ ID NO: 195093 - DNA, 80 bp, synthetic construct; identical to SEQ ID NO: 10363
  source 1..80: mol_type = other DNA

SEQ ID NO: 195094 - DNA, 80 bp, synthetic construct; identical to SEQ ID NO: 10364
  source 1..80: mol_type = other DNA

SEQ ID NO: 195095 - DNA, 80 bp, synthetic construct; identical to SEQ ID NO: 10365
  source 1..80: mol_type = other DNA

SEQ ID NO: 195096 - DNA, 80 bp, synthetic construct; identical to SEQ ID NO: 10366
  source 1..80: mol_type = other DNA

SEQ ID NO: 195097 - DNA, 80 bp, synthetic construct; identical to SEQ ID NO: 10367
  source 1..80: mol_type = other DNA

SEQ ID NO: 195098 - DNA, 80 bp, synthetic construct; identical to SEQ ID NO: 10368
  source 1..80: mol_type = other DNA

SEQ ID NO: 195099 - DNA, 80 bp, synthetic construct; identical to SEQ ID NO: 10369
  source 1..80: mol_type = other DNA

SEQ ID NO: 195100 - DNA, 80 bp, synthetic construct; identical to SEQ ID NO: 10370
  source 1..80: mol_type = other DNA

SEQ ID NO: 195101 - DNA, 80 bp, synthetic construct; identical to SEQ ID NO: 10371
  source 1..80: mol_type = other DNA

SEQ ID NO: 195102 - DNA, 80 bp, synthetic construct; identical to SEQ ID NO: 10372
  source 1..80: mol_type = other DNA

SEQ ID NO: 195103 - DNA, 80 bp, synthetic construct; identical to SEQ ID NO: 10373
  source 1..80: mol_type = other DNA

SEQ ID NO: 195104 - DNA, 80 bp, synthetic construct; identical to SEQ ID NO: 10374
  source 1..80: mol_type = other DNA

SEQ ID NO: 195105 - DNA, 80 bp, synthetic construct; identical to SEQ ID NO: 10375
  source 1..80: mol_type = other DNA

SEQ ID NO: 195106 - DNA, 80 bp, synthetic construct; identical to SEQ ID NO: 10376
  source 1..80: mol_type = other DNA

SEQ ID NO: 195107 - DNA, 80 bp, synthetic construct; identical to SEQ ID NO: 10377
  source 1..80: mol_type = other DNA

SEQ ID NO: 195108 - DNA, 80 bp, synthetic construct; identical to SEQ ID NO: 10378
  source 1..80: mol_type = other DNA

SEQ ID NO: 195109 - DNA, 80 bp, synthetic construct; identical to SEQ ID NO: 10379
  source 1..80: mol_type = other DNA

SEQ ID NO: 195110 - DNA, 80 bp, synthetic construct; identical to SEQ ID NO: 10380
  source 1..80: mol_type = other DNA

SEQ ID NO: 195111 - DNA, 80 bp, synthetic construct; identical to SEQ ID NO: 10381
  source 1..80: mol_type = other DNA

SEQ ID NO: 195112 - DNA, 80 bp, synthetic construct; identical to SEQ ID NO: 10382
  source 1..80: mol_type = other DNA

SEQ ID NO: 195113 - DNA, 80 bp, synthetic construct; identical to SEQ ID NO: 10383
  source 1..80: mol_type = other DNA

SEQ ID NO: 195114 - DNA, 80 bp, synthetic construct; identical to SEQ ID NO: 10384
  source 1..80: mol_type = other DNA

SEQ ID NO: 195115 - DNA, 80 bp, synthetic construct; identical to SEQ ID NO: 10385
  source 1..80: mol_type = other DNA

SEQ ID NO: 195116 - DNA, 80 bp, synthetic construct; identical to SEQ ID NO: 10386
  source 1..80: mol_type = other DNA

SEQ ID NO: 195117 - DNA, 80 bp, synthetic construct; identical to SEQ ID NO: 10387
  source 1..80: mol_type = other DNA

SEQ ID NO: 195118 - DNA, 80 bp, synthetic construct; identical to SEQ ID NO: 10388
  source 1..80: mol_type = other DNA

SEQ ID NO: 195119 - DNA, 80 bp, synthetic construct; identical to SEQ ID NO: 10389
  source 1..80: mol_type = other DNA

SEQ ID NO: 195120 - DNA, 80 bp, synthetic construct; identical to SEQ ID NO: 10390
  source 1..80: mol_type = other DNA

SEQ ID NO: 195121 - DNA, 80 bp, synthetic construct; identical to SEQ ID NO: 10391
  source 1..80: mol_type = other DNA

SEQ ID NO: 195122 - DNA, 80 bp, synthetic construct; identical to SEQ ID NO: 10392
  source 1..80: mol_type = other DNA

SEQ ID NO: 195123 - DNA, 80 bp, synthetic construct; identical to SEQ ID NO: 10393
  source 1..80: mol_type = other DNA

SEQ ID NO: 195124 - DNA, 80 bp, synthetic construct; identical to SEQ ID NO: 10394
  source 1..80: mol_type = other DNA

SEQ ID NO: 195125 - DNA, 80 bp, synthetic construct; identical to SEQ ID NO: 10395
  source 1..80: mol_type = other DNA

SEQ ID NO: 195126 - DNA, 80 bp, synthetic construct; identical to SEQ ID NO: 10396
  source 1..80: mol_type = other DNA

SEQ ID NO: 195127 - DNA, 80 bp, synthetic construct; identical to SEQ ID NO: 10397
  source 1..80: mol_type = other DNA

SEQ ID NO: 195128 - DNA, 80 bp, synthetic construct; identical to SEQ ID NO: 10398
  source 1..80: mol_type = other DNA

SEQ ID NO: 195129 - DNA, 80 bp, synthetic construct; identical to SEQ ID NO: 10399
  source 1..80: mol_type = other DNA

SEQ ID NO: 195130 - DNA, 80 bp, synthetic construct; identical to SEQ ID NO: 10400
  source 1..80: mol_type = other DNA

SEQ ID NO: 195131 - DNA, 80 bp, synthetic construct; identical to SEQ ID NO: 10401
  source 1..80: mol_type = other DNA

SEQ ID NO: 195132 - DNA, 80 bp, synthetic construct; identical to SEQ ID NO: 10402
  source 1..80: mol_type = other DNA

SEQ ID NO: 195133 - DNA, 80 bp, synthetic construct; identical to SEQ ID NO: 10403
  source 1..80: mol_type = other DNA

SEQ ID NO: 195134 - DNA, 80 bp, synthetic construct; identical to SEQ ID NO: 10404
  source 1..80: mol_type = other DNA

SEQ ID NO: 195135 - DNA, 80 bp, synthetic construct; identical to SEQ ID NO: 10405
  source 1..80: mol_type = other DNA

SEQ ID NO: 195136 - DNA, 80 bp, synthetic construct; identical to SEQ ID NO: 10406
  source 1..80: mol_type = other DNA

SEQ ID NO: 195137 - DNA, 80 bp, synthetic construct; identical to SEQ ID NO: 10407
  source 1..80: mol_type = other DNA

SEQ ID NO: 195138 - DNA, 80 bp, synthetic construct; identical to SEQ ID NO: 10408
  source 1..80: mol_type = other DNA

SEQ ID NO: 195139 - DNA, 80 bp, synthetic construct; identical to SEQ ID NO: 10409
  source 1..80: mol_type = other DNA

SEQ ID NO: 195140 - DNA, 80 bp, synthetic construct; identical to SEQ ID NO: 10410
  source 1..80: mol_type = other DNA

SEQ ID NO: 195141 - DNA, 80 bp, synthetic construct; identical to SEQ ID NO: 10411
  source 1..80: mol_type = other DNA

SEQ ID NO: 195142 - DNA, 80 bp, synthetic construct; identical to SEQ ID NO: 10412
  source 1..80: mol_type = other DNA

SEQ ID NO: 195143 - DNA, 80 bp, synthetic construct; identical to SEQ ID NO: 10413
  source 1..80: mol_type = other DNA

SEQ ID NO: 195144 - DNA, 80 bp, synthetic construct; identical to SEQ ID NO: 10414
  source 1..80: mol_type = other DNA

SEQ ID NO: 195145 - DNA, 80 bp, synthetic construct; identical to SEQ ID NO: 10415
  source 1..80: mol_type = other DNA

SEQ ID NO: 195146 - DNA, 80 bp, synthetic construct; identical to SEQ ID NO: 10416
  source 1..80: mol_type = other DNA

SEQ ID NO: 195147 - DNA, 80 bp, synthetic construct; identical to SEQ ID NO: 10417
  source 1..80: mol_type = other DNA

SEQ ID NO: 195148 - DNA, 80 bp, synthetic construct; identical to SEQ ID NO: 10418
  source 1..80: mol_type = other DNA

SEQ ID NO: 195149 - DNA, 80 bp, synthetic construct; identical to SEQ ID NO: 10419
  source 1..80: mol_type = other DNA

SEQ ID NO: 195150 - DNA, 80 bp, synthetic construct; identical to SEQ ID NO: 10420
  source 1..80: mol_type = other DNA

SEQ ID NO: 195151 - DNA, 80 bp, synthetic construct; identical to SEQ ID NO: 10421
  source 1..80: mol_type = other DNA

SEQ ID NO: 195152 - DNA, 80 bp, synthetic construct; identical to SEQ ID NO: 10422
  source 1..80: mol_type = other DNA

SEQ ID NO: 195153 - DNA, 80 bp, synthetic construct; identical to SEQ ID NO: 10423
  source 1..80: mol_type = other DNA

SEQ ID NO: 195154 - DNA, 80 bp, synthetic construct; identical to SEQ ID NO: 10424
  source 1..80: mol_type = other DNA

SEQ ID NO: 195155 - DNA, 80 bp, synthetic construct; identical to SEQ ID NO: 10425
  source 1..80: mol_type = other DNA

SEQ ID NO: 195156 - DNA, 80 bp, synthetic construct; identical to SEQ ID NO: 10426
  source 1..80: mol_type = other DNA

SEQ ID NO: 195157 - DNA, 80 bp, synthetic construct; identical to SEQ ID NO: 10427
  source 1..80: mol_type = other DNA

SEQ ID NO: 195158 - DNA, 80 bp, synthetic construct; identical to SEQ ID NO: 10428
  source 1..80: mol_type = other DNA

SEQ ID NO: 195159 - DNA, 80 bp, synthetic construct; identical to SEQ ID NO: 10429
  source 1..80: mol_type = other DNA

SEQ ID NO: 195160 - DNA, 80 bp, synthetic construct; identical to SEQ ID NO: 10430
  source 1..80: mol_type = other DNA

SEQ ID NO: 195161 - DNA, 80 bp, synthetic construct; identical to SEQ ID NO: 10431
  source 1..80: mol_type = other DNA

SEQ ID NO: 195162 - DNA, 80 bp, synthetic construct; identical to SEQ ID NO: 10432
  source 1..80: mol_type = other DNA

SEQ ID NO: 195163 - DNA, 80 bp, synthetic construct; identical to SEQ ID NO: 10433
  source 1..80: mol_type = other DNA

SEQ ID NO: 195164 - DNA, 80 bp, synthetic construct; identical to SEQ ID NO: 10434
  source 1..80: mol_type = other DNA

SEQ ID NO: 195165 - DNA, 80 bp, synthetic construct; identical to SEQ ID NO: 10435
  source 1..80: mol_type = other DNA

SEQ ID NO: 195166 - DNA, 80 bp, synthetic construct; identical to SEQ ID NO: 10436
  source 1..80: mol_type = other DNA

SEQ ID NO: 195167 - DNA, 80 bp, synthetic construct; identical to SEQ ID NO: 10437
  source 1..80: mol_type = other DNA

SEQ ID NO: 195168 - DNA, 80 bp, synthetic construct; identical to SEQ ID NO: 10438
  source 1..80: mol_type = other DNA

SEQ ID NO: 195169 - DNA, 80 bp, synthetic construct; identical to SEQ ID NO: 10439
  source 1..80: mol_type = other DNA

SEQ ID NO: 195170 - DNA, 80 bp, synthetic construct; identical to SEQ ID NO: 10440
  source 1..80: mol_type = other DNA

SEQ ID NO: 195171 - DNA, 80 bp, synthetic construct; identical to SEQ ID NO: 10441
  source 1..80: mol_type = other DNA

SEQ ID NO: 195172 - DNA, 80 bp, synthetic construct; identical to SEQ ID NO: 10442
  source 1..80: mol_type = other DNA

SEQ ID NO: 195173 - DNA, 80 bp, synthetic construct; identical to SEQ ID NO: 10443
  source 1..80: mol_type = other DNA

SEQ ID NO: 195174 - DNA, 80 bp, synthetic construct; identical to SEQ ID NO: 10444
  source 1..80: mol_type = other DNA

SEQ ID NO: 195175 - DNA, 80 bp, synthetic construct; identical to SEQ ID NO: 10445
  source 1..80: mol_type = other DNA

SEQ ID NO: 195176 - DNA, 80 bp, synthetic construct; identical to SEQ ID NO: 10446
  source 1..80: mol_type = other DNA

SEQ ID NO: 195177 - DNA, 80 bp, synthetic construct; identical to SEQ ID NO: 10447
  source 1..80: mol_type = other DNA

SEQ ID NO: 195178 - DNA, 80 bp, synthetic construct; identical to SEQ ID NO: 10448
  source 1..80: mol_type = other DNA

SEQ ID NO: 195179 - DNA, 80 bp, synthetic construct; identical to SEQ ID NO: 10449
  source 1..80: mol_type = other DNA

SEQ ID NO: 195180 - DNA, 80 bp, synthetic construct; identical to SEQ ID NO: 10450
  source 1..80: mol_type = other DNA

SEQ ID NO: 195181 - DNA, 80 bp, synthetic construct; identical to SEQ ID NO: 10451
  source 1..80: mol_type = other DNA

SEQ ID NO: 195182 - DNA, 80 bp, synthetic construct; identical to SEQ ID NO: 10452
  source 1..80: mol_type = other DNA

SEQ ID NO: 195183 - DNA, 80 bp, synthetic construct; identical to SEQ ID NO: 10453
  source 1..80: mol_type = other DNA

SEQ ID NO: 195184 - DNA, 80 bp, synthetic construct; identical to SEQ ID NO: 10454
  source 1..80: mol_type = other DNA

SEQ ID NO: 195185 - DNA, 80 bp, synthetic construct; identical to SEQ ID NO: 10455
  source 1..80: mol_type = other DNA

SEQ ID NO: 195186 - DNA, 80 bp, synthetic construct; identical to SEQ ID NO: 10456
  source 1..80: mol_type = other DNA

SEQ ID NO: 195187 - DNA, 80 bp, synthetic construct; identical to SEQ ID NO: 10457
  source 1..80: mol_type = other DNA

SEQ ID NO: 195188 - DNA, 80 bp, synthetic construct; identical to SEQ ID NO: 10458
  source 1..80: mol_type = other DNA

SEQ ID NO: 195189 - DNA, 80 bp, synthetic construct; identical to SEQ ID NO: 10459
  source 1..80: mol_type = other DNA

SEQ ID NO: 195190 - DNA, 80 bp, synthetic construct; identical to SEQ ID NO: 10460
  source 1..80: mol_type = other DNA

SEQ ID NO: 195191 - DNA, 80 bp, synthetic construct; identical to SEQ ID NO: 10461
  source 1..80: mol_type = other DNA

SEQ ID NO: 195192 - DNA, 80 bp, synthetic construct; identical to SEQ ID NO: 10462
  source 1..80: mol_type = other DNA

SEQ ID NO: 195193 - DNA, 80 bp, synthetic construct; identical to SEQ ID NO: 10463
  source 1..80: mol_type = other DNA

SEQ ID NO: 195194 - DNA, 80 bp, synthetic construct; identical to SEQ ID NO: 10464
  source 1..80: mol_type = other DNA

SEQ ID NO: 195195 - DNA, 80 bp, synthetic construct; identical to SEQ ID NO: 10465
  source 1..80: mol_type = other DNA

SEQ ID NO: 195196 - DNA, 80 bp, synthetic construct; identical to SEQ ID NO: 10466
  source 1..80: mol_type = other DNA

SEQ ID NO: 195197 - DNA, 80 bp, synthetic construct; identical to SEQ ID NO: 10467
  source 1..80: mol_type = other DNA

SEQ ID NO: 195198 - DNA, 80 bp, synthetic construct; identical to SEQ ID NO: 10468
  source 1..80: mol_type = other DNA

SEQ ID NO: 195199 - DNA, 80 bp, synthetic construct; identical to SEQ ID NO: 10469
  source 1..80: mol_type = other DNA

SEQ ID NO: 195200 - DNA, 80 bp, synthetic construct; identical to SEQ ID NO: 10470
  source 1..80: mol_type = other DNA

SEQ ID NO: 195201 - DNA, 80 bp, synthetic construct; identical to SEQ ID NO: 10471
  source 1..80: mol_type = other DNA

SEQ ID NO: 195202 - DNA, 80 bp, synthetic construct; identical to SEQ ID NO: 10472
  source 1..80: mol_type = other DNA

SEQ ID NO: 195203 - DNA, 80 bp, synthetic construct; identical to SEQ ID NO: 10473
  source 1..80: mol_type = other DNA

SEQ ID NO: 195204 - DNA, 80 bp, synthetic construct; identical to SEQ ID NO: 10474
  source 1..80: mol_type = other DNA

SEQ ID NO: 195205 - DNA, 80 bp, synthetic construct; identical to SEQ ID NO: 10475
  source 1..80: mol_type = other DNA

SEQ ID NO: 195206 - DNA, 80 bp, synthetic construct; identical to SEQ ID NO: 10476
  source 1..80: mol_type = other DNA

SEQ ID NO: 195207 - DNA, 80 bp, synthetic construct; identical to SEQ ID NO: 10477
  source 1..80: mol_type = other DNA

SEQ ID NO: 195208 - DNA, 80 bp, synthetic construct; identical to SEQ ID NO: 10478
  source 1..80: mol_type = other DNA

SEQ ID NO: 195209 - DNA, 80 bp, synthetic construct; identical to SEQ ID NO: 10479
  source 1..80: mol_type = other DNA

SEQ ID NO: 195210 - DNA, 80 bp, synthetic construct; identical to SEQ ID NO: 10480
  source 1..80: mol_type = other DNA

SEQ ID NO: 195211 - DNA, 80 bp, synthetic construct; identical to SEQ ID NO: 10481
  source 1..80: mol_type = other DNA

SEQ ID NO: 195212 - DNA, 80 bp, synthetic construct; identical to SEQ ID NO: 10482
  source 1..80: mol_type = other DNA

SEQ ID NO: 195213 - DNA, 80 bp, synthetic construct; identical to SEQ ID NO: 10483
  source 1..80: mol_type = other DNA

SEQ ID NO: 195214 - DNA, 80 bp, synthetic construct; identical to SEQ ID NO: 10484
  source 1..80: mol_type = other DNA

SEQ ID NO: 195215 - DNA, 80 bp, synthetic construct; identical to SEQ ID NO: 10485
  source 1..80: mol_type = other DNA

SEQ ID NO: 195216 - DNA, 80 bp, synthetic construct; identical to SEQ ID NO: 10486
  source 1..80: mol_type = other DNA

SEQ ID NO: 195217 - DNA, 80 bp, synthetic construct; identical to SEQ ID NO: 10487
  source 1..80: mol_type = other DNA

SEQ ID NO: 195218 - DNA, 80 bp, synthetic construct; identical to SEQ ID NO: 10488
  source 1..80: mol_type = other DNA

SEQ ID NO: 195219 - DNA, 80 bp, synthetic construct; identical to SEQ ID NO: 10489
  source 1..80: mol_type = other DNA

SEQ ID NO: 195220 - DNA, 80 bp, synthetic construct; identical to SEQ ID NO: 10490
  source 1..80: mol_type = other DNA

SEQ ID NO: 195221 - DNA, 80 bp, synthetic construct; identical to SEQ ID NO: 10491
  source 1..80: mol_type = other DNA

SEQ ID NO: 195222 - DNA, 80 bp, synthetic construct; identical to SEQ ID NO: 10492
  source 1..80: mol_type = other DNA

SEQ ID NO: 195223 - DNA, 80 bp, synthetic construct; identical to SEQ ID NO: 10493
  source 1..80: mol_type = other DNA

SEQ ID NO: 195224 - DNA, 80 bp, synthetic construct; identical to SEQ ID NO: 10494
  source 1..80: mol_type = other DNA

SEQ ID NO: 195225 - DNA, 80 bp, synthetic construct; identical to SEQ ID NO: 10495
  source 1..80: mol_type = other DNA

SEQ ID NO: 195226 - DNA, 80 bp, synthetic construct; identical to SEQ ID NO: 10496
  source 1..80: mol_type = other DNA

SEQ ID NO: 195227 - DNA, 80 bp, synthetic construct; identical to SEQ ID NO: 10497
  source 1..80: mol_type = other DNA

SEQ ID NO: 195228 - DNA, 80 bp, synthetic construct; identical to SEQ ID NO: 10498
  source 1..80: mol_type = other DNA

SEQ ID NO: 195229 - DNA, 80 bp, synthetic construct; identical to SEQ ID NO: 10499
  source 1..80: mol_type = other DNA

SEQ ID NO: 195230 - DNA, 80 bp, synthetic construct; identical to SEQ ID NO: 10500
  source 1..80: mol_type = other DNA

SEQ ID NO: 195231 - DNA, 80 bp, synthetic construct; identical to SEQ ID NO: 10501
  source 1..80: mol_type = other DNA

SEQ ID NO: 195232 - DNA, 80 bp, synthetic construct; identical to SEQ ID NO: 10502
  source 1..80: mol_type = other DNA

SEQ ID NO: 195233 - DNA, 80 bp, synthetic construct; identical to SEQ ID NO: 10503
  source 1..80: mol_type = other DNA

SEQ ID NO: 195234 - DNA, 80 bp, synthetic construct; identical to SEQ ID NO: 10504
  source 1..80: mol_type = other DNA

SEQ ID NO: 195235 - DNA, 80 bp, synthetic construct; identical to SEQ ID NO: 10505
  source 1..80: mol_type = other DNA

SEQ ID NO: 195236 - DNA, 80 bp, synthetic construct; identical to SEQ ID NO: 10506
  source 1..80: mol_type = other DNA

SEQ ID NO: 195237 - DNA, 80 bp, synthetic construct; identical to SEQ ID NO: 10507
  source 1..80: mol_type = other DNA

SEQ ID NO: 195238 - DNA, 80 bp, synthetic construct; identical to SEQ ID NO: 10508
  source 1..80: mol_type = other DNA

SEQ ID NO: 195239 - DNA, 80 bp, synthetic construct; identical to SEQ ID NO: 10509
  source 1..80: mol_type = other DNA

SEQ ID NO: 195240 - DNA, 80 bp, synthetic construct; identical to SEQ ID NO: 10510
  source 1..80: mol_type = other DNA

SEQ ID NO: 195241 - DNA, 80 bp, synthetic construct; identical to SEQ ID NO: 10511
  source 1..80: mol_type = other DNA

SEQ ID NO: 195242 - DNA, 80 bp, synthetic construct; identical to SEQ ID NO: 10512
  source 1..80: mol_type = other DNA

SEQ ID NO: 195243 - DNA, 80 bp, synthetic construct; identical to SEQ ID NO: 10513
  source 1..80: mol_type = other DNA

SEQ ID NO: 195244 - DNA, 80 bp, synthetic construct; identical to SEQ ID NO: 10514
  source 1..80: mol_type = other DNA

SEQ ID NO: 195245 - DNA, 80 bp, synthetic construct; identical to SEQ ID NO: 10515
  source 1..80: mol_type = other DNA

SEQ ID NO: 195246 - DNA, 80 bp, synthetic construct; identical to SEQ ID NO: 10516
  source 1..80: mol_type = other DNA

SEQ ID NO: 195247 - DNA, 80 bp, synthetic construct; identical to SEQ ID NO: 10517
  source 1..80: mol_type = other DNA

SEQ ID NO: 195248 - DNA, 80 bp, synthetic construct; identical to SEQ ID NO: 10518
  source 1..80: mol_type = other DNA

SEQ ID NO: 195249 - DNA, 80 bp, synthetic construct; identical to SEQ ID NO: 10519
  source 1..80: mol_type = other DNA

SEQ ID NO: 195250 - DNA, 80 bp, synthetic construct; identical to SEQ ID NO: 10520
  source 1..80: mol_type = other DNA

SEQ ID NO: 195251 - DNA, 80 bp, synthetic construct; identical to SEQ ID NO: 10521
  source 1..80: mol_type = other DNA

SEQ ID NO: 195252 - DNA, 80 bp, synthetic construct; identical to SEQ ID NO: 10522
  source 1..80: mol_type = other DNA

SEQ ID NO: 195253 - DNA, 80 bp, synthetic construct; identical to SEQ ID NO: 10523
  source 1..80: mol_type = other DNA

SEQ ID NO: 195254 - DNA, 80 bp, synthetic construct; identical to SEQ ID NO: 10524
  source 1..80: mol_type = other DNA

SEQ ID NO: 195255 - DNA, 80 bp, synthetic construct; identical to SEQ ID NO: 10525
  source 1..80: mol_type = other DNA

SEQ ID NO: 195256 - DNA, 80 bp, synthetic construct; identical to SEQ ID NO: 10526
  source 1..80: mol_type = other DNA

SEQ ID NO: 195257 - DNA, 80 bp, synthetic construct; identical to SEQ ID NO: 10527
  source 1..80: mol_type = other DNA

SEQ ID NO: 195258 - DNA, 80 bp, synthetic construct; identical to SEQ ID NO: 10528
  source 1..80: mol_type = other DNA

SEQ ID NO: 195259 - DNA, 80 bp, synthetic construct; identical to SEQ ID NO: 10529
  source 1..80: mol_type = other DNA

SEQ ID NO: 195260 - DNA, 80 bp, synthetic construct; identical to SEQ ID NO: 10530
  source 1..80: mol_type = other DNA

SEQ ID NO: 195261 - DNA, 80 bp, synthetic construct; identical to SEQ ID NO: 10531
  source 1..80: mol_type = other DNA

SEQ ID NO: 195262 - DNA, 80 bp, synthetic construct; identical to SEQ ID NO: 10532
  source 1..80: mol_type = other DNA

SEQ ID NO: 195263 - DNA, 80 bp, synthetic construct; identical to SEQ ID NO: 10533
  source 1..80: mol_type = other DNA

SEQ ID NO: 195264 - DNA, 80 bp, synthetic construct; identical to SEQ ID NO: 10534
  source 1..80: mol_type = other DNA

SEQ ID NO: 195265 - DNA, 80 bp, synthetic construct; identical to SEQ ID NO: 10535
  source 1..80: mol_type = other DNA

SEQ ID NO: 195266 - DNA, 80 bp, synthetic construct; identical to SEQ ID NO: 10536
  source 1..80: mol_type = other DNA

SEQ ID NO: 195267 - DNA, 80 bp, synthetic construct; identical to SEQ ID NO: 10537
  source 1..80: mol_type = other DNA

SEQ ID NO: 195268 - DNA, 80 bp, synthetic construct; identical to SEQ ID NO: 10538
  source 1..80: mol_type = other DNA

SEQ ID NO: 195269 - DNA, 80 bp, synthetic construct; identical to SEQ ID NO: 10539
  source 1..80: mol_type = other DNA

SEQ ID NO: 195270 - DNA, 80 bp, synthetic construct; identical to SEQ ID NO: 10540
  source 1..80: mol_type = other DNA

SEQ ID NO: 195271 - DNA, 80 bp, synthetic construct; identical to SEQ ID NO: 10541
  source 1..80: mol_type = other DNA

SEQ ID NO: 195272 - DNA, 80 bp, synthetic construct; identical to SEQ ID NO: 10542
  source 1..80: mol_type = other DNA

SEQ ID NO: 195273 - DNA, 80 bp, synthetic construct; identical to SEQ ID NO: 10543
  source 1..80: mol_type = other DNA

SEQ ID NO: 195274 - DNA, 80 bp, synthetic construct; identical to SEQ ID NO: 10544
  source 1..80: mol_type = other DNA

SEQ ID NO: 195275 - DNA, 80 bp, synthetic construct; identical to SEQ ID NO: 10545
  source 1..80: mol_type = other DNA

SEQ ID NO: 195276 - DNA, 80 bp, synthetic construct; identical to SEQ ID NO: 10546
  source 1..80: mol_type = other DNA

SEQ ID NO: 195277 - DNA, 80 bp, synthetic construct; identical to SEQ ID NO: 10547
  source 1..80: mol_type = other DNA

SEQ ID NO: 195278 - DNA, 80 bp, synthetic construct; identical to SEQ ID NO: 10548
  source 1..80: mol_type = other DNA

SEQ ID NO: 195279 - DNA, 80 bp, synthetic construct; identical to SEQ ID NO: 10549
  source 1..80: mol_type = other DNA

SEQ ID NO: 195280 - DNA, 80 bp, synthetic construct; identical to SEQ ID NO: 10550
  source 1..80: mol_type = other DNA

SEQ ID NO: 195281 - DNA, 80 bp, synthetic construct; identical to SEQ ID NO: 10551
  source 1..80: mol_type = other DNA

SEQ ID NO: 195282 - DNA, 80 bp, synthetic construct; identical to SEQ ID NO: 10552
  source 1..80: mol_type = other DNA

SEQ ID NO: 195283 - DNA, 80 bp, synthetic construct; identical to SEQ ID NO: 10553
  source 1..80: mol_type = other DNA

SEQ ID NO: 195284 - DNA, 80 bp, synthetic construct; identical to SEQ ID NO: 10554
  source 1..80: mol_type = other DNA

SEQ ID NO: 195285 - DNA, 80 bp, synthetic construct; identical to SEQ ID NO: 10555
  source 1..80: mol_type = other DNA

SEQ ID NO: 195286 - DNA, 80 bp, synthetic construct; identical to SEQ ID NO: 10556
  source 1..80: mol_type = other DNA

SEQ ID NO: 195287 - DNA, 80 bp, synthetic construct; identical to SEQ ID NO: 10557
  source 1..80: mol_type = other DNA

SEQ ID NO: 195288 - DNA, 80 bp, synthetic construct; identical to SEQ ID NO: 10558
  source 1..80: mol_type = other DNA

SEQ ID NO: 195289 - DNA, 80 bp, synthetic construct; identical to SEQ ID NO: 10559
  source 1..80: mol_type = other DNA

SEQ ID NO: 195290 - DNA, 80 bp, synthetic construct; identical to SEQ ID NO: 10560
  source 1..80: mol_type = other DNA

SEQ ID NO: 195291 - DNA, 80 bp, synthetic construct; identical to SEQ ID NO: 10561
  source 1..80: mol_type = other DNA

SEQ ID NO: 195292 - DNA, 80 bp, synthetic construct; identical to SEQ ID NO: 10562
  source 1..80: mol_type = other DNA

SEQ ID NO: 195293 - DNA, 80 bp, synthetic construct; identical to SEQ ID NO: 10563
  source 1..80: mol_type = other DNA

SEQ ID NO: 195294 - DNA, 80 bp, synthetic construct; identical to SEQ ID NO: 10564
  source 1..80: mol_type = other DNA

SEQ ID NO: 195295 - DNA, 80 bp, synthetic construct; identical to SEQ ID NO: 10565
  source 1..80: mol_type = other DNA

SEQ ID NO: 195296 - DNA, 80 bp, synthetic construct; identical to SEQ ID NO: 10566
  source 1..80: mol_type = other DNA

SEQ ID NO: 195297 - DNA, 80 bp, synthetic construct; identical to SEQ ID NO: 10567
  source 1..80: mol_type = other DNA

SEQ ID NO: 195298 - DNA, 80 bp, synthetic construct; identical to SEQ ID NO: 10568
  source 1..80: mol_type = other DNA

SEQ ID NO: 195299 - DNA, 80 bp, synthetic construct; identical to SEQ ID NO: 10569
  source 1..80: mol_type = other DNA

SEQ ID NO: 195300 - DNA, 80 bp, synthetic construct; identical to SEQ ID NO: 10570
  source 1..80: mol_type = other DNA

SEQ ID NO: 195301 - DNA, 80 bp, synthetic construct; identical to SEQ ID NO: 10571
  source 1..80: mol_type = other DNA

SEQ ID NO: 195302 - DNA, 80 bp, synthetic construct; identical to SEQ ID NO: 10572
  source 1..80: mol_type = other DNA

SEQ ID NO: 195303 - DNA, 80 bp, synthetic construct; identical to SEQ ID NO: 10573
  source 1..80: mol_type = other DNA

SEQ ID NO: 195304 - DNA, 80 bp, synthetic construct; identical to SEQ ID NO: 10574
  source 1..80: mol_type = other DNA

SEQ ID NO: 195305 - DNA, 80 bp, synthetic construct; identical to SEQ ID NO: 10575
  source 1..80: mol_type = other DNA

SEQ ID NO: 195306 - DNA, 80 bp, synthetic construct; identical to SEQ ID NO: 10576
  source 1..80: mol_type = other DNA

SEQ ID NO: 195307 - DNA, 80 bp, synthetic construct; identical to SEQ ID NO: 10577
  source 1..80: mol_type = other DNA

SEQ ID NO: 195308 - DNA, 80 bp, synthetic construct; identical to SEQ ID NO: 10578
  source 1..80: mol_type = other DNA

SEQ ID NO: 195309 - DNA, 80 bp, synthetic construct; identical to SEQ ID NO: 10579
  source 1..80: mol_type = other DNA

SEQ ID NO: 195310 - DNA, 80 bp, synthetic construct; identical to SEQ ID NO: 10580
  source 1..80: mol_type = other DNA

SEQ ID NO: 195311 - DNA, 80 bp, synthetic construct; identical to SEQ ID NO: 10581
  source 1..80: mol_type = other DNA

SEQ ID NO: 195312 - DNA, 80 bp, synthetic construct; identical to SEQ ID NO: 10582
  source 1..80: mol_type = other DNA

SEQ ID NO: 195313 - DNA, 80 bp, synthetic construct; identical to SEQ ID NO: 10583
  source 1..80: mol_type = other DNA

SEQ ID NO: 195314 - DNA, 80 bp, synthetic construct; identical to SEQ ID NO: 10584
  source 1..80: mol_type = other DNA

SEQ ID NO: 195315 - DNA, 80 bp, synthetic construct; identical to SEQ ID NO: 10585
  source 1..80: mol_type = other DNA

SEQ ID NO: 195316 - DNA, 80 bp, synthetic construct; identical to SEQ ID NO: 10586
  source 1..80: mol_type = other DNA

SEQ ID NO: 195317 - DNA, 80 bp, synthetic construct; identical to SEQ ID NO: 10587
  source 1..80: mol_type = other DNA

SEQ ID NO: 195318 - DNA, 80 bp, synthetic construct; identical to SEQ ID NO: 10588
  source 1..80: mol_type = other DNA

SEQ ID NO: 195319 - DNA, 80 bp, synthetic construct; identical to SEQ ID NO: 10589
  source 1..80: mol_type = other DNA

SEQ ID NO: 195320 - DNA, 80 bp, synthetic construct; identical to SEQ ID NO: 10590
  source 1..80: mol_type = other DNA

SEQ ID NO: 195321 - DNA, 80 bp, synthetic construct; identical to SEQ ID NO: 10591
  source 1..80: mol_type = other DNA

SEQ ID NO: 195322 - DNA, 80 bp, synthetic construct; identical to SEQ ID NO: 10592
  source 1..80: mol_type = other DNA

SEQ ID NO: 195323 - DNA, 80 bp, synthetic construct; identical to SEQ ID NO: 10593
  source 1..80: mol_type = other DNA

SEQ ID NO: 195324 - DNA, 80 bp, synthetic construct; identical to SEQ ID NO: 10594
  source 1..80: mol_type = other DNA

SEQ ID NO: 195325 - DNA, 80 bp, synthetic construct; identical to SEQ ID NO: 10595
  source 1..80: mol_type = other DNA

SEQ ID NO: 195326 - DNA, 80 bp, synthetic construct; identical to SEQ ID NO: 10596
  source 1..80: mol_type = other DNA

SEQ ID NO: 195327 - DNA, 80 bp, synthetic construct; identical to SEQ ID NO: 10597
  source 1..80: mol_type = other DNA

SEQ ID NO: 195328 - DNA, 80 bp, synthetic construct; identical to SEQ ID NO: 10598
  source 1..80: mol_type = other DNA

SEQ ID NO: 195329 - DNA, 80 bp, synthetic construct; identical to SEQ ID NO: 10599
  source 1..80: mol_type = other DNA

SEQ ID NO: 195330 - DNA, 80 bp, synthetic construct; identical to SEQ ID NO: 10600
  source 1..80: mol_type = other DNA

SEQ ID NO: 195331 - DNA, 80 bp, synthetic construct; identical to SEQ ID NO: 10601
  source 1..80: mol_type = other DNA

SEQ ID NO: 195332 - DNA, 80 bp, synthetic construct; identical to SEQ ID NO: 10602
  source 1..80: mol_type = other DNA

SEQ ID NO: 195333 - DNA, 80 bp, synthetic construct; identical to SEQ ID NO: 10603
  source 1..80: mol_type = other DNA

SEQ ID NO: 195334 - DNA, 80 bp, synthetic construct; identical to SEQ ID NO: 10604
  source 1..80: mol_type = other DNA

SEQ ID NO: 195335 - DNA, 80 bp, synthetic construct; identical to SEQ ID NO: 10605
  source 1..80: mol_type = other DNA

SEQ ID NO: 195336 - DNA, 80 bp, synthetic construct; identical to SEQ ID NO: 10606
  source 1..80: mol_type = other DNA

SEQ ID NO: 195337 - DNA, 80 bp, synthetic construct; identical to SEQ ID NO: 10607
  source 1..80: mol_type = other DNA

SEQ ID NO: 195338 - DNA, 80 bp, synthetic construct; identical to SEQ ID NO: 10608
  source 1..80: mol_type = other DNA

SEQ ID NO: 195339 - DNA, 80 bp, synthetic construct; identical to SEQ ID NO: 10609
  source 1..80: mol_type = other DNA

SEQ ID NO: 195340 - DNA, 80 bp, synthetic construct; identical to SEQ ID NO: 10610
  source 1..80: mol_type = other DNA

SEQ ID NO: 195341 - DNA, 80 bp, synthetic construct; identical to SEQ ID NO: 10611
  source 1..80: mol_type = other DNA

SEQ ID NO: 195342 - DNA, 80 bp, synthetic construct; identical to SEQ ID NO: 10612
  source 1..80: mol_type = other DNA

SEQ ID NO: 195343 - DNA, 80 bp, synthetic construct; identical to SEQ ID NO: 10613
  source 1..80: mol_type = other DNA

SEQ ID NO: 195344 - DNA, 80 bp, synthetic construct; identical to SEQ ID NO: 10614
  source 1..80: mol_type = other DNA

SEQ ID NO: 195345 - DNA, 80 bp, synthetic construct; identical to SEQ ID NO: 10615
  source 1..80: mol_type = other DNA

SEQ ID NO: 195346 - DNA, 80 bp, synthetic construct; identical to SEQ ID NO: 10616
  source 1..80: mol_type = other DNA

SEQ ID NO: 195347 - DNA, 80 bp, synthetic construct; identical to SEQ ID NO: 10617
  source 1..80: mol_type = other DNA

SEQ ID NO: 195348 - DNA, 80 bp, synthetic construct; identical to SEQ ID NO: 10618
  source 1..80: mol_type = other DNA

SEQ ID NO: 195349 - DNA, 80 bp, synthetic construct; identical to SEQ ID NO: 10619
  source 1..80: mol_type = other DNA

SEQ ID NO: 195350 - DNA, 80 bp, synthetic construct; identical to SEQ ID NO: 10620
  source 1..80: mol_type = other DNA

SEQ ID NO: 195351 - DNA, 80 bp, synthetic construct; identical to SEQ ID NO: 10621
  source 1..80: mol_type = other DNA

SEQ ID NO: 195352 - DNA, 80 bp, synthetic construct; identical to SEQ ID NO: 10622
  source 1..80: mol_type = other DNA

SEQ ID NO: 195353 - DNA, 80 bp, synthetic construct; identical to SEQ ID NO: 10623
  source 1..80: mol_type = other DNA

SEQ ID NO: 195354 - DNA, 80 bp, synthetic construct; identical to SEQ ID NO: 10624
  source 1..80: mol_type = other DNA

SEQ ID NO: 195355 - DNA, 80 bp, synthetic construct; identical to SEQ ID NO: 10625
  source 1..80: mol_type = other DNA

SEQ ID NO: 195356 - DNA, 80 bp, synthetic construct; identical to SEQ ID NO: 10626
  source 1..80: mol_type = other DNA

SEQ ID NO: 195357 - DNA, 80 bp, synthetic construct; identical to SEQ ID NO: 10627
  source 1..80: mol_type = other DNA

SEQ ID NO: 195358 - DNA, 80 bp, synthetic construct; identical to SEQ ID NO: 10628
  source 1..80: mol_type = other DNA

SEQ ID NO: 195359 - DNA, 80 bp, synthetic construct; identical to SEQ ID NO: 10629
  source 1..80: mol_type = other DNA

SEQ ID NO: 195360 - DNA, 80 bp, synthetic construct; identical to SEQ ID NO: 10630
  source 1..80: mol_type = other DNA

SEQ ID NO: 195361 - DNA, 80 bp, synthetic construct; identical to SEQ ID NO: 10631
  source 1..80: mol_type = other DNA

SEQ ID NO: 195362 - DNA, 80 bp, synthetic construct; identical to SEQ ID NO: 10632
  source 1..80: mol_type = other DNA

SEQ ID NO: 195363 - DNA, 80 bp, synthetic construct; identical to SEQ ID NO: 10633
  source 1..80: mol_type = other DNA

SEQ ID NO: 195364 - DNA, 80 bp, synthetic construct; identical to SEQ ID NO: 10634
  source 1..80: mol_type = other DNA

SEQ ID NO: 195365 - DNA, 80 bp, synthetic construct; identical to SEQ ID NO: 10635
  source 1..80: mol_type = other DNA

SEQ ID NO: 195366 - DNA, 80 bp, synthetic construct; identical to SEQ ID NO: 10636
  source 1..80: mol_type = other DNA

SEQ ID NO: 195367 - DNA, 80 bp, synthetic construct; identical to SEQ ID NO: 10637
  source 1..80: mol_type = other DNA

SEQ ID NO: 195368 - DNA, 80 bp, synthetic construct; identical to SEQ ID NO: 10638
  source 1..80: mol_type = other DNA

SEQ ID NO: 195369 - DNA, 80 bp, synthetic construct; identical to SEQ ID NO: 10639
  source 1..80: mol_type = other DNA

SEQ ID NO: 195370 - DNA, 80 bp, synthetic construct; identical to SEQ ID NO: 10640
  source 1..80: mol_type = other DNA

SEQ ID NO: 195371 - DNA, 80 bp, synthetic construct; identical to SEQ ID NO: 10641
  source 1..80: mol_type = other DNA

SEQ ID NO: 195372 - DNA, 80 bp, synthetic construct; identical to SEQ ID NO: 10642
  source 1..80: mol_type = other DNA

SEQ ID NO: 195373 - DNA, 80 bp, synthetic construct; identical to SEQ ID NO: 10643
  source 1..80: mol_type = other DNA

SEQ ID NO: 195374 - DNA, 80 bp, synthetic construct; identical to SEQ ID NO: 10644
  source 1..80: mol_type = other DNA

SEQ ID NO: 195375 - DNA, 80 bp, synthetic construct; identical to SEQ ID NO: 10645
  source 1..80: mol_type = other DNA

SEQ ID NO: 195376 - DNA, 80 bp, synthetic construct; identical to SEQ ID NO: 10646
  source 1..80: mol_type = other DNA

SEQ ID NO: 195377 - DNA, 80 bp, synthetic construct; identical to SEQ ID NO: 10647
  source 1..80: mol_type = other DNA

SEQ ID NO: 195378 - DNA, 80 bp, synthetic construct; identical to SEQ ID NO: 10648
  source 1..80: mol_type = other DNA

SEQ ID NO: 195379 - DNA, 80 bp, synthetic construct; identical to SEQ ID NO: 10649
  source 1..80: mol_type = other DNA

SEQ ID NO: 195380 - DNA, 80 bp, synthetic construct; identical to SEQ ID NO: 10650
  source 1..80: mol_type = other DNA

SEQ ID NO: 195381 - DNA, 80 bp, synthetic construct; identical to SEQ ID NO: 10651
  source 1..80: mol_type = other DNA

SEQ ID NO: 195382 - DNA, 80 bp, synthetic construct; identical to SEQ ID NO: 10652
  source 1..80: mol_type = other DNA

SEQ ID NO: 195383 - DNA, 80 bp, synthetic construct; identical to SEQ ID NO: 10653
  source 1..80: mol_type = other DNA

SEQ ID NO: 195384 - DNA, 80 bp, synthetic construct; identical to SEQ ID NO: 10654
  source 1..80: mol_type = other DNA

SEQ ID NO: 195385 - DNA, 80 bp, synthetic construct; identical to SEQ ID NO: 10655
  source 1..80: mol_type = other DNA

SEQ ID NO: 195386 - DNA, 80 bp, synthetic construct; identical to SEQ ID NO: 10656
  source 1..80: mol_type = other DNA

SEQ ID NO: 195387 - DNA, 80 bp, synthetic construct; identical to SEQ ID NO: 10657
  source 1..80: mol_type = other DNA

SEQ ID NO: 195388 - DNA, 80 bp, synthetic construct; identical to SEQ ID NO: 10658
  source 1..80: mol_type = other DNA

SEQ ID NO: 195389 - DNA, 80 bp, synthetic construct; identical to SEQ ID NO: 10659
  source 1..80: mol_type = other DNA

SEQ ID NO: 195390 - DNA, 80 bp, synthetic construct; identical to SEQ ID NO: 10660
  source 1..80: mol_type = other DNA

SEQ ID NO: 195391 - DNA, 80 bp, synthetic construct; identical to SEQ ID NO: 10661
  source 1..80: mol_type = other DNA

SEQ ID NO: 195392 - DNA, 80 bp, synthetic construct; identical to SEQ ID NO: 10662
  source 1..80: mol_type = other DNA

SEQ ID NO: 195393 - DNA, 80 bp, synthetic construct; identical to SEQ ID NO: 10663
  source 1..80: mol_type = other DNA

SEQ ID NO: 195394 - DNA, 80 bp, synthetic construct; identical to SEQ ID NO: 10664
  source 1..80: mol_type = other DNA

SEQ ID NO: 195395 - DNA, 80 bp, synthetic construct; identical to SEQ ID NO: 10665
  source 1..80: mol_type = other DNA

SEQ ID NO: 195396 - DNA, 80 bp, synthetic construct; identical to SEQ ID NO: 10666
  source 1..80: mol_type = other DNA

SEQ ID NO: 195397 - DNA, 80 bp, synthetic construct; identical to SEQ ID NO: 10667
  source 1..80: mol_type = other DNA

SEQ ID NO: 195398 - DNA, 80 bp, synthetic construct; identical to SEQ ID NO: 10668
  source 1..80: mol_type = other DNA

SEQ ID NO: 195399 - DNA, 80 bp, synthetic construct; identical to SEQ ID NO: 10669
  source 1..80: mol_type = other DNA

SEQ ID NO: 195400 - DNA, 80 bp, synthetic construct; identical to SEQ ID NO: 10670
  source 1..80: mol_type = other DNA

SEQ ID NO: 195401 - DNA, 80 bp, synthetic construct; identical to SEQ ID NO: 10671
  source 1..80: mol_type = other DNA

SEQ ID NO: 195402 - DNA, 80 bp, synthetic construct; identical to SEQ ID NO: 10672
  source 1..80: mol_type = other DNA

SEQ ID NO: 195403 - DNA, 80 bp, synthetic construct; identical to SEQ ID NO: 10673
  source 1..80: mol_type = other DNA

SEQ ID NO: 195404 - DNA, 80 bp, synthetic construct; identical to SEQ ID NO: 10674
  source 1..80: mol_type = other DNA

SEQ ID NO: 195405 - DNA, 80 bp, synthetic construct; identical to SEQ ID NO: 10675
  source 1..80: mol_type = other DNA

SEQ ID NO: 195406 - DNA, 80 bp, synthetic construct; identical to SEQ ID NO: 10676
  source 1..80: mol_type = other DNA

SEQ ID NO: 195407 - DNA, 80 bp, synthetic construct; identical to SEQ ID NO: 10677
  source 1..80: mol_type = other DNA

SEQ ID NO: 195408 - DNA, 80 bp, synthetic construct; identical to SEQ ID NO: 10678
  source 1..80: mol_type = other DNA

SEQ ID NO: 195409 - DNA, 80 bp, synthetic construct; identical to SEQ ID NO: 10679
  source 1..80: mol_type = other DNA

SEQ ID NO: 195410 - DNA, 80 bp, synthetic construct; identical to SEQ ID NO: 10680
  source 1..80: mol_type = other DNA

SEQ ID NO: 195411 - DNA, 80 bp, synthetic construct; identical to SEQ ID NO: 10681
  source 1..80: mol_type = other DNA

SEQ ID NO: 195412 - DNA, 80 bp, synthetic construct; identical to SEQ ID NO: 10682
  source 1..80: mol_type = other DNA

SEQ ID NO: 195413 - DNA, 80 bp, synthetic construct; identical to SEQ ID NO: 10683
  source 1..80: mol_type = other DNA

SEQ ID NO: 195414 - DNA, 80 bp, synthetic construct; identical to SEQ ID NO: 10684
  source 1..80: mol_type = other DNA

SEQ ID NO: 195415 - DNA, 80 bp, synthetic construct; identical to SEQ ID NO: 10685
  source 1..80: mol_type = other DNA

SEQ ID NO: 195416 - DNA, 80 bp, synthetic construct; identical to SEQ ID NO: 10686
  source 1..80: mol_type = other DNA

SEQ ID NO: 195417 - DNA, 80 bp, synthetic construct; identical to SEQ ID NO: 10687
  source 1..80: mol_type = other DNA

SEQ ID NO: 195418 - DNA, 80 bp, synthetic construct; identical to SEQ ID NO: 10688
  source 1..80: mol_type = other DNA

SEQ ID NO: 195419 - DNA, 80 bp, synthetic construct; identical to SEQ ID NO: 10689
  source 1..80: mol_type = other DNA

SEQ ID NO: 195420 - DNA, 80 bp, synthetic construct; identical to SEQ ID NO: 10690
  source 1..80: mol_type = other DNA

SEQ ID NO: 195421 - DNA, 80 bp, synthetic construct; identical to SEQ ID NO: 10691
  source 1..80: mol_type = other DNA

SEQ ID NO: 195422 - DNA, 80 bp, synthetic construct; identical to SEQ ID NO: 10692
  source 1..80: mol_type = other DNA

SEQ ID NO: 195423 - DNA, 80 bp, synthetic construct; identical to SEQ ID NO: 10693
  source 1..80: mol_type = other DNA

SEQ ID NO: 195424 - DNA, 80 bp, synthetic construct; identical to SEQ ID NO: 10694
  source 1..80: mol_type = other DNA

SEQ ID NO: 195425 - DNA, 80 bp, synthetic construct; identical to SEQ ID NO: 10695
  source 1..80: mol_type = other DNA

SEQ ID NO: 195426 - DNA, 80 bp, synthetic construct; identical to SEQ ID NO: 10696
  source 1..80: mol_type = other DNA

SEQ ID NO: 195427 - DNA, 80 bp, synthetic construct; identical to SEQ ID NO: 10697
  source 1..80: mol_type = other DNA

SEQ ID NO: 195428 - DNA, 80 bp, synthetic construct; identical to SEQ ID NO: 10698
  source 1..80: mol_type = other DNA

SEQ ID NO: 195429 - DNA, 80 bp, synthetic construct; identical to SEQ ID NO: 10699
  source 1..80: mol_type = other DNA

SEQ ID NO: 195430 - DNA, 80 bp, synthetic construct; identical to SEQ ID NO: 10700
  source 1..80: mol_type = other DNA

SEQ ID NO: 195431 - DNA, 80 bp, synthetic construct; identical to SEQ ID NO: 10701
  source 1..80: mol_type = other DNA

SEQ ID NO: 195432 - DNA, 80 bp, synthetic construct; identical to SEQ ID NO: 10702
  source 1..80: mol_type = other DNA

SEQ ID NO: 195433 - DNA, 80 bp, synthetic construct; identical to SEQ ID NO: 10703
  source 1..80: mol_type = other DNA

SEQ ID NO: 195434 - DNA, 80 bp, synthetic construct; identical to SEQ ID NO: 10704
  source 1..80: mol_type = other DNA

SEQ ID NO: 195435 - DNA, 80 bp, synthetic construct; identical to SEQ ID NO: 10705
  source 1..80: mol_type = other DNA

SEQ ID NO: 195436 - DNA, 80 bp, synthetic construct; identical to SEQ ID NO: 10706
  source 1..80: mol_type = other DNA

SEQ ID NO: 195437 - DNA, 80 bp, synthetic construct; identical to SEQ ID NO: 10707
  source 1..80: mol_type = other DNA

SEQ ID NO: 195438 - DNA, 80 bp, synthetic construct; identical to SEQ ID NO: 10708
  source 1..80: mol_type = other DNA

SEQ ID NO: 195439 - DNA, 80 bp, synthetic construct; identical to SEQ ID NO: 10709
  source 1..80: mol_type = other DNA

SEQ ID NO: 195440 - DNA, 80 bp, synthetic construct; identical to SEQ ID NO: 10710
  source 1..80: mol_type = other DNA

SEQ ID NO: 195441 - DNA, 80 bp, synthetic construct; identical to SEQ ID NO: 10711
  source 1..80: mol_type = other DNA

SEQ ID NO: 195442 - DNA, 80 bp, synthetic construct; identical to SEQ ID NO: 10712
  source 1..80: mol_type = other DNA

SEQ ID NO: 195443 - DNA, 80 bp, synthetic construct; identical to SEQ ID NO: 10713
  source 1..80: mol_type = other DNA

SEQ ID NO: 195444 - DNA, 80 bp, synthetic construct; identical to SEQ ID NO: 10714
  source 1..80: mol_type = other DNA

SEQ ID NO: 195445 - DNA, 80 bp, synthetic construct; identical to SEQ ID NO: 10715
  source 1..80: mol_type = other DNA

SEQ ID NO: 195446 - DNA, 80 bp, synthetic construct; identical to SEQ ID NO: 10716
  source 1..80: mol_type = other DNA

SEQ ID NO: 195447 - DNA, 80 bp, synthetic construct; identical to SEQ ID NO: 10717
  source 1..80: mol_type = other DNA

SEQ ID NO: 195448 - DNA, 80 bp, synthetic construct; identical to SEQ ID NO: 10718
  source 1..80: mol_type = other DNA

SEQ ID NO: 195449 - DNA, 80 bp, synthetic construct; identical to SEQ ID NO: 10719
  source 1..80: mol_type = other DNA

SEQ ID NO: 195450 - DNA, 80 bp, synthetic construct; identical to SEQ ID NO: 10720
  source 1..80: mol_type = other DNA

SEQ ID NO: 195451 - DNA, 80 bp, synthetic construct; identical to SEQ ID NO: 10721
  source 1..80: mol_type = other DNA

SEQ ID NO: 195452 - DNA, 80 bp, synthetic construct; identical to SEQ ID NO: 10722
  source 1..80: mol_type = other DNA

SEQ ID NO: 195453 - DNA, 80 bp, synthetic construct; identical to SEQ ID NO: 10723
  source 1..80: mol_type = other DNA

SEQ ID NO: 195454 - DNA, 80 bp, synthetic construct; identical to SEQ ID NO: 10724
  source 1..80: mol_type = other DNA

SEQ ID NO: 195455 - DNA, 80 bp, synthetic construct; identical to SEQ ID NO: 10725
  source 1..80: mol_type = other DNA

SEQ ID NO: 195456 - DNA, 80 bp, synthetic construct; identical to SEQ ID NO: 10726
  source 1..80: mol_type = other DNA

SEQ ID NO: 195457 - DNA, 80 bp, synthetic construct; identical to SEQ ID NO: 10727
  source 1..80: mol_type = other DNA

SEQ ID NO: 195458 - DNA, 80 bp, synthetic construct; identical to SEQ ID NO: 10728
  source 1..80: mol_type = other DNA

SEQ ID NO: 195459 - DNA, 80 bp, synthetic construct; identical to SEQ ID NO: 10729
  source 1..80: mol_type = other DNA

SEQ ID NO: 195460 - DNA, 80 bp, synthetic construct; identical to SEQ ID NO: 10730
  source 1..80: mol_type = other DNA

SEQ ID NO: 195461 - DNA, 80 bp, synthetic construct; identical to SEQ ID NO: 10731
  source 1..80: mol_type = other DNA

SEQ ID NO: 195462 - DNA, 80 bp, synthetic construct; identical to SEQ ID NO: 10732
  source 1..80: mol_type = other DNA

SEQ ID NO: 195463 - DNA, 80 bp, synthetic construct; identical to SEQ ID NO: 10733
  source 1..80: mol_type = other DNA

SEQ ID NO: 195464 - DNA, 80 bp, synthetic construct; identical to SEQ ID NO: 10734
  source 1..80: mol_type = other DNA

SEQ ID NO: 195465 - DNA, 80 bp, synthetic construct; identical to SEQ ID NO: 10735
  source 1..80: mol_type = other DNA

SEQ ID NO: 195466 - DNA, 80 bp, synthetic construct; identical to SEQ ID NO: 10736
  source 1..80: mol_type = other DNA

SEQ ID NO: 195467 - DNA, 80 bp, synthetic construct; identical to SEQ ID NO: 10737
  source 1..80: mol_type = other DNA

SEQ ID NO: 195468 - DNA, 80 bp, synthetic construct; identical to SEQ ID NO: 10738
  source 1..80: mol_type = other DNA

SEQ ID NO: 195469 - DNA, 80 bp, synthetic construct; identical to SEQ ID NO: 10739
  source 1..80: mol_type = other DNA

SEQ ID NO: 195470 - DNA, 80 bp, synthetic construct; identical to SEQ ID NO: 10740
  source 1..80: mol_type = other DNA

SEQ ID NO: 195471 - DNA, 80 bp, synthetic construct; identical to SEQ ID NO: 10741
  source 1..80: mol_type = other DNA

SEQ ID NO: 195472 - DNA, 80 bp, synthetic construct; identical to SEQ ID NO: 10742
  source 1..80: mol_type = other DNA

SEQ ID NO: 195473 - DNA, 80 bp, synthetic construct; identical to SEQ ID NO: 10743
  source 1..80: mol_type = other DNA

SEQ ID NO: 195474 - DNA, 80 bp, synthetic construct; identical to SEQ ID NO: 10744
  source 1..80: mol_type = other DNA

SEQ ID NO: 195475 - DNA, 80 bp, synthetic construct; identical to SEQ ID NO: 10745
  source 1..80: mol_type = other DNA

SEQ ID NO: 195476 - DNA, 80 bp, synthetic construct; identical to SEQ ID NO: 10746
  source 1..80: mol_type = other DNA

SEQ ID NO: 195477 - DNA, 80 bp, synthetic construct; identical to SEQ ID NO: 10747
  source 1..80: mol_type = other DNA

SEQ ID NO: 195478 - DNA, 80 bp, synthetic construct; identical to SEQ ID NO: 10748
  source 1..80: mol_type = other DNA

SEQ ID NO: 195479 - DNA, 80 bp, synthetic construct; identical to SEQ ID NO: 10749
  source 1..80: mol_type = other DNA

SEQ ID NO: 195480 - DNA, 80 bp, synthetic construct; identical to SEQ ID NO: 10750
  source 1..80: mol_type = other DNA

SEQ ID NO: 195481 - DNA, 80 bp, synthetic construct; identical to SEQ ID NO: 10751
  source 1..80: mol_type = other DNA

SEQ ID NO: 195482 - DNA, 80 bp, synthetic construct; identical to SEQ ID NO: 10752
  source 1..80: mol_type = other DNA

SEQ ID NO: 195483 - DNA, 80 bp, synthetic construct; identical to SEQ ID NO: 10753
  source 1..80: mol_type = other DNA

SEQ ID NO: 195484 - DNA, 80 bp, synthetic construct; identical to SEQ ID NO: 10754
  source 1..80: mol_type = other DNA

SEQ ID NO: 195485 - DNA, 80 bp, synthetic construct; identical to SEQ ID NO: 10755
  source 1..80: mol_type = other DNA

SEQ ID NO: 195486 - DNA, 80 bp, synthetic construct; identical to SEQ ID NO: 10756
  source 1..80: mol_type = other DNA

SEQ ID NO: 195487 - DNA, 80 bp, synthetic construct; identical to SEQ ID NO: 10757
  source 1..80: mol_type = other DNA

SEQ ID NO: 195488 - DNA, 80 bp, synthetic construct; identical to SEQ ID NO: 10758
  source 1..80: mol_type = other DNA

SEQ ID NO: 195489 - DNA, 80 bp, synthetic construct; identical to SEQ ID NO: 10759
  source 1..80: mol_type = other DNA

SEQ ID NO: 195490 - DNA, 80 bp, synthetic construct; identical to SEQ ID NO: 10760
  source 1..80: mol_type = other DNA

SEQ ID NO: 195491 - DNA, 80 bp, synthetic construct; identical to SEQ ID NO: 10761
  source 1..80: mol_type = other DNA

SEQ ID NO: 195492 - DNA, 80 bp, synthetic construct; identical to SEQ ID NO: 10762
  source 1..80: mol_type = other DNA

SEQ ID NO: 195493 - DNA, 80 bp, synthetic construct; identical to SEQ ID NO: 10763
  source 1..80: mol_type = other DNA

SEQ ID NO: 195494 - DNA, 80 bp, synthetic construct; identical to SEQ ID NO: 10764
  source 1..80: mol_type = other DNA

SEQ ID NO: 195495 - DNA, 80 bp, synthetic construct; identical to SEQ ID NO: 10765
  source 1..80: mol_type = other DNA

SEQ ID NO: 195496 - DNA, 80 bp, synthetic construct; identical to SEQ ID NO: 10766
  source 1..80: mol_type = other DNA

SEQ ID NO: 195497 - DNA, 80 bp, synthetic construct; identical to SEQ ID NO: 10767
  source 1..80: mol_type = other DNA

SEQ ID NO: 195498 - DNA, 80 bp, synthetic construct; identical to SEQ ID NO: 10768
  source 1..80: mol_type = other DNA

SEQ ID NO: 195499 - DNA, 80 bp, synthetic construct; identical to SEQ ID NO: 10769
  source 1..80: mol_type = other DNA

SEQ ID NO: 195500 - DNA, 80 bp, synthetic construct; identical to SEQ ID NO: 10770
  source 1..80: mol_type = other DNA

SEQ ID NO: 195501 - DNA, 80 bp, synthetic construct; identical to SEQ ID NO: 10771
  source 1..80: mol_type = other DNA

SEQ ID NO: 195502 - DNA, 80 bp, synthetic construct; identical to SEQ ID NO: 10772
  source 1..80: mol_type = other DNA

SEQ ID NO: 195503 - DNA, 80 bp, synthetic construct; identical to SEQ ID NO: 10773
  source 1..80: mol_type = other DNA

SEQ ID NO: 195504 - DNA, 80 bp, synthetic construct; identical to SEQ ID NO: 10774
  source 1..80: mol_type = other DNA

SEQ ID NO: 195505 - DNA, 80 bp, synthetic construct; identical to SEQ ID NO: 10775
  source 1..80: mol_type = other DNA

SEQ ID NO: 195506 - DNA, 80 bp, synthetic construct; identical to SEQ ID NO: 10776
  source 1..80: mol_type = other DNA

SEQ ID NO: 195507 - DNA, 80 bp, synthetic construct; identical to SEQ ID NO: 10777
  source 1..80: mol_type = other DNA

SEQ ID NO: 195508 - DNA, 80 bp, synthetic construct; identical to SEQ ID NO: 10778
  source 1..80: mol_type = other DNA

SEQ ID NO: 195509 - DNA, 80 bp, synthetic construct; identical to SEQ ID NO: 10779
  source 1..80: mol_type = other DNA

SEQ ID NO: 195510 - DNA, 80 bp, synthetic construct; identical to SEQ ID NO: 10780
  source 1..80: mol_type = other DNA

SEQ ID NO: 195511 - DNA, 80 bp, synthetic construct; identical to SEQ ID NO: 10781
  source 1..80: mol_type = other DNA

SEQ ID NO: 195512 - DNA, 80 bp, synthetic construct; identical to SEQ ID NO: 10782
  source 1..80: mol_type = other DNA

SEQ ID NO: 195513 - DNA, 80 bp, synthetic construct; identical to SEQ ID NO: 10783
  source 1..80: mol_type = other DNA

SEQ ID NO: 195514 - DNA, 80 bp, synthetic construct; identical to SEQ ID NO: 10784
  source 1..80: mol_type = other DNA

SEQ ID NO: 195515 - DNA, 80 bp, synthetic construct; identical to SEQ ID NO: 10785
  source 1..80: mol_type = other DNA

SEQ ID NO: 195516 - DNA, 80 bp, synthetic construct; identical to SEQ ID NO: 10786
  source 1..80: mol_type = other DNA

SEQ ID NO: 195517 - DNA, 80 bp, synthetic construct; identical to SEQ ID NO: 10787
  source 1..80: mol_type = other DNA

SEQ ID NO: 195518 - DNA, 80 bp, synthetic construct; identical to SEQ ID NO: 10788
  source 1..80: mol_type = other DNA

SEQ ID NO: 195519 - DNA, 80 bp, synthetic construct; identical to SEQ ID NO: 10789
  source 1..80: mol_type = other DNA

SEQ ID NO: 195520 - DNA, 80 bp, synthetic construct; identical to SEQ ID NO: 10790
  source 1..80: mol_type = other DNA

SEQ ID NO: 195521 - DNA, 80 bp, synthetic construct; identical to SEQ ID NO: 10791
  source 1..80: mol_type = other DNA

SEQ ID NO: 195522 - DNA, 80 bp, synthetic construct; identical to SEQ ID NO: 10792
  source 1..80: mol_type = other DNA

SEQ ID NO: 195523 - DNA, 80 bp, synthetic construct; identical to SEQ ID NO: 10793
  source 1..80: mol_type = other DNA

SEQ ID NO: 195524 - DNA, 80 bp, synthetic construct; identical to SEQ ID NO: 10794
  source 1..80: mol_type = other DNA

SEQ ID NO: 195525 - DNA, 80 bp, synthetic construct; identical to SEQ ID NO: 10795
  source 1..80: mol_type = other DNA

SEQ ID NO: 195526 - DNA, 80 bp, synthetic construct; identical to SEQ ID NO: 10796
  source 1..80: mol_type = other DNA

SEQ ID NO: 195527 - DNA, 80 bp, synthetic construct; identical to SEQ ID NO: 10797
  source 1..80: mol_type = other DNA

SEQ ID NO: 195528 - DNA, 80 bp, synthetic construct; identical to SEQ ID NO: 10798
  source 1..80: mol_type = other DNA

SEQ ID NO: 195529 - DNA, 80 bp, synthetic construct; identical to SEQ ID NO: 10799
  source 1..80: mol_type = other DNA

SEQ ID NO: 195530 - DNA, 80 bp, synthetic construct; identical to SEQ ID NO: 10800
  source 1..80: mol_type = other DNA

SEQ ID NO: 195531 - DNA, 80 bp, synthetic construct; identical to SEQ ID NO: 10801
  source 1..80: mol_type = other DNA

SEQ ID NO: 195532 - DNA, 80 bp, synthetic construct; identical to SEQ ID NO: 10802
  source 1..80: mol_type = other DNA

SEQ ID NO: 195533 - DNA, 80 bp, synthetic construct; identical to SEQ ID NO: 10803
  source 1..80: mol_type = other DNA

SEQ ID NO: 195534 - DNA, 80 bp, synthetic construct; identical to SEQ ID NO: 10804
  source 1..80: mol_type = other DNA

SEQ ID NO: 195535 - DNA, 80 bp, synthetic construct; identical to SEQ ID NO: 10805
  source 1..80: mol_type = other DNA

SEQ ID NO: 195536 - DNA, 80 bp, synthetic construct; identical to SEQ ID NO: 10806
  source 1..80: mol_type = other DNA

SEQ ID NO: 195537 - DNA, 80 bp, synthetic construct; identical to SEQ ID NO: 10807
  source 1..80: mol_type = other DNA

SEQ ID NO: 195538 - DNA, 80 bp, synthetic construct; identical to SEQ ID NO: 10808
  source 1..80: mol_type = other DNA

SEQ ID NO: 195539 - DNA, 80 bp, synthetic construct; identical to SEQ ID NO: 10809
  source 1..80: mol_type = other DNA

SEQ ID NO: 195540 - DNA, 80 bp, synthetic construct; identical to SEQ ID NO: 10810
  source 1..80: mol_type = other DNA

SEQ ID NO: 195541 - DNA, 80 bp, synthetic construct; identical to SEQ ID NO: 10811
  source 1..80: mol_type = other DNA

SEQ ID NO: 195542 - DNA, 80 bp, synthetic construct; identical to SEQ ID NO: 10812
  source 1..80: mol_type = other DNA

SEQ ID NO: 195543 - DNA, 80 bp, synthetic construct; identical to SEQ ID NO: 10813
  source 1..80: mol_type = other DNA

SEQ ID NO: 195544 - DNA, 80 bp, synthetic construct; identical to SEQ ID NO: 10814
  source 1..80: mol_type = other DNA

SEQ ID NO: 195545 - DNA, 80 bp, synthetic construct; identical to SEQ ID NO: 10815
  source 1..80: mol_type = other DNA

SEQ ID NO: 195546 - DNA, 80 bp, synthetic construct; identical to SEQ ID NO: 10816
  source 1..80: mol_type = other DNA

SEQ ID NO: 195547 - DNA, 80 bp, synthetic construct; identical to SEQ ID NO: 10817
  source 1..80: mol_type = other DNA

SEQ ID NO: 195548 - DNA, 80 bp, synthetic construct; identical to SEQ ID NO: 10818
  source 1..80: mol_type = other DNA

SEQ ID NO: 195549 - DNA, 80 bp, synthetic construct; identical to SEQ ID NO: 10819
  source 1..80: mol_type = other DNA

SEQ ID NO: 195550 - DNA, 80 bp, synthetic construct; identical to SEQ ID NO: 10820
  source 1..80: mol_type = other DNA

SEQ ID NO: 195551 - DNA, 80 bp, synthetic construct; identical to SEQ ID NO: 10821
  source 1..80: mol_type = other DNA

SEQ ID NO: 195552 - DNA, 80 bp, synthetic construct; identical to SEQ ID NO: 10822
  source 1..80: mol_type = other DNA

SEQ ID NO: 195553 - DNA, 80 bp, synthetic construct; identical to SEQ ID NO: 10823
  source 1..80: mol_type = other DNA

SEQ ID NO: 195554 - DNA, 80 bp, synthetic construct; identical to SEQ ID NO: 10824
  source 1..80: mol_type = other DNA

SEQ ID NO: 195555 - DNA, 80 bp, synthetic construct; identical to SEQ ID NO: 10825
  source 1..80: mol_type = other DNA

SEQ ID NO: 195556 - DNA, 80 bp, synthetic construct; identical to SEQ ID NO: 10826
  source 1..80: mol_type = other DNA

SEQ ID NO: 195557 - DNA, 80 bp, synthetic construct; identical to SEQ ID NO: 10827
  source 1..80: mol_type = other DNA

SEQ ID NO: 195558 - DNA, 80 bp, synthetic construct; identical to SEQ ID NO: 10828
  source 1..80: mol_type = other DNA

SEQ ID NO: 195559 - DNA, 80 bp, synthetic construct; identical to SEQ ID NO: 10829
  source 1..80: mol_type = other DNA

SEQ ID NO: 195560 - DNA, 80 bp, synthetic construct; identical to SEQ ID NO: 10830
  source 1..80: mol_type = other DNA

SEQ ID NO: 195561 - DNA, 80 bp, synthetic construct; identical to SEQ ID NO: 10831
  source 1..80: mol_type = other DNA

SEQ ID NO: 195562 - DNA, 80 bp, synthetic construct; identical to SEQ ID NO: 10832
  source 1..80: mol_type = other DNA

SEQ ID NO: 195563 - DNA, 80 bp, synthetic construct; identical to SEQ ID NO: 10833
  source 1..80: mol_type = other DNA

SEQ ID NO: 195564 - DNA, 80 bp, synthetic construct; identical to SEQ ID NO: 10834
  source 1..80: mol_type = other DNA

SEQ ID NO: 195565 - DNA, 80 bp, synthetic construct; identical to SEQ ID NO: 10835
  source 1..80: mol_type = other DNA

SEQ ID NO: 195566 - DNA, 80 bp, synthetic construct; identical to SEQ ID NO: 10836
  source 1..80: mol_type = other DNA

SEQ ID NO: 195567 - DNA, 80 bp, synthetic construct; identical to SEQ ID NO: 10837
  source 1..80: mol_type = other DNA

SEQ ID NO: 195568 - DNA, 80 bp, synthetic construct; identical to SEQ ID NO: 10838
  source 1..80: mol_type = other DNA

SEQ ID NO: 195569 - DNA, 80 bp, synthetic construct; identical to SEQ ID NO: 10839
  source 1..80: mol_type = other DNA

SEQ ID NO: 195570 - DNA, 80 bp, synthetic construct; identical to SEQ ID NO: 10840
  source 1..80: mol_type = other DNA

SEQ ID NO: 195571 - DNA, 80 bp, synthetic construct; identical to SEQ ID NO: 10841
  source 1..80: mol_type = other DNA

SEQ ID NO: 195572 - DNA, 80 bp, synthetic construct; identical to SEQ ID NO: 10842
  source 1..80: mol_type = other DNA

SEQ ID NO: 195573 - DNA, 80 bp, synthetic construct; identical to SEQ ID NO: 10843
  source 1..80: mol_type = other DNA

SEQ ID NO: 195574 - DNA, 80 bp, synthetic construct; identical to SEQ ID NO: 10844
  source 1..80: mol_type = other DNA

SEQ ID NO: 195575 - DNA, 80 bp, synthetic construct; identical to SEQ ID NO: 10845
  source 1..80: mol_type = other DNA

SEQ ID NO: 195576 - DNA, 80 bp, synthetic construct; identical to SEQ ID NO: 10846
  source 1..80: mol_type = other DNA

SEQ ID NO: 195577 - DNA, 80 bp, synthetic construct; identical to SEQ ID NO: 10847
  source 1..80: mol_type = other DNA

SEQ ID NO: 195578 - DNA, 80 bp, synthetic construct; identical to SEQ ID NO: 10848
  source 1..80: mol_type = other DNA

SEQ ID NO: 195579 - DNA, 80 bp, synthetic construct; identical to SEQ ID NO: 10849
  source 1..80: mol_type = other DNA

SEQ ID NO: 195580 - DNA, 80 bp, synthetic construct; identical to SEQ ID NO: 10850
  source 1..80: mol_type = other DNA

SEQ ID NO: 195581 - DNA, 80 bp, synthetic construct; identical to SEQ ID NO: 10851
  source 1..80: mol_type = other DNA

SEQ ID NO: 195582 - DNA, 80 bp, synthetic construct; identical to SEQ ID NO: 10852
  source 1..80: mol_type = other DNA

SEQ ID NO: 195583 - DNA, 80 bp, synthetic construct; identical to SEQ ID NO: 10853
  source 1..80: mol_type = other DNA

SEQ ID NO: 195584 - DNA, 80 bp, synthetic construct; identical to SEQ ID NO: 10854
  source 1..80: mol_type = other DNA

SEQ ID NO: 195585 - DNA, 80 bp, synthetic construct; identical to SEQ ID NO: 10855
  source 1..80: mol_type = other DNA

SEQ ID NO: 195586 - DNA, 80 bp, synthetic construct; identical to SEQ ID NO: 10856
  source 1..80: mol_type = other DNA

SEQ ID NO: 195587 - DNA, 80 bp, synthetic construct; identical to SEQ ID NO: 10857
  source 1..80: mol_type = other DNA

SEQ ID NO: 195588 - DNA, 80 bp, synthetic construct; identical to SEQ ID NO: 10858
  source 1..80: mol_type = other DNA

SEQ ID NO: 195589 - DNA, 80 bp, synthetic construct; identical to SEQ ID NO: 10859
  source 1..80: mol_type = other DNA

SEQ ID NO: 195590 - DNA, 80 bp, synthetic construct; identical to SEQ ID NO: 10860
  source 1..80: mol_type = other DNA

SEQ ID NO: 195591 - DNA, 80 bp, synthetic construct; identical to SEQ ID NO: 10861
  source 1..80: mol_type = other DNA

SEQ ID NO: 195592 - DNA, 80 bp, synthetic construct; identical to SEQ ID NO: 10862
  source 1..80: mol_type = other DNA

SEQ ID NO: 195593 - DNA, 80 bp, synthetic construct; identical to SEQ ID NO: 10863
  source 1..80: mol_type = other DNA

SEQ ID NO: 195594 - DNA, 80 bp, synthetic construct; identical to SEQ ID NO: 10864
  source 1..80: mol_type = other DNA

SEQ ID NO: 195595 - DNA, 80 bp, synthetic construct; identical to SEQ ID NO: 10865
  source 1..80: mol_type = other DNA

SEQ ID NO: 195596 - DNA, 80 bp, synthetic construct; identical to SEQ ID NO: 10866
  source 1..80: mol_type = other DNA

SEQ ID NO: 195597 - DNA, 80 bp, synthetic construct; identical to SEQ ID NO: 10867
  source 1..80: mol_type = other DNA

SEQ ID NO: 195598 - DNA, 80 bp, synthetic construct; identical to SEQ ID NO: 10868
  source 1..80: mol_type = other DNA

SEQ ID NO: 195599 - DNA, 80 bp, synthetic construct; identical to SEQ ID NO: 10869
  source 1..80: mol_type = other DNA

SEQ ID NO: 195600 - DNA, 80 bp, synthetic construct; identical to SEQ ID NO: 10870
  source 1..80: mol_type = other DNA

SEQ ID NO: 195601 - DNA, 80 bp, synthetic construct; identical to SEQ ID NO: 10871
  source 1..80: mol_type = other DNA

SEQ ID NO: 195602 - DNA, 80 bp, synthetic construct; identical to SEQ ID NO: 10872
  source 1..80: mol_type = other DNA

SEQ ID NO: 195603 - DNA, 80 bp, synthetic construct; identical to SEQ ID NO: 10873
  source 1..80: mol_type = other DNA

SEQ ID NO: 195604 - DNA, 80 bp, synthetic construct; identical to SEQ ID NO: 10874
  source 1..80: mol_type = other DNA

SEQ ID NO: 195605 - DNA, 80 bp, synthetic construct; identical to SEQ ID NO: 10875
  source 1..80: mol_type = other DNA

SEQ ID NO: 195606 - DNA, 80 bp, synthetic construct; identical to SEQ ID NO: 10876
  source 1..80: mol_type = other DNA

SEQ ID NO: 195607 - DNA, 80 bp, synthetic construct; identical to SEQ ID NO: 10877
  source 1..80: mol_type = other DNA

SEQ ID NO: 195608 - DNA, 80 bp, synthetic construct; identical to SEQ ID NO: 10878
  source 1..80: mol_type = other DNA

SEQ ID NO: 195609 - DNA, 80 bp, synthetic construct; identical to SEQ ID NO: 10879
  source 1..80: mol_type = other DNA

SEQ ID NO: 195610 - DNA, 80 bp, synthetic construct; identical to SEQ ID NO: 10880
  source 1..80: mol_type = other DNA

SEQ ID NO: 195611 - DNA, 80 bp, synthetic construct; identical to SEQ ID NO: 10881
  source 1..80: mol_type = other DNA

SEQ ID NO: 195612 - DNA, 80 bp, synthetic construct; identical to SEQ ID NO: 10882
  source 1..80: mol_type = other DNA

SEQ ID NO: 195613 - DNA, 80 bp, synthetic construct; identical to SEQ ID NO: 10883
  source 1..80: mol_type = other DNA

SEQ ID NO: 195614 - DNA, 80 bp, synthetic construct; identical to SEQ ID NO: 10884
  source 1..80: mol_type = other DNA

SEQ ID NO: 195615 - DNA, 80 bp, synthetic construct; identical to SEQ ID NO: 10885
  source 1..80: mol_type = other DNA

SEQ ID NO: 195616 - DNA, 80 bp, synthetic construct; identical to SEQ ID NO: 10886
  source 1..80: mol_type = other DNA

SEQ ID NO: 195617 - DNA, 80 bp, synthetic construct; identical to SEQ ID NO: 10887
  source 1..80: mol_type = other DNA

SEQ ID NO: 195618 - DNA, 80 bp, synthetic construct; identical to SEQ ID NO: 10888
  source 1..80: mol_type = other DNA

SEQ ID NO: 195619 - DNA, 80 bp, synthetic construct; identical to SEQ ID NO: 10889
  source 1..80: mol_type = other DNA

SEQ ID NO: 195620 - DNA, 80 bp, synthetic construct; identical to SEQ ID NO: 10890
  source 1..80: mol_type = other DNA

SEQ ID NO: 195621 - DNA, 80 bp, synthetic construct; identical to SEQ ID NO: 10891
  source 1..80: mol_type = other DNA

SEQ ID NO: 195622 - DNA, 80 bp, synthetic construct; identical to SEQ ID NO: 10892
  source 1..80: mol_type = other DNA

SEQ ID NO: 195623 - DNA, 80 bp, synthetic construct; identical to SEQ ID NO: 10893
  source 1..80: mol_type = other DNA

SEQ ID NO: 195624 - DNA, 80 bp, synthetic construct; identical to SEQ ID NO: 10894
  source 1..80: mol_type = other DNA

SEQ ID NO: 195625 - DNA, 80 bp, synthetic construct; identical to SEQ ID NO: 10895
  source 1..80: mol_type = other DNA

SEQ ID NO: 195626 - DNA, 80 bp, synthetic construct; identical to SEQ ID NO: 10896
  source 1..80: mol_type = other DNA

SEQ ID NO: 195627 - DNA, 80 bp, synthetic construct; identical to SEQ ID NO: 10897
  source 1..80: mol_type = other DNA

SEQ ID NO: 195628 - DNA, 80 bp, synthetic construct; identical to SEQ ID NO: 10898
  source 1..80: mol_type = other DNA

SEQ ID NO: 195629 - DNA, 80 bp, synthetic construct; identical to SEQ ID NO: 10899
  source 1..80: mol_type = other DNA

SEQ ID NO: 195630 - DNA, 80 bp, synthetic construct; identical to SEQ ID NO: 10900
  source 1..80: mol_type = other DNA

SEQ ID NO: 195631 - DNA, 80 bp, synthetic construct; identical to SEQ ID NO: 10901
  source 1..80: mol_type = other DNA

SEQ ID NO: 195632 - DNA, 80 bp, synthetic construct; identical to SEQ ID NO: 10902
  source 1..80: mol_type = other DNA

SEQ ID NO: 195633 - DNA, 80 bp, synthetic construct; identical to SEQ ID NO: 10903
  source 1..80: mol_type = other DNA

SEQ ID NO: 195634 - DNA, 80 bp, synthetic construct; identical to SEQ ID NO: 10904
  source 1..80: mol_type = other DNA

SEQ ID NO: 195635 - DNA, 80 bp, synthetic construct; identical to SEQ ID NO: 10905
  source 1..80: mol_type = other DNA

SEQ ID NO: 195636 - DNA, 80 bp, synthetic construct; identical to SEQ ID NO: 10906
  source 1..80: mol_type = other DNA

SEQ ID NO: 195637 - DNA, 80 bp, synthetic construct; identical to SEQ ID NO: 10907
  source 1..80: mol_type = other DNA

SEQ ID NO: 195638 - DNA, 80 bp, synthetic construct; identical to SEQ ID NO: 10908
  source 1..80: mol_type = other DNA

SEQ ID NO: 195639 - DNA, 80 bp, synthetic construct; identical to SEQ ID NO: 10909
  source 1..80: mol_type = other DNA

SEQ ID NO: 195640 - DNA, 80 bp, synthetic construct; identical to SEQ ID NO: 10910
  source 1..80: mol_type = other DNA

SEQ ID NO: 195641 - DNA, 80 bp, synthetic construct; identical to SEQ ID NO: 10911
  source 1..80: mol_type = other DNA

SEQ ID NO: 195642 - DNA, 80 bp, synthetic construct; identical to SEQ ID NO: 10912
  source 1..80: mol_type = other DNA

SEQ ID NO: 195643 - DNA, 80 bp, synthetic construct; identical to SEQ ID NO: 10913
  source 1..80: mol_type = other DNA

SEQ ID NO: 195644 - DNA, 80 bp, synthetic construct; identical to SEQ ID NO: 10914
  source 1..80: mol_type = other DNA

SEQ ID NO: 195645 - DNA, 80 bp, synthetic construct; identical to SEQ ID NO: 10915
  source 1..80: mol_type = other DNA

SEQ ID NO: 195646 - DNA, 80 bp, synthetic construct; identical to SEQ ID NO: 10916
  source 1..80: mol_type = other DNA

SEQ ID NO: 195647 - DNA, 80 bp, synthetic construct; identical to SEQ ID NO: 10917
  source 1..80: mol_type = other DNA

SEQ ID NO: 195648 - DNA, 80 bp, synthetic construct; identical to SEQ ID NO: 10918
  source 1..80: mol_type = other DNA

SEQ ID NO: 195649 - DNA, 80 bp, synthetic construct; identical to SEQ ID NO: 10919
  source 1..80: mol_type = other DNA

SEQ ID NO: 195650 - DNA, 80 bp, synthetic construct; identical to SEQ ID NO: 10920
  source 1..80: mol_type = other DNA

SEQ ID NO: 195651 - DNA, 80 bp, synthetic construct; identical to SEQ ID NO: 10921
  source 1..80: mol_type = other DNA

SEQ ID NO: 195652 - DNA, 80 bp, synthetic construct; identical to SEQ ID NO: 10922
  source 1..80: mol_type = other DNA

SEQ ID NO: 195653 - DNA, 80 bp, synthetic construct; identical to SEQ ID NO: 10923
  source 1..80: mol_type = other DNA

SEQ ID NO: 195654 - DNA, 80 bp, synthetic construct; identical to SEQ ID NO: 10924
  source 1..80: mol_type = other DNA

SEQ ID NO: 195655 - DNA, 80 bp, synthetic construct; identical to SEQ ID NO: 10925
  source 1..80: mol_type = other DNA

SEQ ID NO: 195656 - DNA, 80 bp, synthetic construct; identical to SEQ ID NO: 10926
  source 1..80: mol_type = other DNA

SEQ ID NO: 195657 - DNA, 80 bp, synthetic construct; identical to SEQ ID NO: 10927
  source 1..80: mol_type = other DNA

SEQ ID NO: 195658 - DNA, 80 bp, synthetic construct; identical to SEQ ID NO: 10928
  source 1..80: mol_type = other DNA

SEQ ID NO: 195659 - DNA, 80 bp, synthetic construct; identical to SEQ ID NO: 10929
  source 1..80: mol_type = other DNA

SEQ ID NO: 195660 - DNA, 80 bp, synthetic construct; identical to SEQ ID NO: 10930
  source 1..80: mol_type = other DNA

SEQ ID NO: 195661 - DNA, 80 bp, synthetic construct; identical to SEQ ID NO: 10931
  source 1..80: mol_type = other DNA

SEQ ID NO: 195662 - DNA, 80 bp, synthetic construct; identical to SEQ ID NO: 10932
  source 1..80: mol_type = other DNA

SEQ ID NO: 195663 - DNA, 80 bp, synthetic construct; identical to SEQ ID NO: 10933
  source 1..80: mol_type = other DNA

SEQ ID NO: 195664 - DNA, 80 bp, synthetic construct; identical to SEQ ID NO: 10934
  source 1..80: mol_type = other DNA

SEQ ID NO: 195665 - DNA, 80 bp, synthetic construct; identical to SEQ ID NO: 10935
  source 1..80: mol_type = other DNA

SEQ ID NO: 195666 - DNA, 80 bp, synthetic construct; identical to SEQ ID NO: 10936
  source 1..80: mol_type = other DNA

SEQ ID NO: 195667 - DNA, 80 bp, synthetic construct; identical to SEQ ID NO: 10937
  source 1..80: mol_type = other DNA

SEQ ID NO: 195668 - DNA, 80 bp, synthetic construct; identical to SEQ ID NO: 10938
  source 1..80: mol_type = other DNA

SEQ ID NO: 195669 - DNA, 80 bp, synthetic construct; identical to SEQ ID NO: 10939
  source 1..80: mol_type = other DNA

SEQ ID NO: 195670 - DNA, 80 bp, synthetic construct; identical to SEQ ID NO: 10940
  source 1..80: mol_type = other DNA

SEQ ID NO: 195671 - DNA, 80 bp, synthetic construct; identical to SEQ ID NO: 10941
  source 1..80: mol_type = other DNA

SEQ ID NO: 195672 - DNA, 80 bp, synthetic construct; identical to SEQ ID NO: 10942
  source 1..80: mol_type = other DNA

SEQ ID NO: 195673 - DNA, 80 bp, synthetic construct; identical to SEQ ID NO: 10943
  source 1..80: mol_type = other DNA

SEQ ID NO: 195674 - DNA, 80 bp, synthetic construct; identical to SEQ ID NO: 10944
  source 1..80: mol_type = other DNA

SEQ ID NO: 195675 - DNA, 80 bp, synthetic construct; identical to SEQ ID NO: 10945
  source 1..80: mol_type = other DNA

SEQ ID NO: 195676 - DNA, 80 bp, synthetic construct; identical to SEQ ID NO: 10946
  source 1..80: mol_type = other DNA

SEQ ID NO: 195677 - DNA, 80 bp, synthetic construct; identical to SEQ ID NO: 10947
  source 1..80: mol_type = other DNA

SEQ ID NO: 195678 - DNA, 80 bp, synthetic construct; identical to SEQ ID NO: 10948
  source 1..80: mol_type = other DNA

SEQ ID NO: 195679 - DNA, 80 bp, synthetic construct; identical to SEQ ID NO: 10949
  source 1..80: mol_type = other DNA

SEQ ID NO: 195680 - DNA, 80 bp, synthetic construct; identical to SEQ ID NO: 10950
  source 1..80: mol_type = other DNA

SEQ ID NO: 195681 - DNA, 80 bp, synthetic construct; identical to SEQ ID NO: 10951
  source 1..80: mol_type = other DNA

SEQ ID NO: 195682 - DNA, 80 bp, synthetic construct; identical to SEQ ID NO: 10952
  source 1..80: mol_type = other DNA

SEQ ID NO: 195683 - DNA, 80 bp, synthetic construct; identical to SEQ ID NO: 10953
  source 1..80: mol_type = other DNA

SEQ ID NO: 195684 - DNA, 80 bp, synthetic construct; identical to SEQ ID NO: 10954
  source 1..80: mol_type = other DNA

SEQ ID NO: 195685 - DNA, 80 bp, synthetic construct; identical to SEQ ID NO: 10955
  source 1..80: mol_type = other DNA

SEQ ID NO: 195686 - DNA, 80 bp, synthetic construct; identical to SEQ ID NO: 10956
  source 1..80: mol_type = other DNA

SEQ ID NO: 195687 - DNA, 80 bp, synthetic construct; identical to SEQ ID NO: 10957
  source 1..80: mol_type = other DNA

SEQ ID NO: 195688 - DNA, 80 bp, synthetic construct; identical to SEQ ID NO: 10958
  source 1..80: mol_type = other DNA

SEQ ID NO: 195689 - DNA, 80 bp, synthetic construct; identical to SEQ ID NO: 10959
  source 1..80: mol_type = other DNA

SEQ ID NO: 195690 - DNA, 80 bp, synthetic construct; identical to SEQ ID NO: 10960
  source 1..80: mol_type = other DNA

SEQ ID NO: 195691 - DNA, 80 bp, synthetic construct; identical to SEQ ID NO: 10961
  source 1..80: mol_type = other DNA

SEQ ID NO: 195692 - DNA, 80 bp, synthetic construct; identical to SEQ ID NO: 10962
  source 1..80: mol_type = other DNA

SEQ ID NO: 195693 - DNA, 80 bp, synthetic construct; identical to SEQ ID NO: 10963
  source 1..80: mol_type = other DNA

SEQ ID NO: 195694 - DNA, 80 bp, synthetic construct; identical to SEQ ID NO: 10964
  source 1..80: mol_type = other DNA

SEQ ID NO: 195695 - DNA, 80 bp, synthetic construct; identical to SEQ ID NO: 10965
  source 1..80: mol_type = other DNA

SEQ ID NO: 195696 - DNA, 80 bp, synthetic construct; identical to SEQ ID NO: 10966
  source 1..80: mol_type = other DNA

SEQ ID NO: 195697 - DNA, 80 bp, synthetic construct; identical to SEQ ID NO: 10967
  source 1..80: mol_type = other DNA

SEQ ID NO: 195698 - DNA, 80 bp, synthetic construct; identical to SEQ ID NO: 10968
  source 1..80: mol_type = other DNA

SEQ ID NO: 195699 - DNA, 80 bp, synthetic construct; identical to SEQ ID NO: 10969
  source 1..80: mol_type = other DNA

SEQ ID NO: 195700 - DNA, 80 bp, synthetic construct; identical to SEQ ID NO: 10970
  source 1..80: mol_type = other DNA

SEQ ID NO: 195701 - DNA, 80 bp, synthetic construct; identical to SEQ ID NO: 10971
  source 1..80: mol_type = other DNA

SEQ ID NO: 195702 - DNA, 80 bp, synthetic construct; identical to SEQ ID NO: 10972
  source 1..80: mol_type = other DNA

SEQ ID NO: 195703 - DNA, 80 bp, synthetic construct; identical to SEQ ID NO: 10973
  source 1..80: mol_type = other DNA

SEQ ID NO: 195704 - DNA, 80 bp, synthetic construct; identical to SEQ ID NO: 10974
  source 1..80: mol_type = other DNA

SEQ ID NO: 195705 - DNA, 80 bp, synthetic construct; identical to SEQ ID NO: 10975
  source 1..80: mol_type = other DNA

SEQ ID NO: 195706 - DNA, 80 bp, synthetic construct; identical to SEQ ID NO: 10976
  source 1..80: mol_type = other DNA

SEQ ID NO: 195707 - DNA, 80 bp, synthetic construct; identical to SEQ ID NO: 10977
  source 1..80: mol_type = other DNA

SEQ ID NO: 195708 - DNA, 80 bp, synthetic construct; identical to SEQ ID NO: 10978
  source 1..80: mol_type = other DNA

SEQ ID NO: 195709 - DNA, 80 bp, synthetic construct; identical to SEQ ID NO: 10979
  source 1..80: mol_type = other DNA

SEQ ID NO: 195710 - DNA, 80 bp, synthetic construct; identical to SEQ ID NO: 10980
  source 1..80: mol_type = other DNA

SEQ ID NO: 195711 - DNA, 80 bp, synthetic construct; identical to SEQ ID NO: 10981
  source 1..80: mol_type = other DNA

SEQ ID NO: 195712 - DNA, 80 bp, synthetic construct; identical to SEQ ID NO: 10982
  source 1..80: mol_type = other DNA

SEQ ID NO: 195713 - DNA, 80 bp, synthetic construct; identical to SEQ ID NO: 10983
  source 1..80: mol_type = other DNA

SEQ ID NO: 195714 - DNA, 80 bp, synthetic construct; identical to SEQ ID NO: 10984
  source 1..80: mol_type = other DNA

SEQ ID NO: 195715 - DNA, 80 bp, synthetic construct; identical to SEQ ID NO: 10985
  source 1..80: mol_type = other DNA

SEQ ID NO: 195716 - DNA, 80 bp, synthetic construct; identical to SEQ ID NO: 10986
  source 1..80: mol_type = other DNA

SEQ ID NO: 195717 - DNA, 80 bp, synthetic construct; identical to SEQ ID NO: 10987
  source 1..80: mol_type = other DNA

SEQ ID NO: 195718 - DNA, 80 bp, synthetic construct; identical to SEQ ID NO: 10988
  source 1..80: mol_type = other DNA

SEQ ID NO: 195719 - DNA, 80 bp, synthetic construct; identical to SEQ ID NO: 10989
  source 1..80: mol_type = other DNA

SEQ ID NO: 195720 - DNA, 80 bp, synthetic construct; identical to SEQ ID NO: 10990
  source 1..80: mol_type = other DNA

SEQ ID NO: 195721 - DNA, 80 bp, synthetic construct; identical to SEQ ID NO: 10991
  source 1..80: mol_type = other DNA

SEQ ID NO: 195722 - DNA, 80 bp, synthetic construct; identical to SEQ ID NO: 10992
  source 1..80: mol_type = other DNA

SEQ ID NO: 195723 - DNA, 80 bp, synthetic construct; identical to SEQ ID NO: 10993
  source 1..80: mol_type = other DNA

SEQ ID NO: 195724 - DNA, 80 bp, synthetic construct; identical to SEQ ID NO: 10994
  source 1..80: mol_type = other DNA

SEQ ID NO: 195725 - DNA, 80 bp, synthetic construct; identical to SEQ ID NO: 10995
  source 1..80: mol_type = other DNA

SEQ ID NO: 195726 - DNA, 80 bp, synthetic construct; identical to SEQ ID NO: 10996
  source 1..80: mol_type = other DNA

SEQ ID NO: 195727 - DNA, 80 bp, synthetic construct; identical to SEQ ID NO: 10997
  source 1..80: mol_type = other DNA

SEQ ID NO: 195728 - DNA, 80 bp, synthetic construct; identical to SEQ ID NO: 10998
  source 1..80: mol_type = other DNA

SEQ ID NO: 195729 - DNA, 80 bp, synthetic construct; identical to SEQ ID NO: 10999
  source 1..80: mol_type = other DNA

SEQ ID NO: 195730 - DNA, 80 bp, synthetic construct; identical to SEQ ID NO: 11000
  source 1..80: mol_type = other DNA

SEQ ID NO: 195731 - DNA, 80 bp, synthetic construct; identical to SEQ ID NO: 11001
  source 1..80: mol_type = other DNA

SEQ ID NO: 195732 - DNA, 80 bp, synthetic construct; identical to SEQ ID NO: 11002
  source 1..80: mol_type = other DNA

SEQ ID NO: 195733 - DNA, 80 bp, synthetic construct; identical to SEQ ID NO: 11003
  source 1..80: mol_type = other DNA

SEQ ID NO: 195734 - DNA, 80 bp, synthetic construct; identical to SEQ ID NO: 11004
  source 1..80: mol_type = other DNA

SEQ ID NO: 195735 - DNA, 80 bp, synthetic construct; identical to SEQ ID NO: 11005
  source 1..80: mol_type = other DNA

SEQ ID NO: 195736 - DNA, 80 bp, synthetic construct; identical to SEQ ID NO: 11006
  source 1..80: mol_type = other DNA

SEQ ID NO: 195737 - DNA, 80 bp, synthetic construct; identical to SEQ ID NO: 11007
  source 1..80: mol_type = other DNA

SEQ ID NO: 195738 - DNA, 80 bp, synthetic construct; identical to SEQ ID NO: 11008
  source 1..80: mol_type = other DNA

SEQ ID NO: 195739 - DNA, 80 bp, synthetic construct; identical to SEQ ID NO: 11009
  source 1..80: mol_type = other DNA

SEQ ID NO: 195740 - DNA, 80 bp, synthetic construct; identical to SEQ ID NO: 11010
  source 1..80: mol_type = other DNA

SEQ ID NO: 195741 - DNA, 80 bp, synthetic construct; identical to SEQ ID NO: 11011
  source 1..80: mol_type = other DNA

SEQ ID NO: 195742 - DNA, 80 bp, synthetic construct; identical to SEQ ID NO: 11012
  source 1..80: mol_type = other DNA

SEQ ID NO: 195743 - DNA, 80 bp, synthetic construct; identical to SEQ ID NO: 11013
  source 1..80: mol_type = other DNA

SEQ ID NO: 195744 - DNA, 80 bp, synthetic construct; identical to SEQ ID NO: 11014
  source 1..80: mol_type = other DNA

SEQ ID NO: 195745 - DNA, 80 bp, synthetic construct; identical to SEQ ID NO: 11015
  source 1..80: mol_type = other DNA

SEQ ID NO: 195746 - DNA, 80 bp, synthetic construct; identical to SEQ ID NO: 11016
  source 1..80: mol_type = other DNA

SEQ ID NO: 195747 - DNA, 80 bp, synthetic construct; identical to SEQ ID NO: 11017
  source 1..80: mol_type = other DNA

SEQ ID NO: 195748 - DNA, 80 bp, synthetic construct; identical to SEQ ID NO: 11018
  source 1..80: mol_type = other DNA

SEQ ID NO: 195749 - DNA, 80 bp, synthetic construct; identical to SEQ ID NO: 11019
  source 1..80: mol_type = other DNA

SEQ ID NO: 195750 - DNA, 80 bp, synthetic construct; identical to SEQ ID NO: 11020
  source 1..80: mol_type = other DNA

SEQ ID NO: 195751 - DNA, 80 bp, synthetic construct; identical to SEQ ID NO: 11021
  source 1..80: mol_type = other DNA

SEQ ID NO: 195752 - DNA, 80 bp, synthetic construct; identical to SEQ ID NO: 11022
  source 1..80: mol_type = other DNA

SEQ ID NO: 195753 - DNA, 80 bp, synthetic construct; identical to SEQ ID NO: 11023
  source 1..80: mol_type = other DNA

SEQ ID NO: 195754 - DNA, 80 bp, synthetic construct; identical to SEQ ID NO: 11024
  source 1..80: mol_type = other DNA

SEQ ID NO: 195755 - DNA, 80 bp, synthetic construct; identical to SEQ ID NO: 11025
  source 1..80: mol_type = other DNA

SEQ ID NO: 195756 - DNA, 80 bp, synthetic construct; identical to SEQ ID NO: 11026
  source 1..80: mol_type = other DNA

SEQ ID NO: 195757 - DNA, 80 bp, synthetic construct; identical to SEQ ID NO: 11027
  source 1..80: mol_type = other DNA

SEQ ID NO: 195758 - DNA, 80 bp, synthetic construct; identical to SEQ ID NO: 11028
  source 1..80: mol_type = other DNA

SEQ ID NO: 195759 - DNA, 80 bp, synthetic construct; identical to SEQ ID NO: 11029
  source 1..80: mol_type = other DNA

SEQ ID NO: 195760 - DNA, 80 bp, synthetic construct; identical to SEQ ID NO: 11030
  source 1..80: mol_type = other DNA

SEQ ID NO: 195761 - DNA, 80 bp, synthetic construct; identical to SEQ ID NO: 11031
  source 1..80: mol_type = other DNA

SEQ ID NO: 195762 - DNA, 80 bp, synthetic construct; identical to SEQ ID NO: 11032
  source 1..80: mol_type = other DNA

SEQ ID NO: 195763 - DNA, 80 bp, synthetic construct; identical to SEQ ID NO: 11033
  source 1..80: mol_type = other DNA

SEQ ID NO: 195764 - DNA, 80 bp, synthetic construct; identical to SEQ ID NO: 11034
  source 1..80: mol_type = other DNA

SEQ ID NO: 195765 - DNA, 80 bp, synthetic construct; identical to SEQ ID NO: 11035
  source 1..80: mol_type = other DNA

SEQ ID NO: 195766 - DNA, 80 bp, synthetic construct; identical to SEQ ID NO: 11036
  source 1..80: mol_type = other DNA

SEQ ID NO: 195767 - DNA, 80 bp, synthetic construct; identical to SEQ ID NO: 11037
  source 1..80: mol_type = other DNA

SEQ ID NO: 195768 - DNA, 80 bp, synthetic construct; identical to SEQ ID NO: 11038
  source 1..80: mol_type = other DNA

SEQ ID NO: 195769 - DNA, 80 bp, synthetic construct; identical to SEQ ID NO: 11039
  source 1..80: mol_type = other DNA

SEQ ID NO: 195770 - DNA, 80 bp, synthetic construct; identical to SEQ ID NO: 11040
  source 1..80: mol_type = other DNA

SEQ ID NO: 195771 - DNA, 80 bp, synthetic construct; identical to SEQ ID NO: 11041
  source 1..80: mol_type = other DNA

SEQ ID NO: 195772 - DNA, 80 bp, synthetic construct; identical to SEQ ID NO: 11042
  source 1..80: mol_type = other DNA

SEQ ID NO: 195773 - DNA, 80 bp, synthetic construct; identical to SEQ ID NO: 11043
  source 1..80: mol_type = other DNA

SEQ ID NO: 195774 - DNA, 80 bp, synthetic construct; identical to SEQ ID NO: 11044
  source 1..80: mol_type = other DNA

SEQ ID NO: 195775 - DNA, 80 bp, synthetic construct; identical to SEQ ID NO: 11045
  source 1..80: mol_type = other DNA

SEQ ID NO: 195776 - DNA, 80 bp, synthetic construct; identical to SEQ ID NO: 11046
  source 1..80: mol_type = other DNA

SEQ ID NO: 195777 - DNA, 80 bp, synthetic construct; identical to SEQ ID NO: 11047
  source 1..80: mol_type = other DNA

SEQ ID NO: 195778 - DNA, 80 bp, synthetic construct; identical to SEQ ID NO: 11048
  source 1..80: mol_type = other DNA

SEQ ID NO: 195779 - DNA, 80 bp, synthetic construct; identical to SEQ ID NO: 11049
  source 1..80: mol_type = other DNA

SEQ ID NO: 195780 - DNA, 80 bp, synthetic construct; identical to SEQ ID NO: 11050
  source 1..80: mol_type = other DNA

SEQ ID NO: 195781 - DNA, 80 bp, synthetic construct; identical to SEQ ID NO: 11051
  source 1..80: mol_type = other DNA

SEQ ID NO: 195782 - DNA, 80 bp, synthetic construct; identical to SEQ ID NO: 11052
  source 1..80: mol_type = other DNA

SEQ ID NO: 195783 - DNA, 80 bp, synthetic construct; identical to SEQ ID NO: 11053
  source 1..80: mol_type = other DNA

SEQ ID NO: 195784 - DNA, 80 bp, synthetic construct; identical to SEQ ID NO: 11054
  source 1..80: mol_type = other DNA

SEQ ID NO: 195785 - DNA, 80 bp, synthetic construct; identical to SEQ ID NO: 11055
  source 1..80: mol_type = other DNA

SEQ ID NO: 195786 - DNA, 80 bp, synthetic construct; identical to SEQ ID NO: 11056
  source 1..80: mol_type = other DNA

SEQ ID NO: 195787 - DNA, 80 bp, synthetic construct; identical to SEQ ID NO: 11057
  source 1..80: mol_type = other DNA

SEQ ID NO: 195788 - DNA, 80 bp, synthetic construct; identical to SEQ ID NO: 11058
  source 1..80: mol_type = other DNA

SEQ ID NO: 195789 - DNA, 80 bp, synthetic construct; identical to SEQ ID NO: 11059
  source 1..80: mol_type = other DNA

SEQ ID NO: 195790 - DNA, 80 bp, synthetic construct; identical to SEQ ID NO: 11060
  source 1..80: mol_type = other DNA

SEQ ID NO: 195791 - DNA, 80 bp, synthetic construct; identical to SEQ ID NO: 11061
  source 1..80: mol_type = other DNA

SEQ ID NO: 195792 - DNA, 80 bp, synthetic construct; identical to SEQ ID NO: 11062
  source 1..80: mol_type = other DNA

SEQ ID NO: 195793 - DNA, 80 bp, synthetic construct; identical to SEQ ID NO: 11063
  source 1..80: mol_type = other DNA

SEQ ID NO: 195794 - DNA, 80 bp, synthetic construct; identical to SEQ ID NO: 11064
  source 1..80: mol_type = other DNA

SEQ ID NO: 195795 - DNA, 80 bp, synthetic construct; identical to SEQ ID NO: 11065
  source 1..80: mol_type = other DNA

SEQ ID NO: 195796 - DNA, 80 bp, synthetic construct; identical to SEQ ID NO: 11066
  source 1..80: mol_type = other DNA

SEQ ID NO: 195797 - DNA, 80 bp, synthetic construct; identical to SEQ ID NO: 11067
  source 1..80: mol_type = other DNA

SEQ ID NO: 195798 - DNA, 80 bp, synthetic construct; identical to SEQ ID NO: 11068
  source 1..80: mol_type = other DNA

SEQ ID NO: 195799 - DNA, 80 bp, synthetic construct; identical to SEQ ID NO: 11069
  source 1..80: mol_type = other DNA

SEQ ID NO: 195800 - DNA, 80 bp, synthetic construct; identical to SEQ ID NO: 11070
  source 1..80: mol_type = other DNA

SEQ ID NO: 195801 - DNA, 80 bp, synthetic construct; identical to SEQ ID NO: 11071
  source 1..80: mol_type = other DNA

SEQ ID NO: 195802 - DNA, 80 bp, synthetic construct; identical to SEQ ID NO: 11072
  source 1..80: mol_type = other DNA

SEQ ID NO: 195803 - DNA, 80 bp, synthetic construct; identical to SEQ ID NO: 11073
  source 1..80: mol_type = other DNA

SEQ ID NO: 195804 - DNA, 80 bp, synthetic construct; identical to SEQ ID NO: 11074
  source 1..80: mol_type = other DNA

SEQ ID NO: 195805 - DNA, 80 bp, synthetic construct; identical to SEQ ID NO: 11075
  source 1..80: mol_type = other DNA

SEQ ID NO: 195806 - DNA, 80 bp, synthetic construct; identical to SEQ ID NO: 11076
  source 1..80: mol_type = other DNA

SEQ ID NO: 195807 - DNA, 80 bp, synthetic construct; identical to SEQ ID NO: 11077
  source 1..80: mol_type = other DNA

SEQ ID NO: 195808 - DNA, 80 bp, synthetic construct; identical to SEQ ID NO: 11078
  source 1..80: mol_type = other DNA

SEQ ID NO: 195809 - DNA, 80 bp, synthetic construct; identical to SEQ ID NO: 11079
  source 1..80: mol_type = other DNA

SEQ ID NO: 195810 - DNA, 80 bp, synthetic construct; identical to SEQ ID NO: 11080
  source 1..80: mol_type = other DNA

SEQ ID NO: 195811 - DNA, 80 bp, synthetic construct; identical to SEQ ID NO: 11081
  source 1..80: mol_type = other DNA

SEQ ID NO: 195812 - DNA, 80 bp, synthetic construct; identical to SEQ ID NO: 11082
  source 1..80: mol_type = other DNA

SEQ ID NO: 195813 - DNA, 80 bp, synthetic construct; identical to SEQ ID NO: 11083
  source 1..80: mol_type = other DNA

SEQ ID NO: 195814 - DNA, 80 bp, synthetic construct; identical to SEQ ID NO: 11084
  source 1..80: mol_type = other DNA

SEQ ID NO: 195815 - DNA, 80 bp, synthetic construct; identical to SEQ ID NO: 11085
  source 1..80: mol_type = other DNA

SEQ ID NO: 195816 - DNA, 80 bp, synthetic construct; identical to SEQ ID NO: 11086
  source 1..80: mol_type = other DNA

SEQ ID NO: 195817 - DNA, 80 bp, synthetic construct; identical to SEQ ID NO: 11087
  source 1..80: mol_type = other DNA

SEQ ID NO: 195818 - DNA, 80 bp, synthetic construct; identical to SEQ ID NO: 11088
  source 1..80: mol_type = other DNA

SEQ ID NO: 195819 - DNA, 80 bp, synthetic construct; identical to SEQ ID NO: 11089
  source 1..80: mol_type = other DNA

SEQ ID NO: 195820 - DNA, 80 bp, synthetic construct; identical to SEQ ID NO: 11090
  source 1..80: mol_type = other DNA

SEQ ID NO: 195821 - DNA, 80 bp, synthetic construct; identical to SEQ ID NO: 11091
  source 1..80: mol_type = other DNA

SEQ ID NO: 195822 - DNA, 80 bp, synthetic construct; identical to SEQ ID NO: 11092
  source 1..80: mol_type = other DNA

SEQ ID NO: 195823 - DNA, 80 bp, synthetic construct; identical to SEQ ID NO: 11093
  source 1..80: mol_type = other DNA

SEQ ID NO: 195824 - DNA, 80 bp, synthetic construct; identical to SEQ ID NO: 11094
  source 1..80: mol_type = other DNA

SEQ ID NO: 195825 - DNA, 80 bp, synthetic construct; identical to SEQ ID NO: 11095
  source 1..80: mol_type = other DNA

SEQ ID NO: 195826 - DNA, 80 bp, synthetic construct; identical to SEQ ID NO: 11096
  source 1..80: mol_type = other DNA

SEQ ID NO: 195827 - DNA, 80 bp, synthetic construct; identical to SEQ ID NO: 11097
  source 1..80: mol_type = other DNA

SEQ ID NO: 195828 - DNA, 80 bp, synthetic construct; identical to SEQ ID NO: 11098
  source 1..80: mol_type = other DNA

SEQ ID NO: 195829 - DNA, 80 bp, synthetic construct; identical to SEQ ID NO: 11099
  source 1..80: mol_type = other DNA

SEQ ID NO: 195830 - DNA, 80 bp, synthetic construct; identical to SEQ ID NO: 11100
  source 1..80: mol_type = other DNA

SEQ ID NO: 195831 - DNA, 80 bp, synthetic construct; identical to SEQ ID NO: 11101
  source 1..80: mol_type = other DNA

SEQ ID NO: 195832 - DNA, 80 bp, synthetic construct; identical to SEQ ID NO: 11102
  source 1..80: mol_type = other DNA

SEQ ID NO: 195833 - DNA, 80 bp, synthetic construct; identical to SEQ ID NO: 11103
  source 1..80: mol_type = other DNA

SEQ ID NO: 195834 - DNA, 80 bp, synthetic construct; identical to SEQ ID NO: 11104
  source 1..80: mol_type = other DNA

SEQ ID NO: 195835 - DNA, 80 bp, synthetic construct; identical to SEQ ID NO: 11105
  source 1..80: mol_type = other DNA

SEQ ID NO: 195836 - DNA, 80 bp, synthetic construct; identical to SEQ ID NO: 11106
  source 1..80: mol_type = other DNA

SEQ ID NO: 195837 - DNA, 80 bp, synthetic construct; identical to SEQ ID NO: 11107
  source 1..80: mol_type = other DNA

SEQ ID NO: 195838 - DNA, 80 bp, synthetic construct; identical to SEQ ID NO: 11108
  source 1..80: mol_type = other DNA

SEQ ID NO: 195839 - DNA, 80 bp, synthetic construct; identical to SEQ ID NO: 11109
  source 1..80: mol_type = other DNA

SEQ ID NO: 195840 - DNA, 80 bp, synthetic construct; identical to SEQ ID NO: 11110
  source 1..80: mol_type = other DNA

SEQ ID NO: 195841 - DNA, 80 bp, synthetic construct; identical to SEQ ID NO: 11111
  source 1..80: mol_type = other DNA

SEQ ID NO: 195842 - DNA, 80 bp, synthetic construct; identical to SEQ ID NO: 11112
  source 1..80: mol_type = other DNA

SEQ ID NO: 195843 - DNA, 80 bp, synthetic construct; identical to SEQ ID NO: 11113
  source 1..80: mol_type = other DNA

SEQ ID NO: 195844 - DNA, 80 bp, synthetic construct; identical to SEQ ID NO: 11114
  source 1..80: mol_type = other DNA

SEQ ID NO: 195845 - DNA, 80 bp, synthetic construct; identical to SEQ ID NO: 11115
  source 1..80: mol_type = other DNA

SEQ ID NO: 195846 - DNA, 80 bp, synthetic construct; identical to SEQ ID NO: 11116
  source 1..80: mol_type = other DNA

SEQ ID NO: 195847 - DNA, 80 bp, synthetic construct; identical to SEQ ID NO: 11117
  source 1..80: mol_type = other DNA

SEQ ID NO: 195848 - DNA, 80 bp, synthetic construct; identical to SEQ ID NO: 11118
  source 1..80: mol_type = other DNA

SEQ ID NO: 195849 - DNA, 80 bp, synthetic construct; identical to SEQ ID NO: 11119
  source 1..80: mol_type = other DNA

SEQ ID NO: 195850 - DNA, 80 bp, synthetic construct; identical to SEQ ID NO: 11120
  source 1..80: mol_type = other DNA

SEQ ID NO: 195851 - DNA, 80 bp, synthetic construct; identical to SEQ ID NO: 11121
  source 1..80: mol_type = other DNA

SEQ ID NO: 195852 - DNA, 80 bp, synthetic construct; identical to SEQ ID NO: 11122
  source 1..80: mol_type = other DNA

SEQ ID NO: 195853 - DNA, 80 bp, synthetic construct; identical to SEQ ID NO: 11123
  source 1..80: mol_type = other DNA

SEQ ID NO: 195854 - DNA, 80 bp, synthetic construct; identical to SEQ ID NO: 11124
  source 1..80: mol_type = other DNA

SEQ ID NO: 195855 - DNA, 80 bp, synthetic construct; identical to SEQ ID NO: 11125
  source 1..80: mol_type = other DNA

SEQ ID NO: 195856 - DNA, 80 bp, synthetic construct; identical to SEQ ID NO: 11126
  source 1..80: mol_type = other DNA

SEQ ID NO: 195857 - DNA, 80 bp, synthetic construct; identical to SEQ ID NO: 11127
  source 1..80: mol_type = other DNA

SEQ ID NO: 195858 - DNA, 80 bp, synthetic construct; identical to SEQ ID NO: 11128
  source 1..80: mol_type = other DNA

SEQ ID NO: 195859 - DNA, 80 bp, synthetic construct; identical to SEQ ID NO: 11129
  source 1..80: mol_type = other DNA

SEQ ID NO: 195860 - DNA, 80 bp, synthetic construct; identical to SEQ ID NO: 11130
  source 1..80: mol_type = other DNA

SEQ ID NO: 195861 - DNA, 80 bp, synthetic construct; identical to SEQ ID NO: 11131
  source 1..80: mol_type = other DNA

SEQ ID NO: 195862 - DNA, 80 bp, synthetic construct; identical to SEQ ID NO: 11132
  source 1..80: mol_type = other DNA

SEQ ID NO: 195863 - DNA, 80 bp, synthetic construct; identical to SEQ ID NO: 11133
  source 1..80: mol_type = other DNA

SEQ ID NO: 195864 - DNA, 80 bp, synthetic construct; identical to SEQ ID NO: 11134
  source 1..80: mol_type = other DNA

SEQ ID NO: 195865 - DNA, 80 bp, synthetic construct; identical to SEQ ID NO: 11135
  source 1..80: mol_type = other DNA

SEQ ID NO: 195866 - DNA, 80 bp, synthetic construct; identical to SEQ ID NO: 11136
  source 1..80: mol_type = other DNA

SEQ ID NO: 195867 - DNA, 80 bp, synthetic construct; identical to SEQ ID NO: 11137
  source 1..80: mol_type = other DNA

SEQ ID NO: 195868 - DNA, 80 bp, synthetic construct; identical to SEQ ID NO: 11138
  source 1..80: mol_type = other DNA

SEQ ID NO: 195869 - DNA, 80 bp, synthetic construct; identical to SEQ ID NO: 11139
  source 1..80: mol_type = other DNA

SEQ ID NO: 195870 - DNA, 80 bp, synthetic construct; identical to SEQ ID NO: 11140
  source 1..80: mol_type = other DNA

SEQ ID NO: 195871 - DNA, 80 bp, synthetic construct; identical to SEQ ID NO: 11141
  source 1..80: mol_type = other DNA

SEQ ID NO: 195872 - DNA, 80 bp, synthetic construct; identical to SEQ ID NO: 11142
  source 1..80: mol_type = other DNA

SEQ ID NO: 195873 - DNA, 80 bp, synthetic construct; identical to SEQ ID NO: 11143
  source 1..80: mol_type = other DNA

SEQ ID NO: 195874 - DNA, 80 bp, synthetic construct; identical to SEQ ID NO: 11144
  source 1..80: mol_type = other DNA

SEQ ID NO: 195875 - DNA, 80 bp, synthetic construct; identical to SEQ ID NO: 11145
  source 1..80: mol_type = other DNA

SEQ ID NO: 195876 - DNA, 80 bp, synthetic construct; identical to SEQ ID NO: 11146
  source 1..80: mol_type = other DNA

SEQ ID NO: 195877 - DNA, 80 bp, synthetic construct; identical to SEQ ID NO: 11147
  source 1..80: mol_type = other DNA

SEQ ID NO: 195878 - DNA, 80 bp, synthetic construct; identical to SEQ ID NO: 11148
  source 1..80: mol_type = other DNA

SEQ ID NO: 195879 - DNA, 80 bp, synthetic construct; identical to SEQ ID NO: 11149
  source 1..80: mol_type = other DNA

SEQ ID NO: 195880 - DNA, 80 bp, synthetic construct; identical to SEQ ID NO: 11150
  source 1..80: mol_type = other DNA

SEQ ID NO: 195881 - DNA, 80 bp, synthetic construct; identical to SEQ ID NO: 11151
  source 1..80: mol_type = other DNA

SEQ ID NO: 195882 - DNA, 80 bp, synthetic construct; identical to SEQ ID NO: 11152
  source 1..80: mol_type = other DNA

SEQ ID NO: 195883 - DNA, 80 bp, synthetic construct; identical to SEQ ID NO: 11153
  source 1..80: mol_type = other DNA

SEQ ID NO: 195884 - DNA, 80 bp, synthetic construct; identical to SEQ ID NO: 11154
  source 1..80: mol_type = other DNA

SEQ ID NO: 195885 - DNA, 80 bp, synthetic construct; identical to SEQ ID NO: 11155
  source 1..80: mol_type = other DNA

SEQ ID NO: 195886 - DNA, 80 bp, synthetic construct; identical to SEQ ID NO: 11156
  source 1..80: mol_type = other DNA

SEQ ID NO: 195887 - DNA, 80 bp, synthetic construct; identical to SEQ ID NO: 11157
  source 1..80: mol_type = other DNA

SEQ ID NO: 195888 - DNA, 80 bp, synthetic construct; identical to SEQ ID NO: 11158
  source 1..80: mol_type = other DNA

SEQ ID NO: 195889 - DNA, 80 bp, synthetic construct; identical to SEQ ID NO: 11159
  source 1..80: mol_type = other DNA

SEQ ID NO: 195890 - DNA, 80 bp, synthetic construct; identical to SEQ ID NO: 11160
  source 1..80: mol_type = other DNA

SEQ ID NO: 195891 - DNA, 80 bp, synthetic construct; identical to SEQ ID NO: 11161
  source 1..80: mol_type = other DNA

SEQ ID NO: 195892 - DNA, 80 bp, synthetic construct; identical to SEQ ID NO: 11162
  source 1..80: mol_type = other DNA

SEQ ID NO: 195893 - DNA, 80 bp, synthetic construct; identical to SEQ ID NO: 11163
  source 1..80: mol_type = other DNA

SEQ ID NO: 195894 - DNA, 80 bp, synthetic construct; identical to SEQ ID NO: 11164
  source 1..80: mol_type = other DNA

SEQ ID NO: 195895 - DNA, 80 bp, synthetic construct; identical to SEQ ID NO: 11165
  source 1..80: mol_type = other DNA

SEQ ID NO: 195896 - DNA, 80 bp, synthetic construct; identical to SEQ ID NO: 11166
  source 1..80: mol_type = other DNA

SEQ ID NO: 195897 - DNA, 80 bp, synthetic construct; identical to SEQ ID NO: 11167
  source 1..80: mol_type = other DNA

SEQ ID NO: 195898 - DNA, 80 bp, synthetic construct; identical to SEQ ID NO: 11168
  source 1..80: mol_type = other DNA

SEQ ID NO: 195899 - DNA, 80 bp, synthetic construct; identical to SEQ ID NO: 11169
  source 1..80: mol_type = other DNA

SEQ ID NO: 195900 - DNA, 80 bp, synthetic construct; identical to SEQ ID NO: 11170
  source 1..80: mol_type = other DNA

SEQ ID NO: 195901 - DNA, 80 bp, synthetic construct; identical to SEQ ID NO: 11171
  source 1..80: mol_type = other DNA

SEQ ID NO: 195902 - DNA, 80 bp, synthetic construct; identical to SEQ ID NO: 11172
  source 1..80: mol_type = other DNA

SEQ ID NO: 195903 - DNA, 80 bp, synthetic construct; identical to SEQ ID NO: 11173
  source 1..80: mol_type = other DNA

SEQ ID NO: 195904 - DNA, 80 bp, synthetic construct; identical to SEQ ID NO: 11174
  source 1..80: mol_type = other DNA

SEQ ID NO: 195905 - DNA, 80 bp, synthetic construct; identical to SEQ ID NO: 11175
  source 1..80: mol_type = other DNA

SEQ ID NO: 195906 - DNA, 80 bp, synthetic construct; identical to SEQ ID NO: 11176
  source 1..80: mol_type = other DNA

SEQ ID NO: 195907 - DNA, 80 bp, synthetic construct; identical to SEQ ID NO: 11177
  source 1..80: mol_type = other DNA

SEQ ID NO: 195908 - DNA, 80 bp, synthetic construct; identical to SEQ ID NO: 11178
  source 1..80: mol_type = other DNA

SEQ ID NO: 195909 - DNA, 80 bp, synthetic construct; identical to SEQ ID NO: 11179
  source 1..80: mol_type = other DNA

SEQ ID NO: 195910 - DNA, 80 bp, synthetic construct; identical to SEQ ID NO: 11180
  source 1..80: mol_type = other DNA

SEQ ID NO: 195911 - DNA, 80 bp, synthetic construct; identical to SEQ ID NO: 11181
  source 1..80: mol_type = other DNA

SEQ ID NO: 195912 - DNA, 80 bp, synthetic construct; identical to SEQ ID NO: 11182
  source 1..80: mol_type = other DNA

SEQ ID NO: 195913 - DNA, 80 bp, synthetic construct; identical to SEQ ID NO: 11183
  source 1..80: mol_type = other DNA

SEQ ID NO: 195914 - DNA, 80 bp, synthetic construct; identical to SEQ ID NO: 11184
  source 1..80: mol_type = other DNA

SEQ ID NO: 195915 - DNA, 80 bp, synthetic construct; identical to SEQ ID NO: 11185
  source 1..80: mol_type = other DNA

SEQ ID NO: 195916 - DNA, 80 bp, synthetic construct; identical to SEQ ID NO: 11186
  source 1..80: mol_type = other DNA

SEQ ID NO: 195917 - DNA, 80 bp, synthetic construct; identical to SEQ ID NO: 11187
  source 1..80: mol_type = other DNA

SEQ ID NO: 195918 - DNA, 80 bp, synthetic construct; identical to SEQ ID NO: 11188
  source 1..80: mol_type = other DNA

SEQ ID NO: 195919 - DNA, 80 bp, synthetic construct; identical to SEQ ID NO: 11189
  source 1..80: mol_type = other DNA

SEQ ID NO: 195920 - DNA, 80 bp, synthetic construct; identical to SEQ ID NO: 11190
  source 1..80: mol_type = other DNA

SEQ ID NO: 195921 - DNA, 80 bp, synthetic construct; identical to SEQ ID NO: 11191
  source 1..80: mol_type = other DNA

SEQ ID NO: 195922 - DNA, 80 bp, synthetic construct; identical to SEQ ID NO: 11192
  source 1..80: mol_type = other DNA

SEQ ID NO: 195923 - DNA, 80 bp, synthetic construct; identical to SEQ ID NO: 11193
  source 1..80: mol_type = other DNA

SEQ ID NO: 195924 - DNA, 80 bp, synthetic construct; identical to SEQ ID NO: 11194
  source 1..80: mol_type = other DNA

SEQ ID NO: 195925 - DNA, 80 bp, synthetic construct; identical to SEQ ID NO: 11195
  source 1..80: mol_type = other DNA

SEQ ID NO: 195926 - DNA, 80 bp, synthetic construct; identical to SEQ ID NO: 11196
  source 1..80: mol_type = other DNA

SEQ ID NO: 195927 - DNA, 80 bp, synthetic construct; identical to SEQ ID NO: 11197
  source 1..80: mol_type = other DNA

SEQ ID NO: 195928 - DNA, 80 bp, synthetic construct; identical to SEQ ID NO: 11198
  source 1..80: mol_type = other DNA

SEQ ID NO: 195929 - DNA, 80 bp, synthetic construct; identical to SEQ ID NO: 11199
  source 1..80: mol_type = other DNA

SEQ ID NO: 195930 - DNA, 80 bp, synthetic construct; identical to SEQ ID NO: 11200
  source 1..80: mol_type = other DNA

SEQ ID NO: 195931 - DNA, 80 bp, synthetic construct; identical to SEQ ID NO: 11201
  source 1..80: mol_type = other DNA

SEQ ID NO: 195932 - DNA, 80 bp, synthetic construct; identical to SEQ ID NO: 11202
  source 1..80: mol_type = other DNA

SEQ ID NO: 195933 - DNA, 80 bp, synthetic construct; identical to SEQ ID NO: 11203
  source 1..80: mol_type = other DNA

SEQ ID NO: 195934 - DNA, 80 bp, synthetic construct; identical to SEQ ID NO: 11204
  source 1..80: mol_type = other DNA

SEQ ID NO: 195935 - DNA, 80 bp, synthetic construct; identical to SEQ ID NO: 11205
  source 1..80: mol_type = other DNA

SEQ ID NO: 195936 - DNA, 80 bp, synthetic construct; identical to SEQ ID NO: 11206
  source 1..80: mol_type = other DNA

SEQ ID NO: 195937 - DNA, 80 bp, synthetic construct; identical to SEQ ID NO: 11207
  source 1..80: mol_type = other DNA

SEQ ID NO: 195938 - DNA, 80 bp, synthetic construct; identical to SEQ ID NO: 11208
  source 1..80: mol_type = other DNA

SEQ ID NO: 195939 - DNA, 80 bp, synthetic construct; identical to SEQ ID NO: 11209
  source 1..80: mol_type = other DNA

SEQ ID NO: 195940 - DNA, 80 bp, synthetic construct; identical to SEQ ID NO: 11210
  source 1..80: mol_type = other DNA

SEQ ID NO: 195941 - DNA, 80 bp, synthetic construct; identical to SEQ ID NO: 11211
  source 1..80: mol_type = other DNA

SEQ ID NO: 195942 - DNA, 80 bp, synthetic construct; identical to SEQ ID NO: 11212
  source 1..80: mol_type = other DNA

SEQ ID NO: 195943 - DNA, 80 bp, synthetic construct; identical to SEQ ID NO: 11213
  source 1..80: mol_type = other DNA

SEQ ID NO: 195944 - DNA, 80 bp, synthetic construct; identical to SEQ ID NO: 11214
  source 1..80: mol_type = other DNA

SEQ ID NO: 195945 - DNA, 80 bp, synthetic construct; identical to SEQ ID NO: 11215
  source 1..80: mol_type = other DNA

SEQ ID NO: 195946 - DNA, 80 bp, synthetic construct; identical to SEQ ID NO: 11216
  source 1..80: mol_type = other DNA

SEQ ID NO: 195947 - DNA, 80 bp, synthetic construct; identical to SEQ ID NO: 11217
  source 1..80: mol_type = other DNA

SEQ ID NO: 195948 - DNA, 80 bp, synthetic construct; identical to SEQ ID NO: 11218
  source 1..80: mol_type = other DNA

SEQ ID NO: 195949 - DNA, 80 bp, synthetic construct; identical to SEQ ID NO: 11219
  source 1..80: mol_type = other DNA

SEQ ID NO: 195950 - DNA, 80 bp, synthetic construct; identical to SEQ ID NO: 11220
  source 1..80: mol_type = other DNA

SEQ ID NO: 195951 - DNA, 80 bp, synthetic construct; identical to SEQ ID NO: 11221
  source 1..80: mol_type = other DNA

SEQ ID NO: 195952 - DNA, 80 bp, synthetic construct; identical to SEQ ID NO: 11222
  source 1..80: mol_type = other DNA

SEQ ID NO: 195953 - DNA, 80 bp, synthetic construct; identical to SEQ ID NO: 11223
  source 1..80: mol_type = other DNA

SEQ ID NO: 195954 - DNA, 80 bp, synthetic construct; identical to SEQ ID NO: 11224
  source 1..80: mol_type = other DNA

SEQ ID NO: 195955 - DNA, 80 bp, synthetic construct; identical to SEQ ID NO: 11225
  source 1..80: mol_type = other DNA

SEQ ID NO: 195956 - DNA, 80 bp, synthetic construct; identical to SEQ ID NO: 11226
  source 1..80: mol_type = other DNA

SEQ ID NO: 195957 - DNA, 80 bp, synthetic construct; identical to SEQ ID NO: 11227
  source 1..80: mol_type = other DNA

SEQ ID NO: 195958 - DNA, 80 bp, synthetic construct; identical to SEQ ID NO: 11228
  source 1..80: mol_type = other DNA

SEQ ID NO: 195959 - DNA, 80 bp, synthetic construct; identical to SEQ ID NO: 11229
  source 1..80: mol_type = other DNA

SEQ ID NO: 195960 - DNA, 80 bp, synthetic construct; identical to SEQ ID NO: 11230
  source 1..80: mol_type = other DNA

SEQ ID NO: 195961 - DNA, 80 bp, synthetic construct; identical to SEQ ID NO: 11231
  source 1..80: mol_type = other DNA

SEQ ID NO: 195962 - DNA, 80 bp, synthetic construct; identical to SEQ ID NO: 11232
  source 1..80: mol_type = other DNA

SEQ ID NO: 195963 - DNA, 80 bp, synthetic construct; identical to SEQ ID NO: 11233
  source 1..80: mol_type = other DNA

SEQ ID NO: 195964 - DNA, 80 bp, synthetic construct; identical to SEQ ID NO: 11234
  source 1..80: mol_type = other DNA

SEQ ID NO: 195965 - DNA, 80 bp, synthetic construct; identical to SEQ ID NO: 11235
  source 1..80: mol_type = other DNA

SEQ ID NO: 195966 - DNA, 80 bp, synthetic construct; identical to SEQ ID NO: 11236
  source 1..80: mol_type = other DNA

SEQ ID NO: 195967 - DNA, 80 bp, synthetic construct; identical to SEQ ID NO: 11237
  source 1..80: mol_type = other DNA

SEQ ID NO: 195968 - DNA, 80 bp, synthetic construct; identical to SEQ ID NO: 11238
  source 1..80: mol_type = other DNA

SEQ ID NO: 195969 - DNA, 80 bp, synthetic construct; identical to SEQ ID NO: 11239
  source 1..80: mol_type = other DNA

SEQ ID NO: 195970 - DNA, 80 bp, synthetic construct; identical to SEQ ID NO: 11240
  source 1..80: mol_type = other DNA

SEQ ID NO: 195971 - DNA, 80 bp, synthetic construct; identical to SEQ ID NO: 11241
  source 1..80: mol_type = other DNA

SEQ ID NO: 195972 - DNA, 80 bp, synthetic construct; identical to SEQ ID NO: 11242
  source 1..80: mol_type = other DNA

SEQ ID NO: 195973 - DNA, 80 bp, synthetic construct; identical to SEQ ID NO: 11243
  source 1..80: mol_type = other DNA

SEQ ID NO: 195974 - DNA, 80 bp, synthetic construct; identical to SEQ ID NO: 11244
  source 1..80: mol_type = other DNA

SEQ ID NO: 195975 - DNA, 80 bp, synthetic construct; identical to SEQ ID NO: 11245
  source 1..80: mol_type = other DNA

SEQ ID NO: 195976 - DNA, 80 bp, synthetic construct; identical to SEQ ID NO: 11246
  source 1..80: mol_type = other DNA

SEQ ID NO: 195977 - DNA, 80 bp, synthetic construct; identical to SEQ ID NO: 11247
  source 1..80: mol_type = other DNA

SEQ ID NO: 195978 - DNA, 80 bp, synthetic construct; identical to SEQ ID NO: 11248
  source 1..80: mol_type = other DNA

SEQ ID NO: 195979 - DNA, 80 bp, synthetic construct; identical to SEQ ID NO: 11249
  source 1..80: mol_type = other DNA

SEQ ID NO: 195980 - DNA, 80 bp, synthetic construct; identical to SEQ ID NO: 11250
  source 1..80: mol_type = other DNA

SEQ ID NO: 195981 - DNA, 80 bp, synthetic construct; identical to SEQ ID NO: 11251
  source 1..80: mol_type = other DNA

SEQ ID NO: 195982 - DNA, 80 bp, synthetic construct; identical to SEQ ID NO: 11252
  source 1..80: mol_type = other DNA

SEQ ID NO: 195983 - DNA, 80 bp, synthetic construct; identical to SEQ ID NO: 11253
  source 1..80: mol_type = other DNA

SEQ ID NO: 195984 - DNA, 80 bp, synthetic construct; identical to SEQ ID NO: 11254
  source 1..80: mol_type = other DNA

SEQ ID NO: 195985 - DNA, 80 bp, synthetic construct; identical to SEQ ID NO: 11255
  source 1..80: mol_type = other DNA

SEQ ID NO: 195986 - DNA, 80 bp, synthetic construct; identical to SEQ ID NO: 11256
  source 1..80: mol_type = other DNA

SEQ ID NO: 195987 - DNA, 80 bp, synthetic construct; identical to SEQ ID NO: 11257
  source 1..80: mol_type = other DNA

SEQ ID NO: 195988 - DNA, 80 bp, synthetic construct; identical to SEQ ID NO: 11258
  source 1..80: mol_type = other DNA

SEQ ID NO: 195989 - DNA, 80 bp, synthetic construct; identical to SEQ ID NO: 11259
  source 1..80: mol_type = other DNA

SEQ ID NO: 195990 - DNA, 80 bp, synthetic construct; identical to SEQ ID NO: 11260
  source 1..80: mol_type = other DNA

SEQ ID NO: 195991 - DNA, 80 bp, synthetic construct; identical to SEQ ID NO: 11261
  source 1..80: mol_type = other DNA

SEQ ID NO: 195992 - DNA, 80 bp, synthetic construct; identical to SEQ ID NO: 11262
  source 1..80: mol_type = other DNA

SEQ ID NO: 195993 - DNA, 80 bp, synthetic construct; identical to SEQ ID NO: 11263
  source 1..80: mol_type = other DNA

SEQ ID NO: 195994 - DNA, 80 bp, synthetic construct; identical to SEQ ID NO: 11264
  source 1..80: mol_type = other DNA

SEQ ID NO: 195995 - DNA, 80 bp, synthetic construct; identical to SEQ ID NO: 11265
  source 1..80: mol_type = other DNA

SEQ ID NO: 195996 - DNA, 80 bp, synthetic construct; identical to SEQ ID NO: 11266
  source 1..80: mol_type = other DNA

SEQ ID NO: 195997 - DNA, 80 bp, synthetic construct; identical to SEQ ID NO: 11267
  source 1..80: mol_type = other DNA

SEQ ID NO: 195998 - DNA, 80 bp, synthetic construct; identical to SEQ ID NO: 11268
  source 1..80: mol_type = other DNA

SEQ ID NO: 195999 - DNA, 80 bp, synthetic construct; identical to SEQ ID NO: 11269
  source 1..80: mol_type = other DNA

SEQ ID NO: 196000 - DNA, 80 bp, synthetic construct; identical to SEQ ID NO: 11270
  source 1..80: mol_type = other DNA

SEQ ID NO: 196001 - DNA, 80 bp, synthetic construct; identical to SEQ ID NO: 11271
  source 1..80: mol_type = other DNA

SEQ ID NO: 196002 - DNA, 80 bp, synthetic construct; identical to SEQ ID NO: 11272
  source 1..80: mol_type = other DNA

SEQ ID NO: 196003 - DNA, 80 bp, synthetic construct; identical to SEQ ID NO: 11273
  source 1..80: mol_type = other DNA

SEQ ID NO: 196004 - DNA, 80 bp, synthetic construct; identical to SEQ ID NO: 11274
  source 1..80: mol_type = other DNA

SEQ ID NO: 196005 - DNA, 80 bp, synthetic construct; identical to SEQ ID NO: 11275
  source 1..80: mol_type = other DNA

SEQ ID NO: 196006 - DNA, 80 bp, synthetic construct; identical to SEQ ID NO: 11276
  source 1..80: mol_type = other DNA

SEQ ID NO: 196007 - DNA, 80 bp, synthetic construct; identical to SEQ ID NO: 11277
  source 1..80: mol_type = other DNA

SEQ ID NO: 196008 - DNA, 80 bp, synthetic construct; identical to SEQ ID NO: 11278
  source 1..80: mol_type = other DNA

SEQ ID NO: 196009 - DNA, 80 bp, synthetic construct; identical to SEQ ID NO: 11279
  source 1..80: mol_type = other DNA

SEQ ID NO: 196010 - DNA, 80 bp, synthetic construct; identical to SEQ ID NO: 11280
  source 1..80: mol_type = other DNA

SEQ ID NO: 196011 - DNA, 80 bp, synthetic construct; identical to SEQ ID NO: 11281
  source 1..80: mol_type = other DNA

SEQ ID NO: 196012 - DNA, 80 bp, synthetic construct; identical to SEQ ID NO: 11282
  source 1..80: mol_type = other DNA

SEQ ID NO: 196013 - DNA, 80 bp, synthetic construct; identical to SEQ ID NO: 11283
  source 1..80: mol_type = other DNA

SEQ ID NO: 196014 - DNA, 80 bp, synthetic construct; identical to SEQ ID NO: 11284
  source 1..80: mol_type = other DNA

SEQ ID NO: 196015 - DNA, 80 bp, synthetic construct; identical to SEQ ID NO: 11285
  source 1..80: mol_type = other DNA

SEQ ID NO: 196016 - DNA, 80 bp, synthetic construct; identical to SEQ ID NO: 11286
  source 1..80: mol_type = other DNA

SEQ ID NO: 196017 - DNA, 80 bp, synthetic construct; identical to SEQ ID NO: 11287
  source 1..80: mol_type = other DNA

SEQ ID NO: 196018 - DNA, 80 bp, synthetic construct; identical to SEQ ID NO: 11288
  source 1..80: mol_type = other DNA

SEQ ID NO: 196019 - DNA, 80 bp, synthetic construct; identical to SEQ ID NO: 11289
  source 1..80: mol_type = other DNA

SEQ ID NO: 196020 - DNA, 80 bp, synthetic construct; identical to SEQ ID NO: 11290
  source 1..80: mol_type = other DNA

SEQ ID NO: 196021 - DNA, 80 bp, synthetic construct; identical to SEQ ID NO: 11291
  source 1..80: mol_type = other DNA

SEQ ID NO: 196022 - DNA, 80 bp, synthetic construct; identical to SEQ ID NO: 11292
  source 1..80: mol_type = other DNA

SEQ ID NO: 196023 - DNA, 80 bp, synthetic construct; identical to SEQ ID NO: 11293
  source 1..80: mol_type = other DNA

SEQ ID NO: 196024 - DNA, 80 bp, synthetic construct; identical to SEQ ID NO: 11294
  source 1..80: mol_type = other DNA

SEQ ID NO: 196025 - DNA, 80 bp, synthetic construct; identical to SEQ ID NO: 11295
  source 1..80: mol_type = other DNA

SEQ ID NO: 196026 - DNA, 80 bp, synthetic construct; identical to SEQ ID NO: 11296
  source 1..80: mol_type = other DNA

SEQ ID NO: 196027 - DNA, 80 bp, synthetic construct; identical to SEQ ID NO: 11297
  source 1..80: mol_type = other DNA

SEQ ID NO: 196028 - DNA, 80 bp, synthetic construct; identical to SEQ ID NO: 11298
  source 1..80: mol_type = other DNA

SEQ ID NO: 196029 - DNA, 80 bp, synthetic construct; identical to SEQ ID NO: 11299
  source 1..80: mol_type = other DNA

SEQ ID NO: 196030 - DNA, 80 bp, synthetic construct; identical to SEQ ID NO: 11300
  source 1..80: mol_type = other DNA

SEQ ID NO: 196031 - DNA, 80 bp, synthetic construct; identical to SEQ ID NO: 11301
  source 1..80: mol_type = other DNA

SEQ ID NO: 196032 - DNA, 80 bp, synthetic construct; identical to SEQ ID NO: 11302
  source 1..80: mol_type = other DNA

SEQ ID NO: 196033 - DNA, 80 bp, synthetic construct; identical to SEQ ID NO: 11303
  source 1..80: mol_type = other DNA

SEQ ID NO: 196034 - DNA, 80 bp, synthetic construct; identical to SEQ ID NO: 11304
  source 1..80: mol_type = other DNA

SEQ ID NO: 196035 - DNA, 80 bp, synthetic construct; identical to SEQ ID NO: 11305
  source 1..80: mol_type = other DNA

SEQ ID NO: 196036 - DNA, 80 bp, synthetic construct; identical to SEQ ID NO: 11306
  source 1..80: mol_type = other DNA

SEQ ID NO: 196037 - DNA, 80 bp, synthetic construct; identical to SEQ ID NO: 11307
  source 1..80: mol_type = other DNA

SEQ ID NO: 196038 - DNA, 80 bp, synthetic construct; identical to SEQ ID NO: 11308
  source 1..80: mol_type = other DNA

SEQ ID NO: 196039 - DNA, 80 bp, synthetic construct; identical to SEQ ID NO: 11309
  source 1..80: mol_type = other DNA

SEQ ID NO: 196040 - DNA, 80 bp, synthetic construct; identical to SEQ ID NO: 11310
  source 1..80: mol_type = other DNA

SEQ ID NO: 196041 - DNA, 80 bp, synthetic construct; identical to SEQ ID NO: 11311
  source 1..80: mol_type = other DNA

SEQ ID NO: 196042 - DNA, 80 bp, synthetic construct; identical to SEQ ID NO: 11312
  source 1..80: mol_type = other DNA

SEQ ID NO: 196043 - DNA, 80 bp, synthetic construct; identical to SEQ ID NO: 11313
  source 1..80: mol_type = other DNA

SEQ ID NO: 196044 - DNA, 80 bp, synthetic construct; identical to SEQ ID NO: 11314
  source 1..80: mol_type = other DNA

SEQ ID NO: 196045 - DNA, 80 bp, synthetic construct; identical to SEQ ID NO: 11315
  source 1..80: mol_type = other DNA

SEQ ID NO: 196046 - DNA, 80 bp, synthetic construct; identical to SEQ ID NO: 11316
  source 1..80: mol_type = other DNA

SEQ ID NO: 196047 - DNA, 80 bp, synthetic construct; identical to SEQ ID NO: 11317
  source 1..80: mol_type = other DNA

SEQ ID NO: 196048 - DNA, 80 bp, synthetic construct; identical to SEQ ID NO: 11318
  source 1..80: mol_type = other DNA

SEQ ID NO: 196049 - DNA, 80 bp, synthetic construct; identical to SEQ ID NO: 11319
  source 1..80: mol_type = other DNA

SEQ ID NO: 196050 - DNA, 80 bp, synthetic construct; identical to SEQ ID NO: 11320
  source 1..80: mol_type = other DNA

SEQ ID NO: 196051 - DNA, 80 bp, synthetic construct; identical to SEQ ID NO: 11321
  source 1..80: mol_type = other DNA

SEQ ID NO: 196052 - DNA, 80 bp, synthetic construct; identical to SEQ ID NO: 11322
  source 1..80: mol_type = other DNA

SEQ ID NO: 196053 - DNA, 80 bp, synthetic construct; identical to SEQ ID NO: 11323
  source 1..80: mol_type = other DNA

SEQ ID NO: 196054 - DNA, 80 bp, synthetic construct; identical to SEQ ID NO: 11324
  source 1..80: mol_type = other DNA

SEQ ID NO: 196055 - DNA, 80 bp, synthetic construct; identical to SEQ ID NO: 11325
  source 1..80: mol_type = other DNA

SEQ ID NO: 196056 - DNA, 80 bp, synthetic construct; identical to SEQ ID NO: 11326
  source 1..80: mol_type = other DNA

SEQ ID NO: 196057 - DNA, 80 bp, synthetic construct; identical to SEQ ID NO: 11327
  source 1..80: mol_type = other DNA

SEQ ID NO: 196058 - DNA, 80 bp, synthetic construct; identical to SEQ ID NO: 11328
  source 1..80: mol_type = other DNA

SEQ ID NO: 196059 - DNA, 80 bp, synthetic construct; identical to SEQ ID NO: 11329
  source 1..80: mol_type = other DNA

SEQ ID NO: 196060 - DNA, 80 bp, synthetic construct; identical to SEQ ID NO: 11330
  source 1..80: mol_type = other DNA

SEQ ID NO: 196061 - DNA, 80 bp, synthetic construct; identical to SEQ ID NO: 11331
  source 1..80: mol_type = other DNA

SEQ ID NO: 196062 - DNA, 80 bp, synthetic construct; identical to SEQ ID NO: 11332
  source 1..80: mol_type = other DNA

SEQ ID NO: 196063 - DNA, 80 bp, synthetic construct; identical to SEQ ID NO: 11333
  source 1..80: mol_type = other DNA

SEQ ID NO: 196064 - DNA, 80 bp, synthetic construct; identical to SEQ ID NO: 11334
  source 1..80: mol_type = other DNA

SEQ ID NO: 196065 - DNA, 80 bp, synthetic construct; identical to SEQ ID NO: 11335
  source 1..80: mol_type = other DNA

SEQ ID NO: 196066 - DNA, 80 bp, synthetic construct; identical to SEQ ID NO: 11336
  source 1..80: mol_type = other DNA

SEQ ID NO: 196067 - DNA, 80 bp, synthetic construct; identical to SEQ ID NO: 11337
  source 1..80: mol_type = other DNA

SEQ ID NO: 196068 - DNA, 80 bp, synthetic construct; identical to SEQ ID NO: 11338
  source 1..80: mol_type = other DNA

SEQ ID NO: 196069 - DNA, 80 bp, synthetic construct; identical to SEQ ID NO: 11339
  source 1..80: mol_type = other DNA

SEQ ID NO: 196070 - DNA, 80 bp, synthetic construct; identical to SEQ ID NO: 11340
  source 1..80: mol_type = other DNA

SEQ ID NO: 196071 - DNA, 80 bp, synthetic construct; identical to SEQ ID NO: 11341
  source 1..80: mol_type = other DNA

SEQ ID NO: 196072 - DNA, 80 bp, synthetic construct; identical to SEQ ID NO: 11342
  source 1..80: mol_type = other DNA

SEQ ID NO: 196073 - DNA, 80 bp, synthetic construct; identical to SEQ ID NO: 11343
  source 1..80: mol_type = other DNA

SEQ ID NO: 196074 - DNA, 80 bp, synthetic construct; identical to SEQ ID NO: 11344
  source 1..80: mol_type = other DNA

SEQ ID NO: 196075 - DNA, 80 bp, synthetic construct; identical to SEQ ID NO: 11345
  source 1..80: mol_type = other DNA

SEQ ID NO: 196076 - DNA, 80 bp, synthetic construct; identical to SEQ ID NO: 11346
  source 1..80: mol_type = other DNA

SEQ ID NO: 196077 - DNA, 80 bp, synthetic construct; identical to SEQ ID NO: 11347
  source 1..80: mol_type = other DNA

SEQ ID NO: 196078 - DNA, 80 bp, synthetic construct; identical to SEQ ID NO: 11348
  source 1..80: mol_type = other DNA

SEQ ID NO: 196079 - DNA, 80 bp, synthetic construct; identical to SEQ ID NO: 11349
  source 1..80: mol_type = other DNA

SEQ ID NO: 196080 - DNA, 80 bp, synthetic construct; identical to SEQ ID NO: 11350
  source 1..80: mol_type = other DNA

SEQ ID NO: 196081 - DNA, 80 bp, synthetic construct; identical to SEQ ID NO: 11351
  source 1..80: mol_type = other DNA

SEQ ID NO: 196082 - DNA, 80 bp, synthetic construct; identical to SEQ ID NO: 11352
  source 1..80: mol_type = other DNA

SEQ ID NO: 196083 - DNA, 80 bp, synthetic construct; identical to SEQ ID NO: 11353
  source 1..80: mol_type = other DNA

SEQ ID NO: 196084 - DNA, 80 bp, synthetic construct; identical to SEQ ID NO: 11354
  source 1..80: mol_type = other DNA

SEQ ID NO: 196085 - DNA, 80 bp, synthetic construct; identical to SEQ ID NO: 11355
  source 1..80: mol_type = other DNA

SEQ ID NO: 196086 - DNA, 80 bp, synthetic construct; identical to SEQ ID NO: 11356
  source 1..80: mol_type = other DNA

SEQ ID NO: 196087 - DNA, 80 bp, synthetic construct; identical to SEQ ID NO: 11357
  source 1..80: mol_type = other DNA

SEQ ID NO: 196088 - DNA, 80 bp, synthetic construct; identical to SEQ ID NO: 11358
  source 1..80: mol_type = other DNA

SEQ ID NO: 196089 - DNA, 80 bp, synthetic construct; identical to SEQ ID NO: 11359
  source 1..80: mol_type = other DNA

SEQ ID NO: 196090 - DNA, 80 bp, synthetic construct; identical to SEQ ID NO: 11360
  source 1..80: mol_type = other DNA

SEQ ID NO: 196091 - DNA, 80 bp, synthetic construct; identical to SEQ ID NO: 11361
  source 1..80: mol_type = other DNA

SEQ ID NO: 196092 - DNA, 80 bp, synthetic construct; identical to SEQ ID NO: 11362
  source 1..80: mol_type = other DNA

SEQ ID NO: 196093 - DNA, 80 bp, synthetic construct; identical to SEQ ID NO: 11363
  source 1..80: mol_type = other DNA

SEQ ID NO: 196094 - DNA, 80 bp, synthetic construct; identical to SEQ ID NO: 11364
  source 1..80: mol_type = other DNA

SEQ ID NO: 196095 - DNA, 80 bp, synthetic construct; identical to SEQ ID NO: 11365
  source 1..80: mol_type = other DNA

SEQ ID NO: 196096 - DNA, 80 bp, synthetic construct; identical to SEQ ID NO: 11366
  source 1..80: mol_type = other DNA

SEQ ID NO: 196097 - DNA, 80 bp, synthetic construct; identical to SEQ ID NO: 11367
  source 1..80: mol_type = other DNA

SEQ ID NO: 196098 - DNA, 80 bp, synthetic construct; identical to SEQ ID NO: 11368
  source 1..80: mol_type = other DNA

SEQ ID NO: 196099 - DNA, 80 bp, synthetic construct; identical to SEQ ID NO: 11369
  source 1..80: mol_type = other DNA

SEQ ID NO: 196100 - DNA, 80 bp, synthetic construct; identical to SEQ ID NO: 11370
  source 1..80: mol_type = other DNA

SEQ ID NO: 196101 - DNA, 80 bp, synthetic construct; identical to SEQ ID NO: 11371
  source 1..80: mol_type = other DNA

SEQ ID NO: 196102 - DNA, 80 bp, synthetic construct; identical to SEQ ID NO: 11372
  source 1..80: mol_type = other DNA

SEQ ID NO: 196103 - DNA, 80 bp, synthetic construct; identical to SEQ ID NO: 11373
  source 1..80: mol_type = other DNA

SEQ ID NO: 196104 - DNA, 80 bp, synthetic construct; identical to SEQ ID NO: 11374
  source 1..80: mol_type = other DNA

SEQ ID NO: 196105 - DNA, 80 bp, synthetic construct; identical to SEQ ID NO: 11375
  source 1..80: mol_type = other DNA

SEQ ID NO: 196106 - DNA, 80 bp, synthetic construct; identical to SEQ ID NO: 11376
  source 1..80: mol_type = other DNA

SEQ ID NO: 196107 - DNA, 80 bp, synthetic construct; identical to SEQ ID NO: 11377
  source 1..80: mol_type = other DNA

SEQ ID NO: 196108 - DNA, 80 bp, synthetic construct; identical to SEQ ID NO: 11378
  source 1..80: mol_type = other DNA

SEQ ID NO: 196109 - DNA, 80 bp, synthetic construct; identical to SEQ ID NO: 11379
  source 1..80: mol_type = other DNA

SEQ ID NO: 196110 - DNA, 80 bp, synthetic construct; identical to SEQ ID NO: 11380
  source 1..80: mol_type = other DNA

SEQ ID NO: 196111 - DNA, 80 bp, synthetic construct; identical to SEQ ID NO: 11381
  source 1..80: mol_type = other DNA

SEQ ID NO: 196112 - DNA, 80 bp, synthetic construct; identical to SEQ ID NO: 11382
  source 1..80: mol_type = other DNA

SEQ ID NO: 196113 - DNA, 80 bp, synthetic construct; identical to SEQ ID NO: 11383
  source 1..80: mol_type = other DNA

SEQ ID NO: 196114 - DNA, 80 bp, synthetic construct; identical to SEQ ID NO: 11384
  source 1..80: mol_type = other DNA

SEQ ID NO: 196115 - DNA, 80 bp, synthetic construct; identical to SEQ ID NO: 11385
  source 1..80: mol_type = other DNA

SEQ ID NO: 196116 - DNA, 80 bp, synthetic construct; identical to SEQ ID NO: 11386
  source 1..80: mol_type = other DNA

SEQ ID NO: 196117 - DNA, 80 bp, synthetic construct; identical to SEQ ID NO: 11387
  source 1..80: mol_type = other DNA

SEQ ID NO: 196118 - DNA, 80 bp, synthetic construct; identical to SEQ ID NO: 11388
  source 1..80: mol_type = other DNA

SEQ ID NO: 196119 - DNA, 80 bp, synthetic construct; identical to SEQ ID NO: 11389
  source 1..80: mol_type = other DNA

SEQ ID NO: 196120 - DNA, 80 bp, synthetic construct; identical to SEQ ID NO: 11390
  source 1..80: mol_type = other DNA

SEQ ID NO: 196121 - DNA, 80 bp, synthetic construct; identical to SEQ ID NO: 11391
  source 1..80: mol_type = other DNA

SEQ ID NO: 196122 - DNA, 80 bp, synthetic construct; identical to SEQ ID NO: 11392
  source 1..80: mol_type = other DNA

SEQ ID NO: 196123 - DNA, 80 bp, synthetic construct; identical to SEQ ID NO: 11393
  source 1..80: mol_type = other DNA

SEQ ID NO: 196124 - DNA, 80 bp, synthetic construct; identical to SEQ ID NO: 11394
  source 1..80: mol_type = other DNA

SEQ ID NO: 196125 - DNA, 80 bp, synthetic construct; identical to SEQ ID NO: 11395
  source 1..80: mol_type = other DNA

SEQ ID NO: 196126 - DNA, 80 bp, synthetic construct; identical to SEQ ID NO: 11396
  source 1..80: mol_type = other DNA

SEQ ID NO: 196127 - DNA, 80 bp, synthetic construct; identical to SEQ ID NO: 11397
  source 1..80: mol_type = other DNA

SEQ ID NO: 196128 - DNA, 80 bp, synthetic construct; identical to SEQ ID NO: 11398
  source 1..80: mol_type = other DNA

SEQ ID NO: 196129 - DNA, 80 bp, synthetic construct; identical to SEQ ID NO: 11399
  source 1..80: mol_type = other DNA

SEQ ID NO: 196130 - DNA, 80 bp, synthetic construct; identical to SEQ ID NO: 11400
  source 1..80: mol_type = other DNA

SEQ ID NO: 196131 - DNA, 80 bp, synthetic construct; identical to SEQ ID NO: 11401
  source 1..80: mol_type = other DNA

SEQ ID NO: 196132 - DNA, 80 bp, synthetic construct; identical to SEQ ID NO: 11402
  source 1..80: mol_type = other DNA

SEQ ID NO: 196133 - DNA, 80 bp, synthetic construct; identical to SEQ ID NO: 11403
  source 1..80: mol_type = other DNA

SEQ ID NO: 196134 - DNA, 80 bp, synthetic construct; identical to SEQ ID NO: 11404
  source 1..80: mol_type = other DNA

SEQ ID NO: 196135 - DNA, 80 bp, synthetic construct; identical to SEQ ID NO: 11405
  source 1..80: mol_type = other DNA

SEQ ID NO: 196136 - DNA, 80 bp, synthetic construct; identical to SEQ ID NO: 11406
  source 1..80: mol_type = other DNA

SEQ ID NO: 196137 - DNA, 80 bp, synthetic construct; identical to SEQ ID NO: 11407
  source 1..80: mol_type = other DNA

SEQ ID NO: 196138 - DNA, 80 bp, synthetic construct; identical to SEQ ID NO: 11408
  source 1..80: mol_type = other DNA

SEQ ID NO: 196139 - DNA, 80 bp, synthetic construct; identical to SEQ ID NO: 11409
  source 1..80: mol_type = other DNA

SEQ ID NO: 196140 - DNA, 80 bp, synthetic construct; identical to SEQ ID NO: 11410
  source 1..80: mol_type = other DNA

SEQ ID NO: 196141 - DNA, 80 bp, synthetic construct; identical to SEQ ID NO: 11411
  source 1..80: mol_type = other DNA

SEQ ID NO: 196142 - DNA, 80 bp, synthetic construct; identical to SEQ ID NO: 11412
  source 1..80: mol_type = other DNA

SEQ ID NO: 196143 - DNA, 80 bp, synthetic construct; identical to SEQ ID NO: 11413
  source 1..80: mol_type = other DNA

SEQ ID NO: 196144 - DNA, 80 bp, synthetic construct; identical to SEQ ID NO: 11414
  source 1..80: mol_type = other DNA

SEQ ID NO: 196145 - DNA, 80 bp, synthetic construct; identical to SEQ ID NO: 11415
  source 1..80: mol_type = other DNA

SEQ ID NO: 196146 - DNA, 80 bp, synthetic construct; identical to SEQ ID NO: 11416
  source 1..80: mol_type = other DNA

SEQ ID NO: 196147 - DNA, 80 bp, synthetic construct; identical to SEQ ID NO: 11417
  source 1..80: mol_type = other DNA

SEQ ID NO: 196148 - DNA, 80 bp, synthetic construct; identical to SEQ ID NO: 11418
  source 1..80: mol_type = other DNA

SEQ ID NO: 196149 - DNA, 80 bp, synthetic construct; identical to SEQ ID NO: 11419
  source 1..80: mol_type = other DNA

SEQ ID NO: 196150 - DNA, 80 bp, synthetic construct; identical to SEQ ID NO: 11420
  source 1..80: mol_type = other DNA

SEQ ID NO: 196151 - DNA, 80 bp, synthetic construct; identical to SEQ ID NO: 11421
  source 1..80: mol_type = other DNA

SEQ ID NO: 196152 - DNA, 80 bp, synthetic construct; identical to SEQ ID NO: 11422
  source 1..80: mol_type = other DNA

SEQ ID NO: 196153 - DNA, 80 bp, synthetic construct; identical to SEQ ID NO: 11423
  source 1..80: mol_type = other DNA

SEQ ID NO: 196154 - DNA, 80 bp, synthetic construct; identical to SEQ ID NO: 11424
  source 1..80: mol_type = other DNA

SEQ ID NO: 196155 - DNA, 80 bp, synthetic construct; identical to SEQ ID NO: 11425
  source 1..80: mol_type = other DNA

SEQ ID NO: 196156 - DNA, 80 bp, synthetic construct; identical to SEQ ID NO: 11426
  source 1..80: mol_type = other DNA

SEQ ID NO: 196157 - DNA, 80 bp, synthetic construct; identical to SEQ ID NO: 11427
  source 1..80: mol_type = other DNA

SEQ ID NO: 196158 - DNA, 80 bp, synthetic construct; identical to SEQ ID NO: 11428
  source 1..80: mol_type = other DNA

SEQ ID NO: 196159 - DNA, 80 bp, synthetic construct; identical to SEQ ID NO: 11429
  source 1..80: mol_type = other DNA

SEQ ID NO: 196160 - DNA, 80 bp, synthetic construct; identical to SEQ ID NO: 11430
  source 1..80: mol_type = other DNA

SEQ ID NO: 196161 - DNA, 80 bp, synthetic construct; identical to SEQ ID NO: 11431
  source 1..80: mol_type = other DNA

SEQ ID NO: 196162 - DNA, 80 bp, synthetic construct; identical to SEQ ID NO: 11432
  source 1..80: mol_type = other DNA

SEQ ID NO: 196163 - DNA, 80 bp, synthetic construct; identical to SEQ ID NO: 11433
  source 1..80: mol_type = other DNA

SEQ ID NO: 196164 - DNA, 80 bp, synthetic construct; identical to SEQ ID NO: 11434
  source 1..80: mol_type = other DNA

SEQ ID NO: 196165 - DNA, 80 bp, synthetic construct; identical to SEQ ID NO: 11435
  source 1..80: mol_type = other DNA

SEQ ID NO: 196166 - DNA, 80 bp, synthetic construct; identical to SEQ ID NO: 11436
  source 1..80: mol_type = other DNA

SEQ ID NO: 196167 - DNA, 80 bp, synthetic construct; identical to SEQ ID NO: 11437
  source 1..80: mol_type = other DNA

SEQ ID NO: 196168 - DNA, 80 bp, synthetic construct; identical to SEQ ID NO: 11438
  source 1..80: mol_type = other DNA

SEQ ID NO: 196169 - DNA, 80 bp, synthetic construct; identical to SEQ ID NO: 11439
  source 1..80: mol_type = other DNA

SEQ ID NO: 196170 - DNA, 80 bp, synthetic construct; identical to SEQ ID NO: 11440
  source 1..80: mol_type = other DNA

SEQ ID NO: 196171 - DNA, 80 bp, synthetic construct; identical to SEQ ID NO: 11441
  source 1..80: mol_type = other DNA

SEQ ID NO: 196172 - DNA, 80 bp, synthetic construct; identical to SEQ ID NO: 11442
  source 1..80: mol_type = other DNA

SEQ ID NO: 196173 - DNA, 80 bp, synthetic construct; identical to SEQ ID NO: 11443
  source 1..80: mol_type = other DNA

SEQ ID NO: 196174 - DNA, 80 bp, synthetic construct; identical to SEQ ID NO: 11444
  source 1..80: mol_type = other DNA

SEQ ID NO: 196175 - DNA, 80 bp, synthetic construct; identical to SEQ ID NO: 11445
  source 1..80: mol_type = other DNA

SEQ ID NO: 196176 - DNA, 80 bp, synthetic construct; identical to SEQ ID NO: 11446
  source 1..80: mol_type = other DNA

SEQ ID NO: 196177 - DNA, 80 bp, synthetic construct; identical to SEQ ID NO: 11447
  source 1..80: mol_type = other DNA

SEQ ID NO: 196178 - DNA, 80 bp, synthetic construct; identical to SEQ ID NO: 11448
  source 1..80: mol_type = other DNA

SEQ ID NO: 196179 - DNA, 80 bp, synthetic construct; identical to SEQ ID NO: 11449
  source 1..80: mol_type = other DNA

SEQ ID NO: 196180 - DNA, 80 bp, synthetic construct; identical to SEQ ID NO: 11450
  source 1..80: mol_type = other DNA

SEQ ID NO: 196181 - DNA, 80 bp, synthetic construct; identical to SEQ ID NO: 11451
  source 1..80: mol_type = other DNA

SEQ ID NO: 196182 - DNA, 80 bp, synthetic construct; identical to SEQ ID NO: 11452
  source 1..80: mol_type = other DNA

SEQ ID NO: 196183 - DNA, 80 bp, synthetic construct; identical to SEQ ID NO: 11453
  source 1..80: mol_type = other DNA

SEQ ID NO: 196184 - DNA, 80 bp, synthetic construct; identical to SEQ ID NO: 11454
  source 1..80: mol_type = other DNA

SEQ ID NO: 196185 - DNA, 80 bp, synthetic construct; identical to SEQ ID NO: 11455
  source 1..80: mol_type = other DNA

SEQ ID NO: 196186 - DNA, 80 bp, synthetic construct; identical to SEQ ID NO: 11456
  source 1..80: mol_type = other DNA

SEQ ID NO: 196187 - DNA, 80 bp, synthetic construct; identical to SEQ ID NO: 11457
  source 1..80: mol_type = other DNA

SEQ ID NO: 196188 - DNA, 80 bp, synthetic construct; identical to SEQ ID NO: 11458
  source 1..80: mol_type = other DNA

SEQ ID NO: 196189 - DNA, 80 bp, synthetic construct; identical to SEQ ID NO: 11459
  source 1..80: mol_type = other DNA

SEQ ID NO: 196190 - DNA, 80 bp, synthetic construct; identical to SEQ ID NO: 11460
  source 1..80: mol_type = other DNA

SEQ ID NO: 196191 - DNA, 80 bp, synthetic construct; identical to SEQ ID NO: 11461
  source 1..80: mol_type = other DNA

SEQ ID NO: 196192 - DNA, 80 bp, synthetic construct; identical to SEQ ID NO: 11462
  source 1..80: mol_type = other DNA

SEQ ID NO: 196193 - DNA, 80 bp, synthetic construct; identical to SEQ ID NO: 11463
  source 1..80: mol_type = other DNA

SEQ ID NO: 196194 - DNA, 80 bp, synthetic construct; identical to SEQ ID NO: 11464
  source 1..80: mol_type = other DNA

SEQ ID NO: 196195 - DNA, 80 bp, synthetic construct; identical to SEQ ID NO: 11465
  source 1..80: mol_type = other DNA

SEQ ID NO: 196196 - DNA, 80 bp, synthetic construct; identical to SEQ ID NO: 11466
  source 1..80: mol_type = other DNA

SEQ ID NO: 196197 - DNA, 80 bp, synthetic construct; identical to SEQ ID NO: 11467
  source 1..80: mol_type = other DNA

SEQ ID NO: 196198 - DNA, 80 bp, synthetic construct; identical to SEQ ID NO: 11468
  source 1..80: mol_type = other DNA

SEQ ID NO: 196199 - DNA, 80 bp, synthetic construct; identical to SEQ ID NO: 11469
  source 1..80: mol_type = other DNA

SEQ ID NO: 196200 - DNA, 80 bp, synthetic construct; identical to SEQ ID NO: 11470
  source 1..80: mol_type = other DNA

SEQ ID NO: 196201 - DNA, 80 bp, synthetic construct; identical to SEQ ID NO: 11471
  source 1..80: mol_type = other DNA

SEQ ID NO: 196202 - DNA, 80 bp, synthetic construct; identical to SEQ ID NO: 11472
  source 1..80: mol_type = other DNA

SEQ ID NO: 196203 - DNA, 80 bp, synthetic construct; identical to SEQ ID NO: 11473
  source 1..80: mol_type = other DNA

SEQ ID NO: 196204 - DNA, 80 bp, synthetic construct; identical to SEQ ID NO: 11474
  source 1..80: mol_type = other DNA

SEQ ID NO: 196205 - DNA, 80 bp, synthetic construct; identical to SEQ ID NO: 11475
  source 1..80: mol_type = other DNA

SEQ ID NO: 196206 - DNA, 80 bp, synthetic construct; identical to SEQ ID NO: 11476
  source 1..80: mol_type = other DNA

SEQ ID NO: 196207 - DNA, 80 bp, synthetic construct; identical to SEQ ID NO: 11477
  source 1..80: mol_type = other DNA

SEQ ID NO: 196208 - DNA, 80 bp, synthetic construct; identical to SEQ ID NO: 11478
  source 1..80: mol_type = other DNA

SEQ ID NO: 196209 - DNA, 80 bp, synthetic construct; identical to SEQ ID NO: 11479
  source 1..80: mol_type = other DNA

SEQ ID NO: 196210 - DNA, 80 bp, synthetic construct; identical to SEQ ID NO: 11480
  source 1..80: mol_type = other DNA

SEQ ID NO: 196211 - DNA, 80 bp, synthetic construct; identical to SEQ ID NO: 11481
  source 1..80: mol_type = other DNA

SEQ ID NO: 196212 - DNA, 80 bp, synthetic construct; identical to SEQ ID NO: 11482
  source 1..80: mol_type = other DNA

SEQ ID NO: 196213 - DNA, 80 bp, synthetic construct; identical to SEQ ID NO: 11483
  source 1..80: mol_type = other DNA

SEQ ID NO: 196214 - DNA, 80 bp, synthetic construct; identical to SEQ ID NO: 11484
  source 1..80: mol_type = other DNA

SEQ ID NO: 196215 - DNA, 80 bp, synthetic construct; identical to SEQ ID NO: 11485
  source 1..80: mol_type = other DNA

SEQ ID NO: 196216 - DNA, 80 bp, synthetic construct; identical to SEQ ID NO: 11486
  source 1..80: mol_type = other DNA

SEQ ID NO: 196217 - DNA, 80 bp, synthetic construct; identical to SEQ ID NO: 11487
  source 1..80: mol_type = other DNA

SEQ ID NO: 196218 - DNA, 80 bp, synthetic construct; identical to SEQ ID NO: 11488
  source 1..80: mol_type = other DNA

SEQ ID NO: 196219 - DNA, 80 bp, synthetic construct; identical to SEQ ID NO: 11489
  source 1..80: mol_type = other DNA

SEQ ID NO: 196220 - DNA, 80 bp, synthetic construct; identical to SEQ ID NO: 11490
  source 1..80: mol_type = other DNA

SEQ ID NO: 196221 - DNA, 80 bp, synthetic construct; identical to SEQ ID NO: 11491
  source 1..80: mol_type = other DNA

SEQ ID NO: 196222 - DNA, 80 bp, synthetic construct; identical to SEQ ID NO: 11492
  source 1..80: mol_type = other DNA

SEQ ID NO: 196223 - DNA, 80 bp, synthetic construct; identical to SEQ ID NO: 11493
  source 1..80: mol_type = other DNA

SEQ ID NO: 196224 - DNA, 80 bp, synthetic construct; identical to SEQ ID NO: 11494
  source 1..80: mol_type = other DNA

SEQ ID NO: 196225 - DNA, 80 bp, synthetic construct; identical to SEQ ID NO: 11495
  source 1..80: mol_type = other DNA

SEQ ID NO: 196226 - DNA, 80 bp, synthetic construct; identical to SEQ ID NO: 11496
  source 1..80: mol_type = other DNA

SEQ ID NO: 196227 - DNA, 80 bp, synthetic construct; identical to SEQ ID NO: 11497
  source 1..80: mol_type = other DNA

SEQ ID NO: 196228 - DNA, 80 bp, synthetic construct; identical to SEQ ID NO: 11498
  source 1..80: mol_type = other DNA

SEQ ID NO: 196229 - DNA, 80 bp, synthetic construct; identical to SEQ ID NO: 11499
  source 1..80: mol_type = other DNA

SEQ ID NO: 196230 - DNA, 80 bp, synthetic construct; identical to SEQ ID NO: 11500
  source 1..80: mol_type = other DNA

SEQ ID NO: 196231 - DNA, 80 bp, synthetic construct; identical to SEQ ID NO: 11501
  source 1..80: mol_type = other DNA

SEQ ID NO: 196232 - DNA, 80 bp, synthetic construct; identical to SEQ ID NO: 11502
  source 1..80: mol_type = other DNA

SEQ ID NO: 196233 - DNA, 80 bp, synthetic construct; identical to SEQ ID NO: 11503
  source 1..80: mol_type = other DNA

SEQ ID NO: 196234 - DNA, 80 bp, synthetic construct; identical to SEQ ID NO: 11504
  source 1..80: mol_type = other DNA

SEQ ID NO: 196235 - DNA, 80 bp, synthetic construct; identical to SEQ ID NO: 11505
  source 1..80: mol_type = other DNA

SEQ ID NO: 196236 - DNA, 80 bp, synthetic construct; identical to SEQ ID NO: 11506
  source 1..80: mol_type = other DNA

SEQ ID NO: 196237 - DNA, 80 bp, synthetic construct; identical to SEQ ID NO: 11507
  source 1..80: mol_type = other DNA

SEQ ID NO: 196238 - DNA, 80 bp, synthetic construct; identical to SEQ ID NO: 11508
  source 1..80: mol_type = other DNA

SEQ ID NO: 196239 - DNA, 80 bp, synthetic construct; identical to SEQ ID NO: 11509
  source 1..80: mol_type = other DNA

SEQ ID NO: 196240 - DNA, 80 bp, synthetic construct; identical to SEQ ID NO: 11510
  source 1..80: mol_type = other DNA

SEQ ID NO: 196241 - DNA, 80 bp, synthetic construct; identical to SEQ ID NO: 11511
  source 1..80: mol_type = other DNA

SEQ ID NO: 196242 - DNA, 80 bp, synthetic construct; identical to SEQ ID NO: 11512
  source 1..80: mol_type = other DNA

SEQ ID NO: 196243 - DNA, 80 bp, synthetic construct; identical to SEQ ID NO: 11513
  source 1..80: mol_type = other DNA

SEQ ID NO: 196244 - DNA, 80 bp, synthetic construct; identical to SEQ ID NO: 11514
  source 1..80: mol_type = other DNA

SEQ ID NO: 196245 - DNA, 80 bp, synthetic construct; identical to SEQ ID NO: 11515
  source 1..80: mol_type = other DNA

SEQ ID NO: 196246 - DNA, 80 bp, synthetic construct; identical to SEQ ID NO: 11516
  source 1..80: mol_type = other DNA

SEQ ID NO: 196247 - DNA, 80 bp, synthetic construct; identical to SEQ ID NO: 11517
  source 1..80: mol_type = other DNA

SEQ ID NO: 196248 - DNA, 80 bp, synthetic construct; identical to SEQ ID NO: 11518
  source 1..80: mol_type = other DNA

SEQ ID NO: 196249 - DNA, 80 bp, synthetic construct; identical to SEQ ID NO: 11519
  source 1..80: mol_type = other DNA

SEQ ID NO: 196250 - DNA, 80 bp, synthetic construct; identical to SEQ ID NO: 11520
  source 1..80: mol_type = other DNA

SEQ ID NO: 196251 - DNA, 80 bp, synthetic construct; identical to SEQ ID NO: 11521
  source 1..80: mol_type = other DNA

SEQ ID NO: 196252 - DNA, 80 bp, synthetic construct; identical to SEQ ID NO: 11522
  source 1..80: mol_type = other DNA

SEQ ID NO: 196253 - DNA, 80 bp, synthetic construct; identical to SEQ ID NO: 11523
  source 1..80: mol_type = other DNA

SEQ ID NO: 196254 - DNA, 80 bp, synthetic construct; identical to SEQ ID NO: 11524
  source 1..80: mol_type = other DNA

SEQ ID NO: 196255 - DNA, 80 bp, synthetic construct; identical to SEQ ID NO: 11525
  source 1..80: mol_type = other DNA

SEQ ID NO: 196256 - DNA, 80 bp, synthetic construct; identical to SEQ ID NO: 11526
  source 1..80: mol_type = other DNA

SEQ ID NO: 196257 - DNA, 80 bp, synthetic construct; identical to SEQ ID NO: 11527
  source 1..80: mol_type = other DNA

SEQ ID NO: 196258 - DNA, 80 bp, synthetic construct; identical to SEQ ID NO: 11528
  source 1..80: mol_type = other DNA

SEQ ID NO: 196259 - DNA, 80 bp, synthetic construct; identical to SEQ ID NO: 11529
  source 1..80: mol_type = other DNA

SEQ ID NO: 196260 - DNA, 80 bp, synthetic construct; identical to SEQ ID NO: 11530
  source 1..80: mol_type = other DNA

SEQ ID NO: 196261 - DNA, 80 bp, synthetic construct; identical to SEQ ID NO: 11531
  source 1..80: mol_type = other DNA

SEQ ID NO: 196262 - DNA, 80 bp, synthetic construct; identical to SEQ ID NO: 11532
  source 1..80: mol_type = other DNA

SEQ ID NO: 196263 - DNA, 80 bp, synthetic construct; identical to SEQ ID NO: 11533
  source 1..80: mol_type = other DNA

SEQ ID NO: 196264 - DNA, 80 bp, synthetic construct; identical to SEQ ID NO: 11534
  source 1..80: mol_type = other DNA

SEQ ID NO: 196265 - DNA, 80 bp, synthetic construct; identical to SEQ ID NO: 11535
  source 1..80: mol_type = other DNA

SEQ ID NO: 196266 - DNA, 80 bp, synthetic construct; identical to SEQ ID NO: 11536
  source 1..80: mol_type = other DNA

SEQ ID NO: 196267 - DNA, 80 bp, synthetic construct; identical to SEQ ID NO: 11537
  source 1..80: mol_type = other DNA

SEQ ID NO: 196268 - DNA, 80 bp, synthetic construct; identical to SEQ ID NO: 11538
  source 1..80: mol_type = other DNA

SEQ ID NO: 196269 - DNA, 80 bp, synthetic construct; identical to SEQ ID NO: 11539
  source 1..80: mol_type = other DNA

SEQ ID NO: 196270 - DNA, 80 bp, synthetic construct; identical to SEQ ID NO: 11540
  source 1..80: mol_type = other DNA

SEQ ID NO: 196271 - DNA, 80 bp, synthetic construct; identical to SEQ ID NO: 11541
  source 1..80: mol_type = other DNA

SEQ ID NO: 196272 - DNA, 80 bp, synthetic construct; identical to SEQ ID NO: 11542
  source 1..80: mol_type = other DNA

SEQ ID NO: 196273 - DNA, 80 bp, synthetic construct; identical to SEQ ID NO: 11543
  source 1..80: mol_type = other DNA

SEQ ID NO: 196274 - DNA, 80 bp, synthetic construct; identical to SEQ ID NO: 11544
  source 1..80: mol_type = other DNA

SEQ ID NO: 196275 - DNA, 80 bp, synthetic construct; identical to SEQ ID NO: 11545
  source 1..80: mol_type = other DNA

SEQ ID NO: 196276 - DNA, 80 bp, synthetic construct; identical to SEQ ID NO: 11546
  source 1..80: mol_type = other DNA

SEQ ID NO: 196277 - DNA, 80 bp, synthetic construct; identical to SEQ ID NO: 11547
  source 1..80: mol_type = other DNA

SEQ ID NO: 196278 - DNA, 80 bp, synthetic construct; identical to SEQ ID NO: 11548
  source 1..80: mol_type = other DNA

SEQ ID NO: 196279 - DNA, 80 bp, synthetic construct; identical to SEQ ID NO: 11549
  source 1..80: mol_type = other DNA

SEQ ID NO: 196280 - DNA, 80 bp, synthetic construct; identical to SEQ ID NO: 11550
  source 1..80: mol_type = other DNA

SEQ ID NO: 196281 - DNA, 80 bp, synthetic construct; identical to SEQ ID NO: 11551
  source 1..80: mol_type = other DNA

SEQ ID NO: 196282 - DNA, 80 bp, synthetic construct; identical to SEQ ID NO: 11552
  source 1..80: mol_type = other DNA

SEQ ID NO: 196283 - DNA, 80 bp, synthetic construct; identical to SEQ ID NO: 11553
  source 1..80: mol_type = other DNA

SEQ ID NO: 196284 - DNA, 80 bp, synthetic construct; identical to SEQ ID NO: 11554
  source 1..80: mol_type = other DNA

SEQ ID NO: 196285 - DNA, 80 bp, synthetic construct; identical to SEQ ID NO: 11555
  source 1..80: mol_type = other DNA

SEQ ID NO: 196286 - DNA, 80 bp, synthetic construct; identical to SEQ ID NO: 11556
  source 1..80: mol_type = other DNA

SEQ ID NO: 196287 - DNA, 80 bp, synthetic construct; identical to SEQ ID NO: 11557
  source 1..80: mol_type = other DNA

SEQ ID NO: 196288 - DNA, 80 bp, synthetic construct; identical to SEQ ID NO: 11558
  source 1..80: mol_type = other DNA

SEQ ID NO: 196289 - DNA, 80 bp, synthetic construct; identical to SEQ ID NO: 11559
  source 1..80: mol_type = other DNA

SEQ ID NO: 196290 - DNA, 80 bp, synthetic construct; identical to SEQ ID NO: 11560
  source 1..80: mol_type = other DNA

SEQ ID NO: 196291 - DNA, 80 bp, synthetic construct; identical to SEQ ID NO: 11561
  source 1..80: mol_type = other DNA

SEQ ID NO: 196292 - DNA, 80 bp, synthetic construct; identical to SEQ ID NO: 11562
  source 1..80: mol_type = other DNA

SEQ ID NO: 196293 - DNA, 80 bp, synthetic construct; identical to SEQ ID NO: 11563
  source 1..80: mol_type = other DNA

SEQ ID NO: 196294 - DNA, 80 bp, synthetic construct; identical to SEQ ID NO: 11564
  source 1..80: mol_type = other DNA

SEQ ID NO: 196295 - DNA, 80 bp, synthetic construct; identical to SEQ ID NO: 11565
  source 1..80: mol_type = other DNA

SEQ ID NO: 196296 - DNA, 80 bp, synthetic construct; identical to SEQ ID NO: 11566
  source 1..80: mol_type = other DNA

SEQ ID NO: 196297 - DNA, 80 bp, synthetic construct; identical to SEQ ID NO: 11567
  source 1..80: mol_type = other DNA

SEQ ID NO: 196298 - DNA, 80 bp, synthetic construct; identical to SEQ ID NO: 11568
  source 1..80: mol_type = other DNA

SEQ ID NO: 196299 - DNA, 80 bp, synthetic construct; identical to SEQ ID NO: 11569
  source 1..80: mol_type = other DNA

SEQ ID NO: 196300 - DNA, 80 bp, synthetic construct; identical to SEQ ID NO: 11570
  source 1..80: mol_type = other DNA

SEQ ID NO: 196301 - DNA, 80 bp, synthetic construct; identical to SEQ ID NO: 11571
  source 1..80: mol_type = other DNA

SEQ ID NO: 196302 - DNA, 80 bp, synthetic construct; identical to SEQ ID NO: 11572
  source 1..80: mol_type = other DNA

SEQ ID NO: 196303 - DNA, 80 bp, synthetic construct; identical to SEQ ID NO: 11573
  source 1..80: mol_type = other DNA

SEQ ID NO: 196304 - DNA, 80 bp, synthetic construct; identical to SEQ ID NO: 11574
  source 1..80: mol_type = other DNA

SEQ ID NO: 196305 - DNA, 80 bp, synthetic construct; identical to SEQ ID NO: 11575
  source 1..80: mol_type = other DNA

SEQ ID NO: 196306 - DNA, 80 bp, synthetic construct; identical to SEQ ID NO: 11576
  source 1..80: mol_type = other DNA

SEQ ID NO: 196307 - DNA, 80 bp, synthetic construct; identical to SEQ ID NO: 11577
  source 1..80: mol_type = other DNA

SEQ ID NO: 196308 - DNA, 80 bp, synthetic construct; identical to SEQ ID NO: 11578
  source 1..80: mol_type = other DNA

SEQ ID NO: 196309 - DNA, 80 bp, synthetic construct; identical to SEQ ID NO: 11579
  source 1..80: mol_type = other DNA

SEQ ID NO: 196310 - DNA, 80 bp, synthetic construct; identical to SEQ ID NO: 11580
  source 1..80: mol_type = other DNA

SEQ ID NO: 196311 - DNA, 80 bp, synthetic construct; identical to SEQ ID NO: 11581
  source 1..80: mol_type = other DNA

SEQ ID NO: 196312 - DNA, 80 bp, synthetic construct; identical to SEQ ID NO: 11582
  source 1..80: mol_type = other DNA

SEQ ID NO: 196313 - DNA, 80 bp, synthetic construct; identical to SEQ ID NO: 11583
  source 1..80: mol_type = other DNA

SEQ ID NO: 196314 - DNA, 80 bp, synthetic construct; identical to SEQ ID NO: 11584
  source 1..80: mol_type = other DNA

SEQ ID NO: 196315 - DNA, 80 bp, synthetic construct; identical to SEQ ID NO: 11585
  source 1..80: mol_type = other DNA

SEQ ID NO: 196316 - DNA, 80 bp, synthetic construct; identical to SEQ ID NO: 11586
  source 1..80: mol_type = other DNA

SEQ ID NO: 196317 - DNA, 80 bp, synthetic construct; identical to SEQ ID NO: 11587
  source 1..80: mol_type = other DNA

SEQ ID NO: 196318 - DNA, 80 bp, synthetic construct; identical to SEQ ID NO: 11588
  source 1..80: mol_type = other DNA

SEQ ID NO: 196319 - DNA, 80 bp, synthetic construct; identical to SEQ ID NO: 11589
  source 1..80: mol_type = other DNA

SEQ ID NO: 196320 - DNA, 80 bp, synthetic construct; identical to SEQ ID NO: 11590
  source 1..80: mol_type = other DNA

SEQ ID NO: 196321 - DNA, 80 bp, synthetic construct; identical to SEQ ID NO: 11591
  source 1..80: mol_type = other DNA

SEQ ID NO: 196322 - DNA, 80 bp, synthetic construct; identical to SEQ ID NO: 11592
  source 1..80: mol_type = other DNA

SEQ ID NO: 196323 - DNA, 80 bp, synthetic construct; identical to SEQ ID NO: 11593
  source 1..80: mol_type = other DNA

SEQ ID NO: 196324 - DNA, 80 bp, synthetic construct; identical to SEQ ID NO: 11594
  source 1..80: mol_type = other DNA

SEQ ID NO: 196325 - DNA, 80 bp, synthetic construct; identical to SEQ ID NO: 11595
  source 1..80: mol_type = other DNA

SEQ ID NO: 196326 - DNA, 80 bp, synthetic construct; identical to SEQ ID NO: 11596
  source 1..80: mol_type = other DNA

SEQ ID NO: 196327 - DNA, 80 bp, synthetic construct; identical to SEQ ID NO: 11597
  source 1..80: mol_type = other DNA

SEQ ID NO: 196328 - DNA, 80 bp, synthetic construct; identical to SEQ ID NO: 11598
  source 1..80: mol_type = other DNA

SEQ ID NO: 196329 - DNA, 80 bp, synthetic construct; identical to SEQ ID NO: 11599
  source 1..80: mol_type = other DNA

SEQ ID NO: 196330 - DNA, 80 bp, synthetic construct; identical to SEQ ID NO: 11600
  source 1..80: mol_type = other DNA

SEQ ID NO: 196331 - DNA, 80 bp, synthetic construct; identical to SEQ ID NO: 11601
  source 1..80: mol_type = other DNA

SEQ ID NO: 196332 - DNA, 80 bp, synthetic construct; identical to SEQ ID NO: 11602
  source 1..80: mol_type = other DNA

SEQ ID NO: 196333 - DNA, 80 bp, synthetic construct; identical to SEQ ID NO: 11603
  source 1..80: mol_type = other DNA

SEQ ID NO: 196334 - DNA, 80 bp, synthetic construct; identical to SEQ ID NO: 11604
  source 1..80: mol_type = other DNA

SEQ ID NO: 196335 - DNA, 80 bp, synthetic construct; identical to SEQ ID NO: 11605
  source 1..80: mol_type = other DNA

SEQ ID NO: 196336 - DNA, 80 bp, synthetic construct; identical to SEQ ID NO: 11606
  source 1..80: mol_type = other DNA

SEQ ID NO: 196337 - DNA, 80 bp, synthetic construct; identical to SEQ ID NO: 11607
  source 1..80: mol_type = other DNA

SEQ ID NO: 196338 - DNA, 80 bp, synthetic construct; identical to SEQ ID NO: 11608
  source 1..80: mol_type = other DNA

SEQ ID NO: 196339 - DNA, 80 bp, synthetic construct; identical to SEQ ID NO: 11609
  source 1..80: mol_type = other DNA

SEQ ID NO: 196340 - DNA, 80 bp, synthetic construct; identical to SEQ ID NO: 11610
  source 1..80: mol_type = other DNA

SEQ ID NO: 196341 - DNA, 80 bp, synthetic construct; identical to SEQ ID NO: 11611
  source 1..80: mol_type = other DNA

SEQ ID NO: 196342 - DNA, 80 bp, synthetic construct; identical to SEQ ID NO: 11612
  source 1..80: mol_type = other DNA

SEQ ID NO: 196343 - DNA, 80 bp, synthetic construct; identical to SEQ ID NO: 11613
  source 1..80: mol_type = other DNA

SEQ ID NO: 196344 - DNA, 80 bp, synthetic construct; identical to SEQ ID NO: 11614
  source 1..80: mol_type = other DNA

SEQ ID NO: 196345 - DNA, 80 bp, synthetic construct; identical to SEQ ID NO: 11615
  source 1..80: mol_type = other DNA

SEQ ID NO: 196346 - DNA, 80 bp, synthetic construct; identical to SEQ ID NO: 11616
  source 1..80: mol_type = other DNA

SEQ ID NO: 196347 - DNA, 80 bp, synthetic construct; identical to SEQ ID NO: 11617
  source 1..80: mol_type = other DNA

SEQ ID NO: 196348 - DNA, 80 bp, synthetic construct; identical to SEQ ID NO: 11618
  source 1..80: mol_type = other DNA

SEQ ID NO: 196349 - DNA, 80 bp, synthetic construct; identical to SEQ ID NO: 11619
  source 1..80: mol_type = other DNA

SEQ ID NO: 196350 - DNA, 80 bp, synthetic construct; identical to SEQ ID NO: 11620
  source 1..80: mol_type = other DNA

SEQ ID NO: 196351 - DNA, 80 bp, synthetic construct; identical to SEQ ID NO: 11621
  source 1..80: mol_type = other DNA

SEQ ID NO: 196352 - DNA, 80 bp, synthetic construct; identical to SEQ ID NO: 11622
  source 1..80: mol_type = other DNA

SEQ ID NO: 196353 - DNA, 80 bp, synthetic construct; identical to SEQ ID NO: 11623
  source 1..80: mol_type = other DNA

SEQ ID NO: 196354 - DNA, 80 bp, synthetic construct; identical to SEQ ID NO: 11624
  source 1..80: mol_type = other DNA

SEQ ID NO: 196355 - DNA, 80 bp, synthetic construct; identical to SEQ ID NO: 11625
  source 1..80: mol_type = other DNA

SEQ ID NO: 196356 - DNA, 80 bp, synthetic construct; identical to SEQ ID NO: 11626
  source 1..80: mol_type = other DNA

SEQ ID NO: 196357 - DNA, 80 bp, synthetic construct; identical to SEQ ID NO: 11627
  source 1..80: mol_type = other DNA

SEQ ID NO: 196358 - DNA, 80 bp, synthetic construct; identical to SEQ ID NO: 11628
  source 1..80: mol_type = other DNA

SEQ ID NO: 196359 - DNA, 80 bp, synthetic construct; identical to SEQ ID NO: 11629
  source 1..80: mol_type = other DNA

SEQ ID NO: 196360 - DNA, 80 bp, synthetic construct; identical to SEQ ID NO: 11630
  source 1..80: mol_type = other DNA

SEQ ID NO: 196361 - DNA, 80 bp, synthetic construct; identical to SEQ ID NO: 11631
  source 1..80: mol_type = other DNA

SEQ ID NO: 196362 - DNA, 80 bp, synthetic construct; identical to SEQ ID NO: 11632
  source 1..80: mol_type = other DNA

SEQ ID NO: 196363 - DNA, 80 bp, synthetic construct; identical to SEQ ID NO: 11633
  source 1..80: mol_type = other DNA

SEQ ID NO: 196364 - DNA, 80 bp, synthetic construct; identical to SEQ ID NO: 11634
  source 1..80: mol_type = other DNA

SEQ ID NO: 196365 - DNA, 80 bp, synthetic construct; identical to SEQ ID NO: 11635
  source 1..80: mol_type = other DNA

SEQ ID NO: 196366 - DNA, 80 bp, synthetic construct; identical to SEQ ID NO: 11636
  source 1..80: mol_type = other DNA

SEQ ID NO: 196367 - DNA, 80 bp, synthetic construct; identical to SEQ ID NO: 11637
  source 1..80: mol_type = other DNA

SEQ ID NO: 196368 - DNA, 80 bp, synthetic construct; identical to SEQ ID NO: 11638
  source 1..80: mol_type = other DNA

SEQ ID NO: 196369 - DNA, 80 bp, synthetic construct; identical to SEQ ID NO: 11639
  source 1..80: mol_type = other DNA

SEQ ID NO: 196370 - DNA, 80 bp, synthetic construct; identical to SEQ ID NO: 11640
  source 1..80: mol_type = other DNA

SEQ ID NO: 196371 - DNA, 80 bp, synthetic construct; identical to SEQ ID NO: 11641
  source 1..80: mol_type = other DNA

SEQ ID NO: 196372 - DNA, 80 bp, synthetic construct; identical to SEQ ID NO: 11642
  source 1..80: mol_type = other DNA

SEQ ID NO: 196373 - DNA, 80 bp, synthetic construct; identical to SEQ ID NO: 11643
  source 1..80: mol_type = other DNA

SEQ ID NO: 196374 - DNA, 80 bp, synthetic construct; identical to SEQ ID NO: 11644
  source 1..80: mol_type = other DNA

SEQ ID NO: 196375 - DNA, 80 bp, synthetic construct; identical to SEQ ID NO: 11645
  source 1..80: mol_type = other DNA

SEQ ID NO: 196376 - DNA, 80 bp, synthetic construct; identical to SEQ ID NO: 11646
  source 1..80: mol_type = other DNA

SEQ ID NO: 196377 - DNA, 80 bp, synthetic construct; identical to SEQ ID NO: 11647
  source 1..80: mol_type = other DNA

SEQ ID NO: 196378 - DNA, 80 bp, synthetic construct; identical to SEQ ID NO: 11648
  source 1..80: mol_type = other DNA

SEQ ID NO: 196379 - DNA, 80 bp, synthetic construct; identical to SEQ ID NO: 11649
  source 1..80: mol_type = other DNA

SEQ ID NO: 196380 - DNA, 80 bp, synthetic construct; identical to SEQ ID NO: 11650
  source 1..80: mol_type = other DNA

SEQ ID NO: 196381 - DNA, 80 bp, synthetic construct; identical to SEQ ID NO: 11651
  source 1..80: mol_type = other DNA

SEQ ID NO: 196382 - DNA, 80 bp, synthetic construct; identical to SEQ ID NO: 11652
  source 1..80: mol_type = other DNA

SEQ ID NO: 196383 - DNA, 80 bp, synthetic construct; identical to SEQ ID NO: 11653
  source 1..80: mol_type = other DNA

SEQ ID NO: 196384 - DNA, 80 bp, synthetic construct; identical to SEQ ID NO: 11654
  source 1..80: mol_type = other DNA

SEQ ID NO: 196385 - DNA, 80 bp, synthetic construct; identical to SEQ ID NO: 11655
  source 1..80: mol_type = other DNA

SEQ ID NO: 196386 - DNA, 80 bp, synthetic construct; identical to SEQ ID NO: 11656
  source 1..80: mol_type = other DNA

SEQ ID NO: 196387 - DNA, 80 bp, synthetic construct; identical to SEQ ID NO: 11657
  source 1..80: mol_type = other DNA

SEQ ID NO: 196388 - DNA, 80 bp, synthetic construct; identical to SEQ ID NO: 11658
  source 1..80: mol_type = other DNA

SEQ ID NO: 196389 - DNA, 80 bp, synthetic construct; identical to SEQ ID NO: 11659
  source 1..80: mol_type = other DNA

SEQ ID NO: 196390 - DNA, 80 bp, synthetic construct; identical to SEQ ID NO: 11660
  source 1..80: mol_type = other DNA

SEQ ID NO: 196391 - DNA, 80 bp, synthetic construct; identical to SEQ ID NO: 11661
  source 1..80: mol_type = other DNA

SEQ ID NO: 196392 - DNA, 80 bp, synthetic construct; identical to SEQ ID NO: 11662
  source 1..80: mol_type = other DNA

SEQ ID NO: 196393 - DNA, 80 bp, synthetic construct; identical to SEQ ID NO: 11663
  source 1..80: mol_type = other DNA

SEQ ID NO: 196394 - DNA, 80 bp, synthetic construct; identical to SEQ ID NO: 11664
  source 1..80: mol_type = other DNA

SEQ ID NO: 196395 - DNA, 80 bp, synthetic construct; identical to SEQ ID NO: 11665
  source 1..80: mol_type = other DNA

SEQ ID NO: 196396 - DNA, 80 bp, synthetic construct; identical to SEQ ID NO: 11666
  source 1..80: mol_type = other DNA

SEQ ID NO: 196397 - DNA, 80 bp, synthetic construct; identical to SEQ ID NO: 11667
  source 1..80: mol_type = other DNA

SEQ ID NO: 196398 - DNA, 80 bp, synthetic construct; identical to SEQ ID NO: 11668
  source 1..80: mol_type = other DNA

SEQ ID NO: 196399 - DNA, 80 bp, synthetic construct; identical to SEQ ID NO: 11669
  source 1..80: mol_type = other DNA

SEQ ID NO: 196400 - DNA, 80 bp, synthetic construct; identical to SEQ ID NO: 11670
  source 1..80: mol_type = other DNA

SEQ ID NO: 196401 - DNA, 80 bp, synthetic construct; identical to SEQ ID NO: 11671
  source 1..80: mol_type = other DNA

SEQ ID NO: 196402 - DNA, 80 bp, synthetic construct; identical to SEQ ID NO: 11672
  source 1..80: mol_type = other DNA

SEQ ID NO: 196403 - DNA, 80 bp, synthetic construct; identical to SEQ ID NO: 11673
  source 1..80: mol_type = other DNA

SEQ ID NO: 196404 - DNA, 80 bp, synthetic construct; identical to SEQ ID NO: 11674
  source 1..80: mol_type = other DNA

SEQ ID NO: 196405 - DNA, 80 bp, synthetic construct; identical to SEQ ID NO: 11675
  source 1..80: mol_type = other DNA

SEQ ID NO: 196406 - DNA, 80 bp, synthetic construct; identical to SEQ ID NO: 11676
  source 1..80: mol_type = other DNA

SEQ ID NO: 196407 - DNA, 80 bp, synthetic construct; identical to SEQ ID NO: 11677
  source 1..80: mol_type = other DNA

SEQ ID NO: 196408 - DNA, 80 bp, synthetic construct; identical to SEQ ID NO: 11678
  source 1..80: mol_type = other DNA

SEQ ID NO: 196409 - DNA, 80 bp, synthetic construct; identical to SEQ ID NO: 11679
  source 1..80: mol_type = other DNA

SEQ ID NO: 196410 - DNA, 80 bp, synthetic construct; identical to SEQ ID NO: 11680
  source 1..80: mol_type = other DNA

SEQ ID NO: 196411 - DNA, 80 bp, synthetic construct; identical to SEQ ID NO: 11681
  source 1..80: mol_type = other DNA

SEQ ID NO: 196412 - DNA, 80 bp, synthetic construct; identical to SEQ ID NO: 11682
  source 1..80: mol_type = other DNA

SEQ ID NO: 196413 - DNA, 80 bp, synthetic construct; identical to SEQ ID NO: 11683
  source 1..80: mol_type = other DNA

SEQ ID NO: 196414 - DNA, 80 bp, synthetic construct; identical to SEQ ID NO: 11684
  source 1..80: mol_type = other DNA

SEQ ID NO: 196415 - DNA, 80 bp, synthetic construct; identical to SEQ ID NO: 11685
  source 1..80: mol_type = other DNA

SEQ ID NO: 196416 - DNA, 80 bp, synthetic construct; identical to SEQ ID NO: 11686
  source 1..80: mol_type = other DNA

SEQ ID NO: 196417 - DNA, 80 bp, synthetic construct; identical to SEQ ID NO: 11687
  source 1..80: mol_type = other DNA

SEQ ID NO: 196418 - DNA, 80 bp, synthetic construct; identical to SEQ ID NO: 11688
  source 1..80: mol_type = other DNA

SEQ ID NO: 196419 - DNA, 80 bp, synthetic construct; identical to SEQ ID NO: 11689
  source 1..80: mol_type = other DNA

SEQ ID NO: 196420 - DNA, 80 bp, synthetic construct; identical to SEQ ID NO: 11690
  source 1..80: mol_type = other DNA

SEQ ID NO: 196421 - DNA, 80 bp, synthetic construct; identical to SEQ ID NO: 11691
  source 1..80: mol_type = other DNA

SEQ ID NO: 196422 - DNA, 80 bp, synthetic construct; identical to SEQ ID NO: 11692
  source 1..80: mol_type = other DNA

SEQ ID NO: 196423 - DNA, 80 bp, synthetic construct; identical to SEQ ID NO: 11693
  source 1..80: mol_type = other DNA

SEQ ID NO: 196424 - DNA, 80 bp, synthetic construct; identical to SEQ ID NO: 11694
  source 1..80: mol_type = other DNA

SEQ ID NO: 196425 - DNA, 80 bp, synthetic construct; identical to SEQ ID NO: 11695
  source 1..80: mol_type = other DNA

SEQ ID NO: 196426 - DNA, 80 bp, synthetic construct; identical to SEQ ID NO: 11696
  source 1..80: mol_type = other DNA

SEQ ID NO: 196427 - DNA, 80 bp, synthetic construct; identical to SEQ ID NO: 11697
  source 1..80: mol_type = other DNA

SEQ ID NO: 196428 - DNA, 80 bp, synthetic construct; identical to SEQ ID NO: 11698
  source 1..80: mol_type = other DNA

SEQ ID NO: 196429 - DNA, 80 bp, synthetic construct; identical to SEQ ID NO: 11699
  source 1..80: mol_type = other DNA

SEQ ID NO: 196430 - DNA, 80 bp, synthetic construct; identical to SEQ ID NO: 11700
  source 1..80: mol_type = other DNA

SEQ ID NO: 196431 - DNA, 80 bp, synthetic construct; identical to SEQ ID NO: 11701
  source 1..80: mol_type = other DNA

SEQ ID NO: 196432 - DNA, 80 bp, synthetic construct; identical to SEQ ID NO: 11702
  source 1..80: mol_type = other DNA

SEQ ID NO: 196433 - DNA, 80 bp, synthetic construct; identical to SEQ ID NO: 11703
  source 1..80: mol_type = other DNA

SEQ ID NO: 196434 - DNA, 80 bp, synthetic construct; identical to SEQ ID NO: 11704
  source 1..80: mol_type = other DNA

SEQ ID NO: 196435 - DNA, 80 bp, synthetic construct; identical to SEQ ID NO: 11705
  source 1..80: mol_type = other DNA

SEQ ID NO: 196436 - DNA, 80 bp, synthetic construct; identical to SEQ ID NO: 11706
  source 1..80: mol_type = other DNA

SEQ ID NO: 196437 - DNA, 80 bp, synthetic construct; identical to SEQ ID NO: 11707
  source 1..80: mol_type = other DNA

SEQ ID NO: 196438 - DNA, 80 bp, synthetic construct; identical to SEQ ID NO: 11708
  source 1..80: mol_type = other DNA

SEQ ID NO: 196439 - DNA, 80 bp, synthetic construct; identical to SEQ ID NO: 11709
  source 1..80: mol_type = other DNA

SEQ ID NO: 196440 - DNA, 80 bp, synthetic construct; identical to SEQ ID NO: 11710
  source 1..80: mol_type = other DNA

SEQ ID NO: 196441 - DNA, 80 bp, synthetic construct; identical to SEQ ID NO: 11711
  source 1..80: mol_type = other DNA

SEQ ID NO: 196442 - DNA, 80 bp, synthetic construct; identical to SEQ ID NO: 11712
  source 1..80: mol_type = other DNA

SEQ ID NO: 196443 - DNA, 80 bp, synthetic construct; identical to SEQ ID NO: 11713
  source 1..80: mol_type = other DNA

SEQ ID NO: 196444 - DNA, 80 bp, synthetic construct; identical to SEQ ID NO: 11714
  source 1..80: mol_type = other DNA

SEQ ID NO: 196445 - DNA, 80 bp, synthetic construct; identical to SEQ ID NO: 11715
  source 1..80: mol_type = other DNA

SEQ ID NO: 196446 - DNA, 80 bp, synthetic construct; identical to SEQ ID NO: 11716
  source 1..80: mol_type = other DNA

SEQ ID NO: 196447 - DNA, 80 bp, synthetic construct; identical to SEQ ID NO: 11717
  source 1..80: mol_type = other DNA

SEQ ID NO: 196448 - DNA, 80 bp, synthetic construct; identical to SEQ ID NO: 11718
  source 1..80: mol_type = other DNA

SEQ ID NO: 196449 - DNA, 80 bp, synthetic construct; identical to SEQ ID NO: 11719
  source 1..80: mol_type = other DNA

SEQ ID NO: 196450 - DNA, 80 bp, synthetic construct; identical to SEQ ID NO: 11720
  source 1..80: mol_type = other DNA

SEQ ID NO: 196451 - DNA, 80 bp, synthetic construct; identical to SEQ ID NO: 11721
  source 1..80: mol_type = other DNA

SEQ ID NO: 196452 - DNA, 80 bp, synthetic construct; identical to SEQ ID NO: 11722
  source 1..80: mol_type = other DNA

SEQ ID NO: 196453 - DNA, 80 bp, synthetic construct; identical to SEQ ID NO: 11723
  source 1..80: mol_type = other DNA

SEQ ID NO: 196454 - DNA, 80 bp, synthetic construct; identical to SEQ ID NO: 11724
  source 1..80: mol_type = other DNA

SEQ ID NO: 196455 - DNA, 80 bp, synthetic construct; identical to SEQ ID NO: 11725
  source 1..80: mol_type = other DNA

SEQ ID NO: 196456 - DNA, 80 bp, synthetic construct; identical to SEQ ID NO: 11726
  source 1..80: mol_type = other DNA

SEQ ID NO: 196457 - DNA, 80 bp, synthetic construct; identical to SEQ ID NO: 11727
  source 1..80: mol_type = other DNA

SEQ ID NO: 196458 - DNA, 80 bp, synthetic construct; identical to SEQ ID NO: 11728
  source 1..80: mol_type = other DNA

SEQ ID NO: 196459 - DNA, 80 bp, synthetic construct; identical to SEQ ID NO: 11729
  source 1..80: mol_type = other DNA

SEQ ID NO: 196460 - DNA, 80 bp, synthetic construct; identical to SEQ ID NO: 11730
  source 1..80: mol_type = other DNA

SEQ ID NO: 196461 - DNA, 80 bp, synthetic construct; identical to SEQ ID NO: 11731
  source 1..80: mol_type = other DNA

SEQ ID NO: 196462 - DNA, 80 bp, synthetic construct; identical to SEQ ID NO: 11732
  source 1..80: mol_type = other DNA

SEQ ID NO: 196463 - DNA, 80 bp, synthetic construct; identical to SEQ ID NO: 11733
  source 1..80: mol_type = other DNA

SEQ ID NO: 196464 - DNA, 80 bp, synthetic construct; identical to SEQ ID NO: 11734
  source 1..80: mol_type = other DNA

SEQ ID NO: 196465 - DNA, 80 bp, synthetic construct; identical to SEQ ID NO: 11735
  source 1..80: mol_type = other DNA

SEQ ID NO: 196466 - DNA, 80 bp, synthetic construct; identical to SEQ ID NO: 11736
  source 1..80: mol_type = other DNA

SEQ ID NO: 196467 - DNA, 80 bp, synthetic construct; identical to SEQ ID NO: 11737
  source 1..80: mol_type = other DNA

SEQ ID NO: 196468 - DNA, 80 bp, synthetic construct; identical to SEQ ID NO: 11738
  source 1..80: mol_type = other DNA

SEQ ID NO: 196469 - DNA, 80 bp, synthetic construct; identical to SEQ ID NO: 11739
  source 1..80: mol_type = other DNA

SEQ ID NO: 196470 - DNA, 80 bp, synthetic construct; identical to SEQ ID NO: 11740
  source 1..80: mol_type = other DNA

SEQ ID NO: 196471 - DNA, 80 bp, synthetic construct; identical to SEQ ID NO: 11741
  source 1..80: mol_type = other DNA

SEQ ID NO: 196472 - DNA, 80 bp, synthetic construct; identical to SEQ ID NO: 11742
  source 1..80: mol_type = other DNA

SEQ ID NO: 196473 - DNA, 80 bp, synthetic construct; identical to SEQ ID NO: 11743
  source 1..80: mol_type = other DNA

SEQ ID NO: 196474 - DNA, 80 bp, synthetic construct; identical to SEQ ID NO: 11744
  source 1..80: mol_type = other DNA

SEQ ID NO: 196475 - DNA, 80 bp, synthetic construct; identical to SEQ ID NO: 11745
  source 1..80: mol_type = other DNA

SEQ ID NO: 196476 - DNA, 80 bp, synthetic construct; identical to SEQ ID NO: 11746
  source 1..80: mol_type = other DNA

SEQ ID NO: 196477 - DNA, 80 bp, synthetic construct; identical to SEQ ID NO: 11747
  source 1..80: mol_type = other DNA

SEQ ID NO: 196478 - DNA, 80 bp, synthetic construct; identical to SEQ ID NO: 11748
  source 1..80: mol_type = other DNA

SEQ ID NO: 196479 - DNA, 80 bp, synthetic construct; identical to SEQ ID NO: 11749
  source 1..80: mol_type = other DNA

SEQ ID NO: 196480 - DNA, 80 bp, synthetic construct; identical to SEQ ID NO: 11750
  source 1..80: mol_type = other DNA

SEQ ID NO: 196481 - DNA, 80 bp, synthetic construct; identical to SEQ ID NO: 11751
  source 1..80: mol_type = other DNA

SEQ ID NO: 196482 - DNA, 80 bp, synthetic construct; identical to SEQ ID NO: 11752
  source 1..80: mol_type = other DNA

SEQ ID NO: 196483 - DNA, 80 bp, synthetic construct; identical to SEQ ID NO: 11753
  source 1..80: mol_type = other DNA

SEQ ID NO: 196484 - DNA, 80 bp, synthetic construct; identical to SEQ ID NO: 11754
  source 1..80: mol_type = other DNA

SEQ ID NO: 196485 - DNA, 80 bp, synthetic construct; identical to SEQ ID NO: 11755
  source 1..80: mol_type = other DNA

SEQ ID NO: 196486 - DNA, 80 bp, synthetic construct; identical to SEQ ID NO: 11756
  source 1..80: mol_type = other DNA

SEQ ID NO: 196487 - DNA, 80 bp, synthetic construct; identical to SEQ ID NO: 11757
  source 1..80: mol_type = other DNA

SEQ ID NO: 196488 - DNA, 80 bp, synthetic construct; identical to SEQ ID NO: 11758
  source 1..80: mol_type = other DNA

SEQ ID NO: 196489 - DNA, 80 bp, synthetic construct; identical to SEQ ID NO: 11759
  source 1..80: mol_type = other DNA

SEQ ID NO: 196490 - DNA, 80 bp, synthetic construct; identical to SEQ ID NO: 11760
  source 1..80: mol_type = other DNA

SEQ ID NO: 196491 - DNA, 80 bp, synthetic construct; identical to SEQ ID NO: 11761
  source 1..80: mol_type = other DNA

SEQ ID NO: 196492 - DNA, 80 bp, synthetic construct; identical to SEQ ID NO: 11762
  source 1..80: mol_type = other DNA

SEQ ID NO: 196493 - DNA, 80 bp, synthetic construct; identical to SEQ ID NO: 11763
  source 1..80: mol_type = other DNA

SEQ ID NO: 196494 - DNA, 80 bp, synthetic construct; identical to SEQ ID NO: 11764
  source 1..80: mol_type = other DNA

SEQ ID NO: 196495 - DNA, 80 bp, synthetic construct; identical to SEQ ID NO: 11765
  source 1..80: mol_type = other DNA

SEQ ID NO: 196496 - DNA, 80 bp, synthetic construct; identical to SEQ ID NO: 11766
  source 1..80: mol_type = other DNA

SEQ ID NO: 196497 - DNA, 80 bp, synthetic construct; identical to SEQ ID NO: 11767
  source 1..80: mol_type = other DNA

SEQ ID NO: 196498 - DNA, 80 bp, synthetic construct; identical to SEQ ID NO: 11768
  source 1..80: mol_type = other DNA

SEQ ID NO: 196499 - DNA, 80 bp, synthetic construct; identical to SEQ ID NO: 11769
  source 1..80: mol_type = other DNA

SEQ ID NO: 196500 - DNA, 80 bp, synthetic construct; identical to SEQ ID NO: 11770
  source 1..80: mol_type = other DNA

SEQ ID NO: 196501 - DNA, 80 bp, synthetic construct; identical to SEQ ID NO: 11771
  source 1..80: mol_type = other DNA

SEQ ID NO: 196502 - DNA, 80 bp, synthetic construct; identical to SEQ ID NO: 11772
  source 1..80: mol_type = other DNA

SEQ ID NO: 196503 - DNA, 80 bp, synthetic construct; identical to SEQ ID NO: 11773
  source 1..80: mol_type = other DNA

SEQ ID NO: 196504 - DNA, 80 bp, synthetic construct; identical to SEQ ID NO: 11774
  source 1..80: mol_type = other DNA

SEQ ID NO: 196505 - DNA, 80 bp, synthetic construct; identical to SEQ ID NO: 11775
  source 1..80: mol_type = other DNA

SEQ ID NO: 196506 - DNA, 80 bp, synthetic construct; identical to SEQ ID NO: 11776
  source 1..80: mol_type = other DNA

SEQ ID NO: 196507 - DNA, 80 bp, synthetic construct; identical to SEQ ID NO: 11777
  source 1..80: mol_type = other DNA

SEQ ID NO: 196508 - DNA, 80 bp, synthetic construct; identical to SEQ ID NO: 11778
  source 1..80: mol_type = other DNA

SEQ ID NO: 196509 - DNA, 80 bp, synthetic construct; identical to SEQ ID NO: 11779
  source 1..80: mol_type = other DNA

SEQ ID NO: 196510 - DNA, 80 bp, synthetic construct; identical to SEQ ID NO: 11780
  source 1..80: mol_type = other DNA

SEQ ID NO: 196511 - DNA, 80 bp, synthetic construct; identical to SEQ ID NO: 11781
  source 1..80: mol_type = other DNA

SEQ ID NO: 196512 - DNA, 80 bp, synthetic construct; identical to SEQ ID NO: 11782
  source 1..80: mol_type = other DNA

SEQ ID NO: 196513 - DNA, 80 bp, synthetic construct; identical to SEQ ID NO: 11783
  source 1..80: mol_type = other DNA

SEQ ID NO: 196514 - DNA, 80 bp, synthetic construct; identical to SEQ ID NO: 11784
  source 1..80: mol_type = other DNA

SEQ ID NO: 196515 - DNA, 80 bp, synthetic construct; identical to SEQ ID NO: 11785
  source 1..80: mol_type = other DNA

SEQ ID NO: 196516 - DNA, 80 bp, synthetic construct; identical to SEQ ID NO: 11786
  source 1..80: mol_type = other DNA

SEQ ID NO: 196517 - DNA, 80 bp, synthetic construct; identical to SEQ ID NO: 11787
  source 1..80: mol_type = other DNA

SEQ ID NO: 196518 - DNA, 80 bp, synthetic construct; identical to SEQ ID NO: 11788
  source 1..80: mol_type = other DNA

SEQ ID NO: 196519 - DNA, 80 bp, synthetic construct; identical to SEQ ID NO: 11789
  source 1..80: mol_type = other DNA

SEQ ID NO: 196520 - DNA, 80 bp, synthetic construct; identical to SEQ ID NO: 11790
  source 1..80: mol_type = other DNA

SEQ ID NO: 196521 - DNA, 80 bp, synthetic construct; identical to SEQ ID NO: 11791
  source 1..80: mol_type = other DNA

SEQ ID NO: 196522 - DNA, 80 bp, synthetic construct; identical to SEQ ID NO: 11792
  source 1..80: mol_type = other DNA

SEQ ID NO: 196523 - DNA, 80 bp, synthetic construct; identical to SEQ ID NO: 11793
  source 1..80: mol_type = other DNA

SEQ ID NO: 196524 - DNA, 80 bp, synthetic construct; identical to SEQ ID NO: 11794
  source 1..80: mol_type = other DNA

SEQ ID NO: 196525 - DNA, 80 bp, synthetic construct; identical to SEQ ID NO: 11795
  source 1..80: mol_type = other DNA

SEQ ID NO: 196526 - DNA, 80 bp, synthetic construct; identical to SEQ ID NO: 11796
  source 1..80: mol_type = other DNA

SEQ ID NO: 196527 - DNA, 80 bp, synthetic construct; identical to SEQ ID NO: 11797
  source 1..80: mol_type = other DNA

SEQ ID NO: 196528 - DNA, 80 bp, synthetic construct; identical to SEQ ID NO: 11798
  source 1..80: mol_type = other DNA

SEQ ID NO: 196529 - DNA, 80 bp, synthetic construct; identical to SEQ ID NO: 11799
  source 1..80: mol_type = other DNA

SEQ ID NO: 196530 - DNA, 80 bp, synthetic construct; identical to SEQ ID NO: 11800
  source 1..80: mol_type = other DNA

SEQ ID NO: 196531 - DNA, 80 bp, synthetic construct; identical to SEQ ID NO: 11801
  source 1..80: mol_type = other DNA

SEQ ID NO: 196532 - DNA, 80 bp, synthetic construct; identical to SEQ ID NO: 11802
  source 1..80: mol_type = other DNA

SEQ ID NO: 196533 - DNA, 80 bp, synthetic construct; identical to SEQ ID NO: 11803
  source 1..80: mol_type = other DNA

SEQ ID NO: 196534 - DNA, 80 bp, synthetic construct; identical to SEQ ID NO: 11804
  source 1..80: mol_type = other DNA

SEQ ID NO: 196535 - DNA, 80 bp, synthetic construct; identical to SEQ ID NO: 11805
  source 1..80: mol_type = other DNA

SEQ ID NO: 196536 - DNA, 80 bp, synthetic construct; identical to SEQ ID NO: 11806
  source 1..80: mol_type = other DNA

SEQ ID NO: 196537 - DNA, 80 bp, synthetic construct; identical to SEQ ID NO: 11807
  source 1..80: mol_type = other DNA

SEQ ID NO: 196538 - DNA, 80 bp, synthetic construct; identical to SEQ ID NO: 11808
  source 1..80: mol_type = other DNA

SEQ ID NO: 196539 - DNA, 80 bp, synthetic construct; identical to SEQ ID NO: 11809
  source 1..80: mol_type = other DNA

SEQ ID NO: 196540 - DNA, 80 bp, synthetic construct; identical to SEQ ID NO: 11810
  source 1..80: mol_type = other DNA

SEQ ID NO: 196541 - DNA, 80 bp, synthetic construct; identical to SEQ ID NO: 11811
  source 1..80: mol_type = other DNA

SEQ ID NO: 196542 - DNA, 80 bp, synthetic construct; identical to SEQ ID NO: 11812
  source 1..80: mol_type = other DNA

SEQ ID NO: 196543 - DNA, 80 bp, synthetic construct; identical to SEQ ID NO: 11813
  source 1..80: mol_type = other DNA

SEQ ID NO: 196544 - DNA, 80 bp, synthetic construct; identical to SEQ ID NO: 11814
  source 1..80: mol_type = other DNA

SEQ ID NO: 196545 - DNA, 80 bp, synthetic construct; identical to SEQ ID NO: 11815
  source 1..80: mol_type = other DNA

SEQ ID NO: 196546 - DNA, 80 bp, synthetic construct; identical to SEQ ID NO: 11816
  source 1..80: mol_type = other DNA

SEQ ID NO: 196547 - DNA, 80 bp, synthetic construct; identical to SEQ ID NO: 11817
  source 1..80: mol_type = other DNA

SEQ ID NO: 196548 - DNA, 80 bp, synthetic construct; identical to SEQ ID NO: 11818
  source 1..80: mol_type = other DNA

SEQ ID NO: 196549 - DNA, 80 bp, synthetic construct; identical to SEQ ID NO: 11819
  source 1..80: mol_type = other DNA

SEQ ID NO: 196550 - DNA, 80 bp, synthetic construct; identical to SEQ ID NO: 11820
  source 1..80: mol_type = other DNA

SEQ ID NO: 196551 - DNA, 80 bp, synthetic construct; identical to SEQ ID NO: 11821
  source 1..80: mol_type = other DNA

SEQ ID NO: 196552 - DNA, 80 bp, synthetic construct; identical to SEQ ID NO: 11822
  source 1..80: mol_type = other DNA

SEQ ID NO: 196553 - DNA, 80 bp, synthetic construct; identical to SEQ ID NO: 11823
  source 1..80: mol_type = other DNA

SEQ ID NO: 196554 - DNA, 80 bp, synthetic construct; identical to SEQ ID NO: 11824
  source 1..80: mol_type = other DNA

SEQ ID NO: 196555 - DNA, 80 bp, synthetic construct; identical to SEQ ID NO: 11825
  source 1..80: mol_type = other DNA

SEQ ID NO: 196556 - DNA, 80 bp, synthetic construct; identical to SEQ ID NO: 11826
  source 1..80: mol_type = other DNA

SEQ ID NO: 196557 - DNA, 80 bp, synthetic construct; identical to SEQ ID NO: 11827
  source 1..80: mol_type = other DNA

SEQ ID NO: 196558 - DNA, 80 bp, synthetic construct; identical to SEQ ID NO: 11828
  source 1..80: mol_type = other DNA

SEQ ID NO: 196559 - DNA, 80 bp, synthetic construct; identical to SEQ ID NO: 11829
  source 1..80: mol_type = other DNA

SEQ ID NO: 196560 - DNA, 80 bp, synthetic construct; identical to SEQ ID NO: 11830
  source 1..80: mol_type = other DNA

SEQ ID NO: 196561 - DNA, 80 bp, synthetic construct; identical to SEQ ID NO: 11831
  source 1..80: mol_type = other DNA

SEQ ID NO: 196562 - DNA, 80 bp, synthetic construct; identical to SEQ ID NO: 11832
  source 1..80: mol_type = other DNA

SEQ ID NO: 196563 - DNA, 80 bp, synthetic construct; identical to SEQ ID NO: 11833
  source 1..80: mol_type = other DNA

SEQ ID NO: 196564 - DNA, 80 bp, synthetic construct; identical to SEQ ID NO: 11834
  source 1..80: mol_type = other DNA

SEQ ID NO: 196565 - DNA, 80 bp, synthetic construct; identical to SEQ ID NO: 11835
  source 1..80: mol_type = other DNA

SEQ ID NO: 196566 - DNA, 80 bp, synthetic construct; identical to SEQ ID NO: 11836
  source 1..80: mol_type = other DNA

SEQ ID NO: 196567 - DNA, 80 bp, synthetic construct; identical to SEQ ID NO: 11837
  source 1..80: mol_type = other DNA

SEQ ID NO: 196568 - DNA, 80 bp, synthetic construct; identical to SEQ ID NO: 11838
  source 1..80: mol_type = other DNA

SEQ ID NO: 196569 - DNA, 80 bp, synthetic construct; identical to SEQ ID NO: 11839
  source 1..80: mol_type = other DNA

SEQ ID NO: 196570 - DNA, 80 bp, synthetic construct; identical to SEQ ID NO: 11840
  source 1..80: mol_type = other DNA

SEQ ID NO: 196571 - DNA, 80 bp, synthetic construct; identical to SEQ ID NO: 11841
  source 1..80: mol_type = other DNA

SEQ ID NO: 196572 - DNA, 80 bp, synthetic construct; identical to SEQ ID NO: 11842
  source 1..80: mol_type = other DNA

SEQ ID NO: 196573 - DNA, 80 bp, synthetic construct; identical to SEQ ID NO: 11843
  source 1..80: mol_type = other DNA

SEQ ID NO: 196574 - DNA, 80 bp, synthetic construct; identical to SEQ ID NO: 11844
  source 1..80: mol_type = other DNA

SEQ ID NO: 196575 - DNA, 80 bp, synthetic construct; identical to SEQ ID NO: 11845
  source 1..80: mol_type = other DNA

SEQ ID NO: 196576 - DNA, 80 bp, synthetic construct; identical to SEQ ID NO: 11846
  source 1..80: mol_type = other DNA

SEQ ID NO: 196577 - DNA, 80 bp, synthetic construct; identical to SEQ ID NO: 11847
  source 1..80: mol_type = other DNA

SEQ ID NO: 196578 - DNA, 80 bp, synthetic construct; identical to SEQ ID NO: 11848
  source 1..80: mol_type = other DNA

SEQ ID NO: 196579 - DNA, 80 bp, synthetic construct; identical to SEQ ID NO: 11849
  source 1..80: mol_type = other DNA

SEQ ID NO: 196580 - DNA, 80 bp, synthetic construct; identical to SEQ ID NO: 11850
  source 1..80: mol_type = other DNA

SEQ ID NO: 196581 - DNA, 80 bp, synthetic construct; identical to SEQ ID NO: 11851
  source 1..80: mol_type = other DNA

SEQ ID NO: 196582 - DNA, 80 bp, synthetic construct; identical to SEQ ID NO: 11852
  source 1..80: mol_type = other DNA

SEQ ID NO: 196583 - DNA, 80 bp, synthetic construct; identical to SEQ ID NO: 11853
  source 1..80: mol_type = other DNA

SEQ ID NO: 196584 - DNA, 80 bp, synthetic construct; identical to SEQ ID NO: 11854
  source 1..80: mol_type = other DNA

SEQ ID NO: 196585 - DNA, 80 bp, synthetic construct; identical to SEQ ID NO: 11855
  source 1..80: mol_type = other DNA

SEQ ID NO: 196586 - DNA, 80 bp, synthetic construct; identical to SEQ ID NO: 11856
  source 1..80: mol_type = other DNA

SEQ ID NO: 196587 - DNA, 80 bp, synthetic construct; identical to SEQ ID NO: 11857
  source 1..80: mol_type = other DNA

SEQ ID NO: 196588 - DNA, 80 bp, synthetic construct; identical to SEQ ID NO: 11858
  source 1..80: mol_type = other DNA

SEQ ID NO: 196589 - DNA, 80 bp, synthetic construct; identical to SEQ ID NO: 11859
  source 1..80: mol_type = other DNA

SEQ ID NO: 196590 - DNA, 80 bp, synthetic construct; identical to SEQ ID NO: 11860
  source 1..80: mol_type = other DNA

SEQ ID NO: 196591 - DNA, 80 bp, synthetic construct; identical to SEQ ID NO: 11861
  source 1..80: mol_type = other DNA

SEQ ID NO: 196592 - DNA, 80 bp, synthetic construct; identical to SEQ ID NO: 11862
  source 1..80: mol_type = other DNA

SEQ ID NO: 196593 - DNA, 80 bp, synthetic construct; identical to SEQ ID NO: 11863
  source 1..80: mol_type = other DNA

SEQ ID NO: 196594 - DNA, 80 bp, synthetic construct; identical to SEQ ID NO: 11864
  source 1..80: mol_type = other DNA

SEQ ID NO: 196595 - DNA, 80 bp, synthetic construct; identical to SEQ ID NO: 11865
  source 1..80: mol_type = other DNA

SEQ ID NO: 196596 - DNA, 80 bp, synthetic construct; identical to SEQ ID NO: 11866
  source 1..80: mol_type = other DNA

SEQ ID NO: 196597 - DNA, 80 bp, synthetic construct; identical to SEQ ID NO: 11867
  source 1..80: mol_type = other DNA

SEQ ID NO: 196598 - DNA, 80 bp, synthetic construct; identical to SEQ ID NO: 11868
  source 1..80: mol_type = other DNA

SEQ ID NO: 196599 - DNA, 80 bp, synthetic construct; identical to SEQ ID NO: 11869
  source 1..80: mol_type = other DNA

SEQ ID NO: 196600 - DNA, 80 bp, synthetic construct; identical to SEQ ID NO: 11870
  source 1..80: mol_type = other DNA

SEQ ID NO: 196601 - DNA, 80 bp, synthetic construct; identical to SEQ ID NO: 11871
  source 1..80: mol_type = other DNA

SEQ ID NO: 196602 - DNA, 80 bp, synthetic construct; identical to SEQ ID NO: 11872
  source 1..80: mol_type = other DNA

SEQ ID NO: 196603 - DNA, 80 bp, synthetic construct; identical to SEQ ID NO: 11873
  source 1..80: mol_type = other DNA

SEQ ID NO: 196604 - DNA, 80 bp, synthetic construct; identical to SEQ ID NO: 11874
  source 1..80: mol_type = other DNA

SEQ ID NO: 196605 - DNA, 80 bp, synthetic construct; identical to SEQ ID NO: 11875
  source 1..80: mol_type = other DNA

SEQ ID NO: 196606 - DNA, 80 bp, synthetic construct; identical to SEQ ID NO: 11876
  source 1..80: mol_type = other DNA

SEQ ID NO: 196607 - DNA, 80 bp, synthetic construct; identical to SEQ ID NO: 11877
  source 1..80: mol_type = other DNA

SEQ ID NO: 196608 - DNA, 80 bp, synthetic construct; identical to SEQ ID NO: 11878
  source 1..80: mol_type = other DNA

SEQ ID NO: 196609 - DNA, 80 bp, synthetic construct; identical to SEQ ID NO: 11879
  source 1..80: mol_type = other DNA

SEQ ID NO: 196610 - DNA, 80 bp, synthetic construct; identical to SEQ ID NO: 11880
  source 1..80: mol_type = other DNA

SEQ ID NO: 196611 - DNA, 80 bp, synthetic construct; identical to SEQ ID NO: 11881
  source 1..80: mol_type = other DNA

SEQ ID NO: 196612 - DNA, 80 bp, synthetic construct; identical to SEQ ID NO: 11882
  source 1..80: mol_type = other DNA

SEQ ID NO: 196613 - DNA, 80 bp, synthetic construct; identical to SEQ ID NO: 11883
  source 1..80: mol_type = other DNA

SEQ ID NO: 196614 - DNA, 80 bp, synthetic construct; identical to SEQ ID NO: 11884
  source 1..80: mol_type = other DNA

SEQ ID NO: 196615 - DNA, 80 bp, synthetic construct; identical to SEQ ID NO: 11885
  source 1..80: mol_type = other DNA

SEQ ID NO: 196616 - DNA, 80 bp, synthetic construct; identical to SEQ ID NO: 11886
  source 1..80: mol_type = other DNA

SEQ ID NO: 196617 - DNA, 80 bp, synthetic construct; identical to SEQ ID NO: 11887
  source 1..80: mol_type = other DNA

SEQ ID NO: 196618 - DNA, 80 bp, synthetic construct; identical to SEQ ID NO: 11888
  source 1..80: mol_type = other DNA

SEQ ID NO: 196619 - DNA, 80 bp, synthetic construct; identical to SEQ ID NO: 11889
  source 1..80: mol_type = other DNA

SEQ ID NO: 196620 - DNA, 80 bp, synthetic construct; identical to SEQ ID NO: 11890
  source 1..80: mol_type = other DNA

SEQ ID NO: 196621 - DNA, 80 bp, synthetic construct; identical to SEQ ID NO: 11891
  source 1..80: mol_type = other DNA

SEQ ID NO: 196622 - DNA, 80 bp, synthetic construct; identical to SEQ ID NO: 11892
  source 1..80: mol_type = other DNA

SEQ ID NO: 196623 - DNA, 80 bp, synthetic construct; identical to SEQ ID NO: 11893
  source 1..80: mol_type = other DNA

SEQ ID NO: 196624 - DNA, 80 bp, synthetic construct; identical to SEQ ID NO: 11894
  source 1..80: mol_type = other DNA

SEQ ID NO: 196625 - DNA, 80 bp, synthetic construct; identical to SEQ ID NO: 11895
  source 1..80: mol_type = other DNA

SEQ ID NO: 196626 - DNA, 80 bp, synthetic construct; identical to SEQ ID NO: 11896
  source 1..80: mol_type = other DNA

SEQ ID NO: 196627 - DNA, 80 bp, synthetic construct; identical to SEQ ID NO: 11897
  source 1..80: mol_type = other DNA

SEQ ID NO: 196628 - DNA, 80 bp, synthetic construct; identical to SEQ ID NO: 11898
  source 1..80: mol_type = other DNA

SEQ ID NO: 196629 - DNA, 80 bp, synthetic construct; identical to SEQ ID NO: 11899
  source 1..80: mol_type = other DNA

SEQ ID NO: 196630 - DNA, 80 bp, synthetic construct; identical to SEQ ID NO: 11900
  source 1..80: mol_type = other DNA

SEQ ID NO: 196631 - DNA, 80 bp, synthetic construct; identical to SEQ ID NO: 11901
  source 1..80: mol_type = other DNA

SEQ ID NO: 196632 - DNA, 80 bp, synthetic construct; identical to SEQ ID NO: 11902
  source 1..80: mol_type = other DNA

SEQ ID NO: 196633 - DNA, 80 bp, synthetic construct; identical to SEQ ID NO: 11903
  source 1..80: mol_type = other DNA

SEQ ID NO: 196634 - DNA, 80 bp, synthetic construct; identical to SEQ ID NO: 11904
  source 1..80: mol_type = other DNA

SEQ ID NO: 196635 - DNA, 80 bp, synthetic construct; identical to SEQ ID NO: 11905
  source 1..80: mol_type = other DNA

SEQ ID NO: 196636 - DNA, 80 bp, synthetic construct; identical to SEQ ID NO: 11906
  source 1..80: mol_type = other DNA

SEQ ID NO: 196637 - DNA, 80 bp, synthetic construct; identical to SEQ ID NO: 11907
  source 1..80: mol_type = other DNA

SEQ ID NO: 196638 - DNA, 80 bp, synthetic construct; identical to SEQ ID NO: 11908
  source 1..80: mol_type = other DNA

SEQ ID NO: 196639 - DNA, 80 bp, synthetic construct; identical to SEQ ID NO: 11909
  source 1..80: mol_type = other DNA

SEQ ID NO: 196640 - DNA, 80 bp, synthetic construct; identical to SEQ ID NO: 11910
  source 1..80: mol_type = other DNA

SEQ ID NO: 196641 - DNA, 80 bp, synthetic construct; identical to SEQ ID NO: 11911
  source 1..80: mol_type = other DNA

SEQ ID NO: 196642 - DNA, 80 bp, synthetic construct; identical to SEQ ID NO: 11912
  source 1..80: mol_type = other DNA

SEQ ID NO: 196643 - DNA, 80 bp, synthetic construct; identical to SEQ ID NO: 11913
  source 1..80: mol_type = other DNA

SEQ ID NO: 196644 - DNA, 80 bp, synthetic construct; identical to SEQ ID NO: 11914
  source 1..80: mol_type = other DNA

SEQ ID NO: 196645 - DNA, 80 bp, synthetic construct; identical to SEQ ID NO: 11915
  source 1..80: mol_type = other DNA

SEQ ID NO: 196646 - DNA, 80 bp, synthetic construct; identical to SEQ ID NO: 11916
  source 1..80: mol_type = other DNA

SEQ ID NO: 196647 - DNA, 80 bp, synthetic construct; identical to SEQ ID NO: 11917
  source 1..80: mol_type = other DNA

SEQ ID NO: 196648 - DNA, 80 bp, synthetic construct; identical to SEQ ID NO: 11918
  source 1..80: mol_type = other DNA

SEQ ID NO: 196649 - DNA, 80 bp, synthetic construct; identical to SEQ ID NO: 11919
  source 1..80: mol_type = other DNA

SEQ ID NO: 196650 - DNA, 80 bp, synthetic construct; identical to SEQ ID NO: 11920
  source 1..80: mol_type = other DNA

SEQ ID NO: 196651 - DNA, 80 bp, synthetic construct; identical to SEQ ID NO: 11921
  source 1..80: mol_type = other DNA

SEQ ID NO: 196652 - DNA, 80 bp, synthetic construct; identical to SEQ ID NO: 11922
  source 1..80: mol_type = other DNA

SEQ ID NO: 196653 - DNA, 80 bp, synthetic construct; identical to SEQ ID NO: 11923
  source 1..80: mol_type = other DNA

SEQ ID NO: 196654 - DNA, 80 bp, synthetic construct; identical to SEQ ID NO: 11924
  source 1..80: mol_type = other DNA

SEQ ID NO: 196655 - DNA, 80 bp, synthetic construct; identical to SEQ ID NO: 11925
  source 1..80: mol_type = other DNA

SEQ ID NO: 196656 - DNA, 80 bp, synthetic construct; identical to SEQ ID NO: 11926
  source 1..80: mol_type = other DNA

SEQ ID NO: 196657 - DNA, 80 bp, synthetic construct; identical to SEQ ID NO: 11927
  source 1..80: mol_type = other DNA

SEQ ID NO: 196658 - DNA, 80 bp, synthetic construct; identical to SEQ ID NO: 11928
  source 1..80: mol_type = other DNA

SEQ ID NO: 196659 - DNA, 80 bp, synthetic construct; identical to SEQ ID NO: 11929
  source 1..80: mol_type = other DNA

SEQ ID NO: 196660 - DNA, 80 bp, synthetic construct; identical to SEQ ID NO: 11930
  source 1..80: mol_type = other DNA

SEQ ID NO: 196661 - DNA, 80 bp, synthetic construct; identical to SEQ ID NO: 11931
  source 1..80: mol_type = other DNA

SEQ ID NO: 196662 - DNA, 80 bp, synthetic construct; identical to SEQ ID NO: 11932
  source 1..80: mol_type = other DNA

SEQ ID NO: 196663 - DNA, 80 bp, synthetic construct; identical to SEQ ID NO: 11933
  source 1..80: mol_type = other DNA

SEQ ID NO: 196664 - DNA, 80 bp, synthetic construct; identical to SEQ ID NO: 11934
  source 1..80: mol_type = other DNA

SEQ ID NO: 196665 - DNA, 80 bp, synthetic construct; identical to SEQ ID NO: 11935
  source 1..80: mol_type = other DNA

SEQ ID NO: 196666 - DNA, 80 bp, synthetic construct; identical to SEQ ID NO: 11936
  source 1..80: mol_type = other DNA

SEQ ID NO: 196667 - DNA, 80 bp, synthetic construct; identical to SEQ ID NO: 11937
  source 1..80: mol_type = other DNA

SEQ ID NO: 196668 - DNA, 80 bp, synthetic construct; identical to SEQ ID NO: 11938
  source 1..80: mol_type = other DNA

SEQ ID NO: 196669 - DNA, 80 bp, synthetic construct; identical to SEQ ID NO: 11939
  source 1..80: mol_type = other DNA

SEQ ID NO: 196670 - DNA, 80 bp, synthetic construct; identical to SEQ ID NO: 11940
  source 1..80: mol_type = other DNA

SEQ ID NO: 196671 - DNA, 80 bp, synthetic construct; identical to SEQ ID NO: 11941
  source 1..80: mol_type = other DNA

SEQ ID NO: 196672 - DNA, 80 bp, synthetic construct; identical to SEQ ID NO: 11942
  source 1..80: mol_type = other DNA

SEQ ID NO: 196673 - DNA, 80 bp, synthetic construct; identical to SEQ ID NO: 11943
  source 1..80: mol_type = other DNA

SEQ ID NO: 196674 - DNA, 80 bp, synthetic construct; identical to SEQ ID NO: 11944
  source 1..80: mol_type = other DNA

SEQ ID NO: 196675 - DNA, 80 bp, synthetic construct; identical to SEQ ID NO: 11945
  source 1..80: mol_type = other DNA

SEQ ID NO: 196676 - DNA, 80 bp, synthetic construct; identical to SEQ ID NO: 11946
  source 1..80: mol_type = other DNA

SEQ ID NO: 196677 - DNA, 80 bp, synthetic construct; identical to SEQ ID NO: 11947
  source 1..80: mol_type = other DNA

SEQ ID NO: 196678 - DNA, 80 bp, synthetic construct; identical to SEQ ID NO: 11948
  source 1..80: mol_type = other DNA

SEQ ID NO: 196679 - DNA, 80 bp, synthetic construct; identical to SEQ ID NO: 11949
  source 1..80: mol_type = other DNA

SEQ ID NO: 196680 - DNA, 80 bp, synthetic construct; identical to SEQ ID NO: 11950
  source 1..80: mol_type = other DNA

SEQ ID NO: 196681 - DNA, 80 bp, synthetic construct; identical to SEQ ID NO: 11951
  source 1..80: mol_type = other DNA

SEQ ID NO: 196682 - DNA, 80 bp, synthetic construct; identical to SEQ ID NO: 11952
  source 1..80: mol_type = other DNA

SEQ ID NO: 196683 - DNA, 80 bp, synthetic construct; identical to SEQ ID NO: 11953
  source 1..80: mol_type = other DNA

SEQ ID NO: 196684 - DNA, 80 bp, synthetic construct; identical to SEQ ID NO: 11954
  source 1..80: mol_type = other DNA

SEQ ID NO: 196685 - DNA, 80 bp, synthetic construct; identical to SEQ ID NO: 11955
  source 1..80: mol_type = other DNA

SEQ ID NO: 196686 - DNA, 80 bp, synthetic construct; identical to SEQ ID NO: 11956
  source 1..80: mol_type = other DNA

SEQ ID NO: 196687 - DNA, 80 bp, synthetic construct; identical to SEQ ID NO: 11957
  source 1..80: mol_type = other DNA

SEQ ID NO: 196688 - DNA, 80 bp, synthetic construct; identical to SEQ ID NO: 11958
  source 1..80: mol_type = other DNA

SEQ ID NO: 196689 - DNA, 80 bp, synthetic construct; identical to SEQ ID NO: 11959
  source 1..80: mol_type = other DNA

SEQ ID NO: 196690 - DNA, 80 bp, synthetic construct; identical to SEQ ID NO: 11960
  source 1..80: mol_type = other DNA

SEQ ID NO: 196691 - DNA, 80 bp, synthetic construct; identical to SEQ ID NO: 11961
  source 1..80: mol_type = other DNA

SEQ ID NO: 196692 - DNA, 80 bp, synthetic construct; identical to SEQ ID NO: 11962
  source 1..80: mol_type = other DNA

SEQ ID NO: 196693 - DNA, 80 bp, synthetic construct; identical to SEQ ID NO: 11963
  source 1..80: mol_type = other DNA

SEQ ID NO: 196694 - DNA, 80 bp, synthetic construct; identical to SEQ ID NO: 11964
  source 1..80: mol_type = other DNA

SEQ ID NO: 196695 - DNA, 80 bp, synthetic construct; identical to SEQ ID NO: 11965
  source 1..80: mol_type = other DNA

SEQ ID NO: 196696 - DNA, 80 bp, synthetic construct; identical to SEQ ID NO: 11966
  source 1..80: mol_type = other DNA

SEQ ID NO: 196697 - DNA, 80 bp, synthetic construct; identical to SEQ ID NO: 11967
  source 1..80: mol_type = other DNA

SEQ ID NO: 196698 - DNA, 80 bp, synthetic construct; identical to SEQ ID NO: 11968
  source 1..80: mol_type = other DNA

SEQ ID NO: 196699 - DNA, 80 bp, synthetic construct; identical to SEQ ID NO: 11969
  source 1..80: mol_type = other DNA

SEQ ID NO: 196700 - DNA, 80 bp, synthetic construct; identical to SEQ ID NO: 11970
  source 1..80: mol_type = other DNA

SEQ ID NO: 196701 - DNA, 80 bp, synthetic construct; identical to SEQ ID NO: 11971
  source 1..80: mol_type = other DNA

SEQ ID NO: 196702 - DNA, 80 bp, synthetic construct; identical to SEQ ID NO: 11972
  source 1..80: mol_type = other DNA

SEQ ID NO: 196703 - DNA, 80 bp, synthetic construct; identical to SEQ ID NO: 11973
  source 1..80: mol_type = other DNA

SEQ ID NO: 196704 - DNA, 80 bp, synthetic construct; identical to SEQ ID NO: 11974
  source 1..80: mol_type = other DNA

SEQ ID NO: 196705 - DNA, 80 bp, synthetic construct; identical to SEQ ID NO: 11975
  source 1..80: mol_type = other DNA

SEQ ID NO: 196706 - DNA, 80 bp, synthetic construct; identical to SEQ ID NO: 11976
  source 1..80: mol_type = other DNA

SEQ ID NO: 196707 - DNA, 80 bp, synthetic construct; identical to SEQ ID NO: 11977
  source 1..80: mol_type = other DNA

SEQ ID NO: 196708 - DNA, 80 bp, synthetic construct; identical to SEQ ID NO: 11978
  source 1..80: mol_type = other DNA

SEQ ID NO: 196709 - DNA, 80 bp, synthetic construct; identical to SEQ ID NO: 11979
  source 1..80: mol_type = other DNA

SEQ ID NO: 196710 - DNA, 80 bp, synthetic construct; identical to SEQ ID NO: 11980
  source 1..80: mol_type = other DNA

SEQ ID NO: 196711 - DNA, 80 bp, synthetic construct; identical to SEQ ID NO: 11981
  source 1..80: mol_type = other DNA

SEQ ID NO: 196712 - DNA, 80 bp, synthetic construct; identical to SEQ ID NO: 11982
  source 1..80: mol_type = other DNA

SEQ ID NO: 196713 - DNA, 80 bp, synthetic construct; identical to SEQ ID NO: 11983
  source 1..80: mol_type = other DNA

SEQ ID NO: 196714 - DNA, 80 bp, synthetic construct; identical to SEQ ID NO: 11984
  source 1..80: mol_type = other DNA

SEQ ID NO: 196715 - DNA, 80 bp, synthetic construct; identical to SEQ ID NO: 11985
  source 1..80: mol_type = other DNA

SEQ ID NO: 196716 - DNA, 80 bp, synthetic construct; identical to SEQ ID NO: 11986
  source 1..80: mol_type = other DNA

SEQ ID NO: 196717 - DNA, 80 bp, synthetic construct; identical to SEQ ID NO: 11987
  source 1..80: mol_type = other DNA

SEQ ID NO: 196718 - DNA, 80 bp, synthetic construct; identical to SEQ ID NO: 11988
  source 1..80: mol_type = other DNA

SEQ ID NO: 196719 - DNA, 80 bp, synthetic construct; identical to SEQ ID NO: 11989
  source 1..80: mol_type = other DNA

SEQ ID NO: 196720 - DNA, 80 bp, synthetic construct; identical to SEQ ID NO: 11990
  source 1..80: mol_type = other DNA

SEQ ID NO: 196721 - DNA, 80 bp, synthetic construct; identical to SEQ ID NO: 11991
  source 1..80: mol_type = other DNA

SEQ ID NO: 196722 - DNA, 80 bp, synthetic construct; identical to SEQ ID NO: 11992
  source 1..80: mol_type = other DNA

SEQ ID NO: 196723 - DNA, 80 bp, synthetic construct; identical to SEQ ID NO: 11993
  source 1..80: mol_type = other DNA

SEQ ID NO: 196724 - DNA, 80 bp, synthetic construct; identical to SEQ ID NO: 11994
  source 1..80: mol_type = other DNA

SEQ ID NO: 196725 - DNA, 80 bp, synthetic construct; identical to SEQ ID NO: 11995
  source 1..80: mol_type = other DNA

SEQ ID NO: 196726 - DNA, 80 bp, synthetic construct; identical to SEQ ID NO: 11996
  source 1..80: mol_type = other DNA

SEQ ID NO: 196727 - DNA, 80 bp, synthetic construct; identical to SEQ ID NO: 11997
  source 1..80: mol_type = other DNA

SEQ ID NO: 196728 - DNA, 80 bp, synthetic construct; identical to SEQ ID NO: 11998
  source 1..80: mol_type = other DNA

SEQ ID NO: 196729 - DNA, 80 bp, synthetic construct; identical to SEQ ID NO: 11999
  source 1..80: mol_type = other DNA

SEQ ID NO: 196730 - DNA, 80 bp, synthetic construct; identical to SEQ ID NO: 12000
  source 1..80: mol_type = other DNA

SEQ ID NO: 196731 - DNA, 80 bp, synthetic construct; identical to SEQ ID NO: 12001
  source 1..80: mol_type = other DNA

SEQ ID NO: 196732 - DNA, 80 bp, synthetic construct; identical to SEQ ID NO: 12002
  source 1..80: mol_type = other DNA

SEQ ID NO: 196733 - DNA, 80 bp, synthetic construct; identical to SEQ ID NO: 12003
  source 1..80: mol_type = other DNA

SEQ ID NO: 196734 - DNA, 80 bp, synthetic construct; identical to SEQ ID NO: 12004
  source 1..80: mol_type = other DNA

SEQ ID NO: 196735 - DNA, 80 bp, synthetic construct; identical to SEQ ID NO: 12005
  source 1..80: mol_type = other DNA

SEQ ID NO: 196736 - DNA, 80 bp, synthetic construct; identical to SEQ ID NO: 12006
  source 1..80: mol_type = other DNA

SEQ ID NO: 196737 - DNA, 80 bp, synthetic construct; identical to SEQ ID NO: 12007
  source 1..80: mol_type = other DNA

SEQ ID NO: 196738 - DNA, 80 bp, synthetic construct; identical to SEQ ID NO: 12008
  source 1..80: mol_type = other DNA

SEQ ID NO: 196739 - DNA, 80 bp, synthetic construct; identical to SEQ ID NO: 12009
  source 1..80: mol_type = other DNA

SEQ ID NO: 196740 - DNA, 80 bp, synthetic construct; identical to SEQ ID NO: 12010
  source 1..80: mol_type = other DNA

SEQ ID NO: 196741 - DNA, 80 bp, synthetic construct; identical to SEQ ID NO: 12011
  source 1..80: mol_type = other DNA

SEQ ID NO: 196742 - DNA, 80 bp, synthetic construct; identical to SEQ ID NO: 12012
  source 1..80: mol_type = other DNA

SEQ ID NO: 196743 - DNA, 80 bp, synthetic construct; identical to SEQ ID NO: 12013
  source 1..80: mol_type = other DNA

SEQ ID NO: 196744 - DNA, 80 bp, synthetic construct; identical to SEQ ID NO: 12014
  source 1..80: mol_type = other DNA

SEQ ID NO: 196745 - DNA, 80 bp, synthetic construct; identical to SEQ ID NO: 12015
  source 1..80: mol_type = other DNA

SEQ ID NO: 196746 - DNA, 80 bp, synthetic construct; identical to SEQ ID NO: 12016
  source 1..80: mol_type = other DNA

SEQ ID NO: 196747 - DNA, 80 bp, synthetic construct; identical to SEQ ID NO: 12017
  source 1..80: mol_type = other DNA

SEQ ID NO: 196748 - DNA, 80 bp, synthetic construct; identical to SEQ ID NO: 12018
  source 1..80: mol_type = other DNA

SEQ ID NO: 196749 - DNA, 80 bp, synthetic construct; identical to SEQ ID NO: 12019
  source 1..80: mol_type = other DNA

SEQ ID NO: 196750 - DNA, 80 bp, synthetic construct; identical to SEQ ID NO: 12020
  source 1..80: mol_type = other DNA

SEQ ID NO: 196751 - DNA, 80 bp, synthetic construct; identical to SEQ ID NO: 12021
  source 1..80: mol_type = other DNA

SEQ ID NO: 196752 - DNA, 80 bp, synthetic construct; identical to SEQ ID NO: 12022
  source 1..80: mol_type = other DNA

SEQ ID NO: 196753 - DNA, 80 bp, synthetic construct; identical to SEQ ID NO: 12023
  source 1..80: mol_type = other DNA

SEQ ID NO: 196754 - DNA, 80 bp, synthetic construct; identical to SEQ ID NO: 12024
  source 1..80: mol_type = other DNA

SEQ ID NO: 196755 - DNA, 80 bp, synthetic construct; identical to SEQ ID NO: 12025
  source 1..80: mol_type = other DNA

SEQ ID NO: 196756 - DNA, 80 bp, synthetic construct; identical to SEQ ID NO: 12026
  source 1..80: mol_type = other DNA

SEQ ID NO: 196757 - DNA, 80 bp, synthetic construct; identical to SEQ ID NO: 12027
  source 1..80: mol_type = other DNA

SEQ ID NO: 196758 - DNA, 80 bp, synthetic construct; identical to SEQ ID NO: 12028
  source 1..80: mol_type = other DNA

SEQ ID NO: 196759 - DNA, 80 bp, synthetic construct; identical to SEQ ID NO: 12029
  source 1..80: mol_type = other DNA

SEQ ID NO: 196760 - DNA, 80 bp, synthetic construct; identical to SEQ ID NO: 12030
  source 1..80: mol_type = other DNA

SEQ ID NO: 196761 - DNA, 80 bp, synthetic construct; identical to SEQ ID NO: 12031
  source 1..80: mol_type = other DNA

SEQ ID NO: 196762 - DNA, 80 bp, synthetic construct; identical to SEQ ID NO: 12032
  source 1..80: mol_type = other DNA

SEQ ID NO: 196763 - DNA, 80 bp, synthetic construct; identical to SEQ ID NO: 12033
  source 1..80: mol_type = other DNA

SEQ ID NO: 196764 - DNA, 80 bp, synthetic construct; identical to SEQ ID NO: 12034
  source 1..80: mol_type = other DNA

SEQ ID NO: 196765 - DNA, 80 bp, synthetic construct; identical to SEQ ID NO: 12035
  source 1..80: mol_type = other DNA

SEQ ID NO: 196766 - DNA, 80 bp, synthetic construct; identical to SEQ ID NO: 12036
  source 1..80: mol_type = other DNA

SEQ ID NO: 196767 - DNA, 80 bp, synthetic construct; identical to SEQ ID NO: 12037
  source 1..80: mol_type = other DNA

SEQ ID NO: 196768 - DNA, 80 bp, synthetic construct; identical to SEQ ID NO: 12038
  source 1..80: mol_type = other DNA

SEQ ID NO: 196769 - DNA, 80 bp, synthetic construct; identical to SEQ ID NO: 12039
  source 1..80: mol_type = other DNA

SEQ ID NO: 196770 - DNA, 80 bp, synthetic construct; identical to SEQ ID NO: 12040
  source 1..80: mol_type = other DNA

SEQ ID NO: 196771 - DNA, 80 bp, synthetic construct; identical to SEQ ID NO: 12041
  source 1..80: mol_type = other DNA

SEQ ID NO: 196772 - DNA, 80 bp, synthetic construct; identical to SEQ ID NO: 12042
  source 1..80: mol_type = other DNA

SEQ ID NO: 196773 - DNA, 80 bp, synthetic construct; identical to SEQ ID NO: 12043
  source 1..80: mol_type = other DNA

SEQ ID NO: 196774 - DNA, 80 bp, synthetic construct; identical to SEQ ID NO: 12044
  source 1..80: mol_type = other DNA

SEQ ID NO: 196775 - DNA, 80 bp, synthetic construct; identical to SEQ ID NO: 12045
  source 1..80: mol_type = other DNA

SEQ ID NO: 196776 - DNA, 80 bp, synthetic construct; identical to SEQ ID NO: 12046
  source 1..80: mol_type = other DNA

SEQ ID NO: 196777 - DNA, 80 bp, synthetic construct; identical to SEQ ID NO: 12047
  source 1..80: mol_type = other DNA

SEQ ID NO: 196778 - DNA, 80 bp, synthetic construct; identical to SEQ ID NO: 12048
  source 1..80: mol_type = other DNA

SEQ ID NO: 196779 - DNA, 80 bp, synthetic construct; identical to SEQ ID NO: 12049
  source 1..80: mol_type = other DNA

SEQ ID NO: 196780 - DNA, 80 bp, synthetic construct; identical to SEQ ID NO: 12050
  source 1..80: mol_type = other DNA

SEQ ID NO: 196781 - DNA, 80 bp, synthetic construct; identical to SEQ ID NO: 12051
  source 1..80: mol_type = other DNA

SEQ ID NO: 196782 - DNA, 80 bp, synthetic construct; identical to SEQ ID NO: 12052
  source 1..80: mol_type = other DNA

SEQ ID NO: 196783 - DNA, 80 bp, synthetic construct; identical to SEQ ID NO: 12053
  source 1..80: mol_type = other DNA

SEQ ID NO: 196784 - DNA, 80 bp, synthetic construct; identical to SEQ ID NO: 12054
  source 1..80: mol_type = other DNA

SEQ ID NO: 196785 - DNA, 80 bp, synthetic construct; identical to SEQ ID NO: 12055
  source 1..80: mol_type = other DNA

SEQ ID NO: 196786 - DNA, 80 bp, synthetic construct; identical to SEQ ID NO: 12056
  source 1..80: mol_type = other DNA

SEQ ID NO: 196787 - DNA, 80 bp, synthetic construct; identical to SEQ ID NO: 12057
  source 1..80: mol_type = other DNA

SEQ ID NO: 196788 - DNA, 80 bp, synthetic construct; identical to SEQ ID NO: 12058
  source 1..80: mol_type = other DNA

SEQ ID NO: 196789 - DNA, 80 bp, synthetic construct; identical to SEQ ID NO: 12059
  source 1..80: mol_type = other DNA

SEQ ID NO: 196790 - DNA, 80 bp, synthetic construct; identical to SEQ ID NO: 12060
  source 1..80: mol_type = other DNA

SEQ ID NO: 196791 - DNA, 80 bp, synthetic construct; identical to SEQ ID NO: 12061
  source 1..80: mol_type = other DNA

SEQ ID NO: 196792 - DNA, 80 bp, synthetic construct; identical to SEQ ID NO: 12062
  source 1..80: mol_type = other DNA

SEQ ID NO: 196793 - DNA, 80 bp, synthetic construct; identical to SEQ ID NO: 12063
  source 1..80: mol_type = other DNA

SEQ ID NO: 196794 - DNA, 80 bp, synthetic construct; identical to SEQ ID NO: 12064
  source 1..80: mol_type = other DNA

SEQ ID NO: 196795 - DNA, 80 bp, synthetic construct; identical to SEQ ID NO: 12065
  source 1..80: mol_type = other DNA

SEQ ID NO: 196796 - DNA, 80 bp, synthetic construct; identical to SEQ ID NO: 12066
  source 1..80: mol_type = other DNA

SEQ ID NO: 196797 - DNA, 80 bp, synthetic construct; identical to SEQ ID NO: 12067
  source 1..80: mol_type = other DNA

SEQ ID NO: 196798 - DNA, 80 bp, synthetic construct; identical to SEQ ID NO: 12068
  source 1..80: mol_type = other DNA

SEQ ID NO: 196799 - DNA, 80 bp, synthetic construct; identical to SEQ ID NO: 12069
  source 1..80: mol_type = other DNA

SEQ ID NO: 196800 - DNA, 80 bp, synthetic construct; identical to SEQ ID NO: 12070
  source 1..80: mol_type = other DNA

SEQ ID NO: 196801 - DNA, 80 bp, synthetic construct; identical to SEQ ID NO: 12071
  source 1..80: mol_type = other DNA

SEQ ID NO: 196802 - DNA, 80 bp, synthetic construct; identical to SEQ ID NO: 12072
  source 1..80: mol_type = other DNA

SEQ ID NO: 196803 - DNA, 80 bp, synthetic construct; identical to SEQ ID NO: 12073
  source 1..80: mol_type = other DNA

SEQ ID NO: 196804 - DNA, 80 bp, synthetic construct; identical to SEQ ID NO: 12074
  source 1..80: mol_type = other DNA

SEQ ID NO: 196805 - DNA, 80 bp, synthetic construct; identical to SEQ ID NO: 12075
  source 1..80: mol_type = other DNA

SEQ ID NO: 196806 - DNA, 80 bp, synthetic construct; identical to SEQ ID NO: 12076
  source 1..80: mol_type = other DNA

SEQ ID NO: 196807 - DNA, 80 bp, synthetic construct; identical to SEQ ID NO: 12077
  source 1..80: mol_type = other DNA

SEQ ID NO: 196808 - DNA, 80 bp, synthetic construct; identical to SEQ ID NO: 12078
  source 1..80: mol_type = other DNA

SEQ ID NO: 196809 - DNA, 80 bp, synthetic construct; identical to SEQ ID NO: 12079
  source 1..80: mol_type = other DNA

SEQ ID NO: 196810 - DNA, 80 bp, synthetic construct; identical to SEQ ID NO: 12080
  source 1..80: mol_type = other DNA

SEQ ID NO: 196811 - DNA, 80 bp, synthetic construct; identical to SEQ ID NO: 12081
  source 1..80: mol_type = other DNA

SEQ ID NO: 196812 - DNA, 80 bp, synthetic construct; identical to SEQ ID NO: 12082
  source 1..80: mol_type = other DNA

SEQ ID NO: 196813 - DNA, 80 bp, synthetic construct; identical to SEQ ID NO: 12083
  source 1..80: mol_type = other DNA

SEQ ID NO: 196814 - DNA, 80 bp, synthetic construct; identical to SEQ ID NO: 12084
  source 1..80: mol_type = other DNA

SEQ ID NO: 196815 - DNA, 80 bp, synthetic construct; identical to SEQ ID NO: 12085
  source 1..80: mol_type = other DNA

SEQ ID NO: 196816 - DNA, 80 bp, synthetic construct; identical to SEQ ID NO: 12086
  source 1..80: mol_type = other DNA

SEQ ID NO: 196817 - DNA, 80 bp, synthetic construct; identical to SEQ ID NO: 12087
  source 1..80: mol_type = other DNA

SEQ ID NO: 196818 - DNA, 80 bp, synthetic construct; identical to SEQ ID NO: 12088
  source 1..80: mol_type = other DNA

SEQ ID NO: 196819 - DNA, 80 bp, synthetic construct; identical to SEQ ID NO: 12089
  source 1..80: mol_type = other DNA

SEQ ID NO: 196820 - DNA, 80 bp, synthetic construct; identical to SEQ ID NO: 12090
  source 1..80: mol_type = other DNA

SEQ ID NO: 196821 - DNA, 80 bp, synthetic construct; identical to SEQ ID NO: 12091
  source 1..80: mol_type = other DNA

SEQ ID NO: 196822 - DNA, 80 bp, synthetic construct; identical to SEQ ID NO: 12092
  source 1..80: mol_type = other DNA

SEQ ID NO: 196823 - DNA, 80 bp, synthetic construct; identical to SEQ ID NO: 12093
  source 1..80: mol_type = other DNA

SEQ ID NO: 196824 - DNA, 80 bp, synthetic construct; identical to SEQ ID NO: 12094
  source 1..80: mol_type = other DNA

SEQ ID NO: 196825 - DNA, 80 bp, synthetic construct; identical to SEQ ID NO: 12095
  source 1..80: mol_type = other DNA

SEQ ID NO: 196826 - DNA, 80 bp, synthetic construct; identical to SEQ ID NO: 12096
  source 1..80: mol_type = other DNA

SEQ ID NO: 196827 - DNA, 80 bp, synthetic construct; identical to SEQ ID NO: 12097
  source 1..80: mol_type = other DNA

SEQ ID NO: 196828 - DNA, 80 bp, synthetic construct; identical to SEQ ID NO: 12098
  source 1..80: mol_type = other DNA

SEQ ID NO: 196829 - DNA, 80 bp, synthetic construct; identical to SEQ ID NO: 12099
  source 1..80: mol_type = other DNA

SEQ ID NO: 196830 - DNA, 80 bp, synthetic construct; identical to SEQ ID NO: 12100
  source 1..80: mol_type = other DNA

SEQ ID NO: 196831 - DNA, 80 bp, synthetic construct; identical to SEQ ID NO: 12101
  source 1..80: mol_type = other DNA

SEQ ID NO: 196832 - DNA, 80 bp, synthetic construct; identical to SEQ ID NO: 12102
  source 1..80: mol_type = other DNA

SEQ ID NO: 196833 - DNA, 80 bp, synthetic construct; identical to SEQ ID NO: 12103
  source 1..80: mol_type = other DNA

SEQ ID NO: 196834 - DNA, 80 bp, synthetic construct; identical to SEQ ID NO: 12104
  source 1..80: mol_type = other DNA

SEQ ID NO: 196835 - DNA, 80 bp, synthetic construct; identical to SEQ ID NO: 12105
  source 1..80: mol_type = other DNA

SEQ ID NO: 196836 - DNA, 80 bp, synthetic construct; identical to SEQ ID NO: 12106
  source 1..80: mol_type = other DNA

SEQ ID NO: 196837 - DNA, 80 bp, synthetic construct; identical to SEQ ID NO: 12107
  source 1..80: mol_type = other DNA

SEQ ID NO: 196838 - DNA, 80 bp, synthetic construct; identical to SEQ ID NO: 12108
  source 1..80: mol_type = other DNA

SEQ ID NO: 196839 - DNA, 80 bp, synthetic construct; identical to SEQ ID NO: 12109
  source 1..80: mol_type = other DNA

SEQ ID NO: 196840 - DNA, 80 bp, synthetic construct; identical to SEQ ID NO: 12110
  source 1..80: mol_type = other DNA

SEQ ID NO: 196841 - DNA, 80 bp, synthetic construct; identical to SEQ ID NO: 12111
  source 1..80: mol_type = other DNA

SEQ ID NO: 196842 - DNA, 80 bp, synthetic construct; identical to SEQ ID NO: 12112
  source 1..80: mol_type = other DNA

SEQ ID NO: 196843 - DNA, 80 bp, synthetic construct; identical to SEQ ID NO: 12113
  source 1..80: mol_type = other DNA

SEQ ID NO: 196844 - DNA, 80 bp, synthetic construct; identical to SEQ ID NO: 12114
  source 1..80: mol_type = other DNA

SEQ ID NO: 196845 - DNA, 80 bp, synthetic construct; identical to SEQ ID NO: 12115
  source 1..80: mol_type = other DNA

SEQ ID NO: 196846 - DNA, 80 bp, synthetic construct; identical to SEQ ID NO: 12116
  source 1..80: mol_type = other DNA

SEQ ID NO: 196847 - DNA, 80 bp, synthetic construct; identical to SEQ ID NO: 12117
  source 1..80: mol_type = other DNA

SEQ ID NO: 196848 - DNA, 80 bp, synthetic construct; identical to SEQ ID NO: 12118
  source 1..80: mol_type = other DNA

SEQ ID NO: 196849 - DNA, 80 bp, synthetic construct; identical to SEQ ID NO: 12119
  source 1..80: mol_type = other DNA

SEQ ID NO: 196850 - DNA, 80 bp, synthetic construct; identical to SEQ ID NO: 12120
  source 1..80: mol_type = other DNA

SEQ ID NO: 196851 - DNA, 80 bp, synthetic construct; identical to SEQ ID NO: 12121
  source 1..80: mol_type = other DNA

SEQ ID NO: 196852 - DNA, 80 bp, synthetic construct; identical to SEQ ID NO: 12122
  source 1..80: mol_type = other DNA

SEQ ID NO: 196853 - DNA, 80 bp, synthetic construct; identical to SEQ ID NO: 12123
  source 1..80: mol_type = other DNA

SEQ ID NO: 196854 - DNA, 80 bp, synthetic construct; identical to SEQ ID NO: 12124
  source 1..80: mol_type = other DNA

SEQ ID NO: 196855 - DNA, 80 bp, synthetic construct; identical to SEQ ID NO: 12125
  source 1..80: mol_type = other DNA

SEQ ID NO: 196856 - DNA, 80 bp, synthetic construct; identical to SEQ ID NO: 12126
  source 1..80: mol_type = other DNA

SEQ ID NO: 196857 - DNA, 80 bp, synthetic construct; identical to SEQ ID NO: 12127
  source 1..80: mol_type = other DNA

SEQ ID NO: 196858 - DNA, 80 bp, synthetic construct; identical to SEQ ID NO: 12128
  source 1..80: mol_type = other DNA

SEQ ID NO: 196859 - DNA, 80 bp, synthetic construct; identical to SEQ ID NO: 12129
  source 1..80: mol_type = other DNA

SEQ ID NO: 196860 - DNA, 80 bp, synthetic construct; identical to SEQ ID NO: 12130
  source 1..80: mol_type = other DNA

SEQ ID NO: 196861 - DNA, 80 bp, synthetic construct; identical to SEQ ID NO: 12131
  source 1..80: mol_type = other DNA

SEQ ID NO: 196862 - DNA, 80 bp, synthetic construct; identical to SEQ ID NO: 12132
  source 1..80: mol_type = other DNA

SEQ ID NO: 196863 - DNA, 80 bp, synthetic construct; identical to SEQ ID NO: 12133
  source 1..80: mol_type = other DNA

SEQ ID NO: 196864 - DNA, 80 bp, synthetic construct; identical to SEQ ID NO: 12134
  source 1..80: mol_type = other DNA

SEQ ID NO: 196865 - DNA, 80 bp, synthetic construct; identical to SEQ ID NO: 12135
  source 1..80: mol_type = other DNA

SEQ ID NO: 196866 - DNA, 80 bp, synthetic construct; identical to SEQ ID NO: 12136
  source 1..80: mol_type = other DNA

SEQ ID NO: 196867 - DNA, 80 bp, synthetic construct; identical to SEQ ID NO: 12137
  source 1..80: mol_type = other DNA

SEQ ID NO: 196868 - DNA, 80 bp, synthetic construct; identical to SEQ ID NO: 12138
  source 1..80: mol_type = other DNA

SEQ ID NO: 196869 - DNA, 80 bp, synthetic construct; identical to SEQ ID NO: 12139
  source 1..80: mol_type = other DNA

SEQ ID NO: 196870 - DNA, 80 bp, synthetic construct; identical to SEQ ID NO: 12140
  source 1..80: mol_type = other DNA

SEQ ID NO: 196871 - DNA, 80 bp, synthetic construct; identical to SEQ ID NO: 12141
  source 1..80: mol_type = other DNA

SEQ ID NO: 196872 - DNA, 80 bp, synthetic construct; identical to SEQ ID NO: 12142
  source 1..80: mol_type = other DNA

SEQ ID NO: 196873 - DNA, 80 bp, synthetic construct; identical to SEQ ID NO: 12143
  source 1..80: mol_type = other DNA

SEQ ID NO: 196874 - DNA, 80 bp, synthetic construct; identical to SEQ ID NO: 12144
  source 1..80: mol_type = other DNA

SEQ ID NO: 196875 - DNA, 80 bp, synthetic construct; identical to SEQ ID NO: 12145
  source 1..80: mol_type = other DNA

SEQ ID NO: 196876 - DNA, 80 bp, synthetic construct; identical to SEQ ID NO: 12146
  source 1..80: mol_type = other DNA

SEQ ID NO: 196877 - DNA, 80 bp, synthetic construct; identical to SEQ ID NO: 12147
  source 1..80: mol_type = other DNA

SEQ ID NO: 196878 - DNA, 80 bp, synthetic construct; identical to SEQ ID NO: 12148
  source 1..80: mol_type = other DNA

SEQ ID NO: 196879 - DNA, 80 bp, synthetic construct; identical to SEQ ID NO: 12149
  source 1..80: mol_type = other DNA

SEQ ID NO: 196880 - DNA, 80 bp, synthetic construct; identical to SEQ ID NO: 12150
  source 1..80: mol_type = other DNA

SEQ ID NO: 196881 - DNA, 80 bp, synthetic construct; identical to SEQ ID NO: 12151
  source 1..80: mol_type = other DNA

SEQ ID NO: 196882 - DNA, 80 bp, synthetic construct; identical to SEQ ID NO: 12152
  source 1..80: mol_type = other DNA

SEQ ID NO: 196883 - DNA, 80 bp, synthetic construct; identical to SEQ ID NO: 12153
  source 1..80: mol_type = other DNA

SEQ ID NO: 196884 - DNA, 80 bp, synthetic construct; identical to SEQ ID NO: 12154
  source 1..80: mol_type = other DNA

SEQ ID NO: 196885 - DNA, 80 bp, synthetic construct; identical to SEQ ID NO: 12155
  source 1..80: mol_type = other DNA

SEQ ID NO: 196886 - DNA, 80 bp, synthetic construct; identical to SEQ ID NO: 12156
  source 1..80: mol_type = other DNA

SEQ ID NO: 196887 - DNA, 80 bp, synthetic construct; identical to SEQ ID NO: 12157
  source 1..80: mol_type = other DNA

SEQ ID NO: 196888 - DNA, 80 bp, synthetic construct; identical to SEQ ID NO: 12158
  source 1..80: mol_type = other DNA

SEQ ID NO: 196889 - DNA, 80 bp, synthetic construct; identical to SEQ ID NO: 12159
  source 1..80: mol_type = other DNA

SEQ ID NO: 196890 - DNA, 80 bp, synthetic construct; identical to SEQ ID NO: 12160
  source 1..80: mol_type = other DNA

SEQ ID NO: 196891 - DNA, 80 bp, synthetic construct; identical to SEQ ID NO: 12161
  source 1..80: mol_type = other DNA

SEQ ID NO: 196892 - DNA, 80 bp, synthetic construct; identical to SEQ ID NO: 12162
  source 1..80: mol_type = other DNA

SEQ ID NO: 196893 - DNA, 80 bp, synthetic construct; identical to SEQ ID NO: 12163
  source 1..80: mol_type = other DNA

SEQ ID NO: 196894 - DNA, 80 bp, synthetic construct; identical to SEQ ID NO: 12164
  source 1..80: mol_type = other DNA

SEQ ID NO: 196895 - DNA, 80 bp, synthetic construct; identical to SEQ ID NO: 12165
  source 1..80: mol_type = other DNA

SEQ ID NO: 196896 - DNA, 80 bp, synthetic construct; identical to SEQ ID NO: 12166
  source 1..80: mol_type = other DNA

SEQ ID NO: 196897 - DNA, 80 bp, synthetic construct; identical to SEQ ID NO: 12167
  source 1..80: mol_type = other DNA

SEQ ID NO: 196898 - DNA, 80 bp, synthetic construct; identical to SEQ ID NO: 12168
  source 1..80: mol_type = other DNA

SEQ ID NO: 196899 - DNA, 80 bp, synthetic construct; identical to SEQ ID NO: 12169
  source 1..80: mol_type = other DNA

SEQ ID NO: 196900 - DNA, 80 bp, synthetic construct; identical to SEQ ID NO: 12170
  source 1..80: mol_type = other DNA

SEQ ID NO: 196901 - DNA, 80 bp, synthetic construct; identical to SEQ ID NO: 12171
  source 1..80: mol_type = other DNA

SEQ ID NO: 196902 - DNA, 80 bp, synthetic construct; identical to SEQ ID NO: 12172
  source 1..80: mol_type = other DNA

SEQ ID NO: 196903 - DNA, 80 bp, synthetic construct; identical to SEQ ID NO: 12173
  source 1..80: mol_type = other DNA

SEQ ID NO: 196904 - DNA, 80 bp, synthetic construct; identical to SEQ ID NO: 12174
  source 1..80: mol_type = other DNA

SEQ ID NO: 196905 - DNA, 80 bp, synthetic construct; identical to SEQ ID NO: 12175
  source 1..80: mol_type = other DNA

SEQ ID NO: 196906 - DNA, 80 bp, synthetic construct; identical to SEQ ID NO: 12176
  source 1..80: mol_type = other DNA

SEQ ID NO: 196907 - DNA, 80 bp, synthetic construct; identical to SEQ ID NO: 12177
  source 1..80: mol_type = other DNA

SEQ ID NO: 196908 - DNA, 80 bp, synthetic construct; identical to SEQ ID NO: 12178
  source 1..80: mol_type = other DNA

SEQ ID NO: 196909 - DNA, 80 bp, synthetic construct; identical to SEQ ID NO: 12179
  source 1..80: mol_type = other DNA

SEQ ID NO: 196910 - DNA, 80 bp, synthetic construct; identical to SEQ ID NO: 12180
  source 1..80: mol_type = other DNA

SEQ ID NO: 196911 - DNA, 80 bp, synthetic construct; identical to SEQ ID NO: 12181
  source 1..80: mol_type = other DNA

SEQ ID NO: 196912 - DNA, 80 bp, synthetic construct; identical to SEQ ID NO: 12182
  source 1..80: mol_type = other DNA

SEQ ID NO: 196913 - DNA, 80 bp, synthetic construct; identical to SEQ ID NO: 12183
  source 1..80: mol_type = other DNA

SEQ ID NO: 196914 - DNA, 80 bp, synthetic construct; identical to SEQ ID NO: 12184
  source 1..80: mol_type = other DNA

SEQ ID NO: 196915 - DNA, 80 bp, synthetic construct; identical to SEQ ID NO: 12185
  source 1..80: mol_type = other DNA

SEQ ID NO: 196916 - DNA, 80 bp, synthetic construct; identical to SEQ ID NO: 12186
  source 1..80: mol_type = other DNA

SEQ ID NO: 196917 - DNA, 80 bp, synthetic construct; identical to SEQ ID NO: 12187
  source 1..80: mol_type = other DNA

SEQ ID NO: 196918 - DNA, 80 bp, synthetic construct; identical to SEQ ID NO: 12188
  source 1..80: mol_type = other DNA

SEQ ID NO: 196919 - DNA, 80 bp, synthetic construct; identical to SEQ ID NO: 12189
  source 1..80: mol_type = other DNA

SEQ ID NO: 196920 - DNA, 80 bp, synthetic construct; identical to SEQ ID NO: 12190
  source 1..80: mol_type = other DNA

SEQ ID NO: 196921 - DNA, 80 bp, synthetic construct; identical to SEQ ID NO: 12191
  source 1..80: mol_type = other DNA

SEQ ID NO: 196922 - DNA, 80 bp, synthetic construct; identical to SEQ ID NO: 12192
  source 1..80: mol_type = other DNA

SEQ ID NO: 196923 - DNA, 80 bp, synthetic construct; identical to SEQ ID NO: 12193
  source 1..80: mol_type = other DNA

SEQ ID NO: 196924 - DNA, 80 bp, synthetic construct; identical to SEQ ID NO: 12194
  source 1..80: mol_type = other DNA

SEQ ID NO: 196925 - DNA, 80 bp, synthetic construct; identical to SEQ ID NO: 12195
  source 1..80: mol_type = other DNA

SEQ ID NO: 196926 - DNA, 80 bp, synthetic construct; identical to SEQ ID NO: 12196
  source 1..80: mol_type = other DNA

SEQ ID NO: 196927 - DNA, 80 bp, synthetic construct; identical to SEQ ID NO: 12197
  source 1..80: mol_type = other DNA

SEQ ID NO: 196928 - DNA, 80 bp, synthetic construct; identical to SEQ ID NO: 12198
  source 1..80: mol_type = other DNA

SEQ ID NO: 196929 - DNA, 80 bp, synthetic construct; identical to SEQ ID NO: 12199
  source 1..80: mol_type = other DNA

SEQ ID NO: 196930 - DNA, 80 bp, synthetic construct; identical to SEQ ID NO: 12200
  source 1..80: mol_type = other DNA

SEQ ID NO: 196931 - DNA, 80 bp, synthetic construct; identical to SEQ ID NO: 12201
  source 1..80: mol_type = other DNA

SEQ ID NO: 196932 - DNA, 80 bp, synthetic construct; identical to SEQ ID NO: 12202
  source 1..80: mol_type = other DNA

SEQ ID NO: 196933 - DNA, 80 bp, synthetic construct; identical to SEQ ID NO: 12203
  source 1..80: mol_type = other DNA

SEQ ID NO: 196934 - DNA, 80 bp, synthetic construct; identical to SEQ ID NO: 12204
  source 1..80: mol_type = other DNA

SEQ ID NO: 196935 - DNA, 80 bp, synthetic construct; identical to SEQ ID NO: 12205
  source 1..80: mol_type = other DNA

SEQ ID NO: 196936 - DNA, 80 bp, synthetic construct; identical to SEQ ID NO: 12206
  source 1..80: mol_type = other DNA

SEQ ID NO: 196937 - DNA, 80 bp, synthetic construct; identical to SEQ ID NO: 12207
  source 1..80: mol_type = other DNA

SEQ ID NO: 196938 - DNA, 80 bp, synthetic construct; identical to SEQ ID NO: 12208
  source 1..80: mol_type = other DNA

SEQ ID NO: 196939 - DNA, 80 bp, synthetic construct; identical to SEQ ID NO: 12209
  source 1..80: mol_type = other DNA

SEQ ID NO: 196940 - DNA, 80 bp, synthetic construct; identical to SEQ ID NO: 12210
  source 1..80: mol_type = other DNA

SEQ ID NO: 196941 - DNA, 80 bp, synthetic construct; identical to SEQ ID NO: 12211
  source 1..80: mol_type = other DNA

SEQ ID NO: 196942 - DNA, 80 bp, synthetic construct; identical to SEQ ID NO: 12212
  source 1..80: mol_type = other DNA

SEQ ID NO: 196943 - DNA, 80 bp, synthetic construct; identical to SEQ ID NO: 12213
  source 1..80: mol_type = other DNA

SEQ ID NO: 196944 - DNA, 80 bp, synthetic construct; identical to SEQ ID NO: 12214
  source 1..80: mol_type = other DNA

SEQ ID NO: 196945 - DNA, 80 bp, synthetic construct; identical to SEQ ID NO: 12215
  source 1..80: mol_type = other DNA

SEQ ID NO: 196946 - DNA, 80 bp, synthetic construct; identical to SEQ ID NO: 12216
  source 1..80: mol_type = other DNA

SEQ ID NO: 196947 - DNA, 80 bp, synthetic construct; identical to SEQ ID NO: 12217
  source 1..80: mol_type = other DNA

SEQ ID NO: 196948 - DNA, 80 bp, synthetic construct; identical to SEQ ID NO: 12218
  source 1..80: mol_type = other DNA

SEQ ID NO: 196949 - DNA, 80 bp, synthetic construct; identical to SEQ ID NO: 12219
  source 1..80: mol_type = other DNA

SEQ ID NO: 196950 - DNA, 80 bp, synthetic construct; identical to SEQ ID NO: 12220
  source 1..80: mol_type = other DNA

SEQ ID NO: 196951 - DNA, 80 bp, synthetic construct; identical to SEQ ID NO: 12221
  source 1..80: mol_type = other DNA

SEQ ID NO: 196952 - DNA, 80 bp, synthetic construct; identical to SEQ ID NO: 12222
  source 1..80: mol_type = other DNA

SEQ ID NO: 196953 - DNA, 80 bp, synthetic construct; identical to SEQ ID NO: 12223
  source 1..80: mol_type = other DNA

SEQ ID NO: 196954 - DNA, 80 bp, synthetic construct; identical to SEQ ID NO: 12224
  source 1..80: mol_type = other DNA

SEQ ID NO: 196955 - DNA, 80 bp, synthetic construct; identical to SEQ ID NO: 12225
  source 1..80: mol_type = other DNA

SEQ ID NO: 196956 - DNA, 80 bp, synthetic construct; identical to SEQ ID NO: 12226
  source 1..80: mol_type = other DNA

SEQ ID NO: 196957 - DNA, 80 bp, synthetic construct; identical to SEQ ID NO: 12227
  source 1..80: mol_type = other DNA

SEQ ID NO: 196958 - DNA, 80 bp, synthetic construct; identical to SEQ ID NO: 12228
  source 1..80: mol_type = other DNA

SEQ ID NO: 196959 - DNA, 80 bp, synthetic construct; identical to SEQ ID NO: 12229
  source 1..80: mol_type = other DNA

SEQ ID NO: 196960 - DNA, 80 bp, synthetic construct; identical to SEQ ID NO: 12230
  source 1..80: mol_type = other DNA

SEQ ID NO: 196961 - DNA, 80 bp, synthetic construct; identical to SEQ ID NO: 12231
  source 1..80: mol_type = other DNA

SEQ ID NO: 196962 - DNA, 80 bp, synthetic construct; identical to SEQ ID NO: 12232
  source 1..80: mol_type = other DNA

SEQ ID NO: 196963 - DNA, 80 bp, synthetic construct; identical to SEQ ID NO: 12233
  source 1..80: mol_type = other DNA

SEQ ID NO: 196964 - DNA, 80 bp, synthetic construct; identical to SEQ ID NO: 12234
  source 1..80: mol_type = other DNA

SEQ ID NO: 196965 - DNA, 80 bp, synthetic construct; identical to SEQ ID NO: 12235
  source 1..80: mol_type = other DNA

SEQ ID NO: 196966 - DNA, 80 bp, synthetic construct; identical to SEQ ID NO: 12236
  source 1..80: mol_type = other DNA

SEQ ID NO: 196967 - DNA, 80 bp, synthetic construct; identical to SEQ ID NO: 12237
  source 1..80: mol_type = other DNA

SEQ ID NO: 196968 - DNA, 80 bp, synthetic construct; identical to SEQ ID NO: 12238
  source 1..80: mol_type = other DNA

SEQ ID NO: 196969 - DNA, 80 bp, synthetic construct; identical to SEQ ID NO: 12239
  source 1..80: mol_type = other DNA

SEQ ID NO: 196970 - DNA, 80 bp, synthetic construct; identical to SEQ ID NO: 12240
  source 1..80: mol_type = other DNA

SEQ ID NO: 196971 - DNA, 80 bp, synthetic construct; identical to SEQ ID NO: 12241
  source 1..80: mol_type = other DNA

SEQ ID NO: 196972 - DNA, 80 bp, synthetic construct; identical to SEQ ID NO: 12242
  source 1..80: mol_type = other DNA

SEQ ID NO: 196973 - DNA, 80 bp, synthetic construct; identical to SEQ ID NO: 12243
  source 1..80: mol_type = other DNA

SEQ ID NO: 196974 - DNA, 80 bp, synthetic construct; identical to SEQ ID NO: 12244
  source 1..80: mol_type = other DNA

SEQ ID NO: 196975 - DNA, 80 bp, synthetic construct; identical to SEQ ID NO: 12245
  source 1..80: mol_type = other DNA

SEQ ID NO: 196976 - DNA, 80 bp, synthetic construct; identical to SEQ ID NO: 12246
  source 1..80: mol_type = other DNA

SEQ ID NO: 196977 - DNA, 80 bp, synthetic construct; identical to SEQ ID NO: 12247
  source 1..80: mol_type = other DNA

SEQ ID NO: 196978 - DNA, 80 bp, synthetic construct; identical to SEQ ID NO: 12248
  source 1..80: mol_type = other DNA

SEQ ID NO: 196979 - DNA, 80 bp, synthetic construct; identical to SEQ ID NO: 12249
  source 1..80: mol_type = other DNA

SEQ ID NO: 196980 - DNA, 80 bp, synthetic construct; identical to SEQ ID NO: 12250
  source 1..80: mol_type = other DNA

SEQ ID NO: 196981 - DNA, 80 bp, synthetic construct; identical to SEQ ID NO: 12251
  source 1..80: mol_type = other DNA

SEQ ID NO: 196982 - DNA, 80 bp, synthetic construct; identical to SEQ ID NO: 12252
  source 1..80: mol_type = other DNA

SEQ ID NO: 196983 - DNA, 80 bp, synthetic construct; identical to SEQ ID NO: 12253
  source 1..80: mol_type = other DNA

SEQ ID NO: 196984 - DNA, 80 bp, synthetic construct; identical to SEQ ID NO: 12254
  source 1..80: mol_type = other DNA

SEQ ID NO: 196985 - DNA, 80 bp, synthetic construct; identical to SEQ ID NO: 12255
  source 1..80: mol_type = other DNA

SEQ ID NO: 196986 - DNA, 80 bp, synthetic construct; identical to SEQ ID NO: 12256
  source 1..80: mol_type = other DNA

SEQ ID NO: 196987 - DNA, 80 bp, synthetic construct; identical to SEQ ID NO: 12257
  source 1..80: mol_type = other DNA

SEQ ID NO: 196988 - DNA, 80 bp, synthetic construct; identical to SEQ ID NO: 12258
  source 1..80: mol_type = other DNA

SEQ ID NO: 196989 - DNA, 80 bp, synthetic construct; identical to SEQ ID NO: 12259
  source 1..80: mol_type = other DNA

SEQ ID NO: 196990 - DNA, 80 bp, synthetic construct; identical to SEQ ID NO: 12260
  source 1..80: mol_type = other DNA

SEQ ID NO: 196991 - DNA, 80 bp, synthetic construct; identical to SEQ ID NO: 12261
  source 1..80: mol_type = other DNA

SEQ ID NO: 196992 - DNA, 80 bp, synthetic construct; identical to SEQ ID NO: 12262
  source 1..80: mol_type = other DNA

SEQ ID NO: 196993 - DNA, 80 bp, synthetic construct; identical to SEQ ID NO: 12263
  source 1..80: mol_type = other DNA

SEQ ID NO: 196994 - DNA, 80 bp, synthetic construct; identical to SEQ ID NO: 12264
  source 1..80: mol_type = other DNA

SEQ ID NO: 196995 - DNA, 80 bp, synthetic construct; identical to SEQ ID NO: 12265
  source 1..80: mol_type = other DNA

SEQ ID NO: 196996 - DNA, 80 bp, synthetic construct; identical to SEQ ID NO: 12266
  source 1..80: mol_type = other DNA

SEQ ID NO: 196997 - DNA, 80 bp, synthetic construct; identical to SEQ ID NO: 12267
  source 1..80: mol_type = other DNA

SEQ ID NO: 196998 - DNA, 80 bp, synthetic construct; identical to SEQ ID NO: 12268
  source 1..80: mol_type = other DNA

SEQ ID NO: 196999 - DNA, 80 bp, synthetic construct; identical to SEQ ID NO: 12269
  source 1..80: mol_type = other DNA

SEQ ID NO: 197000 - DNA, 80 bp, synthetic construct; identical to SEQ ID NO: 12270
  source 1..80: mol_type = other DNA

SEQ ID NO: 197001 - DNA, 80 bp, synthetic construct; identical to SEQ ID NO: 12271
  source 1..80: mol_type = other DNA

SEQ ID NO: 197002 - DNA, 80 bp, synthetic construct; identical to SEQ ID NO: 12272
  source 1..80: mol_type = other DNA

SEQ ID NO: 197003 - DNA, 80 bp, synthetic construct; identical to SEQ ID NO: 12273
  source 1..80: mol_type = other DNA

SEQ ID NO: 197004 - DNA, 80 bp, synthetic construct; identical to SEQ ID NO: 12274
  source 1..80: mol_type = other DNA

SEQ ID NO: 197005 - DNA, 80 bp, synthetic construct; identical to SEQ ID NO: 12275
  source 1..80: mol_type = other DNA

SEQ ID NO: 197006 - DNA, 80 bp, synthetic construct; identical to SEQ ID NO: 12276
  source 1..80: mol_type = other DNA

SEQ ID NO: 197007 - DNA, 80 bp, synthetic construct; identical to SEQ ID NO: 12277
  source 1..80: mol_type = other DNA

SEQ ID NO: 197008 - DNA, 80 bp, synthetic construct; identical to SEQ ID NO: 12278
  source 1..80: mol_type = other DNA

SEQ ID NO: 197009 - DNA, 80 bp, synthetic construct; identical to SEQ ID NO: 12279
  source 1..80: mol_type = other DNA

SEQ ID NO: 197010 - DNA, 80 bp, synthetic construct; identical to SEQ ID NO: 12280
  source 1..80: mol_type = other DNA

SEQ ID NO: 197011 - DNA, 80 bp, synthetic construct; identical to SEQ ID NO: 12281
  source 1..80: mol_type = other DNA

SEQ ID NO: 197012 - DNA, 80 bp, synthetic construct; identical to SEQ ID NO: 12282
  source 1..80: mol_type = other DNA

SEQ ID NO: 197013 - DNA, 80 bp, synthetic construct; identical to SEQ ID NO: 12283
  source 1..80: mol_type = other DNA

SEQ ID NO: 197014 - DNA, 80 bp, synthetic construct; identical to SEQ ID NO: 12284
  source 1..80: mol_type = other DNA

SEQ ID NO: 197015 - DNA, 80 bp, synthetic construct; identical to SEQ ID NO: 12285
  source 1..80: mol_type = other DNA

SEQ ID NO: 197016 - DNA, 80 bp, synthetic construct; identical to SEQ ID NO: 12286
  source 1..80: mol_type = other DNA

SEQ ID NO: 197017 - DNA, 80 bp, synthetic construct; identical to SEQ ID NO: 12287
  source 1..80: mol_type = other DNA

SEQ ID NO: 197018 - DNA, 80 bp, synthetic construct; identical to SEQ ID NO: 12288
  source 1..80: mol_type = other DNA

SEQ ID NO: 197019 - DNA, 80 bp, synthetic construct; identical to SEQ ID NO: 12289
  source 1..80: mol_type = other DNA

SEQ ID NO: 197020 - DNA, 80 bp, synthetic construct; identical to SEQ ID NO: 12290
  source 1..80: mol_type = other DNA

SEQ ID NO: 197021 - DNA, 80 bp, synthetic construct; identical to SEQ ID NO: 12291
  source 1..80: mol_type = other DNA

SEQ ID NO: 197022 - DNA, 80 bp, synthetic construct; identical to SEQ ID NO: 12292
  source 1..80: mol_type = other DNA

SEQ ID NO: 197023 - DNA, 80 bp, synthetic construct; identical to SEQ ID NO: 12293
  source 1..80: mol_type = other DNA

SEQ ID NO: 197024 - DNA, 80 bp, synthetic construct; identical to SEQ ID NO: 12294
  source 1..80: mol_type = other DNA

SEQ ID NO: 197025 - DNA, 80 bp, synthetic construct; identical to SEQ ID NO: 12295
  source 1..80: mol_type = other DNA

SEQ ID NO: 197026 - DNA, 80 bp, synthetic construct; identical to SEQ ID NO: 12296
  source 1..80: mol_type = other DNA

SEQ ID NO: 197027 - DNA, 80 bp, synthetic construct; identical to SEQ ID NO: 12297
  source 1..80: mol_type = other DNA

SEQ ID NO: 197028 - DNA, 80 bp, synthetic construct; identical to SEQ ID NO: 12298
  source 1..80: mol_type = other DNA

SEQ ID NO: 197029 - DNA, 80 bp, synthetic construct; identical to SEQ ID NO: 12299
  source 1..80: mol_type = other DNA

SEQ ID NO: 197030 - DNA, 80 bp, synthetic construct; identical to SEQ ID NO: 12300
  source 1..80: mol_type = other DNA

SEQ ID NO: 197031 - DNA, 80 bp, synthetic construct; identical to SEQ ID NO: 12301
  source 1..80: mol_type = other DNA

SEQ ID NO: 197032 - DNA, 80 bp, synthetic construct; identical to SEQ ID NO: 12302
  source 1..80: mol_type = other DNA

SEQ ID NO: 197033 - DNA, 80 bp, synthetic construct; identical to SEQ ID NO: 12303
  source 1..80: mol_type = other DNA

SEQ ID NO: 197034 - DNA, 80 bp, synthetic construct; identical to SEQ ID NO: 12304
  source 1..80: mol_type = other DNA

SEQ ID NO: 197035 - DNA, 80 bp, synthetic construct; identical to SEQ ID NO: 12305
  source 1..80: mol_type = other DNA

SEQ ID NO: 197036 - DNA, 80 bp, synthetic construct; identical to SEQ ID NO: 12306
  source 1..80: mol_type = other DNA

SEQ ID NO: 197037 - DNA, 80 bp, synthetic construct; identical to SEQ ID NO: 12307
  source 1..80: mol_type = other DNA

SEQ ID NO: 197038 - DNA, 80 bp, synthetic construct; identical to SEQ ID NO: 12308
  source 1..80: mol_type = other DNA

SEQ ID NO: 197039 - DNA, 80 bp, synthetic construct; identical to SEQ ID NO: 12309
  source 1..80: mol_type = other DNA

SEQ ID NO: 197040 - DNA, 80 bp, synthetic construct; identical to SEQ ID NO: 12310
  source 1..80: mol_type = other DNA

SEQ ID NO: 197041 - DNA, 80 bp, synthetic construct; identical to SEQ ID NO: 12311
  source 1..80: mol_type = other DNA

SEQ ID NO: 197042 - DNA, 80 bp, synthetic construct; identical to SEQ ID NO: 12312
  source 1..80: mol_type = other DNA

SEQ ID NO: 197043 - DNA, 80 bp, synthetic construct; identical to SEQ ID NO: 12313
  source 1..80: mol_type = other DNA

SEQ ID NO: 197044 - DNA, 80 bp, synthetic construct; identical to SEQ ID NO: 12314
  source 1..80: mol_type = other DNA

SEQ ID NO: 197045 - DNA, 80 bp, synthetic construct; identical to SEQ ID NO: 12315
  source 1..80: mol_type = other DNA

SEQ ID NO: 197046 - DNA, 80 bp, synthetic construct; identical to SEQ ID NO: 12316
  source 1..80: mol_type = other DNA

SEQ ID NO: 197047 - DNA, 80 bp, synthetic construct; identical to SEQ ID NO: 12317
  source 1..80: mol_type = other DNA

SEQ ID NO: 197048 - DNA, 80 bp, synthetic construct; identical to SEQ ID NO: 12318
  source 1..80: mol_type = other DNA

SEQ ID NO: 197049 - DNA, 80 bp, synthetic construct; identical to SEQ ID NO: 12319
  source 1..80: mol_type = other DNA

SEQ ID NO: 197050 - DNA, 80 bp, synthetic construct; identical to SEQ ID NO: 12320
  source 1..80: mol_type = other DNA

SEQ ID NO: 197051 - DNA, 80 bp, synthetic construct; identical to SEQ ID NO: 12321
  source 1..80: mol_type = other DNA

SEQ ID NO: 197052 - DNA, 80 bp, synthetic construct; identical to SEQ ID NO: 12322
  source 1..80: mol_type = other DNA

SEQ ID NO: 197053 - DNA, 80 bp, synthetic construct; identical to SEQ ID NO: 12323
  source 1..80: mol_type = other DNA

SEQ ID NO: 197054 - DNA, 80 bp, synthetic construct; identical to SEQ ID NO: 12324
  source 1..80: mol_type = other DNA

SEQ ID NO: 197055 - DNA, 80 bp, synthetic construct; identical to SEQ ID NO: 12325
  source 1..80: mol_type = other DNA

SEQ ID NO: 197056 - DNA, 80 bp, synthetic construct; identical to SEQ ID NO: 12326
  source 1..80: mol_type = other DNA

SEQ ID NO: 197057 - DNA, 80 bp, synthetic construct; identical to SEQ ID NO: 12327
  source 1..80: mol_type = other DNA

SEQ ID NO: 197058 - DNA, 80 bp, synthetic construct; identical to SEQ ID NO: 12328
  source 1..80: mol_type = other DNA

SEQ ID NO: 197059 - DNA, 80 bp, synthetic construct; identical to SEQ ID NO: 12329
  source 1..80: mol_type = other DNA

SEQ ID NO: 197060 - DNA, 80 bp, synthetic construct; identical to SEQ ID NO: 12330
  source 1..80: mol_type = other DNA

SEQ ID NO: 197061 - DNA, 80 bp, synthetic construct; identical to SEQ ID NO: 12331
  source 1..80: mol_type = other DNA

SEQ ID NO: 197062 - DNA, 80 bp, synthetic construct; identical to SEQ ID NO: 12332
  source 1..80: mol_type = other DNA

SEQ ID NO: 197063 - DNA, 80 bp, synthetic construct; identical to SEQ ID NO: 12333
  source 1..80: mol_type = other DNA

SEQ ID NO: 197064 - DNA, 80 bp, synthetic construct; identical to SEQ ID NO: 12334
  source 1..80: mol_type = other DNA

SEQ ID NO: 197065 - DNA, 80 bp, synthetic construct; identical to SEQ ID NO: 12335
  source 1..80: mol_type = other DNA

SEQ ID NO: 197066 - DNA, 80 bp, synthetic construct; identical to SEQ ID NO: 12336
  source 1..80: mol_type = other DNA

SEQ ID NO: 197067 - DNA, 80 bp, synthetic construct; identical to SEQ ID NO: 12337
  source 1..80: mol_type = other DNA

SEQ ID NO: 197068 - DNA, 80 bp, synthetic construct; identical to SEQ ID NO: 12338
  source 1..80: mol_type = other DNA

SEQ ID NO: 197069 - DNA, 80 bp, synthetic construct; identical to SEQ ID NO: 12339
  source 1..80: mol_type = other DNA

SEQ ID NO: 197070 - DNA, 80 bp, synthetic construct; identical to SEQ ID NO: 12340
  source 1..80: mol_type = other DNA

SEQ ID NO: 197071 - DNA, 80 bp, synthetic construct; identical to SEQ ID NO: 12341
  source 1..80: mol_type = other DNA

SEQ ID NO: 197072 - DNA, 80 bp, synthetic construct; identical to SEQ ID NO: 12342
  source 1..80: mol_type = other DNA

SEQ ID NO: 197073 - DNA, 80 bp, synthetic construct; identical to SEQ ID NO: 12343
  source 1..80: mol_type = other DNA

SEQ ID NO: 197074 - DNA, 80 bp, synthetic construct; identical to SEQ ID NO: 12344
  source 1..80: mol_type = other DNA

SEQ ID NO: 197075 - DNA, 80 bp, synthetic construct; identical to SEQ ID NO: 12345
  source 1..80: mol_type = other DNA

SEQ ID NO: 197076 - DNA, 80 bp, synthetic construct; identical to SEQ ID NO: 12346
  source 1..80: mol_type = other DNA

SEQ ID NO: 197077 - DNA, 80 bp, synthetic construct; identical to SEQ ID NO: 12347
  source 1..80: mol_type = other DNA

SEQ ID NO: 197078 - DNA, 80 bp, synthetic construct; identical to SEQ ID NO: 12348
  source 1..80: mol_type = other DNA

SEQ ID NO: 197079 - DNA, 80 bp, synthetic construct; identical to SEQ ID NO: 12349
  source 1..80: mol_type = other DNA

SEQ ID NO: 197080 - DNA, 80 bp, synthetic construct; identical to SEQ ID NO: 12350
  source 1..80: mol_type = other DNA

SEQ ID NO: 197081 - DNA, 80 bp, synthetic construct; identical to SEQ ID NO: 12351
  source 1..80: mol_type = other DNA

SEQ ID NO: 197082 - DNA, 80 bp, synthetic construct; identical to SEQ ID NO: 12352
  source 1..80: mol_type = other DNA

SEQ ID NO: 197083 - DNA, 80 bp, synthetic construct; identical to SEQ ID NO: 12353
  source 1..80: mol_type = other DNA

SEQ ID NO: 197084 - DNA, 80 bp, synthetic construct; identical to SEQ ID NO: 12354
  source 1..80: mol_type = other DNA

SEQ ID NO: 197085 - DNA, 80 bp, synthetic construct; identical to SEQ ID NO: 12355
  source 1..80: mol_type = other DNA

SEQ ID NO: 197086 - DNA, 80 bp, synthetic construct; identical to SEQ ID NO: 12356
  source 1..80: mol_type = other DNA

SEQ ID NO: 197087 - DNA, 80 bp, synthetic construct; identical to SEQ ID NO: 12357
  source 1..80: mol_type = other DNA

SEQ ID NO: 197088 - DNA, 80 bp, synthetic construct; identical to SEQ ID NO: 12358
  source 1..80: mol_type = other DNA

SEQ ID NO: 197089 - DNA, 80 bp, synthetic construct; identical to SEQ ID NO: 12359
  source 1..80: mol_type = other DNA

SEQ ID NO: 197090 - DNA, 80 bp, synthetic construct; identical to SEQ ID NO: 12360
  source 1..80: mol_type = other DNA

SEQ ID NO: 197091 - DNA, 80 bp, synthetic construct; identical to SEQ ID NO: 12361
  source 1..80: mol_type = other DNA

SEQ ID NO: 197092 - DNA, 80 bp, synthetic construct; identical to SEQ ID NO: 12362
  source 1..80: mol_type = other DNA

SEQ ID NO: 197093 - DNA, 80 bp, synthetic construct; identical to SEQ ID NO: 12363
  source 1..80: mol_type = other DNA

SEQ ID NO: 197094 - DNA, 80 bp, synthetic construct; identical to SEQ ID NO: 12364
  source 1..80: mol_type = other DNA

SEQ ID NO: 197095 - DNA, 80 bp, synthetic construct; identical to SEQ ID NO: 12365
  source 1..80: mol_type = other DNA

SEQ ID NO: 197096 - DNA, 80 bp, synthetic construct; identical to SEQ ID NO: 12366
  source 1..80: mol_type = other DNA

SEQ ID NO: 197097 - DNA, 80 bp, synthetic construct; identical to SEQ ID NO: 12367
  source 1..80: mol_type = other DNA

SEQ ID NO: 197098 - DNA, 80 bp, synthetic construct; identical to SEQ ID NO: 12368
  source 1..80: mol_type = other DNA

SEQ ID NO: 197099 - DNA, 80 bp, synthetic construct; identical to SEQ ID NO: 12369
  source 1..80: mol_type = other DNA

SEQ ID NO: 197100 - DNA, 80 bp, synthetic construct; identical to SEQ ID NO: 12370
  source 1..80: mol_type = other DNA

SEQ ID NO: 197101 - DNA, 80 bp, synthetic construct; identical to SEQ ID NO: 12371
  source 1..80: mol_type = other DNA

SEQ ID NO: 197102 - DNA, 80 bp, synthetic construct; identical to SEQ ID NO: 12372
  source 1..80: mol_type = other DNA

SEQ ID NO: 197103 - DNA, 80 bp, synthetic construct; identical to SEQ ID NO: 12373
  source 1..80: mol_type = other DNA

SEQ ID NO: 197104 - DNA, 80 bp, synthetic construct; identical to SEQ ID NO: 12374
  source 1..80: mol_type = other DNA

SEQ ID NO: 197105 - DNA, 80 bp, synthetic construct; identical to SEQ ID NO: 12375
  source 1..80: mol_type = other DNA

SEQ ID NO: 197106 - DNA, 80 bp, synthetic construct; identical to SEQ ID NO: 12376
  source 1..80: mol_type = other DNA

SEQ ID NO: 197107 - DNA, 80 bp, synthetic construct; identical to SEQ ID NO: 12377
  source 1..80: mol_type = other DNA

SEQ ID NO: 197108 - DNA, 80 bp, synthetic construct; identical to SEQ ID NO: 12378
  source 1..80: mol_type = other DNA

SEQ ID NO: 197109 - DNA, 80 bp, synthetic construct; identical to SEQ ID NO: 12379
  source 1..80: mol_type = other DNA

SEQ ID NO: 197110 - DNA, 80 bp, synthetic construct; identical to SEQ ID NO: 12380
  source 1..80: mol_type = other DNA

SEQ ID NO: 197111 - DNA, 80 bp, synthetic construct; identical to SEQ ID NO: 12381
  source 1..80: mol_type = other DNA

SEQ ID NO: 197112 - DNA, 80 bp, synthetic construct; identical to SEQ ID NO: 12382
  source 1..80: mol_type = other DNA

SEQ ID NO: 197113 - DNA, 80 bp, synthetic construct; identical to SEQ ID NO: 12383
  source 1..80: mol_type = other DNA

SEQ ID NO: 197114 - DNA, 80 bp, synthetic construct; identical to SEQ ID NO: 12384
  source 1..80: mol_type = other DNA

SEQ ID NO: 197115 - DNA, 80 bp, synthetic construct; identical to SEQ ID NO: 12385
  source 1..80: mol_type = other DNA

SEQ ID NO: 197116 - DNA, 80 bp, synthetic construct; identical to SEQ ID NO: 12386
  source 1..80: mol_type = other DNA

SEQ ID NO: 197117 - DNA, 80 bp, synthetic construct; identical to SEQ ID NO: 12387
  source 1..80: mol_type = other DNA

SEQ ID NO: 197118 - DNA, 80 bp, synthetic construct; identical to SEQ ID NO: 12388
  source 1..80: mol_type = other DNA

SEQ ID NO: 197119 - DNA, 80 bp, synthetic construct; identical to SEQ ID NO: 12389
  source 1..80: mol_type = other DNA

SEQ ID NO: 197120 - DNA, 80 bp, synthetic construct; identical to SEQ ID NO: 12390
  source 1..80: mol_type = other DNA

SEQ ID NO: 197121 - DNA, 80 bp, synthetic construct; identical to SEQ ID NO: 12391
  source 1..80: mol_type = other DNA

SEQ ID NO: 197122 - DNA, 80 bp, synthetic construct; identical to SEQ ID NO: 12392
  source 1..80: mol_type = other DNA

SEQ ID NO: 197123 - DNA, 80 bp, synthetic construct; identical to SEQ ID NO: 12393
  source 1..80: mol_type = other DNA

SEQ ID NO: 197124 - DNA, 80 bp, synthetic construct; identical to SEQ ID NO: 12394
  source 1..80: mol_type = other DNA

SEQ ID NO: 197125 - DNA, 80 bp, synthetic construct; identical to SEQ ID NO: 12395
  source 1..80: mol_type = other DNA

SEQ ID NO: 197126 - DNA, 80 bp, synthetic construct; identical to SEQ ID NO: 12396
  source 1..80: mol_type = other DNA

SEQ ID NO: 197127 - DNA, 80 bp, synthetic construct; identical to SEQ ID NO: 12397
  source 1..80: mol_type = other DNA

SEQ ID NO: 197128 - DNA, 80 bp, synthetic construct; identical to SEQ ID NO: 12398
  source 1..80: mol_type = other DNA

SEQ ID NO: 197129 - DNA, 80 bp, synthetic construct; identical to SEQ ID NO: 12399
  source 1..80: mol_type = other DNA

SEQ ID NO: 197130 - DNA, 80 bp, synthetic construct; identical to SEQ ID NO: 12400
  source 1..80: mol_type = other DNA

SEQ ID NO: 197131 - DNA, 80 bp, synthetic construct; identical to SEQ ID NO: 12401
  source 1..80: mol_type = other DNA

SEQ ID NO: 197132 - DNA, 80 bp, synthetic construct; identical to SEQ ID NO: 12402
  source 1..80: mol_type = other DNA

SEQ ID NO: 197133 - DNA, 80 bp, synthetic construct; identical to SEQ ID NO: 12403
  source 1..80: mol_type = other DNA

SEQ ID NO: 197134 - DNA, 80 bp, synthetic construct; identical to SEQ ID NO: 12404
  source 1..80: mol_type = other DNA

SEQ ID NO: 197135 - DNA, 80 bp, synthetic construct; identical to SEQ ID NO: 12405
  source 1..80: mol_type = other DNA

SEQ ID NO: 197136 - DNA, 80 bp, synthetic construct; identical to SEQ ID NO: 12406
  source 1..80: mol_type = other DNA

SEQ ID NO: 197137 - DNA, 80 bp, synthetic construct; identical to SEQ ID NO: 12407
  source 1..80: mol_type = other DNA

SEQ ID NO: 197138 - DNA, 80 bp, synthetic construct; identical to SEQ ID NO: 12408
  source 1..80: mol_type = other DNA

SEQ ID NO: 197139 - DNA, 80 bp, synthetic construct; identical to SEQ ID NO: 12409
  source 1..80: mol_type = other DNA

SEQ ID NO: 197140 - DNA, 80 bp, synthetic construct; identical to SEQ ID NO: 12410
  source 1..80: mol_type = other DNA

SEQ ID NO: 197141 - DNA, 80 bp, synthetic construct; identical to SEQ ID NO: 12411
  source 1..80: mol_type = other DNA

SEQ ID NO: 197142 - DNA, 80 bp, synthetic construct; identical to SEQ ID NO: 12412
  source 1..80: mol_type = other DNA

SEQ ID NO: 197143 - DNA, 80 bp, synthetic construct; identical to SEQ ID NO: 12413
  source 1..80: mol_type = other DNA

SEQ ID NO: 197144 - DNA, 80 bp, synthetic construct; identical to SEQ ID NO: 12414
  source 1..80: mol_type = other DNA

SEQ ID NO: 197145 - DNA, 80 bp, synthetic construct; identical to SEQ ID NO: 12415
  source 1..80: mol_type = other DNA

SEQ ID NO: 197146 - DNA, 80 bp, synthetic construct; identical to SEQ ID NO: 12416
  source 1..80: mol_type = other DNA

SEQ ID NO: 197147 - DNA, 80 bp, synthetic construct; identical to SEQ ID NO: 12417
  source 1..80: mol_type = other DNA

SEQ ID NO: 197148 - DNA, 80 bp, synthetic construct; identical to SEQ ID NO: 12418
  source 1..80: mol_type = other DNA

SEQ ID NO: 197149 - DNA, 80 bp, synthetic construct; identical to SEQ ID NO: 12419
  source 1..80: mol_type = other DNA

SEQ ID NO: 197150 - DNA, 80 bp, synthetic construct; identical to SEQ ID NO: 12420
  source 1..80: mol_type = other DNA

SEQ ID NO: 197151 - DNA, 80 bp, synthetic construct; identical to SEQ ID NO: 12421
  source 1..80: mol_type = other DNA

SEQ ID NO: 197152 - DNA, 80 bp, synthetic construct; identical to SEQ ID NO: 12422
  source 1..80: mol_type = other DNA

SEQ ID NO: 197153 - DNA, 80 bp, synthetic construct; identical to SEQ ID NO: 12423
  source 1..80: mol_type = other DNA

SEQ ID NO: 197154 - DNA, 80 bp, synthetic construct; identical to SEQ ID NO: 12424
  source 1..80: mol_type = other DNA

SEQ ID NO: 197155 - DNA, 80 bp, synthetic construct; identical to SEQ ID NO: 12425
  source 1..80: mol_type = other DNA

SEQ ID NO: 197156 - DNA, 80 bp, synthetic construct; identical to SEQ ID NO: 12426
  source 1..80: mol_type = other DNA

SEQ ID NO: 197157 - DNA, 80 bp, synthetic construct; identical to SEQ ID NO: 12427
  source 1..80: mol_type = other DNA

SEQ ID NO: 197158 - DNA, 80 bp, synthetic construct; identical to SEQ ID NO: 12428
  source 1..80: mol_type = other DNA

SEQ ID NO: 197159 - DNA, 80 bp, synthetic construct; identical to SEQ ID NO: 12429
  source 1..80: mol_type = other DNA

SEQ ID NO: 197160 - DNA, 80 bp, synthetic construct; identical to SEQ ID NO: 12430
  source 1..80: mol_type = other DNA

SEQ ID NO: 197161 - DNA, 80 bp, synthetic construct; identical to SEQ ID NO: 12431
  source 1..80: mol_type = other DNA

SEQ ID NO: 197162 - DNA, 80 bp, synthetic construct; identical to SEQ ID NO: 12432
  source 1..80: mol_type = other DNA

SEQ ID NO: 197163 - DNA, 80 bp, synthetic construct; identical to SEQ ID NO: 12433
  source 1..80: mol_type = other DNA

SEQ ID NO: 197164 - DNA, 80 bp, synthetic construct; identical to SEQ ID NO: 12434
  source 1..80: mol_type = other DNA

SEQ ID NO: 197165 - DNA, 80 bp, synthetic construct; identical to SEQ ID NO: 12435
  source 1..80: mol_type = other DNA

SEQ ID NO: 197166 - DNA, 80 bp, synthetic construct; identical to SEQ ID NO: 12436
  source 1..80: mol_type = other DNA

SEQ ID NO: 197167 - DNA, 80 bp, synthetic construct; identical to SEQ ID NO: 12437
  source 1..80: mol_type = other DNA

SEQ ID NO: 197168 - DNA, 80 bp, synthetic construct; identical to SEQ ID NO: 12438
  source 1..80: mol_type = other DNA

SEQ ID NO: 197169 - DNA, 80 bp, synthetic construct; identical to SEQ ID NO: 12439
  source 1..80: mol_type = other DNA

SEQ ID NO: 197170 - DNA, 80 bp, synthetic construct; identical to SEQ ID NO: 12440
  source 1..80: mol_type = other DNA

SEQ ID NO: 197171 - DNA, 80 bp, synthetic construct; identical to SEQ ID NO: 12441
  source 1..80: mol_type = other DNA

SEQ ID NO: 197172 - DNA, 80 bp, synthetic construct; identical to SEQ ID NO: 12442
  source 1..80: mol_type = other DNA

SEQ ID NO: 197173 - DNA, 80 bp, synthetic construct; identical to SEQ ID NO: 12443
  source 1..80: mol_type = other DNA

SEQ ID NO: 197174 - DNA, 80 bp, synthetic construct; identical to SEQ ID NO: 12444
  source 1..80: mol_type = other DNA

SEQ ID NO: 197175 - DNA, 80 bp, synthetic construct; identical to SEQ ID NO: 12445
  source 1..80: mol_type = other DNA

SEQ ID NO: 197176 - DNA, 80 bp, synthetic construct; identical to SEQ ID NO: 12446
  source 1..80: mol_type = other DNA

SEQ ID NO: 197177 - DNA, 80 bp, synthetic construct; identical to SEQ ID NO: 12447
  source 1..80: mol_type = other DNA

SEQ ID NO: 197178 - DNA, 80 bp, synthetic construct; identical to SEQ ID NO: 12448
  source 1..80: mol_type = other DNA

SEQ ID NO: 197179 - DNA, 80 bp, synthetic construct; identical to SEQ ID NO: 12449
  source 1..80: mol_type = other DNA

SEQ ID NO: 197180 - DNA, 80 bp, synthetic construct; identical to SEQ ID NO: 12450
  source 1..80: mol_type = other DNA

SEQ ID NO: 197181 - DNA, 80 bp, synthetic construct; identical to SEQ ID NO: 12451
  source 1..80: mol_type = other DNA

SEQ ID NO: 197182 - DNA, 80 bp, synthetic construct; identical to SEQ ID NO: 12452
  source 1..80: mol_type = other DNA

SEQ ID NO: 197183 - DNA, 80 bp, synthetic construct; identical to SEQ ID NO: 12453
  source 1..80: mol_type = other DNA

SEQ ID NO: 197184 - DNA, 80 bp, synthetic construct; identical to SEQ ID NO: 12454
  source 1..80: mol_type = other DNA

SEQ ID NO: 197185 - DNA, 80 bp, synthetic construct; identical to SEQ ID NO: 12455
  source 1..80: mol_type = other DNA

SEQ ID NO: 197186 - DNA, 80 bp, synthetic construct; identical to SEQ ID NO: 12456
  source 1..80: mol_type = other DNA

SEQ ID NO: 197187 - DNA, 80 bp, synthetic construct; identical to SEQ ID NO: 12457
  source 1..80: mol_type = other DNA

SEQ ID NO: 197188 - DNA, 80 bp, synthetic construct; identical to SEQ ID NO: 12458
  source 1..80: mol_type = other DNA

SEQ ID NO: 197189 - DNA, 80 bp, synthetic construct; identical to SEQ ID NO: 12459
  source 1..80: mol_type = other DNA

SEQ ID NO: 197190 - DNA, 80 bp, synthetic construct; identical to SEQ ID NO: 12460
  source 1..80: mol_type = other DNA

SEQ ID NO: 197191 - DNA, 80 bp, synthetic construct; identical to SEQ ID NO: 12461
  source 1..80: mol_type = other DNA

SEQ ID NO: 197192 - DNA, 80 bp, synthetic construct; identical to SEQ ID NO: 12462
  source 1..80: mol_type = other DNA

SEQ ID NO: 197193 - DNA, 80 bp, synthetic construct; identical to SEQ ID NO: 12463
  source 1..80: mol_type = other DNA

SEQ ID NO: 197194 - DNA, 80 bp, synthetic construct; identical to SEQ ID NO: 12464
  source 1..80: mol_type = other DNA

SEQ ID NO: 197195 - DNA, 80 bp, synthetic construct; identical to SEQ ID NO: 12465
  source 1..80: mol_type = other DNA

SEQ ID NO: 197196 - DNA, 80 bp, synthetic construct; identical to SEQ ID NO: 12466
  source 1..80: mol_type = other DNA

SEQ ID NO: 197197 - DNA, 80 bp, synthetic construct; identical to SEQ ID NO: 12467
  source 1..80: mol_type = other DNA

SEQ ID NO: 197198 - DNA, 80 bp, synthetic construct; identical to SEQ ID NO: 12468
  source 1..80: mol_type = other DNA

SEQ ID NO: 197199 - DNA, 80 bp, synthetic construct; identical to SEQ ID NO: 12469
  source 1..80: mol_type = other DNA

SEQ ID NO: 197200 - DNA, 80 bp, synthetic construct; identical to SEQ ID NO: 12470
  source 1..80: mol_type = other DNA

SEQ ID NO: 197201 - DNA, 80 bp, synthetic construct; identical to SEQ ID NO: 12471
  source 1..80: mol_type = other DNA

SEQ ID NO: 197202 - DNA, 80 bp, synthetic construct; identical to SEQ ID NO: 12472
  source 1..80: mol_type = other DNA

SEQ ID NO: 197203 - DNA, 80 bp, synthetic construct; identical to SEQ ID NO: 12473
  source 1..80: mol_type = other DNA

SEQ ID NO: 197204 - DNA, 80 bp, synthetic construct; identical to SEQ ID NO: 12474
  source 1..80: mol_type = other DNA

SEQ ID NO: 197205 - DNA, 80 bp, synthetic construct; identical to SEQ ID NO: 12475
  source 1..80: mol_type = other DNA

SEQ ID NO: 197206 - DNA, 80 bp, synthetic construct; identical to SEQ ID NO: 12476
  source 1..80: mol_type = other DNA

SEQ ID NO: 197207 - DNA, 80 bp, synthetic construct; identical to SEQ ID NO: 12477
  source 1..80: mol_type = other DNA

SEQ ID NO: 197208 - DNA, 80 bp, synthetic construct; identical to SEQ ID NO: 12478
  source 1..80: mol_type = other DNA

SEQ ID NO: 197209 - DNA, 80 bp, synthetic construct; identical to SEQ ID NO: 12479
  source 1..80: mol_type = other DNA

SEQ ID NO: 197210 - DNA, 80 bp, synthetic construct; identical to SEQ ID NO: 12480
  source 1..80: mol_type = other DNA

SEQ ID NO: 197211 - DNA, 80 bp, synthetic construct; identical to SEQ ID NO: 12481
  source 1..80: mol_type = other DNA

SEQ ID NO: 197212 - DNA, 80 bp, synthetic construct; identical to SEQ ID NO: 12482
  source 1..80: mol_type = other DNA

SEQ ID NO: 197213 - DNA, 80 bp, synthetic construct; identical to SEQ ID NO: 12483
  source 1..80: mol_type = other DNA

SEQ ID NO: 197214 - DNA, 80 bp, synthetic construct; identical to SEQ ID NO: 12484
  source 1..80: mol_type = other DNA

SEQ ID NO: 197215 - DNA, 80 bp, synthetic construct; identical to SEQ ID NO: 12485
  source 1..80: mol_type = other DNA

SEQ ID NO: 197216 - DNA, 80 bp, synthetic construct; identical to SEQ ID NO: 12486
  source 1..80: mol_type = other DNA

SEQ ID NO: 197217 - DNA, 80 bp, synthetic construct; identical to SEQ ID NO: 12487
  source 1..80: mol_type = other DNA

SEQ ID NO: 197218 - DNA, 80 bp, synthetic construct; identical to SEQ ID NO: 12488
  source 1..80: mol_type = other DNA

SEQ ID NO: 197219 - DNA, 80 bp, synthetic construct; identical to SEQ ID NO: 12489
  source 1..80: mol_type = other DNA

SEQ ID NO: 197220 - DNA, 80 bp, synthetic construct; identical to SEQ ID NO: 12490
  source 1..80: mol_type = other DNA

SEQ ID NO: 197221 - DNA, 80 bp, synthetic construct; identical to SEQ ID NO: 12491
  source 1..80: mol_type = other DNA

SEQ ID NO: 197222 - DNA, 80 bp, synthetic construct; identical to SEQ ID NO: 12492
  source 1..80: mol_type = other DNA

SEQ ID NO: 197223 - DNA, 80 bp, synthetic construct; identical to SEQ ID NO: 12493
  source 1..80: mol_type = other DNA

SEQ ID NO: 197224 - DNA, 80 bp, synthetic construct; identical to SEQ ID NO: 12494
  source 1..80: mol_type = other DNA

SEQ ID NO: 197225 - DNA, 80 bp, synthetic construct; identical to SEQ ID NO: 12495
  source 1..80: mol_type = other DNA

SEQ ID NO: 197226 - DNA, 80 bp, synthetic construct; identical to SEQ ID NO: 12496
  source 1..80: mol_type = other DNA

SEQ ID NO: 197227 - DNA, 80 bp, synthetic construct; identical to SEQ ID NO: 12497
  source 1..80: mol_type = other DNA

SEQ ID NO: 197228 - DNA, 80 bp, synthetic construct; identical to SEQ ID NO: 12498
  source 1..80: mol_type = other DNA

SEQ ID NO: 197229 - DNA, 80 bp, synthetic construct; identical to SEQ ID NO: 12499
  source 1..80: mol_type = other DNA

SEQ ID NO: 197230 - DNA, 80 bp, synthetic construct; identical to SEQ ID NO: 12500
  source 1..80: mol_type = other DNA

SEQ ID NO: 197231 - DNA, 80 bp, synthetic construct; identical to SEQ ID NO: 12501
  source 1..80: mol_type = other DNA

SEQ ID NO: 197232 - DNA, 80 bp, synthetic construct; identical to SEQ ID NO: 12502
  source 1..80: mol_type = other DNA

SEQ ID NO: 197233 - DNA, 80 bp, synthetic construct; identical to SEQ ID NO: 12503
  source 1..80: mol_type = other DNA

SEQ ID NO: 197234 - DNA, 80 bp, synthetic construct; identical to SEQ ID NO: 12504
  source 1..80: mol_type = other DNA

SEQ ID NO: 197235 - DNA, 80 bp, synthetic construct; identical to SEQ ID NO: 12505
  source 1..80: mol_type = other DNA

SEQ ID NO: 197236 - DNA, 80 bp, synthetic construct; identical to SEQ ID NO: 12506
  source 1..80: mol_type = other DNA

SEQ ID NO: 197237 - DNA, 80 bp, synthetic construct; identical to SEQ ID NO: 12507
  source 1..80: mol_type = other DNA

SEQ ID NO: 197238 - DNA, 80 bp, synthetic construct; identical to SEQ ID NO: 12508
  source 1..80: mol_type = other DNA

SEQ ID NO: 197239 - DNA, 80 bp, synthetic construct; identical to SEQ ID NO: 12509
  source 1..80: mol_type = other DNA

SEQ ID NO: 197240 - DNA, 80 bp, synthetic construct; identical to SEQ ID NO: 12510
  source 1..80: mol_type = other DNA

SEQ ID NO: 197241 - DNA, 80 bp, synthetic construct; identical to SEQ ID NO: 12511
  source 1..80: mol_type = other DNA

SEQ ID NO: 197242 - DNA, 80 bp, synthetic construct; identical to SEQ ID NO: 12512
  source 1..80: mol_type = other DNA

SEQ ID NO: 197243 - DNA, 80 bp, synthetic construct; identical to SEQ ID NO: 12513
  source 1..80: mol_type = other DNA

SEQ ID NO: 197244 - DNA, 80 bp, synthetic construct; identical to SEQ ID NO: 12514
  source 1..80: mol_type = other DNA

SEQ ID NO: 197245 - DNA, 80 bp, synthetic construct; identical to SEQ ID NO: 12515
  source 1..80: mol_type = other DNA

SEQ ID NO: 197246 - DNA, 80 bp, synthetic construct; identical to SEQ ID NO: 12516
  source 1..80: mol_type = other DNA

SEQ ID NO: 197247 - DNA, 80 bp, synthetic construct; identical to SEQ ID NO: 12517
  source 1..80: mol_type = other DNA

SEQ ID NO: 197248 - DNA, 80 bp, synthetic construct; identical to SEQ ID NO: 12518
  source 1..80: mol_type = other DNA

SEQ ID NO: 197249 - DNA, 80 bp, synthetic construct; identical to SEQ ID NO: 12519
  source 1..80: mol_type = other DNA

SEQ ID NO: 197250 - DNA, 80 bp, synthetic construct; identical to SEQ ID NO: 12520
  source 1..80: mol_type = other DNA

SEQ ID NO: 197251 - DNA, 80 bp, synthetic construct; identical to SEQ ID NO: 12521
  source 1..80: mol_type = other DNA

SEQ ID NO: 197252 - DNA, 80 bp, synthetic construct; identical to SEQ ID NO: 12522
  source 1..80: mol_type = other DNA

SEQ ID NO: 197253 - DNA, 80 bp, synthetic construct; identical to SEQ ID NO: 12523
  source 1..80: mol_type = other DNA

SEQ ID NO: 197254 - DNA, 80 bp, synthetic construct; identical to SEQ ID NO: 12524
  source 1..80: mol_type = other DNA

SEQ ID NO: 197255 - DNA, 80 bp, synthetic construct; identical to SEQ ID NO: 12525
  source 1..80: mol_type = other DNA

SEQ ID NO: 197256 - DNA, 80 bp, synthetic construct; identical to SEQ ID NO: 12526
  source 1..80: mol_type = other DNA

SEQ ID NO: 197257 - DNA, 80 bp, synthetic construct; identical to SEQ ID NO: 12527
  source 1..80: mol_type = other DNA

SEQ ID NO: 197258 - DNA, 80 bp, synthetic construct; identical to SEQ ID NO: 12528
  source 1..80: mol_type = other DNA

SEQ ID NO: 197259 - DNA, 80 bp, synthetic construct; identical to SEQ ID NO: 12529
  source 1..80: mol_type = other DNA

SEQ ID NO: 197260 - DNA, 80 bp, synthetic construct; identical to SEQ ID NO: 12530
  source 1..80: mol_type = other DNA

SEQ ID NO: 197261 - DNA, 80 bp, synthetic construct; identical to SEQ ID NO: 12531
  source 1..80: mol_type = other DNA

SEQ ID NO: 197262 - DNA, 80 bp, synthetic construct; identical to SEQ ID NO: 12532
  source 1..80: mol_type = other DNA

SEQ ID NO: 197263 - DNA, 80 bp, synthetic construct; identical to SEQ ID NO: 12533
  source 1..80: mol_type = other DNA

SEQ ID NO: 197264 - DNA, 80 bp, synthetic construct; identical to SEQ ID NO: 12534
  source 1..80: mol_type = other DNA

SEQ ID NO: 197265 - DNA, 80 bp, synthetic construct; identical to SEQ ID NO: 12535
  source 1..80: mol_type = other DNA

SEQ ID NO: 197266 - DNA, 80 bp, synthetic construct; identical to SEQ ID NO: 12536
  source 1..80: mol_type = other DNA

SEQ ID NO: 197267 - DNA, 80 bp, synthetic construct; identical to SEQ ID NO: 12537
  source 1..80: mol_type = other DNA

SEQ ID NO: 197268 - DNA, 80 bp, synthetic construct; identical to SEQ ID NO: 12538
  source 1..80: mol_type = other DNA

SEQ ID NO: 197269 - DNA, 80 bp, synthetic construct; identical to SEQ ID NO: 12539
  source 1..80: mol_type = other DNA

SEQ ID NO: 197270 - DNA, 80 bp, synthetic construct; identical to SEQ ID NO: 12540
  source 1..80: mol_type = other DNA

SEQ ID NO: 197271 - DNA, 80 bp, synthetic construct; identical to SEQ ID NO: 12541
  source 1..80: mol_type = other DNA

SEQ ID NO: 197272 - DNA, 80 bp, synthetic construct; identical to SEQ ID NO: 12542
  source 1..80: mol_type = other DNA

SEQ ID NO: 197273 - DNA, 80 bp, synthetic construct; identical to SEQ ID NO: 12543
  source 1..80: mol_type = other DNA

SEQ ID NO: 197274 - DNA, 80 bp, synthetic construct; identical to SEQ ID NO: 12544
  source 1..80: mol_type = other DNA

SEQ ID NO: 197275 - DNA, 80 bp, synthetic construct; identical to SEQ ID NO: 12545
  source 1..80: mol_type = other DNA

SEQ ID NO: 197276 - DNA, 80 bp, synthetic construct; identical to SEQ ID NO: 12546
  source 1..80: mol_type = other DNA

SEQ ID NO: 197277 - DNA, 80 bp, synthetic construct; identical to SEQ ID NO: 12547
  source 1..80: mol_type = other DNA

SEQ ID NO: 197278 - DNA, 80 bp, synthetic construct; identical to SEQ ID NO: 12548
  source 1..80: mol_type = other DNA

SEQ ID NO: 197279 - DNA, 80 bp, synthetic construct; identical to SEQ ID NO: 12549
  source 1..80: mol_type = other DNA

SEQ ID NO: 197280 - DNA, 80 bp, synthetic construct; identical to SEQ ID NO: 12550
  source 1..80: mol_type = other DNA

SEQ ID NO: 197281 - DNA, 80 bp, synthetic construct; identical to SEQ ID NO: 12551
  source 1..80: mol_type = other DNA

SEQ ID NO: 197282 - DNA, 80 bp, synthetic construct; identical to SEQ ID NO: 12552
  source 1..80: mol_type = other DNA

SEQ ID NO: 197283 - DNA, 80 bp, synthetic construct; identical to SEQ ID NO: 12553
  source 1..80: mol_type = other DNA

SEQ ID NO: 197284 - DNA, 80 bp, synthetic construct; identical to SEQ ID NO: 12554
  source 1..80: mol_type = other DNA

SEQ ID NO: 197285 - DNA, 80 bp, synthetic construct; identical to SEQ ID NO: 12555
  source 1..80: mol_type = other DNA

SEQ ID NO: 197286 - DNA, 80 bp, synthetic construct; identical to SEQ ID NO: 12556
  source 1..80: mol_type = other DNA

SEQ ID NO: 197287 - DNA, 80 bp, synthetic construct; identical to SEQ ID NO: 12557
  source 1..80: mol_type = other DNA

SEQ ID NO: 197288 - DNA, 80 bp, synthetic construct; identical to SEQ ID NO: 12558
  source 1..80: mol_type = other DNA

SEQ ID NO: 197289 - DNA, 80 bp, synthetic construct; identical to SEQ ID NO: 12559
  source 1..80: mol_type = other DNA

SEQ ID NO: 197290 - DNA, 80 bp, synthetic construct; identical to SEQ ID NO: 12560
  source 1..80: mol_type = other DNA

SEQ ID NO: 197291 - DNA, 80 bp, synthetic construct; identical to SEQ ID NO: 12561
  source 1..80: mol_type = other DNA

SEQ ID NO: 197292 - DNA, 80 bp, synthetic construct; identical to SEQ ID NO: 12562
  source 1..80: mol_type = other DNA

SEQ ID NO: 197293 - DNA, 80 bp, synthetic construct; identical to SEQ ID NO: 12563
  source 1..80: mol_type = other DNA

SEQ ID NO: 197294 - DNA, 80 bp, synthetic construct; identical to SEQ ID NO: 12564
  source 1..80: mol_type = other DNA

SEQ ID NO: 197295 - DNA, 80 bp, synthetic construct; identical to SEQ ID NO: 12565
  source 1..80: mol_type = other DNA

SEQ ID NO: 197296 - DNA, 80 bp, synthetic construct; identical to SEQ ID NO: 12566
  source 1..80: mol_type = other DNA

SEQ ID NO: 197297 - DNA, 80 bp, synthetic construct; identical to SEQ ID NO: 12567
  source 1..80: mol_type = other DNA

SEQ ID NO: 197298 - DNA, 80 bp, synthetic construct; identical to SEQ ID NO: 12568
  source 1..80: mol_type = other DNA

SEQ ID NO: 197299 - DNA, 80 bp, synthetic construct; identical to SEQ ID NO: 12569
  source 1..80: mol_type = other DNA

SEQ ID NO: 197300 - DNA, 80 bp, synthetic construct; identical to SEQ ID NO: 12570
  source 1..80: mol_type = other DNA

SEQ ID NO: 197301 - DNA, 80 bp, synthetic construct; identical to SEQ ID NO: 12571
  source 1..80: mol_type = other DNA

SEQ ID NO: 197302 - DNA, 80 bp, synthetic construct; identical to SEQ ID NO: 12572
  source 1..80: mol_type = other DNA

SEQ ID NO: 197303 - DNA, 80 bp, synthetic construct; identical to SEQ ID NO: 12573
  source 1..80: mol_type = other DNA

SEQ ID NO: 197304 - DNA, 80 bp, synthetic construct; identical to SEQ ID NO: 12574
  source 1..80: mol_type = other DNA

SEQ ID NO: 197305 - DNA, 80 bp, synthetic construct; identical to SEQ ID NO: 12575
  source 1..80: mol_type = other DNA

SEQ ID NO: 197306 - DNA, 80 bp, synthetic construct; identical to SEQ ID NO: 12576
  source 1..80: mol_type = other DNA

SEQ ID NO: 197307 - DNA, 80 bp, synthetic construct; identical to SEQ ID NO: 12577
  source 1..80: mol_type = other DNA

SEQ ID NO: 197308 - DNA, 80 bp, synthetic construct; identical to SEQ ID NO: 12578
  source 1..80: mol_type = other DNA

SEQ ID NO: 197309 - DNA, 80 bp, synthetic construct; identical to SEQ ID NO: 12579
  source 1..80: mol_type = other DNA

SEQ ID NO: 197310 - DNA, 80 bp, synthetic construct; identical to SEQ ID NO: 12580
  source 1..80: mol_type = other DNA

SEQ ID NO: 197311 - DNA, 80 bp, synthetic construct; identical to SEQ ID NO: 12581
  source 1..80: mol_type = other DNA

SEQ ID NO: 197312 - DNA, 80 bp, synthetic construct; identical to SEQ ID NO: 12582
  source 1..80: mol_type = other DNA

SEQ ID NO: 197313 - DNA, 80 bp, synthetic construct; identical to SEQ ID NO: 12583
  source 1..80: mol_type = other DNA

SEQ ID NO: 197314 - DNA, 80 bp, synthetic construct; identical to SEQ ID NO: 12584
  source 1..80: mol_type = other DNA

SEQ ID NO: 197315 - DNA, 80 bp, synthetic construct; identical to SEQ ID NO: 12585
  source 1..80: mol_type = other DNA

SEQ ID NO: 197316 - DNA, 80 bp, synthetic construct; identical to SEQ ID NO: 12586
  source 1..80: mol_type = other DNA

SEQ ID NO: 197317 - DNA, 80 bp, synthetic construct; identical to SEQ ID NO: 12587
  source 1..80: mol_type = other DNA

SEQ ID NO: 197318 - DNA, 80 bp, synthetic construct; identical to SEQ ID NO: 12588
  source 1..80: mol_type = other DNA

SEQ ID NO: 197319 - DNA, 80 bp, synthetic construct; identical to SEQ ID NO: 12589
  source 1..80: mol_type = other DNA

SEQ ID NO: 197320 - DNA, 80 bp, synthetic construct; identical to SEQ ID NO: 12590
  source 1..80: mol_type = other DNA

SEQ ID NO: 197321 - DNA, 80 bp, synthetic construct; identical to SEQ ID NO: 12591
  source 1..80: mol_type = other DNA

SEQ ID NO: 197322 - DNA, 80 bp, synthetic construct; identical to SEQ ID NO: 12592
  source 1..80: mol_type = other DNA

SEQ ID NO: 197323 - DNA, 80 bp, synthetic construct; identical to SEQ ID NO: 12593
  source 1..80: mol_type = other DNA

SEQ ID NO: 197324 - DNA, 80 bp, synthetic construct; identical to SEQ ID NO: 12594
  source 1..80: mol_type = other DNA

SEQ ID NO: 197325 - DNA, 80 bp, synthetic construct; identical to SEQ ID NO: 12595
  source 1..80: mol_type = other DNA

SEQ ID NO: 197326 - DNA, 80 bp, synthetic construct; identical to SEQ ID NO: 12596
  source 1..80: mol_type = other DNA

SEQ ID NO: 197327 - DNA, 80 bp, synthetic construct; identical to SEQ ID NO: 12597
  source 1..80: mol_type = other DNA

SEQ ID NO: 197328 - DNA, 80 bp, synthetic construct; identical to SEQ ID NO: 12598
  source 1..80: mol_type = other DNA

SEQ ID NO: 197329 - DNA, 80 bp, synthetic construct; identical to SEQ ID NO: 12599
  source 1..80: mol_type = other DNA

SEQ ID NO: 197330 - DNA, 80 bp, synthetic construct; identical to SEQ ID NO: 12600
  source 1..80: mol_type = other DNA

SEQ ID NO: 197331 - DNA, 80 bp, synthetic construct; identical to SEQ ID NO: 12601
  source 1..80: mol_type = other DNA

SEQ ID NO: 197332 - DNA, 80 bp, synthetic construct; identical to SEQ ID NO: 12602
  source 1..80: mol_type = other DNA

SEQ ID NO: 197333 - DNA, 80 bp, synthetic construct; identical to SEQ ID NO: 12603
  source 1..80: mol_type = other DNA

SEQ ID NO: 197334 - DNA, 80 bp, synthetic construct; identical to SEQ ID NO: 12604
  source 1..80: mol_type = other DNA

SEQ ID NO: 197335 - DNA, 80 bp, synthetic construct; identical to SEQ ID NO: 12605
  source 1..80: mol_type = other DNA

SEQ ID NO: 197336 - DNA, 80 bp, synthetic construct; identical to SEQ ID NO: 12606
  source 1..80: mol_type = other DNA

SEQ ID NO: 197337 - DNA, 80 bp, synthetic construct; identical to SEQ ID NO: 12607
  source 1..80: mol_type = other DNA

SEQ ID NO: 197338 - DNA, 80 bp, synthetic construct; identical to SEQ ID NO: 12608
  source 1..80: mol_type = other DNA

SEQ ID NO: 197339 - DNA, 80 bp, synthetic construct; identical to SEQ ID NO: 12609
  source 1..80: mol_type = other DNA

SEQ ID NO: 197340 - DNA, 80 bp, synthetic construct; identical to SEQ ID NO: 12610
  source 1..80: mol_type = other DNA

SEQ ID NO: 197341 - DNA, 80 bp, synthetic construct; identical to SEQ ID NO: 12611
  source 1..80: mol_type = other DNA

SEQ ID NO: 197342 - DNA, 80 bp, synthetic construct; identical to SEQ ID NO: 12612
  source 1..80: mol_type = other DNA

SEQ ID NO: 197343 - DNA, 80 bp, synthetic construct; identical to SEQ ID NO: 12613
  source 1..80: mol_type = other DNA

SEQ ID NO: 197344 - DNA, 80 bp, synthetic construct; identical to SEQ ID NO: 12614
  source 1..80: mol_type = other DNA

SEQ ID NO: 197345 - DNA, 80 bp, synthetic construct; identical to SEQ ID NO: 12615
  source 1..80: mol_type = other DNA

SEQ ID NO: 197346 - DNA, 80 bp, synthetic construct; identical to SEQ ID NO: 12616
  source 1..80: mol_type = other DNA

SEQ ID NO: 197347 - DNA, 80 bp, synthetic construct; identical to SEQ ID NO: 12617
  source 1..80: mol_type = other DNA

SEQ ID NO: 197348 - DNA, 80 bp, synthetic construct; identical to SEQ ID NO: 12618
  source 1..80: mol_type = other DNA

SEQ ID NO: 197349 - DNA, 80 bp, synthetic construct; identical to SEQ ID NO: 12619
  source 1..80: mol_type = other DNA

SEQ ID NO: 197350 - DNA, 80 bp, synthetic construct; identical to SEQ ID NO: 12620
  source 1..80: mol_type = other DNA

SEQ ID NO: 197351 - DNA, 80 bp, synthetic construct; identical to SEQ ID NO: 12621
  source 1..80: mol_type = other DNA

SEQ ID NO: 197352 - DNA, 80 bp, synthetic construct; identical to SEQ ID NO: 12622
  source 1..80: mol_type = other DNA

SEQ ID NO: 197353 - DNA, 80 bp, synthetic construct; identical to SEQ ID NO: 12623
  source 1..80: mol_type = other DNA

SEQ ID NO: 197354 - DNA, 80 bp, synthetic construct; identical to SEQ ID NO: 12624
  source 1..80: mol_type = other DNA

SEQ ID NO: 197355 - DNA, 80 bp, synthetic construct; identical to SEQ ID NO: 12625
  source 1..80: mol_type = other DNA

SEQ ID NO: 197356 - DNA, 80 bp, synthetic construct; identical to SEQ ID NO: 12626
  source 1..80: mol_type = other DNA

SEQ ID NO: 197357 - DNA, 80 bp, synthetic construct; identical to SEQ ID NO: 12627
  source 1..80: mol_type = other DNA

SEQ ID NO: 197358 - DNA, 80 bp, synthetic construct; identical to SEQ ID NO: 12628
  source 1..80: mol_type = other DNA

SEQ ID NO: 197359 - DNA, 80 bp, synthetic construct; identical to SEQ ID NO: 12629
  source 1..80: mol_type = other DNA

SEQ ID NO: 197360 - DNA, 80 bp, synthetic construct; identical to SEQ ID NO: 12630
  source 1..80: mol_type = other DNA

SEQ ID NO: 197361 - DNA, 80 bp, synthetic construct; identical to SEQ ID NO: 12631
  source 1..80: mol_type = other DNA

SEQ ID NO: 197362 - DNA, 80 bp, synthetic construct; identical to SEQ ID NO: 12632
  source 1..80: mol_type = other DNA

SEQ ID NO: 197363 - DNA, 80 bp, synthetic construct; identical to SEQ ID NO: 12633
  source 1..80: mol_type = other DNA

SEQ ID NO: 197364 - DNA, 80 bp, synthetic construct; identical to SEQ ID NO: 12634
  source 1..80: mol_type = other DNA

SEQ ID NO: 197365 - DNA, 80 bp, synthetic construct; identical to SEQ ID NO: 12635
  source 1..80: mol_type = other DNA

SEQ ID NO: 197366 - DNA, 80 bp, synthetic construct; identical to SEQ ID NO: 12636
  source 1..80: mol_type = other DNA

SEQ ID NO: 197367 - DNA, 80 bp, synthetic construct; identical to SEQ ID NO: 12637
  source 1..80: mol_type = other DNA

SEQ ID NO: 197368 - DNA, 80 bp, synthetic construct; identical to SEQ ID NO: 12638
  source 1..80: mol_type = other DNA

SEQ ID NO: 197369 - DNA, 80 bp, synthetic construct; identical to SEQ ID NO: 12639
  source 1..80: mol_type = other DNA

SEQ ID NO: 197370 - DNA, 80 bp, synthetic construct; identical to SEQ ID NO: 12640
  source 1..80: mol_type = other DNA

SEQ ID NO: 197371 - DNA, 80 bp, synthetic construct; identical to SEQ ID NO: 12641
  source 1..80: mol_type = other DNA

SEQ ID NO: 197372 - DNA, 80 bp, synthetic construct; identical to SEQ ID NO: 12642
  source 1..80: mol_type = other DNA

SEQ ID NO: 197373 - DNA, 80 bp, synthetic construct; identical to SEQ ID NO: 12643
  source 1..80: mol_type = other DNA

SEQ ID NO: 197374 - DNA, 80 bp, synthetic construct; identical to SEQ ID NO: 12644
  source 1..80: mol_type = other DNA

SEQ ID NO: 197375 - DNA, 80 bp, synthetic construct; identical to SEQ ID NO: 12645
  source 1..80: mol_type = other DNA

SEQ ID NO: 197376 - DNA, 80 bp, synthetic construct; identical to SEQ ID NO: 12646
  source 1..80: mol_type = other DNA

SEQ ID NO: 197377 - DNA, 80 bp, synthetic construct; identical to SEQ ID NO: 12647
  source 1..80: mol_type = other DNA

SEQ ID NO: 197378 - DNA, 80 bp, synthetic construct; identical to SEQ ID NO: 12648
  source 1..80: mol_type = other DNA

SEQ ID NO: 197379 - DNA, 80 bp, synthetic construct; identical to SEQ ID NO: 12649
  source 1..80: mol_type = other DNA

SEQ ID NO: 197380 - DNA, 80 bp, synthetic construct; identical to SEQ ID NO: 12650
  source 1..80: mol_type = other DNA

SEQ ID NO: 197381 - DNA, 80 bp, synthetic construct; identical to SEQ ID NO: 12651
  source 1..80: mol_type = other DNA

SEQ ID NO: 197382 - DNA, 80 bp, synthetic construct; identical to SEQ ID NO: 12652
  source 1..80: mol_type = other DNA

SEQ ID NO: 197383 - DNA, 80 bp, synthetic construct; identical to SEQ ID NO: 12653
  source 1..80: mol_type = other DNA

SEQ ID NO: 197384 - DNA, 80 bp, synthetic construct; identical to SEQ ID NO: 12654
  source 1..80: mol_type = other DNA

SEQ ID NO: 197385 - DNA, 80 bp, synthetic construct; identical to SEQ ID NO: 12655
  source 1..80: mol_type = other DNA

SEQ ID NO: 197386 - DNA, 80 bp, synthetic construct; identical to SEQ ID NO: 12656
  source 1..80: mol_type = other DNA

SEQ ID NO: 197387 - DNA, 80 bp, synthetic construct; identical to SEQ ID NO: 12657
  source 1..80: mol_type = other DNA

SEQ ID NO: 197388 - DNA, 80 bp, synthetic construct; identical to SEQ ID NO: 12658
  source 1..80: mol_type = other DNA

SEQ ID NO: 197389 - DNA, 80 bp, synthetic construct; identical to SEQ ID NO: 12659
  source 1..80: mol_type = other DNA

SEQ ID NO: 197390 - DNA, 80 bp, synthetic construct; identical to SEQ ID NO: 12660
  source 1..80: mol_type = other DNA

SEQ ID NO: 197391 - DNA, 80 bp, synthetic construct; identical to SEQ ID NO: 12661
  source 1..80: mol_type = other DNA

SEQ ID NO: 197392 - DNA, 80 bp, synthetic construct; identical to SEQ ID NO: 12662
  source 1..80: mol_type = other DNA

SEQ ID NO: 197393 - DNA, 80 bp, synthetic construct; identical to SEQ ID NO: 12663
  source 1..80: mol_type = other DNA

SEQ ID NO: 197394 - DNA, 80 bp, synthetic construct; identical to SEQ ID NO: 12664
  source 1..80: mol_type = other DNA

SEQ ID NO: 197395 - DNA, 80 bp, synthetic construct; identical to SEQ ID NO: 12665
  source 1..80: mol_type = other DNA

SEQ ID NO: 197396 - DNA, 80 bp, synthetic construct; identical to SEQ ID NO: 12666
  source 1..80: mol_type = other DNA

SEQ ID NO: 197397 - DNA, 80 bp, synthetic construct; identical to SEQ ID NO: 12667
  source 1..80: mol_type = other DNA

SEQ ID NO: 197398 - DNA, 80 bp, synthetic construct; identical to SEQ ID NO: 12668
  source 1..80: mol_type = other DNA

SEQ ID NO: 197399 - DNA, 80 bp, synthetic construct; identical to SEQ ID NO: 12669
  source 1..80: mol_type = other DNA

SEQ ID NO: 197400 - DNA, 80 bp, synthetic construct; identical to SEQ ID NO: 12670
  source 1..80: mol_type = other DNA

SEQ ID NO: 197401 - DNA, 80 bp, synthetic construct; identical to SEQ ID NO: 12671
  source 1..80: mol_type = other DNA

SEQ ID NO: 197402 - DNA, 80 bp, synthetic construct; identical to SEQ ID NO: 12672
  source 1..80: mol_type = other DNA

SEQ ID NO: 197403 - DNA, 80 bp, synthetic construct; identical to SEQ ID NO: 12673
  source 1..80: mol_type = other DNA

SEQ ID NO: 197404 - DNA, 80 bp, synthetic construct; identical to SEQ ID NO: 12674
  source 1..80: mol_type = other DNA

SEQ ID NO: 197405 - DNA, 80 bp, synthetic construct; identical to SEQ ID NO: 12675
  source 1..80: mol_type = other DNA

SEQ ID NO: 197406 - DNA, 80 bp, synthetic construct; identical to SEQ ID NO: 12676
  source 1..80: mol_type = other DNA

SEQ ID NO: 197407 - DNA, 80 bp, synthetic construct; identical to SEQ ID NO: 12677
  source 1..80: mol_type = other DNA

SEQ ID NO: 197408 - DNA, 80 bp, synthetic construct; identical to SEQ ID NO: 12678
  source 1..80: mol_type = other DNA

SEQ ID NO: 197409 - DNA, 80 bp, synthetic construct; identical to SEQ ID NO: 12679
  source 1..80: mol_type = other DNA

SEQ ID NO: 197410 - DNA, 80 bp, synthetic construct; identical to SEQ ID NO: 12680
  source 1..80: mol_type = other DNA

SEQ ID NO: 197411 - DNA, 80 bp, synthetic construct; identical to SEQ ID NO: 12681
  source 1..80: mol_type = other DNA

SEQ ID NO: 197412 - DNA, 80 bp, synthetic construct; identical to SEQ ID NO: 12682
  source 1..80: mol_type = other DNA

SEQ ID NO: 197413 - DNA, 80 bp, synthetic construct; identical to SEQ ID NO: 12683
  source 1..80: mol_type = other DNA

SEQ ID NO: 197414 - DNA, 80 bp, synthetic construct; identical to SEQ ID NO: 12684
  source 1..80: mol_type = other DNA

SEQ ID NO: 197415 - DNA, 80 bp, synthetic construct; identical to SEQ ID NO: 12685
  source 1..80: mol_type = other DNA

SEQ ID NO: 197416 - DNA, 80 bp, synthetic construct; identical to SEQ ID NO: 12686
  source 1..80: mol_type = other DNA

SEQ ID NO: 197417 - DNA, 80 bp, synthetic construct; identical to SEQ ID NO: 12687
  source 1..80: mol_type = other DNA

SEQ ID NO: 197418 - DNA, 80 bp, synthetic construct; identical to SEQ ID NO: 12688
  source 1..80: mol_type = other DNA

SEQ ID NO: 197419 - DNA, 80 bp, synthetic construct; identical to SEQ ID NO: 12689
  source 1..80: mol_type = other DNA

SEQ ID NO: 197420 - DNA, 80 bp, synthetic construct; identical to SEQ ID NO: 12690
  source 1..80: mol_type = other DNA

SEQ ID NO: 197421 - DNA, 80 bp, synthetic construct; identical to SEQ ID NO: 12691
  source 1..80: mol_type = other DNA

SEQ ID NO: 197422 - DNA, 80 bp, synthetic construct; identical to SEQ ID NO: 12692
  source 1..80: mol_type = other DNA

SEQ ID NO: 197423 - DNA, 80 bp, synthetic construct; identical to SEQ ID NO: 12693
  source 1..80: mol_type = other DNA

SEQ ID NO: 197424 - DNA, 80 bp, synthetic construct; identical to SEQ ID NO: 12694
  source 1..80: mol_type = other DNA

SEQ ID NO: 197425 - DNA, 80 bp, synthetic construct; identical to SEQ ID NO: 12695
  source 1..80: mol_type = other DNA

SEQ ID NO: 197426 - DNA, 80 bp, synthetic construct; identical to SEQ ID NO: 12696
  source 1..80: mol_type = other DNA

SEQ ID NO: 197427 - DNA, 80 bp, synthetic construct; identical to SEQ ID NO: 12697
  source 1..80: mol_type = other DNA

SEQ ID NO: 197428 - DNA, 80 bp, synthetic construct; identical to SEQ ID NO: 12698
  source 1..80: mol_type = other DNA

SEQ ID NO: 197429 - DNA, 80 bp, synthetic construct; identical to SEQ ID NO: 12699
  source 1..80: mol_type = other DNA

SEQ ID NO: 197430 - DNA, 80 bp, synthetic construct; identical to SEQ ID NO: 12700
  source 1..80: mol_type = other DNA

SEQ ID NO: 197431 - DNA, 80 bp, synthetic construct; identical to SEQ ID NO: 12701
  source 1..80: mol_type = other DNA

SEQ ID NO: 197432 - DNA, 80 bp, synthetic construct; identical to SEQ ID NO: 12702
  source 1..80: mol_type = other DNA

SEQ ID NO: 197433 - DNA, 80 bp, synthetic construct; identical to SEQ ID NO: 12703
  source 1..80: mol_type = other DNA

SEQ ID NO: 197434 - DNA, 80 bp, synthetic construct; identical to SEQ ID NO: 12704
  source 1..80: mol_type = other DNA

SEQ ID NO: 197435 - DNA, 80 bp, synthetic construct; identical to SEQ ID NO: 12705
  source 1..80: mol_type = other DNA

SEQ ID NO: 197436 - DNA, 80 bp, synthetic construct; identical to SEQ ID NO: 12706
  source 1..80: mol_type = other DNA

SEQ ID NO: 197437 - DNA, 80 bp, synthetic construct; identical to SEQ ID NO: 12707
  source 1..80: mol_type = other DNA

SEQ ID NO: 197438 - DNA, 80 bp, synthetic construct; identical to SEQ ID NO: 12708
  source 1..80: mol_type = other DNA

SEQ ID NO: 197439 - DNA, 80 bp, synthetic construct; identical to SEQ ID NO: 12709
  source 1..80: mol_type = other DNA

SEQ ID NO: 197440 - DNA, 80 bp, synthetic construct; identical to SEQ ID NO: 12710
  source 1..80: mol_type = other DNA

SEQ ID NO: 197441 - DNA, 80 bp, synthetic construct; identical to SEQ ID NO: 12711
  source 1..80: mol_type = other DNA

SEQ ID NO: 197442 - DNA, 80 bp, synthetic construct; identical to SEQ ID NO: 12712
  source 1..80: mol_type = other DNA

SEQ ID NO: 197443 - DNA, 80 bp, synthetic construct; identical to SEQ ID NO: 12713
  source 1..80: mol_type = other DNA

SEQ ID NO: 197444 - DNA, 80 bp, synthetic construct; identical to SEQ ID NO: 12714
  source 1..80: mol_type = other DNA

SEQ ID NO: 197445 - DNA, 80 bp, synthetic construct; identical to SEQ ID NO: 12715
  source 1..80: mol_type = other DNA

SEQ ID NO: 197446 - DNA, 80 bp, synthetic construct; identical to SEQ ID NO: 12716
  source 1..80: mol_type = other DNA

SEQ ID NO: 197447 - DNA, 80 bp, synthetic construct; identical to SEQ ID NO: 12717
  source 1..80: mol_type = other DNA

SEQ ID NO: 197448 - DNA, 80 bp, synthetic construct; identical to SEQ ID NO: 12718
  source 1..80: mol_type = other DNA

SEQ ID NO: 197449 - DNA, 80 bp, synthetic construct; identical to SEQ ID NO: 12719
  source 1..80: mol_type = other DNA

SEQ ID NO: 197450 - DNA, 80 bp, synthetic construct; identical to SEQ ID NO: 12720
  source 1..80: mol_type = other DNA

SEQ ID NO: 197451 - DNA, 80 bp, synthetic construct; identical to SEQ ID NO: 12721
  source 1..80: mol_type = other DNA

SEQ ID NO: 197452 - DNA, 80 bp, synthetic construct; identical to SEQ ID NO: 12722
  source 1..80: mol_type = other DNA

SEQ ID NO: 197453 - DNA, 80 bp, synthetic construct; identical to SEQ ID NO: 12723
  source 1..80: mol_type = other DNA

SEQ ID NO: 197454 - DNA, 80 bp, synthetic construct; identical to SEQ ID NO: 12724
  source 1..80: mol_type = other DNA

SEQ ID NO: 197455 - DNA, 80 bp, synthetic construct; identical to SEQ ID NO: 12725
  source 1..80: mol_type = other DNA

SEQ ID NO: 197456 - DNA, 80 bp, synthetic construct; identical to SEQ ID NO: 12726
  source 1..80: mol_type = other DNA

SEQ ID NO: 197457 - DNA, 80 bp, synthetic construct; identical to SEQ ID NO: 12727
  source 1..80: mol_type = other DNA

SEQ ID NO: 197458 - DNA, 80 bp, synthetic construct; identical to SEQ ID NO: 12728
  source 1..80: mol_type = other DNA

SEQ ID NO: 197459 - DNA, 80 bp, synthetic construct; identical to SEQ ID NO: 12729
  source 1..80: mol_type = other DNA

SEQ ID NO: 197460 - DNA, 80 bp, synthetic construct; identical to SEQ ID NO: 12730
  source 1..80: mol_type = other DNA

SEQ ID NO: 197461 - DNA, 80 bp, synthetic construct; identical to SEQ ID NO: 12731
  source 1..80: mol_type = other DNA

SEQ ID NO: 197462 - DNA, 80 bp, synthetic construct; identical to SEQ ID NO: 12732
  source 1..80: mol_type = other DNA

SEQ ID NO: 197463 - DNA, 80 bp, synthetic construct; identical to SEQ ID NO: 12733
  source 1..80: mol_type = other DNA

SEQ ID NO: 197464 - DNA, 80 bp, synthetic construct; identical to SEQ ID NO: 12734
  source 1..80: mol_type = other DNA

SEQ ID NO: 197465 - DNA, 80 bp, synthetic construct; identical to SEQ ID NO: 12735
  source 1..80: mol_type = other DNA

SEQ ID NO: 197466 - DNA, 80 bp, synthetic construct; identical to SEQ ID NO: 12736
  source 1..80: mol_type = other DNA

SEQ ID NO: 197467 - DNA, 80 bp, synthetic construct; identical to SEQ ID NO: 12737
  source 1..80: mol_type = other DNA

SEQ ID NO: 197468 - DNA, 80 bp, synthetic construct; identical to SEQ ID NO: 12738
  source 1..80: mol_type = other DNA

SEQ ID NO: 197469 - DNA, 80 bp, synthetic construct; identical to SEQ ID NO: 12739
  source 1..80: mol_type = other DNA

SEQ ID NO: 197470 - DNA, 80 bp, synthetic construct; identical to SEQ ID NO: 12740
  source 1..80: mol_type = other DNA

SEQ ID NO: 197471 - DNA, 80 bp, synthetic construct; identical to SEQ ID NO: 12741
  source 1..80: mol_type = other DNA

SEQ ID NO: 197472 - DNA, 80 bp, synthetic construct; identical to SEQ ID NO: 12742
  source 1..80: mol_type = other DNA

SEQ ID NO: 197473 - DNA, 80 bp, synthetic construct; identical to SEQ ID NO: 12743
  source 1..80: mol_type = other DNA

SEQ ID NO: 197474 - DNA, 80 bp, synthetic construct; identical to SEQ ID NO: 12744
  source 1..80: mol_type = other DNA

SEQ ID NO: 197475 - DNA, 80 bp, synthetic construct; identical to SEQ ID NO: 12745
  source 1..80: mol_type = other DNA

SEQ ID NO: 197476 - DNA, 80 bp, synthetic construct; identical to SEQ ID NO: 12746
  source 1..80: mol_type = other DNA

SEQ ID NO: 197477 - DNA, 80 bp, synthetic construct; identical to SEQ ID NO: 12747
  source 1..80: mol_type = other DNA

SEQ ID NO: 197478 - DNA, 80 bp, synthetic construct; identical to SEQ ID NO: 12748
  source 1..80: mol_type = other DNA

SEQ ID NO: 197479 - DNA, 80 bp, synthetic construct; identical to SEQ ID NO: 12749
  source 1..80: mol_type = other DNA

SEQ ID NO: 197480 - DNA, 80 bp, synthetic construct; identical to SEQ ID NO: 12750
  source 1..80: mol_type = other DNA

SEQ ID NO: 197481 - DNA, 80 bp, synthetic construct; identical to SEQ ID NO: 12751
  source 1..80: mol_type = other DNA

SEQ ID NO: 197482 - DNA, 80 bp, synthetic construct; identical to SEQ ID NO: 12752
  source 1..80: mol_type = other DNA

SEQ ID NO: 197483 - DNA, 80 bp, synthetic construct; identical to SEQ ID NO: 12753
  source 1..80: mol_type = other DNA

SEQ ID NO: 197484 - DNA, 80 bp, synthetic construct; identical to SEQ ID NO: 12754
  source 1..80: mol_type = other DNA

SEQ ID NO: 197485 - DNA, 80 bp, synthetic construct; identical to SEQ ID NO: 12755
  source 1..80: mol_type = other DNA

SEQ ID NO: 197486 - DNA, 80 bp, synthetic construct; identical to SEQ ID NO: 12756
  source 1..80: mol_type = other DNA

SEQ ID NO: 197487 - DNA, 80 bp, synthetic construct; identical to SEQ ID NO: 12757
  source 1..80: mol_type = other DNA

SEQ ID NO: 197488 - DNA, 80 bp, synthetic construct; identical to SEQ ID NO: 12758
  source 1..80: mol_type = other DNA

SEQ ID NO: 197489 - DNA, 80 bp, synthetic construct; identical to SEQ ID NO: 12759
  source 1..80: mol_type = other DNA

SEQ ID NO: 197490 - DNA, 80 bp, synthetic construct; identical to SEQ ID NO: 12760
  source 1..80: mol_type = other DNA

SEQ ID NO: 197491 - DNA, 80 bp, synthetic construct; identical to SEQ ID NO: 12761
  source 1..80: mol_type = other DNA

SEQ ID NO: 197492 - DNA, 80 bp, synthetic construct; identical to SEQ ID NO: 12762
  source 1..80: mol_type = other DNA

SEQ ID NO: 197493 - DNA, 80 bp, synthetic construct; identical to SEQ ID NO: 12763
  source 1..80: mol_type = other DNA

SEQ ID NO: 197494 - DNA, 80 bp, synthetic construct; identical to SEQ ID NO: 12764
  source 1..80: mol_type = other DNA

SEQ ID NO: 197495 - DNA, 80 bp, synthetic construct; identical to SEQ ID NO: 12765
  source 1..80: mol_type = other DNA

SEQ ID NO: 197496 - DNA, 80 bp, synthetic construct; identical to SEQ ID NO: 12766
  source 1..80: mol_type = other DNA

SEQ ID NO: 197497 - DNA, 80 bp, synthetic construct; identical to SEQ ID NO: 12767
  source 1..80: mol_type = other DNA

SEQ ID NO: 197498 - DNA, 80 bp, synthetic construct; identical to SEQ ID NO: 12768
  source 1..80: mol_type = other DNA

SEQ ID NO: 197499 - DNA, 80 bp, synthetic construct; identical to SEQ ID NO: 12769
  source 1..80: mol_type = other DNA

SEQ ID NO: 197500 - DNA, 80 bp, synthetic construct; identical to SEQ ID NO: 12770
  source 1..80: mol_type = other DNA

SEQ ID NO: 197501 - DNA, 80 bp, synthetic construct; identical to SEQ ID NO: 12771
  source 1..80: mol_type = other DNA

SEQ ID NO: 197502 - DNA, 80 bp, synthetic construct; identical to SEQ ID NO: 12772
  source 1..80: mol_type = other DNA

SEQ ID NO: 197503 - DNA, 80 bp, synthetic construct; identical to SEQ ID NO: 12773
  source 1..80: mol_type = other DNA

SEQ ID NO: 197504 - DNA, 80 bp, synthetic construct; identical to SEQ ID NO: 12774
  source 1..80: mol_type = other DNA

SEQ ID NO: 197505 - DNA, 80 bp, synthetic construct; identical to SEQ ID NO: 12775
  source 1..80: mol_type = other DNA

SEQ ID NO: 197506 - DNA, 80 bp, synthetic construct; identical to SEQ ID NO: 12776
  source 1..80: mol_type = other DNA

SEQ ID NO: 197507 - DNA, 80 bp, synthetic construct; identical to SEQ ID NO: 12777
  source 1..80: mol_type = other DNA

SEQ ID NO: 197508 - DNA, 80 bp, synthetic construct; identical to SEQ ID NO: 12778
  source 1..80: mol_type = other DNA

SEQ ID NO: 197509 - DNA, 80 bp, synthetic construct; identical to SEQ ID NO: 12779
  source 1..80: mol_type = other DNA

SEQ ID NO: 197510 - DNA, 80 bp, synthetic construct; identical to SEQ ID NO: 12780
  source 1..80: mol_type = other DNA

SEQ ID NO: 197511 - DNA, 80 bp, synthetic construct; identical to SEQ ID NO: 12781
  source 1..80: mol_type = other DNA

SEQ ID NO: 197512 - DNA, 80 bp, synthetic construct; identical to SEQ ID NO: 12782
  source 1..80: mol_type = other DNA

SEQ ID NO: 197513 - DNA, 80 bp, synthetic construct; identical to SEQ ID NO: 12783
  source 1..80: mol_type = other DNA

SEQ ID NO: 197514 - DNA, 80 bp, synthetic construct; identical to SEQ ID NO: 12784
  source 1..80: mol_type = other DNA

SEQ ID NO: 197515 - DNA, 80 bp, synthetic construct; identical to SEQ ID NO: 12785
  source 1..80: mol_type = other DNA

SEQ ID NO: 197516 - DNA, 80 bp, synthetic construct; identical to SEQ ID NO: 12786
  source 1..80: mol_type = other DNA

SEQ ID NO: 197517 - DNA, 80 bp, synthetic construct; identical to SEQ ID NO: 12787
  source 1..80: mol_type = other DNA

SEQ ID NO: 197518 - DNA, 80 bp, synthetic construct; identical to SEQ ID NO: 12788
  source 1..80: mol_type = other DNA

SEQ ID NO: 197519 - DNA, 80 bp, synthetic construct; identical to SEQ ID NO: 12789
  source 1..80: mol_type = other DNA

SEQ ID NO: 197520 - DNA, 80 bp, synthetic construct; identical to SEQ ID NO: 12790
  source 1..80: mol_type = other DNA

SEQ ID NO: 197521 - DNA, 80 bp, synthetic construct; identical to SEQ ID NO: 12791
  source 1..80: mol_type = other DNA

SEQ ID NO: 197522 - DNA, 80 bp, synthetic construct; identical to SEQ ID NO: 12792
  source 1..80: mol_type = other DNA

SEQ ID NO: 197523 - DNA, 80 bp, synthetic construct; identical to SEQ ID NO: 12793
  source 1..80: mol_type = other DNA

SEQ ID NO: 197524 - DNA, 80 bp, synthetic construct; identical to SEQ ID NO: 12794
  source 1..80: mol_type = other DNA

SEQ ID NO: 197525 - DNA, 80 bp, synthetic construct; identical to SEQ ID NO: 12795
  source 1..80: mol_type = other DNA

SEQ ID NO: 197526 - DNA, 80 bp, synthetic construct; identical to SEQ ID NO: 12796
  source 1..80: mol_type = other DNA

SEQ ID NO: 197527 - DNA, 80 bp, synthetic construct; identical to SEQ ID NO: 12797
  source 1..80: mol_type = other DNA

SEQ ID NO: 197528 - DNA, 80 bp, synthetic construct; identical to SEQ ID NO: 12798
  source 1..80: mol_type = other DNA

SEQ ID NO: 197529 - DNA, 80 bp, synthetic construct; identical to SEQ ID NO: 12799
  source 1..80: mol_type = other DNA

SEQ ID NO: 197530 - DNA, 80 bp, synthetic construct; identical to SEQ ID NO: 12800
  source 1..80: mol_type = other DNA

SEQ ID NO: 197531 - DNA, 80 bp, synthetic construct; identical to SEQ ID NO: 12801
  source 1..80: mol_type = other DNA

SEQ ID NO: 197532 - DNA, 80 bp, synthetic construct; identical to SEQ ID NO: 12802
  source 1..80: mol_type = other DNA

SEQ ID NO: 197533 - DNA, 80 bp, synthetic construct; identical to SEQ ID NO: 12803
  source 1..80: mol_type = other DNA

SEQ ID NO: 197534 - DNA, 80 bp, synthetic construct; identical to SEQ ID NO: 12804
  source 1..80: mol_type = other DNA

SEQ ID NO: 197535 - DNA, 80 bp, synthetic construct; identical to SEQ ID NO: 12805
  source 1..80: mol_type = other DNA

SEQ ID NO: 197536 - DNA, 80 bp, synthetic construct; identical to SEQ ID NO: 12806
  source 1..80: mol_type = other DNA

SEQ ID NO: 197537 - DNA, 80 bp, synthetic construct; identical to SEQ ID NO: 12807
  source 1..80: mol_type = other DNA

SEQ ID NO: 197538 - DNA, 80 bp, synthetic construct; identical to SEQ ID NO: 12808
  source 1..80: mol_type = other DNA

SEQ ID NO: 197539 - DNA, 80 bp, synthetic construct; identical to SEQ ID NO: 12809
  source 1..80: mol_type = other DNA

SEQ ID NO: 197540 - DNA, 80 bp, synthetic construct; identical to SEQ ID NO: 12810
  source 1..80: mol_type = other DNA

SEQ ID NO: 197541 - DNA, 80 bp, synthetic construct; identical to SEQ ID NO: 12811
  source 1..80: mol_type = other DNA

SEQ ID NO: 197542 - DNA, 80 bp, synthetic construct; identical to SEQ ID NO: 12812
  source 1..80: mol_type = other DNA

SEQ ID NO: 197543 - DNA, 80 bp, synthetic construct; identical to SEQ ID NO: 12813
  source 1..80: mol_type = other DNA

SEQ ID NO: 197544 - DNA, 80 bp, synthetic construct; identical to SEQ ID NO: 12814
  source 1..80: mol_type = other DNA

SEQ ID NO: 197545 - DNA, 80 bp, synthetic construct; identical to SEQ ID NO: 12815
  source 1..80: mol_type = other DNA

SEQ ID NO: 197546 - DNA, 80 bp, synthetic construct; identical to SEQ ID NO: 12816
  source 1..80: mol_type = other DNA

SEQ ID NO: 197547 - DNA, 80 bp, synthetic construct; identical to SEQ ID NO: 12817
  source 1..80: mol_type = other DNA

SEQ ID NO: 197548 - DNA, 80 bp, synthetic construct; identical to SEQ ID NO: 12818
  source 1..80: mol_type = other DNA

SEQ ID NO: 197549 - DNA, 80 bp, synthetic construct; identical to SEQ ID NO: 12819
  source 1..80: mol_type = other DNA

SEQ ID NO: 197550 - DNA, 80 bp, synthetic construct; identical to SEQ ID NO: 12820
  source 1..80: mol_type = other DNA

SEQ ID NO: 197551 - DNA, 80 bp, synthetic construct; identical to SEQ ID NO: 12821
  source 1..80: mol_type = other DNA

SEQ ID NO: 197552 - DNA, 80 bp, synthetic construct; identical to SEQ ID NO: 12822
  source 1..80: mol_type = other DNA

SEQ ID NO: 197553 - DNA, 80 bp, synthetic construct; identical to SEQ ID NO: 12823
  source 1..80: mol_type = other DNA

SEQ ID NO: 197554 - DNA, 80 bp, synthetic construct; identical to SEQ ID NO: 12824
  source 1..80: mol_type = other DNA

SEQ ID NO: 197555 - DNA, 80 bp, synthetic construct; identical to SEQ ID NO: 12825
  source 1..80: mol_type = other DNA

SEQ ID NO: 197556 - DNA, 80 bp, synthetic construct; identical to SEQ ID NO: 12826
  source 1..80: mol_type = other DNA

SEQ ID NO: 197557 - DNA, 80 bp, synthetic construct; identical to SEQ ID NO: 12827
  source 1..80: mol_type = other DNA

SEQ ID NO: 197558 - DNA, 80 bp, synthetic construct; identical to SEQ ID NO: 12828
  source 1..80: mol_type = other DNA

SEQ ID NO: 197559 - DNA, 80 bp, synthetic construct; identical to SEQ ID NO: 12829
  source 1..80: mol_type = other DNA

SEQ ID NO: 197560 - DNA, 80 bp, synthetic construct; identical to SEQ ID NO: 12830
  source 1..80: mol_type = other DNA

SEQ ID NO: 197561 - DNA, 80 bp, synthetic construct; identical to SEQ ID NO: 12831
  source 1..80: mol_type = other DNA

SEQ ID NO: 197562 - DNA, 80 bp, synthetic construct; identical to SEQ ID NO: 12832
  source 1..80: mol_type = other DNA

SEQ ID NO: 197563 - DNA, 80 bp, synthetic construct; identical to SEQ ID NO: 12833
  source 1..80: mol_type = other DNA

SEQ ID NO: 197564 - DNA, 80 bp, synthetic construct; identical to SEQ ID NO: 12834
  source 1..80: mol_type = other DNA

SEQ ID NO: 197565 - DNA, 80 bp, synthetic construct; identical to SEQ ID NO: 12835
  source 1..80: mol_type = other DNA

SEQ ID NO: 197566 - DNA, 80 bp, synthetic construct; identical to SEQ ID NO: 12836
  source 1..80: mol_type = other DNA

SEQ ID NO: 197567 - DNA, 80 bp, synthetic construct; identical to SEQ ID NO: 12837
  source 1..80: mol_type = other DNA

SEQ ID NO: 197568 - DNA, 80 bp, synthetic construct; identical to SEQ ID NO: 12838
  source 1..80: mol_type = other DNA

SEQ ID NO: 197569 - DNA, 80 bp, synthetic construct; identical to SEQ ID NO: 12839
  source 1..80: mol_type = other DNA

SEQ ID NO: 197570 - DNA, 80 bp, synthetic construct; identical to SEQ ID NO: 12840
  source 1..80: mol_type = other DNA

SEQ ID NO: 197571 - DNA, 80 bp, synthetic construct; identical to SEQ ID NO: 12841
  source 1..80: mol_type = other DNA

SEQ ID NO: 197572 - DNA, 80 bp, synthetic construct; identical to SEQ ID NO: 12842
  source 1..80: mol_type = other DNA

SEQ ID NO: 197573 - DNA, 80 bp, synthetic construct; identical to SEQ ID NO: 12843
  source 1..80: mol_type = other DNA

SEQ ID NO: 197574 - DNA, 80 bp, synthetic construct; identical to SEQ ID NO: 12844
  source 1..80: mol_type = other DNA

SEQ ID NO: 197575 - DNA, 80 bp, synthetic construct; identical to SEQ ID NO: 12845
  source 1..80: mol_type = other DNA

SEQ ID NO: 197576 - DNA, 80 bp, synthetic construct; identical to SEQ ID NO: 12846
  source 1..80: mol_type = other DNA

SEQ ID NO: 197577 - DNA, 80 bp, synthetic construct; identical to SEQ ID NO: 12847
  source 1..80: mol_type = other DNA

SEQ ID NO: 197578 - DNA, 80 bp, synthetic construct; identical to SEQ ID NO: 12848
  source 1..80: mol_type = other DNA

SEQ ID NO: 197579 - DNA, 80 bp, synthetic construct; identical to SEQ ID NO: 12849
  source 1..80: mol_type = other DNA

SEQ ID NO: 197580 - DNA, 80 bp, synthetic construct; identical to SEQ ID NO: 12850
  source 1..80: mol_type = other DNA

SEQ ID NO: 197581 - DNA, 80 bp, synthetic construct; identical to SEQ ID NO: 12851
  source 1..80: mol_type = other DNA

SEQ ID NO: 197582 - DNA, 80 bp, synthetic construct; identical to SEQ ID NO: 12852
  source 1..80: mol_type = other DNA

SEQ ID NO: 197583 - DNA, 80 bp, synthetic construct; identical to SEQ ID NO: 12853
  source 1..80: mol_type = other DNA

SEQ ID NO: 197584 - DNA, 80 bp, synthetic construct; identical to SEQ ID NO: 12854
  source 1..80: mol_type = other DNA

SEQ ID NO: 197585 - DNA, 80 bp, synthetic construct; identical to SEQ ID NO: 12855
  source 1..80: mol_type = other DNA

SEQ ID NO: 197586 - DNA, 80 bp, synthetic construct; identical to SEQ ID NO: 12856
  source 1..80: mol_type = other DNA

SEQ ID NO: 197587 - DNA, 80 bp, synthetic construct; identical to SEQ ID NO: 12857
  source 1..80: mol_type = other DNA

SEQ ID NO: 197588 - DNA, 80 bp, synthetic construct; identical to SEQ ID NO: 12858
  source 1..80: mol_type = other DNA

SEQ ID NO: 197589 - DNA, 80 bp, synthetic construct; identical to SEQ ID NO: 12859
  source 1..80: mol_type = other DNA

SEQ ID NO: 197590 - DNA, 80 bp, synthetic construct; identical to SEQ ID NO: 12860
  source 1..80: mol_type = other DNA

SEQ ID NO: 197591 - DNA, 80 bp, synthetic construct; identical to SEQ ID NO: 12861
  source 1..80: mol_type = other DNA

SEQ ID NO: 197592 - DNA, 80 bp, synthetic construct; identical to SEQ ID NO: 12862
  source 1..80: mol_type = other DNA

SEQ ID NO: 197593 - DNA, 80 bp, synthetic construct; identical to SEQ ID NO: 12863
  source 1..80: mol_type = other DNA

SEQ ID NO: 197594 - DNA, 80 bp, synthetic construct; identical to SEQ ID NO: 12864
  source 1..80: mol_type = other DNA

SEQ ID NO: 197595 - DNA, 80 bp, synthetic construct; identical to SEQ ID NO: 12865
  source 1..80: mol_type = other DNA

SEQ ID NO: 197596 - DNA, 80 bp, synthetic construct; identical to SEQ ID NO: 12866
  source 1..80: mol_type = other DNA

SEQ ID NO: 197597 - DNA, 80 bp, synthetic construct; identical to SEQ ID NO: 12867
  source 1..80: mol_type = other DNA

SEQ ID NO: 197598 - DNA, 80 bp, synthetic construct; identical to SEQ ID NO: 12868
  source 1..80: mol_type = other DNA

SEQ ID NO: 197599 - DNA, 80 bp, synthetic construct; identical to SEQ ID NO: 12869
  source 1..80: mol_type = other DNA

SEQ ID NO: 197600 - DNA, 80 bp, synthetic construct; identical to SEQ ID NO: 12870
  source 1..80: mol_type = other DNA

SEQ ID NO: 197601 - DNA, 80 bp, synthetic construct; identical to SEQ ID NO: 12871
  source 1..80: mol_type = other DNA

SEQ ID NO: 197602 - DNA, 80 bp, synthetic construct; identical to SEQ ID NO: 12872
  source 1..80: mol_type = other DNA

SEQ ID NO: 197603 - DNA, 80 bp, synthetic construct; identical to SEQ ID NO: 12873
  source 1..80: mol_type = other DNA

SEQ ID NO: 197604 - DNA, 80 bp, synthetic construct; identical to SEQ ID NO: 12874
  source 1..80: mol_type = other DNA

SEQ ID NO: 197605 - DNA, 80 bp, synthetic construct; identical to SEQ ID NO: 12875
  source 1..80: mol_type = other DNA

SEQ ID NO: 197606 - DNA, 80 bp, synthetic construct; identical to SEQ ID NO: 12876
  source 1..80: mol_type = other DNA

SEQ ID NO: 197607 - DNA, 80 bp, synthetic construct; identical to SEQ ID NO: 12877
  source 1..80: mol_type = other DNA

SEQ ID NO: 197608 - DNA, 80 bp, synthetic construct; identical to SEQ ID NO: 12878
  source 1..80: mol_type = other DNA

SEQ ID NO: 197609 - DNA, 80 bp, synthetic construct; identical to SEQ ID NO: 12879
  source 1..80: mol_type = other DNA

SEQ ID NO: 197610 - DNA, 80 bp, synthetic construct; identical to SEQ ID NO: 12880
  source 1..80: mol_type = other DNA

SEQ ID NO: 197611 - DNA, 80 bp, synthetic construct; identical to SEQ ID NO: 12881
  source 1..80: mol_type = other DNA

SEQ ID NO: 197612 - DNA, 80 bp, synthetic construct; identical to SEQ ID NO: 12882
  source 1..80: mol_type = other DNA

SEQ ID NO: 197613 - DNA, 80 bp, synthetic construct; identical to SEQ ID NO: 12883
  source 1..80: mol_type = other DNA

SEQ ID NO: 197614 - DNA, 80 bp, synthetic construct; identical to SEQ ID NO: 12884
  source 1..80: mol_type = other DNA

SEQ ID NO: 197615 - DNA, 80 bp, synthetic construct; identical to SEQ ID NO: 12885
  source 1..80: mol_type = other DNA

SEQ ID NO: 197616 - DNA, 80 bp, synthetic construct; identical to SEQ ID NO: 12886
  source 1..80: mol_type = other DNA

SEQ ID NO: 197617 - DNA, 80 bp, synthetic construct; identical to SEQ ID NO: 12887
  source 1..80: mol_type = other DNA

SEQ ID NO: 197618 - DNA, 80 bp, synthetic construct; identical to SEQ ID NO: 12888
  source 1..80: mol_type = other DNA

SEQ ID NO: 197619 - DNA, 80 bp, synthetic construct; identical to SEQ ID NO: 12889
  source 1..80: mol_type = other DNA

SEQ ID NO: 197620 - DNA, 80 bp, synthetic construct; identical to SEQ ID NO: 12890
  source 1..80: mol_type = other DNA

SEQ ID NO: 197621 - DNA, 80 bp, synthetic construct; identical to SEQ ID NO: 12891
  source 1..80: mol_type = other DNA

SEQ ID NO: 197622 - DNA, 80 bp, synthetic construct; identical to SEQ ID NO: 12892
  source 1..80: mol_type = other DNA

SEQ ID NO: 197623 - DNA, 80 bp, synthetic construct; identical to SEQ ID NO: 12893
  source 1..80: mol_type = other DNA

SEQ ID NO: 197624 - DNA, 80 bp, synthetic construct; identical to SEQ ID NO: 12894
  source 1..80: mol_type = other DNA

SEQ ID NO: 197625 - DNA, 80 bp, synthetic construct; identical to SEQ ID NO: 12895
  source 1..80: mol_type = other DNA

SEQ ID NO: 197626 - DNA, 80 bp, synthetic construct; identical to SEQ ID NO: 12896
  source 1..80: mol_type = other DNA

SEQ ID NO: 197627 - DNA, 80 bp, synthetic construct; identical to SEQ ID NO: 12897
  source 1..80: mol_type = other DNA

SEQ ID NO: 197628 - DNA, 80 bp, synthetic construct; identical to SEQ ID NO: 12898
  source 1..80: mol_type = other DNA

SEQ ID NO: 197629 - DNA, 80 bp, synthetic construct; identical to SEQ ID NO: 12899
  source 1..80: mol_type = other DNA

SEQ ID NO: 197630 - DNA, 80 bp, synthetic construct; identical to SEQ ID NO: 12900
  source 1..80: mol_type = other DNA

SEQ ID NO: 197631 - DNA, 80 bp, synthetic construct; identical to SEQ ID NO: 12901
  source 1..80: mol_type = other DNA

SEQ ID NO: 197632 - DNA, 80 bp, synthetic construct; identical to SEQ ID NO: 12902
  source 1..80: mol_type = other DNA

SEQ ID NO: 197633 - DNA, 80 bp, synthetic construct; identical to SEQ ID NO: 12903
  source 1..80: mol_type = other DNA

SEQ ID NO: 197634 - DNA, 80 bp, synthetic construct; identical to SEQ ID NO: 12904
  source 1..80: mol_type = other DNA

SEQ ID NO: 197635 - DNA, 80 bp, synthetic construct; identical to SEQ ID NO: 12905
  source 1..80: mol_type = other DNA

SEQ ID NO: 197636 - DNA, 80 bp, synthetic construct; identical to SEQ ID NO: 12906
  source 1..80: mol_type = other DNA

SEQ ID NO: 197637 - DNA, 80 bp, synthetic construct; identical to SEQ ID NO: 12907
  source 1..80: mol_type = other DNA

SEQ ID NO: 197638 - DNA, 80 bp, synthetic construct; identical to SEQ ID NO: 12908
  source 1..80: mol_type = other DNA

SEQ ID NO: 197639 - DNA, 80 bp, synthetic construct; identical to SEQ ID NO: 12909
  source 1..80: mol_type = other DNA

SEQ ID NO: 197640 - DNA, 80 bp, synthetic construct; identical to SEQ ID NO: 12910
  source 1..80: mol_type = other DNA

SEQ ID NO: 197641 - DNA, 80 bp, synthetic construct; identical to SEQ ID NO: 12911
  source 1..80: mol_type = other DNA

SEQ ID NO: 197642 - DNA, 80 bp, synthetic construct; identical to SEQ ID NO: 12912
  source 1..80: mol_type = other DNA

SEQ ID NO: 197643 - DNA, 80 bp, synthetic construct; identical to SEQ ID NO: 12913
  source 1..80: mol_type = other DNA

SEQ ID NO: 197644 - DNA, 80 bp, synthetic construct; identical to SEQ ID NO: 12914
  source 1..80: mol_type = other DNA

SEQ ID NO: 197645 - DNA, 80 bp, synthetic construct; identical to SEQ ID NO: 12915
  source 1..80: mol_type = other DNA

SEQ ID NO: 197646 - DNA, 80 bp, synthetic construct; identical to SEQ ID NO: 12916
  source 1..80: mol_type = other DNA

SEQ ID NO: 197647 - DNA, 80 bp, synthetic construct; identical to SEQ ID NO: 12917
  source 1..80: mol_type = other DNA

SEQ ID NO: 197648 - DNA, 80 bp, synthetic construct; identical to SEQ ID NO: 12918
  source 1..80: mol_type = other DNA

SEQ ID NO: 197649 - DNA, 80 bp, synthetic construct; identical to SEQ ID NO: 12919
  source 1..80: mol_type = other DNA

SEQ ID NO: 197650 - DNA, 80 bp, synthetic construct; identical to SEQ ID NO: 12920
  source 1..80: mol_type = other DNA

SEQ ID NO: 197651 - DNA, 80 bp, synthetic construct; identical to SEQ ID NO: 12921
  source 1..80: mol_type = other DNA

SEQ ID NO: 197652 - DNA, 80 bp, synthetic construct; identical to SEQ ID NO: 12922
  source 1..80: mol_type = other DNA

SEQ ID NO: 197653 - DNA, 80 bp, synthetic construct; identical to SEQ ID NO: 12923
  source 1..80: mol_type = other DNA

SEQ ID NO: 197654 - DNA, 80 bp, synthetic construct; identical to SEQ ID NO: 12924
  source 1..80: mol_type = other DNA

SEQ ID NO: 197655 - DNA, 80 bp, synthetic construct; identical to SEQ ID NO: 12925
  source 1..80: mol_type = other DNA

SEQ ID NO: 197656 - DNA, 80 bp, synthetic construct; identical to SEQ ID NO: 12926
  source 1..80: mol_type = other DNA

SEQ ID NO: 197657 - DNA, 80 bp, synthetic construct; identical to SEQ ID NO: 12927
  source 1..80: mol_type = other DNA

SEQ ID NO: 197658 - DNA, 80 bp, synthetic construct; identical to SEQ ID NO: 12928
  source 1..80: mol_type = other DNA

SEQ ID NO: 197659 - DNA, 80 bp, synthetic construct; identical to SEQ ID NO: 12929
  source 1..80: mol_type = other DNA

SEQ ID NO: 197660 - DNA, 80 bp, synthetic construct; identical to SEQ ID NO: 12930
  source 1..80: mol_type = other DNA

SEQ ID NO: 197661 - DNA, 80 bp, synthetic construct; identical to SEQ ID NO: 12931
  source 1..80: mol_type = other DNA

SEQ ID NO: 197662 - DNA, 80 bp, synthetic construct; identical to SEQ ID NO: 12932
  source 1..80: mol_type = other DNA

SEQ ID NO: 197663 - DNA, 80 bp, synthetic construct; identical to SEQ ID NO: 12933
  source 1..80: mol_type = other DNA

SEQ ID NO: 197664 - DNA, 80 bp, synthetic construct; identical to SEQ ID NO: 12934
  source 1..80: mol_type = other DNA

SEQ ID NO: 197665 - DNA, 80 bp, synthetic construct; identical to SEQ ID NO: 12935
  source 1..80: mol_type = other DNA

SEQ ID NO: 197666 - DNA, 80 bp, synthetic construct; identical to SEQ ID NO: 12936
  source 1..80: mol_type = other DNA

SEQ ID NO: 197667 - DNA, 80 bp, synthetic construct; identical to SEQ ID NO: 12937
  source 1..80: mol_type = other DNA

SEQ ID NO: 197668 - DNA, 80 bp, synthetic construct; identical to SEQ ID NO: 12938
  source 1..80: mol_type = other DNA

SEQ ID NO: 197669 - DNA, 80 bp, synthetic construct; identical to SEQ ID NO: 12939
  source 1..80: mol_type = other DNA

SEQ ID NO: 197670 - DNA, 80 bp, synthetic construct; identical to SEQ ID NO: 12940
  source 1..80: mol_type = other DNA

SEQ ID NO: 197671 - DNA, 80 bp, synthetic construct; identical to SEQ ID NO: 12941
  source 1..80: mol_type = other DNA

SEQ ID NO: 197672 - DNA, 80 bp, synthetic construct; identical to SEQ ID NO: 12942
  source 1..80: mol_type = other DNA

SEQ ID NO: 197673 - DNA, 80 bp, synthetic construct; identical to SEQ ID NO: 12943
  source 1..80: mol_type = other DNA

SEQ ID NO: 197674 - DNA, 80 bp, synthetic construct; identical to SEQ ID NO: 12944
  source 1..80: mol_type = other DNA

SEQ ID NO: 197675 - DNA, 80 bp, synthetic construct; identical to SEQ ID NO: 12945
  source 1..80: mol_type = other DNA

SEQ ID NO: 197676 - DNA, 80 bp, synthetic construct; identical to SEQ ID NO: 12946
  source 1..80: mol_type = other DNA

SEQ ID NO: 197677 - DNA, 80 bp, synthetic construct; identical to SEQ ID NO: 12947
  source 1..80: mol_type = other DNA

SEQ ID NO: 197678 - DNA, 80 bp, synthetic construct; identical to SEQ ID NO: 12948
  source 1..80: mol_type = other DNA

SEQ ID NO: 197679 - DNA, 80 bp, synthetic construct; identical to SEQ ID NO: 12949
  source 1..80: mol_type = other DNA

SEQ ID NO: 197680 - DNA, 80 bp, synthetic construct; identical to SEQ ID NO: 12950
  source 1..80: mol_type = other DNA

SEQ ID NO: 197681 - DNA, 80 bp, synthetic construct; identical to SEQ ID NO: 12951
  source 1..80: mol_type = other DNA

SEQ ID NO: 197682 - DNA, 80 bp, synthetic construct; identical to SEQ ID NO: 12952
  source 1..80: mol_type = other DNA

SEQ ID NO: 197683 - DNA, 80 bp, synthetic construct; identical to SEQ ID NO: 12953
  source 1..80: mol_type = other DNA

SEQ ID NO: 197684 - DNA, 80 bp, synthetic construct; identical to SEQ ID NO: 12954
  source 1..80: mol_type = other DNA

SEQ ID NO: 197685 - DNA, 80 bp, synthetic construct; identical to SEQ ID NO: 12955
  source 1..80: mol_type = other DNA

SEQ ID NO: 197686 - DNA, 80 bp, synthetic construct; identical to SEQ ID NO: 12956
  source 1..80: mol_type = other DNA

SEQ ID NO: 197687 - DNA, 80 bp, synthetic construct; identical to SEQ ID NO: 12957
  source 1..80: mol_type = other DNA

SEQ ID NO: 197688 - DNA, 80 bp, synthetic construct; identical to SEQ ID NO: 12958
  source 1..80: mol_type = other DNA

SEQ ID NO: 197689 - DNA, 80 bp, synthetic construct; identical to SEQ ID NO: 12959
  source 1..80: mol_type = other DNA

SEQ ID NO: 197690 - DNA, 80 bp, synthetic construct; identical to SEQ ID NO: 12960
  source 1..80: mol_type = other DNA

SEQ ID NO: 197691 - DNA, 80 bp, synthetic construct; identical to SEQ ID NO: 12961
  source 1..80: mol_type = other DNA

SEQ ID NO: 197692 - DNA, 80 bp, synthetic construct; identical to SEQ ID NO: 12962
  source 1..80: mol_type = other DNA

SEQ ID NO: 197693 - DNA, 80 bp, synthetic construct; identical to SEQ ID NO: 12963
  source 1..80: mol_type = other DNA

SEQ ID NO: 197694 - DNA, 80 bp, synthetic construct; identical to SEQ ID NO: 12964
  source 1..80: mol_type = other DNA

SEQ ID NO: 197695 - DNA, 80 bp, synthetic construct; identical to SEQ ID NO: 12965
  source 1..80: mol_type = other DNA

SEQ ID NO: 197696 - DNA, 80 bp, synthetic construct; identical to SEQ ID NO: 12966
  source 1..80: mol_type = other DNA

SEQ ID NO: 197697 - DNA, 80 bp, synthetic construct; identical to SEQ ID NO: 12967
  source 1..80: mol_type = other DNA

SEQ ID NO: 197698 - DNA, 80 bp, synthetic construct; identical to SEQ ID NO: 12968
  source 1..80: mol_type = other DNA

SEQ ID NO: 197699 - DNA, 80 bp, synthetic construct; identical to SEQ ID NO: 12969
  source 1..80: mol_type = other DNA

SEQ ID NO: 197700 - DNA, 80 bp, synthetic construct; identical to SEQ ID NO: 12970
  source 1..80: mol_type = other DNA

SEQ ID NO: 197701 - DNA, 80 bp, synthetic construct; identical to SEQ ID NO: 12971
  source 1..80: mol_type = other DNA

SEQ ID NO: 197702 - DNA, 80 bp, synthetic construct; identical to SEQ ID NO: 12972
  source 1..80: mol_type = other DNA

SEQ ID NO: 197703 - DNA, 80 bp, synthetic construct; identical to SEQ ID NO: 12973
  source 1..80: mol_type = other DNA

SEQ ID NO: 197704 - DNA, 80 bp, synthetic construct; identical to SEQ ID NO: 12974
  source 1..80: mol_type = other DNA

SEQ ID NO: 197705 - DNA, 80 bp, synthetic construct; identical to SEQ ID NO: 12975
  source 1..80: mol_type = other DNA

SEQ ID NO: 197706 - DNA, 80 bp, synthetic construct; identical to SEQ ID NO: 12976
  source 1..80: mol_type = other DNA

SEQ ID NO: 197707 - DNA, 80 bp, synthetic construct; identical to SEQ ID NO: 12977
  source 1..80: mol_type = other DNA

SEQ ID NO: 197708 - DNA, 80 bp, synthetic construct; identical to SEQ ID NO: 12978
  source 1..80: mol_type = other DNA

SEQ ID NO: 197709 - DNA, 80 bp, synthetic construct; identical to SEQ ID NO: 12979
  source 1..80: mol_type = other DNA

SEQ ID NO: 197710 - DNA, 80 bp, synthetic construct; identical to SEQ ID NO: 12980
  source 1..80: mol_type = other DNA

SEQ ID NO: 197711 - DNA, 80 bp, synthetic construct; identical to SEQ ID NO: 12981
  source 1..80: mol_type = other DNA

SEQ ID NO: 197712 - DNA, 80 bp, synthetic construct; identical to SEQ ID NO: 12982
  source 1..80: mol_type = other DNA

SEQ ID NO: 197713 - DNA, 80 bp, synthetic construct; identical to SEQ ID NO: 12983
  source 1..80: mol_type = other DNA

SEQ ID NO: 197714 - DNA, 80 bp, synthetic construct; identical to SEQ ID NO: 12984
  source 1..80: mol_type = other DNA

SEQ ID NO: 197715 - DNA, 80 bp, synthetic construct; identical to SEQ ID NO: 12985
  source 1..80: mol_type = other DNA

SEQ ID NO: 197716 - DNA, 80 bp, synthetic construct; identical to SEQ ID NO: 12986
  source 1..80: mol_type = other DNA

SEQ ID NO: 197717 - DNA, 80 bp, synthetic construct; identical to SEQ ID NO: 12987
  source 1..80: mol_type = other DNA

SEQ ID NO: 197718 - DNA, 80 bp, synthetic construct; identical to SEQ ID NO: 12988
  source 1..80: mol_type = other DNA

SEQ ID NO: 197719 - DNA, 80 bp, synthetic construct; identical to SEQ ID NO: 12989
  source 1..80: mol_type = other DNA

SEQ ID NO: 197720 - DNA, 80 bp, synthetic construct; identical to SEQ ID NO: 12990
  source 1..80: mol_type = other DNA

SEQ ID NO: 197721 - DNA, 80 bp, synthetic construct; identical to SEQ ID NO: 12991
  source 1..80: mol_type = other DNA

SEQ ID NO: 197722 - DNA, 80 bp, synthetic construct; identical to SEQ ID NO: 12992
  source 1..80: mol_type = other DNA

SEQ ID NO: 197723 - DNA, 80 bp, synthetic construct; identical to SEQ ID NO: 12993
  source 1..80: mol_type = other DNA

SEQ ID NO: 197724 - DNA, 80 bp, synthetic construct; identical to SEQ ID NO: 12994
  source 1..80: mol_type = other DNA

SEQ ID NO: 197725 - DNA, 80 bp, synthetic construct; identical to SEQ ID NO: 12995
  source 1..80: mol_type = other DNA

SEQ ID NO: 197726 - DNA, 80 bp, synthetic construct; identical to SEQ ID NO: 12996
  source 1..80: mol_type = other DNA

SEQ ID NO: 197727 - DNA, 80 bp, synthetic construct; identical to SEQ ID NO: 12997
  source 1..80: mol_type = other DNA

SEQ ID NO: 197728 - DNA, 80 bp, synthetic construct; identical to SEQ ID NO: 12998
  source 1..80: mol_type = other DNA

SEQ ID NO: 197729 - DNA, 80 bp, synthetic construct; identical to SEQ ID NO: 12999
  source 1..80: mol_type = other DNA

SEQ ID NO: 197730 - DNA, 80 bp, synthetic construct; identical to SEQ ID NO: 13000
  source 1..80: mol_type = other DNA

SEQ ID NO: 197731 - DNA, 80 bp, synthetic construct; identical to SEQ ID NO: 13001
  source 1..80: mol_type = other DNA

SEQ ID NO: 197732 - DNA, 80 bp, synthetic construct; identical to SEQ ID NO: 13002
  source 1..80: mol_type = other DNA

SEQ ID NO: 197733 - DNA, 80 bp, synthetic construct; identical to SEQ ID NO: 13003
  source 1..80: mol_type = other DNA

SEQ ID NO: 197734 - DNA, 80 bp, synthetic construct; identical to SEQ ID NO: 13004
  source 1..80: mol_type = other DNA

SEQ ID NO: 197735 - DNA, 80 bp, synthetic construct; identical to SEQ ID NO: 13005
  source 1..80: mol_type = other DNA

SEQ ID NO: 197736 - DNA, 80 bp, synthetic construct; identical to SEQ ID NO: 13006
  source 1..80: mol_type = other DNA

SEQ ID NO: 197737 - DNA, 80 bp, synthetic construct; identical to SEQ ID NO: 13007
  source 1..80: mol_type = other DNA

SEQ ID NO: 197738 - DNA, 80 bp, synthetic construct; identical to SEQ ID NO: 13008
  source 1..80: mol_type = other DNA

SEQ ID NO: 197739 - DNA, 80 bp, synthetic construct; identical to SEQ ID NO: 13009
  source 1..80: mol_type = other DNA

SEQ ID NO: 197740 - DNA, 80 bp, synthetic construct; identical to SEQ ID NO: 13010
  source 1..80: mol_type = other DNA

SEQ ID NO: 197741 - DNA, 80 bp, synthetic construct; identical to SEQ ID NO: 13011
  source 1..80: mol_type = other DNA

SEQ ID NO: 197742 - DNA, 80 bp, synthetic construct; identical to SEQ ID NO: 13012
  source 1..80: mol_type = other DNA

SEQ ID NO: 197743 - DNA, 80 bp, synthetic construct; identical to SEQ ID NO: 13013
  source 1..80: mol_type = other DNA

SEQ ID NO: 197744 - DNA, 80 bp, synthetic construct; identical to SEQ ID NO: 13014
  source 1..80: mol_type = other DNA

SEQ ID NO: 197745 - DNA, 80 bp, synthetic construct; identical to SEQ ID NO: 13015
  source 1..80: mol_type = other DNA

SEQ ID NO: 197746 - DNA, 80 bp, synthetic construct; identical to SEQ ID NO: 13016
  source 1..80: mol_type = other DNA

SEQ ID NO: 197747 - DNA, 80 bp, synthetic construct; identical to SEQ ID NO: 13017
  source 1..80: mol_type = other DNA

SEQ ID NO: 197748 - DNA, 80 bp, synthetic construct; identical to SEQ ID NO: 13018
  source 1..80: mol_type = other DNA

SEQ ID NO: 197749 - DNA, 80 bp, synthetic construct; identical to SEQ ID NO: 13019
  source 1..80: mol_type = other DNA

SEQ ID NO: 197750 - DNA, 80 bp, synthetic construct; identical to SEQ ID NO: 13020
  source 1..80: mol_type = other DNA

SEQ ID NO: 197751 - DNA, 80 bp, synthetic construct; identical to SEQ ID NO: 13021
  source 1..80: mol_type = other DNA

SEQ ID NO: 197752 - DNA, 80 bp, synthetic construct; identical to SEQ ID NO: 13022
  source 1..80: mol_type = other DNA

SEQ ID NO: 197753 - DNA, 80 bp, synthetic construct; identical to SEQ ID NO: 13023
  source 1..80: mol_type = other DNA

SEQ ID NO: 197754 - DNA, 80 bp, synthetic construct; identical to SEQ ID NO: 13024
  source 1..80: mol_type = other DNA

SEQ ID NO: 197755 - DNA, 80 bp, synthetic construct; identical to SEQ ID NO: 13025
  source 1..80: mol_type = other DNA

SEQ ID NO: 197756 - DNA, 80 bp, synthetic construct; identical to SEQ ID NO: 13026
  source 1..80: mol_type = other DNA

SEQ ID NO: 197757 - DNA, 80 bp, synthetic construct; identical to SEQ ID NO: 13027
  source 1..80: mol_type = other DNA

SEQ ID NO: 197758 - DNA, 80 bp, synthetic construct; identical to SEQ ID NO: 13028
  source 1..80: mol_type = other DNA

SEQ ID NO: 197759 - DNA, 80 bp, synthetic construct; identical to SEQ ID NO: 13029
  source 1..80: mol_type = other DNA

SEQ ID NO: 197760 - DNA, 80 bp, synthetic construct; identical to SEQ ID NO: 13030
  source 1..80: mol_type = other DNA

SEQ ID NO: 197761 - DNA, 80 bp, synthetic construct; identical to SEQ ID NO: 13031
  source 1..80: mol_type = other DNA

SEQ ID NO: 197762 - DNA, 80 bp, synthetic construct; identical to SEQ ID NO: 13032
  source 1..80: mol_type = other DNA

SEQ ID NO: 197763 - DNA, 80 bp, synthetic construct; identical to SEQ ID NO: 13033
  source 1..80: mol_type = other DNA

SEQ ID NO: 197764 - DNA, 80 bp, synthetic construct; identical to SEQ ID NO: 13034
  source 1..80: mol_type = other DNA

SEQ ID NO: 197765 - DNA, 80 bp, synthetic construct; identical to SEQ ID NO: 13035
  source 1..80: mol_type = other DNA

SEQ ID NO: 197766 - DNA, 80 bp, synthetic construct; identical to SEQ ID NO: 13036
  source 1..80: mol_type = other DNA

SEQ ID NO: 197767 - DNA, 80 bp, synthetic construct; identical to SEQ ID NO: 13037
  source 1..80: mol_type = other DNA

SEQ ID NO: 197768 - DNA, 80 bp, synthetic construct; identical to SEQ ID NO: 13038
  source 1..80: mol_type = other DNA

SEQ ID NO: 197769 - DNA, 80 bp, synthetic construct; identical to SEQ ID NO: 13039
  source 1..80: mol_type = other DNA

SEQ ID NO: 197770 - DNA, 80 bp, synthetic construct; identical to SEQ ID NO: 13040
  source 1..80: mol_type = other DNA

SEQ ID NO: 197771 - DNA, 80 bp, synthetic construct; identical to SEQ ID NO: 13041
  source 1..80: mol_type = other DNA

SEQ ID NO: 197772 - DNA, 80 bp, synthetic construct; identical to SEQ ID NO: 13042
  source 1..80: mol_type = other DNA

SEQ ID NO: 197773 - DNA, 80 bp, synthetic construct; identical to SEQ ID NO: 13043
  source 1..80: mol_type = other DNA

SEQ ID NO: 197774 - DNA, 80 bp, synthetic construct; identical to SEQ ID NO: 13044
  source 1..80: mol_type = other DNA

SEQ ID NO: 197775 - DNA, 80 bp, synthetic construct; identical to SEQ ID NO: 13045
  source 1..80: mol_type = other DNA

SEQ ID NO: 197776 - DNA, 80 bp, synthetic construct; identical to SEQ ID NO: 13046
  source 1..80: mol_type = other DNA

SEQ ID NO: 197777 - DNA, 80 bp, synthetic construct; identical to SEQ ID NO: 13047
  source 1..80: mol_type = other DNA

SEQ ID NO: 197778 - DNA, 80 bp, synthetic construct; identical to SEQ ID NO: 13048
  source 1..80: mol_type = other DNA

SEQ ID NO: 197779 - DNA, 80 bp, synthetic construct; identical to SEQ ID NO: 13049
  source 1..80: mol_type = other DNA

SEQ ID NO: 197780 - DNA, 80 bp, synthetic construct; identical to SEQ ID NO: 13050
  source 1..80: mol_type = other DNA

SEQ ID NO: 197781 - DNA, 80 bp, synthetic construct; identical to SEQ ID NO: 13051
  source 1..80: mol_type = other DNA

SEQ ID NO: 197782 - DNA, 80 bp, synthetic construct; identical to SEQ ID NO: 13052
  source 1..80: mol_type = other DNA

SEQ ID NO: 197783 - DNA, 80 bp, synthetic construct; identical to SEQ ID NO: 13053
  source 1..80: mol_type = other DNA

SEQ ID NO: 197784 - DNA, 80 bp, synthetic construct; identical to SEQ ID NO: 13054
  source 1..80: mol_type = other DNA

SEQ ID NO: 197785 - DNA, 80 bp, synthetic construct; identical to SEQ ID NO: 13055
  source 1..80: mol_type = other DNA

SEQ ID NO: 197786 - DNA, 80 bp, synthetic construct; identical to SEQ ID NO: 13056
  source 1..80: mol_type = other DNA

SEQ ID NO: 197787 - DNA, 80 bp, synthetic construct; identical to SEQ ID NO: 13057
  source 1..80: mol_type = other DNA

SEQ ID NO: 197788 - DNA, 80 bp, synthetic construct; identical to SEQ ID NO: 13058
  source 1..80: mol_type = other DNA

SEQ ID NO: 197789 - DNA, 80 bp, synthetic construct; identical to SEQ ID NO: 13059
  source 1..80: mol_type = other DNA

SEQ ID NO: 197790 - DNA, 80 bp, synthetic construct; identical to SEQ ID NO: 13060
  source 1..80: mol_type = other DNA

SEQ ID NO: 197791 - DNA, 80 bp, synthetic construct; identical to SEQ ID NO: 13061
  source 1..80: mol_type = other DNA

SEQ ID NO: 197792 - DNA, 80 bp, synthetic construct; identical to SEQ ID NO: 13062
  source 1..80: mol_type = other DNA

SEQ ID NO: 197793 - DNA, 80 bp, synthetic construct; identical to SEQ ID NO: 13063
  source 1..80: mol_type = other DNA

SEQ ID NO: 197794 - DNA, 80 bp, synthetic construct; identical to SEQ ID NO: 13064
  source 1..80: mol_type = other DNA

SEQ ID NO: 197795 - DNA, 80 bp, synthetic construct; identical to SEQ ID NO: 13065
  source 1..80: mol_type = other DNA

SEQ ID NO: 197796 - DNA, 80 bp, synthetic construct; identical to SEQ ID NO: 13066
  source 1..80: mol_type = other DNA

SEQ ID NO: 197797 - DNA, 80 bp, synthetic construct; identical to SEQ ID NO: 13067
  source 1..80: mol_type = other DNA

SEQ ID NO: 197798 - DNA, 80 bp, synthetic construct; identical to SEQ ID NO: 13068
  source 1..80: mol_type = other DNA

SEQ ID NO: 197799 - DNA, 80 bp, synthetic construct; identical to SEQ ID NO: 13069
  source 1..80: mol_type = other DNA

SEQ ID NO: 197800 - DNA, 80 bp, synthetic construct; identical to SEQ ID NO: 13070
  source 1..80: mol_type = other DNA

SEQ ID NO: 197801 - DNA, 80 bp, synthetic construct; identical to SEQ ID NO: 13071
  source 1..80: mol_type = other DNA

SEQ ID NO: 197802 - DNA, 80 bp, synthetic construct; identical to SEQ ID NO: 13072
  source 1..80: mol_type = other DNA

SEQ ID NO: 197803 - DNA, 80 bp, synthetic construct; identical to SEQ ID NO: 13073
  source 1..80: mol_type = other DNA

SEQ ID NO: 197804 - DNA, 80 bp, synthetic construct; identical to SEQ ID NO: 13074
  source 1..80: mol_type = other DNA

SEQ ID NO: 197805 - DNA, 80 bp, synthetic construct; identical to SEQ ID NO: 13075
  source 1..80: mol_type = other DNA

SEQ ID NO: 197806 - DNA, 80 bp, synthetic construct; identical to SEQ ID NO: 13076
  source 1..80: mol_type = other DNA

SEQ ID NO: 197807 - DNA, 80 bp, synthetic construct; identical to SEQ ID NO: 13077
  source 1..80: mol_type = other DNA

SEQ ID NO: 197808 - DNA, 80 bp, synthetic construct; identical to SEQ ID NO: 13078
  source 1..80: mol_type = other DNA

SEQ ID NO: 197809 - DNA, 80 bp, synthetic construct; identical to SEQ ID NO: 13079
  source 1..80: mol_type = other DNA

SEQ ID NO: 197810 - DNA, 80 bp, synthetic construct; identical to SEQ ID NO: 13080
  source 1..80: mol_type = other DNA

SEQ ID NO: 197811 - DNA, 80 bp, synthetic construct; identical to SEQ ID NO: 13081
  source 1..80: mol_type = other DNA

SEQ ID NO: 197812 - DNA, 80 bp, synthetic construct; identical to SEQ ID NO: 13082
  source 1..80: mol_type = other DNA

SEQ ID NO: 197813 - DNA, 80 bp, synthetic construct; identical to SEQ ID NO: 13083
  source 1..80: mol_type = other DNA

SEQ ID NO: 197814 - DNA, 80 bp, synthetic construct; identical to SEQ ID NO: 13084
  source 1..80: mol_type = other DNA

SEQ ID NO: 197815 - DNA, 80 bp, synthetic construct; identical to SEQ ID NO: 13085
  source 1..80: mol_type = other DNA

SEQ ID NO: 197816 - DNA, 80 bp, synthetic construct; identical to SEQ ID NO: 13086
  source 1..80: mol_type = other DNA

SEQ ID NO: 197817 - DNA, 80 bp, synthetic construct; identical to SEQ ID NO: 13087
  source 1..80: mol_type = other DNA

SEQ ID NO: 197818 - DNA, 80 bp, synthetic construct; identical to SEQ ID NO: 13088
  source 1..80: mol_type = other DNA

SEQ ID NO: 197819 - DNA, 80 bp, synthetic construct; identical to SEQ ID NO: 13089
  source 1..80: mol_type = other DNA

SEQ ID NO: 197820 - DNA, 80 bp, synthetic construct; identical to SEQ ID NO: 13090
  source 1..80: mol_type = other DNA

SEQ ID NO: 197821 - DNA, 80 bp, synthetic construct; identical to SEQ ID NO: 13091
  source 1..80: mol_type = other DNA

SEQ ID NO: 197822 - DNA, 80 bp, synthetic construct; identical to SEQ ID NO: 13092
  source 1..80: mol_type = other DNA

SEQ ID NO: 197823 - DNA, 80 bp, synthetic construct; identical to SEQ ID NO: 13093
  source 1..80: mol_type = other DNA

SEQ ID NO: 197824 - DNA, 80 bp, synthetic construct; identical to SEQ ID NO: 13094
  source 1..80: mol_type = other DNA

SEQ ID NO: 197825 - DNA, 80 bp, synthetic construct; identical to SEQ ID NO: 13095
  source 1..80: mol_type = other DNA

SEQ ID NO: 197826 - DNA, 80 bp, synthetic construct; identical to SEQ ID NO: 13096
  source 1..80: mol_type = other DNA

SEQ ID NO: 197827 - DNA, 80 bp, synthetic construct; identical to SEQ ID NO: 13097
  source 1..80: mol_type = other DNA

SEQ ID NO: 197828 - DNA, 80 bp, synthetic construct; identical to SEQ ID NO: 13098
  source 1..80: mol_type = other DNA

SEQ ID NO: 197829 - DNA, 80 bp, synthetic construct; identical to SEQ ID NO: 13099
  source 1..80: mol_type = other DNA

SEQ ID NO: 197830 - DNA, 80 bp, synthetic construct; identical to SEQ ID NO: 13100
  source 1..80: mol_type = other DNA

SEQ ID NO: 197831 - DNA, 80 bp, synthetic construct; identical to SEQ ID NO: 13101
  source 1..80: mol_type = other DNA

SEQ ID NO: 197832 - DNA, 80 bp, synthetic construct; identical to SEQ ID NO: 13102
  source 1..80: mol_type = other DNA

SEQ ID NO: 197833 - DNA, 80 bp, synthetic construct; identical to SEQ ID NO: 13103
  source 1..80: mol_type = other DNA

SEQ ID NO: 197834 - DNA, 80 bp, synthetic construct; identical to SEQ ID NO: 13104
  source 1..80: mol_type = other DNA

SEQ ID NO: 197835 - DNA, 80 bp, synthetic construct; identical to SEQ ID NO: 13105
  source 1..80: mol_type = other DNA

SEQ ID NO: 197836 - DNA, 80 bp, synthetic construct; identical to SEQ ID NO: 13106
  source 1..80: mol_type = other DNA

SEQ ID NO: 197837 - DNA, 80 bp, synthetic construct; identical to SEQ ID NO: 13107
  source 1..80: mol_type = other DNA

SEQ ID NO: 197838 - DNA, 80 bp, synthetic construct; identical to SEQ ID NO: 13108
  source 1..80: mol_type = other DNA

SEQ ID NO: 197839 - DNA, 80 bp, synthetic construct; identical to SEQ ID NO: 13109
  source 1..80: mol_type = other DNA

SEQ ID NO: 197840 - DNA, 80 bp, synthetic construct; identical to SEQ ID NO: 13110
  source 1..80: mol_type = other DNA

SEQ ID NO: 197841 - DNA, 80 bp, synthetic construct; identical to SEQ ID NO: 13111
  source 1..80: mol_type = other DNA

SEQ ID NO: 197842 - DNA, 80 bp, synthetic construct; identical to SEQ ID NO: 13112
  source 1..80: mol_type = other DNA

SEQ ID NO: 197843 - DNA, 80 bp, synthetic construct; identical to SEQ ID NO: 13113
  source 1..80: mol_type = other DNA

SEQ ID NO: 197844 - DNA, 80 bp, synthetic construct; identical to SEQ ID NO: 13114
  source 1..80: mol_type = other DNA

SEQ ID NO: 197845 - DNA, 80 bp, synthetic construct; identical to SEQ ID NO: 13115
  source 1..80: mol_type = other DNA

SEQ ID NO: 197846 - DNA, 80 bp, synthetic construct; identical to SEQ ID NO: 13116
  source 1..80: mol_type = other DNA

SEQ ID NO: 197847 - DNA, 80 bp, synthetic construct; identical to SEQ ID NO: 13117
  source 1..80: mol_type = other DNA

SEQ ID NO: 197848 - DNA, 80 bp, synthetic construct; identical to SEQ ID NO: 13118
  source 1..80: mol_type = other DNA

SEQ ID NO: 197849 - DNA, 80 bp, synthetic construct; identical to SEQ ID NO: 13119
  source 1..80: mol_type = other DNA

SEQ ID NO: 197850 - DNA, 80 bp, synthetic construct; identical to SEQ ID NO: 13120
  source 1..80: mol_type = other DNA

SEQ ID NO: 197851 - DNA, 80 bp, synthetic construct; identical to SEQ ID NO: 13121
  source 1..80: mol_type = other DNA

SEQ ID NO: 197852 - DNA, 80 bp, synthetic construct; identical to SEQ ID NO: 13122
  source 1..80: mol_type = other DNA

SEQ ID NO: 197853 - DNA, 80 bp, synthetic construct; identical to SEQ ID NO: 13123
  source 1..80: mol_type = other DNA

SEQ ID NO: 197854 - DNA, 80 bp, synthetic construct; identical to SEQ ID NO: 13124
  source 1..80: mol_type = other DNA

SEQ ID NO: 197855 - DNA, 80 bp, synthetic construct; identical to SEQ ID NO: 13125
  source 1..80: mol_type = other DNA

SEQ ID NO: 197856 - DNA, 80 bp, synthetic construct; identical to SEQ ID NO: 13126
  source 1..80: mol_type = other DNA

SEQ ID NO: 197857 - DNA, 80 bp, synthetic construct; identical to SEQ ID NO: 13127
  source 1..80: mol_type = other DNA

SEQ ID NO: 197858 - DNA, 80 bp, synthetic construct; identical to SEQ ID NO: 13128
  source 1..80: mol_type = other DNA

SEQ ID NO: 197859 - DNA, 80 bp, synthetic construct; identical to SEQ ID NO: 13129
  source 1..80: mol_type = other DNA

SEQ ID NO: 197860 - DNA, 80 bp, synthetic construct; identical to SEQ ID NO: 13130
  source 1..80: mol_type = other DNA

SEQ ID NO: 197861 - DNA, 80 bp, synthetic construct; identical to SEQ ID NO: 13131
  source 1..80: mol_type = other DNA

SEQ ID NO: 197862 - DNA, 80 bp, synthetic construct; identical to SEQ ID NO: 13132
  source 1..80: mol_type = other DNA

SEQ ID NO: 197863 - DNA, 80 bp, synthetic construct; identical to SEQ ID NO: 13133
  source 1..80: mol_type = other DNA

SEQ ID NO: 197864 - DNA, 80 bp, synthetic construct; identical to SEQ ID NO: 13134
  source 1..80: mol_type = other DNA

SEQ ID NO: 197865 - DNA, 80 bp, synthetic construct; identical to SEQ ID NO: 13135
  source 1..80: mol_type = other DNA

SEQ ID NO: 197866 - DNA, 80 bp, synthetic construct; identical to SEQ ID NO: 13136
  source 1..80: mol_type = other DNA

SEQ ID NO: 197867 - DNA, 80 bp, synthetic construct; identical to SEQ ID NO: 13137
  source 1..80: mol_type = other DNA

SEQ ID NO: 197868 - DNA, 80 bp, synthetic construct; identical to SEQ ID NO: 13138
  source 1..80: mol_type = other DNA

SEQ ID NO: 197869 - DNA, 80 bp, synthetic construct; identical to SEQ ID NO: 13139
  source 1..80: mol_type = other DNA

SEQ ID NO: 197870 - DNA, 80 bp, synthetic construct; identical to SEQ ID NO: 13140
  source 1..80: mol_type = other DNA

SEQ ID NO: 197871 - DNA, 80 bp, synthetic construct; identical to SEQ ID NO: 13141
  source 1..80: mol_type = other DNA

SEQ ID NO: 197872 - DNA, 80 bp, synthetic construct; identical to SEQ ID NO: 13142
  source 1..80: mol_type = other DNA

SEQ ID NO: 197873 - DNA, 80 bp, synthetic construct; identical to SEQ ID NO: 13143
  source 1..80: mol_type = other DNA

SEQ ID NO: 197874 - DNA, 80 bp, synthetic construct; identical to SEQ ID NO: 13144
  source 1..80: mol_type = other DNA

SEQ ID NO: 197875 - DNA, 80 bp, synthetic construct; identical to SEQ ID NO: 13145
  source 1..80: mol_type = other DNA

SEQ ID NO: 197876 - DNA, 80 bp, synthetic construct; identical to SEQ ID NO: 13146
  source 1..80: mol_type = other DNA

SEQ ID NO: 197877 - DNA, 80 bp, synthetic construct; identical to SEQ ID NO: 13147
  source 1..80: mol_type = other DNA

SEQ ID NO: 197878 - DNA, 80 bp, synthetic construct; identical to SEQ ID NO: 13148
  source 1..80: mol_type = other DNA

SEQ ID NO: 197879 - DNA, 80 bp, synthetic construct; identical to SEQ ID NO: 13149
  source 1..80: mol_type = other DNA

SEQ ID NO: 197880 - DNA, 80 bp, synthetic construct; identical to SEQ ID NO: 13150
  source 1..80: mol_type = other DNA

SEQ ID NO: 197881 - DNA, 80 bp, synthetic construct; identical to SEQ ID NO: 13151
  source 1..80: mol_type = other DNA

SEQ ID NO: 197882 - DNA, 80 bp, synthetic construct; identical to SEQ ID NO: 13152
  source 1..80: mol_type = other DNA

SEQ ID NO: 197883 - DNA, 80 bp, synthetic construct; identical to SEQ ID NO: 13153
  source 1..80: mol_type = other DNA

SEQ ID NO: 197884 - DNA, 80 bp, synthetic construct; identical to SEQ ID NO: 13154
  source 1..80: mol_type = other DNA

SEQ ID NO: 197885 - DNA, 80 bp, synthetic construct; identical to SEQ ID NO: 13155
  source 1..80: mol_type = other DNA

SEQ ID NO: 197886 - DNA, 80 bp, synthetic construct; identical to SEQ ID NO: 13156
  source 1..80: mol_type = other DNA

SEQ ID NO: 197887 - DNA, 80 bp, synthetic construct; identical to SEQ ID NO: 13157
  source 1..80: mol_type = other DNA

SEQ ID NO: 197888 - DNA, 80 bp, synthetic construct; identical to SEQ ID NO: 13158
  source 1..80: mol_type = other DNA

SEQ ID NO: 197889 - DNA, 80 bp, synthetic construct; identical to SEQ ID NO: 13159
  source 1..80: mol_type = other DNA

SEQ ID NO: 197890 - DNA, 80 bp, synthetic construct; identical to SEQ ID NO: 13160
  source 1..80: mol_type = other DNA

SEQ ID NO: 197891 - DNA, 80 bp, synthetic construct; identical to SEQ ID NO: 13161
  source 1..80: mol_type = other DNA

SEQ ID NO: 197892 - DNA, 80 bp, synthetic construct; identical to SEQ ID NO: 13162
  source 1..80: mol_type = other DNA

SEQ ID NO: 197893 - DNA, 80 bp, synthetic construct; identical to SEQ ID NO: 13163
  source 1..80: mol_type = other DNA

SEQ ID NO: 197894 - DNA, 80 bp, synthetic construct; identical to SEQ ID NO: 13164
  source 1..80: mol_type = other DNA

SEQ ID NO: 197895 - DNA, 80 bp, synthetic construct; identical to SEQ ID NO: 13165
  source 1..80: mol_type = other DNA

SEQ ID NO: 197896 - DNA, 80 bp, synthetic construct; identical to SEQ ID NO: 13166
  source 1..80: mol_type = other DNA

SEQ ID NO: 197897 - DNA, 80 bp, synthetic construct; identical to SEQ ID NO: 13167
  source 1..80: mol_type = other DNA

SEQ ID NO: 197898 - DNA, 80 bp, synthetic construct; identical to SEQ ID NO: 13168
  source 1..80: mol_type = other DNA

SEQ ID NO: 197899 - DNA, 80 bp, synthetic construct; identical to SEQ ID NO: 13169
  source 1..80: mol_type = other DNA

SEQ ID NO: 197900 - DNA, 80 bp, synthetic construct; identical to SEQ ID NO: 13170
  source 1..80: mol_type = other DNA

SEQ ID NO: 197901 - DNA, 80 bp, synthetic construct; identical to SEQ ID NO: 13171
  source 1..80: mol_type = other DNA

SEQ ID NO: 197902 - DNA, 80 bp, synthetic construct; identical to SEQ ID NO: 13172
  source 1..80: mol_type = other DNA

SEQ ID NO: 197903 - DNA, 80 bp, synthetic construct; identical to SEQ ID NO: 13173
  source 1..80: mol_type = other DNA

SEQ ID NO: 197904 - DNA, 80 bp, synthetic construct; identical to SEQ ID NO: 13174
  source 1..80: mol_type = other DNA

SEQ ID NO: 197905 - DNA, 80 bp, synthetic construct; identical to SEQ ID NO: 13175
  source 1..80: mol_type = other DNA

SEQ ID NO: 197906 - DNA, 80 bp, synthetic construct; identical to SEQ ID NO: 13176
  source 1..80: mol_type = other DNA

SEQ ID NO: 197907 - DNA, 80 bp, synthetic construct; identical to SEQ ID NO: 13177
  source 1..80: mol_type = other DNA

SEQ ID NO: 197908 - DNA, 80 bp, synthetic construct; identical to SEQ ID NO: 13178
  source 1..80: mol_type = other DNA

SEQ ID NO: 197909 - DNA, 80 bp, synthetic construct; identical to SEQ ID NO: 13179
  source 1..80: mol_type = other DNA

SEQ ID NO: 197910 - DNA, 80 bp, synthetic construct; identical to SEQ ID NO: 13180
  source 1..80: mol_type = other DNA

SEQ ID NO: 197911 - DNA, 80 bp, synthetic construct; identical to SEQ ID NO: 13181
  source 1..80: mol_type = other DNA

SEQ ID NO: 197912 - DNA, 80 bp, synthetic construct; identical to SEQ ID NO: 13182
  source 1..80: mol_type = other DNA

SEQ ID NO: 197913 - DNA, 80 bp, synthetic construct; identical to SEQ ID NO: 13183
  source 1..80: mol_type = other DNA

SEQ ID NO: 197914 - DNA, 80 bp, synthetic construct; identical to SEQ ID NO: 13184
  source 1..80: mol_type = other DNA

SEQ ID NO: 197915 - DNA, 80 bp, synthetic construct; identical to SEQ ID NO: 13185
  source 1..80: mol_type = other DNA

SEQ ID NO: 197916 - DNA, 80 bp, synthetic construct; identical to SEQ ID NO: 13186
  source 1..80: mol_type = other DNA

SEQ ID NO: 197917 - DNA, 80 bp, synthetic construct; identical to SEQ ID NO: 13187
  source 1..80: mol_type = other DNA

SEQ ID NO: 197918 - DNA, 80 bp, synthetic construct; identical to SEQ ID NO: 13188
  source 1..80: mol_type = other DNA

SEQ ID NO: 197919 - DNA, 80 bp, synthetic construct; identical to SEQ ID NO: 13189
  source 1..80: mol_type = other DNA

SEQ ID NO: 197920 - DNA, 80 bp, synthetic construct; identical to SEQ ID NO: 13190
  source 1..80: mol_type = other DNA

SEQ ID NO: 197921 - DNA, 80 bp, synthetic construct; identical to SEQ ID NO: 13191
  source 1..80: mol_type = other DNA

SEQ ID NO: 197922 - DNA, 80 bp, synthetic construct; identical to SEQ ID NO: 13192
  source 1..80: mol_type = other DNA

SEQ ID NO: 197923 - DNA, 80 bp, synthetic construct; identical to SEQ ID NO: 13193
  source 1..80: mol_type = other DNA

SEQ ID NO: 197924 - DNA, 80 bp, synthetic construct; identical to SEQ ID NO: 13194
  source 1..80: mol_type = other DNA

SEQ ID NO: 197925 - DNA, 80 bp, synthetic construct; identical to SEQ ID NO: 13195
  source 1..80: mol_type = other DNA

SEQ ID NO: 197926 - DNA, 80 bp, synthetic construct; identical to SEQ ID NO: 13196
  source 1..80: mol_type = other DNA

SEQ ID NO: 197927 - DNA, 80 bp, synthetic construct; identical to SEQ ID NO: 13197
  source 1..80: mol_type = other DNA

SEQ ID NO: 197928 - DNA, 80 bp, synthetic construct; identical to SEQ ID NO: 13198
  source 1..80: mol_type = other DNA

SEQ ID NO: 197929 - DNA, 80 bp, synthetic construct; identical to SEQ ID NO: 13199
  source 1..80: mol_type = other DNA

SEQ ID NO: 197930 - DNA, 80 bp, synthetic construct; identical to SEQ ID NO: 13200
  source 1..80: mol_type = other DNA

SEQ ID NO: 197931 - DNA, 80 bp, synthetic construct; identical to SEQ ID NO: 13201
  source 1..80: mol_type = other DNA

SEQ ID NO: 197932 - DNA, 80 bp, synthetic construct; identical to SEQ ID NO: 13202
  source 1..80: mol_type = other DNA

SEQ ID NO: 197933 - DNA, 80 bp, synthetic construct; identical to SEQ ID NO: 13203
  source 1..80: mol_type = other DNA

SEQ ID NO: 197934 - DNA, 80 bp, synthetic construct; identical to SEQ ID NO: 13204
  source 1..80: mol_type = other DNA

SEQ ID NO: 197935 - DNA, 80 bp, synthetic construct; identical to SEQ ID NO: 13205
  source 1..80: mol_type = other DNA

SEQ ID NO: 197936 - DNA, 80 bp, synthetic construct; identical to SEQ ID NO: 13206
  source 1..80: mol_type = other DNA

SEQ ID NO: 197937 - DNA, 80 bp, synthetic construct; identical to SEQ ID NO: 13207
  source 1..80: mol_type = other DNA

SEQ ID NO: 197938 - DNA, 80 bp, synthetic construct; identical to SEQ ID NO: 13208
  source 1..80: mol_type = other DNA

SEQ ID NO: 197939 - DNA, 80 bp, synthetic construct; identical to SEQ ID NO: 13209
  source 1..80: mol_type = other DNA

SEQ ID NO: 197940 - DNA, 80 bp, synthetic construct; identical to SEQ ID NO: 13210
  source 1..80: mol_type = other DNA

SEQ ID NO: 197941 - DNA, 80 bp, synthetic construct; identical to SEQ ID NO: 13211
  source 1..80: mol_type = other DNA

SEQ ID NO: 197942 - DNA, 80 bp, synthetic construct; identical to SEQ ID NO: 13212
  source 1..80: mol_type = other DNA

SEQ ID NO: 197943 - DNA, 80 bp, synthetic construct; identical to SEQ ID NO: 13213
  source 1..80: mol_type = other DNA

SEQ ID NO: 197944 - DNA, 80 bp, synthetic construct; identical to SEQ ID NO: 13214
  source 1..80: mol_type = other DNA

SEQ ID NO: 197945 - DNA, 80 bp, synthetic construct; identical to SEQ ID NO: 13215
  source 1..80: mol_type = other DNA

SEQ ID NO: 197946 - DNA, 80 bp, synthetic construct; identical to SEQ ID NO: 13216
  source 1..80: mol_type = other DNA

SEQ ID NO: 197947 - DNA, 80 bp, synthetic construct; identical to SEQ ID NO: 13217
  source 1..80: mol_type = other DNA

SEQ ID NO: 197948 - DNA, 80 bp, synthetic construct; identical to SEQ ID NO: 13218
  source 1..80: mol_type = other DNA

SEQ ID NO: 197949 - DNA, 80 bp, synthetic construct; identical to SEQ ID NO: 13219
  source 1..80: mol_type = other DNA

SEQ ID NO: 197950 - DNA, 80 bp, synthetic construct; identical to SEQ ID NO: 13220
  source 1..80: mol_type = other DNA

SEQ ID NO: 197951 - DNA, 80 bp, synthetic construct; identical to SEQ ID NO: 13221
  source 1..80: mol_type = other DNA

SEQ ID NO: 197952 - DNA, 80 bp, synthetic construct; identical to SEQ ID NO: 13222
  source 1..80: mol_type = other DNA

SEQ ID NO: 197953 - DNA, 80 bp, synthetic construct; identical to SEQ ID NO: 13223
  source 1..80: mol_type = other DNA

SEQ ID NO: 197954 - DNA, 80 bp, synthetic construct; identical to SEQ ID NO: 13224
  source 1..80: mol_type = other DNA

SEQ ID NO: 197955 - DNA, 80 bp, synthetic construct; identical to SEQ ID NO: 13225
  source 1..80: mol_type = other DNA

SEQ ID NO: 197956 - DNA, 80 bp, synthetic construct; identical to SEQ ID NO: 13226
  source 1..80: mol_type = other DNA

SEQ ID NO: 197957 - DNA, 80 bp, synthetic construct; identical to SEQ ID NO: 13227
  source 1..80: mol_type = other DNA

SEQ ID NO: 197958 - DNA, 80 bp, synthetic construct; identical to SEQ ID NO: 13228
  source 1..80: mol_type = other DNA

SEQ ID NO: 197959 - DNA, 80 bp, synthetic construct; identical to SEQ ID NO: 13229
  source 1..80: mol_type = other DNA

SEQ ID NO: 197960 - DNA, 80 bp, synthetic construct; identical to SEQ ID NO: 13230
  source 1..80: mol_type = other DNA

SEQ ID NO: 197961 - DNA, 80 bp, synthetic construct; identical to SEQ ID NO: 13231
  source 1..80: mol_type = other DNA

SEQ ID NO: 197962 - DNA, 80 bp, synthetic construct; identical to SEQ ID NO: 13232
  source 1..80: mol_type = other DNA

SEQ ID NO: 197963 - DNA, 80 bp, synthetic construct; identical to SEQ ID NO: 13233
  source 1..80: mol_type = other DNA

SEQ ID NO: 197964 - DNA, 80 bp, synthetic construct; identical to SEQ ID NO: 13234
  source 1..80: mol_type = other DNA

SEQ ID NO: 197965 - DNA, 80 bp, synthetic construct; identical to SEQ ID NO: 13235
  source 1..80: mol_type = other DNA

SEQ ID NO: 197966 - DNA, 80 bp, synthetic construct; identical to SEQ ID NO: 13236
  source 1..80: mol_type = other DNA

SEQ ID NO: 197967 - DNA, 80 bp, synthetic construct; identical to SEQ ID NO: 13237
  source 1..80: mol_type = other DNA

SEQ ID NO: 197968 - DNA, 80 bp, synthetic construct; identical to SEQ ID NO: 13238
  source 1..80: mol_type = other DNA

SEQ ID NO: 197969 - DNA, 80 bp, synthetic construct; identical to SEQ ID NO: 13239
  source 1..80: mol_type = other DNA

SEQ ID NO: 197970 - DNA, 80 bp, synthetic construct; identical to SEQ ID NO: 13240
  source 1..80: mol_type = other DNA

SEQ ID NO: 197971 - DNA, 80 bp, synthetic construct; identical to SEQ ID NO: 13241
  source 1..80: mol_type = other DNA

SEQ ID NO: 197972 - DNA, 80 bp, synthetic construct; identical to SEQ ID NO: 13242
  source 1..80: mol_type = other DNA

SEQ ID NO: 197973 - DNA, 80 bp, synthetic construct; identical to SEQ ID NO: 13243
  source 1..80: mol_type = other DNA

SEQ ID NO: 197974 - DNA, 80 bp, synthetic construct; identical to SEQ ID NO: 13244
  source 1..80: mol_type = other DNA

SEQ ID NO: 197975 - DNA, 80 bp, synthetic construct; identical to SEQ ID NO: 13245
  source 1..80: mol_type = other DNA

SEQ ID NO: 197976 - DNA, 80 bp, synthetic construct; identical to SEQ ID NO: 13246
  source 1..80: mol_type = other DNA

SEQ ID NO: 197977 - DNA, 80 bp, synthetic construct; identical to SEQ ID NO: 13247
  source 1..80: mol_type = other DNA

SEQ ID NO: 197978 - DNA, 80 bp, synthetic construct; identical to SEQ ID NO: 13248
  source 1..80: mol_type = other DNA

SEQ ID NO: 197979 - DNA, 80 bp, synthetic construct; identical to SEQ ID NO: 13249
  source 1..80: mol_type = other DNA

SEQ ID NO: 197980 - DNA, 80 bp, synthetic construct; identical to SEQ ID NO: 13250
  source 1..80: mol_type = other DNA

SEQ ID NO: 197981 - DNA, 80 bp, synthetic construct; identical to SEQ ID NO: 13251
  source 1..80: mol_type = other DNA

SEQ ID NO: 197982 - DNA, 80 bp, synthetic construct; identical to SEQ ID NO: 13252
  source 1..80: mol_type = other DNA

SEQ ID NO: 197983 - DNA, 80 bp, synthetic construct; identical to SEQ ID NO: 13253
  source 1..80: mol_type = other DNA

SEQ ID NO: 197984 - DNA, 80 bp, synthetic construct; identical to SEQ ID NO: 13254
  source 1..80: mol_type = other DNA

SEQ ID NO: 197985 - DNA, 80 bp, synthetic construct; identical to SEQ ID NO: 13255
  source 1..80: mol_type = other DNA

SEQ ID NO: 197986 - DNA, 80 bp, synthetic construct; identical to SEQ ID NO: 13256
  source 1..80: mol_type = other DNA

SEQ ID NO: 197987 - DNA, 80 bp, synthetic construct; identical to SEQ ID NO: 13257
  source 1..80: mol_type = other DNA

SEQ ID NO: 197988 - DNA, 80 bp, synthetic construct; identical to SEQ ID NO: 13258
  source 1..80: mol_type = other DNA

SEQ ID NO: 197989 - DNA, 80 bp, synthetic construct; identical to SEQ ID NO: 13259
  source 1..80: mol_type = other DNA

SEQ ID NO: 197990 - DNA, 80 bp, synthetic construct; identical to SEQ ID NO: 13260
  source 1..80: mol_type = other DNA

SEQ ID NO: 197991 - DNA, 80 bp, synthetic construct; identical to SEQ ID NO: 13261
  source 1..80: mol_type = other DNA

SEQ ID NO: 197992 - DNA, 80 bp, synthetic construct; identical to SEQ ID NO: 13262
  source 1..80: mol_type = other DNA

SEQ ID NO: 197993 - DNA, 80 bp, synthetic construct; identical to SEQ ID NO: 13263
  source 1..80: mol_type = other DNA

SEQ ID NO: 197994 - DNA, 80 bp, synthetic construct; identical to SEQ ID NO: 13264
  source 1..80: mol_type = other DNA

SEQ ID NO: 197995 - DNA, 80 bp, synthetic construct; identical to SEQ ID NO: 13265
  source 1..80: mol_type = other DNA

SEQ ID NO: 197996 - DNA, 80 bp, synthetic construct; identical to SEQ ID NO: 13266
  source 1..80: mol_type = other DNA

SEQ ID NO: 197997 - DNA, 80 bp, synthetic construct; identical to SEQ ID NO: 13267
  source 1..80: mol_type = other DNA

SEQ ID NO: 197998 - DNA, 80 bp, synthetic construct; identical to SEQ ID NO: 13268
  source 1..80: mol_type = other DNA

SEQ ID NO: 197999 - DNA, 80 bp, synthetic construct; identical to SEQ ID NO: 13269
  source 1..80: mol_type = other DNA

SEQ ID NO: 198000 - DNA, 80 bp, synthetic construct; identical to SEQ ID NO: 13270
  source 1..80: mol_type = other DNA

SEQ ID NO: 198001 - DNA, 80 bp, synthetic construct; identical to SEQ ID NO: 13271
  source 1..80: mol_type = other DNA

SEQ ID NO: 198002 - DNA, 80 bp, synthetic construct; identical to SEQ ID NO: 13272
  source 1..80: mol_type = other DNA

SEQ ID NO: 198003 - DNA, 80 bp, synthetic construct; identical to SEQ ID NO: 13273
  source 1..80: mol_type = other DNA

SEQ ID NO: 198004 - DNA, 80 bp, synthetic construct; identical to SEQ ID NO: 13274
  source 1..80: mol_type = other DNA

SEQ ID NO: 198005 - DNA, 80 bp, synthetic construct; identical to SEQ ID NO: 13275
  source 1..80: mol_type = other DNA

SEQ ID NO: 198006 - DNA, 80 bp, synthetic construct; identical to SEQ ID NO: 13276
  source 1..80: mol_type = other DNA

SEQ ID NO: 198007 - DNA, 80 bp, synthetic construct; identical to SEQ ID NO: 13277
  source 1..80: mol_type = other DNA

SEQ ID NO: 198008 - DNA, 80 bp, synthetic construct; identical to SEQ ID NO: 13278
  source 1..80: mol_type = other DNA

SEQ ID NO: 198009 - DNA, 80 bp, synthetic construct; identical to SEQ ID NO: 13279
  source 1..80: mol_type = other DNA

SEQ ID NO: 198010 - DNA, 80 bp, synthetic construct; identical to SEQ ID NO: 13280
  source 1..80: mol_type = other DNA

SEQ ID NO: 198011 - DNA, 80 bp, synthetic construct; identical to SEQ ID NO: 13281
  source 1..80: mol_type = other DNA

SEQ ID NO: 198012 - DNA, 80 bp, synthetic construct; identical to SEQ ID NO: 13282
  source 1..80: mol_type = other DNA

SEQ ID NO: 198013 - DNA, 80 bp, synthetic construct; identical to SEQ ID NO: 13283
  source 1..80: mol_type = other DNA

SEQ ID NO: 198014 - DNA, 80 bp, synthetic construct; identical to SEQ ID NO: 13284
  source 1..80: mol_type = other DNA

SEQ ID NO: 198015 - DNA, 80 bp, synthetic construct; identical to SEQ ID NO: 13285
  source 1..80: mol_type = other DNA

SEQ ID NO: 198016 - DNA, 80 bp, synthetic construct; identical to SEQ ID NO: 13286
  source 1..80: mol_type = other DNA

SEQ ID NO: 198017 - DNA, 80 bp, synthetic construct; identical to SEQ ID NO: 13287
  source 1..80: mol_type = other DNA

SEQ ID NO: 198018 - DNA, 80 bp, synthetic construct; identical to SEQ ID NO: 13288
  source 1..80: mol_type = other DNA

SEQ ID NO: 198019 - DNA, 80 bp, synthetic construct; identical to SEQ ID NO: 13289
  source 1..80: mol_type = other DNA

SEQ ID NO: 198020 - DNA, 80 bp, synthetic construct; identical to SEQ ID NO: 13290
  source 1..80: mol_type = other DNA

SEQ ID NO: 198021 - DNA, 80 bp, synthetic construct; identical to SEQ ID NO: 13291
  source 1..80: mol_type = other DNA

SEQ ID NO: 198022 - DNA, 80 bp, synthetic construct; identical to SEQ ID NO: 13292
  source 1..80: mol_type = other DNA

SEQ ID NO: 198023 - DNA, 80 bp, synthetic construct; identical to SEQ ID NO: 13293
  source 1..80: mol_type = other DNA

SEQ ID NO: 198024 - DNA, 80 bp, synthetic construct; identical to SEQ ID NO: 13294
  source 1..80: mol_type = other DNA

SEQ ID NO: 198025 - DNA, 80 bp, synthetic construct; identical to SEQ ID NO: 13295
  source 1..80: mol_type = other DNA

SEQ ID NO: 198026 - DNA, 80 bp, synthetic construct; identical to SEQ ID NO: 13296
  source 1..80: mol_type = other DNA

SEQ ID NO: 198027 - DNA, 80 bp, synthetic construct; identical to SEQ ID NO: 13297
  source 1..80: mol_type = other DNA

SEQ ID NO: 198028 - DNA, 80 bp, synthetic construct; identical to SEQ ID NO: 13298
  source 1..80: mol_type = other DNA

SEQ ID NO: 198029 - DNA, 80 bp, synthetic construct; identical to SEQ ID NO: 13299
  source 1..80: mol_type = other DNA

SEQ ID NO: 198030 - DNA, 80 bp, synthetic construct; identical to SEQ ID NO: 13300
  source 1..80: mol_type = other DNA

SEQ ID NO: 198031 - DNA, 80 bp, synthetic construct; identical to SEQ ID NO: 13301
  source 1..80: mol_type = other DNA

SEQ ID NO: 198032 - DNA, 80 bp, synthetic construct; identical to SEQ ID NO: 13302
  source 1..80: mol_type = other DNA

SEQ ID NO: 198033 - DNA, 80 bp, synthetic construct; identical to SEQ ID NO: 13303
  source 1..80: mol_type = other DNA

SEQ ID NO: 198034 - DNA, 80 bp, synthetic construct; identical to SEQ ID NO: 13304
  source 1..80: mol_type = other DNA

SEQ ID NO: 198035 - DNA, 80 bp, synthetic construct; identical to SEQ ID NO: 13305
  source 1..80: mol_type = other DNA

SEQ ID NO: 198036 - DNA, 80 bp, synthetic construct; identical to SEQ ID NO: 13306
  source 1..80: mol_type = other DNA

SEQ ID NO: 198037 - DNA, 80 bp, synthetic construct; identical to SEQ ID NO: 13307
  source 1..80: mol_type = other DNA

SEQ ID NO: 198038 - DNA, 80 bp, synthetic construct; identical to SEQ ID NO: 13308
  source 1..80: mol_type = other DNA

SEQ ID NO: 198039 - DNA, 80 bp, synthetic construct; identical to SEQ ID NO: 13309
  source 1..80: mol_type = other DNA

SEQ ID NO: 198040 - DNA, 80 bp, synthetic construct; identical to SEQ ID NO: 13310
  source 1..80: mol_type = other DNA

SEQ ID NO: 198041 - DNA, 80 bp, synthetic construct; identical to SEQ ID NO: 13311
  source 1..80: mol_type = other DNA

SEQ ID NO: 198042 - DNA, 80 bp, synthetic construct; identical to SEQ ID NO: 13312
  source 1..80: mol_type = other DNA

SEQ ID NO: 198043 - DNA, 80 bp, synthetic construct; identical to SEQ ID NO: 13313
  source 1..80: mol_type = other DNA

SEQ ID NO: 198044 - DNA, 80 bp, synthetic construct; identical to SEQ ID NO: 13314
  source 1..80: mol_type = other DNA

SEQ ID NO: 198045 - DNA, 80 bp, synthetic construct; identical to SEQ ID NO: 13315
  source 1..80: mol_type = other DNA

SEQ ID NO: 198046 - DNA, 80 bp, synthetic construct; identical to SEQ ID NO: 13316
  source 1..80: mol_type = other DNA

SEQ ID NO: 198047 - DNA, 80 bp, synthetic construct; identical to SEQ ID NO: 13317
  source 1..80: mol_type = other DNA

SEQ ID NO: 198048 - DNA, 80 bp, synthetic construct; identical to SEQ ID NO: 13318
  source 1..80: mol_type = other DNA

SEQ ID NO: 198049 - DNA, 80 bp, synthetic construct; identical to SEQ ID NO: 13319
  source 1..80: mol_type = other DNA

SEQ ID NO: 198050 - DNA, 80 bp, synthetic construct; identical to SEQ ID NO: 13320
  source 1..80: mol_type = other DNA

SEQ ID NO: 198051 - DNA, 80 bp, synthetic construct; identical to SEQ ID NO: 13321
  source 1..80: mol_type = other DNA

SEQ ID NO: 198052 - DNA, 80 bp, synthetic construct; identical to SEQ ID NO: 13322
  source 1..80: mol_type = other DNA

SEQ ID NO: 198053 - DNA, 80 bp, synthetic construct; identical to SEQ ID NO: 13323
  source 1..80: mol_type = other DNA

SEQ ID NO: 198054 - DNA, 80 bp, synthetic construct; identical to SEQ ID NO: 13324
  source 1..80: mol_type = other DNA

SEQ ID NO: 198055 - DNA, 80 bp, synthetic construct; identical to SEQ ID NO: 13325
  source 1..80: mol_type = other DNA

SEQ ID NO: 198056 - DNA, 80 bp, synthetic construct; identical to SEQ ID NO: 13326
  source 1..80: mol_type = other DNA

SEQ ID NO: 198057 - DNA, 80 bp, synthetic construct; identical to SEQ ID NO: 13327
  source 1..80: mol_type = other DNA

SEQ ID NO: 198058 - DNA, 80 bp, synthetic construct; identical to SEQ ID NO: 13328
  source 1..80: mol_type = other DNA

SEQ ID NO: 198059 - DNA, 80 bp, synthetic construct; identical to SEQ ID NO: 13329
  source 1..80: mol_type = other DNA

SEQ ID NO: 198060 - DNA, 80 bp, synthetic construct; identical to SEQ ID NO: 13330
  source 1..80: mol_type = other DNA

SEQ ID NO: 198061 - DNA, 80 bp, synthetic construct; identical to SEQ ID NO: 13331
  source 1..80: mol_type = other DNA

SEQ ID NO: 198062 - DNA, 80 bp, synthetic construct; identical to SEQ ID NO: 13332
  source 1..80: mol_type = other DNA

SEQ ID NO: 198063 - DNA, 80 bp, synthetic construct; identical to SEQ ID NO: 13333
  source 1..80: mol_type = other DNA

SEQ ID NO: 198064 - DNA, 80 bp, synthetic construct; identical to SEQ ID NO: 13334
  source 1..80: mol_type = other DNA

SEQ ID NO: 198065 - DNA, 80 bp, synthetic construct; identical to SEQ ID NO: 13335
  source 1..80: mol_type = other DNA

SEQ ID NO: 198066 - DNA, 80 bp, synthetic construct; identical to SEQ ID NO: 13336
  source 1..80: mol_type = other DNA

SEQ ID NO: 198067 - DNA, 80 bp, synthetic construct; identical to SEQ ID NO: 13337
  source 1..80: mol_type = other DNA

SEQ ID NO: 198068 - DNA, 80 bp, synthetic construct; identical to SEQ ID NO: 13338
  source 1..80: mol_type = other DNA

SEQ ID NO: 198069 - DNA, 80 bp, synthetic construct; identical to SEQ ID NO: 13339
  source 1..80: mol_type = other DNA

SEQ ID NO: 198070 - DNA, 80 bp, synthetic construct; identical to SEQ ID NO: 13340
  source 1..80: mol_type = other DNA

SEQ ID NO: 198071 - DNA, 80 bp, synthetic construct; identical to SEQ ID NO: 13341
  source 1..80: mol_type = other DNA

SEQ ID NO: 198072 - DNA, 80 bp, synthetic construct; identical to SEQ ID NO: 13342
  source 1..80: mol_type = other DNA

SEQ ID NO: 198073 - DNA, 80 bp, synthetic construct; identical to SEQ ID NO: 13343
  source 1..80: mol_type = other DNA

SEQ ID NO: 198074 - DNA, 80 bp, synthetic construct; identical to SEQ ID NO: 13344
  source 1..80: mol_type = other DNA

SEQ ID NO: 198075 - DNA, 80 bp, synthetic construct; identical to SEQ ID NO: 13345
  source 1..80: mol_type = other DNA

SEQ ID NO: 198076 - DNA, 80 bp, synthetic construct; identical to SEQ ID NO: 13346
  source 1..80: mol_type = other DNA

SEQ ID NO: 198077 - DNA, 80 bp, synthetic construct; identical to SEQ ID NO: 13347
  source 1..80: mol_type = other DNA

SEQ ID NO: 198078 - DNA, 80 bp, synthetic construct; identical to SEQ ID NO: 13348
  source 1..80: mol_type = other DNA

SEQ ID NO: 198079 - DNA, 80 bp, synthetic construct; identical to SEQ ID NO: 13349
  source 1..80: mol_type = other DNA

SEQ ID NO: 198080 - DNA, 80 bp, synthetic construct; identical to SEQ ID NO: 13350
  source 1..80: mol_type = other DNA

SEQ ID NO: 198081 - DNA, 80 bp, synthetic construct; identical to SEQ ID NO: 13351
  source 1..80: mol_type = other DNA

SEQ ID NO: 198082 - DNA, 80 bp, synthetic construct; identical to SEQ ID NO: 13352
  source 1..80: mol_type = other DNA

SEQ ID NO: 198083 - DNA, 80 bp, synthetic construct; identical to SEQ ID NO: 13353
  source 1..80: mol_type = other DNA

SEQ ID NO: 198084 - DNA, 80 bp, synthetic construct; identical to SEQ ID NO: 13354
  source 1..80: mol_type = other DNA

SEQ ID NO: 198085 - DNA, 80 bp, synthetic construct; identical to SEQ ID NO: 13355
  source 1..80: mol_type = other DNA

SEQ ID NO: 198086 - DNA, 80 bp, synthetic construct; identical to SEQ ID NO: 13356
  source 1..80: mol_type = other DNA

SEQ ID NO: 198087 - DNA, 80 bp, synthetic construct; identical to SEQ ID NO: 13357
  source 1..80: mol_type = other DNA

SEQ ID NO: 198088 - DNA, 80 bp, synthetic construct; identical to SEQ ID NO: 13358
  source 1..80: mol_type = other DNA

SEQ ID NO: 198089 - DNA, 80 bp, synthetic construct; identical to SEQ ID NO: 13359
  source 1..80: mol_type = other DNA

SEQ ID NO: 198090 - DNA, 80 bp, synthetic construct; identical to SEQ ID NO: 13360
  source 1..80: mol_type = other DNA

SEQ ID NO: 198091 - DNA, 80 bp, synthetic construct; identical to SEQ ID NO: 13361
  source 1..80: mol_type = other DNA

SEQ ID NO: 198092 - DNA, 80 bp, synthetic construct; identical to SEQ ID NO: 13362
  source 1..80: mol_type = other DNA

SEQ ID NO: 198093 - DNA, 80 bp, synthetic construct; identical to SEQ ID NO: 13363
  source 1..80: mol_type = other DNA

SEQ ID NO: 198094 - DNA, 80 bp, synthetic construct; identical to SEQ ID NO: 13364
  source 1..80: mol_type = other DNA

SEQ ID NO: 198095 - DNA, 80 bp, synthetic construct; identical to SEQ ID NO: 13365
  source 1..80: mol_type = other DNA

SEQ ID NO: 198096 - DNA, 80 bp, synthetic construct; identical to SEQ ID NO: 13366
  source 1..80: mol_type = other DNA

SEQ ID NO: 198097 - DNA, 80 bp, synthetic construct; identical to SEQ ID NO: 13367
  source 1..80: mol_type = other DNA

SEQ ID NO: 198098 - DNA, 80 bp, synthetic construct; identical to SEQ ID NO: 13368
  source 1..80: mol_type = other DNA

SEQ ID NO: 198099 - DNA, 80 bp, synthetic construct; identical to SEQ ID NO: 13369
  source 1..80: mol_type = other DNA

SEQ ID NO: 198100 - DNA, 80 bp, synthetic construct; identical to SEQ ID NO: 13370
  source 1..80: mol_type = other DNA

SEQ ID NO: 198101 - DNA, 80 bp, synthetic construct; identical to SEQ ID NO: 13371
  source 1..80: mol_type = other DNA

SEQ ID NO: 198102 - DNA, 80 bp, synthetic construct; identical to SEQ ID NO: 13372
  source 1..80: mol_type = other DNA

SEQ ID NO: 198103 - DNA, 80 bp, synthetic construct; identical to SEQ ID NO: 13373
  source 1..80: mol_type = other DNA

SEQ ID NO: 198104 - DNA, 80 bp, synthetic construct; identical to SEQ ID NO: 13374
  source 1..80: mol_type = other DNA

SEQ ID NO: 198105 - DNA, 80 bp, synthetic construct; identical to SEQ ID NO: 13375
  source 1..80: mol_type = other DNA

SEQ ID NO: 198106 - DNA, 80 bp, synthetic construct; identical to SEQ ID NO: 13376
  source 1..80: mol_type = other DNA

SEQ ID NO: 198107 - DNA, 80 bp, synthetic construct; identical to SEQ ID NO: 13377
  source 1..80: mol_type = other DNA

SEQ ID NO: 198108 - DNA, 80 bp, synthetic construct; identical to SEQ ID NO: 13378
  source 1..80: mol_type = other DNA

SEQ ID NO: 198109 - DNA, 80 bp, synthetic construct; identical to SEQ ID NO: 13379
  source 1..80: mol_type = other DNA

SEQ ID NO: 198110 - DNA, 80 bp, synthetic construct; identical to SEQ ID NO: 13380
  source 1..80: mol_type = other DNA

SEQ ID NO: 198111 - DNA, 80 bp, synthetic construct; identical to SEQ ID NO: 13381
  source 1..80: mol_type = other DNA

SEQ ID NO: 198112 - DNA, 80 bp, synthetic construct; identical to SEQ ID NO: 13382
  source 1..80: mol_type = other DNA

SEQ ID NO: 198113 - DNA, 80 bp, synthetic construct; identical to SEQ ID NO: 13383
  source 1..80: mol_type = other DNA

SEQ ID NO: 198114 - DNA, 80 bp, synthetic construct; identical to SEQ ID NO: 13384
  source 1..80: mol_type = other DNA

SEQ ID NO: 198115 - DNA, 80 bp, synthetic construct; identical to SEQ ID NO: 13385
  source 1..80: mol_type = other DNA

SEQ ID NO: 198116 - DNA, 80 bp, synthetic construct; identical to SEQ ID NO: 13386
  source 1..80: mol_type = other DNA

SEQ ID NO: 198117 - DNA, 80 bp, synthetic construct; identical to SEQ ID NO: 13387
  source 1..80: mol_type = other DNA

SEQ ID NO: 198118 - DNA, 80 bp, synthetic construct; identical to SEQ ID NO: 13388
  source 1..80: mol_type = other DNA

SEQ ID NO: 198119 - DNA, 80 bp, synthetic construct; identical to SEQ ID NO: 13389
  source 1..80: mol_type = other DNA

SEQ ID NO: 198120 - DNA, 80 bp, synthetic construct; identical to SEQ ID NO: 13390
  source 1..80: mol_type = other DNA

SEQ ID NO: 198121 - DNA, 80 bp, synthetic construct; identical to SEQ ID NO: 13391
  source 1..80: mol_type = other DNA

SEQ ID NO: 198122 - DNA, 80 bp, synthetic construct; identical to SEQ ID NO: 13392
  source 1..80: mol_type = other DNA

SEQ ID NO: 198123 - DNA, 80 bp, synthetic construct; identical to SEQ ID NO: 13393
  source 1..80: mol_type = other DNA

SEQ ID NO: 198124 - DNA, 80 bp, synthetic construct; identical to SEQ ID NO: 13394
  source 1..80: mol_type = other DNA

SEQ ID NO: 198125 - DNA, 80 bp, synthetic construct; identical to SEQ ID NO: 13395
  source 1..80: mol_type = other DNA

SEQ ID NO: 198126 - DNA, 80 bp, synthetic construct; identical to SEQ ID NO: 13396
  source 1..80: mol_type = other DNA

SEQ ID NO: 198127 - DNA, 80 bp, synthetic construct; identical to SEQ ID NO: 13397
  source 1..80: mol_type = other DNA

SEQ ID NO: 198128 - DNA, 80 bp, synthetic construct; identical to SEQ ID NO: 13398
  source 1..80: mol_type = other DNA

SEQ ID NO: 198129 - DNA, 80 bp, synthetic construct; identical to SEQ ID NO: 13399
  source 1..80: mol_type = other DNA

SEQ ID NO: 198130 - DNA, 80 bp, synthetic construct; identical to SEQ ID NO: 13400
  source 1..80: mol_type = other DNA

SEQ ID NO: 198131 - DNA, 80 bp, synthetic construct; identical to SEQ ID NO: 13401
  source 1..80: mol_type = other DNA

SEQ ID NO: 198132 - DNA, 80 bp, synthetic construct; identical to SEQ ID NO: 13402
  source 1..80: mol_type = other DNA

SEQ ID NO: 198133 - DNA, 80 bp, synthetic construct; identical to SEQ ID NO: 13403
  source 1..80: mol_type = other DNA

SEQ ID NO: 198134 - DNA, 80 bp, synthetic construct; identical to SEQ ID NO: 13404
  source 1..80: mol_type = other DNA

SEQ ID NO: 198135 - DNA, 80 bp, synthetic construct; identical to SEQ ID NO: 13405
  source 1..80: mol_type = other DNA

SEQ ID NO: 198136 - DNA, 80 bp, synthetic construct; identical to SEQ ID NO: 13406
  source 1..80: mol_type = other DNA

SEQ ID NO: 198137 - DNA, 80 bp, synthetic construct; identical to SEQ ID NO: 13407
  source 1..80: mol_type = other DNA

SEQ ID NO: 198138 - DNA, 80 bp, synthetic construct; identical to SEQ ID NO: 13408
  source 1..80: mol_type = other DNA

SEQ ID NO: 198139 - DNA, 80 bp, synthetic construct; identical to SEQ ID NO: 13409
  source 1..80: mol_type = other DNA

SEQ ID NO: 198140 - DNA, 80 bp, synthetic construct; identical to SEQ ID NO: 13410
  source 1..80: mol_type = other DNA

SEQ ID NO: 198141 - DNA, 80 bp, synthetic construct; identical to SEQ ID NO: 13411
  source 1..80: mol_type = other DNA

SEQ ID NO: 198142 - DNA, 80 bp, synthetic construct; identical to SEQ ID NO: 13412
  source 1..80: mol_type = other DNA

SEQ ID NO: 198143 - DNA, 80 bp, synthetic construct; identical to SEQ ID NO: 13413
  source 1..80: mol_type = other DNA

SEQ ID NO: 198144 - DNA, 80 bp, synthetic construct; identical to SEQ ID NO: 13414
  source 1..80: mol_type = other DNA

SEQ ID NO: 198145 - DNA, 80 bp, synthetic construct; identical to SEQ ID NO: 13415
  source 1..80: mol_type = other DNA

SEQ ID NO: 198146 - DNA, 80 bp, synthetic construct; identical to SEQ ID NO: 13416
  source 1..80: mol_type = other DNA

SEQ ID NO: 198147 - DNA, 80 bp, synthetic construct; identical to SEQ ID NO: 13417
  source 1..80: mol_type = other DNA

SEQ ID NO: 198148 - DNA, 80 bp, synthetic construct; identical to SEQ ID NO: 13418
  source 1..80: mol_type = other DNA

SEQ ID NO: 198149 - DNA, 80 bp, synthetic construct; identical to SEQ ID NO: 13419
  source 1..80: mol_type = other DNA

SEQ ID NO: 198150 - DNA, 80 bp, synthetic construct; identical to SEQ ID NO: 13420
  source 1..80: mol_type = other DNA

SEQ ID NO: 198151 - DNA, 80 bp, synthetic construct; identical to SEQ ID NO: 13421
  source 1..80: mol_type = other DNA

SEQ ID NO: 198152 - DNA, 80 bp, synthetic construct; identical to SEQ ID NO: 13422
  source 1..80: mol_type = other DNA

SEQ ID NO: 198153 - DNA, 80 bp, synthetic construct; identical to SEQ ID NO: 13423
  source 1..80: mol_type = other DNA

SEQ ID NO: 198154 - DNA, 80 bp, synthetic construct; identical to SEQ ID NO: 13424
  source 1..80: mol_type = other DNA

SEQ ID NO: 198155 - DNA, 80 bp, synthetic construct; identical to SEQ ID NO: 13425
  source 1..80: mol_type = other DNA

SEQ ID NO: 198156 - DNA, 80 bp, synthetic construct; identical to SEQ ID NO: 13426
  source 1..80: mol_type = other DNA

SEQ ID NO: 198157 - DNA, 80 bp, synthetic construct; identical to SEQ ID NO: 13427
  source 1..80: mol_type = other DNA

SEQ ID NO: 198158 - DNA, 80 bp, synthetic construct; identical to SEQ ID NO: 13428
  source 1..80: mol_type = other DNA

SEQ ID NO: 198159 - DNA, 80 bp, synthetic construct; identical to SEQ ID NO: 13429
  source 1..80: mol_type = other DNA

SEQ ID NO: 198160 - DNA, 80 bp, synthetic construct; identical to SEQ ID NO: 13430
  source 1..80: mol_type = other DNA

SEQ ID NO: 198161 - DNA, 80 bp, synthetic construct; identical to SEQ ID NO: 13431
  source 1..80: mol_type = other DNA

SEQ ID NO: 198162 - DNA, 80 bp, synthetic construct; identical to SEQ ID NO: 13432
  source 1..80: mol_type = other DNA

SEQ ID NO: 198163 - DNA, 80 bp, synthetic construct; identical to SEQ ID NO: 13433
  source 1..80: mol_type = other DNA

SEQ ID NO: 198164 - DNA, 80 bp, synthetic construct; identical to SEQ ID NO: 13434
  source 1..80: mol_type = other DNA

SEQ ID NO: 198165 - DNA, 80 bp, synthetic construct; identical to SEQ ID NO: 13435
  source 1..80: mol_type = other DNA

SEQ ID NO: 198166 - DNA, 80 bp, synthetic construct; identical to SEQ ID NO: 13436
  source 1..80: mol_type = other DNA

SEQ ID NO: 198167 - DNA, 80 bp, synthetic construct; identical to SEQ ID NO: 13437
  source 1..80: mol_type = other DNA

SEQ ID NO: 198168 - DNA, 80 bp, synthetic construct; identical to SEQ ID NO: 13438
  source 1..80: mol_type = other DNA

SEQ ID NO: 198169 - DNA, 80 bp, synthetic construct; identical to SEQ ID NO: 13439
  source 1..80: mol_type = other DNA

SEQ ID NO: 198170 - DNA, 80 bp, synthetic construct; identical to SEQ ID NO: 13440
  source 1..80: mol_type = other DNA

SEQ ID NO: 198171 - DNA, 80 bp, synthetic construct; identical to SEQ ID NO: 13441
  source 1..80: mol_type = other DNA

SEQ ID NO: 198172 - DNA, 80 bp, synthetic construct; identical to SEQ ID NO: 13442
  source 1..80: mol_type = other DNA

SEQ ID NO: 198173 - DNA, 80 bp, synthetic construct; identical to SEQ ID NO: 13443
  source 1..80: mol_type = other DNA

SEQ ID NO: 198174 - DNA, 80 bp, synthetic construct; identical to SEQ ID NO: 13444
  source 1..80: mol_type = other DNA

SEQ ID NO: 198175 - DNA, 80 bp, synthetic construct; identical to SEQ ID NO: 13445
  source 1..80: mol_type = other DNA

SEQ ID NO: 198176 - DNA, 80 bp, synthetic construct; identical to SEQ ID NO: 13446
  source 1..80: mol_type = other DNA

SEQ ID NO: 198177 - DNA, 80 bp, synthetic construct; identical to SEQ ID NO: 13447
  source 1..80: mol_type = other DNA

SEQ ID NO: 198178 - DNA, 80 bp, synthetic construct; identical to SEQ ID NO: 13448
  source 1..80: mol_type = other DNA

SEQ ID NO: 198179 - DNA, 80 bp, synthetic construct; identical to SEQ ID NO: 13449
  source 1..80: mol_type = other DNA

SEQ ID NO: 198180 - DNA, 80 bp, synthetic construct; identical to SEQ ID NO: 13450
  source 1..80: mol_type = other DNA

SEQ ID NO: 198181 - DNA, 80 bp, synthetic construct; identical to SEQ ID NO: 13451
  source 1..80: mol_type = other DNA

SEQ ID NO: 198182 - DNA, 80 bp, synthetic construct; identical to SEQ ID NO: 13452
  source 1..80: mol_type = other DNA

SEQ ID NO: 198183 - DNA, 80 bp, synthetic construct; identical to SEQ ID NO: 13453
  source 1..80: mol_type = other DNA

SEQ ID NO: 198184 - DNA, 80 bp, synthetic construct; identical to SEQ ID NO: 13454
  source 1..80: mol_type = other DNA

SEQ ID NO: 198185 - DNA, 80 bp, synthetic construct; identical to SEQ ID NO: 13455
  source 1..80: mol_type = other DNA

SEQ ID NO: 198186 - DNA, 80 bp, synthetic construct; identical to SEQ ID NO: 13456
  source 1..80: mol_type = other DNA

SEQ ID NO: 198187 - DNA, 80 bp, synthetic construct; identical to SEQ ID NO: 13457
  source 1..80: mol_type = other DNA

SEQ ID NO: 198188 - DNA, 80 bp, synthetic construct; identical to SEQ ID NO: 13458
  source 1..80: mol_type = other DNA

SEQ ID NO: 198189 - DNA, 80 bp, synthetic construct; identical to SEQ ID NO: 13459
  source 1..80: mol_type = other DNA

SEQ ID NO: 198190 - DNA, 80 bp, synthetic construct; identical to SEQ ID NO: 13460
  source 1..80: mol_type = other DNA

SEQ ID NO: 198191 - DNA, 80 bp, synthetic construct; identical to SEQ ID NO: 13461
  source 1..80: mol_type = other DNA

SEQ ID NO: 198192 - DNA, 80 bp, synthetic construct; identical to SEQ ID NO: 13462
  source 1..80: mol_type = other DNA

SEQ ID NO: 198193 - DNA, 80 bp, synthetic construct; identical to SEQ ID NO: 13463
  source 1..80: mol_type = other DNA

SEQ ID NO: 198194 - DNA, 80 bp, synthetic construct; identical to SEQ ID NO: 13464
  source 1..80: mol_type = other DNA

SEQ ID NO: 198195 - DNA, 80 bp, synthetic construct; identical to SEQ ID NO: 13465
  source 1..80: mol_type = other DNA

SEQ ID NO: 198196 - DNA, 80 bp, synthetic construct; identical to SEQ ID NO: 13466
  source 1..80: mol_type = other DNA

SEQ ID NO: 198197 - DNA, 80 bp, synthetic construct; identical to SEQ ID NO: 13467
  source 1..80: mol_type = other DNA

SEQ ID NO: 198198 - DNA, 80 bp, synthetic construct; identical to SEQ ID NO: 13468
  source 1..80: mol_type = other DNA

SEQ ID NO: 198199 - DNA, 80 bp, synthetic construct; identical to SEQ ID NO: 13469
  source 1..80: mol_type = other DNA

SEQ ID NO: 198200 - DNA, 80 bp, synthetic construct; identical to SEQ ID NO: 13470
  source 1..80: mol_type = other DNA

SEQ ID NO: 198201 - DNA, 80 bp, synthetic construct; identical to SEQ ID NO: 13471
  source 1..80: mol_type = other DNA

SEQ ID NO: 198202 - DNA, 80 bp, synthetic construct; identical to SEQ ID NO: 13472
  source 1..80: mol_type = other DNA

SEQ ID NO: 198203 - DNA, 80 bp, synthetic construct; identical to SEQ ID NO: 13473
  source 1..80: mol_type = other DNA

SEQ ID NO: 198204 - DNA, 80 bp, synthetic construct; identical to SEQ ID NO: 13474
  source 1..80: mol_type = other DNA

SEQ ID NO: 198205 - DNA, 80 bp, synthetic construct; identical to SEQ ID NO: 13475
  source 1..80: mol_type = other DNA

SEQ ID NO: 198206 - DNA, 80 bp, synthetic construct; identical to SEQ ID NO: 13476
  source 1..80: mol_type = other DNA

SEQ ID NO: 198207 - DNA, 80 bp, synthetic construct; identical to SEQ ID NO: 13477
  source 1..80: mol_type = other DNA

SEQ ID NO: 198208 - DNA, 80 bp, synthetic construct; identical to SEQ ID NO: 13478
  source 1..80: mol_type = other DNA

SEQ ID NO: 198209 - DNA, 80 bp, synthetic construct; identical to SEQ ID NO: 13479
  source 1..80: mol_type = other DNA

SEQ ID NO: 198210 - DNA, 80 bp, synthetic construct; identical to SEQ ID NO: 13480
  source 1..80: mol_type = other DNA

SEQ ID NO: 198211 - DNA, 80 bp, synthetic construct; identical to SEQ ID NO: 13481
  source 1..80: mol_type = other DNA

SEQ ID NO: 198212 - DNA, 80 bp, synthetic construct; identical to SEQ ID NO: 13482
  source 1..80: mol_type = other DNA

SEQ ID NO: 198213 - DNA, 80 bp, synthetic construct; identical to SEQ ID NO: 13483
  source 1..80: mol_type = other DNA

SEQ ID NO: 198214 - DNA, 80 bp, synthetic construct; identical to SEQ ID NO: 13484
  source 1..80: mol_type = other DNA

SEQ ID NO: 198215 - DNA, 80 bp, synthetic construct; identical to SEQ ID NO: 13485
  source 1..80: mol_type = other DNA

SEQ ID NO: 198216 - DNA, 80 bp, synthetic construct; identical to SEQ ID NO: 13486
  source 1..80: mol_type = other DNA

SEQ ID NO: 198217 - DNA, 80 bp, synthetic construct; identical to SEQ ID NO: 13487
  source 1..80: mol_type = other DNA

SEQ ID NO: 198218 - DNA, 80 bp, synthetic construct; identical to SEQ ID NO: 13488
  source 1..80: mol_type = other DNA

SEQ ID NO: 198219 - DNA, 80 bp, synthetic construct; identical to SEQ ID NO: 13489
  source 1..80: mol_type = other DNA

SEQ ID NO: 198220 - DNA, 80 bp, synthetic construct; identical to SEQ ID NO: 13490
  source 1..80: mol_type = other DNA

SEQ ID NO: 198221 - DNA, 80 bp, synthetic construct; identical to SEQ ID NO: 13491
  source 1..80: mol_type = other DNA

SEQ ID NO: 198222 - DNA, 80 bp, synthetic construct; identical to SEQ ID NO: 13492
  source 1..80: mol_type = other DNA

SEQ ID NO: 198223 - DNA, 80 bp, synthetic construct; identical to SEQ ID NO: 13493
  source 1..80: mol_type = other DNA

SEQ ID NO: 198224 - DNA, 80 bp, synthetic construct; identical to SEQ ID NO: 13494
  source 1..80: mol_type = other DNA

SEQ ID NO: 198225 - DNA, 80 bp, synthetic construct; identical to SEQ ID NO: 13495
  source 1..80: mol_type = other DNA

SEQ ID NO: 198226 - DNA, 80 bp, synthetic construct; identical to SEQ ID NO: 13496
  source 1..80: mol_type = other DNA

SEQ ID NO: 198227 - DNA, 80 bp, synthetic construct; identical to SEQ ID NO: 13497
  source 1..80: mol_type = other DNA

SEQ ID NO: 198228 - DNA, 80 bp, synthetic construct; identical to SEQ ID NO: 13498
  source 1..80: mol_type = other DNA

SEQ ID NO: 198229 - DNA, 80 bp, synthetic construct; identical to SEQ ID NO: 13499
  source 1..80: mol_type = other DNA

SEQ ID NO: 198230 - DNA, 80 bp, synthetic construct; identical to SEQ ID NO: 13500
  source 1..80: mol_type = other DNA

SEQ ID NO: 198231 - DNA, 80 bp, synthetic construct; identical to SEQ ID NO: 13501
  source 1..80: mol_type = other DNA

SEQ ID NO: 198232 - DNA, 80 bp, synthetic construct; identical to SEQ ID NO: 13502
  source 1..80: mol_type = other DNA

SEQ ID NO: 198233 - DNA, 80 bp, synthetic construct; identical to SEQ ID NO: 13503
  source 1..80: mol_type = other DNA

SEQ ID NO: 198234 - DNA, 80 bp, synthetic construct; identical to SEQ ID NO: 13504
  source 1..80: mol_type = other DNA

SEQ ID NO: 198235 - DNA, 80 bp, synthetic construct; identical to SEQ ID NO: 13505
  source 1..80: mol_type = other DNA

SEQ ID NO: 198236 - DNA, 80 bp, synthetic construct; identical to SEQ ID NO: 13506
  source 1..80: mol_type = other DNA

SEQ ID NO: 198237 - DNA, 80 bp, synthetic construct; identical to SEQ ID NO: 13507
  source 1..80: mol_type = other DNA

SEQ ID NO: 198238 - DNA, 80 bp, synthetic construct; identical to SEQ ID NO: 13508
  source 1..80: mol_type = other DNA

SEQ ID NO: 198239 - DNA, 80 bp, synthetic construct; identical to SEQ ID NO: 13509
  source 1..80: mol_type = other DNA

SEQ ID NO: 198240 - DNA, 80 bp, synthetic construct; identical to SEQ ID NO: 13510
  source 1..80: mol_type = other DNA

SEQ ID NO: 198241 - DNA, 80 bp, synthetic construct; identical to SEQ ID NO: 13511
  source 1..80: mol_type = other DNA

SEQ ID NO: 198242 - DNA, 80 bp, synthetic construct; identical to SEQ ID NO: 13512
  source 1..80: mol_type = other DNA

SEQ ID NO: 198243 - DNA, 80 bp, synthetic construct; identical to SEQ ID NO: 13513
  source 1..80: mol_type = other DNA

SEQ ID NO: 198244 - DNA, 80 bp, synthetic construct; identical to SEQ ID NO: 13514
  source 1..80: mol_type = other DNA

SEQ ID NO: 198245 - DNA, 80 bp, synthetic construct; identical to SEQ ID NO: 13515
  source 1..80: mol_type = other DNA

SEQ ID NO: 198246 - DNA, 80 bp, synthetic construct; identical to SEQ ID NO: 13516
  source 1..80: mol_type = other DNA

SEQ ID NO: 198247 - DNA, 80 bp, synthetic construct; identical to SEQ ID NO: 13517
  source 1..80: mol_type = other DNA

SEQ ID NO: 198248 - DNA, 80 bp, synthetic construct; identical to SEQ ID NO: 13518
  source 1..80: mol_type = other DNA

SEQ ID NO: 198249 - DNA, 80 bp, synthetic construct; identical to SEQ ID NO: 13519
  source 1..80: mol_type = other DNA

SEQ ID NO: 198250 - DNA, 80 bp, synthetic construct; identical to SEQ ID NO: 13520
  source 1..80: mol_type = other DNA

SEQ ID NO: 198251 - DNA, 80 bp, synthetic construct; identical to SEQ ID NO: 13521
  source 1..80: mol_type = other DNA

SEQ ID NO: 198252 - DNA, 80 bp, synthetic construct; identical to SEQ ID NO: 13522
  source 1..80: mol_type = other DNA

SEQ ID NO: 198253 - DNA, 80 bp, synthetic construct; identical to SEQ ID NO: 13523
  source 1..80: mol_type = other DNA

SEQ ID NO: 198254 - DNA, 80 bp, synthetic construct; identical to SEQ ID NO: 13524
  source 1..80: mol_type = other DNA

SEQ ID NO: 198255 - DNA, 80 bp, synthetic construct; identical to SEQ ID NO: 13525
  source 1..80: mol_type = other DNA

SEQ ID NO: 198256 - DNA, 80 bp, synthetic construct; identical to SEQ ID NO: 13526
  source 1..80: mol_type = other DNA

SEQ ID NO: 198257 - DNA, 80 bp, synthetic construct; identical to SEQ ID NO: 13527
  source 1..80: mol_type = other DNA

SEQ ID NO: 198258 - DNA, 80 bp, synthetic construct; identical to SEQ ID NO: 13528
  source 1..80: mol_type = other DNA

SEQ ID NO: 198259 - DNA, 80 bp, synthetic construct; identical to SEQ ID NO: 13529
  source 1..80: mol_type = other DNA

SEQ ID NO: 198260 - DNA, 80 bp, synthetic construct; identical to SEQ ID NO: 13530
  source 1..80: mol_type = other DNA

SEQ ID NO: 198261 - DNA, 80 bp, synthetic construct; identical to SEQ ID NO: 13531
  source 1..80: mol_type = other DNA

SEQ ID NO: 198262 - DNA, 80 bp, synthetic construct; identical to SEQ ID NO: 13532
  source 1..80: mol_type = other DNA

SEQ ID NO: 198263 - DNA, 80 bp, synthetic construct; identical to SEQ ID NO: 13533
  source 1..80: mol_type = other DNA

SEQ ID NO: 198264 - DNA, 80 bp, synthetic construct; identical to SEQ ID NO: 13534
  source 1..80: mol_type = other DNA

SEQ ID NO: 198265 - DNA, 80 bp, synthetic construct; identical to SEQ ID NO: 13535
  source 1..80: mol_type = other DNA

SEQ ID NO: 198266 - DNA, 80 bp, synthetic construct; identical to SEQ ID NO: 13536
  source 1..80: mol_type = other DNA

SEQ ID NO: 198267 - DNA, 80 bp, synthetic construct; identical to SEQ ID NO: 13537
  source 1..80: mol_type = other DNA

SEQ ID NO: 198268 - DNA, 80 bp, synthetic construct; identical to SEQ ID NO: 13538
  source 1..80: mol_type = other DNA

SEQ ID NO: 198269 - DNA, 80 bp, synthetic construct; identical to SEQ ID NO: 13539
  source 1..80: mol_type = other DNA

SEQ ID NO: 198270 - DNA, 80 bp, synthetic construct; identical to SEQ ID NO: 13540
  source 1..80: mol_type = other DNA

SEQ ID NO: 198271 - DNA, 80 bp, synthetic construct; identical to SEQ ID NO: 13541
  source 1..80: mol_type = other DNA

SEQ ID NO: 198272 - DNA, 80 bp, synthetic construct; identical to SEQ ID NO: 13542
  source 1..80: mol_type = other DNA

SEQ ID NO: 198273 - DNA, 80 bp, synthetic construct; identical to SEQ ID NO: 13543
  source 1..80: mol_type = other DNA

SEQ ID NO: 198274 - DNA, 80 bp, synthetic construct; identical to SEQ ID NO: 13544
  source 1..80: mol_type = other DNA

SEQ ID NO: 198275 - DNA, 80 bp, synthetic construct; identical to SEQ ID NO: 13545
  source 1..80: mol_type = other DNA

SEQ ID NO: 198276 - DNA, 80 bp, synthetic construct; identical to SEQ ID NO: 13546
  source 1..80: mol_type = other DNA

SEQ ID NO: 198277 - DNA, 80 bp, synthetic construct; identical to SEQ ID NO: 13547
  source 1..80: mol_type = other DNA

SEQ ID NO: 198278 - DNA, 80 bp, synthetic construct; identical to SEQ ID NO: 13548
  source 1..80: mol_type = other DNA

SEQ ID NO: 198279 - DNA, 80 bp, synthetic construct; identical to SEQ ID NO: 13549
  source 1..80: mol_type = other DNA

SEQ ID NO: 198280 - DNA, 80 bp, synthetic construct; identical to SEQ ID NO: 13550
  source 1..80: mol_type = other DNA

SEQ ID NO: 198281 - DNA, 80 bp, synthetic construct; identical to SEQ ID NO: 13551
  source 1..80: mol_type = other DNA

SEQ ID NO: 198282 - DNA, 80 bp, synthetic construct; identical to SEQ ID NO: 13552
  source 1..80: mol_type = other DNA

SEQ ID NO: 198283 - DNA, 80 bp, synthetic construct; identical to SEQ ID NO: 13553
  source 1..80: mol_type = other DNA

SEQ ID NO: 198284 - DNA, 80 bp, synthetic construct; identical to SEQ ID NO: 13554
  source 1..80: mol_type = other DNA

SEQ ID NO: 198285 - DNA, 80 bp, synthetic construct; identical to SEQ ID NO: 13555
  source 1..80: mol_type = other DNA

SEQ ID NO: 198286 - DNA, 80 bp, synthetic construct; identical to SEQ ID NO: 13556
  source 1..80: mol_type = other DNA

SEQ ID NO: 198287 - DNA, 80 bp, synthetic construct; identical to SEQ ID NO: 13557
  source 1..80: mol_type = other DNA

SEQ ID NO: 198288 - DNA, 80 bp, synthetic construct; identical to SEQ ID NO: 13558
  source 1..80: mol_type = other DNA

SEQ ID NO: 198289 - DNA, 80 bp, synthetic construct; identical to SEQ ID NO: 13559
  source 1..80: mol_type = other DNA

SEQ ID NO: 198290 - DNA, 80 bp, synthetic construct; identical to SEQ ID NO: 13560
  source 1..80: mol_type = other DNA

SEQ ID NO: 198291 - DNA, 80 bp, synthetic construct; identical to SEQ ID NO: 13561
  source 1..80: mol_type = other DNA

SEQ ID NO: 198292 - DNA, 80 bp, synthetic construct; identical to SEQ ID NO: 13562
  source 1..80: mol_type = other DNA

SEQ ID NO: 198293 - DNA, 80 bp, synthetic construct; identical to SEQ ID NO: 13563
  source 1..80: mol_type = other DNA

SEQ ID NO: 198294 - DNA, 80 bp, synthetic construct; identical to SEQ ID NO: 13564
  source 1..80: mol_type = other DNA

SEQ ID NO: 198295 - DNA, 80 bp, synthetic construct; identical to SEQ ID NO: 13565
  source 1..80: mol_type = other DNA

SEQ ID NO: 198296 - DNA, 80 bp, synthetic construct; identical to SEQ ID NO: 13566
  source 1..80: mol_type = other DNA

SEQ ID NO: 198297 - DNA, 80 bp, synthetic construct; identical to SEQ ID NO: 13567
  source 1..80: mol_type = other DNA

SEQ ID NO: 198298 - DNA, 80 bp, synthetic construct; identical to SEQ ID NO: 13568
  source 1..80: mol_type = other DNA

SEQ ID NO: 198299 - DNA, 80 bp, synthetic construct; identical to SEQ ID NO: 13569
  source 1..80: mol_type = other DNA

SEQ ID NO: 198300 - DNA, 80 bp, synthetic construct; identical to SEQ ID NO: 13570
  source 1..80: mol_type = other DNA

SEQ ID NO: 198301 - DNA, 80 bp, synthetic construct; identical to SEQ ID NO: 13571
  source 1..80: mol_type = other DNA

SEQ ID NO: 198302 - DNA, 80 bp, synthetic construct; identical to SEQ ID NO: 13572
  source 1..80: mol_type = other DNA

SEQ ID NO: 198303 - DNA, 80 bp, synthetic construct; identical to SEQ ID NO: 13573
  source 1..80: mol_type = other DNA

SEQ ID NO: 198304 - DNA, 80 bp, synthetic construct; identical to SEQ ID NO: 13574
  source 1..80: mol_type = other DNA

SEQ ID NO: 198305 - DNA, 80 bp, synthetic construct; identical to SEQ ID NO: 13575
  source 1..80: mol_type = other DNA

SEQ ID NO: 198306 - DNA, 80 bp, synthetic construct; identical to SEQ ID NO: 13576
  source 1..80: mol_type = other DNA

SEQ ID NO: 198307 - DNA, 80 bp, synthetic construct; identical to SEQ ID NO: 13577
  source 1..80: mol_type = other DNA

SEQ ID NO: 198308 - DNA, 80 bp, synthetic construct; identical to SEQ ID NO: 13578
  source 1..80: mol_type = other DNA

SEQ ID NO: 198309 - DNA, 80 bp, synthetic construct; identical to SEQ ID NO: 13579
  source 1..80: mol_type = other DNA

SEQ ID NO: 198310 - DNA, 80 bp, synthetic construct; identical to SEQ ID NO: 13580
  source 1..80: mol_type = other DNA

SEQ ID NO: 198311 - DNA, 80 bp, synthetic construct; identical to SEQ ID NO: 13581
  source 1..80: mol_type = other DNA

SEQ ID NO: 198312 - DNA, 80 bp, synthetic construct; identical to SEQ ID NO: 13582
  source 1..80: mol_type = other DNA

SEQ ID NO: 198313 - DNA, 80 bp, synthetic construct; identical to SEQ ID NO: 13583
  source 1..80: mol_type = other DNA

SEQ ID NO: 198314 - DNA, 80 bp, synthetic construct; identical to SEQ ID NO: 13584
  source 1..80: mol_type = other DNA

SEQ ID NO: 198315 - DNA, 80 bp, synthetic construct; identical to SEQ ID NO: 13585
  source 1..80: mol_type = other DNA

SEQ ID NO: 198316 - DNA, 80 bp, synthetic construct; identical to SEQ ID NO: 13586
  source 1..80: mol_type = other DNA

SEQ ID NO: 198317 - DNA, 80 bp, synthetic construct; identical to SEQ ID NO: 13587
  source 1..80: mol_type = other DNA

SEQ ID NO: 198318 - DNA, 80 bp, synthetic construct; identical to SEQ ID NO: 13588
  source 1..80: mol_type = other DNA

SEQ ID NO: 198319 - DNA, 80 bp, synthetic construct; identical to SEQ ID NO: 13589
  source 1..80: mol_type = other DNA

SEQ ID NO: 198320 - DNA, 80 bp, synthetic construct; identical to SEQ ID NO: 13590
  source 1..80: mol_type = other DNA

SEQ ID NO: 198321 - DNA, 80 bp, synthetic construct; identical to SEQ ID NO: 13591
  source 1..80: mol_type = other DNA

SEQ ID NO: 198322 - DNA, 80 bp, synthetic construct; identical to SEQ ID NO: 13592
  source 1..80: mol_type = other DNA

SEQ ID NO: 198323 - DNA, 80 bp, synthetic construct; identical to SEQ ID NO: 13593
  source 1..80: mol_type = other DNA

SEQ ID NO: 198324 - DNA, 80 bp, synthetic construct; identical to SEQ ID NO: 13594
  source 1..80: mol_type = other DNA

SEQ ID NO: 198325 - DNA, 80 bp, synthetic construct; identical to SEQ ID NO: 13595
  source 1..80: mol_type = other DNA

SEQ ID NO: 198326 - DNA, 80 bp, synthetic construct; identical to SEQ ID NO: 13596
  source 1..80: mol_type = other DNA

SEQ ID NO: 198327 - DNA, 80 bp, synthetic construct; identical to SEQ ID NO: 13597
  source 1..80: mol_type = other DNA

SEQ ID NO: 198328 - DNA, 80 bp, synthetic construct; identical to SEQ ID NO: 13598
  source 1..80: mol_type = other DNA

SEQ ID NO: 198329 - DNA, 80 bp, synthetic construct; identical to SEQ ID NO: 13599
  source 1..80: mol_type = other DNA

SEQ ID NO: 198330 - DNA, 80 bp, synthetic construct; identical to SEQ ID NO: 13600
  source 1..80: mol_type = other DNA

SEQ ID NO: 198331 - DNA, 80 bp, synthetic construct; identical to SEQ ID NO: 13601
  source 1..80: mol_type = other DNA

SEQ ID NO: 198332 - DNA, 80 bp, synthetic construct; identical to SEQ ID NO: 13602
  source 1..80: mol_type = other DNA

SEQ ID NO: 198333 - DNA, 80 bp, synthetic construct; identical to SEQ ID NO: 13603
  source 1..80: mol_type = other DNA

SEQ ID NO: 198334 - DNA, 80 bp, synthetic construct; identical to SEQ ID NO: 13604
  source 1..80: mol_type = other DNA

SEQ ID NO: 198335 - DNA, 80 bp, synthetic construct; identical to SEQ ID NO: 13605
  source 1..80: mol_type = other DNA

SEQ ID NO: 198336 - DNA, 80 bp, synthetic construct; identical to SEQ ID NO: 13606
  source 1..80: mol_type = other DNA

SEQ ID NO: 198337 - DNA, 80 bp, synthetic construct; identical to SEQ ID NO: 13607
  source 1..80: mol_type = other DNA

SEQ ID NO: 198338 - DNA, 80 bp, synthetic construct; identical to SEQ ID NO: 13608
  source 1..80: mol_type = other DNA

SEQ ID NO: 198339 - DNA, 80 bp, synthetic construct; identical to SEQ ID NO: 13609
  source 1..80: mol_type = other DNA

SEQ ID NO: 198340 - DNA, 80 bp, synthetic construct; identical to SEQ ID NO: 13610
  source 1..80: mol_type = other DNA

SEQ ID NO: 198341 - DNA, 80 bp, synthetic construct; identical to SEQ ID NO: 13611
  source 1..80: mol_type = other DNA

SEQ ID NO: 198342 - DNA, 80 bp, synthetic construct; identical to SEQ ID NO: 13612
  source 1..80: mol_type = other DNA

SEQ ID NO: 198343 - DNA, 80 bp, synthetic construct; identical to SEQ ID NO: 13613
  source 1..80: mol_type = other DNA

SEQ ID NO: 198344 - DNA, 80 bp, synthetic construct; identical to SEQ ID NO: 13614
  source 1..80: mol_type = other DNA

SEQ ID NO: 198345 - DNA, 80 bp, synthetic construct; identical to SEQ ID NO: 13615
  source 1..80: mol_type = other DNA

SEQ ID NO: 198346 - DNA, 80 bp, synthetic construct; identical to SEQ ID NO: 13616
  source 1..80: mol_type = other DNA

SEQ ID NO: 198347 - DNA, 80 bp, synthetic construct; identical to SEQ ID NO: 13617
  source 1..80: mol_type = other DNA

SEQ ID NO: 198348 - DNA, 80 bp, synthetic construct; identical to SEQ ID NO: 13618
  source 1..80: mol_type = other DNA

SEQ ID NO: 198349 - DNA, 80 bp, synthetic construct; identical to SEQ ID NO: 13619
  source 1..80: mol_type = other DNA

SEQ ID NO: 198350 - DNA, 80 bp, synthetic construct; identical to SEQ ID NO: 13620
  source 1..80: mol_type = other DNA

SEQ ID NO: 198351 - DNA, 80 bp, synthetic construct; identical to SEQ ID NO: 13621
  source 1..80: mol_type = other DNA

SEQ ID NO: 198352 - DNA, 80 bp, synthetic construct; identical to SEQ ID NO: 13622
  source 1..80: mol_type = other DNA

SEQ ID NO: 198353 - DNA, 80 bp, synthetic construct; identical to SEQ ID NO: 13623
  source 1..80: mol_type = other DNA

SEQ ID NO: 198354 - DNA, 80 bp, synthetic construct; identical to SEQ ID NO: 13624
  source 1..80: mol_type = other DNA

SEQ ID NO: 198355 - DNA, 80 bp, synthetic construct; identical to SEQ ID NO: 13625
  source 1..80: mol_type = other DNA

SEQ ID NO: 198356 - DNA, 80 bp, synthetic construct; identical to SEQ ID NO: 13626
  source 1..80: mol_type = other DNA

SEQ ID NO: 198357 - DNA, 80 bp, synthetic construct; identical to SEQ ID NO: 13627
  source 1..80: mol_type = other DNA

SEQ ID NO: 198358 - DNA, 80 bp, synthetic construct; identical to SEQ ID NO: 13628
  source 1..80: mol_type = other DNA

SEQ ID NO: 198359 - DNA, 80 bp, synthetic construct; identical to SEQ ID NO: 13629
  source 1..80: mol_type = other DNA

SEQ ID NO: 198360 - DNA, 80 bp, synthetic construct; identical to SEQ ID NO: 13630
  source 1..80: mol_type = other DNA

SEQ ID NO: 198361 - DNA, 80 bp, synthetic construct; identical to SEQ ID NO: 13631
  source 1..80: mol_type = other DNA

SEQ ID NO: 198362 - DNA, 80 bp, synthetic construct; identical to SEQ ID NO: 13632
  source 1..80: mol_type = other DNA

SEQ ID NO: 198363 - DNA, 80 bp, synthetic construct; identical to SEQ ID NO: 13633
  source 1..80: mol_type = other DNA

SEQ ID NO: 198364 - DNA, 80 bp, synthetic construct; identical to SEQ ID NO: 13634
  source 1..80: mol_type = other DNA

SEQ ID NO: 198365 - DNA, 80 bp, synthetic construct; identical to SEQ ID NO: 13635
  source 1..80: mol_type = other DNA

SEQ ID NO: 198366 - DNA, 80 bp, synthetic construct; identical to SEQ ID NO: 13636
  source 1..80: mol_type = other DNA

SEQ ID NO: 198367 - DNA, 80 bp, synthetic construct; identical to SEQ ID NO: 13637
  source 1..80: mol_type = other DNA

SEQ ID NO: 198368 - DNA, 80 bp, synthetic construct; identical to SEQ ID NO: 13638
  source 1..80: mol_type = other DNA

SEQ ID NO: 198369 - DNA, 80 bp, synthetic construct; identical to SEQ ID NO: 13639
  source 1..80: mol_type = other DNA

SEQ ID NO: 198370 - DNA, 80 bp, synthetic construct; identical to SEQ ID NO: 13640
  source 1..80: mol_type = other DNA

SEQ ID NO: 198371 - DNA, 80 bp, synthetic construct; identical to SEQ ID NO: 13641
  source 1..80: mol_type = other DNA

SEQ ID NO: 198372 - DNA, 80 bp, synthetic construct; identical to SEQ ID NO: 13642
  source 1..80: mol_type = other DNA

SEQ ID NO: 198373 - DNA, 80 bp, synthetic construct; identical to SEQ ID NO: 13643
  source 1..80: mol_type = other DNA

SEQ ID NO: 198374 - DNA, 80 bp, synthetic construct; identical to SEQ ID NO: 13644
  source 1..80: mol_type = other DNA

SEQ ID NO: 198375 - DNA, 80 bp, synthetic construct; identical to SEQ ID NO: 13645
  source 1..80: mol_type = other DNA

SEQ ID NO: 198376 - DNA, 80 bp, synthetic construct; identical to SEQ ID NO: 13646
  source 1..80: mol_type = other DNA

SEQ ID NO: 198377 - DNA, 80 bp, synthetic construct; identical to SEQ ID NO: 13647
  source 1..80: mol_type = other DNA

SEQ ID NO: 198378 - DNA, 80 bp, synthetic construct; identical to SEQ ID NO: 13648
  source 1..80: mol_type = other DNA

SEQ ID NO: 198379 - DNA, 80 bp, synthetic construct; identical to SEQ ID NO: 13649
  source 1..80: mol_type = other DNA

SEQ ID NO: 198380 - DNA, 80 bp, synthetic construct; identical to SEQ ID NO: 13650
  source 1..80: mol_type = other DNA

SEQ ID NO: 198381 - DNA, 80 bp, synthetic construct; identical to SEQ ID NO: 13651
  source 1..80: mol_type = other DNA

SEQ ID NO: 198382 - DNA, 80 bp, synthetic construct; identical to SEQ ID NO: 13652
  source 1..80: mol_type = other DNA

SEQ ID NO: 198383 - DNA, 80 bp, synthetic construct; identical to SEQ ID NO: 13653
  source 1..80: mol_type = other DNA

SEQ ID NO: 198384 - DNA, 80 bp, synthetic construct; identical to SEQ ID NO: 13654
  source 1..80: mol_type = other DNA

SEQ ID NO: 198385 - DNA, 80 bp, synthetic construct; identical to SEQ ID NO: 13655
  source 1..80: mol_type = other DNA

SEQ ID NO: 198386 - DNA, 80 bp, synthetic construct; identical to SEQ ID NO: 13656
  source 1..80: mol_type = other DNA

SEQ ID NO: 198387 - DNA, 80 bp, synthetic construct; identical to SEQ ID NO: 13657
  source 1..80: mol_type = other DNA

SEQ ID NO: 198388 - DNA, 80 bp, synthetic construct; identical to SEQ ID NO: 13658
  source 1..80: mol_type = other DNA

SEQ ID NO: 198389 - DNA, 80 bp, synthetic construct; identical to SEQ ID NO: 13659
  source 1..80: mol_type = other DNA

SEQ ID NO: 198390 - DNA, 80 bp, synthetic construct; identical to SEQ ID NO: 13660
  source 1..80: mol_type = other DNA

SEQ ID NO: 198391 - DNA, 80 bp, synthetic construct; identical to SEQ ID NO: 13661
  source 1..80: mol_type = other DNA

SEQ ID NO: 198392 - DNA, 80 bp, synthetic construct; identical to SEQ ID NO: 13662
  source 1..80: mol_type = other DNA

SEQ ID NO: 198393 - DNA, 80 bp, synthetic construct; identical to SEQ ID NO: 13663
  source 1..80: mol_type = other DNA

SEQ ID NO: 198394 - DNA, 80 bp, synthetic construct; identical to SEQ ID NO: 13664
  source 1..80: mol_type = other DNA

SEQ ID NO: 198395 - DNA, 80 bp, synthetic construct; identical to SEQ ID NO: 13665
  source 1..80: mol_type = other DNA

SEQ ID NO: 198396 - DNA, 80 bp, synthetic construct; identical to SEQ ID NO: 13666
  source 1..80: mol_type = other DNA

SEQ ID NO: 198397 - DNA, 80 bp, synthetic construct; identical to SEQ ID NO: 13667
  source 1..80: mol_type = other DNA

SEQ ID NO: 198398 - DNA, 80 bp, synthetic construct; identical to SEQ ID NO: 13668
  source 1..80: mol_type = other DNA

SEQ ID NO: 198399 - DNA, 80 bp, synthetic construct; identical to SEQ ID NO: 13669
  source 1..80: mol_type = other DNA

SEQ ID NO: 198400 - DNA, 80 bp, synthetic construct; identical to SEQ ID NO: 13670
  source 1..80: mol_type = other DNA

SEQ ID NO: 198401 - DNA, 80 bp, synthetic construct; identical to SEQ ID NO: 13671
  source 1..80: mol_type = other DNA

SEQ ID NO: 198402 - DNA, 80 bp, synthetic construct; identical to SEQ ID NO: 13672
  source 1..80: mol_type = other DNA

SEQ ID NO: 198403 - DNA, 80 bp, synthetic construct; identical to SEQ ID NO: 13673
  source 1..80: mol_type = other DNA

SEQ ID NO: 198404 - DNA, 80 bp, synthetic construct; identical to SEQ ID NO: 13674
  source 1..80: mol_type = other DNA

SEQ ID NO: 198405 - DNA, 80 bp, synthetic construct; identical to SEQ ID NO: 13675
  source 1..80: mol_type = other DNA

SEQ ID NO: 198406 - DNA, 80 bp, synthetic construct; identical to SEQ ID NO: 13676
  source 1..80: mol_type = other DNA

SEQ ID NO: 198407 - DNA, 80 bp, synthetic construct; identical to SEQ ID NO: 13677
  source 1..80: mol_type = other DNA

SEQ ID NO: 198408 - DNA, 80 bp, synthetic construct; identical to SEQ ID NO: 13678
  source 1..80: mol_type = other DNA

SEQ ID NO: 198409 - DNA, 80 bp, synthetic construct; identical to SEQ ID NO: 13679
  source 1..80: mol_type = other DNA

SEQ ID NO: 198410 - DNA, 80 bp, synthetic construct; identical to SEQ ID NO: 13680
  source 1..80: mol_type = other DNA

SEQ ID NO: 198411 - DNA, 80 bp, synthetic construct; identical to SEQ ID NO: 13681
  source 1..80: mol_type = other DNA

SEQ ID NO: 198412 - DNA, 80 bp, synthetic construct; identical to SEQ ID NO: 13682
  source 1..80: mol_type = other DNA

SEQ ID NO: 198413 - DNA, 80 bp, synthetic construct; identical to SEQ ID NO: 13683
  source 1..80: mol_type = other DNA

SEQ ID NO: 198414 - DNA, 80 bp, synthetic construct; identical to SEQ ID NO: 13684
  source 1..80: mol_type = other DNA

SEQ ID NO: 198415 - DNA, 80 bp, synthetic construct; identical to SEQ ID NO: 13685
  source 1..80: mol_type = other DNA

SEQ ID NO: 198416 - DNA, 80 bp, synthetic construct; identical to SEQ ID NO: 13686
  source 1..80: mol_type = other DNA

SEQ ID NO: 198417 - DNA, 80 bp, synthetic construct; identical to SEQ ID NO: 13687
  source 1..80: mol_type = other DNA

SEQ ID NO: 198418 - DNA, 80 bp, synthetic construct; identical to SEQ ID NO: 13688
  source 1..80: mol_type = other DNA

SEQ ID NO: 198419 - DNA, 80 bp, synthetic construct; identical to SEQ ID NO: 13689
  source 1..80: mol_type = other DNA

SEQ ID NO: 198420 - DNA, 80 bp, synthetic construct; identical to SEQ ID NO: 13690
  source 1..80: mol_type = other DNA

SEQ ID NO: 198421 - DNA, 80 bp, synthetic construct; identical to SEQ ID NO: 13691
  source 1..80: mol_type = other DNA

SEQ ID NO: 198422 - DNA, 80 bp, synthetic construct; identical to SEQ ID NO: 13692
  source 1..80: mol_type = other DNA

SEQ ID NO: 198423 - DNA, 80 bp, synthetic construct; identical to SEQ ID NO: 13693
  source 1..80: mol_type = other DNA

SEQ ID NO: 198424 - DNA, 80 bp, synthetic construct; identical to SEQ ID NO: 13694
  source 1..80: mol_type = other DNA

SEQ ID NO: 198425 - DNA, 80 bp, synthetic construct; identical to SEQ ID NO: 13695
  source 1..80: mol_type = other DNA

SEQ ID NO: 198426 - DNA, 80 bp, synthetic construct; identical to SEQ ID NO: 13696
  source 1..80: mol_type = other DNA

SEQ ID NO: 198427 - DNA, 80 bp, synthetic construct; identical to SEQ ID NO: 13697
  source 1..80: mol_type = other DNA

SEQ ID NO: 198428 - DNA, 80 bp, synthetic construct; identical to SEQ ID NO: 13698
  source 1..80: mol_type = other DNA

SEQ ID NO: 198429 - DNA, 80 bp, synthetic construct; identical to SEQ ID NO: 13699
  source 1..80: mol_type = other DNA

SEQ ID NO: 198430 - DNA, 80 bp, synthetic construct; identical to SEQ ID NO: 13700
  source 1..80: mol_type = other DNA

SEQ ID NO: 198431 - DNA, 80 bp, synthetic construct; identical to SEQ ID NO: 13701
  source 1..80: mol_type = other DNA

SEQ ID NO: 198432 - DNA, 80 bp, synthetic construct; identical to SEQ ID NO: 13702
  source 1..80: mol_type = other DNA

SEQ ID NO: 198433 - DNA, 80 bp, synthetic construct; identical to SEQ ID NO: 13703
  source 1..80: mol_type = other DNA

SEQ ID NO: 198434 - DNA, 80 bp, synthetic construct; identical to SEQ ID NO: 13704
  source 1..80: mol_type = other DNA

SEQ ID NO: 198435 - DNA, 80 bp, synthetic construct; identical to SEQ ID NO: 13705
  source 1..80: mol_type = other DNA

SEQ ID NO: 198436 - DNA, 80 bp, synthetic construct; identical to SEQ ID NO: 13706
  source 1..80: mol_type = other DNA

SEQ ID NO: 198437 - DNA, 80 bp, synthetic construct; identical to SEQ ID NO: 13707
  source 1..80: mol_type = other DNA

SEQ ID NO: 198438 - DNA, 80 bp, synthetic construct; identical to SEQ ID NO: 13708
  source 1..80: mol_type = other DNA

SEQ ID NO: 198439 - DNA, 80 bp, synthetic construct; identical to SEQ ID NO: 13709
  source 1..80: mol_type = other DNA

SEQ ID NO: 198440 - DNA, 80 bp, synthetic construct; identical to SEQ ID NO: 13710
  source 1..80: mol_type = other DNA

SEQ ID NO: 198441 - DNA, 80 bp, synthetic construct; identical to SEQ ID NO: 13711
  source 1..80: mol_type = other DNA

SEQ ID NO: 198442 - DNA, 80 bp, synthetic construct; identical to SEQ ID NO: 13712
  source 1..80: mol_type = other DNA

SEQ ID NO: 198443 - DNA, 80 bp, synthetic construct; identical to SEQ ID NO: 13713
  source 1..80: mol_type = other DNA

SEQ ID NO: 198444 - DNA, 80 bp, synthetic construct; identical to SEQ ID NO: 13714
  source 1..80: mol_type = other DNA

SEQ ID NO: 198445 - DNA, 80 bp, synthetic construct; identical to SEQ ID NO: 13715
  source 1..80: mol_type = other DNA

SEQ ID NO: 198446 - DNA, 80 bp, synthetic construct; identical to SEQ ID NO: 13716
  source 1..80: mol_type = other DNA

SEQ ID NO: 198447 - DNA, 80 bp, synthetic construct; identical to SEQ ID NO: 13717
  source 1..80: mol_type = other DNA

SEQ ID NO: 198448 - DNA, 80 bp, synthetic construct; identical to SEQ ID NO: 13718
  source 1..80: mol_type = other DNA

SEQ ID NO: 198449 - DNA, 80 bp, synthetic construct; identical to SEQ ID NO: 13719
  source 1..80: mol_type = other DNA

SEQ ID NO: 198450 - DNA, 80 bp, synthetic construct; identical to SEQ ID NO: 13720
  source 1..80: mol_type = other DNA

SEQ ID NO: 198451 - DNA, 80 bp, synthetic construct; identical to SEQ ID NO: 13721
  source 1..80: mol_type = other DNA

SEQ ID NO: 198452 - DNA, 80 bp, synthetic construct; identical to SEQ ID NO: 13722
  source 1..80: mol_type = other DNA

SEQ ID NO: 198453 - DNA, 80 bp, synthetic construct; identical to SEQ ID NO: 13723
  source 1..80: mol_type = other DNA

SEQ ID NO: 198454 - DNA, 80 bp, synthetic construct; identical to SEQ ID NO: 13724
  source 1..80: mol_type = other DNA

SEQ ID NO: 198455 - DNA, 80 bp, synthetic construct; identical to SEQ ID NO: 13725
  source 1..80: mol_type = other DNA

SEQ ID NO: 198456 - DNA, 80 bp, synthetic construct; identical to SEQ ID NO: 13726
  source 1..80: mol_type = other DNA

SEQ ID NO: 198457 - DNA, 80 bp, synthetic construct; identical to SEQ ID NO: 13727
  source 1..80: mol_type = other DNA

SEQ ID NO: 198458 - DNA, 80 bp, synthetic construct; identical to SEQ ID NO: 13728
  source 1..80: mol_type = other DNA

SEQ ID NO: 198459 - DNA, 80 bp, synthetic construct; identical to SEQ ID NO: 13729
  source 1..80: mol_type = other DNA

SEQ ID NO: 198460 - DNA, 80 bp, synthetic construct; identical to SEQ ID NO: 13730
  source 1..80: mol_type = other DNA

SEQ ID NO: 198461 - DNA, 80 bp, synthetic construct; identical to SEQ ID NO: 13731
  source 1..80: mol_type = other DNA

SEQ ID NO: 198462 - DNA, 80 bp, synthetic construct; identical to SEQ ID NO: 13732
  source 1..80: mol_type = other DNA

SEQ ID NO: 198463 - DNA, 80 bp, synthetic construct; identical to SEQ ID NO: 13733
  source 1..80: mol_type = other DNA

SEQ ID NO: 198464 - DNA, 80 bp, synthetic construct; identical to SEQ ID NO: 13734
  source 1..80: mol_type = other DNA

SEQ ID NO: 198465 - DNA, 80 bp, synthetic construct; identical to SEQ ID NO: 13735
  source 1..80: mol_type = other DNA

SEQ ID NO: 198466 - DNA, 80 bp, synthetic construct; identical to SEQ ID NO: 13736
  source 1..80: mol_type = other DNA

SEQ ID NO: 198467 - DNA, 80 bp, synthetic construct; identical to SEQ ID NO: 13737
  source 1..80: mol_type = other DNA

SEQ ID NO: 198468 - DNA, 80 bp, synthetic construct; identical to SEQ ID NO: 13738
  source 1..80: mol_type = other DNA

SEQ ID NO: 198469 - DNA, 80 bp, synthetic construct; identical to SEQ ID NO: 13739
  source 1..80: mol_type = other DNA

SEQ ID NO: 198470 - DNA, 80 bp, synthetic construct; identical to SEQ ID NO: 13740
  source 1..80: mol_type = other DNA

SEQ ID NO: 198471 - DNA, 80 bp, synthetic construct; identical to SEQ ID NO: 13741
  source 1..80: mol_type = other DNA

SEQ ID NO: 198472 - DNA, 80 bp, synthetic construct; identical to SEQ ID NO: 13742
  source 1..80: mol_type = other DNA

SEQ ID NO: 198473 - DNA, 80 bp, synthetic construct; identical to SEQ ID NO: 13743
  source 1..80: mol_type = other DNA

SEQ ID NO: 198474 - DNA, 80 bp, synthetic construct; identical to SEQ ID NO: 13744
  source 1..80: mol_type = other DNA

SEQ ID NO: 198475 - DNA, 80 bp, synthetic construct; identical to SEQ ID NO: 13745
  source 1..80: mol_type = other DNA

SEQ ID NO: 198476 - DNA, 80 bp, synthetic construct; identical to SEQ ID NO: 13746
  source 1..80: mol_type = other DNA

SEQ ID NO: 198477 - DNA, 80 bp, synthetic construct; identical to SEQ ID NO: 13747
  source 1..80: mol_type = other DNA

SEQ ID NO: 198478 - DNA, 80 bp, synthetic construct; identical to SEQ ID NO: 13748
  source 1..80: mol_type = other DNA

SEQ ID NO: 198479 - DNA, 80 bp, synthetic construct; identical to SEQ ID NO: 13749
  source 1..80: mol_type = other DNA

SEQ ID NO: 198480 - DNA, 80 bp, synthetic construct; identical to SEQ ID NO: 13750
  source 1..80: mol_type = other DNA

SEQ ID NO: 198481 - DNA, 80 bp, synthetic construct; identical to SEQ ID NO: 13751
  source 1..80: mol_type = other DNA

SEQ ID NO: 198482 - DNA, 80 bp, synthetic construct; identical to SEQ ID NO: 13752
  source 1..80: mol_type = other DNA

SEQ ID NO: 198483 - DNA, 80 bp, synthetic construct; identical to SEQ ID NO: 13753
  source 1..80: mol_type = other DNA

SEQ ID NO: 198484 - DNA, 80 bp, synthetic construct; identical to SEQ ID NO: 13754
  source 1..80: mol_type = other DNA

SEQ ID NO: 198485 - DNA, 80 bp, synthetic construct; identical to SEQ ID NO: 13755
  source 1..80: mol_type = other DNA

SEQ ID NO: 198486 - DNA, 80 bp, synthetic construct; identical to SEQ ID NO: 13756
  source 1..80: mol_type = other DNA

SEQ ID NO: 198487 - DNA, 80 bp, synthetic construct; identical to SEQ ID NO: 13757
  source 1..80: mol_type = other DNA

SEQ ID NO: 198488 - DNA, 80 bp, synthetic construct; identical to SEQ ID NO: 13758
  source 1..80: mol_type = other DNA

SEQ ID NO: 198489 - DNA, 80 bp, synthetic construct; identical to SEQ ID NO: 13759
  source 1..80: mol_type = other DNA

SEQ ID NO: 198490 - DNA, 80 bp, synthetic construct; identical to SEQ ID NO: 13760
  source 1..80: mol_type = other DNA

SEQ ID NO: 198491 - DNA, 80 bp, synthetic construct; identical to SEQ ID NO: 13761
  source 1..80: mol_type = other DNA

SEQ ID NO: 198492 - DNA, 80 bp, synthetic construct; identical to SEQ ID NO: 13762
  source 1..80: mol_type = other DNA

SEQ ID NO: 198493 - DNA, 80 bp, synthetic construct; identical to SEQ ID NO: 13763
  source 1..80: mol_type = other DNA

SEQ ID NO: 198494 - DNA, 80 bp, synthetic construct; identical to SEQ ID NO: 13764
  source 1..80: mol_type = other DNA

SEQ ID NO: 198495 - DNA, 80 bp, synthetic construct; identical to SEQ ID NO: 13765
  source 1..80: mol_type = other DNA

SEQ ID NO: 198496 - DNA, 80 bp, synthetic construct; identical to SEQ ID NO: 13766
  source 1..80: mol_type = other DNA

SEQ ID NO: 198497 - DNA, 80 bp, synthetic construct; identical to SEQ ID NO: 13767
  source 1..80: mol_type = other DNA

SEQ ID NO: 198498 - DNA, 80 bp, synthetic construct; identical to SEQ ID NO: 13768
  source 1..80: mol_type = other DNA

SEQ ID NO: 198499 - DNA, 80 bp, synthetic construct; identical to SEQ ID NO: 13769
  source 1..80: mol_type = other DNA

SEQ ID NO: 198500 - DNA, 80 bp, synthetic construct; identical to SEQ ID NO: 13770
  source 1..80: mol_type = other DNA

SEQ ID NO: 198501 - DNA, 80 bp, synthetic construct; identical to SEQ ID NO: 13771
  source 1..80: mol_type = other DNA

SEQ ID NO: 198502 - DNA, 80 bp, synthetic construct; identical to SEQ ID NO: 13772
  source 1..80: mol_type = other DNA

SEQ ID NO: 198503 - DNA, 80 bp, synthetic construct; identical to SEQ ID NO: 13773
  source 1..80: mol_type = other DNA

SEQ ID NO: 198504 - DNA, 80 bp, synthetic construct; identical to SEQ ID NO: 13774
  source 1..80: mol_type = other DNA

SEQ ID NO: 198505 - DNA, 80 bp, synthetic construct; identical to SEQ ID NO: 13775
  source 1..80: mol_type = other DNA

SEQ ID NO: 198506 - DNA, 80 bp, synthetic construct; identical to SEQ ID NO: 13776
  source 1..80: mol_type = other DNA

SEQ ID NO: 198507 - DNA, 80 bp, synthetic construct; identical to SEQ ID NO: 13777
  source 1..80: mol_type = other DNA

SEQ ID NO: 198508 - DNA, 80 bp, synthetic construct; identical to SEQ ID NO: 13778
  source 1..80: mol_type = other DNA

SEQ ID NO: 198509 - DNA, 80 bp, synthetic construct; identical to SEQ ID NO: 13779
  source 1..80: mol_type = other DNA

SEQ ID NO: 198510 - DNA, 80 bp, synthetic construct; identical to SEQ ID NO: 13780
  source 1..80: mol_type = other DNA

SEQ ID NO: 198511 - DNA, 80 bp, synthetic construct; identical to SEQ ID NO: 13781
  source 1..80: mol_type = other DNA

SEQ ID NO: 198512 - DNA, 80 bp, synthetic construct; identical to SEQ ID NO: 13782
  source 1..80: mol_type = other DNA

SEQ ID NO: 198513 - DNA, 80 bp, synthetic construct; identical to SEQ ID NO: 13783
  source 1..80: mol_type = other DNA

SEQ ID NO: 198514 - DNA, 80 bp, synthetic construct; identical to SEQ ID NO: 13784
  source 1..80: mol_type = other DNA

SEQ ID NO: 198515 - DNA, 80 bp, synthetic construct; identical to SEQ ID NO: 13785
  source 1..80: mol_type = other DNA

SEQ ID NO: 198516 - DNA, 80 bp, synthetic construct; identical to SEQ ID NO: 13786
  source 1..80: mol_type = other DNA

SEQ ID NO: 198517 - DNA, 80 bp, synthetic construct; identical to SEQ ID NO: 13787
  source 1..80: mol_type = other DNA

SEQ ID NO: 198518 - DNA, 80 bp, synthetic construct; identical to SEQ ID NO: 13788
  source 1..80: mol_type = other DNA

SEQ ID NO: 198519 - DNA, 80 bp, synthetic construct; identical to SEQ ID NO: 13789
  source 1..80: mol_type = other DNA

SEQ ID NO: 198520 - DNA, 80 bp, synthetic construct; identical to SEQ ID NO: 13790
  source 1..80: mol_type = other DNA

SEQ ID NO: 198521 - DNA, 80 bp, synthetic construct; identical to SEQ ID NO: 13791
  source 1..80: mol_type = other DNA

SEQ ID NO: 198522 - DNA, 80 bp, synthetic construct; identical to SEQ ID NO: 13792
  source 1..80: mol_type = other DNA

SEQ ID NO: 198523 - DNA, 80 bp, synthetic construct; identical to SEQ ID NO: 13793
  source 1..80: mol_type = other DNA

SEQ ID NO: 198524 - DNA, 80 bp, synthetic construct; identical to SEQ ID NO: 13794
  source 1..80: mol_type = other DNA

SEQ ID NO: 198525 - DNA, 80 bp, synthetic construct; identical to SEQ ID NO: 13795
  source 1..80: mol_type = other DNA

SEQ ID NO: 198526 - DNA, 80 bp, synthetic construct; identical to SEQ ID NO: 13796
  source 1..80: mol_type = other DNA

SEQ ID NO: 198527 - DNA, 80 bp, synthetic construct; identical to SEQ ID NO: 13797
  source 1..80: mol_type = other DNA

SEQ ID NO: 198528 - DNA, 80 bp, synthetic construct; identical to SEQ ID NO: 13798
  source 1..80: mol_type = other DNA

SEQ ID NO: 198529 - DNA, 80 bp, synthetic construct; identical to SEQ ID NO: 13799
  source 1..80: mol_type = other DNA

SEQ ID NO: 198530 - DNA, 80 bp, synthetic construct; identical to SEQ ID NO: 13800
  source 1..80: mol_type = other DNA

SEQ ID NO: 198531 - DNA, 80 bp, synthetic construct; identical to SEQ ID NO: 13801
  source 1..80: mol_type = other DNA

SEQ ID NO: 198532 - DNA, 80 bp, synthetic construct; identical to SEQ ID NO: 13802
  source 1..80: mol_type = other DNA

SEQ ID NO: 198533 - DNA, 80 bp, synthetic construct; identical to SEQ ID NO: 13803
  source 1..80: mol_type = other DNA

SEQ ID NO: 198534 - DNA, 80 bp, synthetic construct; identical to SEQ ID NO: 13804
  source 1..80: mol_type = other DNA

SEQ ID NO: 198535 - DNA, 80 bp, synthetic construct; identical to SEQ ID NO: 13805
  source 1..80: mol_type = other DNA

SEQ ID NO: 198536 - DNA, 80 bp, synthetic construct; identical to SEQ ID NO: 13806
  source 1..80: mol_type = other DNA

SEQ ID NO: 198537 - DNA, 80 bp, synthetic construct; identical to SEQ ID NO: 13807
  source 1..80: mol_type = other DNA

SEQ ID NO: 198538 - DNA, 80 bp, synthetic construct; identical to SEQ ID NO: 13808
  source 1..80: mol_type = other DNA

SEQ ID NO: 198539 - DNA, 80 bp, synthetic construct; identical to SEQ ID NO: 13809
  source 1..80: mol_type = other DNA

SEQ ID NO: 198540 - DNA, 80 bp, synthetic construct; identical to SEQ ID NO: 13810
  source 1..80: mol_type = other DNA

SEQ ID NO: 198541 - DNA, 80 bp, synthetic construct; identical to SEQ ID NO: 13811
  source 1..80: mol_type = other DNA

SEQ ID NO: 198542 - DNA, 80 bp, synthetic construct; identical to SEQ ID NO: 13812
  source 1..80: mol_type = other DNA

SEQ ID NO: 198543 - DNA, 80 bp, synthetic construct; identical to SEQ ID NO: 13813
  source 1..80: mol_type = other DNA

SEQ ID NO: 198544 - DNA, 80 bp, synthetic construct; identical to SEQ ID NO: 13814
  source 1..80: mol_type = other DNA

SEQ ID NO: 198545 - DNA, 80 bp, synthetic construct; identical to SEQ ID NO: 13815
  source 1..80: mol_type = other DNA

SEQ ID NO: 198546 - DNA, 80 bp, synthetic construct; identical to SEQ ID NO: 13816
  source 1..80: mol_type = other DNA

SEQ ID NO: 198547 - DNA, 80 bp, synthetic construct; identical to SEQ ID NO: 13817
  source 1..80: mol_type = other DNA

SEQ ID NO: 198548 - DNA, 80 bp, synthetic construct; identical to SEQ ID NO: 13818
  source 1..80: mol_type = other DNA

SEQ ID NO: 198549 - DNA, 80 bp, synthetic construct; identical to SEQ ID NO: 13819
  source 1..80: mol_type = other DNA

SEQ ID NO: 198550 - DNA, 80 bp, synthetic construct; identical to SEQ ID NO: 13820
  source 1..80: mol_type = other DNA

SEQ ID NO: 198551 - DNA, 80 bp, synthetic construct; identical to SEQ ID NO: 13821
  source 1..80: mol_type = other DNA

SEQ ID NO: 198552 - DNA, 80 bp, synthetic construct; identical to SEQ ID NO: 13822
  source 1..80: mol_type = other DNA

SEQ ID NO: 198553 - DNA, 80 bp, synthetic construct; identical to SEQ ID NO: 13823
  source 1..80: mol_type = other DNA

SEQ ID NO: 198554 - DNA, 80 bp, synthetic construct; identical to SEQ ID NO: 13824
  source 1..80: mol_type = other DNA

SEQ ID NO: 198555 - DNA, 80 bp, synthetic construct; identical to SEQ ID NO: 13825
  source 1..80: mol_type = other DNA

SEQ ID NO: 198556 - DNA, 80 bp, synthetic construct; identical to SEQ ID NO: 13826
  source 1..80: mol_type = other DNA

SEQ ID NO: 198557 - DNA, 80 bp, synthetic construct; identical to SEQ ID NO: 13827
  source 1..80: mol_type = other DNA

SEQ ID NO: 198558 - DNA, 80 bp, synthetic construct; identical to SEQ ID NO: 13828
  source 1..80: mol_type = other DNA

SEQ ID NO: 198559 - DNA, 80 bp, synthetic construct; identical to SEQ ID NO: 13829
  source 1..80: mol_type = other DNA

SEQ ID NO: 198560 - DNA, 80 bp, synthetic construct; identical to SEQ ID NO: 13830
  source 1..80: mol_type = other DNA

SEQ ID NO: 198561 - DNA, 80 bp, synthetic construct; identical to SEQ ID NO: 13831
  source 1..80: mol_type = other DNA

SEQ ID NO: 198562 - DNA, 80 bp, synthetic construct; identical to SEQ ID NO: 13832
  source 1..80: mol_type = other DNA

SEQ ID NO: 198563 - DNA, 80 bp, synthetic construct; identical to SEQ ID NO: 13833
  source 1..80: mol_type = other DNA

SEQ ID NO: 198564 - DNA, 80 bp, synthetic construct; identical to SEQ ID NO: 13834
  source 1..80: mol_type = other DNA

SEQ ID NO: 198565 - DNA, 80 bp, synthetic construct; identical to SEQ ID NO: 13835
  source 1..80: mol_type = other DNA

SEQ ID NO: 198566 - DNA, 80 bp, synthetic construct; identical to SEQ ID NO: 13836
  source 1..80: mol_type = other DNA

SEQ ID NO: 198567 - DNA, 80 bp, synthetic construct; identical to SEQ ID NO: 13837
  source 1..80: mol_type = other DNA

SEQ ID NO: 198568 - DNA, 80 bp, synthetic construct; identical to SEQ ID NO: 13838
  source 1..80: mol_type = other DNA

SEQ ID NO: 198569 - DNA, 80 bp, synthetic construct; identical to SEQ ID NO: 13839
  source 1..80: mol_type = other DNA

SEQ ID NO: 198570 - DNA, 80 bp, synthetic construct; identical to SEQ ID NO: 13840
  source 1..80: mol_type = other DNA

SEQ ID NO: 198571 - DNA, 80 bp, synthetic construct; identical to SEQ ID NO: 13841
  source 1..80: mol_type = other DNA

SEQ ID NO: 198572 - DNA, 80 bp, synthetic construct; identical to SEQ ID NO: 13842
  source 1..80: mol_type = other DNA

SEQ ID NO: 198573 - DNA, 80 bp, synthetic construct; identical to SEQ ID NO: 13843
  source 1..80: mol_type = other DNA

SEQ ID NO: 198574 - DNA, 80 bp, synthetic construct; identical to SEQ ID NO: 13844
  source 1..80: mol_type = other DNA

SEQ ID NO: 198575 - DNA, 80 bp, synthetic construct; identical to SEQ ID NO: 13845
  source 1..80: mol_type = other DNA

SEQ ID NO: 198576 - DNA, 80 bp, synthetic construct; identical to SEQ ID NO: 13846
  source 1..80: mol_type = other DNA

SEQ ID NO: 198577 - DNA, 80 bp, synthetic construct; identical to SEQ ID NO: 13847
  source 1..80: mol_type = other DNA

SEQ ID NO: 198578 - DNA, 80 bp, synthetic construct; identical to SEQ ID NO: 13848
  source 1..80: mol_type = other DNA

SEQ ID NO: 198579 - DNA, 80 bp, synthetic construct; identical to SEQ ID NO: 13849
  source 1..80: mol_type = other DNA

SEQ ID NO: 198580 - DNA, 80 bp, synthetic construct; identical to SEQ ID NO: 13850
  source 1..80: mol_type = other DNA

SEQ ID NO: 198581 - DNA, 80 bp, synthetic construct; identical to SEQ ID NO: 13851
  source 1..80: mol_type = other DNA

SEQ ID NO: 198582 - DNA, 80 bp, synthetic construct; identical to SEQ ID NO: 13852
  source 1..80: mol_type = other DNA

SEQ ID NO: 198583 - DNA, 80 bp, synthetic construct; identical to SEQ ID NO: 13853
  source 1..80: mol_type = other DNA

SEQ ID NO: 198584 - DNA, 80 bp, synthetic construct; identical to SEQ ID NO: 13854
  source 1..80: mol_type = other DNA

SEQ ID NO: 198585 - DNA, 80 bp, synthetic construct; identical to SEQ ID NO: 13855
  source 1..80: mol_type = other DNA

SEQ ID NO: 198586 - DNA, 80 bp, synthetic construct; identical to SEQ ID NO: 13856
  source 1..80: mol_type = other DNA

SEQ ID NO: 198587 - DNA, 80 bp, synthetic construct; identical to SEQ ID NO: 13857
  source 1..80: mol_type = other DNA

SEQ ID NO: 198588 - DNA, 80 bp, synthetic construct; identical to SEQ ID NO: 13858
  source 1..80: mol_type = other DNA

SEQ ID NO: 198589 - DNA, 80 bp, synthetic construct; identical to SEQ ID NO: 13859
  source 1..80: mol_type = other DNA

SEQ ID NO: 198590 - DNA, 80 bp, synthetic construct; identical to SEQ ID NO: 13860
  source 1..80: mol_type = other DNA

SEQ ID NO: 198591 - DNA, 80 bp, synthetic construct; identical to SEQ ID NO: 13861
  source 1..80: mol_type = other DNA

SEQ ID NO: 198592 - DNA, 80 bp, synthetic construct; identical to SEQ ID NO: 13862
  source 1..80: mol_type = other DNA

SEQ ID NO: 198593 - DNA, 80 bp, synthetic construct; identical to SEQ ID NO: 13863
  source 1..80: mol_type = other DNA

SEQ ID NO: 198594 - DNA, 80 bp, synthetic construct; identical to SEQ ID NO: 13864
  source 1..80: mol_type = other DNA

SEQ ID NO: 198595 - DNA, 80 bp, synthetic construct; identical to SEQ ID NO: 13865
  source 1..80: mol_type = other DNA

SEQ ID NO: 198596 - DNA, 80 bp, synthetic construct; identical to SEQ ID NO: 13866
  source 1..80: mol_type = other DNA

SEQ ID NO: 198597 - DNA, 80 bp, synthetic construct; identical to SEQ ID NO: 13867
  source 1..80: mol_type = other DNA

SEQ ID NO: 198598 - DNA, 80 bp, synthetic construct; identical to SEQ ID NO: 13868
  source 1..80: mol_type = other DNA

SEQ ID NO: 198599 - DNA, 80 bp, synthetic construct; identical to SEQ ID NO: 13869
  source 1..80: mol_type = other DNA

SEQ ID NO: 198600 - DNA, 80 bp, synthetic construct; identical to SEQ ID NO: 13870
  source 1..80: mol_type = other DNA

SEQ ID NO: 198601 - DNA, 80 bp, synthetic construct; identical to SEQ ID NO: 13871
  source 1..80: mol_type = other DNA

SEQ ID NO: 198602 - DNA, 80 bp, synthetic construct; identical to SEQ ID NO: 13872
  source 1..80: mol_type = other DNA

SEQ ID NO: 198603 - DNA, 80 bp, synthetic construct; identical to SEQ ID NO: 13873
  source 1..80: mol_type = other DNA

SEQ ID NO: 198604 - DNA, 80 bp, synthetic construct; identical to SEQ ID NO: 13874
  source 1..80: mol_type = other DNA

SEQ ID NO: 198605 - DNA, 80 bp, synthetic construct; identical to SEQ ID NO: 13875
  source 1..80: mol_type = other DNA

SEQ ID NO: 198606 - DNA, 80 bp, synthetic construct; identical to SEQ ID NO: 13876
  source 1..80: mol_type = other DNA

SEQ ID NO: 198607 - DNA, 80 bp, synthetic construct; identical to SEQ ID NO: 13877
  source 1..80: mol_type = other DNA

SEQ ID NO: 198608 - DNA, 80 bp, synthetic construct; identical to SEQ ID NO: 13878
  source 1..80: mol_type = other DNA

SEQ ID NO: 198609 - DNA, 80 bp, synthetic construct; identical to SEQ ID NO: 13879
  source 1..80: mol_type = other DNA

SEQ ID NO: 198610 - DNA, 80 bp, synthetic construct; identical to SEQ ID NO: 13880
  source 1..80: mol_type = other DNA

SEQ ID NO: 198611 - DNA, 80 bp, synthetic construct; identical to SEQ ID NO: 13881
  source 1..80: mol_type = other DNA

SEQ ID NO: 198612 - DNA, 80 bp, synthetic construct; identical to SEQ ID NO: 13882
  source 1..80: mol_type = other DNA

SEQ ID NO: 198613 - DNA, 80 bp, synthetic construct; identical to SEQ ID NO: 13883
  source 1..80: mol_type = other DNA

SEQ ID NO: 198614 - DNA, 80 bp, synthetic construct; identical to SEQ ID NO: 13884
  source 1..80: mol_type = other DNA

SEQ ID NO: 198615 - DNA, 80 bp, synthetic construct; identical to SEQ ID NO: 13885
  source 1..80: mol_type = other DNA

SEQ ID NO: 198616 - DNA, 80 bp, synthetic construct; identical to SEQ ID NO: 13886
  source 1..80: mol_type = other DNA

SEQ ID NO: 198617 - DNA, 80 bp, synthetic construct; identical to SEQ ID NO: 13887
  source 1..80: mol_type = other DNA

SEQ ID NO: 198618 - DNA, 80 bp, synthetic construct; identical to SEQ ID NO: 13888
  source 1..80: mol_type = other DNA

SEQ ID NO: 198619 - DNA, 80 bp, synthetic construct; identical to SEQ ID NO: 13889
  source 1..80: mol_type = other DNA

SEQ ID NO: 198620 - DNA, 80 bp, synthetic construct; identical to SEQ ID NO: 13890
  source 1..80: mol_type = other DNA

SEQ ID NO: 198621 - DNA, 80 bp, synthetic construct; identical to SEQ ID NO: 13891
  source 1..80: mol_type = other DNA

SEQ ID NO: 198622 - DNA, 80 bp, synthetic construct; identical to SEQ ID NO: 13892
  source 1..80: mol_type = other DNA

SEQ ID NO: 198623 - DNA, 80 bp, synthetic construct; identical to SEQ ID NO: 13893
  source 1..80: mol_type = other DNA

SEQ ID NO: 198624 - DNA, 80 bp, synthetic construct; identical to SEQ ID NO: 13894
  source 1..80: mol_type = other DNA

SEQ ID NO: 198625 - DNA, 80 bp, synthetic construct; identical to SEQ ID NO: 13895
  source 1..80: mol_type = other DNA

SEQ ID NO: 198626 - DNA, 80 bp, synthetic construct; identical to SEQ ID NO: 13896
  source 1..80: mol_type = other DNA

SEQ ID NO: 198627 - DNA, 80 bp, synthetic construct; identical to SEQ ID NO: 13897
  source 1..80: mol_type = other DNA

SEQ ID NO: 198628 - DNA, 80 bp, synthetic construct; identical to SEQ ID NO: 13898
  source 1..80: mol_type = other DNA

SEQ ID NO: 198629 - DNA, 80 bp, synthetic construct; identical to SEQ ID NO: 13899
  source 1..80: mol_type = other DNA

SEQ ID NO: 198630 - DNA, 80 bp, synthetic construct; identical to SEQ ID NO: 13900
  source 1..80: mol_type = other DNA

SEQ ID NO: 198631 - DNA, 80 bp, synthetic construct; identical to SEQ ID NO: 13901
  source 1..80: mol_type = other DNA

SEQ ID NO: 198632 - DNA, 80 bp, synthetic construct; identical to SEQ ID NO: 13902
  source 1..80: mol_type = other DNA

SEQ ID NO: 198633 - DNA, 80 bp, synthetic construct; identical to SEQ ID NO: 13903
  source 1..80: mol_type = other DNA

SEQ ID NO: 198634 - DNA, 80 bp, synthetic construct; identical to SEQ ID NO: 13904
  source 1..80: mol_type = other DNA

SEQ ID NO: 198635 - DNA, 80 bp, synthetic construct; identical to SEQ ID NO: 13905
  source 1..80: mol_type = other DNA

SEQ ID NO: 198636 - DNA, 80 bp, synthetic construct; identical to SEQ ID NO: 13906
  source 1..80: mol_type = other DNA

SEQ ID NO: 198637 - DNA, 80 bp, synthetic construct; identical to SEQ ID NO: 13907
  source 1..80: mol_type = other DNA

SEQ ID NO: 198638 - DNA, 80 bp, synthetic construct; identical to SEQ ID NO: 13908
  source 1..80: mol_type = other DNA

SEQ ID NO: 198639 - DNA, 80 bp, synthetic construct; identical to SEQ ID NO: 13909
  source 1..80: mol_type = other DNA

SEQ ID NO: 198640 - DNA, 80 bp, synthetic construct; identical to SEQ ID NO: 13910
  source 1..80: mol_type = other DNA

SEQ ID NO: 198641 - DNA, 80 bp, synthetic construct; identical to SEQ ID NO: 13911
  source 1..80: mol_type = other DNA

SEQ ID NO: 198642 - DNA, 80 bp, synthetic construct; identical to SEQ ID NO: 13912
  source 1..80: mol_type = other DNA

SEQ ID NO: 198643 - DNA, 80 bp, synthetic construct; identical to SEQ ID NO: 13913
  source 1..80: mol_type = other DNA

SEQ ID NO: 198644 - DNA, 80 bp, synthetic construct; identical to SEQ ID NO: 13914
  source 1..80: mol_type = other DNA

SEQ ID NO: 198645 - DNA, 80 bp, synthetic construct; identical to SEQ ID NO: 13915
  source 1..80: mol_type = other DNA

SEQ ID NO: 198646 - DNA, 80 bp, synthetic construct; identical to SEQ ID NO: 13916
  source 1..80: mol_type = other DNA

SEQ ID NO: 198647 - DNA, 80 bp, synthetic construct; identical to SEQ ID NO: 13917
  source 1..80: mol_type = other DNA

SEQ ID NO: 198648 - DNA, 80 bp, synthetic construct; identical to SEQ ID NO: 13918
  source 1..80: mol_type = other DNA

SEQ ID NO: 198649 - DNA, 80 bp, synthetic construct; identical to SEQ ID NO: 13919
  source 1..80: mol_type = other DNA

SEQ ID NO: 198650 - DNA, 80 bp, synthetic construct; identical to SEQ ID NO: 13920
  source 1..80: mol_type = other DNA

SEQ ID NO: 198651 - DNA, 80 bp, synthetic construct; identical to SEQ ID NO: 13921
  source 1..80: mol_type = other DNA

SEQ ID NO: 198652 - DNA, 80 bp, synthetic construct; identical to SEQ ID NO: 13922
  source 1..80: mol_type = other DNA

SEQ ID NO: 198653 - DNA, 80 bp, synthetic construct; identical to SEQ ID NO: 13923
  source 1..80: mol_type = other DNA

SEQ ID NO: 198654 - DNA, 80 bp, synthetic construct; identical to SEQ ID NO: 13924
  source 1..80: mol_type = other DNA

SEQ ID NO: 198655 - DNA, 80 bp, synthetic construct; identical to SEQ ID NO: 13925
  source 1..80: mol_type = other DNA

SEQ ID NO: 198656 - DNA, 80 bp, synthetic construct; identical to SEQ ID NO: 13926
  source 1..80: mol_type = other DNA

SEQ ID NO: 198657 - DNA, 80 bp, synthetic construct; identical to SEQ ID NO: 13927
  source 1..80: mol_type = other DNA

SEQ ID NO: 198658 - DNA, 80 bp, synthetic construct; identical to SEQ ID NO: 13928
  source 1..80: mol_type = other DNA

SEQ ID NO: 198659 - DNA, 80 bp, synthetic construct; identical to SEQ ID NO: 13929
  source 1..80: mol_type = other DNA

SEQ ID NO: 198660 - DNA, 80 bp, synthetic construct; identical to SEQ ID NO: 13930
  source 1..80: mol_type = other DNA

SEQ ID NO: 198661 - DNA, 80 bp, synthetic construct; identical to SEQ ID NO: 13931
  source 1..80: mol_type = other DNA

SEQ ID NO: 198662 - DNA, 80 bp, synthetic construct; identical to SEQ ID NO: 13932
  source 1..80: mol_type = other DNA

SEQ ID NO: 198663 - DNA, 80 bp, synthetic construct; identical to SEQ ID NO: 13933
  source 1..80: mol_type = other DNA

SEQ ID NO: 198664 - DNA, 80 bp, synthetic construct; identical to SEQ ID NO: 13934
  source 1..80: mol_type = other DNA

SEQ ID NO: 198665 - DNA, 80 bp, synthetic construct; identical to SEQ ID NO: 13935
  source 1..80: mol_type = other DNA

SEQ ID NO: 198666 - DNA, 80 bp, synthetic construct; identical to SEQ ID NO: 13936
  source 1..80: mol_type = other DNA

SEQ ID NO: 198667 - DNA, 80 bp, synthetic construct; identical to SEQ ID NO: 13937
  source 1..80: mol_type = other DNA

SEQ ID NO: 198668 - DNA, 80 bp, synthetic construct; identical to SEQ ID NO: 13938
  source 1..80: mol_type = other DNA

SEQ ID NO: 198669 - DNA, 80 bp, synthetic construct; identical to SEQ ID NO: 13939
  source 1..80: mol_type = other DNA

SEQ ID NO: 198670 - DNA, 80 bp, synthetic construct; identical to SEQ ID NO: 13940
  source 1..80: mol_type = other DNA

SEQ ID NO: 198671 - DNA, 80 bp, synthetic construct; identical to SEQ ID NO: 13941
  source 1..80: mol_type = other DNA

SEQ ID NO: 198672 - DNA, 80 bp, synthetic construct; identical to SEQ ID NO: 13942
  source 1..80: mol_type = other DNA

SEQ ID NO: 198673 - DNA, 80 bp, synthetic construct; identical to SEQ ID NO: 13943
  source 1..80: mol_type = other DNA

SEQ ID NO: 198674 - DNA, 80 bp, synthetic construct; identical to SEQ ID NO: 13944
  source 1..80: mol_type = other DNA

SEQ ID NO: 198675 - DNA, 80 bp, synthetic construct; identical to SEQ ID NO: 13945
  source 1..80: mol_type = other DNA

SEQ ID NO: 198676 - DNA, 80 bp, synthetic construct; identical to SEQ ID NO: 13946
  source 1..80: mol_type = other DNA

SEQ ID NO: 198677 - DNA, 80 bp, synthetic construct; identical to SEQ ID NO: 13947
  source 1..80: mol_type = other DNA

SEQ ID NO: 198678 - DNA, 80 bp, synthetic construct; identical to SEQ ID NO: 13948
  source 1..80: mol_type = other DNA

SEQ ID NO: 198679 - DNA, 80 bp, synthetic construct; identical to SEQ ID NO: 13949
  source 1..80: mol_type = other DNA

SEQ ID NO: 198680 - DNA, 80 bp, synthetic construct; identical to SEQ ID NO: 13950
  source 1..80: mol_type = other DNA

SEQ ID NO: 198681 - DNA, 80 bp, synthetic construct; identical to SEQ ID NO: 13951
  source 1..80: mol_type = other DNA

SEQ ID NO: 198682 - DNA, 80 bp, synthetic construct; identical to SEQ ID NO: 13952
  source 1..80: mol_type = other DNA

SEQ ID NO: 198683 - DNA, 80 bp, synthetic construct; identical to SEQ ID NO: 13953
  source 1..80: mol_type = other DNA

SEQ ID NO: 198684 - DNA, 80 bp, synthetic construct; identical to SEQ ID NO: 13954
  source 1..80: mol_type = other DNA

SEQ ID NO: 198685 - DNA, 80 bp, synthetic construct; identical to SEQ ID NO: 13955
  source 1..80: mol_type = other DNA

SEQ ID NO: 198686 - DNA, 80 bp, synthetic construct; identical to SEQ ID NO: 13956
  source 1..80: mol_type = other DNA

SEQ ID NO: 198687 - DNA, 80 bp, synthetic construct; identical to SEQ ID NO: 13957
  source 1..80: mol_type = other DNA

SEQ ID NO: 198688 - DNA, 80 bp, synthetic construct; identical to SEQ ID NO: 13958
  source 1..80: mol_type = other DNA

SEQ ID NO: 198689 - DNA, 80 bp, synthetic construct; identical to SEQ ID NO: 13959
  source 1..80: mol_type = other DNA

SEQ ID NO: 198690 - DNA, 80 bp, synthetic construct; identical to SEQ ID NO: 13960
  source 1..80: mol_type = other DNA

SEQ ID NO: 198691 - DNA, 80 bp, synthetic construct; identical to SEQ ID NO: 13961
  source 1..80: mol_type = other DNA

SEQ ID NO: 198692 - DNA, 80 bp, synthetic construct; identical to SEQ ID NO: 13962
  source 1..80: mol_type = other DNA

SEQ ID NO: 198693 - DNA, 80 bp, synthetic construct; identical to SEQ ID NO: 13963
  source 1..80: mol_type = other DNA

SEQ ID NO: 198694 - DNA, 80 bp, synthetic construct; identical to SEQ ID NO: 13964
  source 1..80: mol_type = other DNA

SEQ ID NO: 198695 - DNA, 80 bp, synthetic construct; identical to SEQ ID NO: 13965
  source 1..80: mol_type = other DNA

SEQ ID NO: 198696 - DNA, 80 bp, synthetic construct; identical to SEQ ID NO: 13966
  source 1..80: mol_type = other DNA

SEQ ID NO: 198697 - DNA, 80 bp, synthetic construct; identical to SEQ ID NO: 13967
  source 1..80: mol_type = other DNA

SEQ ID NO: 198698 - DNA, 80 bp, synthetic construct; identical to SEQ ID NO: 13968
  source 1..80: mol_type = other DNA

SEQ ID NO: 198699 - DNA, 80 bp, synthetic construct; identical to SEQ ID NO: 13969
  source 1..80: mol_type = other DNA

SEQ ID NO: 198700 - DNA, 80 bp, synthetic construct; identical to SEQ ID NO: 13970
  source 1..80: mol_type = other DNA

SEQ ID NO: 198701 - DNA, 80 bp, synthetic construct; identical to SEQ ID NO: 13971
  source 1..80: mol_type = other DNA

SEQ ID NO: 198702 - DNA, 80 bp, synthetic construct; identical to SEQ ID NO: 13972
  source 1..80: mol_type = other DNA

SEQ ID NO: 198703 - DNA, 80 bp, synthetic construct; identical to SEQ ID NO: 13973
  source 1..80: mol_type = other DNA

SEQ ID NO: 198704 - DNA, 80 bp, synthetic construct; identical to SEQ ID NO: 13974
  source 1..80: mol_type = other DNA

SEQ ID NO: 198705 - DNA, 80 bp, synthetic construct; identical to SEQ ID NO: 13975
  source 1..80: mol_type = other DNA

SEQ ID NO: 198706 - DNA, 80 bp, synthetic construct; identical to SEQ ID NO: 13976
  source 1..80: mol_type = other DNA

SEQ ID NO: 198707 - DNA, 80 bp, synthetic construct; identical to SEQ ID NO: 13977
  source 1..80: mol_type = other DNA

SEQ ID NO: 198708 - DNA, 80 bp, synthetic construct; identical to SEQ ID NO: 13978
  source 1..80: mol_type = other DNA

SEQ ID NO: 198709 - DNA, 80 bp, synthetic construct; identical to SEQ ID NO: 13979
  source 1..80: mol_type = other DNA

SEQ ID NO: 198710 - DNA, 80 bp, synthetic construct; identical to SEQ ID NO: 13980
  source 1..80: mol_type = other DNA

SEQ ID NO: 198711 - DNA, 80 bp, synthetic construct; identical to SEQ ID NO: 13981
  source 1..80: mol_type = other DNA

SEQ ID NO: 198712 - DNA, 80 bp, synthetic construct; identical to SEQ ID NO: 13982
  source 1..80: mol_type = other DNA

SEQ ID NO: 198713 - DNA, 80 bp, synthetic construct; identical to SEQ ID NO: 13983
  source 1..80: mol_type = other DNA

SEQ ID NO: 198714 - DNA, 80 bp, synthetic construct; identical to SEQ ID NO: 13984
  source 1..80: mol_type = other DNA

SEQ ID NO: 198715 - DNA, 80 bp, synthetic construct; identical to SEQ ID NO: 13985
  source 1..80: mol_type = other DNA

SEQ ID NO: 198716 - DNA, 80 bp, synthetic construct; identical to SEQ ID NO: 13986
  source 1..80: mol_type = other DNA

SEQ ID NO: 198717 - DNA, 80 bp, synthetic construct; identical to SEQ ID NO: 13987
  source 1..80: mol_type = other DNA

SEQ ID NO: 198718 - DNA, 80 bp, synthetic construct; identical to SEQ ID NO: 13988
  source 1..80: mol_type = other DNA

SEQ ID NO: 198719 - DNA, 80 bp, synthetic construct; identical to SEQ ID NO: 13989
  source 1..80: mol_type = other DNA

SEQ ID NO: 198720 - DNA, 80 bp, synthetic construct; identical to SEQ ID NO: 13990
  source 1..80: mol_type = other DNA

SEQ ID NO: 198721 - DNA, 80 bp, synthetic construct; identical to SEQ ID NO: 13991
  source 1..80: mol_type = other DNA

SEQ ID NO: 198722 - DNA, 80 bp, synthetic construct; identical to SEQ ID NO: 13992
  source 1..80: mol_type = other DNA

SEQ ID NO: 198723 - DNA, 80 bp, synthetic construct; identical to SEQ ID NO: 13993
  source 1..80: mol_type = other DNA

SEQ ID NO: 198724 - DNA, 80 bp, synthetic construct; identical to SEQ ID NO: 13994
  source 1..80: mol_type = other DNA

SEQ ID NO: 198725 - DNA, 80 bp, synthetic construct; identical to SEQ ID NO: 13995
  source 1..80: mol_type = other DNA

SEQ ID NO: 198726 - DNA, 80 bp, synthetic construct; identical to SEQ ID NO: 13996
  source 1..80: mol_type = other DNA

SEQ ID NO: 198727 - DNA, 80 bp, synthetic construct; identical to SEQ ID NO: 13997
  source 1..80: mol_type = other DNA

SEQ ID NO: 198728 - DNA, 80 bp, synthetic construct; identical to SEQ ID NO: 13998
  source 1..80: mol_type = other DNA

SEQ ID NO: 198729 - DNA, 80 bp, synthetic construct; identical to SEQ ID NO: 13999
  source 1..80: mol_type = other DNA

SEQ ID NO: 198730 - DNA, 80 bp, synthetic construct; identical to SEQ ID NO: 14000
  source 1..80: mol_type = other DNA

SEQ ID NO: 198731 - DNA, 80 bp, synthetic construct; identical to SEQ ID NO: 14001
  source 1..80: mol_type = other DNA

SEQ ID NO: 198732 - DNA, 80 bp, synthetic construct; identical to SEQ ID NO: 14002
  source 1..80: mol_type = other DNA

SEQ ID NO: 198733 - DNA, 80 bp, synthetic construct; identical to SEQ ID NO: 14003
  source 1..80: mol_type = other DNA

SEQ ID NO: 198734 - DNA, 80 bp, synthetic construct; identical to SEQ ID NO: 14004
  source 1..80: mol_type = other DNA

SEQ ID NO: 198735 - DNA, 80 bp, synthetic construct; identical to SEQ ID NO: 14005
  source 1..80: mol_type = other DNA

SEQ ID NO: 198736 - DNA, 80 bp, synthetic construct; identical to SEQ ID NO: 14006
  source 1..80: mol_type = other DNA

SEQ ID NO: 198737 - DNA, 80 bp, synthetic construct; identical to SEQ ID NO: 14007
  source 1..80: mol_type = other DNA

SEQ ID NO: 198738 - DNA, 80 bp, synthetic construct; identical to SEQ ID NO: 14008
  source 1..80: mol_type = other DNA

SEQ ID NO: 198739 - DNA, 80 bp, synthetic construct; identical to SEQ ID NO: 14009
  source 1..80: mol_type = other DNA

SEQ ID NO: 198740 - DNA, 80 bp, synthetic construct; identical to SEQ ID NO: 14010
  source 1..80: mol_type = other DNA

SEQ ID NO: 198741 - DNA, 80 bp, synthetic construct; identical to SEQ ID NO: 14011
  source 1..80: mol_type = other DNA

SEQ ID NO: 198742 - DNA, 80 bp, synthetic construct; identical to SEQ ID NO: 14012
  source 1..80: mol_type = other DNA

SEQ ID NO: 198743 - DNA, 80 bp, synthetic construct; identical to SEQ ID NO: 14013
  source 1..80: mol_type = other DNA

SEQ ID NO: 198744 - DNA, 80 bp, synthetic construct; identical to SEQ ID NO: 14014
  source 1..80: mol_type = other DNA

SEQ ID NO: 198745 - DNA, 80 bp, synthetic construct; identical to SEQ ID NO: 14015
  source 1..80: mol_type = other DNA

SEQ ID NO: 198746 - DNA, 80 bp, synthetic construct; identical to SEQ ID NO: 14016
  source 1..80: mol_type = other DNA

SEQ ID NO: 198747 - DNA, 80 bp, synthetic construct; identical to SEQ ID NO: 14017
  source 1..80: mol_type = other DNA

SEQ ID NO: 198748 - DNA, 80 bp, synthetic construct; identical to SEQ ID NO: 14018
  source 1..80: mol_type = other DNA

SEQ ID NO: 198749 - DNA, 80 bp, synthetic construct; identical to SEQ ID NO: 14019
  source 1..80: mol_type = other DNA

SEQ ID NO: 198750 - DNA, 80 bp, synthetic construct; identical to SEQ ID NO: 14020
  source 1..80: mol_type = other DNA

SEQ ID NO: 198751 - DNA, 80 bp, synthetic construct; identical to SEQ ID NO: 14021
  source 1..80: mol_type = other DNA

SEQ ID NO: 198752 - DNA, 80 bp, synthetic construct; identical to SEQ ID NO: 14022
  source 1..80: mol_type = other DNA

SEQ ID NO: 198753 - DNA, 80 bp, synthetic construct; identical to SEQ ID NO: 14023
  source 1..80: mol_type = other DNA

SEQ ID NO: 198754 - DNA, 80 bp, synthetic construct; identical to SEQ ID NO: 14024
  source 1..80: mol_type = other DNA

SEQ ID NO: 198755 - DNA, 80 bp, synthetic construct; identical to SEQ ID NO: 14025
  source 1..80: mol_type = other DNA

SEQ ID NO: 198756 - DNA, 80 bp, synthetic construct; identical to SEQ ID NO: 14026
  source 1..80: mol_type = other DNA

SEQ ID NO: 198757 - DNA, 80 bp, synthetic construct; identical to SEQ ID NO: 14027
  source 1..80: mol_type = other DNA

SEQ ID NO: 198758 - DNA, 80 bp, synthetic construct; identical to SEQ ID NO: 14028
  source 1..80: mol_type = other DNA

SEQ ID NO: 198759 - DNA, 80 bp, synthetic construct; identical to SEQ ID NO: 14029
  source 1..80: mol_type = other DNA

SEQ ID NO: 198760 - DNA, 80 bp, synthetic construct; identical to SEQ ID NO: 14030
  source 1..80: mol_type = other DNA

SEQ ID NO: 198761 - DNA, 80 bp, synthetic construct; identical to SEQ ID NO: 14031
  source 1..80: mol_type = other DNA

SEQ ID NO: 198762 - DNA, 80 bp, synthetic construct; identical to SEQ ID NO: 14032
  source 1..80: mol_type = other DNA

SEQ ID NO: 198763 - DNA, 80 bp, synthetic construct; identical to SEQ ID NO: 14033
  source 1..80: mol_type = other DNA

SEQ ID NO: 198764 - DNA, 80 bp, synthetic construct; identical to SEQ ID NO: 14034
  source 1..80: mol_type = other DNA

SEQ ID NO: 198765 - DNA, 80 bp, synthetic construct; identical to SEQ ID NO: 14035
  source 1..80: mol_type = other DNA

SEQ ID NO: 198766 - DNA, 80 bp, synthetic construct; identical to SEQ ID NO: 14036
  source 1..80: mol_type = other DNA

SEQ ID NO: 198767 - DNA, 80 bp, synthetic construct; identical to SEQ ID NO: 14037
  source 1..80: mol_type = other DNA

SEQ ID NO: 198768 - DNA, 80 bp, synthetic construct; identical to SEQ ID NO: 14038
  source 1..80: mol_type = other DNA

SEQ ID NO: 198769 - DNA, 80 bp, synthetic construct; identical to SEQ ID NO: 14039
  source 1..80: mol_type = other DNA

SEQ ID NO: 198770 - DNA, 80 bp, synthetic construct; identical to SEQ ID NO: 14040
  source 1..80: mol_type = other DNA

SEQ ID NO: 198771 - DNA, 80 bp, synthetic construct; identical to SEQ ID NO: 14041
  source 1..80: mol_type = other DNA

SEQ ID NO: 198772 - DNA, 80 bp, synthetic construct; identical to SEQ ID NO: 14042
  source 1..80: mol_type = other DNA

SEQ ID NO: 198773 - DNA, 80 bp, synthetic construct; identical to SEQ ID NO: 14043
  source 1..80: mol_type = other DNA

SEQ ID NO: 198774 - DNA, 80 bp, synthetic construct; identical to SEQ ID NO: 14044
  source 1..80: mol_type = other DNA

SEQ ID NO: 198775 - DNA, 80 bp, synthetic construct; identical to SEQ ID NO: 14045
  source 1..80: mol_type = other DNA

SEQ ID NO: 198776 - DNA, 80 bp, synthetic construct; identical to SEQ ID NO: 14046
  source 1..80: mol_type = other DNA

SEQ ID NO: 198777 - DNA, 80 bp, synthetic construct; identical to SEQ ID NO: 14047
  source 1..80: mol_type = other DNA

SEQ ID NO: 198778 - DNA, 80 bp, synthetic construct; identical to SEQ ID NO: 14048
  source 1..80: mol_type = other DNA

SEQ ID NO: 198779 - DNA, 80 bp, synthetic construct; identical to SEQ ID NO: 14049
  source 1..80: mol_type = other DNA

SEQ ID NO: 198780 - DNA, 80 bp, synthetic construct; identical to SEQ ID NO: 14050
  source 1..80: mol_type = other DNA

SEQ ID NO: 198781 - DNA, 80 bp, synthetic construct; identical to SEQ ID NO: 14051
  source 1..80: mol_type = other DNA

SEQ ID NO: 198782 - DNA, 80 bp, synthetic construct; identical to SEQ ID NO: 14052
  source 1..80: mol_type = other DNA

SEQ ID NO: 198783 - DNA, 80 bp, synthetic construct; identical to SEQ ID NO: 14053
  source 1..80: mol_type = other DNA

SEQ ID NO: 198784 - DNA, 80 bp, synthetic construct; identical to SEQ ID NO: 14054
  source 1..80: mol_type = other DNA

SEQ ID NO: 198785 - DNA, 80 bp, synthetic construct; identical to SEQ ID NO: 14055
  source 1..80: mol_type = other DNA

SEQ ID NO: 198786 - DNA, 80 bp, synthetic construct; identical to SEQ ID NO: 14056
  source 1..80: mol_type = other DNA

SEQ ID NO: 198787 - DNA, 80 bp, synthetic construct; identical to SEQ ID NO: 14057
  source 1..80: mol_type = other DNA

SEQ ID NO: 198788 - DNA, 80 bp, synthetic construct; identical to SEQ ID NO: 14058
  source 1..80: mol_type = other DNA

SEQ ID NO: 198789 - DNA, 80 bp, synthetic construct; identical to SEQ ID NO: 14059
  source 1..80: mol_type = other DNA

SEQ ID NO: 198790 - DNA, 80 bp, synthetic construct; identical to SEQ ID NO: 14060
  source 1..80: mol_type = other DNA

SEQ ID NO: 198791 - DNA, 80 bp, synthetic construct; identical to SEQ ID NO: 14061
  source 1..80: mol_type = other DNA

SEQ ID NO: 198792 - DNA, 80 bp, synthetic construct; identical to SEQ ID NO: 14062
  source 1..80: mol_type = other DNA

SEQ ID NO: 198793 - DNA, 80 bp, synthetic construct; identical to SEQ ID NO: 14063
  source 1..80: mol_type = other DNA

SEQ ID NO: 198794 - DNA, 80 bp, synthetic construct; identical to SEQ ID NO: 14064
  source 1..80: mol_type = other DNA

SEQ ID NO: 198795 - DNA, 80 bp, synthetic construct; identical to SEQ ID NO: 14065
  source 1..80: mol_type = other DNA

SEQ ID NO: 198796 - DNA, 80 bp, synthetic construct; identical to SEQ ID NO: 14066
  source 1..80: mol_type = other DNA

SEQ ID NO: 198797 - DNA, 80 bp, synthetic construct; identical to SEQ ID NO: 14067
  source 1..80: mol_type = other DNA

SEQ ID NO: 198798 - DNA, 80 bp, synthetic construct; identical to SEQ ID NO: 14068
  source 1..80: mol_type = other DNA

SEQ ID NO: 198799 - DNA, 80 bp, synthetic construct; identical to SEQ ID NO: 14069
  source 1..80: mol_type = other DNA

SEQ ID NO: 198800 - DNA, 80 bp, synthetic construct; identical to SEQ ID NO: 14070
  source 1..80: mol_type = other DNA

SEQ ID NO: 198801 - DNA, 80 bp, synthetic construct; identical to SEQ ID NO: 14071
  source 1..80: mol_type = other DNA

SEQ ID NO: 198802 - DNA, 80 bp, synthetic construct; identical to SEQ ID NO: 14072
  source 1..80: mol_type = other DNA

SEQ ID NO: 198803 - DNA, 80 bp, synthetic construct; identical to SEQ ID NO: 14073
  source 1..80: mol_type = other DNA

SEQ ID NO: 198804 - DNA, 80 bp, synthetic construct; identical to SEQ ID NO: 14074
  source 1..80: mol_type = other DNA

SEQ ID NO: 198805 - DNA, 80 bp, synthetic construct; identical to SEQ ID NO: 14075
  source 1..80: mol_type = other DNA

SEQ ID NO: 198806 - DNA, 80 bp, synthetic construct; identical to SEQ ID NO: 14076
  source 1..80: mol_type = other DNA

SEQ ID NO: 198807 - DNA, 80 bp, synthetic construct; identical to SEQ ID NO: 14077
  source 1..80: mol_type = other DNA

SEQ ID NO: 198808 - DNA, 80 bp, synthetic construct; identical to SEQ ID NO: 14078
  source 1..80: mol_type = other DNA

SEQ ID NO: 198809 - DNA, 80 bp, synthetic construct; identical to SEQ ID NO: 14079
  source 1..80: mol_type = other DNA

SEQ ID NO: 198810 - DNA, 80 bp, synthetic construct; identical to SEQ ID NO: 14080
  source 1..80: mol_type = other DNA

SEQ ID NO: 198811 - DNA, 80 bp, synthetic construct; identical to SEQ ID NO: 14081
  source 1..80: mol_type = other DNA

SEQ ID NO: 198812 - DNA, 80 bp, synthetic construct; identical to SEQ ID NO: 14082
  source 1..80: mol_type = other DNA

SEQ ID NO: 198813 - DNA, 80 bp, synthetic construct; identical to SEQ ID NO: 14083
  source 1..80: mol_type = other DNA

SEQ ID NO: 198814 - DNA, 80 bp, synthetic construct; identical to SEQ ID NO: 14084
  source 1..80: mol_type = other DNA

SEQ ID NO: 198815 - DNA, 80 bp, synthetic construct; identical to SEQ ID NO: 14085
  source 1..80: mol_type = other DNA

SEQ ID NO: 198816 - DNA, 80 bp, synthetic construct; identical to SEQ ID NO: 14086
  source 1..80: mol_type = other DNA

SEQ ID NO: 198817 - DNA, 80 bp, synthetic construct; identical to SEQ ID NO: 14087
  source 1..80: mol_type = other DNA

SEQ ID NO: 198818 - DNA, 80 bp, synthetic construct; identical to SEQ ID NO: 14088
  source 1..80: mol_type = other DNA

SEQ ID NO: 198819 - DNA, 80 bp, synthetic construct; identical to SEQ ID NO: 14089
  source 1..80: mol_type = other DNA

SEQ ID NO: 198820 - DNA, 80 bp, synthetic construct; identical to SEQ ID NO: 14090
  source 1..80: mol_type = other DNA

SEQ ID NO: 198821 - DNA, 80 bp, synthetic construct; identical to SEQ ID NO: 14091
  source 1..80: mol_type = other DNA

SEQ ID NO: 198822 - DNA, 80 bp, synthetic construct; identical to SEQ ID NO: 14092
  source 1..80: mol_type = other DNA

SEQ ID NO: 198823 - DNA, 80 bp, synthetic construct; identical to SEQ ID NO: 14093
  source 1..80: mol_type = other DNA

SEQ ID NO: 198824 - DNA, 80 bp, synthetic construct; identical to SEQ ID NO: 14094
  source 1..80: mol_type = other DNA

SEQ ID NO: 198825 - DNA, 80 bp, synthetic construct; identical to SEQ ID NO: 14095
  source 1..80: mol_type = other DNA

SEQ ID NO: 198826 - DNA, 80 bp, synthetic construct; identical to SEQ ID NO: 14096
  source 1..80: mol_type = other DNA

SEQ ID NO: 198827 - DNA, 80 bp, synthetic construct; identical to SEQ ID NO: 14097
  source 1..80: mol_type = other DNA

SEQ ID NO: 198828 - DNA, 80 bp, synthetic construct; identical to SEQ ID NO: 14098
  source 1..80: mol_type = other DNA

SEQ ID NO: 198829 - DNA, 80 bp, synthetic construct; identical to SEQ ID NO: 14099
  source 1..80: mol_type = other DNA

SEQ ID NO: 198830 - DNA, 80 bp, synthetic construct; identical to SEQ ID NO: 14100
  source 1..80: mol_type = other DNA

SEQ ID NO: 198831 - DNA, 80 bp, synthetic construct; identical to SEQ ID NO: 14101
  source 1..80: mol_type = other DNA

SEQ ID NO: 198832 - DNA, 80 bp, synthetic construct; identical to SEQ ID NO: 14102
  source 1..80: mol_type = other DNA

SEQ ID NO: 198833 - DNA, 80 bp, synthetic construct; identical to SEQ ID NO: 14103
  source 1..80: mol_type = other DNA

SEQ ID NO: 198834 - DNA, 80 bp, synthetic construct; identical to SEQ ID NO: 14104
  source 1..80: mol_type = other DNA

SEQ ID NO: 198835 - DNA, 80 bp, synthetic construct; identical to SEQ ID NO: 14105
  source 1..80: mol_type = other DNA

SEQ ID NO: 198836 - DNA, 80 bp, synthetic construct; identical to SEQ ID NO: 14106
  source 1..80: mol_type = other DNA

SEQ ID NO: 198837 - DNA, 80 bp, synthetic construct; identical to SEQ ID NO: 14107
  source 1..80: mol_type = other DNA

SEQ ID NO: 198838 - DNA, 80 bp, synthetic construct; identical to SEQ ID NO: 14108
  source 1..80: mol_type = other DNA

SEQ ID NO: 198839 - DNA, 80 bp, synthetic construct; identical to SEQ ID NO: 14109
  source 1..80: mol_type = other DNA

SEQ ID NO: 198840 - DNA, 80 bp, synthetic construct; identical to SEQ ID NO: 14110
  source 1..80: mol_type = other DNA

SEQ ID NO: 198841 - DNA, 80 bp, synthetic construct; identical to SEQ ID NO: 14111
  source 1..80: mol_type = other DNA

SEQ ID NO: 198842 - DNA, 80 bp, synthetic construct; identical to SEQ ID NO: 14112
  source 1..80: mol_type = other DNA

SEQ ID NO: 198843 - DNA, 80 bp, synthetic construct; identical to SEQ ID NO: 14113
  source 1..80: mol_type = other DNA

SEQ ID NO: 198844 - DNA, 80 bp, synthetic construct; identical to SEQ ID NO: 14114
  source 1..80: mol_type = other DNA

SEQ ID NO: 198845 - DNA, 80 bp, synthetic construct; identical to SEQ ID NO: 14115
  source 1..80: mol_type = other DNA

SEQ ID NO: 198846 - DNA, 80 bp, synthetic construct; identical to SEQ ID NO: 14116
  source 1..80: mol_type = other DNA

SEQ ID NO: 198847 - DNA, 80 bp, synthetic construct; identical to SEQ ID NO: 14117
  source 1..80: mol_type = other DNA

SEQ ID NO: 198848 - DNA, 80 bp, synthetic construct; identical to SEQ ID NO: 14118
  source 1..80: mol_type = other DNA

SEQ ID NO: 198849 - DNA, 80 bp, synthetic construct; identical to SEQ ID NO: 14119
  source 1..80: mol_type = other DNA

SEQ ID NO: 198850 - DNA, 80 bp, synthetic construct; identical to SEQ ID NO: 14120
  source 1..80: mol_type = other DNA

SEQ ID NO: 198851 - DNA, 80 bp, synthetic construct; identical to SEQ ID NO: 14121
  source 1..80: mol_type = other DNA

SEQ ID NO: 198852 - DNA, 80 bp, synthetic construct; identical to SEQ ID NO: 14122
  source 1..80: mol_type = other DNA

SEQ ID NO: 198853 - DNA, 80 bp, synthetic construct; identical to SEQ ID NO: 14123
  source 1..80: mol_type = other DNA

SEQ ID NO: 198854 - DNA, 80 bp, synthetic construct; identical to SEQ ID NO: 14124
  source 1..80: mol_type = other DNA

SEQ ID NO: 198855 - DNA, 80 bp, synthetic construct; identical to SEQ ID NO: 14125
  source 1..80: mol_type = other DNA

SEQ ID NO: 198856 - DNA, 80 bp, synthetic construct; identical to SEQ ID NO: 14126
  source 1..80: mol_type = other DNA

SEQ ID NO: 198857 - DNA, 80 bp, synthetic construct; identical to SEQ ID NO: 14127
  source 1..80: mol_type = other DNA

SEQ ID NO: 198858 - DNA, 80 bp, synthetic construct; identical to SEQ ID NO: 14128
  source 1..80: mol_type = other DNA

SEQ ID NO: 198859 - DNA, 80 bp, synthetic construct; identical to SEQ ID NO: 14129
  source 1..80: mol_type = other DNA

SEQ ID NO: 198860 - DNA, 80 bp, synthetic construct; identical to SEQ ID NO: 14130
  source 1..80: mol_type = other DNA

SEQ ID NO: 198861 - DNA, 80 bp, synthetic construct; identical to SEQ ID NO: 14131
  source 1..80: mol_type = other DNA

SEQ ID NO: 198862 - DNA, 80 bp, synthetic construct; identical to SEQ ID NO: 14132
  source 1..80: mol_type = other DNA

SEQ ID NO: 198863 - DNA, 80 bp, synthetic construct; identical to SEQ ID NO: 14133
  source 1..80: mol_type = other DNA

SEQ ID NO: 198864 - DNA, 80 bp, synthetic construct; identical to SEQ ID NO: 14134
  source 1..80: mol_type = other DNA

SEQ ID NO: 198865 - DNA, 80 bp, synthetic construct; identical to SEQ ID NO: 14135
  source 1..80: mol_type = other DNA

SEQ ID NO: 198866 - DNA, 80 bp, synthetic construct; identical to SEQ ID NO: 14136
  source 1..80: mol_type = other DNA

SEQ ID NO: 198867 - DNA, 80 bp, synthetic construct; identical to SEQ ID NO: 14137
  source 1..80: mol_type = other DNA

SEQ ID NO: 198868 - DNA, 80 bp, synthetic construct; identical to SEQ ID NO: 14138
  source 1..80: mol_type = other DNA

SEQ ID NO: 198869 - DNA, 80 bp, synthetic construct; identical to SEQ ID NO: 14139
  source 1..80: mol_type = other DNA

SEQ ID NO: 198870 - DNA, 80 bp, synthetic construct; identical to SEQ ID NO: 14140
  source 1..80: mol_type = other DNA

SEQ ID NO: 198871 - DNA, 80 bp, synthetic construct; identical to SEQ ID NO: 14141
  source 1..80: mol_type = other DNA

SEQ ID NO: 198872 - DNA, 80 bp, synthetic construct; identical to SEQ ID NO: 14142
  source 1..80: mol_type = other DNA

SEQ ID NO: 198873 - DNA, 80 bp, synthetic construct; identical to SEQ ID NO: 14143
  source 1..80: mol_type = other DNA

SEQ ID NO: 198874 - DNA, 80 bp, synthetic construct; identical to SEQ ID NO: 14144
  source 1..80: mol_type = other DNA

SEQ ID NO: 198875 - DNA, 80 bp, synthetic construct; identical to SEQ ID NO: 14145
  source 1..80: mol_type = other DNA

SEQ ID NO: 198876 - DNA, 80 bp, synthetic construct; identical to SEQ ID NO: 14146
  source 1..80: mol_type = other DNA

SEQ ID NO: 198877 - DNA, 80 bp, synthetic construct; identical to SEQ ID NO: 14147
  source 1..80: mol_type = other DNA

SEQ ID NO: 198878 - DNA, 80 bp, synthetic construct; identical to SEQ ID NO: 14148
  source 1..80: mol_type = other DNA

SEQ ID NO: 198879 - DNA, 80 bp, synthetic construct; identical to SEQ ID NO: 14149
  source 1..80: mol_type = other DNA

SEQ ID NO: 198880 - DNA, 80 bp, synthetic construct; identical to SEQ ID NO: 14150
  source 1..80: mol_type = other DNA

SEQ ID NO: 198881 - DNA, 80 bp, synthetic construct; identical to SEQ ID NO: 14151
  source 1..80: mol_type = other DNA

SEQ ID NO: 198882 - DNA, 80 bp, synthetic construct; identical to SEQ ID NO: 14152
  source 1..80: mol_type = other DNA

SEQ ID NO: 198883 - DNA, 80 bp, synthetic construct; identical to SEQ ID NO: 14153
  source 1..80: mol_type = other DNA

SEQ ID NO: 198884 - DNA, 80 bp, synthetic construct; identical to SEQ ID NO: 14154
  source 1..80: mol_type = other DNA

SEQ ID NO: 198885 - DNA, 80 bp, synthetic construct; identical to SEQ ID NO: 14155
  source 1..80: mol_type = other DNA

SEQ ID NO: 198886 - DNA, 80 bp, synthetic construct; identical to SEQ ID NO: 14156
  source 1..80: mol_type = other DNA

SEQ ID NO: 198887 - DNA, 80 bp, synthetic construct; identical to SEQ ID NO: 14157
  source 1..80: mol_type = other DNA

SEQ ID NO: 198888 - DNA, 80 bp, synthetic construct; identical to SEQ ID NO: 14158
  source 1..80: mol_type = other DNA

SEQ ID NO: 198889 - DNA, 80 bp, synthetic construct; identical to SEQ ID NO: 14159
  source 1..80: mol_type = other DNA

SEQ ID NO: 198890 - DNA, 80 bp, synthetic construct; identical to SEQ ID NO: 14160
  source 1..80: mol_type = other DNA

SEQ ID NO: 198891 - DNA, 80 bp, synthetic construct; identical to SEQ ID NO: 14161
  source 1..80: mol_type = other DNA

SEQ ID NO: 198892 - DNA, 80 bp, synthetic construct; identical to SEQ ID NO: 14162
  source 1..80: mol_type = other DNA

SEQ ID NO: 198893 - DNA, 80 bp, synthetic construct; identical to SEQ ID NO: 14163
  source 1..80: mol_type = other DNA

SEQ ID NO: 198894 - DNA, 80 bp, synthetic construct; identical to SEQ ID NO: 14164
  source 1..80: mol_type = other DNA

SEQ ID NO: 198895 - DNA, 80 bp, synthetic construct; identical to SEQ ID NO: 14165
  source 1..80: mol_type = other DNA

SEQ ID NO: 198896 - DNA, 80 bp, synthetic construct; identical to SEQ ID NO: 14166
  source 1..80: mol_type = other DNA

SEQ ID NO: 198897 - DNA, 80 bp, synthetic construct; identical to SEQ ID NO: 14167
  source 1..80: mol_type = other DNA

SEQ ID NO: 198898 - DNA, 80 bp, synthetic construct; identical to SEQ ID NO: 14168
  source 1..80: mol_type = other DNA

SEQ ID NO: 198899 - DNA, 80 bp, synthetic construct; identical to SEQ ID NO: 14169
  source 1..80: mol_type = other DNA

SEQ ID NO: 198900 - DNA, 80 bp, synthetic construct; identical to SEQ ID NO: 14170
  source 1..80: mol_type = other DNA

SEQ ID NO: 198901 - DNA, 80 bp, synthetic construct; identical to SEQ ID NO: 14171
  source 1..80: mol_type = other DNA

SEQ ID NO: 198902 - DNA, 80 bp, synthetic construct; identical to SEQ ID NO: 14172
  source 1..80: mol_type = other DNA

SEQ ID NO: 198903 - DNA, 80 bp, synthetic construct; identical to SEQ ID NO: 14173
  source 1..80: mol_type = other DNA

SEQ ID NO: 198904 - DNA, 80 bp, synthetic construct; identical to SEQ ID NO: 14174
  source 1..80: mol_type = other DNA

SEQ ID NO: 198905 - DNA, 80 bp, synthetic construct; identical to SEQ ID NO: 14175
  source 1..80: mol_type = other DNA

SEQ ID NO: 198906 - DNA, 80 bp, synthetic construct; identical to SEQ ID NO: 14176
  source 1..80: mol_type = other DNA

SEQ ID NO: 198907 - DNA, 80 bp, synthetic construct; identical to SEQ ID NO: 14177
  source 1..80: mol_type = other DNA

SEQ ID NO: 198908 - DNA, 80 bp, synthetic construct; identical to SEQ ID NO: 14178
  source 1..80: mol_type = other DNA

SEQ ID NO: 198909 - DNA, 80 bp, synthetic construct; identical to SEQ ID NO: 14179
  source 1..80: mol_type = other DNA

SEQ ID NO: 198910 - DNA, 80 bp, synthetic construct; identical to SEQ ID NO: 14180
  source 1..80: mol_type = other DNA

SEQ ID NO: 198911 - DNA, 80 bp, synthetic construct; identical to SEQ ID NO: 14181
  source 1..80: mol_type = other DNA

SEQ ID NO: 198912 - DNA, 80 bp, synthetic construct; identical to SEQ ID NO: 14182
  source 1..80: mol_type = other DNA

SEQ ID NO: 198913 - DNA, 80 bp, synthetic construct; identical to SEQ ID NO: 14183
  source 1..80: mol_type = other DNA

SEQ ID NO: 198914 - DNA, 80 bp, synthetic construct; identical to SEQ ID NO: 14184
  source 1..80: mol_type = other DNA

SEQ ID NO: 198915 - DNA, 80 bp, synthetic construct; identical to SEQ ID NO: 14185
  source 1..80: mol_type = other DNA

SEQ ID NO: 198916 - DNA, 80 bp, synthetic construct; identical to SEQ ID NO: 14186
  source 1..80: mol_type = other DNA

SEQ ID NO: 198917 - DNA, 80 bp, synthetic construct; identical to SEQ ID NO: 14187
  source 1..80: mol_type = other DNA

SEQ ID NO: 198918 - DNA, 80 bp, synthetic construct; identical to SEQ ID NO: 14188
  source 1..80: mol_type = other DNA

SEQ ID NO: 198919 - DNA, 80 bp, synthetic construct; identical to SEQ ID NO: 14189
  source 1..80: mol_type = other DNA

SEQ ID NO: 198920 - DNA, 80 bp, synthetic construct; identical to SEQ ID NO: 14190
  source 1..80: mol_type = other DNA

SEQ ID NO: 198921 - DNA, 80 bp, synthetic construct; identical to SEQ ID NO: 14191
  source 1..80: mol_type = other DNA

SEQ ID NO: 198922 - DNA, 80 bp, synthetic construct; identical to SEQ ID NO: 14192
  source 1..80: mol_type = other DNA

SEQ ID NO: 198923 - DNA, 80 bp, synthetic construct; identical to SEQ ID NO: 14193
  source 1..80: mol_type = other DNA

SEQ ID NO: 198924 - DNA, 80 bp, synthetic construct; identical to SEQ ID NO: 14194
  source 1..80: mol_type = other DNA

SEQ ID NO: 198925 - DNA, 80 bp, synthetic construct; identical to SEQ ID NO: 14195
  source 1..80: mol_type = other DNA

SEQ ID NO: 198926 - DNA, 80 bp, synthetic construct; identical to SEQ ID NO: 14196
  source 1..80: mol_type = other DNA

SEQ ID NO: 198927 - DNA, 80 bp, synthetic construct; identical to SEQ ID NO: 14197
  source 1..80: mol_type = other DNA

SEQ ID NO: 198928 - DNA, 80 bp, synthetic construct; identical to SEQ ID NO: 14198
  source 1..80: mol_type = other DNA

SEQ ID NO: 198929 - DNA, 80 bp, synthetic construct; identical to SEQ ID NO: 14199
  source 1..80: mol_type = other DNA

SEQ ID NO: 198930 - DNA, 80 bp, synthetic construct; identical to SEQ ID NO: 14200
  source 1..80: mol_type = other DNA

SEQ ID NO: 198931 - DNA, 80 bp, synthetic construct; identical to SEQ ID NO: 14201
  source 1..80: mol_type = other DNA

SEQ ID NO: 198932 - DNA, 80 bp, synthetic construct; identical to SEQ ID NO: 14202
  source 1..80: mol_type = other DNA

SEQ ID NO: 198933 - DNA, 80 bp, synthetic construct; identical to SEQ ID NO: 14203
  source 1..80: mol_type = other DNA

SEQ ID NO: 198934 - DNA, 80 bp, synthetic construct; identical to SEQ ID NO: 14204
  source 1..80: mol_type = other DNA

SEQ ID NO: 198935 - DNA, 80 bp, synthetic construct; identical to SEQ ID NO: 14205
  source 1..80: mol_type = other DNA

SEQ ID NO: 198936 - DNA, 80 bp, synthetic construct; identical to SEQ ID NO: 14206
  source 1..80: mol_type = other DNA

SEQ ID NO: 198937 - DNA, 80 bp, synthetic construct; identical to SEQ ID NO: 14207
  source 1..80: mol_type = other DNA

SEQ ID NO: 198938 - DNA, 80 bp, synthetic construct; identical to SEQ ID NO: 14208
  source 1..80: mol_type = other DNA

SEQ ID NO: 198939 - DNA, 80 bp, synthetic construct; identical to SEQ ID NO: 14209
  source 1..80: mol_type = other DNA

SEQ ID NO: 198940 - DNA, 80 bp, synthetic construct; identical to SEQ ID NO: 14210
  source 1..80: mol_type = other DNA

SEQ ID NO: 198941 - DNA, 80 bp, synthetic construct; identical to SEQ ID NO: 14211
  source 1..80: mol_type = other DNA

SEQ ID NO: 198942 - DNA, 80 bp, synthetic construct; identical to SEQ ID NO: 14212
  source 1..80: mol_type = other DNA

SEQ ID NO: 198943 - DNA, 80 bp, synthetic construct; identical to SEQ ID NO: 14213
  source 1..80: mol_type = other DNA

SEQ ID NO: 198944 - DNA, 80 bp, synthetic construct; identical to SEQ ID NO: 14214
  source 1..80: mol_type = other DNA

SEQ ID NO: 198945 - DNA, 80 bp, synthetic construct; identical to SEQ ID NO: 14215
  source 1..80: mol_type = other DNA

SEQ ID NO: 198946 - DNA, 80 bp, synthetic construct; identical to SEQ ID NO: 14216
  source 1..80: mol_type = other DNA

SEQ ID NO: 198947 - DNA, 80 bp, synthetic construct; identical to SEQ ID NO: 14217
  source 1..80: mol_type = other DNA

SEQ ID NO: 198948 - DNA, 80 bp, synthetic construct; identical to SEQ ID NO: 14218
  source 1..80: mol_type = other DNA

SEQ ID NO: 198949 - DNA, 80 bp, synthetic construct; identical to SEQ ID NO: 14219
  source 1..80: mol_type = other DNA

SEQ ID NO: 198950 - DNA, 80 bp, synthetic construct; identical to SEQ ID NO: 14220
  source 1..80: mol_type = other DNA

SEQ ID NO: 198951 - DNA, 80 bp, synthetic construct; identical to SEQ ID NO: 14221
  source 1..80: mol_type = other DNA

SEQ ID NO: 198952 - DNA, 80 bp, synthetic construct; identical to SEQ ID NO: 14222
  source 1..80: mol_type = other DNA

SEQ ID NO: 198953 - DNA, 80 bp, synthetic construct; identical to SEQ ID NO: 14223
  source 1..80: mol_type = other DNA

SEQ ID NO: 198954 - DNA, 80 bp, synthetic construct; identical to SEQ ID NO: 14224
  source 1..80: mol_type = other DNA

SEQ ID NO: 198955 - DNA, 80 bp, synthetic construct; identical to SEQ ID NO: 14225
  source 1..80: mol_type = other DNA

SEQ ID NO: 198956 - DNA, 80 bp, synthetic construct; identical to SEQ ID NO: 14226
  source 1..80: mol_type = other DNA

SEQ ID NO: 198957 - DNA, 80 bp, synthetic construct; identical to SEQ ID NO: 14227
  source 1..80: mol_type = other DNA

SEQ ID NO: 198958 - DNA, 80 bp, synthetic construct; identical to SEQ ID NO: 14228
  source 1..80: mol_type = other DNA

SEQ ID NO: 198959 - DNA, 80 bp, synthetic construct; identical to SEQ ID NO: 14229
  source 1..80: mol_type = other DNA

SEQ ID NO: 198960 - DNA, 80 bp, synthetic construct; identical to SEQ ID NO: 14230
  source 1..80: mol_type = other DNA

SEQ ID NO: 198961 - DNA, 80 bp, synthetic construct; identical to SEQ ID NO: 14231
  source 1..80: mol_type = other DNA

SEQ ID NO: 198962 - DNA, 80 bp, synthetic construct; identical to SEQ ID NO: 14232
  source 1..80: mol_type = other DNA

SEQ ID NO: 198963 - DNA, 80 bp, synthetic construct; identical to SEQ ID NO: 14233
  source 1..80: mol_type = other DNA

SEQ ID NO: 198964 - DNA, 80 bp, synthetic construct; identical to SEQ ID NO: 14234
  source 1..80: mol_type = other DNA

SEQ ID NO: 198965 - DNA, 80 bp, synthetic construct; identical to SEQ ID NO: 14235
  source 1..80: mol_type = other DNA

SEQ ID NO: 198966 - DNA, 80 bp, synthetic construct; identical to SEQ ID NO: 14236
  source 1..80: mol_type = other DNA

SEQ ID NO: 198967 - DNA, 80 bp, synthetic construct; identical to SEQ ID NO: 14237
  source 1..80: mol_type = other DNA

SEQ ID NO: 198968 - DNA, 80 bp, synthetic construct; identical to SEQ ID NO: 14238
  source 1..80: mol_type = other DNA

SEQ ID NO: 198969 - DNA, 80 bp, synthetic construct; identical to SEQ ID NO: 14239
  source 1..80: mol_type = other DNA

SEQ ID NO: 198970 - DNA, 80 bp, synthetic construct; identical to SEQ ID NO: 14240
  source 1..80: mol_type = other DNA

SEQ ID NO: 198971 - DNA, 80 bp, synthetic construct; identical to SEQ ID NO: 14241
  source 1..80: mol_type = other DNA

SEQ ID NO: 198972 - DNA, 80 bp, synthetic construct; identical to SEQ ID NO: 14242
  source 1..80: mol_type = other DNA

SEQ ID NO: 198973 - DNA, 80 bp, synthetic construct; identical to SEQ ID NO: 14243
  source 1..80: mol_type = other DNA

SEQ ID NO: 198974 - DNA, 80 bp, synthetic construct; identical to SEQ ID NO: 14244
  source 1..80: mol_type = other DNA

SEQ ID NO: 198975 - DNA, 80 bp, synthetic construct; identical to SEQ ID NO: 14245
  source 1..80: mol_type = other DNA

SEQ ID NO: 198976 - DNA, 80 bp, synthetic construct; identical to SEQ ID NO: 14246
  source 1..80: mol_type = other DNA

SEQ ID NO: 198977 - DNA, 80 bp, synthetic construct; identical to SEQ ID NO: 14247
  source 1..80: mol_type = other DNA

SEQ ID NO: 198978 - DNA, 80 bp, synthetic construct; identical to SEQ ID NO: 14248
  source 1..80: mol_type = other DNA

SEQ ID NO: 198979 - DNA, 80 bp, synthetic construct; identical to SEQ ID NO: 14249
  source 1..80: mol_type = other DNA

SEQ ID NO: 198980 - DNA, 80 bp, synthetic construct; identical to SEQ ID NO: 14250
  source 1..80: mol_type = other DNA

SEQ ID NO: 198981 - DNA, 80 bp, synthetic construct; identical to SEQ ID NO: 14251
  source 1..80: mol_type = other DNA

SEQ ID NO: 198982 - DNA, 80 bp, synthetic construct; identical to SEQ ID NO: 14252
  source 1..80: mol_type = other DNA

SEQ ID NO: 198983 - DNA, 80 bp, synthetic construct; identical to SEQ ID NO: 14253
  source 1..80: mol_type = other DNA

SEQ ID NO: 198984 - DNA, 80 bp, synthetic construct; identical to SEQ ID NO: 14254
  source 1..80: mol_type = other DNA

SEQ ID NO: 198985 - DNA, 80 bp, synthetic construct; identical to SEQ ID NO: 14255
  source 1..80: mol_type = other DNA

SEQ ID NO: 198986 - DNA, 80 bp, synthetic construct; identical to SEQ ID NO: 14256
  source 1..80: mol_type = other DNA

SEQ ID NO: 198987 - DNA, 80 bp, synthetic construct; identical to SEQ ID NO: 14257
  source 1..80: mol_type = other DNA

SEQ ID NO: 198988 - DNA, 80 bp, synthetic construct; identical to SEQ ID NO: 14258
  source 1..80: mol_type = other DNA

SEQ ID NO: 198989 - DNA, 80 bp, synthetic construct; identical to SEQ ID NO: 14259
  source 1..80: mol_type = other DNA

SEQ ID NO: 198990 - DNA, 80 bp, synthetic construct; identical to SEQ ID NO: 14260
  source 1..80: mol_type = other DNA

SEQ ID NO: 198991 - DNA, 80 bp, synthetic construct; identical to SEQ ID NO: 14261
  source 1..80: mol_type = other DNA

SEQ ID NO: 198992 - DNA, 80 bp, synthetic construct; identical to SEQ ID NO: 14262
  source 1..80: mol_type = other DNA

SEQ ID NO: 198993 - DNA, 80 bp, synthetic construct; identical to SEQ ID NO: 14263
  source 1..80: mol_type = other DNA

SEQ ID NO: 198994 - DNA, 80 bp, synthetic construct; identical to SEQ ID NO: 14264
  source 1..80: mol_type = other DNA

SEQ ID NO: 198995 - DNA, 80 bp, synthetic construct; identical to SEQ ID NO: 14265
  source 1..80: mol_type = other DNA

SEQ ID NO: 198996 - DNA, 80 bp, synthetic construct; identical to SEQ ID NO: 14266
  source 1..80: mol_type = other DNA

SEQ ID NO: 198997 - DNA, 80 bp, synthetic construct; identical to SEQ ID NO: 14267
  source 1..80: mol_type = other DNA

SEQ ID NO: 198998 - DNA, 80 bp, synthetic construct; identical to SEQ ID NO: 14268
  source 1..80: mol_type = other DNA

SEQ ID NO: 198999 - DNA, 80 bp, synthetic construct; identical to SEQ ID NO: 14269
  source 1..80: mol_type = other DNA

SEQ ID NO: 199000 - DNA, 80 bp, synthetic construct; identical to SEQ ID NO: 14270
  source 1..80: mol_type = other DNA

SEQ ID NO: 199001 - DNA, 80 bp, synthetic construct; identical to SEQ ID NO: 14271
  source 1..80: mol_type = other DNA

SEQ ID NO: 199002 - DNA, 80 bp, synthetic construct; identical to SEQ ID NO: 14272
  source 1..80: mol_type = other DNA

SEQ ID NO: 199003 - DNA, 80 bp, synthetic construct; identical to SEQ ID NO: 14273
  source 1..80: mol_type = other DNA

SEQ ID NO: 199004 - DNA, 80 bp, synthetic construct; identical to SEQ ID NO: 14274
  source 1..80: mol_type = other DNA

SEQ ID NO: 199005 - DNA, 80 bp, synthetic construct; identical to SEQ ID NO: 14275
  source 1..80: mol_type = other DNA

SEQ ID NO: 199006 - DNA, 80 bp, synthetic construct; identical to SEQ ID NO: 14276
  source 1..80: mol_type = other DNA

SEQ ID NO: 199007 - DNA, 80 bp, synthetic construct; identical to SEQ ID NO: 14277
  source 1..80: mol_type = other DNA

SEQ ID NO: 199008 - DNA, 80 bp, synthetic construct; identical to SEQ ID NO: 14278
  source 1..80: mol_type = other DNA

SEQ ID NO: 199009 - DNA, 80 bp, synthetic construct; identical to SEQ ID NO: 14279
  source 1..80: mol_type = other DNA

SEQ ID NO: 199010 - DNA, 80 bp, synthetic construct; identical to SEQ ID NO: 14280
  source 1..80: mol_type = other DNA

SEQ ID NO: 199011 - DNA, 80 bp, synthetic construct; identical to SEQ ID NO: 14281
  source 1..80: mol_type = other DNA

SEQ ID NO: 199012 - DNA, 80 bp, synthetic construct; identical to SEQ ID NO: 14282
  source 1..80: mol_type = other DNA

SEQ ID NO: 199013 - DNA, 80 bp, synthetic construct; identical to SEQ ID NO: 14283
  source 1..80: mol_type = other DNA

SEQ ID NO: 199014 - DNA, 80 bp, synthetic construct; identical to SEQ ID NO: 14284
  source 1..80: mol_type = other DNA

SEQ ID NO: 199015 - DNA, 80 bp, synthetic construct; identical to SEQ ID NO: 14285
  source 1..80: mol_type = other DNA

SEQ ID NO: 199016 - DNA, 80 bp, synthetic construct; identical to SEQ ID NO: 14286
  source 1..80: mol_type = other DNA

SEQ ID NO: 199017 - DNA, 80 bp, synthetic construct; identical to SEQ ID NO: 14287
  source 1..80: mol_type = other DNA

SEQ ID NO: 199018 - DNA, 80 bp, synthetic construct; identical to SEQ ID NO: 14288
  source 1..80: mol_type = other DNA

SEQ ID NO: 199019 - DNA, 80 bp, synthetic construct; identical to SEQ ID NO: 14289
  source 1..80: mol_type = other DNA

SEQ ID NO: 199020 - DNA, 80 bp, synthetic construct; identical to SEQ ID NO: 14290
  source 1..80: mol_type = other DNA

SEQ ID NO: 199021 - DNA, 80 bp, synthetic construct; identical to SEQ ID NO: 14291
  source 1..80: mol_type = other DNA

SEQ ID NO: 199022 - DNA, 80 bp, synthetic construct; identical to SEQ ID NO: 14292
  source 1..80: mol_type = other DNA

SEQ ID NO: 199023 - DNA, 80 bp, synthetic construct; identical to SEQ ID NO: 14293
  source 1..80: mol_type = other DNA

SEQ ID NO: 199024 - DNA, 80 bp, synthetic construct; identical to SEQ ID NO: 14294
  source 1..80: mol_type = other DNA

SEQ ID NO: 199025 - DNA, 80 bp, synthetic construct; identical to SEQ ID NO: 14295
  source 1..80: mol_type = other DNA

SEQ ID NO: 199026 - DNA, 80 bp, synthetic construct; identical to SEQ ID NO: 14296
  source 1..80: mol_type = other DNA

SEQ ID NO: 199027 - DNA, 80 bp, synthetic construct; identical to SEQ ID NO: 14297
  source 1..80: mol_type = other DNA

SEQ ID NO: 199028 - DNA, 80 bp, synthetic construct; identical to SEQ ID NO: 14298
  source 1..80: mol_type = other DNA

SEQ ID NO: 199029 - DNA, 80 bp, synthetic construct; identical to SEQ ID NO: 14299
  source 1..80: mol_type = other DNA

SEQ ID NO: 199030 - DNA, 80 bp, synthetic construct; identical to SEQ ID NO: 14300
  source 1..80: mol_type = other DNA

SEQ ID NO: 199031 - DNA, 80 bp, synthetic construct; identical to SEQ ID NO: 14301
  source 1..80: mol_type = other DNA

SEQ ID NO: 199032 - DNA, 80 bp, synthetic construct; identical to SEQ ID NO: 14302
  source 1..80: mol_type = other DNA

SEQ ID NO: 199033 - DNA, 80 bp, synthetic construct; identical to SEQ ID NO: 14303
  source 1..80: mol_type = other DNA

SEQ ID NO: 199034 - DNA, 80 bp, synthetic construct; identical to SEQ ID NO: 14304
  source 1..80: mol_type = other DNA

SEQ ID NO: 199035 - DNA, 80 bp, synthetic construct; identical to SEQ ID NO: 14305
  source 1..80: mol_type = other DNA

SEQ ID NO: 199036 - DNA, 80 bp, synthetic construct; identical to SEQ ID NO: 14306
  source 1..80: mol_type = other DNA

SEQ ID NO: 199037 - DNA, 80 bp, synthetic construct; identical to SEQ ID NO: 14307
  source 1..80: mol_type = other DNA

SEQ ID NO: 199038 - DNA, 80 bp, synthetic construct; identical to SEQ ID NO: 14308
  source 1..80: mol_type = other DNA

SEQ ID NO: 199039 - DNA, 80 bp, synthetic construct; identical to SEQ ID NO: 14309
  source 1..80: mol_type = other DNA

SEQ ID NO: 199040 - DNA, 80 bp, synthetic construct; identical to SEQ ID NO: 14310
  source 1..80: mol_type = other DNA

SEQ ID NO: 199041 - DNA, 80 bp, synthetic construct; identical to SEQ ID NO: 14311
  source 1..80: mol_type = other DNA

SEQ ID NO: 199042 - DNA, 80 bp, synthetic construct; identical to SEQ ID NO: 14312
  source 1..80: mol_type = other DNA

SEQ ID NO: 199043 - DNA, 80 bp, synthetic construct; identical to SEQ ID NO: 14313
  source 1..80: mol_type = other DNA

SEQ ID NO: 199044 - DNA, 80 bp, synthetic construct; identical to SEQ ID NO: 14314
  source 1..80: mol_type = other DNA

SEQ ID NO: 199045 - DNA, 80 bp, synthetic construct; identical to SEQ ID NO: 14315
  source 1..80: mol_type = other DNA

SEQ ID NO: 199046 - DNA, 80 bp, synthetic construct; identical to SEQ ID NO: 14316
  source 1..80: mol_type = other DNA

SEQ ID NO: 199047 - DNA, 80 bp, synthetic construct; identical to SEQ ID NO: 14317
  source 1..80: mol_type = other DNA

SEQ ID NO: 199048 - DNA, 80 bp, synthetic construct; identical to SEQ ID NO: 14318
  source 1..80: mol_type = other DNA

SEQ ID NO: 199049 - DNA, 80 bp, synthetic construct; identical to SEQ ID NO: 14319
  source 1..80: mol_type = other DNA

SEQ ID NO: 199050 - DNA, 80 bp, synthetic construct; identical to SEQ ID NO: 14320
  source 1..80: mol_type = other DNA

SEQ ID NO: 199051 - DNA, 80 bp, synthetic construct; identical to SEQ ID NO: 14321
  source 1..80: mol_type = other DNA

SEQ ID NO: 199052 - DNA, 80 bp, synthetic construct; identical to SEQ ID NO: 14322
  source 1..80: mol_type = other DNA

SEQ ID NO: 199053 - DNA, 80 bp, synthetic construct; identical to SEQ ID NO: 14323
  source 1..80: mol_type = other DNA

SEQ ID NO: 199054 - DNA, 80 bp, synthetic construct; identical to SEQ ID NO: 14324
  source 1..80: mol_type = other DNA

SEQ ID NO: 199055 - DNA, 80 bp, synthetic construct; identical to SEQ ID NO: 14325
  source 1..80: mol_type = other DNA

SEQ ID NO: 199056 - DNA, 80 bp, synthetic construct; identical to SEQ ID NO: 14326
  source 1..80: mol_type = other DNA

SEQ ID NO: 199057 - DNA, 80 bp, synthetic construct; identical to SEQ ID NO: 14327
  source 1..80: mol_type = other DNA

SEQ ID NO: 199058 - DNA, 80 bp, synthetic construct; identical to SEQ ID NO: 14328
  source 1..80: mol_type = other DNA

SEQ ID NO: 199059 - DNA, 80 bp, synthetic construct; identical to SEQ ID NO: 14329
  source 1..80: mol_type = other DNA

SEQ ID NO: 199060 - DNA, 80 bp, synthetic construct; identical to SEQ ID NO: 14330
  source 1..80: mol_type = other DNA

SEQ ID NO: 199061 - DNA, 80 bp, synthetic construct; identical to SEQ ID NO: 14331
  source 1..80: mol_type = other DNA

SEQ ID NO: 199062 - DNA, 80 bp, synthetic construct; identical to SEQ ID NO: 14332
  source 1..80: mol_type = other DNA

SEQ ID NO: 199063 - DNA, 80 bp, synthetic construct; identical to SEQ ID NO: 14333
  source 1..80: mol_type = other DNA

SEQ ID NO: 199064 - DNA, 80 bp, synthetic construct; identical to SEQ ID NO: 14334
  source 1..80: mol_type = other DNA

SEQ ID NO: 199065 - DNA, 80 bp, synthetic construct; identical to SEQ ID NO: 14335
  source 1..80: mol_type = other DNA

SEQ ID NO: 199066 - DNA, 80 bp, synthetic construct; identical to SEQ ID NO: 14336
  source 1..80: mol_type = other DNA

SEQ ID NO: 199067 - DNA, 80 bp, synthetic construct; identical to SEQ ID NO: 14337
  source 1..80: mol_type = other DNA

SEQ ID NO: 199068 - DNA, 80 bp, synthetic construct; identical to SEQ ID NO: 14338
  source 1..80: mol_type = other DNA

SEQ ID NO: 199069 - DNA, 80 bp, synthetic construct; identical to SEQ ID NO: 14339
  source 1..80: mol_type = other DNA

SEQ ID NO: 199070 - DNA, 80 bp, synthetic construct; identical to SEQ ID NO: 14340
  source 1..80: mol_type = other DNA

SEQ ID NO: 199071 - DNA, 80 bp, synthetic construct; identical to SEQ ID NO: 14341
  source 1..80: mol_type = other DNA

SEQ ID NO: 199072 - DNA, 80 bp, synthetic construct; identical to SEQ ID NO: 14342
  source 1..80: mol_type = other DNA

SEQ ID NO: 199073 - DNA, 80 bp, synthetic construct; identical to SEQ ID NO: 14343
  source 1..80: mol_type = other DNA

SEQ ID NO: 199074 - DNA, 80 bp, synthetic construct; identical to SEQ ID NO: 14344
  source 1..80: mol_type = other DNA

SEQ ID NO: 199075 - DNA, 80 bp, synthetic construct; identical to SEQ ID NO: 14345
  source 1..80: mol_type = other DNA

SEQ ID NO: 199076 - DNA, 80 bp, synthetic construct; identical to SEQ ID NO: 14346
  source 1..80: mol_type = other DNA

SEQ ID NO: 199077 - DNA, 80 bp, synthetic construct; identical to SEQ ID NO: 14347
  source 1..80: mol_type = other DNA

SEQ ID NO: 199078 - DNA, 80 bp, synthetic construct; identical to SEQ ID NO: 14348
  source 1..80: mol_type = other DNA

SEQ ID NO: 199079 - DNA, 80 bp, synthetic construct; identical to SEQ ID NO: 14349
  source 1..80: mol_type = other DNA

SEQ ID NO: 199080 - DNA, 80 bp, synthetic construct; identical to SEQ ID NO: 14350
  source 1..80: mol_type = other DNA

SEQ ID NO: 199081 - DNA, 80 bp, synthetic construct; identical to SEQ ID NO: 14351
  source 1..80: mol_type = other DNA

SEQ ID NO: 199082 - DNA, 80 bp, synthetic construct; identical to SEQ ID NO: 14352
  source 1..80: mol_type = other DNA

SEQ ID NO: 199083 - DNA, 80 bp, synthetic construct; identical to SEQ ID NO: 14353
  source 1..80: mol_type = other DNA

SEQ ID NO: 199084 - DNA, 80 bp, synthetic construct; identical to SEQ ID NO: 14354
  source 1..80: mol_type = other DNA

SEQ ID NO: 199085 - DNA, 80 bp, synthetic construct; identical to SEQ ID NO: 14355
  source 1..80: mol_type = other DNA

SEQ ID NO: 199086 - DNA, 80 bp, synthetic construct; identical to SEQ ID NO: 14356
  source 1..80: mol_type = other DNA

SEQ ID NO: 199087 - DNA, 80 bp, synthetic construct; identical to SEQ ID NO: 14357
  source 1..80: mol_type = other DNA

SEQ ID NO: 199088 - DNA, 80 bp, synthetic construct; identical to SEQ ID NO: 14358
  source 1..80: mol_type = other DNA

SEQ ID NO: 199089 - DNA, 80 bp, synthetic construct; identical to SEQ ID NO: 14359
  source 1..80: mol_type = other DNA

SEQ ID NO: 199090 - DNA, 80 bp, synthetic construct; identical to SEQ ID NO: 14360
  source 1..80: mol_type = other DNA

SEQ ID NO: 199091 - DNA, 80 bp, synthetic construct; identical to SEQ ID NO: 14361
  source 1..80: mol_type = other DNA

SEQ ID NO: 199092 - DNA, 80 bp, synthetic construct; identical to SEQ ID NO: 14362
  source 1..80: mol_type = other DNA

SEQ ID NO: 199093 - DNA, 80 bp, synthetic construct; identical to SEQ ID NO: 14363
  source 1..80: mol_type = other DNA

SEQ ID NO: 199094 - DNA, 80 bp, synthetic construct; identical to SEQ ID NO: 14364
  source 1..80: mol_type = other DNA

SEQ ID NO: 199095 - DNA, 80 bp, synthetic construct; identical to SEQ ID NO: 14365
  source 1..80: mol_type = other DNA

SEQ ID NO: 199096 - DNA, 80 bp, synthetic construct; identical to SEQ ID NO: 14366
  source 1..80: mol_type = other DNA

SEQ ID NO: 199097 - DNA, 80 bp, synthetic construct; identical to SEQ ID NO: 14367
  source 1..80: mol_type = other DNA

SEQ ID NO: 199098 - DNA, 80 bp, synthetic construct; identical to SEQ ID NO: 14368
  source 1..80: mol_type = other DNA

SEQ ID NO: 199099 - DNA, 80 bp, synthetic construct; identical to SEQ ID NO: 14369
  source 1..80: mol_type = other DNA

SEQ ID NO: 199100 - DNA, 80 bp, synthetic construct; identical to SEQ ID NO: 14370
  source 1..80: mol_type = other DNA

SEQ ID NO: 199101 - DNA, 80 bp, synthetic construct; identical to SEQ ID NO: 14371
  source 1..80: mol_type = other DNA

SEQ ID NO: 199102 - DNA, 80 bp, synthetic construct; identical to SEQ ID NO: 14372
  source 1..80: mol_type = other DNA

SEQ ID NO: 199103 - DNA, 80 bp, synthetic construct; identical to SEQ ID NO: 14373
  source 1..80: mol_type = other DNA

SEQ ID NO: 199104 - DNA, 80 bp, synthetic construct; identical to SEQ ID NO: 14374
  source 1..80: mol_type = other DNA

SEQ ID NO: 199105 - DNA, 80 bp, synthetic construct; identical to SEQ ID NO: 14375
  source 1..80: mol_type = other DNA

SEQ ID NO: 199106 - DNA, 80 bp, synthetic construct; identical to SEQ ID NO: 14376
  source 1..80: mol_type = other DNA

SEQ ID NO: 199107 - DNA, 80 bp, synthetic construct; identical to SEQ ID NO: 14377
  source 1..80: mol_type = other DNA

SEQ ID NO: 199108 - DNA, 80 bp, synthetic construct; identical to SEQ ID NO: 14378
  source 1..80: mol_type = other DNA

SEQ ID NO: 199109 - DNA, 80 bp, synthetic construct; identical to SEQ ID NO: 14379
  source 1..80: mol_type = other DNA

SEQ ID NO: 199110 - DNA, 80 bp, synthetic construct; identical to SEQ ID NO: 14380
  source 1..80: mol_type = other DNA

SEQ ID NO: 199111 - DNA, 80 bp, synthetic construct; identical to SEQ ID NO: 14381
  source 1..80: mol_type = other DNA

SEQ ID NO: 199112 - DNA, 80 bp, synthetic construct; identical to SEQ ID NO: 14382
  source 1..80: mol_type = other DNA

SEQ ID NO: 199113 - DNA, 80 bp, synthetic construct; identical to SEQ ID NO: 14383
  source 1..80: mol_type = other DNA

SEQ ID NO: 199114 - DNA, 80 bp, synthetic construct; identical to SEQ ID NO: 14384
  source 1..80: mol_type = other DNA

SEQ ID NO: 199115 - DNA, 80 bp, synthetic construct; identical to SEQ ID NO: 14385
  source 1..80: mol_type = other DNA

SEQ ID NO: 199116 - DNA, 80 bp, synthetic construct; identical to SEQ ID NO: 14386
  source 1..80: mol_type = other DNA

SEQ ID NO: 199117 - DNA, 80 bp, synthetic construct; identical to SEQ ID NO: 14387
  source 1..80: mol_type = other DNA

SEQ ID NO: 199118 - DNA, 80 bp, synthetic construct; identical to SEQ ID NO: 14388
  source 1..80: mol_type = other DNA

SEQ ID NO: 199119 - DNA, 80 bp, synthetic construct; identical to SEQ ID NO: 14389
  source 1..80: mol_type = other DNA

SEQ ID NO: 199120 - DNA, 80 bp, synthetic construct; identical to SEQ ID NO: 14390
  source 1..80: mol_type = other DNA

SEQ ID NO: 199121 - DNA, 80 bp, synthetic construct; identical to SEQ ID NO: 14391
  source 1..80: mol_type = other DNA

SEQ ID NO: 199122 - DNA, 80 bp, synthetic construct; identical to SEQ ID NO: 14392
  source 1..80: mol_type = other DNA

SEQ ID NO: 199123 - DNA, 80 bp, synthetic construct; identical to SEQ ID NO: 14393
  source 1..80: mol_type = other DNA

SEQ ID NO: 199124 - DNA, 80 bp, synthetic construct; identical to SEQ ID NO: 14394
  source 1..80: mol_type = other DNA

SEQ ID NO: 199125 - DNA, 80 bp, synthetic construct; identical to SEQ ID NO: 14395
  source 1..80: mol_type = other DNA

SEQ ID NO: 199126 - DNA, 80 bp, synthetic construct; identical to SEQ ID NO: 14396
  source 1..80: mol_type = other DNA

SEQ ID NO: 199127 - DNA, 80 bp, synthetic construct; identical to SEQ ID NO: 14397
  source 1..80: mol_type = other DNA

SEQ ID NO: 199128 - DNA, 80 bp, synthetic construct; identical to SEQ ID NO: 14398
  source 1..80: mol_type = other DNA

SEQ ID NO: 199129 - DNA, 80 bp, synthetic construct; identical to SEQ ID NO: 14399
  source 1..80: mol_type = other DNA

SEQ ID NO: 199130 - DNA, 80 bp, synthetic construct; identical to SEQ ID NO: 14400
  source 1..80: mol_type = other DNA

SEQ ID NO: 199131 - DNA, 80 bp, synthetic construct; identical to SEQ ID NO: 14401
  source 1..80: mol_type = other DNA

SEQ ID NO: 199132 - DNA, 80 bp, synthetic construct; identical to SEQ ID NO: 14402
  source 1..80: mol_type = other DNA

SEQ ID NO: 199133 - DNA, 80 bp, synthetic construct; identical to SEQ ID NO: 14403
  source 1..80: mol_type = other DNA

SEQ ID NO: 199134 - DNA, 80 bp, synthetic construct; identical to SEQ ID NO: 14404
  source 1..80: mol_type = other DNA

SEQ ID NO: 199135 - DNA, 80 bp, synthetic construct; identical to SEQ ID NO: 14405
  source 1..80: mol_type = other DNA

SEQ ID NO: 199136 - DNA, 80 bp, synthetic construct; identical to SEQ ID NO: 14406
  source 1..80: mol_type = other DNA

SEQ ID NO: 199137 - DNA, 80 bp, synthetic construct; identical to SEQ ID NO: 14407
  source 1..80: mol_type = other DNA

SEQ ID NO: 199138 - DNA, 80 bp, synthetic construct; identical to SEQ ID NO: 14408
  source 1..80: mol_type = other DNA

SEQ ID NO: 199139 - DNA, 80 bp, synthetic construct; identical to SEQ ID NO: 14409
  source 1..80: mol_type = other DNA

SEQ ID NO: 199140 - DNA, 80 bp, synthetic construct; identical to SEQ ID NO: 14410
  source 1..80: mol_type = other DNA

SEQ ID NO: 199141 - DNA, 80 bp, synthetic construct; identical to SEQ ID NO: 14411
  source 1..80: mol_type = other DNA

SEQ ID NO: 199142 - DNA, 80 bp, synthetic construct; identical to SEQ ID NO: 14412
  source 1..80: mol_type = other DNA

SEQ ID NO: 199143 - DNA, 80 bp, synthetic construct; identical to SEQ ID NO: 14413
  source 1..80: mol_type = other DNA

SEQ ID NO: 199144 - DNA, 80 bp, synthetic construct; identical to SEQ ID NO: 14414
  source 1..80: mol_type = other DNA

SEQ ID NO: 199145 - DNA, 80 bp, synthetic construct; identical to SEQ ID NO: 14415
  source 1..80: mol_type = other DNA

SEQ ID NO: 199146 - DNA, 80 bp, synthetic construct; identical to SEQ ID NO: 14416
  source 1..80: mol_type = other DNA

SEQ ID NO: 199147 - DNA, 80 bp, synthetic construct; identical to SEQ ID NO: 14417
  source 1..80: mol_type = other DNA

SEQ ID NO: 199148 - DNA, 80 bp, synthetic construct; identical to SEQ ID NO: 14418
  source 1..80: mol_type = other DNA

SEQ ID NO: 199149 - DNA, 80 bp, synthetic construct; identical to SEQ ID NO: 14419
  source 1..80: mol_type = other DNA

SEQ ID NO: 199150 - DNA, 80 bp, synthetic construct; identical to SEQ ID NO: 14420
  source 1..80: mol_type = other DNA

SEQ ID NO: 199151 - DNA, 80 bp, synthetic construct; identical to SEQ ID NO: 14421
  source 1..80: mol_type = other DNA

SEQ ID NO: 199152 - DNA, 80 bp, synthetic construct; identical to SEQ ID NO: 14422
  source 1..80: mol_type = other DNA

SEQ ID NO: 199153 - DNA, 80 bp, synthetic construct; identical to SEQ ID NO: 14423
  source 1..80: mol_type = other DNA

SEQ ID NO: 199154 - DNA, 80 bp, synthetic construct; identical to SEQ ID NO: 14424
  source 1..80: mol_type = other DNA

SEQ ID NO: 199155 - DNA, 80 bp, synthetic construct; identical to SEQ ID NO: 14425
  source 1..80: mol_type = other DNA

SEQ ID NO: 199156 - DNA, 80 bp, synthetic construct; identical to SEQ ID NO: 14426
  source 1..80: mol_type = other DNA

SEQ ID NO: 199157 - DNA, 80 bp, synthetic construct; identical to SEQ ID NO: 14427
  source 1..80: mol_type = other DNA

SEQ ID NO: 199158 - DNA, 80 bp, synthetic construct; identical to SEQ ID NO: 14428
  source 1..80: mol_type = other DNA

SEQ ID NO: 199159 - DNA, 80 bp, synthetic construct; identical to SEQ ID NO: 14429
  source 1..80: mol_type = other DNA

SEQ ID NO: 199160 - DNA, 80 bp, synthetic construct; identical to SEQ ID NO: 14430
  source 1..80: mol_type = other DNA

SEQ ID NO: 199161 - DNA, 80 bp, synthetic construct; identical to SEQ ID NO: 14431
  source 1..80: mol_type = other DNA

SEQ ID NO: 199162 - DNA, 80 bp, synthetic construct; identical to SEQ ID NO: 14432
  source 1..80: mol_type = other DNA

SEQ ID NO: 199163 - DNA, 80 bp, synthetic construct; identical to SEQ ID NO: 14433
  source 1..80: mol_type = other DNA

SEQ ID NO: 199164 - DNA, 80 bp, synthetic construct; identical to SEQ ID NO: 14434
  source 1..80: mol_type = other DNA

SEQ ID NO: 199165 - DNA, 80 bp, synthetic construct; identical to SEQ ID NO: 14435
  source 1..80: mol_type = other DNA

SEQ ID NO: 199166 - DNA, 80 bp, synthetic construct; identical to SEQ ID NO: 14436
  source 1..80: mol_type = other DNA

SEQ ID NO: 199167 - DNA, 80 bp, synthetic construct; identical to SEQ ID NO: 14437
  source 1..80: mol_type = other DNA

SEQ ID NO: 199168 - DNA, 80 bp, synthetic construct; identical to SEQ ID NO: 14438
  source 1..80: mol_type = other DNA

SEQ ID NO: 199169 - DNA, 80 bp, synthetic construct; identical to SEQ ID NO: 14439
  source 1..80: mol_type = other DNA

SEQ ID NO: 199170 - DNA, 80 bp, synthetic construct; identical to SEQ ID NO: 14440
  source 1..80: mol_type = other DNA

SEQ ID NO: 199171 - DNA, 80 bp, synthetic construct; identical to SEQ ID NO: 14441
  source 1..80: mol_type = other DNA

SEQ ID NO: 199172 - DNA, 80 bp, synthetic construct; identical to SEQ ID NO: 14442
  source 1..80: mol_type = other DNA

SEQ ID NO: 199173 - DNA, 80 bp, synthetic construct; identical to SEQ ID NO: 14443
  source 1..80: mol_type = other DNA

SEQ ID NO: 199174 - DNA, 80 bp, synthetic construct; identical to SEQ ID NO: 14444
  source 1..80: mol_type = other DNA

SEQ ID NO: 199175 - DNA, 80 bp, synthetic construct; identical to SEQ ID NO: 14445
  source 1..80: mol_type = other DNA

SEQ ID NO: 199176 - DNA, 80 bp, synthetic construct; identical to SEQ ID NO: 14446
  source 1..80: mol_type = other DNA

SEQ ID NO: 199177 - DNA, 80 bp, synthetic construct; identical to SEQ ID NO: 14447
  source 1..80: mol_type = other DNA

SEQ ID NO: 199178 - DNA, 80 bp, synthetic construct; identical to SEQ ID NO: 14448
  source 1..80: mol_type = other DNA

SEQ ID NO: 199179 - DNA, 80 bp, synthetic construct; identical to SEQ ID NO: 14449
  source 1..80: mol_type = other DNA

SEQ ID NO: 199180 - DNA, 80 bp, synthetic construct; identical to SEQ ID NO: 14450
  source 1..80: mol_type = other DNA

SEQ ID NO: 199181 - DNA, 80 bp, synthetic construct; identical to SEQ ID NO: 14451
  source 1..80: mol_type = other DNA

SEQ ID NO: 199182 - DNA, 80 bp, synthetic construct; identical to SEQ ID NO: 14452
  source 1..80: mol_type = other DNA

SEQ ID NO: 199183 - DNA, 80 bp, synthetic construct; identical to SEQ ID NO: 14453
  source 1..80: mol_type = other DNA

SEQ ID NO: 199184 - DNA, 80 bp, synthetic construct; identical to SEQ ID NO: 14454
  source 1..80: mol_type = other DNA

SEQ ID NO: 199185 - DNA, 80 bp, synthetic construct; identical to SEQ ID NO: 14455
  source 1..80: mol_type = other DNA

SEQ ID NO: 199186 - DNA, 80 bp, synthetic construct; identical to SEQ ID NO: 14456
  source 1..80: mol_type = other DNA

SEQ ID NO: 199187 - DNA, 80 bp, synthetic construct; identical to SEQ ID NO: 14457
  source 1..80: mol_type = other DNA

SEQ ID NO: 199188 - DNA, 80 bp, synthetic construct; identical to SEQ ID NO: 14458
  source 1..80: mol_type = other DNA

SEQ ID NO: 199189 - DNA, 80 bp, synthetic construct; identical to SEQ ID NO: 14459
  source 1..80: mol_type = other DNA

SEQ ID NO: 199190 - DNA, 80 bp, synthetic construct; identical to SEQ ID NO: 14460
  source 1..80: mol_type = other DNA

SEQ ID NO: 199191 - DNA, 80 bp, synthetic construct; identical to SEQ ID NO: 14461
  source 1..80: mol_type = other DNA

SEQ ID NO: 199192 - DNA, 80 bp, synthetic construct; identical to SEQ ID NO: 14462
  source 1..80: mol_type = other DNA

SEQ ID NO: 199193 - DNA, 80 bp, synthetic construct; identical to SEQ ID NO: 14463
  source 1..80: mol_type = other DNA

SEQ ID NO: 199194 - DNA, 80 bp, synthetic construct; identical to SEQ ID NO: 14464
  source 1..80: mol_type = other DNA

SEQ ID NO: 199195 - DNA, 80 bp, synthetic construct; identical to SEQ ID NO: 14465
  source 1..80: mol_type = other DNA

SEQ ID NO: 199196 - DNA, 80 bp, synthetic construct; identical to SEQ ID NO: 14466
  source 1..80: mol_type = other DNA

SEQ ID NO: 199197 - DNA, 80 bp, synthetic construct; identical to SEQ ID NO: 14467
  source 1..80: mol_type = other DNA

SEQ ID NO: 199198 - DNA, 80 bp, synthetic construct; identical to SEQ ID NO: 14468
  source 1..80: mol_type = other DNA

SEQ ID NO: 199199 - DNA, 80 bp, synthetic construct; identical to SEQ ID NO: 14469
  source 1..80: mol_type = other DNA

SEQ ID NO: 199200 - DNA, 80 bp, synthetic construct; identical to SEQ ID NO: 14470
  source 1..80: mol_type = other DNA

SEQ ID NO: 199201 - DNA, 80 bp, synthetic construct; identical to SEQ ID NO: 14471
  source 1..80: mol_type = other DNA

SEQ ID NO: 199202 - DNA, 80 bp, synthetic construct; identical to SEQ ID NO: 14472
  source 1..80: mol_type = other DNA

SEQ ID NO: 199203 - DNA, 80 bp, synthetic construct; identical to SEQ ID NO: 14473
  source 1..80: mol_type = other DNA

SEQ ID NO: 199204 - DNA, 80 bp, synthetic construct; identical to SEQ ID NO: 14474
  source 1..80: mol_type = other DNA

SEQ ID NO: 199205 - DNA, 80 bp, synthetic construct; identical to SEQ ID NO: 14475
  source 1..80: mol_type = other DNA

SEQ ID NO: 199206 - DNA, 80 bp, synthetic construct; identical to SEQ ID NO: 14476
  source 1..80: mol_type = other DNA

SEQ ID NO: 199207 - DNA, 80 bp, synthetic construct; identical to SEQ ID NO: 14477
  source 1..80: mol_type = other DNA

SEQ ID NO: 199208 - DNA, 80 bp, synthetic construct; identical to SEQ ID NO: 14478
  source 1..80: mol_type = other DNA

SEQ ID NO: 199209 - DNA, 80 bp, synthetic construct; identical to SEQ ID NO: 14479
  source 1..80: mol_type = other DNA

SEQ ID NO: 199210 - DNA, 80 bp, synthetic construct; identical to SEQ ID NO: 14480
  source 1..80: mol_type = other DNA

SEQ ID NO: 199211 - DNA, 80 bp, synthetic construct; identical to SEQ ID NO: 14481
  source 1..80: mol_type = other DNA

SEQ ID NO: 199212 - DNA, 80 bp, synthetic construct; identical to SEQ ID NO: 14482
  source 1..80: mol_type = other DNA

SEQ ID NO: 199213 - DNA, 80 bp, synthetic construct; identical to SEQ ID NO: 14483
  source 1..80: mol_type = other DNA

SEQ ID NO: 199214 - DNA, 80 bp, synthetic construct; identical to SEQ ID NO: 14484
  source 1..80: mol_type = other DNA

SEQ ID NO: 199215 - DNA, 80 bp, synthetic construct; identical to SEQ ID NO: 14485
  source 1..80: mol_type = other DNA

SEQ ID NO: 199216 - DNA, 80 bp, synthetic construct; identical to SEQ ID NO: 14486
  source 1..80: mol_type = other DNA

SEQ ID NO: 199217 - DNA, 80 bp, synthetic construct; identical to SEQ ID NO: 14487
  source 1..80: mol_type = other DNA

SEQ ID NO: 199218 - DNA, 80 bp, synthetic construct; identical to SEQ ID NO: 14488
  source 1..80: mol_type = other DNA

SEQ ID NO: 199219 - DNA, 80 bp, synthetic construct; identical to SEQ ID NO: 14489
  source 1..80: mol_type = other DNA

SEQ ID NO: 199220 - DNA, 80 bp, synthetic construct; identical to SEQ ID NO: 14490
  source 1..80: mol_type = other DNA

SEQ ID NO: 199221 - DNA, 80 bp, synthetic construct; identical to SEQ ID NO: 14491
  source 1..80: mol_type = other DNA

SEQ ID NO: 199222 - DNA, 80 bp, synthetic construct; identical to SEQ ID NO: 14492
  source 1..80: mol_type = other DNA

SEQ ID NO: 199223 - DNA, 80 bp, synthetic construct; identical to SEQ ID NO: 14493
  source 1..80: mol_type = other DNA

SEQ ID NO: 199224 - DNA, 80 bp, synthetic construct; identical to SEQ ID NO: 14494
  source 1..80: mol_type = other DNA

SEQ ID NO: 199225 - DNA, 80 bp, synthetic construct; identical to SEQ ID NO: 14495
  source 1..80: mol_type = other DNA

SEQ ID NO: 199226 - DNA, 80 bp, synthetic construct; identical to SEQ ID NO: 14496
  source 1..80: mol_type = other DNA

SEQ ID NO: 199227 - DNA, 80 bp, synthetic construct; identical to SEQ ID NO: 14497
  source 1..80: mol_type = other DNA

SEQ ID NO: 199228 - DNA, 80 bp, synthetic construct; identical to SEQ ID NO: 14498
  source 1..80: mol_type = other DNA

SEQ ID NO: 199229 - DNA, 80 bp, synthetic construct; identical to SEQ ID NO: 14499
  source 1..80: mol_type = other DNA

SEQ ID NO: 199230 - DNA, 80 bp, synthetic construct; identical to SEQ ID NO: 14500
  source 1..80: mol_type = other DNA

SEQ ID NO: 199231 - DNA, 80 bp, synthetic construct; identical to SEQ ID NO: 14501
  source 1..80: mol_type = other DNA

SEQ ID NO: 199232 - DNA, 80 bp, synthetic construct; identical to SEQ ID NO: 14502
  source 1..80: mol_type = other DNA

SEQ ID NO: 199233 - DNA, 80 bp, synthetic construct; identical to SEQ ID NO: 14503
  source 1..80: mol_type = other DNA

SEQ ID NO: 199234 - DNA, 80 bp, synthetic construct; identical to SEQ ID NO: 14504
  source 1..80: mol_type = other DNA

SEQ ID NO: 199235 - DNA, 80 bp, synthetic construct; identical to SEQ ID NO: 14505
  source 1..80: mol_type = other DNA

SEQ ID NO: 199236 - DNA, 80 bp, synthetic construct; identical to SEQ ID NO: 14506
  source 1..80: mol_type = other DNA

SEQ ID NO: 199237 - DNA, 80 bp, synthetic construct; identical to SEQ ID NO: 14507
  source 1..80: mol_type = other DNA

SEQ ID NO: 199238 - DNA, 80 bp, synthetic construct; identical to SEQ ID NO: 14508
  source 1..80: mol_type = other DNA

SEQ ID NO: 199239 - DNA, 80 bp, synthetic construct; identical to SEQ ID NO: 14509
  source 1..80: mol_type = other DNA

SEQ ID NO: 199240 - DNA, 80 bp, synthetic construct; identical to SEQ ID NO: 14510
  source 1..80: mol_type = other DNA

SEQ ID NO: 199241 - DNA, 80 bp, synthetic construct; identical to SEQ ID NO: 14511
  source 1..80: mol_type = other DNA

SEQ ID NO: 199242 - DNA, 80 bp, synthetic construct; identical to SEQ ID NO: 14512
  source 1..80: mol_type = other DNA

SEQ ID NO: 199243 - DNA, 80 bp, synthetic construct; identical to SEQ ID NO: 14513
  source 1..80: mol_type = other DNA

SEQ ID NO: 199244 - DNA, 80 bp, synthetic construct; identical to SEQ ID NO: 14514
  source 1..80: mol_type = other DNA

SEQ ID NO: 199245 - DNA, 80 bp, synthetic construct; identical to SEQ ID NO: 14515
  source 1..80: mol_type = other DNA

SEQ ID NO: 199246 - DNA, 80 bp, synthetic construct; identical to SEQ ID NO: 14516
  source 1..80: mol_type = other DNA

SEQ ID NO: 199247 - DNA, 80 bp, synthetic construct; identical to SEQ ID NO: 14517
  source 1..80: mol_type = other DNA

SEQ ID NO: 199248 - DNA, 80 bp, synthetic construct; identical to SEQ ID NO: 14518
  source 1..80: mol_type = other DNA

SEQ ID NO: 199249 - DNA, 80 bp, synthetic construct; identical to SEQ ID NO: 14519
  source 1..80: mol_type = other DNA

SEQ ID NO: 199250 - DNA, 80 bp, synthetic construct; identical to SEQ ID NO: 14520
  source 1..80: mol_type = other DNA

SEQ ID NO: 199251 - DNA, 80 bp, synthetic construct; identical to SEQ ID NO: 14521
  source 1..80: mol_type = other DNA

SEQ ID NO: 199252 - DNA, 80 bp, synthetic construct; identical to SEQ ID NO: 14522
  source 1..80: mol_type = other DNA

SEQ ID NO: 199253 - DNA, 80 bp, synthetic construct; identical to SEQ ID NO: 14523
  source 1..80: mol_type = other DNA

SEQ ID NO: 199254 - DNA, 80 bp, synthetic construct; identical to SEQ ID NO: 14524
  source 1..80: mol_type = other DNA

SEQ ID NO: 199255 - DNA, 80 bp, synthetic construct; identical to SEQ ID NO: 14525
  source 1..80: mol_type = other DNA

SEQ ID NO: 199256 - DNA, 80 bp, synthetic construct; identical to SEQ ID NO: 14526
  source 1..80: mol_type = other DNA

SEQ ID NO: 199257 - DNA, 80 bp, synthetic construct; identical to SEQ ID NO: 14527
  source 1..80: mol_type = other DNA

SEQ ID NO: 199258 - DNA, 80 bp, synthetic construct; identical to SEQ ID NO: 14528
  source 1..80: mol_type = other DNA

SEQ ID NO: 199259 - DNA, 80 bp, synthetic construct; identical to SEQ ID NO: 14529
  source 1..80: mol_type = other DNA

SEQ ID NO: 199260 - DNA, 80 bp, synthetic construct; identical to SEQ ID NO: 14530
  source 1..80: mol_type = other DNA

SEQ ID NO: 199261 - DNA, 80 bp, synthetic construct; identical to SEQ ID NO: 14531
  source 1..80: mol_type = other DNA

SEQ ID NO: 199262 - DNA, 80 bp, synthetic construct; identical to SEQ ID NO: 14532
  source 1..80: mol_type = other DNA

SEQ ID NO: 199263 - DNA, 80 bp, synthetic construct; identical to SEQ ID NO: 14533
  source 1..80: mol_type = other DNA

SEQ ID NO: 199264 - DNA, 80 bp, synthetic construct; identical to SEQ ID NO: 14534
  source 1..80: mol_type = other DNA

SEQ ID NO: 199265 - DNA, 80 bp, synthetic construct; identical to SEQ ID NO: 14535
  source 1..80: mol_type = other DNA

SEQ ID NO: 199266 - DNA, 80 bp, synthetic construct; identical to SEQ ID NO: 14536
  source 1..80: mol_type = other DNA

SEQ ID NO: 199267 - DNA, 80 bp, synthetic construct; identical to SEQ ID NO: 14537
  source 1..80: mol_type = other DNA

SEQ ID NO: 199268 - DNA, 80 bp, synthetic construct; identical to SEQ ID NO: 14538
  source 1..80: mol_type = other DNA

SEQ ID NO: 199269 - DNA, 80 bp, synthetic construct; identical to SEQ ID NO: 14539
  source 1..80: mol_type = other DNA

SEQ ID NO: 199270 - DNA, 80 bp, synthetic construct; identical to SEQ ID NO: 14540
  source 1..80: mol_type = other DNA

SEQ ID NO: 199271 - DNA, 80 bp, synthetic construct; identical to SEQ ID NO: 14541
  source 1..80: mol_type = other DNA

SEQ ID NO: 199272 - DNA, 80 bp, synthetic construct; identical to SEQ ID NO: 14542
  source 1..80: mol_type = other DNA

SEQ ID NO: 199273 - DNA, 80 bp, synthetic construct; identical to SEQ ID NO: 14543
  source 1..80: mol_type = other DNA

SEQ ID NO: 199274 - DNA, 80 bp, synthetic construct; identical to SEQ ID NO: 14544
  source 1..80: mol_type = other DNA

SEQ ID NO: 199275 - DNA, 80 bp, synthetic construct; identical to SEQ ID NO: 14545
  source 1..80: mol_type = other DNA

SEQ ID NO: 199276 - DNA, 80 bp, synthetic construct; identical to SEQ ID NO: 14546
  source 1..80: mol_type = other DNA

SEQ ID NO: 199277 - DNA, 80 bp, synthetic construct; identical to SEQ ID NO: 14547
  source 1..80: mol_type = other DNA

SEQ ID NO: 199278 - DNA, 80 bp, synthetic construct; identical to SEQ ID NO: 14548
  source 1..80: mol_type = other DNA

SEQ ID NO: 199279 - DNA, 80 bp, synthetic construct; identical to SEQ ID NO: 14549
  source 1..80: mol_type = other DNA

SEQ ID NO: 199280 - DNA, 80 bp, synthetic construct; identical to SEQ ID NO: 14550
  source 1..80: mol_type = other DNA

SEQ ID NO: 199281 - DNA, 80 bp, synthetic construct; identical to SEQ ID NO: 14551
  source 1..80: mol_type = other DNA

SEQ ID NO: 199282 - DNA, 80 bp, synthetic construct; identical to SEQ ID NO: 14552
  source 1..80: mol_type = other DNA

SEQ ID NO: 199283 - DNA, 80 bp, synthetic construct; identical to SEQ ID NO: 14553
  source 1..80: mol_type = other DNA

SEQ ID NO: 199284 - DNA, 80 bp, synthetic construct; identical to SEQ ID NO: 14554
  source 1..80: mol_type = other DNA

SEQ ID NO: 199285 - DNA, 80 bp, synthetic construct; identical to SEQ ID NO: 14555
  source 1..80: mol_type = other DNA

SEQ ID NO: 199286 - DNA, 80 bp, synthetic construct; identical to SEQ ID NO: 14556
  source 1..80: mol_type = other DNA

SEQ ID NO: 199287 - DNA, 80 bp, synthetic construct; identical to SEQ ID NO: 14557
  source 1..80: mol_type = other DNA

SEQ ID NO: 199288 - DNA, 80 bp, synthetic construct; identical to SEQ ID NO: 14558
  source 1..80: mol_type = other DNA

SEQ ID NO: 199289 - DNA, 80 bp, synthetic construct; identical to SEQ ID NO: 14559
  source 1..80: mol_type = other DNA

SEQ ID NO: 199290 - DNA, 80 bp, synthetic construct; identical to SEQ ID NO: 14560
  source 1..80: mol_type = other DNA

SEQ ID NO: 199291 - DNA, 80 bp, synthetic construct; identical to SEQ ID NO: 14561
  source 1..80: mol_type = other DNA

SEQ ID NO: 199292 - DNA, 80 bp, synthetic construct; identical to SEQ ID NO: 14562
  source 1..80: mol_type = other DNA

SEQ ID NO: 199293 - DNA, 80 bp, synthetic construct; identical to SEQ ID NO: 14563
  source 1..80: mol_type = other DNA

SEQ ID NO: 199294 - DNA, 80 bp, synthetic construct; identical to SEQ ID NO: 14564
  source 1..80: mol_type = other DNA

SEQ ID NO: 199295 - DNA, 80 bp, synthetic construct; identical to SEQ ID NO: 14565
  source 1..80: mol_type = other DNA

SEQ ID NO: 199296 - DNA, 80 bp, synthetic construct; identical to SEQ ID NO: 14566
  source 1..80: mol_type = other DNA

SEQ ID NO: 199297 - DNA, 80 bp, synthetic construct; identical to SEQ ID NO: 14567
  source 1..80: mol_type = other DNA

SEQ ID NO: 199298 - DNA, 80 bp, synthetic construct; identical to SEQ ID NO: 14568
  source 1..80: mol_type = other DNA

SEQ ID NO: 199299 - DNA, 80 bp, synthetic construct; identical to SEQ ID NO: 14569
  source 1..80: mol_type = other DNA

SEQ ID NO: 199300 - DNA, 80 bp, synthetic construct; identical to SEQ ID NO: 14570
  source 1..80: mol_type = other DNA

SEQ ID NO: 199301 - DNA, 80 bp, synthetic construct; identical to SEQ ID NO: 14571
  source 1..80: mol_type = other DNA

SEQ ID NO: 199302 - DNA, 80 bp, synthetic construct; identical to SEQ ID NO: 14572
  source 1..80: mol_type = other DNA

SEQ ID NO: 199303 - DNA, 80 bp, synthetic construct; identical to SEQ ID NO: 14573
  source 1..80: mol_type = other DNA

SEQ ID NO: 199304 - DNA, 80 bp, synthetic construct; identical to SEQ ID NO: 14574
  source 1..80: mol_type = other DNA

SEQ ID NO: 199305 - DNA, 80 bp, synthetic construct; identical to SEQ ID NO: 14575
  source 1..80: mol_type = other DNA

SEQ ID NO: 199306 - DNA, 80 bp, synthetic construct; identical to SEQ ID NO: 14576
  source 1..80: mol_type = other DNA

SEQ ID NO: 199307 - DNA, 80 bp, synthetic construct; identical to SEQ ID NO: 14577
  source 1..80: mol_type = other DNA

SEQ ID NO: 199308 - DNA, 80 bp, synthetic construct; identical to SEQ ID NO: 14578
  source 1..80: mol_type = other DNA

SEQ ID NO: 199309 - DNA, 80 bp, synthetic construct; identical to SEQ ID NO: 14579
  source 1..80: mol_type = other DNA

SEQ ID NO: 199310 - DNA, 80 bp, synthetic construct; identical to SEQ ID NO: 14580
  source 1..80: mol_type = other DNA

SEQ ID NO: 199311 - DNA, 80 bp, synthetic construct; identical to SEQ ID NO: 14581
  source 1..80: mol_type = other DNA

SEQ ID NO: 199312 - DNA, 80 bp, synthetic construct; identical to SEQ ID NO: 14582
  source 1..80: mol_type = other DNA

SEQ ID NO: 199313 - DNA, 80 bp, synthetic construct; identical to SEQ ID NO: 14583
  source 1..80: mol_type = other DNA

SEQ ID NO: 199314 - DNA, 80 bp, synthetic construct; identical to SEQ ID NO: 14584
  source 1..80: mol_type = other DNA

SEQ ID NO: 199315 - DNA, 80 bp, synthetic construct; identical to SEQ ID NO: 14585
  source 1..80: mol_type = other DNA

SEQ ID NO: 199316 - DNA, 80 bp, synthetic construct; identical to SEQ ID NO: 14586
  source 1..80: mol_type = other DNA

SEQ ID NO: 199317 - DNA, 80 bp, synthetic construct; identical to SEQ ID NO: 14587
  source 1..80: mol_type = other DNA

SEQ ID NO: 199318 - DNA, 80 bp, synthetic construct; identical to SEQ ID NO: 14588
  source 1..80: mol_type = other DNA

SEQ ID NO: 199319 - DNA, 80 bp, synthetic construct; identical to SEQ ID NO: 14589
  source 1..80: mol_type = other DNA

SEQ ID NO: 199320 - DNA, 80 bp, synthetic construct; identical to SEQ ID NO: 14590
  source 1..80: mol_type = other DNA

SEQ ID NO: 199321 - DNA, 80 bp, synthetic construct; identical to SEQ ID NO: 14591
  source 1..80: mol_type = other DNA

SEQ ID NO: 199322 - DNA, 80 bp, synthetic construct; identical to SEQ ID NO: 14592
  source 1..80: mol_type = other DNA

SEQ ID NO: 199323 - DNA, 80 bp, synthetic construct; identical to SEQ ID NO: 14593
  source 1..80: mol_type = other DNA

SEQ ID NO: 199324 - DNA, 80 bp, synthetic construct; identical to SEQ ID NO: 14594
  source 1..80: mol_type = other DNA

SEQ ID NO: 199325 - DNA, 80 bp, synthetic construct; identical to SEQ ID NO: 14595
  source 1..80: mol_type = other DNA

SEQ ID NO: 199326 - DNA, 80 bp, synthetic construct; identical to SEQ ID NO: 14596
  source 1..80: mol_type = other DNA

SEQ ID NO: 199327 - DNA, 80 bp, synthetic construct; identical to SEQ ID NO: 14597
  source 1..80: mol_type = other DNA

SEQ ID NO: 199328 - DNA, 80 bp, synthetic construct; identical to SEQ ID NO: 14598
  source 1..80: mol_type = other DNA

SEQ ID NO: 199329 - DNA, 80 bp, synthetic construct; identical to SEQ ID NO: 14599
  source 1..80: mol_type = other DNA

SEQ ID NO: 199330 - DNA, 80 bp, synthetic construct; identical to SEQ ID NO: 14600
  source 1..80: mol_type = other DNA

SEQ ID NO: 199331 - DNA, 80 bp, synthetic construct; identical to SEQ ID NO: 14601
  source 1..80: mol_type = other DNA

SEQ ID NO: 199332 - DNA, 80 bp, synthetic construct; identical to SEQ ID NO: 14602
  source 1..80: mol_type = other DNA

SEQ ID NO: 199333 - DNA, 80 bp, synthetic construct; identical to SEQ ID NO: 14603
  source 1..80: mol_type = other DNA

SEQ ID NO: 199334 - DNA, 80 bp, synthetic construct; identical to SEQ ID NO: 14604
  source 1..80: mol_type = other DNA

SEQ ID NO: 199335 - DNA, 80 bp, synthetic construct; identical to SEQ ID NO: 14605
  source 1..80: mol_type = other DNA

SEQ ID NO: 199336 - DNA, 80 bp, synthetic construct; identical to SEQ ID NO: 14606
  source 1..80: mol_type = other DNA

SEQ ID NO: 199337 - DNA, 80 bp, synthetic construct; identical to SEQ ID NO: 14607
  source 1..80: mol_type = other DNA

SEQ ID NO: 199338 - DNA, 80 bp, synthetic construct; identical to SEQ ID NO: 14608
  source 1..80: mol_type = other DNA

SEQ ID NO: 199339 - DNA, 80 bp, synthetic construct; identical to SEQ ID NO: 14609
  source 1..80: mol_type = other DNA

SEQ ID NO: 199340 - DNA, 80 bp, synthetic construct; identical to SEQ ID NO: 14610
  source 1..80: mol_type = other DNA

SEQ ID NO: 199341 - DNA, 80 bp, synthetic construct; identical to SEQ ID NO: 14611
  source 1..80: mol_type = other DNA

SEQ ID NO: 199342 - DNA, 80 bp, synthetic construct; identical to SEQ ID NO: 14612
  source 1..80: mol_type = other DNA

SEQ ID NO: 199343 - DNA, 80 bp, synthetic construct; identical to SEQ ID NO: 14613
  source 1..80: mol_type = other DNA

SEQ ID NO: 199344 - DNA, 80 bp, synthetic construct; identical to SEQ ID NO: 14614
  source 1..80: mol_type = other DNA

SEQ ID NO: 199345 - DNA, 80 bp, synthetic construct; identical to SEQ ID NO: 14615
  source 1..80: mol_type = other DNA

SEQ ID NO: 199346 - DNA, 80 bp, synthetic construct; identical to SEQ ID NO: 14616
  source 1..80: mol_type = other DNA

SEQ ID NO: 199347 - DNA, 80 bp, synthetic construct; identical to SEQ ID NO: 14617
  source 1..80: mol_type = other DNA

SEQ ID NO: 199348 - DNA, 80 bp, synthetic construct; identical to SEQ ID NO: 14618
  source 1..80: mol_type = other DNA

SEQ ID NO: 199349 - DNA, 80 bp, synthetic construct; identical to SEQ ID NO: 14619
  source 1..80: mol_type = other DNA

SEQ ID NO: 199350 - DNA, 80 bp, synthetic construct; identical to SEQ ID NO: 14620
  source 1..80: mol_type = other DNA

SEQ ID NO: 199351 - DNA, 80 bp, synthetic construct; identical to SEQ ID NO: 14621
  source 1..80: mol_type = other DNA

SEQ ID NO: 199352 - DNA, 80 bp, synthetic construct; identical to SEQ ID NO: 14622
  source 1..80: mol_type = other DNA

SEQ ID NO: 199353 - DNA, 80 bp, synthetic construct; identical to SEQ ID NO: 14623
  source 1..80: mol_type = other DNA

SEQ ID NO: 199354 - DNA, 80 bp, synthetic construct; identical to SEQ ID NO: 14624
  source 1..80: mol_type = other DNA

SEQ ID NO: 199355 - DNA, 80 bp, synthetic construct; identical to SEQ ID NO: 14625
  source 1..80: mol_type = other DNA

SEQ ID NO: 199356 - DNA, 80 bp, synthetic construct; identical to SEQ ID NO: 14626
  source 1..80: mol_type = other DNA

SEQ ID NO: 199357 - DNA, 80 bp, synthetic construct; identical to SEQ ID NO: 14627
  source 1..80: mol_type = other DNA

SEQ ID NO: 199358 - DNA, 80 bp, synthetic construct; identical to SEQ ID NO: 14628
  source 1..80: mol_type = other DNA

SEQ ID NO: 199359 - DNA, 80 bp, synthetic construct; identical to SEQ ID NO: 14629
  source 1..80: mol_type = other DNA

SEQ ID NO: 199360 - DNA, 80 bp, synthetic construct; identical to SEQ ID NO: 14630
  source 1..80: mol_type = other DNA

SEQ ID NO: 199361 - DNA, 80 bp, synthetic construct; identical to SEQ ID NO: 14631
  source 1..80: mol_type = other DNA

SEQ ID NO: 199362 - DNA, 80 bp, synthetic construct; identical to SEQ ID NO: 14632
  source 1..80: mol_type = other DNA

SEQ ID NO: 199363 - DNA, 80 bp, synthetic construct; identical to SEQ ID NO: 14633
  source 1..80: mol_type = other DNA

SEQ ID NO: 199364 - DNA, 80 bp, synthetic construct; identical to SEQ ID NO: 14634
  source 1..80: mol_type = other DNA

SEQ ID NO: 199365 - DNA, 80 bp, synthetic construct; identical to SEQ ID NO: 14635
  source 1..80: mol_type = other DNA

SEQ ID NO: 199366 - DNA, 80 bp, synthetic construct; identical to SEQ ID NO: 14636
  source 1..80: mol_type = other DNA

SEQ ID NO: 199367 - DNA, 80 bp, synthetic construct; identical to SEQ ID NO: 14637
  source 1..80: mol_type = other DNA

SEQ ID NO: 199368 - DNA, 80 bp, synthetic construct; identical to SEQ ID NO: 14638
  source 1..80: mol_type = other DNA

SEQ ID NO: 199369 - DNA, 80 bp, synthetic construct; identical to SEQ ID NO: 14639
  source 1..80: mol_type = other DNA

SEQ ID NO: 199370 - DNA, 80 bp, synthetic construct; identical to SEQ ID NO: 14640
  source 1..80: mol_type = other DNA

SEQ ID NO: 199371 - DNA, 80 bp, synthetic construct; identical to SEQ ID NO: 14641
  source 1..80: mol_type = other DNA

SEQ ID NO: 199372 - DNA, 80 bp, synthetic construct; identical to SEQ ID NO: 14642
  source 1..80: mol_type = other DNA

SEQ ID NO: 199373 - DNA, 80 bp, synthetic construct; identical to SEQ ID NO: 14643
  source 1..80: mol_type = other DNA

SEQ ID NO: 199374 - DNA, 80 bp, synthetic construct; identical to SEQ ID NO: 14644
  source 1..80: mol_type = other DNA

SEQ ID NO: 199375 - DNA, 80 bp, synthetic construct; identical to SEQ ID NO: 14645
  source 1..80: mol_type = other DNA

SEQ ID NO: 199376 - DNA, 80 bp, synthetic construct; identical to SEQ ID NO: 14646
  source 1..80: mol_type = other DNA

SEQ ID NO: 199377 - DNA, 80 bp, synthetic construct; identical to SEQ ID NO: 14647
  source 1..80: mol_type = other DNA

SEQ ID NO: 199378 - DNA, 80 bp, synthetic construct; identical to SEQ ID NO: 14648
  source 1..80: mol_type = other DNA

SEQ ID NO: 199379 - DNA, 80 bp, synthetic construct; identical to SEQ ID NO: 14649
  source 1..80: mol_type = other DNA

SEQ ID NO: 199380 - DNA, 80 bp, synthetic construct; identical to SEQ ID NO: 14650
  source 1..80: mol_type = other DNA

SEQ ID NO: 199381 - DNA, 80 bp, synthetic construct; identical to SEQ ID NO: 14651
  source 1..80: mol_type = other DNA

SEQ ID NO: 199382 - DNA, 80 bp, synthetic construct; identical to SEQ ID NO: 14652
  source 1..80: mol_type = other DNA

SEQ ID NO: 199383 - DNA, 80 bp, synthetic construct; identical to SEQ ID NO: 14653
  source 1..80: mol_type = other DNA

SEQ ID NO: 199384 - DNA, 80 bp, synthetic construct; identical to SEQ ID NO: 14654
  source 1..80: mol_type = other DNA

SEQ ID NO: 199385 - DNA, 80 bp, synthetic construct; identical to SEQ ID NO: 14655
  source 1..80: mol_type = other DNA

SEQ ID NO: 199386 - DNA, 80 bp, synthetic construct; identical to SEQ ID NO: 14656
  source 1..80: mol_type = other DNA

SEQ ID NO: 199387 - DNA, 80 bp, synthetic construct; identical to SEQ ID NO: 14657
  source 1..80: mol_type = other DNA

SEQ ID NO: 199388 - DNA, 80 bp, synthetic construct; identical to SEQ ID NO: 14658
  source 1..80: mol_type = other DNA

SEQ ID NO: 199389 - DNA, 80 bp, synthetic construct; identical to SEQ ID NO: 14659
  source 1..80: mol_type = other DNA

SEQ ID NO: 199390 - DNA, 80 bp, synthetic construct; identical to SEQ ID NO: 14660
  source 1..80: mol_type = other DNA

SEQ ID NO: 199391 - DNA, 80 bp, synthetic construct; identical to SEQ ID NO: 14661
  source 1..80: mol_type = other DNA

SEQ ID NO: 199392 - DNA, 80 bp, synthetic construct; identical to SEQ ID NO: 14662
  source 1..80: mol_type = other DNA

SEQ ID NO: 199393 - DNA, 80 bp, synthetic construct; identical to SEQ ID NO: 14663
  source 1..80: mol_type = other DNA

SEQ ID NO: 199394 - DNA, 80 bp, synthetic construct; identical to SEQ ID NO: 14664
  source 1..80: mol_type = other DNA

SEQ ID NO: 199395 - DNA, 80 bp, synthetic construct; identical to SEQ ID NO: 14665
  source 1..80: mol_type = other DNA

SEQ ID NO: 199396 - DNA, 80 bp, synthetic construct; identical to SEQ ID NO: 14666
  source 1..80: mol_type = other DNA

SEQ ID NO: 199397 - DNA, 80 bp, synthetic construct; identical to SEQ ID NO: 14667
  source 1..80: mol_type = other DNA

SEQ ID NO: 199398 - DNA, 80 bp, synthetic construct; identical to SEQ ID NO: 14668
  source 1..80: mol_type = other DNA

SEQ ID NO: 199399 - DNA, 80 bp, synthetic construct; identical to SEQ ID NO: 14669
  source 1..80: mol_type = other DNA

SEQ ID NO: 199400 - DNA, 80 bp, synthetic construct; identical to SEQ ID NO: 14670
  source 1..80: mol_type = other DNA

SEQ ID NO: 199401 - DNA, 80 bp, synthetic construct; identical to SEQ ID NO: 14671
  source 1..80: mol_type = other DNA

SEQ ID NO: 199402 - DNA, 80 bp, synthetic construct; identical to SEQ ID NO: 14672
  source 1..80: mol_type = other DNA

SEQ ID NO: 199403 - DNA, 80 bp, synthetic construct; identical to SEQ ID NO: 14673
  source 1..80: mol_type = other DNA

SEQ ID NO: 199404 - DNA, 80 bp, synthetic construct; identical to SEQ ID NO: 14674
  source 1..80: mol_type = other DNA

SEQ ID NO: 199405 - DNA, 80 bp, synthetic construct; identical to SEQ ID NO: 14675
  source 1..80: mol_type = other DNA

SEQ ID NO: 199406 - DNA, 80 bp, synthetic construct; identical to SEQ ID NO: 14676
  source 1..80: mol_type = other DNA

SEQ ID NO: 199407 - DNA, 80 bp, synthetic construct; identical to SEQ ID NO: 14677
  source 1..80: mol_type = other DNA

SEQ ID NO: 199408 - DNA, 80 bp, synthetic construct; identical to SEQ ID NO: 14678
  source 1..80: mol_type = other DNA

SEQ ID NO: 199409 - DNA, 80 bp, synthetic construct; identical to SEQ ID NO: 14679
  source 1..80: mol_type = other DNA

SEQ ID NO: 199410 - DNA, 80 bp, synthetic construct; identical to SEQ ID NO: 14680
  source 1..80: mol_type = other DNA

SEQ ID NO: 199411 - DNA, 80 bp, synthetic construct; identical to SEQ ID NO: 14681
  source 1..80: mol_type = other DNA

SEQ ID NO: 199412 - DNA, 80 bp, synthetic construct; identical to SEQ ID NO: 14682
  source 1..80: mol_type = other DNA

SEQ ID NO: 199413 - DNA, 80 bp, synthetic construct; identical to SEQ ID NO: 14683
  source 1..80: mol_type = other DNA

SEQ ID NO: 199414 - DNA, 80 bp, synthetic construct; identical to SEQ ID NO: 14684
  source 1..80: mol_type = other DNA

SEQ ID NO: 199415 - DNA, 80 bp, synthetic construct; identical to SEQ ID NO: 14685
  source 1..80: mol_type = other DNA

SEQ ID NO: 199416 - DNA, 80 bp, synthetic construct; identical to SEQ ID NO: 14686
  source 1..80: mol_type = other DNA

SEQ ID NO: 199417 - DNA, 80 bp, synthetic construct; identical to SEQ ID NO: 14687
  source 1..80: mol_type = other DNA

SEQ ID NO: 199418 - DNA, 80 bp, synthetic construct; identical to SEQ ID NO: 14688
  source 1..80: mol_type = other DNA

SEQ ID NO: 199419 - DNA, 80 bp, synthetic construct; identical to SEQ ID NO: 14689
  source 1..80: mol_type = other DNA

SEQ ID NO: 199420 - DNA, 80 bp, synthetic construct; identical to SEQ ID NO: 14690
  source 1..80: mol_type = other DNA

SEQ ID NO: 199421 - DNA, 80 bp, synthetic construct; identical to SEQ ID NO: 14691
  source 1..80: mol_type = other DNA

SEQ ID NO: 199422 - DNA, 80 bp, synthetic construct; identical to SEQ ID NO: 14692
  source 1..80: mol_type = other DNA

SEQ ID NO: 199423 - DNA, 80 bp, synthetic construct; identical to SEQ ID NO: 14693
  source 1..80: mol_type = other DNA

SEQ ID NO: 199424 - DNA, 80 bp, synthetic construct; identical to SEQ ID NO: 14694
  source 1..80: mol_type = other DNA

SEQ ID NO: 199425 - DNA, 80 bp, synthetic construct; identical to SEQ ID NO: 14695
  source 1..80: mol_type = other DNA

SEQ ID NO: 199426 - DNA, 80 bp, synthetic construct; identical to SEQ ID NO: 14696
  source 1..80: mol_type = other DNA

SEQ ID NO: 199427 - DNA, 80 bp, synthetic construct; identical to SEQ ID NO: 14697
  source 1..80: mol_type = other DNA

SEQ ID NO: 199428 - DNA, 80 bp, synthetic construct; identical to SEQ ID NO: 14698
  source 1..80: mol_type = other DNA

SEQ ID NO: 199429 - DNA, 80 bp, synthetic construct; identical to SEQ ID NO: 14699
  source 1..80: mol_type = other DNA

SEQ ID NO: 199430 - DNA, 80 bp, synthetic construct; identical to SEQ ID NO: 14700
  source 1..80: mol_type = other DNA

SEQ ID NO: 199431 - DNA, 80 bp, synthetic construct; identical to SEQ ID NO: 14701
  source 1..80: mol_type = other DNA

SEQ ID NO: 199432 - DNA, 80 bp, synthetic construct; identical to SEQ ID NO: 14702
  source 1..80: mol_type = other DNA

SEQ ID NO: 199433 - DNA, 80 bp, synthetic construct; identical to SEQ ID NO: 14703
  source 1..80: mol_type = other DNA

SEQ ID NO: 199434 - DNA, 80 bp, synthetic construct; identical to SEQ ID NO: 14704
  source 1..80: mol_type = other DNA

SEQ ID NO: 199435 - DNA, 80 bp, synthetic construct; identical to SEQ ID NO: 14705
  source 1..80: mol_type = other DNA

SEQ ID NO: 199436 - DNA, 80 bp, synthetic construct; identical to SEQ ID NO: 14706
  source 1..80: mol_type = other DNA

SEQ ID NO: 199437 - DNA, 80 bp, synthetic construct; identical to SEQ ID NO: 14707
  source 1..80: mol_type = other DNA

SEQ ID NO: 199438 - DNA, 80 bp, synthetic construct; identical to SEQ ID NO: 14708
  source 1..80: mol_type = other DNA

SEQ ID NO: 199439 - DNA, 80 bp, synthetic construct; identical to SEQ ID NO: 14709
  source 1..80: mol_type = other DNA

SEQ ID NO: 199440 - DNA, 80 bp, synthetic construct; identical to SEQ ID NO: 14710
  source 1..80: mol_type = other DNA

SEQ ID NO: 199441 - DNA, 80 bp, synthetic construct; identical to SEQ ID NO: 14711
  source 1..80: mol_type = other DNA

SEQ ID NO: 199442 - DNA, 80 bp, synthetic construct; identical to SEQ ID NO: 14712
  source 1..80: mol_type = other DNA

SEQ ID NO: 199443 - DNA, 80 bp, synthetic construct; identical to SEQ ID NO: 14713
  source 1..80: mol_type = other DNA

SEQ ID NO: 199444 - DNA, 80 bp, synthetic construct; identical to SEQ ID NO: 14714
  source 1..80: mol_type = other DNA

SEQ ID NO: 199445 - DNA, 80 bp, synthetic construct; identical to SEQ ID NO: 14715
  source 1..80: mol_type = other DNA

SEQ ID NO: 199446 - DNA, 80 bp, synthetic construct; identical to SEQ ID NO: 14716
  source 1..80: mol_type = other DNA

SEQ ID NO: 199447 - DNA, 80 bp, synthetic construct; identical to SEQ ID NO: 14717
  source 1..80: mol_type = other DNA

SEQ ID NO: 199448 - DNA, 80 bp, synthetic construct; identical to SEQ ID NO: 14718
  source 1..80: mol_type = other DNA

SEQ ID NO: 199449 - DNA, 80 bp, synthetic construct; identical to SEQ ID NO: 14719
  source 1..80: mol_type = other DNA

SEQ ID NO: 199450 - DNA, 80 bp, synthetic construct; identical to SEQ ID NO: 14720
  source 1..80: mol_type = other DNA

SEQ ID NO: 199451 - DNA, 80 bp, synthetic construct; identical to SEQ ID NO: 14721
  source 1..80: mol_type = other DNA

SEQ ID NO: 199452 - DNA, 80 bp, synthetic construct; identical to SEQ ID NO: 14722
  source 1..80: mol_type = other DNA

SEQ ID NO: 199453 - DNA, 80 bp, synthetic construct; identical to SEQ ID NO: 14723
  source 1..80: mol_type = other DNA

SEQ ID NO: 199454 - DNA, 80 bp, synthetic construct; identical to SEQ ID NO: 14724
  source 1..80: mol_type = other DNA

SEQ ID NO: 199455 - DNA, 80 bp, synthetic construct; identical to SEQ ID NO: 14725
  source 1..80: mol_type = other DNA

SEQ ID NO: 199456 - DNA, 80 bp, synthetic construct; identical to SEQ ID NO: 14726
  source 1..80: mol_type = other DNA

SEQ ID NO: 199457 - DNA, 80 bp, synthetic construct; identical to SEQ ID NO: 14727
  source 1..80: mol_type = other DNA

SEQ ID NO: 199458 - DNA, 80 bp, synthetic construct; identical to SEQ ID NO: 14728
  source 1..80: mol_type = other DNA

SEQ ID NO: 199459 - DNA, 80 bp, synthetic construct; identical to SEQ ID NO: 14729
  source 1..80: mol_type = other DNA

SEQ ID NO: 199460 - DNA, 80 bp, synthetic construct; identical to SEQ ID NO: 14730
  source 1..80: mol_type = other DNA

SEQ ID NO: 199461 - DNA, 80 bp, synthetic construct; identical to SEQ ID NO: 14731
  source 1..80: mol_type = other DNA

SEQ ID NO: 199462 - DNA, 80 bp, synthetic construct; identical to SEQ ID NO: 14732
  source 1..80: mol_type = other DNA

SEQ ID NO: 199463 - DNA, 80 bp, synthetic construct; identical to SEQ ID NO: 14733
  source 1..80: mol_type = other DNA

SEQ ID NO: 199464 - DNA, 80 bp, synthetic construct; identical to SEQ ID NO: 14734
  source 1..80: mol_type = other DNA

SEQ ID NO: 199465 - DNA, 80 bp, synthetic construct; identical to SEQ ID NO: 14735
  source 1..80: mol_type = other DNA

SEQ ID NO: 199466 - DNA, 80 bp, synthetic construct; identical to SEQ ID NO: 14736
  source 1..80: mol_type = other DNA

SEQ ID NO: 199467 - DNA, 80 bp, synthetic construct; identical to SEQ ID NO: 14737
  source 1..80: mol_type = other DNA

SEQ ID NO: 199468 - DNA, 80 bp, synthetic construct; identical to SEQ ID NO: 14738
  source 1..80: mol_type = other DNA

SEQ ID NO: 199469 - DNA, 80 bp, synthetic construct; identical to SEQ ID NO: 14739
  source 1..80: mol_type = other DNA

SEQ ID NO: 199470 - DNA, 80 bp, synthetic construct; identical to SEQ ID NO: 14740
  source 1..80: mol_type = other DNA

SEQ ID NO: 199471 - DNA, 80 bp, synthetic construct; identical to SEQ ID NO: 14741
  source 1..80: mol_type = other DNA

SEQ ID NO: 199472 - DNA, 80 bp, synthetic construct; identical to SEQ ID NO: 14742
  source 1..80: mol_type = other DNA

SEQ ID NO: 199473 - DNA, 80 bp, synthetic construct; identical to SEQ ID NO: 14743
  source 1..80: mol_type = other DNA

SEQ ID NO: 199474 - DNA, 80 bp, synthetic construct; identical to SEQ ID NO: 14744
  source 1..80: mol_type = other DNA

SEQ ID NO: 199475 - DNA, 80 bp, synthetic construct; identical to SEQ ID NO: 14745
  source 1..80: mol_type = other DNA

SEQ ID NO: 199476 - DNA, 80 bp, synthetic construct; identical to SEQ ID NO: 14746
  source 1..80: mol_type = other DNA

SEQ ID NO: 199477 - DNA, 80 bp, synthetic construct; identical to SEQ ID NO: 14747
  source 1..80: mol_type = other DNA

SEQ ID NO: 199478 - DNA, 80 bp, synthetic construct; identical to SEQ ID NO: 14748
  source 1..80: mol_type = other DNA

SEQ ID NO: 199479 - DNA, 80 bp, synthetic construct; identical to SEQ ID NO: 14749
  source 1..80: mol_type = other DNA

SEQ ID NO: 199480 - DNA, 80 bp, synthetic construct; identical to SEQ ID NO: 14750
  source 1..80: mol_type = other DNA

SEQ ID NO: 199481 - DNA, 80 bp, synthetic construct; identical to SEQ ID NO: 14751
  source 1..80: mol_type = other DNA

SEQ ID NO: 199482 - DNA, 80 bp, synthetic construct; identical to SEQ ID NO: 14752
  source 1..80: mol_type = other DNA

SEQ ID NO: 199483 - DNA, 80 bp, synthetic construct; identical to SEQ ID NO: 14753
  source 1..80: mol_type = other DNA

SEQ ID NO: 199484 - DNA, 80 bp, synthetic construct; identical to SEQ ID NO: 14754
  source 1..80: mol_type = other DNA

SEQ ID NO: 199485 - DNA, 80 bp, synthetic construct; identical to SEQ ID NO: 14755
  source 1..80: mol_type = other DNA

SEQ ID NO: 199486 - DNA, 80 bp, synthetic construct; identical to SEQ ID NO: 14756
  source 1..80: mol_type = other DNA

SEQ ID NO: 199487 - DNA, 80 bp, synthetic construct; identical to SEQ ID NO: 14757
  source 1..80: mol_type = other DNA

SEQ ID NO: 199488 - DNA, 80 bp, synthetic construct; identical to SEQ ID NO: 14758
  source 1..80: mol_type = other DNA

SEQ ID NO: 199489 - DNA, 80 bp, synthetic construct; identical to SEQ ID NO: 14759
  source 1..80: mol_type = other DNA

SEQ ID NO: 199490 - DNA, 80 bp, synthetic construct; identical to SEQ ID NO: 14760
  source 1..80: mol_type = other DNA

SEQ ID NO: 199491 - DNA, 80 bp, synthetic construct; identical to SEQ ID NO: 14761
  source 1..80: mol_type = other DNA

SEQ ID NO: 199492 - DNA, 80 bp, synthetic construct; identical to SEQ ID NO: 14762
  source 1..80: mol_type = other DNA

SEQ ID NO: 199493 - DNA, 80 bp, synthetic construct; identical to SEQ ID NO: 14763
  source 1..80: mol_type = other DNA

SEQ ID NO: 199494 - DNA, 80 bp, synthetic construct; identical to SEQ ID NO: 14764
  source 1..80: mol_type = other DNA

SEQ ID NO: 199495 - DNA, 80 bp, synthetic construct; identical to SEQ ID NO: 14765
  source 1..80: mol_type = other DNA

SEQ ID NO: 199496 - DNA, 80 bp, synthetic construct; identical to SEQ ID NO: 14766
  source 1..80: mol_type = other DNA

SEQ ID NO: 199497 - DNA, 80 bp, synthetic construct; identical to SEQ ID NO: 14767
  source 1..80: mol_type = other DNA

SEQ ID NO: 199498 - DNA, 80 bp, synthetic construct; identical to SEQ ID NO: 14768
  source 1..80: mol_type = other DNA

SEQ ID NO: 199499 - DNA, 80 bp, synthetic construct; identical to SEQ ID NO: 14769
  source 1..80: mol_type = other DNA

SEQ ID NO: 199500 - DNA, 80 bp, synthetic construct; identical to SEQ ID NO: 14770
  source 1..80: mol_type = other DNA

SEQ ID NO: 199501 - DNA, 80 bp, synthetic construct; identical to SEQ ID NO: 14771
  source 1..80: mol_type = other DNA

SEQ ID NO: 199502 - DNA, 80 bp, synthetic construct; identical to SEQ ID NO: 14772
  source 1..80: mol_type = other DNA

SEQ ID NO: 199503 - DNA, 80 bp, synthetic construct; identical to SEQ ID NO: 14773
  source 1..80: mol_type = other DNA

SEQ ID NO: 199504 - DNA, 80 bp, synthetic construct; identical to SEQ ID NO: 14774
  source 1..80: mol_type = other DNA

SEQ ID NO: 199505 - DNA, 80 bp, synthetic construct; identical to SEQ ID NO: 14775
  source 1..80: mol_type = other DNA

SEQ ID NO: 199506 - DNA, 80 bp, synthetic construct; identical to SEQ ID NO: 14776
  source 1..80: mol_type = other DNA

SEQ ID NO: 199507 - DNA, 80 bp, synthetic construct; identical to SEQ ID NO: 14777
  source 1..80: mol_type = other DNA

SEQ ID NO: 199508 - DNA, 80 bp, synthetic construct; identical to SEQ ID NO: 14778
  source 1..80: mol_type = other DNA

SEQ ID NO: 199509 - DNA, 80 bp, synthetic construct; identical to SEQ ID NO: 14779
  source 1..80: mol_type = other DNA

SEQ ID NO: 199510 - DNA, 80 bp, synthetic construct; identical to SEQ ID NO: 14780
  source 1..80: mol_type = other DNA

SEQ ID NO: 199511 - DNA, 80 bp, synthetic construct; identical to SEQ ID NO: 14781
  source 1..80: mol_type = other DNA

SEQ ID NO: 199512 - DNA, 80 bp, synthetic construct; identical to SEQ ID NO: 14782
  source 1..80: mol_type = other DNA

SEQ ID NO: 199513 - DNA, 80 bp, synthetic construct; identical to SEQ ID NO: 14783
  source 1..80: mol_type = other DNA

SEQ ID NO: 199514 - DNA, 80 bp, synthetic construct; identical to SEQ ID NO: 14784
  source 1..80: mol_type = other DNA

SEQ ID NO: 199515 - DNA, 80 bp, synthetic construct; identical to SEQ ID NO: 14785
  source 1..80: mol_type = other DNA

SEQ ID NO: 199516 - DNA, 80 bp, synthetic construct; identical to SEQ ID NO: 14786
  source 1..80: mol_type = other DNA

SEQ ID NO: 199517 - DNA, 80 bp, synthetic construct; identical to SEQ ID NO: 14787
  source 1..80: mol_type = other DNA

SEQ ID NO: 199518 - DNA, 80 bp, synthetic construct; identical to SEQ ID NO: 14788
  source 1..80: mol_type = other DNA

SEQ ID NO: 199519 - DNA, 80 bp, synthetic construct; identical to SEQ ID NO: 14789
  source 1..80: mol_type = other DNA

SEQ ID NO: 199520 - DNA, 80 bp, synthetic construct; identical to SEQ ID NO: 14790
  source 1..80: mol_type = other DNA

SEQ ID NO: 199521 - DNA, 80 bp, synthetic construct; identical to SEQ ID NO: 14791
  source 1..80: mol_type = other DNA

SEQ ID NO: 199522 - DNA, 80 bp, synthetic construct; identical to SEQ ID NO: 14792
  source 1..80: mol_type = other DNA

SEQ ID NO: 199523 - DNA, 80 bp, synthetic construct; identical to SEQ ID NO: 14793
  source 1..80: mol_type = other DNA

SEQ ID NO: 199524 - DNA, 80 bp, synthetic construct; identical to SEQ ID NO: 14794
  source 1..80: mol_type = other DNA

SEQ ID NO: 199525 - DNA, 80 bp, synthetic construct; identical to SEQ ID NO: 14795
  source 1..80: mol_type = other DNA

SEQ ID NO: 199526 - DNA, 80 bp, synthetic construct; identical to SEQ ID NO: 14796
  source 1..80: mol_type = other DNA

SEQ ID NO: 199527 - DNA, 80 bp, synthetic construct; identical to SEQ ID NO: 14797
  source 1..80: mol_type = other DNA

SEQ ID NO: 199528 - DNA, 80 bp, synthetic construct; identical to SEQ ID NO: 14798
  source 1..80: mol_type = other DNA

SEQ ID NO: 199529 - DNA, 80 bp, synthetic construct; identical to SEQ ID NO: 14799
  source 1..80: mol_type = other DNA

SEQ ID NO: 199530 - DNA, 80 bp, synthetic construct; identical to SEQ ID NO: 14800
  source 1..80: mol_type = other DNA

SEQ ID NO: 199531 - DNA, 80 bp, synthetic construct; identical to SEQ ID NO: 14801
  source 1..80: mol_type = other DNA

SEQ ID NO: 199532 - DNA, 80 bp, synthetic construct; identical to SEQ ID NO: 14802
  source 1..80: mol_type = other DNA

SEQ ID NO: 199533 - DNA, 80 bp, synthetic construct; identical to SEQ ID NO: 14803
  source 1..80: mol_type = other DNA

SEQ ID NO: 199534 - DNA, 80 bp, synthetic construct; identical to SEQ ID NO: 14804
  source 1..80: mol_type = other DNA

SEQ ID NO: 199535 - DNA, 80 bp, synthetic construct; identical to SEQ ID NO: 14805
  source 1..80: mol_type = other DNA

SEQ ID NO: 199536 - DNA, 80 bp, synthetic construct; identical to SEQ ID NO: 14806
  source 1..80: mol_type = other DNA

SEQ ID NO: 199537 - DNA, 80 bp, synthetic construct; identical to SEQ ID NO: 14807
  source 1..80: mol_type = other DNA

SEQ ID NO: 199538 - DNA, 80 bp, synthetic construct; identical to SEQ ID NO: 14808
  source 1..80: mol_type = other DNA

SEQ ID NO: 199539 - DNA, 80 bp, synthetic construct; identical to SEQ ID NO: 14809
  source 1..80: mol_type = other DNA

SEQ ID NO: 199540 - DNA, 80 bp, synthetic construct; identical to SEQ ID NO: 14810
  source 1..80: mol_type = other DNA

SEQ ID NO: 199541 - DNA, 80 bp, synthetic construct; identical to SEQ ID NO: 14811
  source 1..80: mol_type = other DNA

SEQ ID NO: 199542 - DNA, 80 bp, synthetic construct; identical to SEQ ID NO: 14812
  source 1..80: mol_type = other DNA

SEQ ID NO: 199543 - DNA, 80 bp, synthetic construct; identical to SEQ ID NO: 14813
  source 1..80: mol_type = other DNA

SEQ ID NO: 199544 - DNA, 80 bp, synthetic construct; identical to SEQ ID NO: 14814
  source 1..80: mol_type = other DNA

SEQ ID NO: 199545 - DNA, 80 bp, synthetic construct; identical to SEQ ID NO: 14815
  source 1..80: mol_type = other DNA

SEQ ID NO: 199546 - DNA, 80 bp, synthetic construct; identical to SEQ ID NO: 14816
  source 1..80: mol_type = other DNA

SEQ ID NO: 199547 - DNA, 80 bp, synthetic construct; identical to SEQ ID NO: 14817
  source 1..80: mol_type = other DNA

SEQ ID NO: 199548 - DNA, 80 bp, synthetic construct; identical to SEQ ID NO: 14818
  source 1..80: mol_type = other DNA

SEQ ID NO: 199549 - DNA, 80 bp, synthetic construct; identical to SEQ ID NO: 14819
  source 1..80: mol_type = other DNA

SEQ ID NO: 199550 - DNA, 80 bp, synthetic construct; identical to SEQ ID NO: 14820
  source 1..80: mol_type = other DNA

SEQ ID NO: 199551 - DNA, 80 bp, synthetic construct; identical to SEQ ID NO: 14821
  source 1..80: mol_type = other DNA

SEQ ID NO: 199552 - DNA, 80 bp, synthetic construct; identical to SEQ ID NO: 14822
  source 1..80: mol_type = other DNA

SEQ ID NO: 199553 - DNA, 80 bp, synthetic construct; identical to SEQ ID NO: 14823
  source 1..80: mol_type = other DNA

SEQ ID NO: 199554 - DNA, 80 bp, synthetic construct; identical to SEQ ID NO: 14824
  source 1..80: mol_type = other DNA

SEQ ID NO: 199555 - DNA, 80 bp, synthetic construct; identical to SEQ ID NO: 14825
  source 1..80: mol_type = other DNA

SEQ ID NO: 199556 - DNA, 80 bp, synthetic construct; identical to SEQ ID NO: 14826
  source 1..80: mol_type = other DNA

SEQ ID NO: 199557 - DNA, 80 bp, synthetic construct; identical to SEQ ID NO: 14827
  source 1..80: mol_type = other DNA

SEQ ID NO: 199558 - DNA, 80 bp, synthetic construct; identical to SEQ ID NO: 14828
  source 1..80: mol_type = other DNA

SEQ ID NO: 199559 - DNA, 80 bp, synthetic construct; identical to SEQ ID NO: 14829
  source 1..80: mol_type = other DNA

SEQ ID NO: 199560 - DNA, 80 bp, synthetic construct; identical to SEQ ID NO: 14830
  source 1..80: mol_type = other DNA

SEQ ID NO: 199561 - DNA, 80 bp, synthetic construct; identical to SEQ ID NO: 14831
  source 1..80: mol_type = other DNA

SEQ ID NO: 199562 - DNA, 80 bp, synthetic construct; identical to SEQ ID NO: 14832
  source 1..80: mol_type = other DNA

SEQ ID NO: 199563 - DNA, 80 bp, synthetic construct; identical to SEQ ID NO: 14833
  source 1..80: mol_type = other DNA

SEQ ID NO: 199564 - DNA, 80 bp, synthetic construct; identical to SEQ ID NO: 14834
  source 1..80: mol_type = other DNA

SEQ ID NO: 199565 - DNA, 80 bp, synthetic construct; identical to SEQ ID NO: 14835
  source 1..80: mol_type = other DNA

SEQ ID NO: 199566 - DNA, 80 bp, synthetic construct; identical to SEQ ID NO: 14836
  source 1..80: mol_type = other DNA

SEQ ID NO: 199567 - DNA, 80 bp, synthetic construct; identical to SEQ ID NO: 14837
  source 1..80: mol_type = other DNA

SEQ ID NO: 199568 - DNA, 80 bp, synthetic construct; identical to SEQ ID NO: 14838
  source 1..80: mol_type = other DNA

SEQ ID NO: 199569 - DNA, 80 bp, synthetic construct; identical to SEQ ID NO: 14839
  source 1..80: mol_type = other DNA

SEQ ID NO: 199570 - DNA, 80 bp, synthetic construct; identical to SEQ ID NO: 14840
  source 1..80: mol_type = other DNA

SEQ ID NO: 199571 - DNA, 80 bp, synthetic construct; identical to SEQ ID NO: 14841
  source 1..80: mol_type = other DNA

SEQ ID NO: 199572 - DNA, 80 bp, synthetic construct; identical to SEQ ID NO: 14842
  source 1..80: mol_type = other DNA

SEQ ID NO: 199573 - DNA, 80 bp, synthetic construct; identical to SEQ ID NO: 14843
  source 1..80: mol_type = other DNA

SEQ ID NO: 199574 - DNA, 80 bp, synthetic construct; identical to SEQ ID NO: 14844
  source 1..80: mol_type = other DNA

SEQ ID NO: 199575 - DNA, 80 bp, synthetic construct; identical to SEQ ID NO: 14845
  source 1..80: mol_type = other DNA

SEQ ID NO: 199576 - DNA, 80 bp, synthetic construct; identical to SEQ ID NO: 14846
  source 1..80: mol_type = other DNA

SEQ ID NO: 199577 - DNA, 80 bp, synthetic construct; identical to SEQ ID NO: 14847
  source 1..80: mol_type = other DNA

SEQ ID NO: 199578 - DNA, 80 bp, synthetic construct; identical to SEQ ID NO: 14848
  source 1..80: mol_type = other DNA

SEQ ID NO: 199579 - DNA, 80 bp, synthetic construct; identical to SEQ ID NO: 14849
  source 1..80: mol_type = other DNA

SEQ ID NO: 199580 - DNA, 80 bp, synthetic construct; identical to SEQ ID NO: 14850
  source 1..80: mol_type = other DNA

SEQ ID NO: 199581 - DNA, 80 bp, synthetic construct; identical to SEQ ID NO: 14851
  source 1..80: mol_type = other DNA

SEQ ID NO: 199582 - DNA, 80 bp, synthetic construct; identical to SEQ ID NO: 14852
  source 1..80: mol_type = other DNA

SEQ ID NO: 199583 - DNA, 80 bp, synthetic construct; identical to SEQ ID NO: 14853
  source 1..80: mol_type = other DNA

SEQ ID NO: 199584 - DNA, 80 bp, synthetic construct; identical to SEQ ID NO: 14854
  source 1..80: mol_type = other DNA

SEQ ID NO: 199585 - DNA, 80 bp, synthetic construct; identical to SEQ ID NO: 14855
  source 1..80: mol_type = other DNA

SEQ ID NO: 199586 - DNA, 80 bp, synthetic construct; identical to SEQ ID NO: 14856
  source 1..80: mol_type = other DNA

SEQ ID NO: 199587 - DNA, 80 bp, synthetic construct; identical to SEQ ID NO: 14857
  source 1..80: mol_type = other DNA

SEQ ID NO: 199588 - DNA, 80 bp, synthetic construct; identical to SEQ ID NO: 14858
  source 1..80: mol_type = other DNA

SEQ ID NO: 199589 - DNA, 80 bp, synthetic construct; identical to SEQ ID NO: 14859
  source 1..80: mol_type = other DNA

SEQ ID NO: 199590 - DNA, 80 bp, synthetic construct; identical to SEQ ID NO: 14860
  source 1..80: mol_type = other DNA

SEQ ID NO: 199591 - DNA, 80 bp, synthetic construct; identical to SEQ ID NO: 14861
  source 1..80: mol_type = other DNA

SEQ ID NO: 199592 - DNA, 80 bp, synthetic construct; identical to SEQ ID NO: 14862
  source 1..80: mol_type = other DNA

SEQ ID NO: 199593 - DNA, 80 bp, synthetic construct; identical to SEQ ID NO: 14863
  source 1..80: mol_type = other DNA

SEQ ID NO: 199594 - DNA, 80 bp, synthetic construct; identical to SEQ ID NO: 14864
  source 1..80: mol_type = other DNA

SEQ ID NO: 199595 - DNA, 80 bp, synthetic construct; identical to SEQ ID NO: 14865
  source 1..80: mol_type = other DNA

SEQ ID NO: 199596 - DNA, 80 bp, synthetic construct; identical to SEQ ID NO: 14866
  source 1..80: mol_type = other DNA

SEQ ID NO: 199597 - DNA, 80 bp, synthetic construct; identical to SEQ ID NO: 14867
  source 1..80: mol_type = other DNA

SEQ ID NO: 199598 - DNA, 80 bp, synthetic construct; identical to SEQ ID NO: 14868
  source 1..80: mol_type = other DNA

SEQ ID NO: 199599 - DNA, 80 bp, synthetic construct; identical to SEQ ID NO: 14869
  source 1..80: mol_type = other DNA

SEQ ID NO: 199600 - DNA, 80 bp, synthetic construct; identical to SEQ ID NO: 14870
  source 1..80: mol_type = other DNA

SEQ ID NO: 199601 - DNA, 80 bp, synthetic construct; identical to SEQ ID NO: 14871
  source 1..80: mol_type = other DNA

SEQ ID NO: 199602 - DNA, 80 bp, synthetic construct; identical to SEQ ID NO: 14872
  source 1..80: mol_type = other DNA

SEQ ID NO: 199603 - DNA, 80 bp, synthetic construct; identical to SEQ ID NO: 14873
  source 1..80: mol_type = other DNA

SEQ ID NO: 199604 - DNA, 80 bp, synthetic construct; identical to SEQ ID NO: 14874
  source 1..80: mol_type = other DNA

SEQ ID NO: 199605 - DNA, 80 bp, synthetic construct; identical to SEQ ID NO: 14875
  source 1..80: mol_type = other DNA

SEQ ID NO: 199606 - DNA, 80 bp, synthetic construct; identical to SEQ ID NO: 14876
  source 1..80: mol_type = other DNA

SEQ ID NO: 199607 - DNA, 80 bp, synthetic construct; identical to SEQ ID NO: 14877
  source 1..80: mol_type = other DNA

SEQ ID NO: 199608 - DNA, 80 bp, synthetic construct; identical to SEQ ID NO: 14878
  source 1..80: mol_type = other DNA

SEQ ID NO: 199609 - DNA, 80 bp, synthetic construct; identical to SEQ ID NO: 14879
  source 1..80: mol_type = other DNA

SEQ ID NO: 199610 - DNA, 80 bp, synthetic construct; identical to SEQ ID NO: 14880
  source 1..80: mol_type = other DNA

SEQ ID NO: 199611 - DNA, 80 bp, synthetic construct; identical to SEQ ID NO: 14881
  source 1..80: mol_type = other DNA

SEQ ID NO: 199612 - DNA, 80 bp, synthetic construct; identical to SEQ ID NO: 14882
  source 1..80: mol_type = other DNA

SEQ ID NO: 199613 - DNA, 80 bp, synthetic construct; identical to SEQ ID NO: 14883
  source 1..80: mol_type = other DNA

SEQ ID NO: 199614 - DNA, 80 bp, synthetic construct; identical to SEQ ID NO: 14884
  source 1..80: mol_type = other DNA

SEQ ID NO: 199615 - DNA, 80 bp, synthetic construct; identical to SEQ ID NO: 14885
  source 1..80: mol_type = other DNA

SEQ ID NO: 199616 - DNA, 80 bp, synthetic construct; identical to SEQ ID NO: 14886
  source 1..80: mol_type = other DNA

SEQ ID NO: 199617 - DNA, 80 bp, synthetic construct; identical to SEQ ID NO: 14887
  source 1..80: mol_type = other DNA

SEQ ID NO: 199618 - DNA, 80 bp, synthetic construct; identical to SEQ ID NO: 14888
  source 1..80: mol_type = other DNA

SEQ ID NO: 199619 - DNA, 80 bp, synthetic construct; identical to SEQ ID NO: 14889
  source 1..80: mol_type = other DNA

SEQ ID NO: 199620 - DNA, 80 bp, synthetic construct; identical to SEQ ID NO: 14890
  source 1..80: mol_type = other DNA

SEQ ID NO: 199621 - DNA, 80 bp, synthetic construct; identical to SEQ ID NO: 14891
  source 1..80: mol_type = other DNA

SEQ ID NO: 199622 - DNA, 80 bp, synthetic construct; identical to SEQ ID NO: 14892
  source 1..80: mol_type = other DNA

SEQ ID NO: 199623 - DNA, 80 bp, synthetic construct; identical to SEQ ID NO: 14893
  source 1..80: mol_type = other DNA

SEQ ID NO: 199624 - DNA, 80 bp, synthetic construct; identical to SEQ ID NO: 14894
  source 1..80: mol_type = other DNA

SEQ ID NO: 199625 - DNA, 80 bp, synthetic construct; identical to SEQ ID NO: 14895
  source 1..80: mol_type = other DNA

SEQ ID NO: 199626 - DNA, 80 bp, synthetic construct; identical to SEQ ID NO: 14896
  source 1..80: mol_type = other DNA

SEQ ID NO: 199627 - DNA, 80 bp, synthetic construct; identical to SEQ ID NO: 14897
  source 1..80: mol_type = other DNA

SEQ ID NO: 199628 - DNA, 80 bp, synthetic construct; identical to SEQ ID NO: 14898
  source 1..80: mol_type = other DNA

SEQ ID NO: 199629 - DNA, 80 bp, synthetic construct; identical to SEQ ID NO: 14899
  source 1..80: mol_type = other DNA

SEQ ID NO: 199630 - DNA, 80 bp, synthetic construct; identical to SEQ ID NO: 14900
  source 1..80: mol_type = other DNA

SEQ ID NO: 199631 - DNA, 80 bp, synthetic construct; identical to SEQ ID NO: 14901
  source 1..80: mol_type = other DNA

SEQ ID NO: 199632 - DNA, 80 bp, synthetic construct; identical to SEQ ID NO: 14902
  source 1..80: mol_type = other DNA

SEQ ID NO: 199633 - DNA, 80 bp, synthetic construct; identical to SEQ ID NO: 14903
  source 1..80: mol_type = other DNA

SEQ ID NO: 199634 - DNA, 80 bp, synthetic construct; identical to SEQ ID NO: 14904
  source 1..80: mol_type = other DNA

SEQ ID NO: 199635 - DNA, 80 bp, synthetic construct; identical to SEQ ID NO: 14905
  source 1..80: mol_type = other DNA

SEQ ID NO: 199636 - DNA, 80 bp, synthetic construct; identical to SEQ ID NO: 14906
  source 1..80: mol_type = other DNA

SEQ ID NO: 199637 - DNA, 80 bp, synthetic construct; identical to SEQ ID NO: 14907
  source 1..80: mol_type = other DNA

SEQ ID NO: 199638 - DNA, 80 bp, synthetic construct; identical to SEQ ID NO: 14908
  source 1..80: mol_type = other DNA

SEQ ID NO: 199639 - DNA, 80 bp, synthetic construct; identical to SEQ ID NO: 14909
  source 1..80: mol_type = other DNA

SEQ ID NO: 199640 - DNA, 80 bp, synthetic construct; identical to SEQ ID NO: 14910
  source 1..80: mol_type = other DNA

SEQ ID NO: 199641 - DNA, 80 bp, synthetic construct; identical to SEQ ID NO: 14911
  source 1..80: mol_type = other DNA

SEQ ID NO: 199642 - DNA, 80 bp, synthetic construct; identical to SEQ ID NO: 14912
  source 1..80: mol_type = other DNA

SEQ ID NO: 199643 - DNA, 80 bp, synthetic construct; identical to SEQ ID NO: 14913
  source 1..80: mol_type = other DNA

SEQ ID NO: 199644 - DNA, 80 bp, synthetic construct; identical to SEQ ID NO: 14914
  source 1..80: mol_type = other DNA

SEQ ID NO: 199645 - DNA, 80 bp, synthetic construct; identical to SEQ ID NO: 14915
  source 1..80: mol_type = other DNA

SEQ ID NO: 199646 - DNA, 80 bp, synthetic construct; identical to SEQ ID NO: 14916
  source 1..80: mol_type = other DNA

SEQ ID NO: 199647 - DNA, 80 bp, synthetic construct; identical to SEQ ID NO: 14917
  source 1..80: mol_type = other DNA

SEQ ID NO: 199648 - DNA, 80 bp, synthetic construct; identical to SEQ ID NO: 14918
  source 1..80: mol_type = other DNA

SEQ ID NO: 199649 - DNA, 80 bp, synthetic construct; identical to SEQ ID NO: 14919
  source 1..80: mol_type = other DNA

SEQ ID NO: 199650 - DNA, 80 bp, synthetic construct; identical to SEQ ID NO: 14920
  source 1..80: mol_type = other DNA

SEQ ID NO: 199651 - DNA, 80 bp, synthetic construct; identical to SEQ ID NO: 14921
  source 1..80: mol_type = other DNA

SEQ ID NO: 199652 - DNA, 80 bp, synthetic construct; identical to SEQ ID NO: 14922
  source 1..80: mol_type = other DNA

SEQ ID NO: 199653 - DNA, 80 bp, synthetic construct; identical to SEQ ID NO: 14923
  source 1..80: mol_type = other DNA

SEQ ID NO: 199654 - DNA, 80 bp, synthetic construct; identical to SEQ ID NO: 14924
  source 1..80: mol_type = other DNA

SEQ ID NO: 199655 - DNA, 80 bp, synthetic construct; identical to SEQ ID NO: 14925
  source 1..80: mol_type = other DNA

SEQ ID NO: 199656 - DNA, 80 bp, synthetic construct; identical to SEQ ID NO: 14926
  source 1..80: mol_type = other DNA

SEQ ID NO: 199657 - DNA, 80 bp, synthetic construct; identical to SEQ ID NO: 14927
  source 1..80: mol_type = other DNA

SEQ ID NO: 199658 - DNA, 80 bp, synthetic construct; identical to SEQ ID NO: 14928
  source 1..80: mol_type = other DNA

SEQ ID NO: 199659 - DNA, 80 bp, synthetic construct; identical to SEQ ID NO: 14929
  source 1..80: mol_type = other DNA

SEQ ID NO: 199660 - DNA, 80 bp, synthetic construct; identical to SEQ ID NO: 14930
  source 1..80: mol_type = other DNA

SEQ ID NO: 199661 - DNA, 80 bp, synthetic construct; identical to SEQ ID NO: 14931
  source 1..80: mol_type = other DNA

SEQ ID NO: 199662 - DNA, 80 bp, synthetic construct; identical to SEQ ID NO: 14932
  source 1..80: mol_type = other DNA

SEQ ID NO: 199663 - DNA, 80 bp, synthetic construct; identical to SEQ ID NO: 14933
  source 1..80: mol_type = other DNA

SEQ ID NO: 199664 - DNA, 80 bp, synthetic construct; identical to SEQ ID NO: 14934
  source 1..80: mol_type = other DNA

SEQ ID NO: 199665 - DNA, 80 bp, synthetic construct; identical to SEQ ID NO: 14935
  source 1..80: mol_type = other DNA

SEQ ID NO: 199666 - DNA, 80 bp, synthetic construct; identical to SEQ ID NO: 14936
  source 1..80: mol_type = other DNA

SEQ ID NO: 199667 - DNA, 80 bp, synthetic construct; identical to SEQ ID NO: 14937
  source 1..80: mol_type = other DNA

SEQ ID NO: 199668 - DNA, 80 bp, synthetic construct; identical to SEQ ID NO: 14938
  source 1..80: mol_type = other DNA

SEQ ID NO: 199669 - DNA, 80 bp, synthetic construct; identical to SEQ ID NO: 14939
  source 1..80: mol_type = other DNA

SEQ ID NO: 199670 - DNA, 80 bp, synthetic construct; identical to SEQ ID NO: 14940
  source 1..80: mol_type = other DNA

SEQ ID NO: 199671 - DNA, 80 bp, synthetic construct; identical to SEQ ID NO: 14941
  source 1..80: mol_type = other DNA

SEQ ID NO: 199672 - DNA, 80 bp, synthetic construct; identical to SEQ ID NO: 14942
  source 1..80: mol_type = other DNA

SEQ ID NO: 199673 - DNA, 80 bp, synthetic construct; identical to SEQ ID NO: 14943
  source 1..80: mol_type = other DNA

SEQ ID NO: 199674 - DNA, 80 bp, synthetic construct; identical to SEQ ID NO: 14944
  source 1..80: mol_type = other DNA

SEQ ID NO: 199675 - DNA, 80 bp, synthetic construct; identical to SEQ ID NO: 14945
  source 1..80: mol_type = other DNA

SEQ ID NO: 199676 - DNA, 80 bp, synthetic construct; identical to SEQ ID NO: 14946
  source 1..80: mol_type = other DNA

SEQ ID NO: 199677 - DNA, 80 bp, synthetic construct; identical to SEQ ID NO: 14947
  source 1..80: mol_type = other DNA

SEQ ID NO: 199678 - DNA, 80 bp, synthetic construct; identical to SEQ ID NO: 14948
  source 1..80: mol_type = other DNA

SEQ ID NO: 199679 - DNA, 80 bp, synthetic construct; identical to SEQ ID NO: 14949
  source 1..80: mol_type = other DNA

SEQ ID NO: 199680 - DNA, 80 bp, synthetic construct; identical to SEQ ID NO: 14950
  source 1..80: mol_type = other DNA

SEQ ID NO: 199681 - DNA, 80 bp, synthetic construct; identical to SEQ ID NO: 14951
  source 1..80: mol_type = other DNA

SEQ ID NO: 199682 - DNA, 80 bp, synthetic construct; identical to SEQ ID NO: 14952
  source 1..80: mol_type = other DNA

SEQ ID NO: 199683 - DNA, 80 bp, synthetic construct; identical to SEQ ID NO: 14953
  source 1..80: mol_type = other DNA

SEQ ID NO: 199684 - DNA, 80 bp, synthetic construct; identical to SEQ ID NO: 14954
  source 1..80: mol_type = other DNA

SEQ ID NO: 199685 - DNA, 80 bp, synthetic construct; identical to SEQ ID NO: 14955
  source 1..80: mol_type = other DNA

SEQ ID NO: 199686 - DNA, 80 bp, synthetic construct; identical to SEQ ID NO: 14956
  source 1..80: mol_type = other DNA

SEQ ID NO: 199687 - DNA, 80 bp, synthetic construct; identical to SEQ ID NO: 14957
  source 1..80: mol_type = other DNA

SEQ ID NO: 199688 - DNA, 80 bp, synthetic construct; identical to SEQ ID NO: 14958
  source 1..80: mol_type = other DNA

SEQ ID NO: 199689 - DNA, 80 bp, synthetic construct; identical to SEQ ID NO: 14959
  source 1..80: mol_type = other DNA

SEQ ID NO: 199690 - DNA, 80 bp, synthetic construct; identical to SEQ ID NO: 14960
  source 1..80: mol_type = other DNA

SEQ ID NO: 199691 - DNA, 80 bp, synthetic construct; identical to SEQ ID NO: 14961
  source 1..80: mol_type = other DNA

SEQ ID NO: 199692 - DNA, 80 bp, synthetic construct; identical to SEQ ID NO: 14962
  source 1..80: mol_type = other DNA

SEQ ID NO: 199693 - DNA, 80 bp, synthetic construct; identical to SEQ ID NO: 14963
  source 1..80: mol_type = other DNA

SEQ ID NO: 199694 - DNA, 80 bp, synthetic construct; identical to SEQ ID NO: 14964
  source 1..80: mol_type = other DNA

SEQ ID NO: 199695 - DNA, 80 bp, synthetic construct; identical to SEQ ID NO: 14965
  source 1..80: mol_type = other DNA

SEQ ID NO: 199696 - DNA, 80 bp, synthetic construct; identical to SEQ ID NO: 14966
  source 1..80: mol_type = other DNA

SEQ ID NO: 199697 - DNA, 80 bp, synthetic construct; identical to SEQ ID NO: 14967
  source 1..80: mol_type = other DNA

SEQ ID NO: 199698 - DNA, 80 bp, synthetic construct; identical to SEQ ID NO: 14968
  source 1..80: mol_type = other DNA

SEQ ID NO: 199699 - DNA, 80 bp, synthetic construct; identical to SEQ ID NO: 14969
  source 1..80: mol_type = other DNA

SEQ ID NO: 199700 - DNA, 80 bp, synthetic construct; identical to SEQ ID NO: 14970
  source 1..80: mol_type = other DNA

SEQ ID NO: 199701 - DNA, 80 bp, synthetic construct; identical to SEQ ID NO: 14971
  source 1..80: mol_type = other DNA

SEQ ID NO: 199702 - DNA, 80 bp, synthetic construct; identical to SEQ ID NO: 14972
  source 1..80: mol_type = other DNA

SEQ ID NO: 199703 - DNA, 80 bp, synthetic construct; identical to SEQ ID NO: 14973
  source 1..80: mol_type = other DNA

SEQ ID NO: 199704 - DNA, 80 bp, synthetic construct; identical to SEQ ID NO: 14974
  source 1..80: mol_type = other DNA

SEQ ID NO: 199705 - DNA, 80 bp, synthetic construct; identical to SEQ ID NO: 14975
  source 1..80: mol_type = other DNA

SEQ ID NO: 199706 - DNA, 80 bp, synthetic construct; identical to SEQ ID NO: 14976
  source 1..80: mol_type = other DNA

SEQ ID NO: 199707 - DNA, 80 bp, synthetic construct; identical to SEQ ID NO: 14977
  source 1..80: mol_type = other DNA

SEQ ID NO: 199708 - DNA, 80 bp, synthetic construct; identical to SEQ ID NO: 14978
  source 1..80: mol_type = other DNA

SEQ ID NO: 199709 - DNA, 80 bp, synthetic construct; identical to SEQ ID NO: 14979
  source 1..80: mol_type = other DNA

SEQ ID NO: 199710 - DNA, 80 bp, synthetic construct; identical to SEQ ID NO: 14980
  source 1..80: mol_type = other DNA

SEQ ID NO: 199711 - DNA, 80 bp, synthetic construct; identical to SEQ ID NO: 14981
  source 1..80: mol_type = other DNA

SEQ ID NO: 199712 - DNA, 80 bp, synthetic construct; identical to SEQ ID NO: 14982
  source 1..80: mol_type = other DNA

SEQ ID NO: 199713 - DNA, 80 bp, synthetic construct; identical to SEQ ID NO: 14983
  source 1..80: mol_type = other DNA

SEQ ID NO: 199714 - DNA, 80 bp, synthetic construct; identical to SEQ ID NO: 14984
  source 1..80: mol_type = other DNA

SEQ ID NO: 199715 - DNA, 80 bp, synthetic construct; identical to SEQ ID NO: 14985
  source 1..80: mol_type = other DNA

SEQ ID NO: 199716 - DNA, 80 bp, synthetic construct; identical to SEQ ID NO: 14986
  source 1..80: mol_type = other DNA

SEQ ID NO: 199717 - DNA, 80 bp, synthetic construct; identical to SEQ ID NO: 14987
  source 1..80: mol_type = other DNA

SEQ ID NO: 199718 - DNA, 80 bp, synthetic construct; identical to SEQ ID NO: 14988
  source 1..80: mol_type = other DNA

SEQ ID NO: 199719 - DNA, 80 bp, synthetic construct; identical to SEQ ID NO: 14989
  source 1..80: mol_type = other DNA

SEQ ID NO: 199720 - DNA, 80 bp, synthetic construct; identical to SEQ ID NO: 14990
  source 1..80: mol_type = other DNA

SEQ ID NO: 199721 - DNA, 80 bp, synthetic construct; identical to SEQ ID NO: 14991
  source 1..80: mol_type = other DNA

SEQ ID NO: 199722 - DNA, 80 bp, synthetic construct; identical to SEQ ID NO: 14992
  source 1..80: mol_type = other DNA

SEQ ID NO: 199723 - DNA, 80 bp, synthetic construct; identical to SEQ ID NO: 14993
  source 1..80: mol_type = other DNA

SEQ ID NO: 199724 - DNA, 80 bp, synthetic construct; identical to SEQ ID NO: 14994
  source 1..80: mol_type = other DNA

SEQ ID NO: 199725 - DNA, 80 bp, synthetic construct; identical to SEQ ID NO: 14995
  source 1..80: mol_type = other DNA

SEQ ID NO: 199726 - DNA, 80 bp, synthetic construct; identical to SEQ ID NO: 14996
  source 1..80: mol_type = other DNA

SEQ ID NO: 199727 - DNA, 80 bp, synthetic construct; identical to SEQ ID NO: 14997
  source 1..80: mol_type = other DNA

SEQ ID NO: 199728 - DNA, 80 bp, synthetic construct; identical to SEQ ID NO: 14998
  source 1..80: mol_type = other DNA

SEQ ID NO: 199729 - DNA, 80 bp, synthetic construct; identical to SEQ ID NO: 14999
  source 1..80: mol_type = other DNA

SEQ ID NO: 199730 - DNA, 80 bp, synthetic construct; identical to SEQ ID NO: 15000
  source 1..80: mol_type = other DNA

SEQ ID NO: 199731 - DNA, 80 bp, synthetic construct; identical to SEQ ID NO: 15001
  source 1..80: mol_type = other DNA

SEQ ID NO: 199732 - DNA, 80 bp, synthetic construct; identical to SEQ ID NO: 15002
  source 1..80: mol_type = other DNA

SEQ ID NO: 199733 - DNA, 80 bp, synthetic construct; identical to SEQ ID NO: 15003
  source 1..80: mol_type = other DNA

SEQ ID NO: 199734 - DNA, 80 bp, synthetic construct; identical to SEQ ID NO: 15004
  source 1..80: mol_type = other DNA

SEQ ID NO: 199735 - DNA, 80 bp, synthetic construct; identical to SEQ ID NO: 15005
  source 1..80: mol_type = other DNA

SEQ ID NO: 199736 - DNA, 80 bp, synthetic construct; identical to SEQ ID NO: 15006
  source 1..80: mol_type = other DNA

SEQ ID NO: 199737 - DNA, 80 bp, synthetic construct; identical to SEQ ID NO: 15007
  source 1..80: mol_type = other DNA

SEQ ID NO: 199738 - DNA, 80 bp, synthetic construct; identical to SEQ ID NO: 15008
  source 1..80: mol_type = other DNA

SEQ ID NO: 199739 - DNA, 80 bp, synthetic construct; identical to SEQ ID NO: 15009
  source 1..80: mol_type = other DNA

SEQ ID NO: 199740 - DNA, 80 bp, synthetic construct; identical to SEQ ID NO: 15010
  source 1..80: mol_type = other DNA

SEQ ID NO: 199741 - DNA, 80 bp, synthetic construct; identical to SEQ ID NO: 15011
  source 1..80: mol_type = other DNA

SEQ ID NO: 199742 - DNA, 80 bp, synthetic construct; identical to SEQ ID NO: 15012
  source 1..80: mol_type = other DNA

SEQ ID NO: 199743 - DNA, 80 bp, synthetic construct; identical to SEQ ID NO: 15013
  source 1..80: mol_type = other DNA

SEQ ID NO: 199744 - DNA, 80 bp, synthetic construct; identical to SEQ ID NO: 15014
  source 1..80: mol_type = other DNA

SEQ ID NO: 199745 - DNA, 80 bp, synthetic construct; identical to SEQ ID NO: 15015
  source 1..80: mol_type = other DNA

SEQ ID NO: 199746 - DNA, 80 bp, synthetic construct; identical to SEQ ID NO: 15016
  source 1..80: mol_type = other DNA

SEQ ID NO: 199747 - DNA, 80 bp, synthetic construct; identical to SEQ ID NO: 15017
  source 1..80: mol_type = other DNA

SEQ ID NO: 199748 - DNA, 80 bp, synthetic construct; identical to SEQ ID NO: 15018
  source 1..80: mol_type = other DNA

SEQ ID NO: 199749 - DNA, 80 bp, synthetic construct; identical to SEQ ID NO: 15019
  source 1..80: mol_type = other DNA

SEQ ID NO: 199750 - DNA, 80 bp, synthetic construct; identical to SEQ ID NO: 15020
  source 1..80: mol_type = other DNA

SEQ ID NO: 199751 - DNA, 80 bp, synthetic construct; identical to SEQ ID NO: 15021
  source 1..80: mol_type = other DNA

SEQ ID NO: 199752 - DNA, 80 bp, synthetic construct; identical to SEQ ID NO: 15022
  source 1..80: mol_type = other DNA

SEQ ID NO: 199753 - DNA, 80 bp, synthetic construct; identical to SEQ ID NO: 15023
  source 1..80: mol_type = other DNA

SEQ ID NO: 199754 - DNA, 80 bp, synthetic construct; identical to SEQ ID NO: 15024
  source 1..80: mol_type = other DNA

SEQ ID NO: 199755 - DNA, 80 bp, synthetic construct; identical to SEQ ID NO: 15025
  source 1..80: mol_type = other DNA

SEQ ID NO: 199756 - DNA, 80 bp, synthetic construct; identical to SEQ ID NO: 15026
  source 1..80: mol_type = other DNA

SEQ ID NO: 199757 - DNA, 80 bp, synthetic construct; identical to SEQ ID NO: 15027
  source 1..80: mol_type = other DNA

SEQ ID NO: 199758 - DNA, 80 bp, synthetic construct; identical to SEQ ID NO: 15028
  source 1..80: mol_type = other DNA

SEQ ID NO: 199759 - DNA, 80 bp, synthetic construct; identical to SEQ ID NO: 15029
  source 1..80: mol_type = other DNA

SEQ ID NO: 199760 - DNA, 80 bp, synthetic construct; identical to SEQ ID NO: 15030
  source 1..80: mol_type = other DNA

SEQ ID NO: 199761 - DNA, 80 bp, synthetic construct; identical to SEQ ID NO: 15031
  source 1..80: mol_type = other DNA

SEQ ID NO: 199762 - DNA, 80 bp, synthetic construct; identical to SEQ ID NO: 15032
  source 1..80: mol_type = other DNA

SEQ ID NO: 199763 - DNA, 80 bp, synthetic construct; identical to SEQ ID NO: 15033
  source 1..80: mol_type = other DNA

SEQ ID NO: 199764 - DNA, 80 bp, synthetic construct; identical to SEQ ID NO: 15034
  source 1..80: mol_type = other DNA

SEQ ID NO: 199765 - DNA, 80 bp, synthetic construct; identical to SEQ ID NO: 15035
  source 1..80: mol_type = other DNA

SEQ ID NO: 199766 - DNA, 80 bp, synthetic construct; identical to SEQ ID NO: 15036
  source 1..80: mol_type = other DNA

SEQ ID NO: 199767 - DNA, 80 bp, synthetic construct; identical to SEQ ID NO: 15037
  source 1..80: mol_type = other DNA

SEQ ID NO: 199768 - DNA, 80 bp, synthetic construct; identical to SEQ ID NO: 15038
  source 1..80: mol_type = other DNA

SEQ ID NO: 199769 - DNA, 80 bp, synthetic construct; identical to SEQ ID NO: 15039
  source 1..80: mol_type = other DNA

SEQ ID NO: 199770 - DNA, 80 bp, synthetic construct; identical to SEQ ID NO: 15040
  source 1..80: mol_type = other DNA

SEQ ID NO: 199771 - DNA, 80 bp, synthetic construct; identical to SEQ ID NO: 15041
  source 1..80: mol_type = other DNA

SEQ ID NO: 199772 - DNA, 80 bp, synthetic construct; identical to SEQ ID NO: 15042
  source 1..80: mol_type = other DNA

SEQ ID NO: 199773 - DNA, 80 bp, synthetic construct; identical to SEQ ID NO: 15043
  source 1..80: mol_type = other DNA

SEQ ID NO: 199774 - DNA, 80 bp, synthetic construct; identical to SEQ ID NO: 15044
  source 1..80: mol_type = other DNA

SEQ ID NO: 199775 - DNA, 80 bp, synthetic construct; identical to SEQ ID NO: 15045
  source 1..80: mol_type = other DNA

SEQ ID NO: 199776 - DNA, 80 bp, synthetic construct; identical to SEQ ID NO: 15046
  source 1..80: mol_type = other DNA

SEQ ID NO: 199777 - DNA, 80 bp, synthetic construct; identical to SEQ ID NO: 15047
  source 1..80: mol_type = other DNA

SEQ ID NO: 199778 - DNA, 80 bp, synthetic construct; identical to SEQ ID NO: 15048
  source 1..80: mol_type = other DNA

SEQ ID NO: 199779 - DNA, 80 bp, synthetic construct; identical to SEQ ID NO: 15049
  source 1..80: mol_type = other DNA

SEQ ID NO: 199780 - DNA, 80 bp, synthetic construct; identical to SEQ ID NO: 15050
  source 1..80: mol_type = other DNA

SEQ ID NO: 199781 - DNA, 80 bp, synthetic construct; identical to SEQ ID NO: 15051
  source 1..80: mol_type = other DNA

SEQ ID NO: 199782 - DNA, 80 bp, synthetic construct; identical to SEQ ID NO: 15052
  source 1..80: mol_type = other DNA

SEQ ID NO: 199783 - DNA, 80 bp, synthetic construct; identical to SEQ ID NO: 15053
  source 1..80: mol_type = other DNA

SEQ ID NO: 199784 - DNA, 80 bp, synthetic construct; identical to SEQ ID NO: 15054
  source 1..80: mol_type = other DNA

SEQ ID NO: 199785 - DNA, 80 bp, synthetic construct; identical to SEQ ID NO: 15055
  source 1..80: mol_type = other DNA

SEQ ID NO: 199786 - DNA, 80 bp, synthetic construct; identical to SEQ ID NO: 15056
  source 1..80: mol_type = other DNA

SEQ ID NO: 199787 - DNA, 80 bp, synthetic construct; identical to SEQ ID NO: 15057
  source 1..80: mol_type = other DNA

SEQ ID NO: 199788 - DNA, 80 bp, synthetic construct; identical to SEQ ID NO: 15058
  source 1..80: mol_type = other DNA

SEQ ID NO: 199789 - DNA, 80 bp, synthetic construct; identical to SEQ ID NO: 15059
  source 1..80: mol_type = other DNA

SEQ ID NO: 199790 - DNA, 80 bp, synthetic construct; identical to SEQ ID NO: 15060
  source 1..80: mol_type = other DNA

SEQ ID NO: 199791 - DNA, 80 bp, synthetic construct; identical to SEQ ID NO: 15061
  source 1..80: mol_type = other DNA

SEQ ID NO: 199792 - DNA, 80 bp, synthetic construct; identical to SEQ ID NO: 15062
  source 1..80: mol_type = other DNA

SEQ ID NO: 199793 - DNA, 80 bp, synthetic construct; identical to SEQ ID NO: 15063
  source 1..80: mol_type = other DNA

SEQ ID NO: 199794 - DNA, 80 bp, synthetic construct; identical to SEQ ID NO: 15064
  source 1..80: mol_type = other DNA

SEQ ID NO: 199795 - DNA, 80 bp, synthetic construct; identical to SEQ ID NO: 15065
  source 1..80: mol_type = other DNA

SEQ ID NO: 199796 - DNA, 80 bp, synthetic construct; identical to SEQ ID NO: 15066
  source 1..80: mol_type = other DNA

SEQ ID NO: 199797 - DNA, 80 bp, synthetic construct; identical to SEQ ID NO: 15067
  source 1..80: mol_type = other DNA

SEQ ID NO: 199798 - DNA, 80 bp, synthetic construct; identical to SEQ ID NO: 15068
  source 1..80: mol_type = other DNA

SEQ ID NO: 199799 - DNA, 80 bp, synthetic construct; identical to SEQ ID NO: 15069
  source 1..80: mol_type = other DNA

SEQ ID NO: 199800 - DNA, 80 bp, synthetic construct; identical to SEQ ID NO: 15070
  source 1..80: mol_type = other DNA

SEQ ID NO: 199801 - DNA, 80 bp, synthetic construct; identical to SEQ ID NO: 15071
  source 1..80: mol_type = other DNA

SEQ ID NO: 199802 - DNA, 80 bp, synthetic construct; identical to SEQ ID NO: 15072
  source 1..80: mol_type = other DNA

SEQ ID NO: 199803 - DNA, 80 bp, synthetic construct; identical to SEQ ID NO: 15073
  source 1..80: mol_type = other DNA

SEQ ID NO: 199804 - DNA, 80 bp, synthetic construct; identical to SEQ ID NO: 15074
  source 1..80: mol_type = other DNA

SEQ ID NO: 199805 - DNA, 80 bp, synthetic construct; identical to SEQ ID NO: 15075
  source 1..80: mol_type = other DNA

SEQ ID NO: 199806 - DNA, 80 bp, synthetic construct; identical to SEQ ID NO: 15076
  source 1..80: mol_type = other DNA

SEQ ID NO: 199807 - DNA, 80 bp, synthetic construct; identical to SEQ ID NO: 15077
  source 1..80: mol_type = other DNA

SEQ ID NO: 199808 - DNA, 80 bp, synthetic construct; identical to SEQ ID NO: 15078
  source 1..80: mol_type = other DNA

SEQ ID NO: 199809 - DNA, 80 bp, synthetic construct; identical to SEQ ID NO: 15079
  source 1..80: mol_type = other DNA

SEQ ID NO: 199810 - DNA, 80 bp, synthetic construct; identical to SEQ ID NO: 15080
  source 1..80: mol_type = other DNA

SEQ ID NO: 199811 - DNA, 80 bp, synthetic construct; identical to SEQ ID NO: 15081
  source 1..80: mol_type = other DNA

SEQ ID NO: 199812 - DNA, 80 bp, synthetic construct; identical to SEQ ID NO: 15082
  source 1..80: mol_type = other DNA

SEQ ID NO: 199813 - DNA, 80 bp, synthetic construct; identical to SEQ ID NO: 15083
  source 1..80: mol_type = other DNA

SEQ ID NO: 199814 - DNA, 80 bp, synthetic construct; identical to SEQ ID NO: 15084
  source 1..80: mol_type = other DNA

SEQ ID NO: 199815 - DNA, 80 bp, synthetic construct; identical to SEQ ID NO: 15085
  source 1..80: mol_type = other DNA

SEQ ID NO: 199816 - DNA, 80 bp, synthetic construct; identical to SEQ ID NO: 15086
  source 1..80: mol_type = other DNA

SEQ ID NO: 199817 - DNA, 80 bp, synthetic construct; identical to SEQ ID NO: 15087
  source 1..80: mol_type = other DNA

SEQ ID NO: 199818 - DNA, 80 bp, synthetic construct; identical to SEQ ID NO: 15088
  source 1..80: mol_type = other DNA

SEQ ID NO: 199819 - DNA, 80 bp, synthetic construct; identical to SEQ ID NO: 15089
  source 1..80: mol_type = other DNA

SEQ ID NO: 199820 - DNA, 80 bp, synthetic construct; identical to SEQ ID NO: 15090
  source 1..80: mol_type = other DNA

SEQ ID NO: 199821 - DNA, 80 bp, synthetic construct; identical to SEQ ID NO: 15091
  source 1..80: mol_type = other DNA

SEQ ID NO: 199822 - DNA, 80 bp, synthetic construct; identical to SEQ ID NO: 15092
  source 1..80: mol_type = other DNA

SEQ ID NO: 199823 - DNA, 80 bp, synthetic construct; identical to SEQ ID NO: 15093
  source 1..80: mol_type = other DNA

SEQ ID NO: 199824 - DNA, 80 bp, synthetic construct; identical to SEQ ID NO: 15094
  source 1..80: mol_type = other DNA

SEQ ID NO: 199825 - DNA, 80 bp, synthetic construct; identical to SEQ ID NO: 15095
  source 1..80: mol_type = other DNA

SEQ ID NO: 199826 - DNA, 80 bp, synthetic construct; identical to SEQ ID NO: 15096
  source 1..80: mol_type = other DNA

SEQ ID NO: 199827 - DNA, 80 bp, synthetic construct; identical to SEQ ID NO: 15097
  source 1..80: mol_type = other DNA

SEQ ID NO: 199828 - DNA, 80 bp, synthetic construct; identical to SEQ ID NO: 15098
  source 1..80: mol_type = other DNA

SEQ ID NO: 199829 - DNA, 80 bp, synthetic construct; identical to SEQ ID NO: 15099
  source 1..80: mol_type = other DNA

SEQ ID NO: 199830 - DNA, 80 bp, synthetic construct; identical to SEQ ID NO: 15100
  source 1..80: mol_type = other DNA

SEQ ID NO: 199831 - DNA, 80 bp, synthetic construct; identical to SEQ ID NO: 15101
  source 1..80: mol_type = other DNA

SEQ ID NO: 199832 - DNA, 80 bp, synthetic construct; identical to SEQ ID NO: 15102
  source 1..80: mol_type = other DNA

SEQ ID NO: 199833 - DNA, 80 bp, synthetic construct; identical to SEQ ID NO: 15103
  source 1..80: mol_type = other DNA

SEQ ID NO: 199834 - DNA, 80 bp, synthetic construct; identical to SEQ ID NO: 15104
  source 1..80: mol_type = other DNA

SEQ ID NO: 199835 - DNA, 80 bp, synthetic construct; identical to SEQ ID NO: 15105
  source 1..80: mol_type = other DNA

SEQ ID NO: 199836 - DNA, 80 bp, synthetic construct; identical to SEQ ID NO: 15106
  source 1..80: mol_type = other DNA

SEQ ID NO: 199837 - DNA, 80 bp, synthetic construct; identical to SEQ ID NO: 15107
  source 1..80: mol_type = other DNA

SEQ ID NO: 199838 - DNA, 80 bp, synthetic construct; identical to SEQ ID NO: 15108
  source 1..80: mol_type = other DNA

SEQ ID NO: 199839 - DNA, 80 bp, synthetic construct; identical to SEQ ID NO: 15109
  source 1..80: mol_type = other DNA

SEQ ID NO: 199840 - DNA, 80 bp, synthetic construct; identical to SEQ ID NO: 15110
  source 1..80: mol_type = other DNA

SEQ ID NO: 199841 - DNA, 80 bp, synthetic construct; identical to SEQ ID NO: 15111
  source 1..80: mol_type = other DNA

SEQ ID NO: 199842 - DNA, 80 bp, synthetic construct; identical to SEQ ID NO: 15112
  source 1..80: mol_type = other DNA

SEQ ID NO: 199843 - DNA, 80 bp, synthetic construct; identical to SEQ ID NO: 15113
  source 1..80: mol_type = other DNA

SEQ ID NO: 199844 - DNA, 80 bp, synthetic construct; identical to SEQ ID NO: 15114
  source 1..80: mol_type = other DNA

SEQ ID NO: 199845 - DNA, 80 bp, synthetic construct; identical to SEQ ID NO: 15115
  source 1..80: mol_type = other DNA

SEQ ID NO: 199846 - DNA, 80 bp, synthetic construct; identical to SEQ ID NO: 15116
  source 1..80: mol_type = other DNA

SEQ ID NO: 199847 - DNA, 80 bp, synthetic construct; identical to SEQ ID NO: 15117
  source 1..80: mol_type = other DNA

SEQ ID NO: 199848 - DNA, 80 bp, synthetic construct; identical to SEQ ID NO: 15118
  source 1..80: mol_type = other DNA

SEQ ID NO: 199849 - DNA, 80 bp, synthetic construct; identical to SEQ ID NO: 15119
  source 1..80: mol_type = other DNA

SEQ ID NO: 199850 - DNA, 80 bp, synthetic construct; identical to SEQ ID NO: 15120
  source 1..80: mol_type = other DNA

SEQ ID NO: 199851 - DNA, 80 bp, synthetic construct; identical to SEQ ID NO: 15121
  source 1..80: mol_type = other DNA

SEQ ID NO: 199852 - DNA, 80 bp, synthetic construct; identical to SEQ ID NO: 15122
  source 1..80: mol_type = other DNA

SEQ ID NO: 199853 - DNA, 80 bp, synthetic construct; identical to SEQ ID NO: 15123
  source 1..80: mol_type = other DNA

SEQ ID NO: 199854 - DNA, 80 bp, synthetic construct; identical to SEQ ID NO: 15124
  source 1..80: mol_type = other DNA

SEQ ID NO: 199855 - DNA, 80 bp, synthetic construct; identical to SEQ ID NO: 15125
  source 1..80: mol_type = other DNA

SEQ ID NO: 199856 - DNA, 80 bp, synthetic construct; identical to SEQ ID NO: 15126
  source 1..80: mol_type = other DNA

SEQ ID NO: 199857 - DNA, 80 bp, synthetic construct; identical to SEQ ID NO: 15127
  source 1..80: mol_type = other DNA

SEQ ID NO: 199858 - DNA, 80 bp, synthetic construct; identical to SEQ ID NO: 15128
  source 1..80: mol_type = other DNA

SEQ ID NO: 199859 - DNA, 80 bp, synthetic construct; identical to SEQ ID NO: 15129
  source 1..80: mol_type = other DNA

SEQ ID NO: 199860 - DNA, 80 bp, synthetic construct; identical to SEQ ID NO: 15130
  source 1..80: mol_type = other DNA

SEQ ID NO: 199861 - DNA, 80 bp, synthetic construct; identical to SEQ ID NO: 15131
  source 1..80: mol_type = other DNA

SEQ ID NO: 199862 - DNA, 80 bp, synthetic construct; identical to SEQ ID NO: 15132
  source 1..80: mol_type = other DNA

SEQ ID NO: 199863 - DNA, 80 bp, synthetic construct; identical to SEQ ID NO: 15133
  source 1..80: mol_type = other DNA

SEQ ID NO: 199864 - DNA, 80 bp, synthetic construct; identical to SEQ ID NO: 15134
  source 1..80: mol_type = other DNA

SEQ ID NO: 199865 - DNA, 80 bp, synthetic construct; identical to SEQ ID NO: 15135
  source 1..80: mol_type = other DNA

SEQ ID NO: 199866 - DNA, 80 bp, synthetic construct; identical to SEQ ID NO: 15136
  source 1..80: mol_type = other DNA

SEQ ID NO: 199867 - DNA, 80 bp, synthetic construct; identical to SEQ ID NO: 15137
  source 1..80: mol_type = other DNA

SEQ ID NO: 199868 - DNA, 80 bp, synthetic construct; identical to SEQ ID NO: 15138
  source 1..80: mol_type = other DNA

SEQ ID NO: 199869 - DNA, 80 bp, synthetic construct; identical to SEQ ID NO: 15139
  source 1..80: mol_type = other DNA

SEQ ID NO: 199870 - DNA, 80 bp, synthetic construct; identical to SEQ ID NO: 15140
  source 1..80: mol_type = other DNA

SEQ ID NO: 199871 - DNA, 80 bp, synthetic construct; identical to SEQ ID NO: 15141
  source 1..80: mol_type = other DNA

SEQ ID NO: 199872 - DNA, 80 bp, synthetic construct; identical to SEQ ID NO: 15142
  source 1..80: mol_type = other DNA

SEQ ID NO: 199873 - DNA, 80 bp, synthetic construct; identical to SEQ ID NO: 15143
  source 1..80: mol_type = other DNA

SEQ ID NO: 199874 - DNA, 80 bp, synthetic construct; identical to SEQ ID NO: 15144
  source 1..80: mol_type = other DNA

SEQ ID NO: 199875 - DNA, 80 bp, synthetic construct; identical to SEQ ID NO: 15145
  source 1..80: mol_type = other DNA

SEQ ID NO: 199876 - DNA, 80 bp, synthetic construct; identical to SEQ ID NO: 15146
  source 1..80: mol_type = other DNA

SEQ ID NO: 199877 - DNA, 80 bp, synthetic construct; identical to SEQ ID NO: 15147
  source 1..80: mol_type = other DNA

SEQ ID NO: 199878 - DNA, 80 bp, synthetic construct; identical to SEQ ID NO: 15148
  source 1..80: mol_type = other DNA

SEQ ID NO: 199879 - DNA, 80 bp, synthetic construct; identical to SEQ ID NO: 15149
  source 1..80: mol_type = other DNA

SEQ ID NO: 199880 - DNA, 80 bp, synthetic construct; identical to SEQ ID NO: 15150
  source 1..80: mol_type = other DNA

SEQ ID NO: 199881 - DNA, 80 bp, synthetic construct; identical to SEQ ID NO: 15151
  source 1..80: mol_type = other DNA

SEQ ID NO: 199882 - DNA, 80 bp, synthetic construct; identical to SEQ ID NO: 15152
  source 1..80: mol_type = other DNA

SEQ ID NO: 199883 - DNA, 80 bp, synthetic construct; identical to SEQ ID NO: 15153
  source 1..80: mol_type = other DNA

SEQ ID NO: 199884 - DNA, 80 bp, synthetic construct; identical to SEQ ID NO: 15154
  source 1..80: mol_type = other DNA

SEQ ID NO: 199885 - DNA, 80 bp, synthetic construct; identical to SEQ ID NO: 15155
  source 1..80: mol_type = other DNA

SEQ ID NO: 199886 - DNA, 80 bp, synthetic construct; identical to SEQ ID NO: 15156
  source 1..80: mol_type = other DNA

SEQ ID NO: 199887 - DNA, 80 bp, synthetic construct; identical to SEQ ID NO: 15157
  source 1..80: mol_type = other DNA

SEQ ID NO: 199888 - DNA, 80 bp, synthetic construct; identical to SEQ ID NO: 15158
  source 1..80: mol_type = other DNA

SEQ ID NO: 199889 - DNA, 80 bp, synthetic construct; identical to SEQ ID NO: 15159
  source 1..80: mol_type = other DNA

SEQ ID NO: 199890 - DNA, 80 bp, synthetic construct; identical to SEQ ID NO: 15160
  source 1..80: mol_type = other DNA

SEQ ID NO: 199891 - DNA, 80 bp, synthetic construct; identical to SEQ ID NO: 15161
  source 1..80: mol_type = other DNA

SEQ ID NO: 199892 - DNA, 80 bp, synthetic construct; identical to SEQ ID NO: 15162
  source 1..80: mol_type = other DNA

SEQ ID NO: 199893 - DNA, 80 bp, synthetic construct; identical to SEQ ID NO: 15163
  source 1..80: mol_type = other DNA

SEQ ID NO: 199894 - DNA, 80 bp, synthetic construct; identical to SEQ ID NO: 15164
  source 1..80: mol_type = other DNA

SEQ ID NO: 199895 - DNA, 80 bp, synthetic construct; identical to SEQ ID NO: 15165
  source 1..80: mol_type = other DNA

SEQ ID NO: 199896 - DNA, 80 bp, synthetic construct; identical to SEQ ID NO: 15166
  source 1..80: mol_type = other DNA

SEQ ID NO: 199897 - DNA, 80 bp, synthetic construct; identical to SEQ ID NO: 15167
  source 1..80: mol_type = other DNA

SEQ ID NO: 199898 - DNA, 80 bp, synthetic construct; identical to SEQ ID NO: 15168
  source 1..80: mol_type = other DNA

SEQ ID NO: 199899 - DNA, 80 bp, synthetic construct; identical to SEQ ID NO: 15169
  source 1..80: mol_type = other DNA

SEQ ID NO: 199900 - DNA, 80 bp, synthetic construct; identical to SEQ ID NO: 15170
  source 1..80: mol_type = other DNA

SEQ ID NO: 199901 - DNA, 80 bp, synthetic construct; identical to SEQ ID NO: 15171
  source 1..80: mol_type = other DNA

SEQ ID NO: 199902 - DNA, 80 bp, synthetic construct; identical to SEQ ID NO: 15172
  source 1..80: mol_type = other DNA

SEQ ID NO: 199903 - DNA, 80 bp, synthetic construct; identical to SEQ ID NO: 15173
  source 1..80: mol_type = other DNA

SEQ ID NO: 199904 - DNA, 80 bp, synthetic construct; identical to SEQ ID NO: 15174
  source 1..80: mol_type = other DNA

SEQ ID NO: 199905 - DNA, 80 bp, synthetic construct; identical to SEQ ID NO: 15175
  source 1..80: mol_type = other DNA

SEQ ID NO: 199906 - DNA, 80 bp, synthetic construct; identical to SEQ ID NO: 15176
  source 1..80: mol_type = other DNA

SEQ ID NO: 199907 - DNA, 80 bp, synthetic construct; identical to SEQ ID NO: 15177
  source 1..80: mol_type = other DNA

SEQ ID NO: 199908 - DNA, 80 bp, synthetic construct; identical to SEQ ID NO: 15178
  source 1..80: mol_type = other DNA

SEQ ID NO: 199909 - DNA, 80 bp, synthetic construct; identical to SEQ ID NO: 15179
  source 1..80: mol_type = other DNA

SEQ ID NO: 199910 - DNA, 80 bp, synthetic construct; identical to SEQ ID NO: 15180
  source 1..80: mol_type = other DNA

SEQ ID NO: 199911 - DNA, 80 bp, synthetic construct; identical to SEQ ID NO: 15181
  source 1..80: mol_type = other DNA

SEQ ID NO: 199912 - DNA, 80 bp, synthetic construct; identical to SEQ ID NO: 15182
  source 1..80: mol_type = other DNA

SEQ ID NO: 199913 - DNA, 80 bp, synthetic construct; identical to SEQ ID NO: 15183
  source 1..80: mol_type = other DNA

SEQ ID NO: 199914 - DNA, 80 bp, synthetic construct; identical to SEQ ID NO: 15184
  source 1..80: mol_type = other DNA

SEQ ID NO: 199915 - DNA, 80 bp, synthetic construct; identical to SEQ ID NO: 15185
  source 1..80: mol_type = other DNA

SEQ ID NO: 199916 - DNA, 80 bp, synthetic construct; identical to SEQ ID NO: 15186
  source 1..80: mol_type = other DNA

SEQ ID NO: 199917 - DNA, 80 bp, synthetic construct; identical to SEQ ID NO: 15187
  source 1..80: mol_type = other DNA

SEQ ID NO: 199918 - DNA, 80 bp, synthetic construct; identical to SEQ ID NO: 15188
  source 1..80: mol_type = other DNA

SEQ ID NO: 199919 - DNA, 80 bp, synthetic construct; identical to SEQ ID NO: 15189
  source 1..80: mol_type = other DNA

SEQ ID NO: 199920 - DNA, 80 bp, synthetic construct; identical to SEQ ID NO: 15190
  source 1..80: mol_type = other DNA

SEQ ID NO: 199921 - DNA, 80 bp, synthetic construct; identical to SEQ ID NO: 15191
  source 1..80: mol_type = other DNA

SEQ ID NO: 199922 - DNA, 80 bp, synthetic construct; identical to SEQ ID NO: 15192
  source 1..80: mol_type = other DNA

SEQ ID NO: 199923 - DNA, 80 bp, synthetic construct; identical to SEQ ID NO: 15193
  source 1..80: mol_type = other DNA

SEQ ID NO: 199924 - DNA, 80 bp, synthetic construct; identical to SEQ ID NO: 15194
  source 1..80: mol_type = other DNA

SEQ ID NO: 199925 - DNA, 80 bp, synthetic construct; identical to SEQ ID NO: 15195
  source 1..80: mol_type = other DNA

SEQ ID NO: 199926 - DNA, 80 bp, synthetic construct; identical to SEQ ID NO: 15196
  source 1..80: mol_type = other DNA

SEQ ID NO: 199927 - DNA, 80 bp, synthetic construct; identical to SEQ ID NO: 15197
  source 1..80: mol_type = other DNA

SEQ ID NO: 199928 - DNA, 80 bp, synthetic construct; identical to SEQ ID NO: 15198
  source 1..80: mol_type = other DNA

SEQ ID NO: 199929 - DNA, 80 bp, synthetic construct; identical to SEQ ID NO: 15199
  source 1..80: mol_type = other DNA

SEQ ID NO: 199930 - DNA, 80 bp, synthetic construct; identical to SEQ ID NO: 15200
  source 1..80: mol_type = other DNA

SEQ ID NO: 199931 - DNA, 80 bp, synthetic construct; identical to SEQ ID NO: 15201
  source 1..80: mol_type = other DNA

SEQ ID NO: 199932 - DNA, 80 bp, synthetic construct; identical to SEQ ID NO: 15202
  source 1..80: mol_type = other DNA

SEQ ID NO: 199933 - DNA, 80 bp, synthetic construct; identical to SEQ ID NO: 15203
  source 1..80: mol_type = other DNA

SEQ ID NO: 199934 - DNA, 80 bp, synthetic construct; identical to SEQ ID NO: 15204
  source 1..80: mol_type = other DNA

SEQ ID NO: 199935 - DNA, 80 bp, synthetic construct; identical to SEQ ID NO: 15205
  source 1..80: mol_type = other DNA

SEQ ID NO: 199936 - DNA, 80 bp, synthetic construct; identical to SEQ ID NO: 15206
  source 1..80: mol_type = other DNA

SEQ ID NO: 199937 - DNA, 80 bp, synthetic construct; identical to SEQ ID NO: 15207
  source 1..80: mol_type = other DNA

SEQ ID NO: 199938 - DNA, 80 bp, synthetic construct; identical to SEQ ID NO: 15208
  source 1..80: mol_type = other DNA

SEQ ID NO: 199939 - DNA, 80 bp, synthetic construct; identical to SEQ ID NO: 15209
  source 1..80: mol_type = other DNA

SEQ ID NO: 199940 - DNA, 80 bp, synthetic construct; identical to SEQ ID NO: 15210
  source 1..80: mol_type = other DNA

SEQ ID NO: 199941 - DNA, 80 bp, synthetic construct; identical to SEQ ID NO: 15211
  source 1..80: mol_type = other DNA

SEQ ID NO: 199942 - DNA, 80 bp, synthetic construct; identical to SEQ ID NO: 15212
  source 1..80: mol_type = other DNA

SEQ ID NO: 199943 - DNA, 80 bp, synthetic construct; identical to SEQ ID NO: 15213
  source 1..80: mol_type = other DNA

SEQ ID NO: 199944 - DNA, 80 bp, synthetic construct; identical to SEQ ID NO: 15214
  source 1..80: mol_type = other DNA

SEQ ID NO: 199945 - DNA, 80 bp, synthetic construct; identical to SEQ ID NO: 15215
  source 1..80: mol_type = other DNA

SEQ ID NO: 199946 - DNA, 80 bp, synthetic construct; identical to SEQ ID NO: 15216
  source 1..80: mol_type = other DNA

SEQ ID NO: 199947 - DNA, 80 bp, synthetic construct; identical to SEQ ID NO: 15217
  source 1..80: mol_type = other DNA

SEQ ID NO: 199948 - DNA, 80 bp, synthetic construct; identical to SEQ ID NO: 15218
  source 1..80: mol_type = other DNA

SEQ ID NO: 199949 - DNA, 80 bp, synthetic construct; identical to SEQ ID NO: 15219
  source 1..80: mol_type = other DNA

SEQ ID NO: 199950 - DNA, 80 bp, synthetic construct; identical to SEQ ID NO: 15220
  source 1..80: mol_type = other DNA

SEQ ID NO: 199951 - DNA, 80 bp, synthetic construct; identical to SEQ ID NO: 15221
  source 1..80: mol_type = other DNA

SEQ ID NO: 199952 - DNA, 80 bp, synthetic construct; identical to SEQ ID NO: 15222
  source 1..80: mol_type = other DNA

SEQ ID NO: 199953 - DNA, 80 bp, synthetic construct; identical to SEQ ID NO: 15223
  source 1..80: mol_type = other DNA

SEQ ID NO: 199954 - DNA, 80 bp, synthetic construct; identical to SEQ ID NO: 15224
  source 1..80: mol_type = other DNA

SEQ ID NO: 199955 - DNA, 80 bp, synthetic construct; identical to SEQ ID NO: 15225
  source 1..80: mol_type = other DNA

SEQ ID NO: 199956 - DNA, 80 bp, synthetic construct; identical to SEQ ID NO: 15226
  source 1..80: mol_type = other DNA

SEQ ID NO: 199957 - DNA, 80 bp, synthetic construct; identical to SEQ ID NO: 15227
  source 1..80: mol_type = other DNA

SEQ ID NO: 199958 - DNA, 80 bp, synthetic construct; identical to SEQ ID NO: 15228
  source 1..80: mol_type = other DNA

SEQ ID NO: 199959 - DNA, 80 bp, synthetic construct; identical to SEQ ID NO: 15229
  source 1..80: mol_type = other DNA

SEQ ID NO: 199960 - DNA, 80 bp, synthetic construct; identical to SEQ ID NO: 15230
  source 1..80: mol_type = other DNA

SEQ ID NO: 199961 - DNA, 80 bp, synthetic construct; identical to SEQ ID NO: 15231
  source 1..80: mol_type = other DNA

SEQ ID NO: 199962 - DNA, 80 bp, synthetic construct; identical to SEQ ID NO: 15232
  source 1..80: mol_type = other DNA

SEQ ID NO: 199963 - DNA, 80 bp, synthetic construct; identical to SEQ ID NO: 15233
  source 1..80: mol_type = other DNA

SEQ ID NO: 199964 - DNA, 80 bp, synthetic construct; identical to SEQ ID NO: 15234
  source 1..80: mol_type = other DNA

SEQ ID NO: 199965 - DNA, 80 bp, synthetic construct; identical to SEQ ID NO: 15235
  source 1..80: mol_type = other DNA

SEQ ID NO: 199966 - DNA, 80 bp, synthetic construct; identical to SEQ ID NO: 15236
  source 1..80: mol_type = other DNA

SEQ ID NO: 199967 - DNA, 80 bp, synthetic construct; identical to SEQ ID NO: 15237
  source 1..80: mol_type = other DNA

SEQ ID NO: 199968 - DNA, 80 bp, synthetic construct; identical to SEQ ID NO: 15238
  source 1..80: mol_type = other DNA

SEQ ID NO: 199969 - DNA, 80 bp, synthetic construct; identical to SEQ ID NO: 15239
  source 1..80: mol_type = other DNA

SEQ ID NO: 199970 - DNA, 80 bp, synthetic construct; identical to SEQ ID NO: 15240
  source 1..80: mol_type = other DNA

SEQ ID NO: 199971 - DNA, 80 bp, synthetic construct; identical to SEQ ID NO: 15241
  source 1..80: mol_type = other DNA

SEQ ID NO: 199972 - DNA, 80 bp, synthetic construct; identical to SEQ ID NO: 15242
  source 1..80: mol_type = other DNA

SEQ ID NO: 199973 - DNA, 80 bp, synthetic construct; identical to SEQ ID NO: 15243
  source 1..80: mol_type = other DNA

SEQ ID NO: 199974 - DNA, 80 bp, synthetic construct; identical to SEQ ID NO: 15244
  source 1..80: mol_type = other DNA

SEQ ID NO: 199975 - DNA, 80 bp, synthetic construct; identical to SEQ ID NO: 15245
  source 1..80: mol_type = other DNA

SEQ ID NO: 199976 - DNA, 80 bp, synthetic construct; identical to SEQ ID NO: 15246
  source 1..80: mol_type = other DNA

SEQ ID NO: 199977 - DNA, 80 bp, synthetic construct; identical to SEQ ID NO: 15247
  source 1..80: mol_type = other DNA

SEQ ID NO: 199978 - DNA, 80 bp, synthetic construct; identical to SEQ ID NO: 15248
  source 1..80: mol_type = other DNA

SEQ ID NO: 199979 - DNA, 80 bp, synthetic construct; identical to SEQ ID NO: 15249
  source 1..80: mol_type = other DNA

SEQ ID NO: 199980 - DNA, 80 bp, synthetic construct; identical to SEQ ID NO: 15250
  source 1..80: mol_type = other DNA

SEQ ID NO: 199981 - DNA, 80 bp, synthetic construct; identical to SEQ ID NO: 15251
  source 1..80: mol_type = other DNA

SEQ ID NO: 199982 - DNA, 80 bp, synthetic construct; identical to SEQ ID NO: 15252
  source 1..80: mol_type = other DNA

SEQ ID NO: 199983 - DNA, 80 bp, synthetic construct; identical to SEQ ID NO: 15253
  source 1..80: mol_type = other DNA

SEQ ID NO: 199984 - DNA, 80 bp, synthetic construct; identical to SEQ ID NO: 15254
  source 1..80: mol_type = other DNA

SEQ ID NO: 199985 - DNA, 80 bp, synthetic construct; identical to SEQ ID NO: 15255
  source 1..80: mol_type = other DNA

SEQ ID NO: 199986 - DNA, 80 bp, synthetic construct; identical to SEQ ID NO: 15256
  source 1..80: mol_type = other DNA

SEQ ID NO: 199987 - DNA, 80 bp, synthetic construct; identical to SEQ ID NO: 15257
  source 1..80: mol_type = other DNA

SEQ ID NO: 199988 - DNA, 80 bp, synthetic construct; identical to SEQ ID NO: 15258
  source 1..80: mol_type = other DNA

SEQ ID NO: 199989 - DNA, 80 bp, synthetic construct; identical to SEQ ID NO: 15259
  source 1..80: mol_type = other DNA

SEQ ID NO: 199990 - DNA, 80 bp, synthetic construct; identical to SEQ ID NO: 15260
  source 1..80: mol_type = other DNA

SEQ ID NO: 199991 - DNA, 80 bp, synthetic construct; identical to SEQ ID NO: 15261
  source 1..80: mol_type = other DNA

SEQ ID NO: 199992 - DNA, 80 bp, synthetic construct; identical to SEQ ID NO: 15262
  source 1..80: mol_type = other DNA

SEQ ID NO: 199993 - DNA, 80 bp, synthetic construct; identical to SEQ ID NO: 15263
  source 1..80: mol_type = other DNA

SEQ ID NO: 199994 - DNA, 80 bp, synthetic construct; identical to SEQ ID NO: 15264
  source 1..80: mol_type = other DNA

SEQ ID NO: 199995 - DNA, 80 bp, synthetic construct; identical to SEQ ID NO: 15265
  source 1..80: mol_type = other DNA

SEQ ID NO: 199996 - DNA, 80 bp, synthetic construct; identical to SEQ ID NO: 15266
  source 1..80: mol_type = other DNA

SEQ ID NO: 199997 - DNA, 80 bp, synthetic construct; identical to SEQ ID NO: 15267
  source 1..80: mol_type = other DNA

SEQ ID NO: 199998 - DNA, 80 bp, synthetic construct; identical to SEQ ID NO: 15268
  source 1..80: mol_type = other DNA

SEQ ID NO: 199999 - DNA, 80 bp, synthetic construct; identical to SEQ ID NO: 15269
  source 1..80: mol_type = other DNA

SEQ ID NO: 200000 - DNA, 80 bp, synthetic construct; identical to SEQ ID NO: 15270
  source 1..80: mol_type = other DNA

SEQ ID NO: 200001 - DNA, 80 bp, synthetic construct; identical to SEQ ID NO: 15271
  source 1..80: mol_type = other DNA

SEQ ID NO: 200002 - DNA, 80 bp, synthetic construct; identical to SEQ ID NO: 15272
  source 1..80: mol_type = other DNA

SEQ ID NO: 200003 - DNA, 80 bp, synthetic construct; identical to SEQ ID NO: 15273
  source 1..80: mol_type = other DNA

SEQ ID NO: 200004 - DNA, 80 bp, synthetic construct; identical to SEQ ID NO: 15274
  source 1..80: mol_type = other DNA

SEQ ID NO: 200005 - DNA, 80 bp, synthetic construct; identical to SEQ ID NO: 15275
  source 1..80: mol_type = other DNA

SEQ ID NO: 200006 - DNA, 80 bp, synthetic construct; identical to SEQ ID NO: 15276
  source 1..80: mol_type = other DNA

SEQ ID NO: 200007 - DNA, 80 bp, synthetic construct; identical to SEQ ID NO: 15277
  source 1..80: mol_type = other DNA

SEQ ID NO: 200008 - DNA, 80 bp, synthetic construct; identical to SEQ ID NO: 15278
  source 1..80: mol_type = other DNA

SEQ ID NO: 200009 - DNA, 80 bp, synthetic construct; identical to SEQ ID NO: 15279
  source 1..80: mol_type = other DNA

SEQ ID NO: 200010 - DNA, 80 bp, synthetic construct; identical to SEQ ID NO: 15280
  source 1..80: mol_type = other DNA

SEQ ID NO: 200011 - DNA, 80 bp, synthetic construct; identical to SEQ ID NO: 15281
  source 1..80: mol_type = other DNA

SEQ ID NO: 200012 - DNA, 80 bp, synthetic construct; identical to SEQ ID NO: 15282
  source 1..80: mol_type = other DNA

SEQ ID NO: 200013 - DNA, 80 bp, synthetic construct; identical to SEQ ID NO: 15283
  source 1..80: mol_type = other DNA

SEQ ID NO: 200014 - DNA, 80 bp, synthetic construct; identical to SEQ ID NO: 15284
  source 1..80: mol_type = other DNA

SEQ ID NO: 200015 - DNA, 80 bp, synthetic construct; identical to SEQ ID NO: 15285
  source 1..80: mol_type = other DNA

SEQ ID NO: 200016 - DNA, 80 bp, synthetic construct; identical to SEQ ID NO: 15286
  source 1..80: mol_type = other DNA

SEQ ID NO: 200017 - DNA, 80 bp, synthetic construct; identical to SEQ ID NO: 15287
  source 1..80: mol_type = other DNA

SEQ ID NO: 200018 - DNA, 80 bp, synthetic construct; identical to SEQ ID NO: 15288
  source 1..80: mol_type = other DNA

SEQ ID NO: 200019 - DNA, 80 bp, synthetic construct; identical to SEQ ID NO: 15289
  source 1..80: mol_type = other DNA

SEQ ID NO: 200020 - DNA, 80 bp, synthetic construct; identical to SEQ ID NO: 15290
  source 1..80: mol_type = other DNA

SEQ ID NO: 200021 - DNA, 80 bp, synthetic construct; identical to SEQ ID NO: 15291
  source 1..80: mol_type = other DNA

SEQ ID NO: 200022 - DNA, 80 bp, synthetic construct; identical to SEQ ID NO: 15292
  source 1..80: mol_type = other DNA

SEQ ID NO: 200023 - DNA, 80 bp, synthetic construct; identical to SEQ ID NO: 15293
  source 1..80: mol_type = other DNA

SEQ ID NO: 200024 - DNA, 80 bp, synthetic construct; identical to SEQ ID NO: 15294
  source 1..80: mol_type = other DNA

SEQ ID NO: 200025 - DNA, 80 bp, synthetic construct; identical to SEQ ID NO: 15295
  source 1..80: mol_type = other DNA

SEQ ID NO: 200026 - DNA, 80 bp, synthetic construct; identical to SEQ ID NO: 15296
  source 1..80: mol_type = other DNA

SEQ ID NO: 200027 - DNA, 80 bp, synthetic construct; identical to SEQ ID NO: 15297
  source 1..80: mol_type = other DNA

SEQ ID NO: 200028 - DNA, 80 bp, synthetic construct; identical to SEQ ID NO: 15298
  source 1..80: mol_type = other DNA

SEQ ID NO: 200029 - DNA, 80 bp, synthetic construct; identical to SEQ ID NO: 15299
  source 1..80: mol_type = other DNA

SEQ ID NO: 200030 - DNA, 80 bp, synthetic construct; identical to SEQ ID NO: 15300
  source 1..80: mol_type = other DNA

SEQ ID NO: 200031 - DNA, 80 bp, synthetic construct; identical to SEQ ID NO: 15301
  source 1..80: mol_type = other DNA

SEQ ID NO: 200032 - DNA, 80 bp, synthetic construct; identical to SEQ ID NO: 15302
  source 1..80: mol_type = other DNA

SEQ ID NO: 200033 - DNA, 80 bp, synthetic construct; identical to SEQ ID NO: 15303
  source 1..80: mol_type = other DNA

SEQ ID NO: 200034 - DNA, 80 bp, synthetic construct; identical to SEQ ID NO: 15304
  source 1..80: mol_type = other DNA

SEQ ID NO: 200035 - DNA, 80 bp, synthetic construct; identical to SEQ ID NO: 15305
  source 1..80: mol_type = other DNA

SEQ ID NO: 200036 - DNA, 80 bp, synthetic construct; identical to SEQ ID NO: 15306
  source 1..80: mol_type = other DNA

SEQ ID NO: 200037 - DNA, 80 bp, synthetic construct; identical to SEQ ID NO: 15307
  source 1..80: mol_type = other DNA

SEQ ID NO: 200038 - DNA, 80 bp, synthetic construct; identical to SEQ ID NO: 15308
  source 1..80: mol_type = other DNA

SEQ ID NO: 200039 - DNA, 80 bp, synthetic construct; identical to SEQ ID NO: 15309
  source 1..80: mol_type = other DNA

SEQ ID NO: 200040 - DNA, 80 bp, synthetic construct; identical to SEQ ID NO: 15310
  source 1..80: mol_type = other DNA

SEQ ID NO: 200041 - DNA, 80 bp, synthetic construct; identical to SEQ ID NO: 15311
  source 1..80: mol_type = other DNA

SEQ ID NO: 200042 - DNA, 80 bp, synthetic construct; identical to SEQ ID NO: 15312
  source 1..80: mol_type = other DNA

SEQ ID NO: 200043 - DNA, 80 bp, synthetic construct; identical to SEQ ID NO: 15313
  source 1..80: mol_type = other DNA

SEQ ID NO: 200044 - DNA, 80 bp, synthetic construct; identical to SEQ ID NO: 15314
  source 1..80: mol_type = other DNA

SEQ ID NO: 200045 - DNA, 80 bp, synthetic construct; identical to SEQ ID NO: 15315
  source 1..80: mol_type = other DNA

SEQ ID NO: 200046 - DNA, 80 bp, synthetic construct; identical to SEQ ID NO: 15316
  source 1..80: mol_type = other DNA

SEQ ID NO: 200047 - DNA, 80 bp, synthetic construct; identical to SEQ ID NO: 15317
  source 1..80: mol_type = other DNA

SEQ ID NO: 200048 - DNA, 80 bp, synthetic construct; identical to SEQ ID NO: 15318
  source 1..80: mol_type = other DNA

SEQ ID NO: 200049 - DNA, 80 bp, synthetic construct; identical to SEQ ID NO: 15319
  source 1..80: mol_type = other DNA

SEQ ID NO: 200050 - DNA, 80 bp, synthetic construct; identical to SEQ ID NO: 15320
  source 1..80: mol_type = other DNA

SEQ ID NO: 200051 - DNA, 80 bp, synthetic construct; identical to SEQ ID NO: 15321
  source 1..80: mol_type = other DNA

SEQ ID NO: 200052 - DNA, 80 bp, synthetic construct; identical to SEQ ID NO: 15322
  source 1..80: mol_type = other DNA

SEQ ID NO: 200053 - DNA, 80 bp, synthetic construct; identical to SEQ ID NO: 15323
  source 1..80: mol_type = other DNA

SEQ ID NO: 200054 - DNA, 80 bp, synthetic construct; identical to SEQ ID NO: 15324
  source 1..80: mol_type = other DNA

SEQ ID NO: 200055 - DNA, 80 bp, synthetic construct; identical to SEQ ID NO: 15325
  source 1..80: mol_type = other DNA

SEQ ID NO: 200056 - DNA, 80 bp, synthetic construct; identical to SEQ ID NO: 15326
  source 1..80: mol_type = other DNA

SEQ ID NO: 200057 - DNA, 80 bp, synthetic construct; identical to SEQ ID NO: 15327
  source 1..80: mol_type = other DNA

SEQ ID NO: 200058 - DNA, 80 bp, synthetic construct; identical to SEQ ID NO: 15328
  source 1..80: mol_type = other DNA

SEQ ID NO: 200059 - DNA, 80 bp, synthetic construct; identical to SEQ ID NO: 15329
  source 1..80: mol_type = other DNA

SEQ ID NO: 200060 - DNA, 80 bp, synthetic construct; identical to SEQ ID NO: 15330
  source 1..80: mol_type = other DNA

SEQ ID NO: 200061 - DNA, 80 bp, synthetic construct; identical to SEQ ID NO: 15331
  source 1..80: mol_type = other DNA

SEQ ID NO: 200062 - DNA, 80 bp, synthetic construct; identical to SEQ ID NO: 15332
  source 1..80: mol_type = other DNA

SEQ ID NO: 200063 - DNA, 80 bp, synthetic construct; identical to SEQ ID NO: 15333
  source 1..80: mol_type = other DNA

SEQ ID NO: 200064 - DNA, 80 bp, synthetic construct; identical to SEQ ID NO: 15334
  source 1..80: mol_type = other DNA

SEQ ID NO: 200065 - DNA, 80 bp, synthetic construct; identical to SEQ ID NO: 15335
  source 1..80: mol_type = other DNA

SEQ ID NO: 200066 - DNA, 80 bp, synthetic construct; identical to SEQ ID NO: 15336
  source 1..80: mol_type = other DNA

SEQ ID NO: 200067 - DNA, 80 bp, synthetic construct; identical to SEQ ID NO: 15337
  source 1..80: mol_type = other DNA

SEQ ID NO: 200068 - DNA, 80 bp, synthetic construct; identical to SEQ ID NO: 15338
  source 1..80: mol_type = other DNA

SEQ ID NO: 200069 - DNA, 80 bp, synthetic construct; identical to SEQ ID NO: 15339
  source 1..80: mol_type = other DNA

SEQ ID NO: 200070 - DNA, 80 bp, synthetic construct; identical to SEQ ID NO: 15340
  source 1..80: mol_type = other DNA

SEQ ID NO: 200071 - DNA, 80 bp, synthetic construct; identical to SEQ ID NO: 15341
  source 1..80: mol_type = other DNA

SEQ ID NO: 200072 - DNA, 80 bp, synthetic construct; identical to SEQ ID NO: 15342
  source 1..80: mol_type = other DNA

SEQ ID NO: 200073 - DNA, 80 bp, synthetic construct; identical to SEQ ID NO: 15343
  source 1..80: mol_type = other DNA

SEQ ID NO: 200074 - DNA, 80 bp, synthetic construct; identical to SEQ ID NO: 15344
  source 1..80: mol_type = other DNA

SEQ ID NO: 200075 - DNA, 80 bp, synthetic construct; identical to SEQ ID NO: 15345
  source 1..80: mol_type = other DNA

SEQ ID NO: 200076 - DNA, 80 bp, synthetic construct; identical to SEQ ID NO: 15346
  source 1..80: mol_type = other DNA

SEQ ID NO: 200077 - DNA, 80 bp, synthetic construct; identical to SEQ ID NO: 15347
  source 1..80: mol_type = other DNA

SEQ ID NO: 200078 - DNA, 80 bp, synthetic construct; identical to SEQ ID NO: 15348
  source 1..80: mol_type = other DNA

SEQ ID NO: 200079 - DNA, 80 bp, synthetic construct; identical to SEQ ID NO: 15349
  source 1..80: mol_type = other DNA

SEQ ID NO: 200080 - DNA, 80 bp, synthetic construct; identical to SEQ ID NO: 15350
  source 1..80: mol_type = other DNA

SEQ ID NO: 200081 - DNA, 80 bp, synthetic construct; identical to SEQ ID NO: 15351
  source 1..80: mol_type = other DNA

SEQ ID NO: 200082 - DNA, 80 bp, synthetic construct; identical to SEQ ID NO: 15352
  source 1..80: mol_type = other DNA

SEQ ID NO: 200083 - DNA, 80 bp, synthetic construct; identical to SEQ ID NO: 15353
  source 1..80: mol_type = other DNA

SEQ ID NO: 200084 - DNA, 80 bp, synthetic construct; identical to SEQ ID NO: 15354
  source 1..80: mol_type = other DNA

SEQ ID NO: 200085 - DNA, 80 bp, synthetic construct; identical to SEQ ID NO: 15355
  source 1..80: mol_type = other DNA

SEQ ID NO: 200086 - DNA, 80 bp, synthetic construct; identical to SEQ ID NO: 15356
  source 1..80: mol_type = other DNA

SEQ ID NO: 200087 - DNA, 80 bp, synthetic construct; identical to SEQ ID NO: 15357
  source 1..80: mol_type = other DNA

SEQ ID NO: 200088 - DNA, 80 bp, synthetic construct; identical to SEQ ID NO: 15358
  source 1..80: mol_type = other DNA

SEQ ID NO: 200089 - DNA, 80 bp, synthetic construct; identical to SEQ ID NO: 15359
  source 1..80: mol_type = other DNA

SEQ ID NO: 200090 - DNA, 80 bp, synthetic construct; identical to SEQ ID NO: 15360
  source 1..80: mol_type = other DNA

SEQ ID NO: 200091 - DNA, 80 bp, synthetic construct; identical to SEQ ID NO: 15361
  source 1..80: mol_type = other DNA

SEQ ID NO: 200092 - DNA, 80 bp, synthetic construct; identical to SEQ ID NO: 15362
  source 1..80: mol_type = other DNA

SEQ ID NO: 200093 - DNA, 80 bp, synthetic construct; identical to SEQ ID NO: 15363
  source 1..80: mol_type = other DNA

SEQ ID NO: 200094 - DNA, 80 bp, synthetic construct; identical to SEQ ID NO: 15364
  source 1..80: mol_type = other DNA

SEQ ID NO: 200095 - DNA, 80 bp, synthetic construct; identical to SEQ ID NO: 15365
  source 1..80: mol_type = other DNA

SEQ ID NO: 200096 - DNA, 80 bp, synthetic construct; identical to SEQ ID NO: 15366
  source 1..80: mol_type = other DNA

SEQ ID NO: 200097 - DNA, 80 bp, synthetic construct; identical to SEQ ID NO: 15367
  source 1..80: mol_type = other DNA

SEQ ID NO: 200098 - DNA, 80 bp, synthetic construct; identical to SEQ ID NO: 15368
  source 1..80: mol_type = other DNA

SEQ ID NO: 200099 - DNA, 80 bp, synthetic construct; identical to SEQ ID NO: 15369
  source 1..80: mol_type = other DNA

SEQ ID NO: 200100 - DNA, 80 bp, synthetic construct; identical to SEQ ID NO: 15370
  source 1..80: mol_type = other DNA

SEQ ID NO: 200101 - DNA, 80 bp, synthetic construct; identical to SEQ ID NO: 15371
  source 1..80: mol_type = other DNA

SEQ ID NO: 200102 - DNA, 80 bp, synthetic construct; identical to SEQ ID NO: 15372
  source 1..80: mol_type = other DNA

SEQ ID NO: 200103 - DNA, 80 bp, synthetic construct; identical to SEQ ID NO: 15373
  source 1..80: mol_type = other DNA

SEQ ID NO: 200104 - DNA, 80 bp, synthetic construct; identical to SEQ ID NO: 15374
  source 1..80: mol_type = other DNA

SEQ ID NO: 200105 - DNA, 80 bp, synthetic construct; identical to SEQ ID NO: 15375
  source 1..80: mol_type = other DNA

SEQ ID NO: 200106 - DNA, 80 bp, synthetic construct; identical to SEQ ID NO: 15376
  source 1..80: mol_type = other DNA

SEQ ID NO: 200107 - DNA, 80 bp, synthetic construct; identical to SEQ ID NO: 15377
  source 1..80: mol_type = other DNA

SEQ ID NO: 200108 - DNA, 80 bp, synthetic construct; identical to SEQ ID NO: 15378
  source 1..80: mol_type = other DNA

SEQ ID NO: 200109 - DNA, 80 bp, synthetic construct; identical to SEQ ID NO: 15379
  source 1..80: mol_type = other DNA

SEQ ID NO: 200110 - DNA, 80 bp, synthetic construct; identical to SEQ ID NO: 15380
  source 1..80: mol_type = other DNA

SEQ ID NO: 200111 - DNA, 80 bp, synthetic construct; identical to SEQ ID NO: 15381
  source 1..80: mol_type = other DNA

SEQ ID NO: 200112 - DNA, 80 bp, synthetic construct; identical to SEQ ID NO: 15382
  source 1..80: mol_type = other DNA

SEQ ID NO: 200113 - DNA, 80 bp, synthetic construct; identical to SEQ ID NO: 15383
  source 1..80: mol_type = other DNA

SEQ ID NO: 200114 - DNA, 80 bp, synthetic construct; identical to SEQ ID NO: 15384
  source 1..80: mol_type = other DNA

SEQ ID NO: 200115 - DNA, 80 bp, synthetic construct; identical to SEQ ID NO: 15385
  source 1..80: mol_type = other DNA

SEQ ID NO: 200116 - DNA, 80 bp, synthetic construct; identical to SEQ ID NO: 15386
  source 1..80: mol_type = other DNA

SEQ ID NO: 200117 - DNA, 80 bp, synthetic construct; identical to SEQ ID NO: 15387
  source 1..80: mol_type = other DNA

SEQ ID NO: 200118 - DNA, 80 bp, synthetic construct; identical to SEQ ID NO: 15388
  source 1..80: mol_type = other DNA

SEQ ID NO: 200119 - DNA, 80 bp, synthetic construct; identical to SEQ ID NO: 15389
  source 1..80: mol_type = other DNA

SEQ ID NO: 200120 - DNA, 80 bp, synthetic construct; identical to SEQ ID NO: 15390
  source 1..80: mol_type = other DNA

SEQ ID NO: 200121 - DNA, 80 bp, synthetic construct; identical to SEQ ID NO: 15391
  source 1..80: mol_type = other DNA

SEQ ID NO: 200122 - DNA, 80 bp, synthetic construct; identical to SEQ ID NO: 15392
  source 1..80: mol_type = other DNA

SEQ ID NO: 200123 - DNA, 80 bp, synthetic construct; identical to SEQ ID NO: 15393
  source 1..80: mol_type = other DNA

SEQ ID NO: 200124 - DNA, 80 bp, synthetic construct; identical to SEQ ID NO: 15394
  source 1..80: mol_type = other DNA

SEQ ID NO: 200125 - DNA, 80 bp, synthetic construct; identical to SEQ ID NO: 15395
  source 1..80: mol_type = other DNA

SEQ ID NO: 200126 - DNA, 80 bp, synthetic construct; identical to SEQ ID NO: 15396
  source 1..80: mol_type = other DNA

SEQ ID NO: 200127 - DNA, 80 bp, synthetic construct; identical to SEQ ID NO: 15397
  source 1..80: mol_type = other DNA

SEQ ID NO: 200128 - DNA, 80 bp, synthetic construct; identical to SEQ ID NO: 15398
  source 1..80: mol_type = other DNA

SEQ ID NO: 200129 - DNA, 80 bp, synthetic construct; identical to SEQ ID NO: 15399
  source 1..80: mol_type = other DNA

SEQ ID NO: 200130 - DNA, 80 bp, synthetic construct; identical to SEQ ID NO: 15400
  source 1..80: mol_type = other DNA

SEQ ID NO: 200131 - DNA, 80 bp, synthetic construct; identical to SEQ ID NO: 15401
  source 1..80: mol_type = other DNA

SEQ ID NO: 200132 - DNA, 80 bp, synthetic construct; identical to SEQ ID NO: 15402
  source 1..80: mol_type = other DNA

SEQ ID NO: 200133 - DNA, 80 bp, synthetic construct; identical to SEQ ID NO: 15403
  source 1..80: mol_type = other DNA

SEQ ID NO: 200134 - DNA, 80 bp, synthetic construct; identical to SEQ ID NO: 15404
  source 1..80: mol_type = other DNA

SEQ ID NO: 200135 - DNA, 80 bp, synthetic construct; identical to SEQ ID NO: 15405
  source 1..80: mol_type = other DNA

SEQ ID NO: 200136 - DNA, 80 bp, synthetic construct; identical to SEQ ID NO: 15406
  source 1..80: mol_type = other DNA

SEQ ID NO: 200137 - DNA, 80 bp, synthetic construct; identical to SEQ ID NO: 15407
  source 1..80: mol_type = other DNA

SEQ ID NO: 200138 - DNA, 80 bp, synthetic construct; identical to SEQ ID NO: 15408
  source 1..80: mol_type = other DNA

SEQ ID NO: 200139 - DNA, 80 bp, synthetic construct; identical to SEQ ID NO: 15409
  source 1..80: mol_type = other DNA

SEQ ID NO: 200140 - DNA, 80 bp, synthetic construct; identical to SEQ ID NO: 15410
  source 1..80: mol_type = other DNA

SEQ ID NO: 200141 - DNA, 80 bp, synthetic construct; identical to SEQ ID NO: 15411
  source 1..80: mol_type = other DNA

SEQ ID NO: 200142 - DNA, 80 bp, synthetic construct; identical to SEQ ID NO: 15412
  source 1..80: mol_type = other DNA

SEQ ID NO: 200143 - DNA, 80 bp, synthetic construct; identical to SEQ ID NO: 15413
  source 1..80: mol_type = other DNA

SEQ ID NO: 200144 - DNA, 80 bp, synthetic construct; identical to SEQ ID NO: 15414
  source 1..80: mol_type = other DNA

SEQ ID NO: 200145 - DNA, 80 bp, synthetic construct; identical to SEQ ID NO: 15415
  source 1..80: mol_type = other DNA

SEQ ID NO: 200146 - DNA, 80 bp, synthetic construct; identical to SEQ ID NO: 15416
  source 1..80: mol_type = other DNA

SEQ ID NO: 200147 - DNA, 80 bp, synthetic construct; identical to SEQ ID NO: 15417
  source 1..80: mol_type = other DNA

SEQ ID NO: 200148 - DNA, 80 bp, synthetic construct; identical to SEQ ID NO: 15418
  source 1..80: mol_type = other DNA

SEQ ID NO: 200149 - DNA, 80 bp, synthetic construct; identical to SEQ ID NO: 15419
  source 1..80: mol_type = other DNA

SEQ ID NO: 200150 - DNA, 80 bp, synthetic construct; identical to SEQ ID NO: 15420
  source 1..80: mol_type = other DNA

SEQ ID NO: 200151 - DNA, 80 bp, synthetic construct; identical to SEQ ID NO: 15421
  source 1..80: mol_type = other DNA

SEQ ID NO: 200152 - DNA, 80 bp, synthetic construct; identical to SEQ ID NO: 15422
  source 1..80: mol_type = other DNA

SEQ ID NO: 200153 - DNA, 80 bp, synthetic construct; identical to SEQ ID NO: 15423
  source 1..80: mol_type = other DNA

SEQ ID NO: 200154 - DNA, 80 bp, synthetic construct; identical to SEQ ID NO: 15424
  source 1..80: mol_type = other DNA

SEQ ID NO: 200155 - DNA, 80 bp, synthetic construct; identical to SEQ ID NO: 15425
  source 1..80: mol_type = other DNA

SEQ ID NO: 200156 - DNA, 80 bp, synthetic construct; identical to SEQ ID NO: 15426
  source 1..80: mol_type = other DNA

SEQ ID NO: 200157 - DNA, 80 bp, synthetic construct; identical to SEQ ID NO: 15427
  source 1..80: mol_type = other DNA

SEQ ID NO: 200158 - DNA, 80 bp, synthetic construct; identical to SEQ ID NO: 15428
  source 1..80: mol_type = other DNA

SEQ ID NO: 200159 - DNA, 80 bp, synthetic construct; identical to SEQ ID NO: 15429
  source 1..80: mol_type = other DNA

SEQ ID NO: 200160 - DNA, 80 bp, synthetic construct; identical to SEQ ID NO: 15430
  source 1..80: mol_type = other DNA

SEQ ID NO: 200161 - DNA, 80 bp, synthetic construct; identical to SEQ ID NO: 15431
  source 1..80: mol_type = other DNA

SEQ ID NO: 200162 - DNA, 80 bp, synthetic construct; identical to SEQ ID NO: 15432
  source 1..80: mol_type = other DNA

SEQ ID NO: 200163 - DNA, 80 bp, synthetic construct; identical to SEQ ID NO: 15433
  source 1..80: mol_type = other DNA

SEQ ID NO: 200164 - DNA, 80 bp, synthetic construct; identical to SEQ ID NO: 15434
  source 1..80: mol_type = other DNA

SEQ ID NO: 200165 - DNA, 80 bp, synthetic construct; identical to SEQ ID NO: 15435
  source 1..80: mol_type = other DNA

SEQ ID NO: 200166 - DNA, 80 bp, synthetic construct; identical to SEQ ID NO: 15436
  source 1..80: mol_type = other DNA

SEQ ID NO: 200167 - DNA, 80 bp, synthetic construct; identical to SEQ ID NO: 15437
  source 1..80: mol_type = other DNA

SEQ ID NO: 200168 - DNA, 80 bp, synthetic construct; identical to SEQ ID NO: 15438
  source 1..80: mol_type = other DNA

SEQ ID NO: 200169 - DNA, 80 bp, synthetic construct; identical to SEQ ID NO: 15439
  source 1..80: mol_type = other DNA

SEQ ID NO: 200170 - DNA, 80 bp, synthetic construct; identical to SEQ ID NO: 15440
  source 1..80: mol_type = other DNA

SEQ ID NO: 200171 - DNA, 80 bp, synthetic construct; identical to SEQ ID NO: 15441
  source 1..80: mol_type = other DNA

SEQ ID NO: 200172 - DNA, 80 bp, synthetic construct; identical to SEQ ID NO: 15442
  source 1..80: mol_type = other DNA

SEQ ID NO: 200173 - DNA, 80 bp, synthetic construct; identical to SEQ ID NO: 15443
  source 1..80: mol_type = other DNA

SEQ ID NO: 200174 - DNA, 80 bp, synthetic construct; identical to SEQ ID NO: 15444
  source 1..80: mol_type = other DNA

SEQ ID NO: 200175 - DNA, 80 bp, synthetic construct; identical to SEQ ID NO: 15445
  source 1..80: mol_type = other DNA

SEQ ID NO: 200176 - DNA, 80 bp, synthetic construct; identical to SEQ ID NO: 15446
  source 1..80: mol_type = other DNA

SEQ ID NO: 200177 - DNA, 80 bp, synthetic construct; identical to SEQ ID NO: 15447
  source 1..80: mol_type = other DNA

SEQ ID NO: 200178 - DNA, 80 bp, synthetic construct; identical to SEQ ID NO: 15448
  source 1..80: mol_type = other DNA

SEQ ID NO: 200179 - DNA, 80 bp, synthetic construct; identical to SEQ ID NO: 15449
  source 1..80: mol_type = other DNA

SEQ ID NO: 200180 - DNA, 80 bp, synthetic construct; identical to SEQ ID NO: 15450
  source 1..80: mol_type = other DNA

SEQ ID NO: 200181 - DNA, 80 bp, synthetic construct; identical to SEQ ID NO: 15451
  source 1..80: mol_type = other DNA

SEQ ID NO: 200182 - DNA, 80 bp, synthetic construct; identical to SEQ ID NO: 15452
  source 1..80: mol_type = other DNA

SEQ ID NO: 200183 - DNA, 80 bp, synthetic construct; identical to SEQ ID NO: 15453
  source 1..80: mol_type = other DNA

SEQ ID NO: 200184 - DNA, 80 bp, synthetic construct; identical to SEQ ID NO: 15454
  source 1..80: mol_type = other DNA

SEQ ID NO: 200185 - DNA, 80 bp, synthetic construct; identical to SEQ ID NO: 15455
  source 1..80: mol_type = other DNA

SEQ ID NO: 200186 - DNA, 80 bp, synthetic construct; identical to SEQ ID NO: 15456
  source 1..80: mol_type = other DNA

SEQ ID NO: 200187 - DNA, 80 bp, synthetic construct; identical to SEQ ID NO: 15457
  source 1..80: mol_type = other DNA

SEQ ID NO: 200188 - DNA, 80 bp, synthetic construct; identical to SEQ ID NO: 15458
  source 1..80: mol_type = other DNA

SEQ ID NO: 200189 - DNA, 80 bp, synthetic construct; identical to SEQ ID NO: 15459
  source 1..80: mol_type = other DNA

SEQ ID NO: 200190 - DNA, 80 bp, synthetic construct; identical to SEQ ID NO: 15460
  source 1..80: mol_type = other DNA

SEQ ID NO: 200191 - DNA, 80 bp, synthetic construct; identical to SEQ ID NO: 15461
  source 1..80: mol_type = other DNA

SEQ ID NO: 200192 - DNA, 80 bp, synthetic construct; identical to SEQ ID NO: 15462
  source 1..80: mol_type = other DNA

SEQ ID NO: 200193 - DNA, 80 bp, synthetic construct; identical to SEQ ID NO: 15463
  source 1..80: mol_type = other DNA

SEQ ID NO: 200194 - DNA, 80 bp, synthetic construct; identical to SEQ ID NO: 15464
  source 1..80: mol_type = other DNA

SEQ ID NO: 200195 - DNA, 80 bp, synthetic construct; identical to SEQ ID NO: 15465
  source 1..80: mol_type = other DNA

SEQ ID NO: 200196 - DNA, 80 bp, synthetic construct; identical to SEQ ID NO: 15466
  source 1..80: mol_type = other DNA

SEQ ID NO: 200197 - DNA, 80 bp, synthetic construct; identical to SEQ ID NO: 15467
  source 1..80: mol_type = other DNA

SEQ ID NO: 200198 - DNA, 80 bp, synthetic construct; identical to SEQ ID NO: 15468
  source 1..80: mol_type = other DNA

SEQ ID NO: 200199 - DNA, 80 bp, synthetic construct; identical to SEQ ID NO: 15469
  source 1..80: mol_type = other DNA

SEQ ID NO: 200200 - DNA, 80 bp, synthetic construct; identical to SEQ ID NO: 15470
  source 1..80: mol_type = other DNA

SEQ ID NO: 200201 - DNA, 80 bp, synthetic construct; identical to SEQ ID NO: 15471
  source 1..80: mol_type = other DNA

SEQ ID NO: 200202 - DNA, 80 bp, synthetic construct; identical to SEQ ID NO: 15472
  source 1..80: mol_type = other DNA

SEQ ID NO: 200203 - DNA, 80 bp, synthetic construct; identical to SEQ ID NO: 15473
  source 1..80: mol_type = other DNA

SEQ ID NO: 200204 - DNA, 80 bp, synthetic construct; identical to SEQ ID NO: 15474
  source 1..80: mol_type = other DNA

SEQ ID NO: 200205 - DNA, 80 bp, synthetic construct; identical to SEQ ID NO: 15475
  source 1..80: mol_type = other DNA

SEQ ID NO: 200206 - DNA, 80 bp, synthetic construct; identical to SEQ ID NO: 15476
  source 1..80: mol_type = other DNA

SEQ ID NO: 200207 - DNA, 80 bp, synthetic construct; identical to SEQ ID NO: 15477
  source 1..80: mol_type = other DNA

SEQ ID NO: 200208 - DNA, 80 bp, synthetic construct; identical to SEQ ID NO: 15478
  source 1..80: mol_type = other DNA

SEQ ID NO: 200209 - DNA, 80 bp, synthetic construct; identical to SEQ ID NO: 15479
  source 1..80: mol_type = other DNA

SEQ ID NO: 200210 - DNA, 80 bp, synthetic construct; identical to SEQ ID NO: 15480
  source 1..80: mol_type = other DNA

SEQ ID NO: 200211 - DNA, 80 bp, synthetic construct; identical to SEQ ID NO: 15481
  source 1..80: mol_type = other DNA

SEQ ID NO: 200212 - DNA, 80 bp, synthetic construct; identical to SEQ ID NO: 15482
  source 1..80: mol_type = other DNA

SEQ ID NO: 200213 - DNA, 80 bp, synthetic construct; identical to SEQ ID NO: 15483
  source 1..80: mol_type = other DNA

SEQ ID NO: 200214 - DNA, 80 bp, synthetic construct; identical to SEQ ID NO: 15484
  source 1..80: mol_type = other DNA

SEQ ID NO: 200215 - DNA, 80 bp, synthetic construct; identical to SEQ ID NO: 15485
  source 1..80: mol_type = other DNA

SEQ ID NO: 200216 - DNA, 80 bp, synthetic construct; identical to SEQ ID NO: 15486
  source 1..80: mol_type = other DNA

SEQ ID NO: 200217 - DNA, 80 bp, synthetic construct; identical to SEQ ID NO: 15487
  source 1..80: mol_type = other DNA

SEQ ID NO: 200218 - DNA, 80 bp, synthetic construct; identical to SEQ ID NO: 15488
  source 1..80: mol_type = other DNA

SEQ ID NO: 200219 - DNA, 80 bp, synthetic construct; identical to SEQ ID NO: 15489
  source 1..80: mol_type = other DNA

SEQ ID NO: 200220 - DNA, 80 bp, synthetic construct; identical to SEQ ID NO: 15490
  source 1..80: mol_type = other DNA

SEQ ID NO: 200221 - DNA, 80 bp, synthetic construct; identical to SEQ ID NO: 15491
  source 1..80: mol_type = other DNA

SEQ ID NO: 200222 - DNA, 80 bp, synthetic construct; identical to SEQ ID NO: 15492
  source 1..80: mol_type = other DNA

SEQ ID NO: 200223 - DNA, 80 bp, synthetic construct; identical to SEQ ID NO: 15493
  source 1..80: mol_type = other DNA

SEQ ID NO: 200224 - DNA, 80 bp, synthetic construct; identical to SEQ ID NO: 15494
  source 1..80: mol_type = other DNA

SEQ ID NO: 200225 - DNA, 80 bp, synthetic construct; identical to SEQ ID NO: 15495
  source 1..80: mol_type = other DNA

SEQ ID NO: 200226 - DNA, 80 bp, synthetic construct; identical to SEQ ID NO: 15496
  source 1..80: mol_type = other DNA

SEQ ID NO: 200227 - DNA, 80 bp, synthetic construct; identical to SEQ ID NO: 15497
  source 1..80: mol_type = other DNA

SEQ ID NO: 200228 - DNA, 80 bp, synthetic construct; identical to SEQ ID NO: 15498
  source 1..80: mol_type = other DNA

SEQ ID NO: 200229 - DNA, 80 bp, synthetic construct; identical to SEQ ID NO: 15499
  source 1..80: mol_type = other DNA

SEQ ID NO: 200230 - DNA, 80 bp, synthetic construct; identical to SEQ ID NO: 15500
  source 1..80: mol_type = other DNA

SEQ ID NO: 200231 - DNA, 80 bp, synthetic construct; identical to SEQ ID NO: 15501
  source 1..80: mol_type = other DNA

SEQ ID NO: 200232 - DNA, 80 bp, synthetic construct; identical to SEQ ID NO: 15502
  source 1..80: mol_type = other DNA

SEQ ID NO: 200233 - DNA, 80 bp, synthetic construct; identical to SEQ ID NO: 15503
  source 1..80: mol_type = other DNA

SEQ ID NO: 200234 - DNA, 80 bp, synthetic construct; identical to SEQ ID NO: 15504
  source 1..80: mol_type = other DNA

SEQ ID NO: 200235 - DNA, 80 bp, synthetic construct; identical to SEQ ID NO: 15505
  source 1..80: mol_type = other DNA

SEQ ID NO: 200236 - DNA, 80 bp, synthetic construct; identical to SEQ ID NO: 15506
  source 1..80: mol_type = other DNA

SEQ ID NO: 200237 - DNA, 80 bp, synthetic construct; identical to SEQ ID NO: 15507
  source 1..80: mol_type = other DNA

SEQ ID NO: 200238 - DNA, 80 bp, synthetic construct; identical to SEQ ID NO: 15508
  source 1..80: mol_type = other DNA

SEQ ID NO: 200239 - DNA, 80 bp, synthetic construct; identical to SEQ ID NO: 15509
  source 1..80: mol_type = other DNA

SEQ ID NO: 200240 - DNA, 80 bp, synthetic construct; identical to SEQ ID NO: 15510
  source 1..80: mol_type = other DNA

SEQ ID NO: 200241 - DNA, 80 bp, synthetic construct; identical to SEQ ID NO: 15511
  source 1..80: mol_type = other DNA

SEQ ID NO: 200242 - DNA, 80 bp, synthetic construct; identical to SEQ ID NO: 15512
  source 1..80: mol_type = other DNA

SEQ ID NO: 200243 - DNA, 80 bp, synthetic construct; identical to SEQ ID NO: 15513
  source 1..80: mol_type = other DNA

SEQ ID NO: 200244 - DNA, 80 bp, synthetic construct; identical to SEQ ID NO: 15514
  source 1..80: mol_type = other DNA

SEQ ID NO: 200245 - DNA, 80 bp, synthetic construct; identical to SEQ ID NO: 15515
  source 1..80: mol_type = other DNA

SEQ ID NO: 200246 - DNA, 80 bp, synthetic construct; identical to SEQ ID NO: 15516
  source 1..80: mol_type = other DNA

SEQ ID NO: 200247 - DNA, 80 bp, synthetic construct; identical to SEQ ID NO: 15517
  source 1..80: mol_type = other DNA

SEQ ID NO: 200248 - DNA, 80 bp, synthetic construct; identical to SEQ ID NO: 15518
  source 1..80: mol_type = other DNA

SEQ ID NO: 200249 - DNA, 80 bp, synthetic construct; identical to SEQ ID NO: 15519
  source 1..80: mol_type = other DNA

SEQ ID NO: 200250 - DNA, 80 bp, synthetic construct; identical to SEQ ID NO: 15520
  source 1..80: mol_type = other DNA

SEQ ID NO: 200251 - DNA, 80 bp, synthetic construct; identical to SEQ ID NO: 15521
  source 1..80: mol_type = other DNA

SEQ ID NO: 200252 - DNA, 80 bp, synthetic construct; identical to SEQ ID NO: 15522
  source 1..80: mol_type = other DNA

SEQ ID NO: 200253 - DNA, 80 bp, synthetic construct; identical to SEQ ID NO: 15523
  source 1..80: mol_type = other DNA

SEQ ID NO: 200254 - DNA, 80 bp, synthetic construct; identical to SEQ ID NO: 15524
  source 1..80: mol_type = other DNA

SEQ ID NO: 200255 - DNA, 80 bp, synthetic construct; identical to SEQ ID NO: 15525
  source 1..80: mol_type = other DNA

SEQ ID NO: 200256 - DNA, 80 bp, synthetic construct; identical to SEQ ID NO: 15526
  source 1..80: mol_type = other DNA

SEQ ID NO: 200257 - DNA, 80 bp, synthetic construct; identical to SEQ ID NO: 15527
  source 1..80: mol_type = other DNA

SEQ ID NO: 200258 - DNA, 80 bp, synthetic construct; identical to SEQ ID NO: 15528
  source 1..80: mol_type = other DNA

SEQ ID NO: 200259 - DNA, 80 bp, synthetic construct; identical to SEQ ID NO: 15529
  source 1..80: mol_type = other DNA

SEQ ID NO: 200260 - DNA, 80 bp, synthetic construct; identical to SEQ ID NO: 15530
  source 1..80: mol_type = other DNA

SEQ ID NO: 200261 - DNA, 80 bp, synthetic construct; identical to SEQ ID NO: 15531
  source 1..80: mol_type = other DNA

SEQ ID NO: 200262 - DNA, 80 bp, synthetic construct; identical to SEQ ID NO: 15532
  source 1..80: mol_type = other DNA

SEQ ID NO: 200263 - DNA, 80 bp, synthetic construct; identical to SEQ ID NO: 15533
  source 1..80: mol_type = other DNA

SEQ ID NO: 200264 - DNA, 80 bp, synthetic construct; identical to SEQ ID NO: 15534
  source 1..80: mol_type = other DNA

SEQ ID NO: 200265 - DNA, 80 bp, synthetic construct; identical to SEQ ID NO: 15535
  source 1..80: mol_type = other DNA

SEQ ID NO: 200266 - DNA, 80 bp, synthetic construct; identical to SEQ ID NO: 15536
  source 1..80: mol_type = other DNA

SEQ ID NO: 200267 - DNA, 80 bp, synthetic construct; identical to SEQ ID NO: 15537
  source 1..80: mol_type = other DNA

SEQ ID NO: 200268 - DNA, 80 bp, synthetic construct; identical to SEQ ID NO: 15538
  source 1..80: mol_type = other DNA

SEQ ID NO: 200269 - DNA, 80 bp, synthetic construct; identical to SEQ ID NO: 15539
  source 1..80: mol_type = other DNA

SEQ ID NO: 200270 - DNA, 80 bp, synthetic construct; identical to SEQ ID NO: 15540
  source 1..80: mol_type = other DNA

SEQ ID NO: 200271 - DNA, 80 bp, synthetic construct; identical to SEQ ID NO: 15541
  source 1..80: mol_type = other DNA

SEQ ID NO: 200272 - DNA, 80 bp, synthetic construct; identical to SEQ ID NO: 15542
  source 1..80: mol_type = other DNA

SEQ ID NO: 200273 - DNA, 80 bp, synthetic construct; identical to SEQ ID NO: 15543
  source 1..80: mol_type = other DNA

SEQ ID NO: 200274 - DNA, 80 bp, synthetic construct; identical to SEQ ID NO: 15544
  source 1..80: mol_type = other DNA

SEQ ID NO: 200275 - DNA, 80 bp, synthetic construct; identical to SEQ ID NO: 15545
  source 1..80: mol_type = other DNA

SEQ ID NO: 200276 - DNA, 80 bp, synthetic construct; identical to SEQ ID NO: 15546
  source 1..80: mol_type = other DNA

SEQ ID NO: 200277 - DNA, 80 bp, synthetic construct; identical to SEQ ID NO: 15547
  source 1..80: mol_type = other DNA

SEQ ID NO: 200278 - DNA, 80 bp, synthetic construct; identical to SEQ ID NO: 15548
  source 1..80: mol_type = other DNA

SEQ ID NO: 200279 - DNA, 80 bp, synthetic construct; identical to SEQ ID NO: 15549
  source 1..80: mol_type = other DNA

SEQ ID NO: 200280 - DNA, 80 bp, synthetic construct; identical to SEQ ID NO: 15550
  source 1..80: mol_type = other DNA

SEQ ID NO: 200281 - DNA, 80 bp, synthetic construct; identical to SEQ ID NO: 15551
  source 1..80: mol_type = other DNA

SEQ ID NO: 200282 - DNA, 80 bp, synthetic construct; identical to SEQ ID NO: 15552
  source 1..80: mol_type = other DNA

SEQ ID NO: 200283 - DNA, 80 bp, synthetic construct; identical to SEQ ID NO: 15553
  source 1..80: mol_type = other DNA

SEQ ID NO: 200284 - DNA, 80 bp, synthetic construct; identical to SEQ ID NO: 15554
  source 1..80: mol_type = other DNA

SEQ ID NO: 200285 - DNA, 80 bp, synthetic construct; identical to SEQ ID NO: 15555
  source 1..80: mol_type = other DNA

SEQ ID NO: 200286 - DNA, 80 bp, synthetic construct; identical to SEQ ID NO: 15556
  source 1..80: mol_type = other DNA

SEQ ID NO: 200287 - DNA, 80 bp, synthetic construct; identical to SEQ ID NO: 15557
  source 1..80: mol_type = other DNA

SEQ ID NO: 200288 - DNA, 80 bp, synthetic construct; identical to SEQ ID NO: 15558
  source 1..80: mol_type = other DNA

SEQ ID NO: 200289 - DNA, 80 bp, synthetic construct; identical to SEQ ID NO: 15559
  source 1..80: mol_type = other DNA

SEQ ID NO: 200290 - DNA, 80 bp, synthetic construct; identical to SEQ ID NO: 15560
  source 1..80: mol_type = other DNA

SEQ ID NO: 200291 - DNA, 80 bp, synthetic construct; identical to SEQ ID NO: 15561
  source 1..80: mol_type = other DNA

SEQ ID NO: 200292 - DNA, 80 bp, synthetic construct; identical to SEQ ID NO: 15562
  source 1..80: mol_type = other DNA

SEQ ID NO: 200293 - DNA, 80 bp, synthetic construct; identical to SEQ ID NO: 15563
  source 1..80: mol_type = other DNA

SEQ ID NO: 200294 - DNA, 80 bp, synthetic construct; identical to SEQ ID NO: 15564
  source 1..80: mol_type = other DNA

SEQ ID NO: 200295 - DNA, 80 bp, synthetic construct; identical to SEQ ID NO: 15565
  source 1..80: mol_type = other DNA

SEQ ID NO: 200296 - DNA, 80 bp, synthetic construct; identical to SEQ ID NO: 15566
  source 1..80: mol_type = other DNA

SEQ ID NO: 200297 - DNA, 80 bp, synthetic construct; identical to SEQ ID NO: 15567
  source 1..80: mol_type = other DNA

SEQ ID NO: 200298 - DNA, 80 bp, synthetic construct; identical to SEQ ID NO: 15568
  source 1..80: mol_type = other DNA

SEQ ID NO: 200299 - DNA, 80 bp, synthetic construct; identical to SEQ ID NO: 15569
  source 1..80: mol_type = other DNA

SEQ ID NO: 200300 - DNA, 80 bp, synthetic construct; identical to SEQ ID NO: 15570
  source 1..80: mol_type = other DNA

SEQ ID NO: 200301 - DNA, 80 bp, synthetic construct; identical to SEQ ID NO: 15571
  source 1..80: mol_type = other DNA

SEQ ID NO: 200302 - DNA, 80 bp, synthetic construct; identical to SEQ ID NO: 15572
  source 1..80: mol_type = other DNA

SEQ ID NO: 200303 - DNA, 80 bp, synthetic construct; identical to SEQ ID NO: 15573
  source 1..80: mol_type = other DNA

SEQ ID NO: 200304 - DNA, 80 bp, synthetic construct; identical to SEQ ID NO: 15574
  source 1..80: mol_type = other DNA

SEQ ID NO: 200305 - DNA, 80 bp, synthetic construct; identical to SEQ ID NO: 15575
  source 1..80: mol_type = other DNA

SEQ ID NO: 200306 - DNA, 80 bp, synthetic construct; identical to SEQ ID NO: 15576
  source 1..80: mol_type = other DNA

SEQ ID NO: 200307 - DNA, 80 bp, synthetic construct; identical to SEQ ID NO: 15577
  source 1..80: mol_type = other DNA

SEQ ID NO: 200308 - DNA, 80 bp, synthetic construct; identical to SEQ ID NO: 15578
  source 1..80: mol_type = other DNA

SEQ ID NO: 200309 - DNA, 80 bp, synthetic construct; identical to SEQ ID NO: 15579
  source 1..80: mol_type = other DNA

SEQ ID NO: 200310 - DNA, 80 bp, synthetic construct; identical to SEQ ID NO: 15580
  source 1..80: mol_type = other DNA

SEQ ID NO: 200311 - DNA, 80 bp, synthetic construct; identical to SEQ ID NO: 15581
  source 1..80: mol_type = other DNA

SEQ ID NO: 200312 - DNA, 80 bp, synthetic construct; identical to SEQ ID NO: 15582
  source 1..80: mol_type = other DNA

SEQ ID NO: 200313 - DNA, 80 bp, synthetic construct; identical to SEQ ID NO: 15583
  source 1..80: mol_type = other DNA

SEQ ID NO: 200314 - DNA, 80 bp, synthetic construct; identical to SEQ ID NO: 15584
  source 1..80: mol_type = other DNA

SEQ ID NO: 200315 - DNA, 80 bp, synthetic construct; identical to SEQ ID NO: 15585
  source 1..80: mol_type = other DNA

SEQ ID NO: 200316 - DNA, 80 bp, synthetic construct; identical to SEQ ID NO: 15586
  source 1..80: mol_type = other DNA

SEQ ID NO: 200317 - DNA, 80 bp, synthetic construct; identical to SEQ ID NO: 15587
  source 1..80: mol_type = other DNA

SEQ ID NO: 200318 - DNA, 80 bp, synthetic construct; identical to SEQ ID NO: 15588
  source 1..80: mol_type = other DNA

SEQ ID NO: 200319 - DNA, 80 bp, synthetic construct; identical to SEQ ID NO: 15589
  source 1..80: mol_type = other DNA

SEQ ID NO: 200320 - DNA, 80 bp, synthetic construct; identical to SEQ ID NO: 15590
  source 1..80: mol_type = other DNA

SEQ ID NO: 200321 - DNA, 80 bp, synthetic construct; identical to SEQ ID NO: 15591
  source 1..80: mol_type = other DNA

SEQ ID NO: 200322 - DNA, 80 bp, synthetic construct; identical to SEQ ID NO: 15592
  source 1..80: mol_type = other DNA

SEQ ID NO: 200323 - DNA, 80 bp, synthetic construct; identical to SEQ ID NO: 15593
  source 1..80: mol_type = other DNA

SEQ ID NO: 200324 - DNA, 80 bp, synthetic construct; identical to SEQ ID NO: 15594
  source 1..80: mol_type = other DNA

SEQ ID NO: 200325 - DNA, 80 bp, synthetic construct; identical to SEQ ID NO: 15595
  source 1..80: mol_type = other DNA

SEQ ID NO: 200326 - DNA, 80 bp, synthetic construct; identical to SEQ ID NO: 15596
  source 1..80: mol_type = other DNA

SEQ ID NO: 200327 - DNA, 80 bp, synthetic construct; identical to SEQ ID NO: 15597
  source 1..80: mol_type = other DNA

SEQ ID NO: 200328 - DNA, 80 bp, synthetic construct; identical to SEQ ID NO: 15598
  source 1..80: mol_type = other DNA

SEQ ID NO: 200329 - DNA, 80 bp, synthetic construct; identical to SEQ ID NO: 15599
  source 1..80: mol_type = other DNA

SEQ ID NO: 200330 - DNA, 80 bp, synthetic construct; identical to SEQ ID NO: 15600
  source 1..80: mol_type = other DNA

SEQ ID NO: 200331 - DNA, 80 bp, synthetic construct; identical to SEQ ID NO: 15601
  source 1..80: mol_type = other DNA

SEQ ID NO: 200332 - DNA, 80 bp, synthetic construct; identical to SEQ ID NO: 15602
  source 1..80: mol_type = other DNA

SEQ ID NO: 200333 - DNA, 80 bp, synthetic construct; identical to SEQ ID NO: 15603
  source 1..80: mol_type = other DNA

SEQ ID NO: 200334 - DNA, 80 bp, synthetic construct; identical to SEQ ID NO: 15604
  source 1..80: mol_type = other DNA

SEQ ID NO: 200335 - DNA, 80 bp, synthetic construct; identical to SEQ ID NO: 15605
  source 1..80: mol_type = other DNA

SEQ ID NO: 200336 - DNA, 80 bp, synthetic construct; identical to SEQ ID NO: 15606
  source 1..80: mol_type = other DNA

SEQ ID NO: 200337 - DNA, 80 bp, synthetic construct; identical to SEQ ID NO: 15607
  source 1..80: mol_type = other DNA

SEQ ID NO: 200338 - DNA, 80 bp, synthetic construct; identical to SEQ ID NO: 15608
  source 1..80: mol_type = other DNA

SEQ ID NO: 200339 - DNA, 80 bp, synthetic construct; identical to SEQ ID NO: 15609
  source 1..80: mol_type = other DNA

SEQ ID NO: 200340 - DNA, 80 bp, synthetic construct; identical to SEQ ID NO: 15610
  source 1..80: mol_type = other DNA

SEQ ID NO: 200341 - DNA, 80 bp, synthetic construct; identical to SEQ ID NO: 15611
  source 1..80: mol_type = other DNA

SEQ ID NO: 200342 - DNA, 80 bp, synthetic construct; identical to SEQ ID NO: 15612
  source 1..80: mol_type = other DNA

SEQ ID NO: 200343 - DNA, 80 bp, synthetic construct; identical to SEQ ID NO: 15613
  source 1..80: mol_type = other DNA

SEQ ID NO: 200344 - DNA, 80 bp, synthetic construct; identical to SEQ ID NO: 15614
  source 1..80: mol_type = other DNA

SEQ ID NO: 200345 - DNA, 80 bp, synthetic construct; identical to SEQ ID NO: 15615
  source 1..80: mol_type = other DNA

SEQ ID NO: 200346 - DNA, 80 bp, synthetic construct; identical to SEQ ID NO: 15616
  source 1..80: mol_type = other DNA

SEQ ID NO: 200347 - DNA, 80 bp, synthetic construct; identical to SEQ ID NO: 15617
  source 1..80: mol_type = other DNA

SEQ ID NO: 200348 - DNA, 80 bp, synthetic construct; identical to SEQ ID NO: 15618
  source 1..80: mol_type = other DNA

SEQ ID NO: 200349 - DNA, 80 bp, synthetic construct; identical to SEQ ID NO: 15619
  source 1..80: mol_type = other DNA

SEQ ID NO: 200350 - DNA, 80 bp, synthetic construct; identical to SEQ ID NO: 15620
  source 1..80: mol_type = other DNA

SEQ ID NO: 200351 - DNA, 80 bp, synthetic construct; identical to SEQ ID NO: 15621
  source 1..80: mol_type = other DNA

SEQ ID NO: 200352 - DNA, 80 bp, synthetic construct; identical to SEQ ID NO: 15622
  source 1..80: mol_type = other DNA

SEQ ID NO: 200353 - DNA, 80 bp, synthetic construct; identical to SEQ ID NO: 15623
  source 1..80: mol_type = other DNA

SEQ ID NO: 200354 - DNA, 80 bp, synthetic construct; identical to SEQ ID NO: 15624
  source 1..80: mol_type = other DNA

SEQ ID NO: 200355 - DNA, 80 bp, synthetic construct; identical to SEQ ID NO: 15625
  source 1..80: mol_type = other DNA

SEQ ID NO: 200356 - DNA, 80 bp, synthetic construct; identical to SEQ ID NO: 15626
  source 1..80: mol_type = other DNA

SEQ ID NO: 200357 - DNA, 80 bp, synthetic construct; identical to SEQ ID NO: 15627
  source 1..80: mol_type = other DNA

SEQ ID NO: 200358 - DNA, 80 bp, synthetic construct; identical to SEQ ID NO: 15628
  source 1..80: mol_type = other DNA

SEQ ID NO: 200359 - DNA, 80 bp, synthetic construct; identical to SEQ ID NO: 15629
  source 1..80: mol_type = other DNA

SEQ ID NO: 200360 - DNA, 80 bp, synthetic construct; identical to SEQ ID NO: 15630
  source 1..80: mol_type = other DNA

SEQ ID NO: 200361 - DNA, 80 bp, synthetic construct; identical to SEQ ID NO: 15631
  source 1..80: mol_type = other DNA

SEQ ID NO: 200362 - DNA, 80 bp, synthetic construct; identical to SEQ ID NO: 15632
  source 1..80: mol_type = other DNA

SEQ ID NO: 200363 - DNA, 80 bp, synthetic construct; identical to SEQ ID NO: 15633
  source 1..80: mol_type = other DNA

SEQ ID NO: 200364 - DNA, 80 bp, synthetic construct; identical to SEQ ID NO: 15634
  source 1..80: mol_type = other DNA

SEQ ID NO: 200365 - DNA, 80 bp, synthetic construct; identical to SEQ ID NO: 15635
  source 1..80: mol_type = other DNA

SEQ ID NO: 200366 - DNA, 80 bp, synthetic construct; identical to SEQ ID NO: 15636
  source 1..80: mol_type = other DNA

SEQ ID NO: 200367 - DNA, 80 bp, synthetic construct; identical to SEQ ID NO: 15637
  source 1..80: mol_type = other DNA

SEQ ID NO: 200368 - DNA, 80 bp, synthetic construct; identical to SEQ ID NO: 15638
  source 1..80: mol_type = other DNA

SEQ ID NO: 200369 - DNA, 80 bp, synthetic construct; identical to SEQ ID NO: 15639
  source 1..80: mol_type = other DNA

SEQ ID NO: 200370 - DNA, 80 bp, synthetic construct; identical to SEQ ID NO: 15640
  source 1..80: mol_type = other DNA

SEQ ID NO: 200371 - DNA, 80 bp, synthetic construct; identical to SEQ ID NO: 15641
  source 1..80: mol_type = other DNA

SEQ ID NO: 200372 - DNA, 80 bp, synthetic construct; identical to SEQ ID NO: 15642
  source 1..80: mol_type = other DNA

SEQ ID NO: 200373 - DNA, 80 bp, synthetic construct; identical to SEQ ID NO: 15643
  source 1..80: mol_type = other DNA

SEQ ID NO: 200374 - DNA, 80 bp, synthetic construct; identical to SEQ ID NO: 15644
  source 1..80: mol_type = other DNA

SEQ ID NO: 200375 - DNA, 80 bp, synthetic construct; identical to SEQ ID NO: 15645
  source 1..80: mol_type = other DNA

SEQ ID NO: 200376 - DNA, 80 bp, synthetic construct; identical to SEQ ID NO: 15646
  source 1..80: mol_type = other DNA

SEQ ID NO: 200377 - DNA, 80 bp, synthetic construct; identical to SEQ ID NO: 15647
  source 1..80: mol_type = other DNA

SEQ ID NO: 200378 - DNA, 80 bp, synthetic construct; identical to SEQ ID NO: 15648
  source 1..80: mol_type = other DNA

SEQ ID NO: 200379 - DNA, 80 bp, synthetic construct; identical to SEQ ID NO: 15649
  source 1..80: mol_type = other DNA

SEQ ID NO: 200380 - DNA, 80 bp, synthetic construct; identical to SEQ ID NO: 15650
  source 1..80: mol_type = other DNA

SEQ ID NO: 200381 - DNA, 80 bp, synthetic construct; identical to SEQ ID NO: 15651
  source 1..80: mol_type = other DNA

SEQ ID NO: 200382 - DNA, 80 bp, synthetic construct; identical to SEQ ID NO: 15652
  source 1..80: mol_type = other DNA

SEQ ID NO: 200383 - DNA, 80 bp, synthetic construct; identical to SEQ ID NO: 15653
  source 1..80: mol_type = other DNA

SEQ ID NO: 200384 - DNA, 80 bp, synthetic construct; identical to SEQ ID NO: 15654
  source 1..80: mol_type = other DNA

SEQ ID NO: 200385 - DNA, 80 bp, synthetic construct; identical to SEQ ID NO: 15655
  source 1..80: mol_type = other DNA

SEQ ID NO: 200386 - DNA, 80 bp, synthetic construct; identical to SEQ ID NO: 15656
  source 1..80: mol_type = other DNA

SEQ ID NO: 200387 - DNA, 80 bp, synthetic construct; identical to SEQ ID NO: 15657
  source 1..80: mol_type = other DNA

SEQ ID NO: 200388 - DNA, 80 bp, synthetic construct; identical to SEQ ID NO: 15658
  source 1..80: mol_type = other DNA

SEQ ID NO: 200389 - DNA, 80 bp, synthetic construct; identical to SEQ ID NO: 15659
  source 1..80: mol_type = other DNA

SEQ ID NO: 200390 - DNA, 80 bp, synthetic construct; identical to SEQ ID NO: 15660
  source 1..80: mol_type = other DNA

SEQ ID NO: 200391 - DNA, 80 bp, synthetic construct; identical to SEQ ID NO: 15661
  source 1..80: mol_type = other DNA

SEQ ID NO: 200392 - DNA, 80 bp, synthetic construct; identical to SEQ ID NO: 15662
  source 1..80: mol_type = other DNA

SEQ ID NO: 200393 - DNA, 80 bp, synthetic construct; identical to SEQ ID NO: 15663
  source 1..80: mol_type = other DNA

SEQ ID NO: 200394 - DNA, 80 bp, synthetic construct; identical to SEQ ID NO: 15664
  source 1..80: mol_type = other DNA

SEQ ID NO: 200395 - DNA, 80 bp, synthetic construct; identical to SEQ ID NO: 15665
  source 1..80: mol_type = other DNA

SEQ ID NO: 200396 - DNA, 80 bp, synthetic construct; identical to SEQ ID NO: 15666
  source 1..80: mol_type = other DNA

SEQ ID NO: 200397 - DNA, 80 bp, synthetic construct; identical to SEQ ID NO: 15667
  source 1..80: mol_type = other DNA

SEQ ID NO: 200398 - DNA, 80 bp, synthetic construct; identical to SEQ ID NO: 15668
  source 1..80: mol_type = other DNA

SEQ ID NO: 200399 - DNA, 80 bp, synthetic construct; identical to SEQ ID NO: 15669
  source 1..80: mol_type = other DNA

SEQ ID NO: 200400 - DNA, 80 bp, synthetic construct; identical to SEQ ID NO: 15670
  source 1..80: mol_type = other DNA

SEQ ID NO: 200401 - DNA, 80 bp, synthetic construct; identical to SEQ ID NO: 15671
  source 1..80: mol_type = other DNA

SEQ ID NO: 200402 - DNA, 80 bp, synthetic construct; identical to SEQ ID NO: 15672
  source 1..80: mol_type = other DNA

SEQ ID NO: 200403 - DNA, 80 bp, synthetic construct; identical to SEQ ID NO: 15673
  source 1..80: mol_type = other DNA

SEQ ID NO: 200404 - DNA, 80 bp, synthetic construct; identical to SEQ ID NO: 15674
  source 1..80: mol_type = other DNA

SEQ ID NO: 200405 - DNA, 80 bp, synthetic construct; identical to SEQ ID NO: 15675
  source 1..80: mol_type = other DNA

SEQ ID NO: 200406 - DNA, 80 bp, synthetic construct; identical to SEQ ID NO: 15676
  source 1..80: mol_type = other DNA

SEQ ID NO: 200407 - DNA, 80 bp, synthetic construct; identical to SEQ ID NO: 15677
  source 1..80: mol_type = other DNA

SEQ ID NO: 200408 - DNA, 80 bp, synthetic construct; identical to SEQ ID NO: 15678
  source 1..80: mol_type = other DNA

SEQ ID NO: 200409 - DNA, 80 bp, synthetic construct; identical to SEQ ID NO: 15679
  source 1..80: mol_type = other DNA

SEQ ID NO: 200410 - DNA, 80 bp, synthetic construct; identical to SEQ ID NO: 15680
  source 1..80: mol_type = other DNA

SEQ ID NO: 200411 - DNA, 80 bp, synthetic construct; identical to SEQ ID NO: 15681
  source 1..80: mol_type = other DNA

SEQ ID NO: 200412 - DNA, 80 bp, synthetic construct; identical to SEQ ID NO: 15682
  source 1..80: mol_type = other DNA

SEQ ID NO: 200413 - DNA, 80 bp, synthetic construct; identical to SEQ ID NO: 15683
  source 1..80: mol_type = other DNA

SEQ ID NO: 200414 - DNA, 80 bp, synthetic construct; identical to SEQ ID NO: 15684
  source 1..80: mol_type = other DNA

SEQ ID NO: 200415 - DNA, 80 bp, synthetic construct; identical to SEQ ID NO: 15685
  source 1..80: mol_type = other DNA

SEQ ID NO: 200416 - DNA, 80 bp, synthetic construct; identical to SEQ ID NO: 15686
  source 1..80: mol_type = other DNA

SEQ ID NO: 200417 - DNA, 80 bp, synthetic construct; identical to SEQ ID NO: 15687
  source 1..80: mol_type = other DNA

SEQ ID NO: 200418 - DNA, 80 bp, synthetic construct; identical to SEQ ID NO: 15688
  source 1..80: mol_type = other DNA

SEQ ID NO: 200419 - DNA, 80 bp, synthetic construct; identical to SEQ ID NO: 15689
  source 1..80: mol_type = other DNA

SEQ ID NO: 200420 - DNA, 80 bp, synthetic construct; identical to SEQ ID NO: 15690
  source 1..80: mol_type = other DNA

SEQ ID NO: 200421 - DNA, 80 bp, synthetic construct; identical to SEQ ID NO: 15691
  source 1..80: mol_type = other DNA

SEQ ID NO: 200422 - DNA, 80 bp, synthetic construct; identical to SEQ ID NO: 15692
  source 1..80: mol_type = other DNA

SEQ ID NO: 200423 - DNA, 80 bp, synthetic construct; identical to SEQ ID NO: 15693
  source 1..80: mol_type = other DNA

SEQ ID NO: 200424 - DNA, 80 bp, synthetic construct; identical to SEQ ID NO: 15694
  source 1..80: mol_type = other DNA

SEQ ID NO: 200425 - DNA, 80 bp, synthetic construct; identical to SEQ ID NO: 15695
  source 1..80: mol_type = other DNA

SEQ ID NO: 200426 - DNA, 80 bp, synthetic construct; identical to SEQ ID NO: 15696
  source 1..80: mol_type = other DNA

SEQ ID NO: 200427 - DNA, 80 bp, synthetic construct; identical to SEQ ID NO: 15697
  source 1..80: mol_type = other DNA

SEQ ID NO: 200428 - DNA, 80 bp, synthetic construct; identical to SEQ ID NO: 15698
  source 1..80: mol_type = other DNA

SEQ ID NO: 200429 - DNA, 80 bp, synthetic construct; identical to SEQ ID NO: 15699
  source 1..80: mol_type = other DNA

SEQ ID NO: 200430 - DNA, 80 bp, synthetic construct; identical to SEQ ID NO: 15700
  source 1..80: mol_type = other DNA

SEQ ID NO: 200431 - DNA, 80 bp, synthetic construct; identical to SEQ ID NO: 15701
  source 1..80: mol_type = other DNA

SEQ ID NO: 200432 - DNA, 80 bp, synthetic construct; identical to SEQ ID NO: 15702
  source 1..80: mol_type = other DNA

SEQ ID NO: 200433 - DNA, 80 bp, synthetic construct; identical to SEQ ID NO: 15703
  source 1..80: mol_type = other DNA

SEQ ID NO: 200434 - DNA, 80 bp, synthetic construct; identical to SEQ ID NO: 15704
  source 1..80: mol_type = other DNA

SEQ ID NO: 200435 - DNA, 80 bp, synthetic construct; identical to SEQ ID NO: 15705
  source 1..80: mol_type = other DNA

SEQ ID NO: 200436 - DNA, 80 bp, synthetic construct; identical to SEQ ID NO: 15706
  source 1..80: mol_type = other DNA

SEQ ID NO: 200437 - DNA, 80 bp, synthetic construct; identical to SEQ ID NO: 15707
  source 1..80: mol_type = other DNA

SEQ ID NO: 200438 - DNA, 80 bp, synthetic construct; identical to SEQ ID NO: 15708
  source 1..80: mol_type = other DNA

SEQ ID NO: 200439 - DNA, 80 bp, synthetic construct; identical to SEQ ID NO: 15709
  source 1..80: mol_type = other DNA

SEQ ID NO: 200440 - DNA, 80 bp, synthetic construct; identical to SEQ ID NO: 15710
  source 1..80: mol_type = other DNA

SEQ ID NO: 200441 - DNA, 80 bp, synthetic construct; identical to SEQ ID NO: 15711
  source 1..80: mol_type = other DNA

SEQ ID NO: 200442 - DNA, 80 bp, synthetic construct; identical to SEQ ID NO: 15712
  source 1..80: mol_type = other DNA

SEQ ID NO: 200443 - DNA, 80 bp, synthetic construct; identical to SEQ ID NO: 15713
  source 1..80: mol_type = other DNA

SEQ ID NO: 200444 - DNA, 80 bp, synthetic construct; identical to SEQ ID NO: 15714
  source 1..80: mol_type = other DNA

SEQ ID NO: 200445 - DNA, 80 bp, synthetic construct; identical to SEQ ID NO: 15715
  source 1..80: mol_type = other DNA

SEQ ID NO: 200446 - DNA, 80 bp, synthetic construct; identical to SEQ ID NO: 15716
  source 1..80: mol_type = other DNA

SEQ ID NO: 200447 - DNA, 80 bp, synthetic construct; identical to SEQ ID NO: 15717
  source 1..80: mol_type = other DNA

SEQ ID NO: 200448 - DNA, 80 bp, synthetic construct; identical to SEQ ID NO: 15718
  source 1..80: mol_type = other DNA

SEQ ID NO: 200449 - DNA, 80 bp, synthetic construct; identical to SEQ ID NO: 15719
  source 1..80: mol_type = other DNA

SEQ ID NO: 200450 - DNA, 80 bp, synthetic construct; identical to SEQ ID NO: 15720
  source 1..80: mol_type = other DNA

SEQ ID NO: 200451 - DNA, 80 bp, synthetic construct; identical to SEQ ID NO: 15721
  source 1..80: mol_type = other DNA

SEQ ID NO: 200452 - DNA, 80 bp, synthetic construct; identical to SEQ ID NO: 15722
  source 1..80: mol_type = other DNA

SEQ ID NO: 200453 - DNA, 80 bp, synthetic construct; identical to SEQ ID NO: 15723
  source 1..80: mol_type = other DNA

SEQ ID NO: 200454 - DNA, 80 bp, synthetic construct; identical to SEQ ID NO: 15724
  source 1..80: mol_type = other DNA

SEQ ID NO: 200455 - DNA, 80 bp, synthetic construct; identical to SEQ ID NO: 15725
  source 1..80: mol_type = other DNA

SEQ ID NO: 200456 - DNA, 80 bp, synthetic construct; identical to SEQ ID NO: 15726
  source 1..80: mol_type = other DNA

SEQ ID NO: 200457 - DNA, 80 bp, synthetic construct; identical to SEQ ID NO: 15727
  source 1..80: mol_type = other DNA

SEQ ID NO: 200458 - DNA, 80 bp, synthetic construct; identical to SEQ ID NO: 15728
  source 1..80: mol_type = other DNA

SEQ ID NO: 200459 - DNA, 80 bp, synthetic construct; identical to SEQ ID NO: 15729
  source 1..80: mol_type = other DNA

SEQ ID NO: 200460 - DNA, 80 bp, synthetic construct; identical to SEQ ID NO: 15730
  source 1..80: mol_type = other DNA

SEQ ID NO: 200461 - DNA, 80 bp, synthetic construct; identical to SEQ ID NO: 15731
  source 1..80: mol_type = other DNA

SEQ ID NO: 200462 - DNA, 80 bp, synthetic construct; identical to SEQ ID NO: 15732
  source 1..80: mol_type = other DNA

SEQ ID NO: 200463 - DNA, 80 bp, synthetic construct; identical to SEQ ID NO: 15733
  source 1..80: mol_type = other DNA

SEQ ID NO: 200464 - DNA, 80 bp, synthetic construct; identical to SEQ ID NO: 15734
  source 1..80: mol_type = other DNA

SEQ ID NO: 200465 - DNA, 80 bp, synthetic construct; identical to SEQ ID NO: 15735
  source 1..80: mol_type = other DNA

SEQ ID NO: 200466 - DNA, 80 bp, synthetic construct; identical to SEQ ID NO: 15736
  source 1..80: mol_type = other DNA

SEQ ID NO: 200467 - DNA, 80 bp, synthetic construct; identical to SEQ ID NO: 15737
  source 1..80: mol_type = other DNA

SEQ ID NO: 200468 - DNA, 80 bp, synthetic construct; identical to SEQ ID NO: 15738
  source 1..80: mol_type = other DNA

SEQ ID NO: 200469 - DNA, 80 bp, synthetic construct; identical to SEQ ID NO: 15739
  source 1..80: mol_type = other DNA

SEQ ID NO: 200470 - DNA, 80 bp, synthetic construct; identical to SEQ ID NO: 15740
  source 1..80: mol_type = other DNA

SEQ ID NO: 200471 - DNA, 80 bp, synthetic construct; identical to SEQ ID NO: 15741
  source 1..80: mol_type = other DNA

SEQ ID NO: 200472 - DNA, 80 bp, synthetic construct; identical to SEQ ID NO: 15742
  source 1..80: mol_type = other DNA

SEQ ID NO: 200473 - DNA, 80 bp, synthetic construct; identical to SEQ ID NO: 15743
  source 1..80: mol_type = other DNA

SEQ ID NO: 200474 - DNA, 80 bp, synthetic construct; identical to SEQ ID NO: 15744
  source 1..80: mol_type = other DNA

SEQ ID NO: 200475 - DNA, 80 bp, synthetic construct; identical to SEQ ID NO: 15745
  source 1..80: mol_type = other DNA

SEQ ID NO: 200476 - DNA, 80 bp, synthetic construct; identical to SEQ ID NO: 15746
  source 1..80: mol_type = other DNA

SEQ ID NO: 200477 - DNA, 80 bp, synthetic construct; identical to SEQ ID NO: 15747
  source 1..80: mol_type = other DNA

SEQ ID NO: 200478 - DNA, 80 bp, synthetic construct; identical to SEQ ID NO: 15748
  source 1..80: mol_type = other DNA

SEQ ID NO: 200479 - DNA, 80 bp, synthetic construct; identical to SEQ ID NO: 15749
  source 1..80: mol_type = other DNA

SEQ ID NO: 200480 - DNA, 80 bp, synthetic construct; identical to SEQ ID NO: 15750
  source 1..80: mol_type = other DNA

SEQ ID NO: 200481 - DNA, 80 bp, synthetic construct; identical to SEQ ID NO: 15751
  source 1..80: mol_type = other DNA

SEQ ID NO: 200482 - DNA, 80 bp, synthetic construct; identical to SEQ ID NO: 15752
  source 1..80: mol_type = other DNA

SEQ ID NO: 200483 - DNA, 80 bp, synthetic construct; identical to SEQ ID NO: 15753
  source 1..80: mol_type = other DNA

SEQ ID NO: 200484 - DNA, 80 bp, synthetic construct; identical to SEQ ID NO: 15754
  source 1..80: mol_type = other DNA

SEQ ID NO: 200485 - DNA, 80 bp, synthetic construct; identical to SEQ ID NO: 15755
  source 1..80: mol_type = other DNA

SEQ ID NO: 200486 - DNA, 80 bp, synthetic construct; identical to SEQ ID NO: 15756
  source 1..80: mol_type = other DNA

SEQ ID NO: 200487 - DNA, 80 bp, synthetic construct; identical to SEQ ID NO: 15757
  source 1..80: mol_type = other DNA

SEQ ID NO: 200488 - DNA, 80 bp, synthetic construct; identical to SEQ ID NO: 15758
  source 1..80: mol_type = other DNA

SEQ ID NO: 200489 - DNA, 80 bp, synthetic construct; identical to SEQ ID NO: 15759
  source 1..80: mol_type = other DNA

SEQ ID NO: 200490 - DNA, 80 bp, synthetic construct; identical to SEQ ID NO: 15760
  source 1..80: mol_type = other DNA

SEQ ID NO: 200491 - DNA, 80 bp, synthetic construct; identical to SEQ ID NO: 15761
  source 1..80: mol_type = other DNA

SEQ ID NO: 200492 - DNA, 80 bp, synthetic construct; identical to SEQ ID NO: 15762
  source 1..80: mol_type = other DNA

SEQ ID NO: 200493 - DNA, 80 bp, synthetic construct; identical to SEQ ID NO: 15763
  source 1..80: mol_type = other DNA

SEQ ID NO: 200494 - DNA, 80 bp, synthetic construct; identical to SEQ ID NO: 15764
  source 1..80: mol_type = other DNA

SEQ ID NO: 200495 - DNA, 80 bp, synthetic construct; identical to SEQ ID NO: 15765
  source 1..80: mol_type = other DNA

SEQ ID NO: 200496 - DNA, 80 bp, synthetic construct; identical to SEQ ID NO: 15766
  source 1..80: mol_type = other DNA

SEQ ID NO: 200497 - DNA, 80 bp, synthetic construct; identical to SEQ ID NO: 15767
  source 1..80: mol_type = other DNA

SEQ ID NO: 200498 - DNA, 80 bp, synthetic construct; identical to SEQ ID NO: 15768
  source 1..80: mol_type = other DNA

SEQ ID NO: 200499 - DNA, 80 bp, synthetic construct; identical to SEQ ID NO: 15769
  source 1..80: mol_type = other DNA

SEQ ID NO: 200500 - DNA, 80 bp, synthetic construct; identical to SEQ ID NO: 15770
  source 1..80: mol_type = other DNA

SEQ ID NO: 200501 - DNA, 80 bp, synthetic construct; identical to SEQ ID NO: 15771
  source 1..80: mol_type = other DNA

SEQ ID NO: 200502 - DNA, 80 bp, synthetic construct; identical to SEQ ID NO: 15772
  source 1..80: mol_type = other DNA

SEQ ID NO: 200503 - DNA, 80 bp, synthetic construct; identical to SEQ ID NO: 15773
  source 1..80: mol_type = other DNA

SEQ ID NO: 200504 - DNA, 80 bp, synthetic construct; identical to SEQ ID NO: 15774
  source 1..80: mol_type = other DNA

SEQ ID NO: 200505 - DNA, 80 bp, synthetic construct; identical to SEQ ID NO: 15775
  source 1..80: mol_type = other DNA

SEQ ID NO: 200506 - DNA, 80 bp, synthetic construct; identical to SEQ ID NO: 15776
  source 1..80: mol_type = other DNA

SEQ ID NO: 200507 - DNA, 80 bp, synthetic construct; identical to SEQ ID NO: 15777
  source 1..80: mol_type = other DNA

SEQ ID NO: 200508 - DNA, 80 bp, synthetic construct; identical to SEQ ID NO: 15778
  source 1..80: mol_type = other DNA

SEQ ID NO: 200509 - DNA, 80 bp, synthetic construct; identical to SEQ ID NO: 15779
  source 1..80: mol_type = other DNA

SEQ ID NO: 200510 - DNA, 80 bp, synthetic construct; identical to SEQ ID NO: 15780
  source 1..80: mol_type = other DNA

SEQ ID NO: 200511 - DNA, 80 bp, synthetic construct; identical to SEQ ID NO: 15781
  source 1..80: mol_type = other DNA

SEQ ID NO: 200512 - DNA, 80 bp, synthetic construct; identical to SEQ ID NO: 15782
  source 1..80: mol_type = other DNA

SEQ ID NO: 200513 - DNA, 80 bp, synthetic construct; identical to SEQ ID NO: 15783
  source 1..80: mol_type = other DNA

SEQ ID NO: 200514 - DNA, 80 bp, synthetic construct; identical to SEQ ID NO: 15784
  source 1..80: mol_type = other DNA

SEQ ID NO: 200515 - DNA, 80 bp, synthetic construct; identical to SEQ ID NO: 15785
  source 1..80: mol_type = other DNA

SEQ ID NO: 200516 - DNA, 80 bp, synthetic construct; identical to SEQ ID NO: 15786
  source 1..80: mol_type = other DNA

SEQ ID NO: 200517 - DNA, 80 bp, synthetic construct; identical to SEQ ID NO: 15787
  source 1..80: mol_type = other DNA

SEQ ID NO: 200518 - DNA, 80 bp, synthetic construct; identical to SEQ ID NO: 15788
  source 1..80: mol_type = other DNA

SEQ ID NO: 200519 - DNA, 80 bp, synthetic construct; identical to SEQ ID NO: 15789
  source 1..80: mol_type = other DNA

SEQ ID NO: 200520 - DNA, 80 bp, synthetic construct; identical to SEQ ID NO: 15790
  source 1..80: mol_type = other DNA

SEQ ID NO: 200521 - DNA, 80 bp, synthetic construct; identical to SEQ ID NO: 15791
  source 1..80: mol_type = other DNA

SEQ ID NO: 200522 - DNA, 80 bp, synthetic construct; identical to SEQ ID NO: 15792
  source 1..80: mol_type = other DNA

SEQ ID NO: 200523 - DNA, 80 bp, synthetic construct; identical to SEQ ID NO: 15793
  source 1..80: mol_type = other DNA

SEQ ID NO: 200524 - DNA, 80 bp, synthetic construct; identical to SEQ ID NO: 15794
  source 1..80: mol_type = other DNA

SEQ ID NO: 200525 - DNA, 80 bp, synthetic construct; identical to SEQ ID NO: 15795
  source 1..80: mol_type = other DNA

SEQ ID NO: 200526 - DNA, 80 bp, synthetic construct; identical to SEQ ID NO: 15796
  source 1..80: mol_type = other DNA

SEQ ID NO: 200527 - DNA, 80 bp, synthetic construct; identical to SEQ ID NO: 15797
  source 1..80: mol_type = other DNA

SEQ ID NO: 200528 - DNA, 80 bp, synthetic construct; identical to SEQ ID NO: 15798
  source 1..80: mol_type = other DNA

SEQ ID NO: 200529 - DNA, 80 bp, synthetic construct; identical to SEQ ID NO: 15799
  source 1..80: mol_type = other DNA

SEQ ID NO: 200530 - DNA, 80 bp, synthetic construct; identical to SEQ ID NO: 15800
  source 1..80: mol_type = other DNA

SEQ ID NO: 200531 - DNA, 80 bp, synthetic construct; identical to SEQ ID NO: 15801
  source 1..80: mol_type = other DNA

SEQ ID NO: 200532 - DNA, 80 bp, synthetic construct; identical to SEQ ID NO: 15802
  source 1..80: mol_type = other DNA

SEQ ID NO: 200533 - DNA, 80 bp, synthetic construct; identical to SEQ ID NO: 15803
  source 1..80: mol_type = other DNA

SEQ ID NO: 200534 - DNA, 80 bp, synthetic construct; identical to SEQ ID NO: 15804
  source 1..80: mol_type = other DNA

SEQ ID NO: 200535 - DNA, 80 bp, synthetic construct; identical to SEQ ID NO: 15805
  source 1..80: mol_type = other DNA

SEQ ID NO: 200536 - DNA, 80 bp, synthetic construct; identical to SEQ ID NO: 15806
  source 1..80: mol_type = other DNA

SEQ ID NO: 200537 - DNA, 80 bp, synthetic construct; identical to SEQ ID NO: 15807
  source 1..80: mol_type = other DNA

SEQ ID NO: 200538 - DNA, 80 bp, synthetic construct; identical to SEQ ID NO: 15808
  source 1..80: mol_type = other DNA

SEQ ID NO: 200539 - DNA, 80 bp, synthetic construct; identical to SEQ ID NO: 15809
  source 1..80: mol_type = other DNA

SEQ ID NO: 200540 - DNA, 80 bp, synthetic construct; identical to SEQ ID NO: 15810
  source 1..80: mol_type = other DNA

SEQ ID NO: 200541 - DNA, 80 bp, synthetic construct; identical to SEQ ID NO: 15811
  source 1..80: mol_type = other DNA

SEQ ID NO: 200542 - DNA, 80 bp, synthetic construct; identical to SEQ ID NO: 15812
  source 1..80: mol_type = other DNA

SEQ ID NO: 200543 - DNA, 80 bp, synthetic construct; identical to SEQ ID NO: 15813
  source 1..80: mol_type = other DNA

SEQ ID NO: 200544 - DNA, 80 bp, synthetic construct; identical to SEQ ID NO: 15814
  source 1..80: mol_type = other DNA

SEQ ID NO: 200545 - DNA, 80 bp, synthetic construct; identical to SEQ ID NO: 15815
  source 1..80: mol_type = other DNA

SEQ ID NO: 200546 - DNA, 80 bp, synthetic construct; identical to SEQ ID NO: 15816
  source 1..80: mol_type = other DNA

SEQ ID NO: 200547 - DNA, 80 bp, synthetic construct; identical to SEQ ID NO: 15817
  source 1..80: mol_type = other DNA

SEQ ID NO: 200548 - DNA, 80 bp, synthetic construct; identical to SEQ ID NO: 15818
  source 1..80: mol_type = other DNA

SEQ ID NO: 200549 - DNA, 80 bp, synthetic construct; identical to SEQ ID NO: 15819
  source 1..80: mol_type = other DNA

SEQ ID NO: 200550 - DNA, 80 bp, synthetic construct; identical to SEQ ID NO: 15820
  source 1..80: mol_type = other DNA

SEQ ID NO: 200551 - DNA, 80 bp, synthetic construct; identical to SEQ ID NO: 15821
  source 1..80: mol_type = other DNA

SEQ ID NO: 200552 - DNA, 80 bp, synthetic construct; identical to SEQ ID NO: 15822
  source 1..80: mol_type = other DNA

SEQ ID NO: 200553 - DNA, 80 bp, synthetic construct; identical to SEQ ID NO: 15823
  source 1..80: mol_type = other DNA

SEQ ID NO: 200554 - DNA, 80 bp, synthetic construct; identical to SEQ ID NO: 15824
  source 1..80: mol_type = other DNA

SEQ ID NO: 200555 - DNA, 80 bp, synthetic construct; identical to SEQ ID NO: 15825
  source 1..80: mol_type = other DNA

SEQ ID NO: 200556 - DNA, 80 bp, synthetic construct; identical to SEQ ID NO: 15826
  source 1..80: mol_type = other DNA

SEQ ID NO: 200557 - DNA, 80 bp, synthetic construct; identical to SEQ ID NO: 15827
  source 1..80: mol_type = other DNA

SEQ ID NO: 200558 - DNA, 80 bp, synthetic construct; identical to SEQ ID NO: 15828
  source 1..80: mol_type = other DNA

SEQ ID NO: 200559 - DNA, 80 bp, synthetic construct; identical to SEQ ID NO: 15829
  source 1..80: mol_type = other DNA

SEQ ID NO: 200560 - DNA, 80 bp, synthetic construct; identical to SEQ ID NO: 15830
  source 1..80: mol_type = other DNA

SEQ ID NO: 200561 - DNA, 80 bp, synthetic construct; identical to SEQ ID NO: 15831
  source 1..80: mol_type = other DNA

SEQ ID NO: 200562 - DNA, 80 bp, synthetic construct; identical to SEQ ID NO: 15832
  source 1..80: mol_type = other DNA

SEQ ID NO: 200563 - DNA, 80 bp, synthetic construct; identical to SEQ ID NO: 15833
  source 1..80: mol_type = other DNA

SEQ ID NO: 200564 - DNA, 80 bp, synthetic construct; identical to SEQ ID NO: 15834
  source 1..80: mol_type = other DNA

SEQ ID NO: 200565 - DNA, 80 bp, synthetic construct; identical to SEQ ID NO: 15835
  source 1..80: mol_type = other DNA

SEQ ID NO: 200566 - DNA, 80 bp, synthetic construct; identical to SEQ ID NO: 15836
  source 1..80: mol_type = other DNA

SEQ ID NO: 200567 - DNA, 80 bp, synthetic construct; identical to SEQ ID NO: 15837
  source 1..80: mol_type = other DNA

SEQ ID NO: 200568 - DNA, 80 bp, synthetic construct; identical to SEQ ID NO: 15838
  source 1..80: mol_type = other DNA

SEQ ID NO: 200569 - DNA, 80 bp, synthetic construct; identical to SEQ ID NO: 15839
  source 1..80: mol_type = other DNA

SEQ ID NO: 200570 - DNA, 80 bp, synthetic construct; identical to SEQ ID NO: 15840
  source 1..80: mol_type = other DNA

SEQ ID NO: 200571 - DNA, 80 bp, synthetic construct; identical to SEQ ID NO: 15841
  source 1..80: mol_type = other DNA

SEQ ID NO: 200572 - DNA, 80 bp, synthetic construct; identical to SEQ ID NO: 15842
  source 1..80: mol_type = other DNA

SEQ ID NO: 200573 - DNA, 80 bp, synthetic construct; identical to SEQ ID NO: 15843
  source 1..80: mol_type = other DNA

SEQ ID NO: 200574 - DNA, 80 bp, synthetic construct; identical to SEQ ID NO: 15844
  source 1..80: mol_type = other DNA

SEQ ID NO: 200575 - DNA, 80 bp, synthetic construct; identical to SEQ ID NO: 15845
  source 1..80: mol_type = other DNA

SEQ ID NO: 200576 - DNA, 80 bp, synthetic construct; identical to SEQ ID NO: 15846
  source 1..80: mol_type = other DNA

SEQ ID NO: 200577 - DNA, 80 bp, synthetic construct; identical to SEQ ID NO: 15847
  source 1..80: mol_type = other DNA

SEQ ID NO: 200578 - DNA, 80 bp, synthetic construct; identical to SEQ ID NO: 15848
  source 1..80: mol_type = other DNA

SEQ ID NO: 200579 - DNA, 80 bp, synthetic construct; identical to SEQ ID NO: 15849
  source 1..80: mol_type = other DNA

SEQ ID NO: 200580 - DNA, 80 bp, synthetic construct; identical to SEQ ID NO: 15850
  source 1..80: mol_type = other DNA

SEQ ID NO: 200581 - DNA, 80 bp, synthetic construct; identical to SEQ ID NO: 15851
  source 1..80: mol_type = other DNA

SEQ ID NO: 200582 - DNA, 80 bp, synthetic construct; identical to SEQ ID NO: 15852
  source 1..80: mol_type = other DNA

SEQ ID NO: 200583 - DNA, 80 bp, synthetic construct; identical to SEQ ID NO: 15853
  source 1..80: mol_type = other DNA

SEQ ID NO: 200584 - DNA, 80 bp, synthetic construct; identical to SEQ ID NO: 15854
  source 1..80: mol_type = other DNA

SEQ ID NO: 200585 - DNA, 80 bp, synthetic construct; identical to SEQ ID NO: 15855
  source 1..80: mol_type = other DNA

SEQ ID NO: 200586 - DNA, 80 bp, synthetic construct; identical to SEQ ID NO: 15856
  source 1..80: mol_type = other DNA

SEQ ID NO: 200587 - DNA, 80 bp, synthetic construct; identical to SEQ ID NO: 15857
  source 1..80: mol_type = other DNA

SEQ ID NO: 200588 - DNA, 80 bp, synthetic construct; identical to SEQ ID NO: 15858
  source 1..80: mol_type = other DNA

SEQ ID NO: 200589 - DNA, 80 bp, synthetic construct; identical to SEQ ID NO: 15859
  source 1..80: mol_type = other DNA

SEQ ID NO: 200590 - DNA, 80 bp, synthetic construct; identical to SEQ ID NO: 15860
  source 1..80: mol_type = other DNA

SEQ ID NO: 200591 - DNA, 80 bp, synthetic construct; identical to SEQ ID NO: 15861
  source 1..80: mol_type = other DNA

SEQ ID NO: 200592 - DNA, 80 bp, synthetic construct; identical to SEQ ID NO: 15862
  source 1..80: mol_type = other DNA

SEQ ID NO: 200593 - DNA, 80 bp, synthetic construct; identical to SEQ ID NO: 15863
  source 1..80: mol_type = other DNA

SEQ ID NO: 200594 - DNA, 80 bp, synthetic construct; identical to SEQ ID NO: 15864
  source 1..80: mol_type = other DNA

SEQ ID NO: 200595 - DNA, 80 bp, synthetic construct; identical to SEQ ID NO: 15865
  source 1..80: mol_type = other DNA

SEQ ID NO: 200596 - DNA, 80 bp, synthetic construct; identical to SEQ ID NO: 15866
  source 1..80: mol_type = other DNA

SEQ ID NO: 200597 - DNA, 80 bp, synthetic construct; identical to SEQ ID NO: 15867
  source 1..80: mol_type = other DNA

SEQ ID NO: 200598 - DNA, 80 bp, synthetic construct; identical to SEQ ID NO: 15868
  source 1..80: mol_type = other DNA

SEQ ID NO: 200599 - DNA, 80 bp, synthetic construct; identical to SEQ ID NO: 15869
  source 1..80: mol_type = other DNA

SEQ ID NO: 200600 - DNA, 80 bp, synthetic construct; identical to SEQ ID NO: 15870
  source 1..80: mol_type = other DNA

SEQ ID NO: 200601 - DNA, 80 bp, synthetic construct; identical to SEQ ID NO: 15871
  source 1..80: mol_type = other DNA

SEQ ID NO: 200602 - DNA, 80 bp, synthetic construct; identical to SEQ ID NO: 15872
  source 1..80: mol_type = other DNA

SEQ ID NO: 200603 - DNA, 80 bp, synthetic construct; identical to SEQ ID NO: 15873
  source 1..80: mol_type = other DNA

SEQ ID NO: 200604 - DNA, 80 bp, synthetic construct; identical to SEQ ID NO: 15874
  source 1..80: mol_type = other DNA

SEQ ID NO: 200605 - DNA, 80 bp, synthetic construct; identical to SEQ ID NO: 15875
  source 1..80: mol_type = other DNA

SEQ ID NO: 200606 - DNA, 80 bp, synthetic construct; identical to SEQ ID NO: 15876
  source 1..80: mol_type = other DNA

SEQ ID NO: 200607 - DNA, 80 bp, synthetic construct; identical to SEQ ID NO: 15877
  source 1..80: mol_type = other DNA

SEQ ID NO: 200608 - DNA, 80 bp, synthetic construct; identical to SEQ ID NO: 15878
  source 1..80: mol_type = other DNA

SEQ ID NO: 200609 - DNA, 80 bp, synthetic construct; identical to SEQ ID NO: 15879
  source 1..80: mol_type = other DNA

SEQ ID NO: 200610 - DNA, 80 bp, synthetic construct; identical to SEQ ID NO: 15880
  source 1..80: mol_type = other DNA

SEQ ID NO: 200611 - DNA, 80 bp, synthetic construct; identical to SEQ ID NO: 15881
  source 1..80: mol_type = other DNA

SEQ ID NO: 200612 - DNA, 80 bp, synthetic construct; identical to SEQ ID NO: 15882
  source 1..80: mol_type = other DNA

SEQ ID NO: 200613 - DNA, 80 bp, synthetic construct; identical to SEQ ID NO: 15883
  source 1..80: mol_type = other DNA

SEQ ID NO: 200614 - DNA, 80 bp, synthetic construct; identical to SEQ ID NO: 15884
  source 1..80: mol_type = other DNA

SEQ ID NO: 200615 - DNA, 80 bp, synthetic construct; identical to SEQ ID NO: 15885
  source 1..80: mol_type = other DNA

SEQ ID NO: 200616 - DNA, 80 bp, synthetic construct; identical to SEQ ID NO: 15886
  source 1..80: mol_type = other DNA

SEQ ID NO: 200617 - DNA, 80 bp, synthetic construct; identical to SEQ ID NO: 15887
  source 1..80: mol_type = other DNA

SEQ ID NO: 200618 - DNA, 80 bp, synthetic construct; identical to SEQ ID NO: 15888
  source 1..80: mol_type = other DNA

SEQ ID NO: 200619 - DNA, 80 bp, synthetic construct; identical to SEQ ID NO: 15889
  source 1..80: mol_type = other DNA

SEQ ID NO: 200620 - DNA, 80 bp, synthetic construct; identical to SEQ ID NO: 15890
  source 1..80: mol_type = other DNA

SEQ ID NO: 200621 - DNA, 80 bp, synthetic construct; identical to SEQ ID NO: 15891
  source 1..80: mol_type = other DNA

SEQ ID NO: 200622 - DNA, 80 bp, synthetic construct; identical to SEQ ID NO: 15892
  source 1..80: mol_type = other DNA

SEQ ID NO: 200623 - DNA, 80 bp, synthetic construct; identical to SEQ ID NO: 15893
  source 1..80: mol_type = other DNA

SEQ ID NO: 200624 - DNA, 80 bp, synthetic construct; identical to SEQ ID NO: 15894
  source 1..80: mol_type = other DNA

SEQ ID NO: 200625 - DNA, 80 bp, synthetic construct; identical to SEQ ID NO: 15895
  source 1..80: mol_type = other DNA

SEQ ID NO: 200626 - DNA, 80 bp, synthetic construct; identical to SEQ ID NO: 15896
  source 1..80: mol_type = other DNA

SEQ ID NO: 200627 - DNA, 80 bp, synthetic construct; identical to SEQ ID NO: 15897
  source 1..80: mol_type = other DNA

SEQ ID NO: 200628 - DNA, 80 bp, synthetic construct; identical to SEQ ID NO: 15898
  source 1..80: mol_type = other DNA

SEQ ID NO: 200629 - DNA, 80 bp, synthetic construct; identical to SEQ ID NO: 15899
  source 1..80: mol_type = other DNA

SEQ ID NO: 200630 - DNA, 80 bp, synthetic construct; identical to SEQ ID NO: 15900
  source 1..80: mol_type = other DNA

SEQ ID NO: 200631 - DNA, 80 bp, synthetic construct; identical to SEQ ID NO: 15901
  source 1..80: mol_type = other DNA

SEQ ID NO: 200632 - DNA, 80 bp, synthetic construct; identical to SEQ ID NO: 15902
  source 1..80: mol_type = other DNA

SEQ ID NO: 200633 - DNA, 80 bp, synthetic construct; identical to SEQ ID NO: 15903
  source 1..80: mol_type = other DNA

SEQ ID NO: 200634 - DNA, 80 bp, synthetic construct; identical to SEQ ID NO: 15904
  source 1..80: mol_type = other DNA

SEQ ID NO: 200635 - DNA, 80 bp, synthetic construct; identical to SEQ ID NO: 15905
  source 1..80: mol_type = other DNA

SEQ ID NO: 200636 - DNA, 80 bp, synthetic construct; identical to SEQ ID NO: 15906
  source 1..80: mol_type = other DNA

SEQ ID NO: 200637 - DNA, 80 bp, synthetic construct; identical to SEQ ID NO: 15907
  source 1..80: mol_type = other DNA

SEQ ID NO: 200638 - DNA, 80 bp, synthetic construct; identical to SEQ ID NO: 15908
  source 1..80: mol_type = other DNA

SEQ ID NO: 200639 - DNA, 80 bp, synthetic construct; identical to SEQ ID NO: 15909
  source 1..80: mol_type = other DNA

SEQ ID NO: 200640 - DNA, 80 bp, synthetic construct; identical to SEQ ID NO: 15910
  source 1..80: mol_type = other DNA

SEQ ID NO: 200641 - DNA, 80 bp, synthetic construct; identical to SEQ ID NO: 15911
  source 1..80: mol_type = other DNA

SEQ ID NO: 200642 - DNA, 80 bp, synthetic construct; identical to SEQ ID NO: 15912
  source 1..80: mol_type = other DNA

SEQ ID NO: 200643 - DNA, 80 bp, synthetic construct; identical to SEQ ID NO: 15913
  source 1..80: mol_type = other DNA

SEQ ID NO: 200644 - DNA, 80 bp, synthetic construct; identical to SEQ ID NO: 15914
  source 1..80: mol_type = other DNA

SEQ ID NO: 200645 - DNA, 80 bp, synthetic construct; identical to SEQ ID NO: 15915
  source 1..80: mol_type = other DNA

SEQ ID NO: 200646 - DNA, 80 bp, synthetic construct; identical to SEQ ID NO: 15916
  source 1..80: mol_type = other DNA

SEQ ID NO: 200647 - DNA, 80 bp, synthetic construct; identical to SEQ ID NO: 15917
  source 1..80: mol_type = other DNA

SEQ ID NO: 200648 - DNA, 80 bp, synthetic construct; identical to SEQ ID NO: 15918
  source 1..80: mol_type = other DNA

SEQ ID NO: 200649 - DNA, 80 bp, synthetic construct; identical to SEQ ID NO: 15919
  source 1..80: mol_type = other DNA

SEQ ID NO: 200650 - DNA, 80 bp, synthetic construct; identical to SEQ ID NO: 15920
  source 1..80: mol_type = other DNA

SEQ ID NO: 200651 - DNA, 80 bp, synthetic construct; identical to SEQ ID NO: 15921
  source 1..80: mol_type = other DNA

SEQ ID NO: 200652 - DNA, 80 bp, synthetic construct; identical to SEQ ID NO: 15922
  source 1..80: mol_type = other DNA

SEQ ID NO: 200653 - DNA, 80 bp, synthetic construct; identical to SEQ ID NO: 15923
  source 1..80: mol_type = other DNA

SEQ ID NO: 200654 - DNA, 80 bp, synthetic construct; identical to SEQ ID NO: 15924
  source 1..80: mol_type = other DNA

SEQ ID NO: 200655 - DNA, 80 bp, synthetic construct; identical to SEQ ID NO: 15925
  source 1..80: mol_type = other DNA

SEQ ID NO: 200656 - DNA, 80 bp, synthetic construct; identical to SEQ ID NO: 15926
  source 1..80: mol_type = other DNA

SEQ ID NO: 200657 - DNA, 80 bp, synthetic construct; identical to SEQ ID NO: 15927
  source 1..80: mol_type = other DNA

SEQ ID NO: 200658 - DNA, 80 bp, synthetic construct; identical to SEQ ID NO: 15928
  source 1..80: mol_type = other DNA

SEQ ID NO: 200659 - DNA, 80 bp, synthetic construct; identical to SEQ ID NO: 15929
  source 1..80: mol_type = other DNA

SEQ ID NO: 200660 - DNA, 80 bp, synthetic construct; identical to SEQ ID NO: 15930
  source 1..80: mol_type = other DNA

SEQ ID NO: 200661 - DNA, 80 bp, synthetic construct; identical to SEQ ID NO: 15931
  source 1..80: mol_type = other DNA

SEQ ID NO: 200662 - DNA, 80 bp, synthetic construct; identical to SEQ ID NO: 15932
  source 1..80: mol_type = other DNA

SEQ ID NO: 200663 - DNA, 80 bp, synthetic construct; identical to SEQ ID NO: 15933
  source 1..80: mol_type = other DNA

SEQ ID NO: 200664 - DNA, 80 bp, synthetic construct; identical to SEQ ID NO: 15934
  source 1..80: mol_type = other DNA

SEQ ID NO: 200665 - DNA, 80 bp, synthetic construct; identical to SEQ ID NO: 15935
  source 1..80: mol_type = other DNA

SEQ ID NO: 200666 - DNA, 80 bp, synthetic construct; identical to SEQ ID NO: 15936
  source 1..80: mol_type = other DNA

SEQ ID NO: 200667 - DNA, 80 bp, synthetic construct; identical to SEQ ID NO: 15937
  source 1..80: mol_type = other DNA

SEQ ID NO: 200668 - DNA, 80 bp, synthetic construct; identical to SEQ ID NO: 15938
  source 1..80: mol_type = other DNA

SEQ ID NO: 200669 - DNA, 80 bp, synthetic construct; identical to SEQ ID NO: 15939
  source 1..80: mol_type = other DNA

SEQ ID NO: 200670 - DNA, 80 bp, synthetic construct; identical to SEQ ID NO: 15940
  source 1..80: mol_type = other DNA

SEQ ID NO: 200671 - DNA, 80 bp, synthetic construct; identical to SEQ ID NO: 15941
  source 1..80: mol_type = other DNA

SEQ ID NO: 200672 - DNA, 80 bp, synthetic construct; identical to SEQ ID NO: 15942
  source 1..80: mol_type = other DNA

SEQ ID NO: 200673 - DNA, 80 bp, synthetic construct; identical to SEQ ID NO: 15943
  source 1..80: mol_type = other DNA

SEQ ID NO: 200674 - DNA, 80 bp, synthetic construct; identical to SEQ ID NO: 15944
  source 1..80: mol_type = other DNA

SEQ ID NO: 200675 - DNA, 80 bp, synthetic construct; identical to SEQ ID NO: 15945
  source 1..80: mol_type = other DNA

SEQ ID NO: 200676 - DNA, 80 bp, synthetic construct; identical to SEQ ID NO: 15946
  source 1..80: mol_type = other DNA

SEQ ID NO: 200677 - DNA, 80 bp, synthetic construct; identical to SEQ ID NO: 15947
  source 1..80: mol_type = other DNA

SEQ ID NO: 200678 - DNA, 80 bp, synthetic construct; identical to SEQ ID NO: 15948
  source 1..80: mol_type = other DNA

SEQ ID NO: 200679 - DNA, 80 bp, synthetic construct; identical to SEQ ID NO: 15949
  source 1..80: mol_type = other DNA

SEQ ID NO: 200680 - DNA, 80 bp, synthetic construct; identical to SEQ ID NO: 15950
  source 1..80: mol_type = other DNA

SEQ ID NO: 200681 - DNA, 80 bp, synthetic construct; identical to SEQ ID NO: 15951
  source 1..80: mol_type = other DNA

SEQ ID NO: 200682 - DNA, 80 bp, synthetic construct; identical to SEQ ID NO: 15952
  source 1..80: mol_type = other DNA

SEQ ID NO: 200683 - DNA, 80 bp, synthetic construct; identical to SEQ ID NO: 15953
  source 1..80: mol_type = other DNA

SEQ ID NO: 200684 - DNA, 80 bp, synthetic construct; identical to SEQ ID NO: 15954
  source 1..80: mol_type = other DNA

SEQ ID NO: 200685 - DNA, 80 bp, synthetic construct; identical to SEQ ID NO: 15955
  source 1..80: mol_type = other DNA

SEQ ID NO: 200686 - DNA, 80 bp, synthetic construct; identical to SEQ ID NO: 15956
  source 1..80: mol_type = other DNA

SEQ ID NO: 200687 - DNA, 80 bp, synthetic construct; identical to SEQ ID NO: 15957
  source 1..80: mol_type = other DNA

SEQ ID NO: 200688 - DNA, 80 bp, synthetic construct; identical to SEQ ID NO: 15958
  source 1..80: mol_type = other DNA

SEQ ID NO: 200689 - DNA, 80 bp, synthetic construct; identical to SEQ ID NO: 15959
  source 1..80: mol_type = other DNA

SEQ ID NO: 200690 - DNA, 80 bp, synthetic construct; identical to SEQ ID NO: 15960
  source 1..80: mol_type = other DNA

SEQ ID NO: 200691 - DNA, 80 bp, synthetic construct; identical to SEQ ID NO: 15961
  source 1..80: mol_type = other DNA

SEQ ID NO: 200692 - DNA, 80 bp, synthetic construct; identical to SEQ ID NO: 15962
  source 1..80: mol_type = other DNA

SEQ ID NO: 200693 - DNA, 80 bp, synthetic construct; identical to SEQ ID NO: 15963
  source 1..80: mol_type = other DNA

SEQ ID NO: 200694 - DNA, 80 bp, synthetic construct; identical to SEQ ID NO: 15964
  source 1..80: mol_type = other DNA

SEQ ID NO: 200695 - DNA, 80 bp, synthetic construct; identical to SEQ ID NO: 15965
  source 1..80: mol_type = other DNA

SEQ ID NO: 200696 - DNA, 80 bp, synthetic construct; identical to SEQ ID NO: 15966
  source 1..80: mol_type = other DNA

SEQ ID NO: 200697 - DNA, 80 bp, synthetic construct; identical to SEQ ID NO: 15967
  source 1..80: mol_type = other DNA

SEQ ID NO: 200698 - DNA, 80 bp, synthetic construct; identical to SEQ ID NO: 15968
  source 1..80: mol_type = other DNA

SEQ ID NO: 200699 - DNA, 80 bp, synthetic construct; identical to SEQ ID NO: 15969
  source 1..80: mol_type = other DNA

SEQ ID NO: 200700 - DNA, 80 bp, synthetic construct; identical to SEQ ID NO: 15970
  source 1..80: mol_type = other DNA

SEQ ID NO: 200701 - DNA, 80 bp, synthetic construct; identical to SEQ ID NO: 15971
  source 1..80: mol_type = other DNA

SEQ ID NO: 200702 - DNA, 80 bp, synthetic construct; identical to SEQ ID NO: 15972
  source 1..80: mol_type = other DNA

SEQ ID NO: 200703 - DNA, 80 bp, synthetic construct; identical to SEQ ID NO: 15973
  source 1..80: mol_type = other DNA

SEQ ID NO: 200704 - DNA, 80 bp, synthetic construct; identical to SEQ ID NO: 15974
  source 1..80: mol_type = other DNA

SEQ ID NO: 200705 - DNA, 80 bp, synthetic construct; identical to SEQ ID NO: 15975
  source 1..80: mol_type = other DNA

SEQ ID NO: 200706 - DNA, 80 bp, synthetic construct; identical to SEQ ID NO: 15976
  source 1..80: mol_type = other DNA

SEQ ID NO: 200707 - DNA, 80 bp, synthetic construct; identical to SEQ ID NO: 15977
  source 1..80: mol_type = other DNA

SEQ ID NO: 200708 - DNA, 80 bp, synthetic construct; identical to SEQ ID NO: 15978
  source 1..80: mol_type = other DNA

SEQ ID NO: 200709 - DNA, 80 bp, synthetic construct; identical to SEQ ID NO: 15979
  source 1..80: mol_type = other DNA

SEQ ID NO: 200710 - DNA, 80 bp, synthetic construct; identical to SEQ ID NO: 15980
  source 1..80: mol_type = other DNA

SEQ ID NO: 200711 - DNA, 80 bp, synthetic construct; identical to SEQ ID NO: 15981
  source 1..80: mol_type = other DNA

SEQ ID NO: 200712 - DNA, 80 bp, synthetic construct; identical to SEQ ID NO: 15982
  source 1..80: mol_type = other DNA

SEQ ID NO: 200713 - DNA, 80 bp, synthetic construct; identical to SEQ ID NO: 15983
  source 1..80: mol_type = other DNA

SEQ ID NO: 200714 - DNA, 80 bp, synthetic construct; identical to SEQ ID NO: 15984
  source 1..80: mol_type = other DNA

SEQ ID NO: 200715 - DNA, 80 bp, synthetic construct; identical to SEQ ID NO: 15985
  source 1..80: mol_type = other DNA

SEQ ID NO: 200716 - DNA, 80 bp, synthetic construct; identical to SEQ ID NO: 15986
  source 1..80: mol_type = other DNA

SEQ ID NO: 200717 - DNA, 80 bp, synthetic construct; identical to SEQ ID NO: 15987
  source 1..80: mol_type = other DNA

SEQ ID NO: 200718 - DNA, 80 bp, synthetic construct; identical to SEQ ID NO: 15988
  source 1..80: mol_type = other DNA

SEQ ID NO: 200719 - DNA, 80 bp, synthetic construct; identical to SEQ ID NO: 15989
  source 1..80: mol_type = other DNA

SEQ ID NO: 200720 - DNA, 80 bp, synthetic construct; identical to SEQ ID NO: 15990
  source 1..80: mol_type = other DNA

SEQ ID NO: 200721 - DNA, 80 bp, synthetic construct; identical to SEQ ID NO: 15991
  source 1..80: mol_type = other DNA

SEQ ID NO: 200722 - DNA, 80 bp, synthetic construct; identical to SEQ ID NO: 15992
  source 1..80: mol_type = other DNA

SEQ ID NO: 200723 - DNA, 80 bp, synthetic construct; identical to SEQ ID NO: 15993
  source 1..80: mol_type = other DNA

SEQ ID NO: 200724 - DNA, 80 bp, synthetic construct; identical to SEQ ID NO: 15994
  source 1..80: mol_type = other DNA

SEQ ID NO: 200725 - DNA, 80 bp, synthetic construct; identical to SEQ ID NO: 15995
  source 1..80: mol_type = other DNA

SEQ ID NO: 200726 - DNA, 80 bp, synthetic construct; identical to SEQ ID NO: 15996
  source 1..80: mol_type = other DNA

SEQ ID NO: 200727 - DNA, 80 bp, synthetic construct; identical to SEQ ID NO: 15997
  source 1..80: mol_type = other DNA

SEQ ID NO: 200728 - DNA, 80 bp, synthetic construct; identical to SEQ ID NO: 15998
  source 1..80: mol_type = other DNA

SEQ ID NO: 200729 - DNA, 80 bp, synthetic construct; identical to SEQ ID NO: 15999
  source 1..80: mol_type = other DNA

SEQ ID NO: 200730 - DNA, 80 bp, synthetic construct; identical to SEQ ID NO: 16000
  source 1..80: mol_type = other DNA

SEQ ID NO: 200731 - DNA, 80 bp, synthetic construct; identical to SEQ ID NO: 16001
  source 1..80: mol_type = other DNA

SEQ ID NO: 200732 - DNA, 80 bp, synthetic construct; identical to SEQ ID NO: 16002
  source 1..80: mol_type = other DNA

SEQ ID NO: 200733 - DNA, 80 bp, synthetic construct; identical to SEQ ID NO: 16003
  source 1..80: mol_type = other DNA

SEQ ID NO: 200734 - DNA, 80 bp, synthetic construct; identical to SEQ ID NO: 16004
  source 1..80: mol_type = other DNA

SEQ ID NO: 200735 - DNA, 80 bp, synthetic construct; identical to SEQ ID NO: 16005
  source 1..80: mol_type = other DNA

SEQ ID NO: 200736 - DNA, 80 bp, synthetic construct; identical to SEQ ID NO: 16006
  source 1..80: mol_type = other DNA

SEQ ID NO: 200737 - DNA, 80 bp, synthetic construct; identical to SEQ ID NO: 16007
  source 1..80: mol_type = other DNA

SEQ ID NO: 200738 - DNA, 80 bp, synthetic construct; identical to SEQ ID NO: 16008
  source 1..80: mol_type = other DNA

SEQ ID NO: 200739 - DNA, 80 bp, synthetic construct; identical to SEQ ID NO: 16009
  source 1..80: mol_type = other DNA

SEQ ID NO: 200740 - DNA, 80 bp, synthetic construct; identical to SEQ ID NO: 16010
  source 1..80: mol_type = other DNA

SEQ ID NO: 200741 - DNA, 80 bp, synthetic construct; identical to SEQ ID NO: 16011
  source 1..80: mol_type = other DNA

SEQ ID NO: 200742 - DNA, 80 bp, synthetic construct; identical to SEQ ID NO: 16012
  source 1..80: mol_type = other DNA

SEQ ID NO: 200743 - DNA, 80 bp, synthetic construct; identical to SEQ ID NO: 16013
  source 1..80: mol_type = other DNA

SEQ ID NO: 200744 - DNA, 80 bp, synthetic construct; identical to SEQ ID NO: 16014
  source 1..80: mol_type = other DNA

SEQ ID NO: 200745 - DNA, 80 bp, synthetic construct; identical to SEQ ID NO: 16015
  source 1..80: mol_type = other DNA

SEQ ID NO: 200746 - DNA, 80 bp, synthetic construct; identical to SEQ ID NO: 16016
  source 1..80: mol_type = other DNA

SEQ ID NO: 200747 - DNA, 80 bp, synthetic construct; identical to SEQ ID NO: 16017
  source 1..80: mol_type = other DNA

SEQ ID NO: 200748 - DNA, 80 bp, synthetic construct; identical to SEQ ID NO: 16018
  source 1..80: mol_type = other DNA

SEQ ID NO: 200749 - DNA, 80 bp, synthetic construct; identical to SEQ ID NO: 16019
  source 1..80: mol_type = other DNA

SEQ ID NO: 200750 - DNA, 80 bp, synthetic construct; identical to SEQ ID NO: 16020
  source 1..80: mol_type = other DNA

SEQ ID NO: 200751 - DNA, 80 bp, synthetic construct; identical to SEQ ID NO: 16021
  source 1..80: mol_type = other DNA

SEQ ID NO: 200752 - DNA, 80 bp, synthetic construct; identical to SEQ ID NO: 16022
  source 1..80: mol_type = other DNA

SEQ ID NO: 200753 - DNA, 80 bp, synthetic construct; identical to SEQ ID NO: 16023
  source 1..80: mol_type = other DNA

SEQ ID NO: 200754 - DNA, 80 bp, synthetic construct; identical to SEQ ID NO: 16024
  source 1..80: mol_type = other DNA

SEQ ID NO: 200755 - DNA, 80 bp, synthetic construct; identical to SEQ ID NO: 16025
  source 1..80: mol_type = other DNA

SEQ ID NO: 200756 - DNA, 80 bp, synthetic construct; identical to SEQ ID NO: 16026
  source 1..80: mol_type = other DNA

SEQ ID NO: 200757 - DNA, 80 bp, synthetic construct; identical to SEQ ID NO: 16027
  source 1..80: mol_type = other DNA

SEQ ID NO: 200758 - DNA, 80 bp, synthetic construct; identical to SEQ ID NO: 16028
  source 1..80: mol_type = other DNA

SEQ ID NO: 200759 - DNA, 80 bp, synthetic construct; identical to SEQ ID NO: 16029
  source 1..80: mol_type = other DNA

SEQ ID NO: 200760 - DNA, 80 bp, synthetic construct; identical to SEQ ID NO: 16030
  source 1..80: mol_type = other DNA

SEQ ID NO: 200761 - DNA, 80 bp, synthetic construct; identical to SEQ ID NO: 16031
  source 1..80: mol_type = other DNA

SEQ ID NO: 200762 - DNA, 80 bp, synthetic construct; identical to SEQ ID NO: 16032
  source 1..80: mol_type = other DNA

SEQ ID NO: 200763 - DNA, 80 bp, synthetic construct; identical to SEQ ID NO: 16033
  source 1..80: mol_type = other DNA

SEQ ID NO: 200764 - DNA, 80 bp, synthetic construct; identical to SEQ ID NO: 16034
  source 1..80: mol_type = other DNA

SEQ ID NO: 200765 - DNA, 80 bp, synthetic construct; identical to SEQ ID NO: 16035
  source 1..80: mol_type = other DNA

SEQ ID NO: 200766 - DNA, 80 bp, synthetic construct; identical to SEQ ID NO: 16036
  source 1..80: mol_type = other DNA

SEQ ID NO: 200767 - DNA, 80 bp, synthetic construct; identical to SEQ ID NO: 16037
  source 1..80: mol_type = other DNA

SEQ ID NO: 200768 - DNA, 80 bp, synthetic construct; identical to SEQ ID NO: 16038
  source 1..80: mol_type = other DNA

SEQ ID NO: 200769 - DNA, 80 bp, synthetic construct; identical to SEQ ID NO: 16039
  source 1..80: mol_type = other DNA

SEQ ID NO: 200770 - DNA, 80 bp, synthetic construct; identical to SEQ ID NO: 16040
  source 1..80: mol_type = other DNA

SEQ ID NO: 200771 - DNA, 80 bp, synthetic construct; identical to SEQ ID NO: 16041
  source 1..80: mol_type = other DNA

SEQ ID NO: 200772 - DNA, 80 bp, synthetic construct; identical to SEQ ID NO: 16042
  source 1..80: mol_type = other DNA

SEQ ID NO: 200773 - DNA, 80 bp, synthetic construct; identical to SEQ ID NO: 16043
  source 1..80: mol_type = other DNA

SEQ ID NO: 200774 - DNA, 80 bp, synthetic construct; identical to SEQ ID NO: 16044
  source 1..80: mol_type = other DNA

SEQ ID NO: 200775 - DNA, 80 bp, synthetic construct; identical to SEQ ID NO: 16045
  source 1..80: mol_type = other DNA

SEQ ID NO: 200776 - DNA, 80 bp, synthetic construct; identical to SEQ ID NO: 16046
  source 1..80: mol_type = other DNA

SEQ ID NO: 200777 - DNA, 80 bp, synthetic construct; identical to SEQ ID NO: 16047
  source 1..80: mol_type = other DNA

SEQ ID NO: 200778 - DNA, 80 bp, synthetic construct; identical to SEQ ID NO: 16048
  source 1..80: mol_type = other DNA

SEQ ID NO: 200779 - DNA, 80 bp, synthetic construct; identical to SEQ ID NO: 16049
  source 1..80: mol_type = other DNA

SEQ ID NO: 200780 - DNA, 80 bp, synthetic construct; identical to SEQ ID NO: 16050
  source 1..80: mol_type = other DNA

SEQ ID NO: 200781 - DNA, 80 bp, synthetic construct; identical to SEQ ID NO: 16051
  source 1..80: mol_type = other DNA

SEQ ID NO: 200782 - DNA, 80 bp, synthetic construct; identical to SEQ ID NO: 16052
  source 1..80: mol_type = other DNA

SEQ ID NO: 200783 - DNA, 80 bp, synthetic construct; identical to SEQ ID NO: 16053
  source 1..80: mol_type = other DNA

SEQ ID NO: 200784 - DNA, 80 bp, synthetic construct; identical to SEQ ID NO: 16054
  source 1..80: mol_type = other DNA

SEQ ID NO: 200785 - DNA, 80 bp, synthetic construct; identical to SEQ ID NO: 16055
  source 1..80: mol_type = other DNA

SEQ ID NO: 200786 - DNA, 80 bp, synthetic construct; identical to SEQ ID NO: 16056
  source 1..80: mol_type = other DNA

SEQ ID NO: 200787 - DNA, 80 bp, synthetic construct; identical to SEQ ID NO: 16057
  source 1..80: mol_type = other DNA

SEQ ID NO: 200788 - DNA, 80 bp, synthetic construct; identical to SEQ ID NO: 16058
  source 1..80: mol_type = other DNA

SEQ ID NO: 200789 - DNA, 80 bp, synthetic construct; identical to SEQ ID NO: 16059
  source 1..80: mol_type = other DNA

SEQ ID NO: 200790 - DNA, 80 bp, synthetic construct; identical to SEQ ID NO: 16060
  source 1..80: mol_type = other DNA

SEQ ID NO: 200791 - DNA, 80 bp, synthetic construct; identical to SEQ ID NO: 16061
  source 1..80: mol_type = other DNA

SEQ ID NO: 200792 - DNA, 80 bp, synthetic construct; identical to SEQ ID NO: 16062
  source 1..80: mol_type = other DNA

SEQ ID NO: 200793 - DNA, 80 bp, synthetic construct; identical to SEQ ID NO: 16063
  source 1..80: mol_type = other DNA

SEQ ID NO: 200794 - DNA, 80 bp, synthetic construct; identical to SEQ ID NO: 16064
  source 1..80: mol_type = other DNA

SEQ ID NO: 200795 - DNA, 80 bp, synthetic construct; identical to SEQ ID NO: 16065
  source 1..80: mol_type = other DNA

SEQ ID NO: 200796 - DNA, 80 bp, synthetic construct; identical to SEQ ID NO: 16066
  source 1..80: mol_type = other DNA

SEQ ID NO: 200797 - DNA, 80 bp, synthetic construct; identical to SEQ ID NO: 16067
  source 1..80: mol_type = other DNA

SEQ ID NO: 200798 - DNA, 80 bp, synthetic construct; identical to SEQ ID NO: 16068
  source 1..80: mol_type = other DNA

SEQ ID NO: 200799 - DNA, 80 bp, synthetic construct; identical to SEQ ID NO: 16069
  source 1..80: mol_type = other DNA

SEQ ID NO: 200800 - DNA, 80 bp, synthetic construct; identical to SEQ ID NO: 16070
  source 1..80: mol_type = other DNA

SEQ ID NO: 200801 - DNA, 80 bp, synthetic construct; identical to SEQ ID NO: 16071
  source 1..80: mol_type = other DNA

SEQ ID NO: 200802 - DNA, 80 bp, synthetic construct; identical to SEQ ID NO: 16072
  source 1..80: mol_type = other DNA

SEQ ID NO: 200803 - DNA, 80 bp, synthetic construct; identical to SEQ ID NO: 16073
  source 1..80: mol_type = other DNA

SEQ ID NO: 200804 - DNA, 80 bp, synthetic construct; identical to SEQ ID NO: 16074
  source 1..80: mol_type = other DNA

SEQ ID NO: 200805 - DNA, 80 bp, synthetic construct; identical to SEQ ID NO: 16075
  source 1..80: mol_type = other DNA

SEQ ID NO: 200806 - DNA, 80 bp, synthetic construct; identical to SEQ ID NO: 16076
  source 1..80: mol_type = other DNA

SEQ ID NO: 200807 - DNA, 80 bp, synthetic construct; identical to SEQ ID NO: 16077
  source 1..80: mol_type = other DNA

SEQ ID NO: 200808 - DNA, 80 bp, synthetic construct; identical to SEQ ID NO: 16078
  source 1..80: mol_type = other DNA

SEQ ID NO: 200809 - DNA, 80 bp, synthetic construct; identical to SEQ ID NO: 16079
  source 1..80: mol_type = other DNA

SEQ ID NO: 200810 - DNA, 80 bp, synthetic construct; identical to SEQ ID NO: 16080
  source 1..80: mol_type = other DNA

SEQ ID NO: 200811 - DNA, 80 bp, synthetic construct; identical to SEQ ID NO: 16081
  source 1..80: mol_type = other DNA

SEQ ID NO: 200812 - DNA, 80 bp, synthetic construct; identical to SEQ ID NO: 16082
  source 1..80: mol_type = other DNA

SEQ ID NO: 200813 - DNA, 80 bp, synthetic construct; identical to SEQ ID NO: 16083
  source 1..80: mol_type = other DNA

SEQ ID NO: 200814 - DNA, 80 bp, synthetic construct; identical to SEQ ID NO: 16084
  source 1..80: mol_type = other DNA

SEQ ID NO: 200815 - DNA, 80 bp, synthetic construct; identical to SEQ ID NO: 16085
  source 1..80: mol_type = other DNA

SEQ ID NO: 200816 - DNA, 80 bp, synthetic construct; identical to SEQ ID NO: 16086
  source 1..80: mol_type = other DNA

SEQ ID NO: 200817 - DNA, 80 bp, synthetic construct; identical to SEQ ID NO: 16087
  source 1..80: mol_type = other DNA

SEQ ID NO: 200818 - DNA, 80 bp, synthetic construct; identical to SEQ ID NO: 16088
  source 1..80: mol_type = other DNA

SEQ ID NO: 200819 - DNA, 80 bp, synthetic construct; identical to SEQ ID NO: 16089
  source 1..80: mol_type = other DNA

SEQ ID NO: 200820 - DNA, 80 bp, synthetic construct; identical to SEQ ID NO: 16090
  source 1..80: mol_type = other DNA

SEQ ID NO: 200821 - DNA, 80 bp, synthetic construct; identical to SEQ ID NO: 16091
  source 1..80: mol_type = other DNA

SEQ ID NO: 200822 - DNA, 80 bp, synthetic construct; identical to SEQ ID NO: 16092
  source 1..80: mol_type = other DNA

SEQ ID NO: 200823 - DNA, 80 bp, synthetic construct; identical to SEQ ID NO: 16093
  source 1..80: mol_type = other DNA

SEQ ID NO: 200824 - DNA, 80 bp, synthetic construct; identical to SEQ ID NO: 16094
  source 1..80: mol_type = other DNA

SEQ ID NO: 200825 - DNA, 80 bp, synthetic construct; identical to SEQ ID NO: 16095
  source 1..80: mol_type = other DNA

SEQ ID NO: 200826 - DNA, 80 bp, synthetic construct; identical to SEQ ID NO: 16096
  source 1..80: mol_type = other DNA

SEQ ID NO: 200827 - DNA, 80 bp, synthetic construct; identical to SEQ ID NO: 16097
  source 1..80: mol_type = other DNA

SEQ ID NO: 200828 - DNA, 80 bp, synthetic construct; identical to SEQ ID NO: 16098
  source 1..80: mol_type = other DNA

SEQ ID NO: 200829 - DNA, 80 bp, synthetic construct; identical to SEQ ID NO: 16099
  source 1..80: mol_type = other DNA

SEQ ID NO: 200830 - DNA, 80 bp, synthetic construct; identical to SEQ ID NO: 16100
  source 1..80: mol_type = other DNA

SEQ ID NO: 200831 - DNA, 80 bp, synthetic construct; identical to SEQ ID NO: 16101
  source 1..80: mol_type = other DNA

SEQ ID NO: 200832 - DNA, 80 bp, synthetic construct; identical to SEQ ID NO: 16102
  source 1..80: mol_type = other DNA

SEQ ID NO: 200833 - DNA, 80 bp, synthetic construct; identical to SEQ ID NO: 16103
  source 1..80: mol_type = other DNA

SEQ ID NO: 200834 - DNA, 80 bp, synthetic construct; identical to SEQ ID NO: 16104
  source 1..80: mol_type = other DNA

SEQ ID NO: 200835 - DNA, 80 bp, synthetic construct; identical to SEQ ID NO: 16105
  source 1..80: mol_type = other DNA

SEQ ID NO: 200836 - DNA, 80 bp, synthetic construct; identical to SEQ ID NO: 16106
  source 1..80: mol_type = other DNA

SEQ ID NO: 200837 - DNA, 80 bp, synthetic construct; identical to SEQ ID NO: 16107
  source 1..80: mol_type = other DNA

SEQ ID NO: 200838 - DNA, 80 bp, synthetic construct; identical to SEQ ID NO: 16108
  source 1..80: mol_type = other DNA

SEQ ID NO: 200839 - DNA, 80 bp, synthetic construct; identical to SEQ ID NO: 16109
  source 1..80: mol_type = other DNA

SEQ ID NO: 200840 - DNA, 80 bp, synthetic construct; identical to SEQ ID NO: 16110
  source 1..80: mol_type = other DNA

SEQ ID NO: 200841 - DNA, 80 bp, synthetic construct; identical to SEQ ID NO: 16111
  source 1..80: mol_type = other DNA

SEQ ID NO: 200842 - DNA, 80 bp, synthetic construct; identical to SEQ ID NO: 16112
  source 1..80: mol_type = other DNA

SEQ ID NO: 200843 - DNA, 80 bp, synthetic construct; identical to SEQ ID NO: 16113
  source 1..80: mol_type = other DNA

SEQ ID NO: 200844 - DNA, 80 bp, synthetic construct; identical to SEQ ID NO: 16114
  source 1..80: mol_type = other DNA

SEQ ID NO: 200845 - DNA, 80 bp, synthetic construct; identical to SEQ ID NO: 16115
  source 1..80: mol_type = other DNA

SEQ ID NO: 200846 - DNA, 80 bp, synthetic construct; identical to SEQ ID NO: 16116
  source 1..80: mol_type = other DNA

SEQ ID NO: 200847 - DNA, 80 bp, synthetic construct; identical to SEQ ID NO: 16117
  source 1..80: mol_type = other DNA

SEQ ID NO: 200848 - DNA, 80 bp, synthetic construct; identical to SEQ ID NO: 16118
  source 1..80: mol_type = other DNA

SEQ ID NO: 200849 - DNA, 80 bp, synthetic construct; identical to SEQ ID NO: 16119
  source 1..80: mol_type = other DNA

SEQ ID NO: 200850 - DNA, 80 bp, synthetic construct; identical to SEQ ID NO: 16120
  source 1..80: mol_type = other DNA

SEQ ID NO: 200851 - DNA, 80 bp, synthetic construct; identical to SEQ ID NO: 16121
  source 1..80: mol_type = other DNA

SEQ ID NO: 200852 - DNA, 80 bp, synthetic construct; identical to SEQ ID NO: 16122
  source 1..80: mol_type = other DNA

SEQ ID NO: 200853 - DNA, 80 bp, synthetic construct; identical to SEQ ID NO: 16123
  source 1..80: mol_type = other DNA

SEQ ID NO: 200854 - DNA, 80 bp, synthetic construct; identical to SEQ ID NO: 16124
  source 1..80: mol_type = other DNA

SEQ ID NO: 200855 - DNA, 80 bp, synthetic construct; identical to SEQ ID NO: 16125
  source 1..80: mol_type = other DNA

SEQ ID NO: 200856 - DNA, 80 bp, synthetic construct; identical to SEQ ID NO: 16126
  source 1..80: mol_type = other DNA

SEQ ID NO: 200857 - DNA, 80 bp, synthetic construct; identical to SEQ ID NO: 16127
  source 1..80: mol_type = other DNA

SEQ ID NO: 200858 - DNA, 80 bp, synthetic construct; identical to SEQ ID NO: 16128
  source 1..80: mol_type = other DNA

SEQ ID NO: 200859 - DNA, 80 bp, synthetic construct; identical to SEQ ID NO: 16129
  source 1..80: mol_type = other DNA

SEQ ID NO: 200860 - DNA, 80 bp, synthetic construct; identical to SEQ ID NO: 16130
  source 1..80: mol_type = other DNA

SEQ ID NO: 200861 - DNA, 80 bp, synthetic construct; identical to SEQ ID NO: 16131
  source 1..80: mol_type = other DNA

SEQ ID NO: 200862 - DNA, 80 bp, synthetic construct; identical to SEQ ID NO: 16132
  source 1..80: mol_type = other DNA

SEQ ID NO: 200863 - DNA, 80 bp, synthetic construct; identical to SEQ ID NO: 16133
  source 1..80: mol_type = other DNA

SEQ ID NO: 200864 - DNA, 80 bp, synthetic construct; identical to SEQ ID NO: 16134
  source 1..80: mol_type = other DNA

SEQ ID NO: 200865 - DNA, 80 bp, synthetic construct; identical to SEQ ID NO: 16135
  source 1..80: mol_type = other DNA

SEQ ID NO: 200866 - DNA, 80 bp, synthetic construct; identical to SEQ ID NO: 16136
  source 1..80: mol_type = other DNA

SEQ ID NO: 200867 - DNA, 80 bp, synthetic construct; identical to SEQ ID NO: 16137
  source 1..80: mol_type = other DNA

SEQ ID NO: 200868 - DNA, 80 bp, synthetic construct; identical to SEQ ID NO: 16138
  source 1..80: mol_type = other DNA

SEQ ID NO: 200869 - DNA, 80 bp, synthetic construct; identical to SEQ ID NO: 16139
  source 1..80: mol_type = other DNA

SEQ ID NO: 200870 - DNA, 80 bp, synthetic construct; identical to SEQ ID NO: 16140
  source 1..80: mol_type = other DNA

SEQ ID NO: 200871 - DNA, 80 bp, synthetic construct; identical to SEQ ID NO: 16141
  source 1..80: mol_type = other DNA

SEQ ID NO: 200872 - DNA, 80 bp, synthetic construct; identical to SEQ ID NO: 16142
  source 1..80: mol_type = other DNA

SEQ ID NO: 200873 - DNA, 80 bp, synthetic construct; identical to SEQ ID NO: 16143
  source 1..80: mol_type = other DNA

SEQ ID NO: 200874 - DNA, 80 bp, synthetic construct; identical to SEQ ID NO: 16144
  source 1..80: mol_type = other DNA

SEQ ID NO: 200875 - DNA, 80 bp, synthetic construct; identical to SEQ ID NO: 16145
  source 1..80: mol_type = other DNA

SEQ ID NO: 200876 - DNA, 80 bp, synthetic construct; identical to SEQ ID NO: 16146
  source 1..80: mol_type = other DNA

SEQ ID NO: 200877 - DNA, 80 bp, synthetic construct; identical to SEQ ID NO: 16147
  source 1..80: mol_type = other DNA

SEQ ID NO: 200878 - DNA, 80 bp, synthetic construct; identical to SEQ ID NO: 16148
  source 1..80: mol_type = other DNA

SEQ ID NO: 200879 - DNA, 80 bp, synthetic construct; identical to SEQ ID NO: 16149
  source 1..80: mol_type = other DNA

SEQ ID NO: 200880 - DNA, 80 bp, synthetic construct; identical to SEQ ID NO: 16150
  source 1..80: mol_type = other DNA

SEQ ID NO: 200881 - DNA, 80 bp, synthetic construct; identical to SEQ ID NO: 16151
  source 1..80: mol_type = other DNA

SEQ ID NO: 200882 - DNA, 80 bp, synthetic construct; identical to SEQ ID NO: 16152
  source 1..80: mol_type = other DNA

SEQ ID NO: 200883 - DNA, 80 bp, synthetic construct; identical to SEQ ID NO: 16153
  source 1..80: mol_type = other DNA

SEQ ID NO: 200884 - DNA, 80 bp, synthetic construct; identical to SEQ ID NO: 16154
  source 1..80: mol_type = other DNA

SEQ ID NO: 200885 - DNA, 80 bp, synthetic construct; identical to SEQ ID NO: 16155
  source 1..80: mol_type = other DNA

SEQ ID NO: 200886 - DNA, 80 bp, synthetic construct; identical to SEQ ID NO: 16156
  source 1..80: mol_type = other DNA

SEQ ID NO: 200887 - DNA, 80 bp, synthetic construct; identical to SEQ ID NO: 16157
  source 1..80: mol_type = other DNA

SEQ ID NO: 200888 - DNA, 80 bp, synthetic construct; identical to SEQ ID NO: 16158
  source 1..80: mol_type = other DNA

SEQ ID NO: 200889 - DNA, 80 bp, synthetic construct; identical to SEQ ID NO: 16159
  source 1..80: mol_type = other DNA

SEQ ID NO: 200890 - DNA, 80 bp, synthetic construct; identical to SEQ ID NO: 16160
  source 1..80: mol_type = other DNA

SEQ ID NO: 200891 - DNA, 80 bp, synthetic construct; identical to SEQ ID NO: 16161
  source 1..80: mol_type = other DNA

SEQ ID NO: 200892 - DNA, 80 bp, synthetic construct; identical to SEQ ID NO: 16162
  source 1..80: mol_type = other DNA

SEQ ID NO: 200893 - DNA, 80 bp, synthetic construct; identical to SEQ ID NO: 16163
  source 1..80: mol_type = other DNA

SEQ ID NO: 200894 - DNA, 80 bp, synthetic construct; identical to SEQ ID NO: 16164
  source 1..80: mol_type = other DNA

SEQ ID NO: 200895 - DNA, 80 bp, synthetic construct; identical to SEQ ID NO: 16165
  source 1..80: mol_type = other DNA

SEQ ID NO: 200896 - DNA, 80 bp, synthetic construct; identical to SEQ ID NO: 16166
  source 1..80: mol_type = other DNA

SEQ ID NO: 200897 - DNA, 80 bp, synthetic construct; identical to SEQ ID NO: 16167
  source 1..80: mol_type = other DNA

SEQ ID NO: 200898 - DNA, 80 bp, synthetic construct; identical to SEQ ID NO: 16168
  source 1..80: mol_type = other DNA

SEQ ID NO: 200899 - DNA, 80 bp, synthetic construct; identical to SEQ ID NO: 16169
  source 1..80: mol_type = other DNA

SEQ ID NO: 200900 - DNA, 80 bp, synthetic construct; identical to SEQ ID NO: 16170
  source 1..80: mol_type = other DNA

SEQ ID NO: 200901 - DNA, 80 bp, synthetic construct; identical to SEQ ID NO: 16171
  source 1..80: mol_type = other DNA

SEQ ID NO: 200902 - DNA, 80 bp, synthetic construct; identical to SEQ ID NO: 16172
  source 1..80: mol_type = other DNA

SEQ ID NO: 200903 - DNA, 80 bp, synthetic construct; identical to SEQ ID NO: 16173
  source 1..80: mol_type = other DNA

SEQ ID NO: 200904 - DNA, 80 bp, synthetic construct; identical to SEQ ID NO: 16174
  source 1..80: mol_type = other DNA

SEQ ID NO: 200905 - DNA, 80 bp, synthetic construct; identical to SEQ ID NO: 16175
  source 1..80: mol_type = other DNA

SEQ ID NO: 200906 - DNA, 80 bp, synthetic construct; identical to SEQ ID NO: 16176
  source 1..80: mol_type = other DNA

SEQ ID NO: 200907 - DNA, 80 bp, synthetic construct; identical to SEQ ID NO: 16177
  source 1..80: mol_type = other DNA

SEQ ID NO: 200908 - DNA, 80 bp, synthetic construct; identical to SEQ ID NO: 16178
  source 1..80: mol_type = other DNA

SEQ ID NO: 200909 - DNA, 80 bp, synthetic construct; identical to SEQ ID NO: 16179
  source 1..80: mol_type = other DNA

SEQ ID NO: 200910 - DNA, 80 bp, synthetic construct; identical to SEQ ID NO: 16180
  source 1..80: mol_type = other DNA

SEQ ID NO: 200911 - DNA, 80 bp, synthetic construct; identical to SEQ ID NO: 16181
  source 1..80: mol_type = other DNA

SEQ ID NO: 200912 - DNA, 80 bp, synthetic construct; identical to SEQ ID NO: 16182
  source 1..80: mol_type = other DNA

SEQ ID NO: 200913 - DNA, 80 bp, synthetic construct; identical to SEQ ID NO: 16183
  source 1..80: mol_type = other DNA

SEQ ID NO: 200914 - DNA, 80 bp, synthetic construct; identical to SEQ ID NO: 16184
  source 1..80: mol_type = other DNA

SEQ ID NO: 200915 - DNA, 80 bp, synthetic construct; identical to SEQ ID NO: 16185
  source 1..80: mol_type = other DNA

SEQ ID NO: 200916 - DNA, 80 bp, synthetic construct; identical to SEQ ID NO: 16186
  source 1..80: mol_type = other DNA

SEQ ID NO: 200917 - DNA, 80 bp, synthetic construct; identical to SEQ ID NO: 16187
  source 1..80: mol_type = other DNA

SEQ ID NO: 200918 - DNA, 80 bp, synthetic construct; identical to SEQ ID NO: 16188
  source 1..80: mol_type = other DNA

SEQ ID NO: 200919 - DNA, 80 bp, synthetic construct; identical to SEQ ID NO: 16189
  source 1..80: mol_type = other DNA

SEQ ID NO: 200920 - DNA, 80 bp, synthetic construct; identical to SEQ ID NO: 16190
  source 1..80: mol_type = other DNA

SEQ ID NO: 200921 - DNA, 80 bp, synthetic construct; identical to SEQ ID NO: 16191
  source 1..80: mol_type = other DNA

SEQ ID NO: 200922 - DNA, 80 bp, synthetic construct; identical to SEQ ID NO: 16192
  source 1..80: mol_type = other DNA

SEQ ID NO: 200923 - DNA, 80 bp, synthetic construct; identical to SEQ ID NO: 16193
  source 1..80: mol_type = other DNA

SEQ ID NO: 200924 - DNA, 80 bp, synthetic construct; identical to SEQ ID NO: 16194
  source 1..80: mol_type = other DNA

SEQ ID NO: 200925 - DNA, 80 bp, synthetic construct; identical to SEQ ID NO: 16195
  source 1..80: mol_type = other DNA

SEQ ID NO: 200926 - DNA, 80 bp, synthetic construct; identical to SEQ ID NO: 16196
  source 1..80: mol_type = other DNA

SEQ ID NO: 200927 - DNA, 80 bp, synthetic construct; identical to SEQ ID NO: 16197
  source 1..80: mol_type = other DNA

SEQ ID NO: 200928 - DNA, 80 bp, synthetic construct; identical to SEQ ID NO: 16198
  source 1..80: mol_type = other DNA

SEQ ID NO: 200929 - DNA, 80 bp, synthetic construct; identical to SEQ ID NO: 16199
  source 1..80: mol_type = other DNA

SEQ ID NO: 200930 - DNA, 80 bp, synthetic construct; identical to SEQ ID NO: 16200
  source 1..80: mol_type = other DNA

SEQ ID NO: 200931 - DNA, 80 bp, synthetic construct; identical to SEQ ID NO: 16201
  source 1..80: mol_type = other DNA

SEQ ID NO: 200932 - DNA, 80 bp, synthetic construct; identical to SEQ ID NO: 16202
  source 1..80: mol_type = other DNA

SEQ ID NO: 200933 - DNA, 80 bp, synthetic construct; identical to SEQ ID NO: 16203
  source 1..80: mol_type = other DNA

SEQ ID NO: 200934 - DNA, 80 bp, synthetic construct; identical to SEQ ID NO: 16204
  source 1..80: mol_type = other DNA

SEQ ID NO: 200935 - DNA, 80 bp, synthetic construct; identical to SEQ ID NO: 16205
  source 1..80: mol_type = other DNA

SEQ ID NO: 200936 - DNA, 80 bp, synthetic construct; identical to SEQ ID NO: 16206
  source 1..80: mol_type = other DNA

SEQ ID NO: 200937 - DNA, 80 bp, synthetic construct; identical to SEQ ID NO: 16207
  source 1..80: mol_type = other DNA

SEQ ID NO: 200938 - DNA, 80 bp, synthetic construct; identical to SEQ ID NO: 16208
  source 1..80: mol_type = other DNA

SEQ ID NO: 200939 - DNA, 80 bp, synthetic construct; identical to SEQ ID NO: 16209
  source 1..80: mol_type = other DNA

SEQ ID NO: 200940 - DNA, 80 bp, synthetic construct; identical to SEQ ID NO: 16210
  source 1..80: mol_type = other DNA

SEQ ID NO: 200941 - DNA, 80 bp, synthetic construct; identical to SEQ ID NO: 16211
  source 1..80: mol_type = other DNA

SEQ ID NO: 200942 - DNA, 80 bp, synthetic construct; identical to SEQ ID NO: 16212
  source 1..80: mol_type = other DNA

SEQ ID NO: 200943 - DNA, 80 bp, synthetic construct; identical to SEQ ID NO: 16213
  source 1..80: mol_type = other DNA

SEQ ID NO: 200944 - DNA, 80 bp, synthetic construct; identical to SEQ ID NO: 16214
  source 1..80: mol_type = other DNA

SEQ ID NO: 200945 - DNA, 80 bp, synthetic construct; identical to SEQ ID NO: 16215
  source 1..80: mol_type = other DNA

SEQ ID NO: 200946 - DNA, 80 bp, synthetic construct; identical to SEQ ID NO: 16216
  source 1..80: mol_type = other DNA

SEQ ID NO: 200947 - DNA, 80 bp, synthetic construct; identical to SEQ ID NO: 16217
  source 1..80: mol_type = other DNA

SEQ ID NO: 200948 - DNA, 80 bp, synthetic construct; identical to SEQ ID NO: 16218
  source 1..80: mol_type = other DNA

SEQ ID NO: 200949 - DNA, 80 bp, synthetic construct; identical to SEQ ID NO: 16219
  source 1..80: mol_type = other DNA

SEQ ID NO: 200950 - DNA, 80 bp, synthetic construct; identical to SEQ ID NO: 16220
  source 1..80: mol_type = other DNA

SEQ ID NO: 200951 - DNA, 80 bp, synthetic construct; identical to SEQ ID NO: 16221
  source 1..80: mol_type = other DNA

SEQ ID NO: 200952 - DNA, 80 bp, synthetic construct; identical to SEQ ID NO: 16222
  source 1..80: mol_type = other DNA

SEQ ID NO: 200953 - DNA, 80 bp, synthetic construct; identical to SEQ ID NO: 16223
  source 1..80: mol_type = other DNA

SEQ ID NO: 200954 - DNA, 80 bp, synthetic construct; identical to SEQ ID NO: 16224
  source 1..80: mol_type = other DNA

SEQ ID NO: 200955 - DNA, 80 bp, synthetic construct; identical to SEQ ID NO: 16225
  source 1..80: mol_type = other DNA

SEQ ID NO: 200956 - DNA, 80 bp, synthetic construct; identical to SEQ ID NO: 16226
  source 1..80: mol_type = other DNA

SEQ ID NO: 200957 - DNA, 80 bp, synthetic construct; identical to SEQ ID NO: 16227
  source 1..80: mol_type = other DNA

SEQ ID NO: 200958 - DNA, 80 bp, synthetic construct; identical to SEQ ID NO: 16228
  source 1..80: mol_type = other DNA

SEQ ID NO: 200959 - DNA, 80 bp, synthetic construct; identical to SEQ ID NO: 16229
  source 1..80: mol_type = other DNA

SEQ ID NO: 200960 - DNA, 80 bp, synthetic construct; identical to SEQ ID NO: 16230
  source 1..80: mol_type = other DNA

SEQ ID NO: 200961 - DNA, 80 bp, synthetic construct; identical to SEQ ID NO: 16231
  source 1..80: mol_type = other DNA

SEQ ID NO: 200962 - DNA, 80 bp, synthetic construct; identical to SEQ ID NO: 16232
  source 1..80: mol_type = other DNA

SEQ ID NO: 200963 - DNA, 80 bp, synthetic construct; identical to SEQ ID NO: 16233
  source 1..80: mol_type = other DNA

SEQ ID NO: 200964 - DNA, 80 bp, synthetic construct; identical to SEQ ID NO: 16234
  source 1..80: mol_type = other DNA

SEQ ID NO: 200965 - DNA, 80 bp, synthetic construct; identical to SEQ ID NO: 16235
  source 1..80: mol_type = other DNA

SEQ ID NO: 200966 - DNA, 80 bp, synthetic construct; identical to SEQ ID NO: 16236
  source 1..80: mol_type = other DNA

SEQ ID NO: 200967 - DNA, 80 bp, synthetic construct; identical to SEQ ID NO: 16237
  source 1..80: mol_type = other DNA

SEQ ID NO: 200968 - DNA, 80 bp, synthetic construct; identical to SEQ ID NO: 16238
  source 1..80: mol_type = other DNA

SEQ ID NO: 200969 - DNA, 80 bp, synthetic construct; identical to SEQ ID NO: 16239
  source 1..80: mol_type = other DNA

SEQ ID NO: 200970 - DNA, 80 bp, synthetic construct; identical to SEQ ID NO: 16240
  source 1..80: mol_type = other DNA

SEQ ID NO: 200971 - DNA, 80 bp, synthetic construct; identical to SEQ ID NO: 16241
  source 1..80: mol_type = other DNA

SEQ ID NO: 200972 - DNA, 80 bp, synthetic construct; identical to SEQ ID NO: 16242
  source 1..80: mol_type = other DNA

SEQ ID NO: 200973 - DNA, 80 bp, synthetic construct; identical to SEQ ID NO: 16243
  source 1..80: mol_type = other DNA

SEQ ID NO: 200974 - DNA, 80 bp, synthetic construct; identical to SEQ ID NO: 16244
  source 1..80: mol_type = other DNA

SEQ ID NO: 200975 - DNA, 80 bp, synthetic construct; identical to SEQ ID NO: 16245
  source 1..80: mol_type = other DNA

SEQ ID NO: 200976 - DNA, 80 bp, synthetic construct; identical to SEQ ID NO: 16246
  source 1..80: mol_type = other DNA

SEQ ID NO: 200977 - DNA, 80 bp, synthetic construct; identical to SEQ ID NO: 16247
  source 1..80: mol_type = other DNA

SEQ ID NO: 200978 - DNA, 80 bp, synthetic construct; identical to SEQ ID NO: 16248
  source 1..80: mol_type = other DNA

SEQ ID NO: 200979 - DNA, 80 bp, synthetic construct; identical to SEQ ID NO: 16249
  source 1..80: mol_type = other DNA

SEQ ID NO: 200980 - DNA, 80 bp, synthetic construct; identical to SEQ ID NO: 16250
  source 1..80: mol_type = other DNA

SEQ ID NO: 200981 - DNA, 80 bp, synthetic construct; identical to SEQ ID NO: 16251
  source 1..80: mol_type = other DNA

SEQ ID NO: 200982 - DNA, 80 bp, synthetic construct; identical to SEQ ID NO: 16252
  source 1..80: mol_type = other DNA

SEQ ID NO: 200983 - DNA, 80 bp, synthetic construct; identical to SEQ ID NO: 16253
  source 1..80: mol_type = other DNA

SEQ ID NO: 200984 - DNA, 80 bp, synthetic construct; identical to SEQ ID NO: 16254
  source 1..80: mol_type = other DNA

SEQ ID NO: 200985 - DNA, 80 bp, synthetic construct; identical to SEQ ID NO: 16255
  source 1..80: mol_type = other DNA

SEQ ID NO: 200986 - DNA, 80 bp, synthetic construct; identical to SEQ ID NO: 16256
  source 1..80: mol_type = other DNA

SEQ ID NO: 200987 - DNA, 80 bp, synthetic construct; identical to SEQ ID NO: 16257
  source 1..80: mol_type = other DNA

SEQ ID NO: 200988 - DNA, 80 bp, synthetic construct; identical to SEQ ID NO: 16258
  source 1..80: mol_type = other DNA

SEQ ID NO: 200989 - DNA, 80 bp, synthetic construct; identical to SEQ ID NO: 16259
  source 1..80: mol_type = other DNA

SEQ ID NO: 200990 - DNA, 80 bp, synthetic construct; identical to SEQ ID NO: 16260
  source 1..80: mol_type = other DNA

SEQ ID NO: 200991 - DNA, 80 bp, synthetic construct; identical to SEQ ID NO: 16261
  source 1..80: mol_type = other DNA

SEQ ID NO: 200992 - DNA, 80 bp, synthetic construct; identical to SEQ ID NO: 16262
  source 1..80: mol_type = other DNA

SEQ ID NO: 200993 - DNA, 80 bp, synthetic construct; identical to SEQ ID NO: 16263
  source 1..80: mol_type = other DNA

SEQ ID NO: 200994 - DNA, 80 bp, synthetic construct; identical to SEQ ID NO: 16264
  source 1..80: mol_type = other DNA

SEQ ID NO: 200995 - DNA, 80 bp, synthetic construct; identical to SEQ ID NO: 16265
  source 1..80: mol_type = other DNA

SEQ ID NO: 200996 - DNA, 80 bp, synthetic construct; identical to SEQ ID NO: 16266
  source 1..80: mol_type = other DNA

SEQ ID NO: 200997 - DNA, 80 bp, synthetic construct; identical to SEQ ID NO: 16267
  source 1..80: mol_type = other DNA

SEQ ID NO: 200998 - DNA, 80 bp, synthetic construct; identical to SEQ ID NO: 16268
  source 1..80: mol_type = other DNA

SEQ ID NO: 200999 - DNA, 80 bp, synthetic construct; identical to SEQ ID NO: 16269
  source 1..80: mol_type = other DNA

SEQ ID NO: 201000 - DNA, 80 bp, synthetic construct; identical to SEQ ID NO: 16270
  source 1..80: mol_type = other DNA

SEQ ID NO: 201001 - DNA, 80 bp, synthetic construct; identical to SEQ ID NO: 16271
  source 1..80: mol_type = other DNA

SEQ ID NO: 201002 - DNA, 80 bp, synthetic construct; identical to SEQ ID NO: 16272
  source 1..80: mol_type = other DNA

SEQ ID NO: 201003 - DNA, 80 bp, synthetic construct; identical to SEQ ID NO: 16273
  source 1..80: mol_type = other DNA

SEQ ID NO: 201004 - DNA, 80 bp, synthetic construct; identical to SEQ ID NO: 16274
  source 1..80: mol_type = other DNA

SEQ ID NO: 201005 - DNA, 80 bp, synthetic construct; identical to SEQ ID NO: 16275
  source 1..80: mol_type = other DNA

SEQ ID NO: 201006 - DNA, 80 bp, synthetic construct; identical to SEQ ID NO: 16276
  source 1..80: mol_type = other DNA

SEQ ID NO: 201007 - DNA, 80 bp, synthetic construct; identical to SEQ ID NO: 16277
  source 1..80: mol_type = other DNA

SEQ ID NO: 201008 - DNA, 80 bp, synthetic construct; identical to SEQ ID NO: 16278
  source 1..80: mol_type = other DNA

SEQ ID NO: 201009 - DNA, 80 bp, synthetic construct; identical to SEQ ID NO: 16279
  source 1..80: mol_type = other DNA

SEQ ID NO: 201010 - DNA, 80 bp, synthetic construct; identical to SEQ ID NO: 16280
  source 1..80: mol_type = other DNA

SEQ ID NO: 201011 - DNA, 80 bp, synthetic construct; identical to SEQ ID NO: 16281
  source 1..80: mol_type = other DNA

SEQ ID NO: 201012 - DNA, 80 bp, synthetic construct; identical to SEQ ID NO: 16282
  source 1..80: mol_type = other DNA

SEQ ID NO: 201013 - DNA, 80 bp, synthetic construct; identical to SEQ ID NO: 16283
  source 1..80: mol_type = other DNA

SEQ ID NO: 201014 - DNA, 80 bp, synthetic construct; identical to SEQ ID NO: 16284
  source 1..80: mol_type = other DNA

SEQ ID NO: 201015 - DNA, 80 bp, synthetic construct; identical to SEQ ID NO: 16285
  source 1..80: mol_type = other DNA

SEQ ID NO: 201016 - DNA, 80 bp, synthetic construct; identical to SEQ ID NO: 16286
  source 1..80: mol_type = other DNA

SEQ ID NO: 201017 - DNA, 80 bp, synthetic construct; identical to SEQ ID NO: 16287
  source 1..80: mol_type = other DNA

SEQ ID NO: 201018 - DNA, 80 bp, synthetic construct; identical to SEQ ID NO: 16288
  source 1..80: mol_type = other DNA

SEQ ID NO: 201019 - DNA, 80 bp, synthetic construct; identical to SEQ ID NO: 16289
  source 1..80: mol_type = other DNA

SEQ ID NO: 201020 - DNA, 80 bp, synthetic construct; identical to SEQ ID NO: 16290
  source 1..80: mol_type = other DNA

SEQ ID NO: 201021 - DNA, 80 bp, synthetic construct; identical to SEQ ID NO: 16291
  source 1..80: mol_type = other DNA

SEQ ID NO: 201022 - DNA, 80 bp, synthetic construct; identical to SEQ ID NO: 16292
  source 1..80: mol_type = other DNA

SEQ ID NO: 201023 - DNA, 80 bp, synthetic construct; identical to SEQ ID NO: 16293
  source 1..80: mol_type = other DNA

SEQ ID NO: 201024 - DNA, 80 bp, synthetic construct; identical to SEQ ID NO: 16294
  source 1..80: mol_type = other DNA

SEQ ID NO: 201025 - DNA, 80 bp, synthetic construct; identical to SEQ ID NO: 16295
  source 1..80: mol_type = other DNA

SEQ ID NO: 201026 - DNA, 80 bp, synthetic construct; identical to SEQ ID NO: 16296
  source 1..80: mol_type = other DNA

SEQ ID NO: 201027 - DNA, 80 bp, synthetic construct; identical to SEQ ID NO: 16297
  source 1..80: mol_type = other DNA

SEQ ID NO: 201028 - DNA, 80 bp, synthetic construct; identical to SEQ ID NO: 16298
  source 1..80: mol_type = other DNA

SEQ ID NO: 201029 - DNA, 80 bp, synthetic construct; identical to SEQ ID NO: 16299
  source 1..80: mol_type = other DNA

SEQ ID NO: 201030 - DNA, 80 bp, synthetic construct; identical to SEQ ID NO: 16300
  source 1..80: mol_type = other DNA

SEQ ID NO: 201031 - DNA, 80 bp, synthetic construct; identical to SEQ ID NO: 16301
  source 1..80: mol_type = other DNA

SEQ ID NO: 201032 - DNA, 80 bp, synthetic construct; identical to SEQ ID NO: 16302
  source 1..80: mol_type = other DNA

SEQ ID NO: 201033 - DNA, 80 bp, synthetic construct; identical to SEQ ID NO: 16303
  source 1..80: mol_type = other DNA

SEQ ID NO: 201034 - DNA, 80 bp, synthetic construct; identical to SEQ ID NO: 16304
  source 1..80: mol_type = other DNA

SEQ ID NO: 201035 - DNA, 80 bp, synthetic construct; identical to SEQ ID NO: 16305
  source 1..80: mol_type = other DNA

SEQ ID NO: 201036 - DNA, 80 bp, synthetic construct; identical to SEQ ID NO: 16306
  source 1..80: mol_type = other DNA

SEQ ID NO: 201037 - DNA, 80 bp, synthetic construct; identical to SEQ ID NO: 16307
  source 1..80: mol_type = other DNA

SEQ ID NO: 201038 - DNA, 80 bp, synthetic construct; identical to SEQ ID NO: 16308
  source 1..80: mol_type = other DNA

SEQ ID NO: 201039 - DNA, 80 bp, synthetic construct; identical to SEQ ID NO: 16309
  source 1..80: mol_type = other DNA

SEQ ID NO: 201040 - DNA, 80 bp, synthetic construct; identical to SEQ ID NO: 16310
  source 1..80: mol_type = other DNA

SEQ ID NO: 201041 - DNA, 80 bp, synthetic construct; identical to SEQ ID NO: 16311
  source 1..80: mol_type = other DNA

SEQ ID NO: 201042 - DNA, 80 bp, synthetic construct; identical to SEQ ID NO: 16312
  source 1..80: mol_type = other DNA

SEQ ID NO: 201043 - DNA, 80 bp, synthetic construct; identical to SEQ ID NO: 16313
  source 1..80: mol_type = other DNA

SEQ ID NO: 201044 - DNA, 80 bp, synthetic construct; identical to SEQ ID NO: 16314
  source 1..80: mol_type = other DNA

SEQ ID NO: 201045 - DNA, 80 bp, synthetic construct; identical to SEQ ID NO: 16315
  source 1..80: mol_type = other DNA

SEQ ID NO: 201046 - DNA, 80 bp, synthetic construct; identical to SEQ ID NO: 16316
  source 1..80: mol_type = other DNA

SEQ ID NO: 201047 - DNA, 80 bp, synthetic construct; identical to SEQ ID NO: 16317
  source 1..80: mol_type = other DNA

SEQ ID NO: 201048 - DNA, 80 bp, synthetic construct; identical to SEQ ID NO: 16318
  source 1..80: mol_type = other DNA

SEQ ID NO: 201049 - DNA, 80 bp, synthetic construct; identical to SEQ ID NO: 16319
  source 1..80: mol_type = other DNA

SEQ ID NO: 201050 - DNA, 80 bp, synthetic construct; identical to SEQ ID NO: 16320
  source 1..80: mol_type = other DNA

SEQ ID NO: 201051 - DNA, 80 bp, synthetic construct; identical to SEQ ID NO: 16321
  source 1..80: mol_type = other DNA

SEQ ID NO: 201052 - DNA, 80 bp, synthetic construct; identical to SEQ ID NO: 16322
  source 1..80: mol_type = other DNA

SEQ ID NO: 201053 - DNA, 80 bp, synthetic construct; identical to SEQ ID NO: 16323
  source 1..80: mol_type = other DNA

SEQ ID NO: 201054 - DNA, 80 bp, synthetic construct; identical to SEQ ID NO: 16324
  source 1..80: mol_type = other DNA

SEQ ID NO: 201055 - DNA, 80 bp, synthetic construct; identical to SEQ ID NO: 16325
  source 1..80: mol_type = other DNA

SEQ ID NO: 201056 - DNA, 80 bp, synthetic construct; identical to SEQ ID NO: 16326
  source 1..80: mol_type = other DNA

SEQ ID NO: 201057 - DNA, 80 bp, synthetic construct; identical to SEQ ID NO: 16327
  source 1..80: mol_type = other DNA

SEQ ID NO: 201058 - DNA, 80 bp, synthetic construct; identical to SEQ ID NO: 16328
  source 1..80: mol_type = other DNA

SEQ ID NO: 201059 - DNA, 80 bp, synthetic construct; identical to SEQ ID NO: 16329
  source 1..80: mol_type = other DNA

SEQ ID NO: 201060 - DNA, 80 bp, synthetic construct; identical to SEQ ID NO: 16330
  source 1..80: mol_type = other DNA

SEQ ID NO: 201061 - DNA, 80 bp, synthetic construct; identical to SEQ ID NO: 16331
  source 1..80: mol_type = other DNA

SEQ ID NO: 201062 - DNA, 80 bp, synthetic construct; identical to SEQ ID NO: 16332
  source 1..80: mol_type = other DNA

SEQ ID NO: 201063 - DNA, 80 bp, synthetic construct; identical to SEQ ID NO: 16333
  source 1..80: mol_type = other DNA

SEQ ID NO: 201064 - DNA, 80 bp, synthetic construct; identical to SEQ ID NO: 16334
  source 1..80: mol_type = other DNA

SEQ ID NO: 201065 - DNA, 80 bp, synthetic construct; identical to SEQ ID NO: 16335
  source 1..80: mol_type = other DNA

SEQ ID NO: 201066 - DNA, 80 bp, synthetic construct; identical to SEQ ID NO: 16336
  source 1..80: mol_type = other DNA

SEQ ID NO: 201067 - DNA, 80 bp, synthetic construct; identical to SEQ ID NO: 16337
  source 1..80: mol_type = other DNA

SEQ ID NO: 201068 - DNA, 80 bp, synthetic construct; identical to SEQ ID NO: 16338
  source 1..80: mol_type = other DNA

SEQ ID NO: 201069 - DNA, 80 bp, synthetic construct; identical to SEQ ID NO: 16339
  source 1..80: mol_type = other DNA

SEQ ID NO: 201070 - DNA, 80 bp, synthetic construct; identical to SEQ ID NO: 16340
  source 1..80: mol_type = other DNA

SEQ ID NO: 201071 - DNA, 80 bp, synthetic construct; identical to SEQ ID NO: 16341
  source 1..80: mol_type = other DNA

SEQ ID NO: 201072 - DNA, 80 bp, synthetic construct; identical to SEQ ID NO: 16342
  source 1..80: mol_type = other DNA

SEQ ID NO: 201073 - DNA, 80 bp, synthetic construct; identical to SEQ ID NO: 16343
  source 1..80: mol_type = other DNA

SEQ ID NO: 201074 - DNA, 80 bp, synthetic construct; identical to SEQ ID NO: 16344
  source 1..80: mol_type = other DNA

SEQ ID NO: 201075 - DNA, 80 bp, synthetic construct; identical to SEQ ID NO: 16345
  source 1..80: mol_type = other DNA

SEQ ID NO: 201076 - DNA, 80 bp, synthetic construct; identical to SEQ ID NO: 16346
  source 1..80: mol_type = other DNA

SEQ ID NO: 201077 - DNA, 80 bp, synthetic construct; identical to SEQ ID NO: 16347
  source 1..80: mol_type = other DNA

SEQ ID NO: 201078 - DNA, 80 bp, synthetic construct; identical to SEQ ID NO: 16348
  source 1..80: mol_type = other DNA

SEQ ID NO: 201079 - DNA, 80 bp, synthetic construct; identical to SEQ ID NO: 16349
  source 1..80: mol_type = other DNA

SEQ ID NO: 201080 - DNA, 80 bp, synthetic construct; identical to SEQ ID NO: 16350
  source 1..80: mol_type = other DNA

SEQ ID NO: 201081 - DNA, 80 bp, synthetic construct; identical to SEQ ID NO: 16351
  source 1..80: mol_type = other DNA

SEQ ID NO: 201082 - DNA, 80 bp, synthetic construct; identical to SEQ ID NO: 16352
  source 1..80: mol_type = other DNA

SEQ ID NO: 201083 - DNA, 80 bp, synthetic construct; identical to SEQ ID NO: 16353
  source 1..80: mol_type = other DNA

SEQ ID NO: 201084 - DNA, 80 bp, synthetic construct; identical to SEQ ID NO: 16354
  source 1..80: mol_type = other DNA

SEQ ID NO: 201085 - DNA, 80 bp, synthetic construct; identical to SEQ ID NO: 16355
  source 1..80: mol_type = other DNA

SEQ ID NO: 201086 - DNA, 80 bp, synthetic construct; identical to SEQ ID NO: 16356
  source 1..80: mol_type = other DNA

SEQ ID NO: 201087 - DNA, 80 bp, synthetic construct; identical to SEQ ID NO: 16357
  source 1..80: mol_type = other DNA

SEQ ID NO: 201088 - DNA, 80 bp, synthetic construct; identical to SEQ ID NO: 16358
  source 1..80: mol_type = other DNA

SEQ ID NO: 201089 - DNA, 80 bp, synthetic construct; identical to SEQ ID NO: 16359
  source 1..80: mol_type = other DNA

SEQ ID NO: 201090 - DNA, 80 bp, synthetic construct; identical to SEQ ID NO: 16360
  source 1..80: mol_type = other DNA

SEQ ID NO: 201091 - DNA, 80 bp, synthetic construct; identical to SEQ ID NO: 16361
  source 1..80: mol_type = other DNA

SEQ ID NO: 201092 - DNA, 80 bp, synthetic construct; identical to SEQ ID NO: 16362
  source 1..80: mol_type = other DNA

SEQ ID NO: 201093 - DNA, 80 bp, synthetic construct; identical to SEQ ID NO: 16363
  source 1..80: mol_type = other DNA

SEQ ID NO: 201094 - DNA, 80 bp, synthetic construct; identical to SEQ ID NO: 16364
  source 1..80: mol_type = other DNA

SEQ ID NO: 201095 - DNA, 80 bp, synthetic construct; identical to SEQ ID NO: 16365
  source 1..80: mol_type = other DNA

SEQ ID NO: 201096 - DNA, 80 bp, synthetic construct; identical to SEQ ID NO: 16366
  source 1..80: mol_type = other DNA

SEQ ID NO: 201097 - DNA, 80 bp, synthetic construct; identical to SEQ ID NO: 16367
  source 1..80: mol_type = other DNA

SEQ ID NO: 201098 - DNA, 80 bp, synthetic construct; identical to SEQ ID NO: 16368
  source 1..80: mol_type = other DNA

SEQ ID NO: 201099 - DNA, 80 bp, synthetic construct; identical to SEQ ID NO: 16369
  source 1..80: mol_type = other DNA

SEQ ID NO: 201100 - DNA, 80 bp, synthetic construct; identical to SEQ ID NO: 16370
  source 1..80: mol_type = other DNA

SEQ ID NO: 201101 - DNA, 80 bp, synthetic construct; identical to SEQ ID NO: 16371
  source 1..80: mol_type = other DNA

SEQ ID NO: 201102 - DNA, 80 bp, synthetic construct; identical to SEQ ID NO: 16372
  source 1..80: mol_type = other DNA

SEQ ID NO: 201103 - DNA, 80 bp, synthetic construct; identical to SEQ ID NO: 16373
  source 1..80: mol_type = other DNA

SEQ ID NO: 201104 - DNA, 80 bp, synthetic construct; identical to SEQ ID NO: 16374
  source 1..80: mol_type = other DNA

SEQ ID NO: 201105 - DNA, 80 bp, synthetic construct; identical to SEQ ID NO: 16375
  source 1..80: mol_type = other DNA

SEQ ID NO: 201106 - DNA, 80 bp, synthetic construct; identical to SEQ ID NO: 16376
  source 1..80: mol_type = other DNA

SEQ ID NO: 201107 - DNA, 80 bp, synthetic construct; identical to SEQ ID NO: 16377
  source 1..80: mol_type = other DNA

SEQ ID NO: 201108 - DNA, 80 bp, synthetic construct; identical to SEQ ID NO: 16378
  source 1..80: mol_type = other DNA

SEQ ID NO: 201109 - DNA, 80 bp, synthetic construct; identical to SEQ ID NO: 16379
  source 1..80: mol_type = other DNA

SEQ ID NO: 201110 - DNA, 80 bp, synthetic construct; identical to SEQ ID NO: 16380
  source 1..80: mol_type = other DNA

SEQ ID NO: 201111 - DNA, 80 bp, synthetic construct; identical to SEQ ID NO: 16381
  source 1..80: mol_type = other DNA

SEQ ID NO: 201112 - DNA, 80 bp, synthetic construct; identical to SEQ ID NO: 16382
  source 1..80: mol_type = other DNA

SEQ ID NO: 201113 - DNA, 80 bp, synthetic construct; identical to SEQ ID NO: 16383
  source 1..80: mol_type = other DNA

SEQ ID NO: 201114 - DNA, 80 bp, synthetic construct; identical to SEQ ID NO: 16384
  source 1..80: mol_type = other DNA

SEQ ID NO: 201115 - DNA, 80 bp, synthetic construct; identical to SEQ ID NO: 16385
  source 1..80: mol_type = other DNA

SEQ ID NO: 201116 - DNA, 80 bp, synthetic construct; identical to SEQ ID NO: 16386
  source 1..80: mol_type = other DNA

SEQ ID NO: 201117 - DNA, 80 bp, synthetic construct; identical to SEQ ID NO: 16387
  source 1..80: mol_type = other DNA

SEQ ID NO: 201118 - DNA, 80 bp, synthetic construct; identical to SEQ ID NO: 16388
  source 1..80: mol_type = other DNA

SEQ ID NO: 201119 - DNA, 80 bp, synthetic construct; identical to SEQ ID NO: 16389
  source 1..80: mol_type = other DNA

SEQ ID NO: 201120 - DNA, 80 bp, synthetic construct; identical to SEQ ID NO: 16390
  source 1..80: mol_type = other DNA

SEQ ID NO: 201121 - DNA, 80 bp, synthetic construct; identical to SEQ ID NO: 16391
  source 1..80: mol_type = other DNA

SEQ ID NO: 201122 - DNA, 80 bp, synthetic construct; identical to SEQ ID NO: 16392
  source 1..80: mol_type = other DNA

SEQ ID NO: 201123 - DNA, 80 bp, synthetic construct; identical to SEQ ID NO: 16393
  source 1..80: mol_type = other DNA

SEQ ID NO: 201124 - DNA, 80 bp, synthetic construct; identical to SEQ ID NO: 16394
  source 1..80: mol_type = other DNA

SEQ ID NO: 201125 - DNA, 80 bp, synthetic construct; identical to SEQ ID NO: 16395
  source 1..80: mol_type = other DNA

SEQ ID NO: 201126 - DNA, 80 bp, synthetic construct; identical to SEQ ID NO: 16396
  source 1..80: mol_type = other DNA

SEQ ID NO: 201127 - DNA, 80 bp, synthetic construct; identical to SEQ ID NO: 16397
  source 1..80: mol_type = other DNA

SEQ ID NO: 201128 - DNA, 80 bp, synthetic construct; identical to SEQ ID NO: 16398
  source 1..80: mol_type = other DNA

SEQ ID NO: 201129 - DNA, 80 bp, synthetic construct; identical to SEQ ID NO: 16399
  source 1..80: mol_type = other DNA

SEQ ID NO: 201130 - DNA, 80 bp, synthetic construct; identical to SEQ ID NO: 16400
  source 1..80: mol_type = other DNA

SEQ ID NO: 201131 - DNA, 80 bp, synthetic construct; identical to SEQ ID NO: 16401
  source 1..80: mol_type = other DNA

SEQ ID NO: 201132 - DNA, 80 bp, synthetic construct; identical to SEQ ID NO: 16402
  source 1..80: mol_type = other DNA

SEQ ID NO: 201133 - DNA, 80 bp, synthetic construct; identical to SEQ ID NO: 16403
  source 1..80: mol_type = other DNA

SEQ ID NO: 201134 - DNA, 80 bp, synthetic construct; identical to SEQ ID NO: 16404
  source 1..80: mol_type = other DNA

SEQ ID NO: 201135 - DNA, 80 bp, synthetic construct; identical to SEQ ID NO: 16405
  source 1..80: mol_type = other DNA

SEQ ID NO: 201136 - DNA, 80 bp, synthetic construct; identical to SEQ ID NO: 16406
  source 1..80: mol_type = other DNA

SEQ ID NO: 201137 - DNA, 80 bp, synthetic construct; identical to SEQ ID NO: 16407
  source 1..80: mol_type = other DNA

SEQ ID NO: 201138 - DNA, 80 bp, synthetic construct; identical to SEQ ID NO: 16408
  source 1..80: mol_type = other DNA

SEQ ID NO: 201139 - DNA, 80 bp, synthetic construct; identical to SEQ ID NO: 16409
  source 1..80: mol_type = other DNA

SEQ ID NO: 201140 - DNA, 80 bp, synthetic construct; identical to SEQ ID NO: 16410
  source 1..80: mol_type = other DNA

SEQ ID NO: 201141 - DNA, 80 bp, synthetic construct; identical to SEQ ID NO: 16411
  source 1..80: mol_type = other DNA

SEQ ID NO: 201142 - DNA, 80 bp, synthetic construct; identical to SEQ ID NO: 16412
  source 1..80: mol_type = other DNA

SEQ ID NO: 201143 - DNA, 80 bp, synthetic construct; identical to SEQ ID NO: 16413
  source 1..80: mol_type = other DNA

SEQ ID NO: 201144 - DNA, 80 bp, synthetic construct; identical to SEQ ID NO: 16414
  source 1..80: mol_type = other DNA

SEQ ID NO: 201145 - DNA, 80 bp, synthetic construct; identical to SEQ ID NO: 16415
  source 1..80: mol_type = other DNA

SEQ ID NO: 201146 - DNA, 80 bp, synthetic construct; identical to SEQ ID NO: 16416
  source 1..80: mol_type = other DNA

SEQ ID NO: 201147 - DNA, 80 bp, synthetic construct; identical to SEQ ID NO: 16417
  source 1..80: mol_type = other DNA

SEQ ID NO: 201148 - DNA, 80 bp, synthetic construct; identical to SEQ ID NO: 16418
  source 1..80: mol_type = other DNA

SEQ ID NO: 201149 - DNA, 80 bp, synthetic construct; identical to SEQ ID NO: 16419
  source 1..80: mol_type = other DNA

SEQ ID NO: 201150 - DNA, 80 bp, synthetic construct; identical to SEQ ID NO: 16420
  source 1..80: mol_type = other DNA

SEQ ID NO: 201151 - DNA, 80 bp, synthetic construct; identical to SEQ ID NO: 16421
  source 1..80: mol_type = other DNA

SEQ ID NO: 201152 - DNA, 80 bp, synthetic construct; identical to SEQ ID NO: 16422
  source 1..80: mol_type = other DNA

SEQ ID NO: 201153 - DNA, 80 bp, synthetic construct; identical to SEQ ID NO: 16423
  source 1..80: mol_type = other DNA

SEQ ID NO: 201154 - DNA, 80 bp, synthetic construct; identical to SEQ ID NO: 16424
  source 1..80: mol_type = other DNA

SEQ ID NO: 201155 - DNA, 80 bp, synthetic construct; identical to SEQ ID NO: 16425
  source 1..80: mol_type = other DNA

SEQ ID NO: 201156 - DNA, 80 bp, synthetic construct; identical to SEQ ID NO: 16426
  source 1..80: mol_type = other DNA

SEQ ID NO: 201157 - DNA, 80 bp, synthetic construct; identical to SEQ ID NO: 16427
  source 1..80: mol_type = other DNA

SEQ ID NO: 201158 - DNA, 80 bp, synthetic construct; identical to SEQ ID NO: 16428
  source 1..80: mol_type = other DNA

SEQ ID NO: 201159 - DNA, 80 bp, synthetic construct; identical to SEQ ID NO: 16429
  source 1..80: mol_type = other DNA

SEQ ID NO: 201160 - DNA, 80 bp, synthetic construct; identical to SEQ ID NO: 16430
  source 1..80: mol_type = other DNA

SEQ ID NO: 201161 - DNA, 80 bp, synthetic construct; identical to SEQ ID NO: 16431
  source 1..80: mol_type = other DNA

SEQ ID NO: 201162 - DNA, 80 bp, synthetic construct; identical to SEQ ID NO: 16432
  source 1..80: mol_type = other DNA

SEQ ID NO: 201163 - DNA, 80 bp, synthetic construct; identical to SEQ ID NO: 16433
  source 1..80: mol_type = other DNA

SEQ ID NO: 201164 - DNA, 80 bp, synthetic construct; identical to SEQ ID NO: 16434
  source 1..80: mol_type = other DNA

SEQ ID NO: 201165 - DNA, 80 bp, synthetic construct; identical to SEQ ID NO: 16435
  source 1..80: mol_type = other DNA

SEQ ID NO: 201166 - DNA, 80 bp, synthetic construct; identical to SEQ ID NO: 16436
  source 1..80: mol_type = other DNA

SEQ ID NO: 201167 - DNA, 80 bp, synthetic construct; identical to SEQ ID NO: 16437
  source 1..80: mol_type = other DNA

SEQ ID NO: 201168 - DNA, 80 bp, synthetic construct; identical to SEQ ID NO: 16438
  source 1..80: mol_type = other DNA

SEQ ID NO: 201169 - DNA, 80 bp, synthetic construct; identical to SEQ ID NO: 16439
  source 1..80: mol_type = other DNA

SEQ ID NO: 201170 - DNA, 80 bp, synthetic construct; identical to SEQ ID NO: 16440
  source 1..80: mol_type = other DNA

SEQ ID NO: 201171 - DNA, 80 bp, synthetic construct; identical to SEQ ID NO: 16441
  source 1..80: mol_type = other DNA

SEQ ID NO: 201172 - DNA, 80 bp, synthetic construct; identical to SEQ ID NO: 16442
  source 1..80: mol_type = other DNA

SEQ ID NO: 201173 - DNA, 80 bp, synthetic construct; identical to SEQ ID NO: 16443
  source 1..80: mol_type = other DNA

SEQ ID NO: 201174 - DNA, 80 bp, synthetic construct; identical to SEQ ID NO: 16444
  source 1..80: mol_type = other DNA

SEQ ID NO: 201175 - DNA, 80 bp, synthetic construct; identical to SEQ ID NO: 16445
  source 1..80: mol_type = other DNA

SEQ ID NO: 201176 - DNA, 80 bp, synthetic construct; identical to SEQ ID NO: 16446
  source 1..80: mol_type = other DNA

SEQ ID NO: 201177 - DNA, 80 bp, synthetic construct; identical to SEQ ID NO: 16447
  source 1..80: mol_type = other DNA

SEQ ID NO: 201178 - DNA, 80 bp, synthetic construct; identical to SEQ ID NO: 16448
  source 1..80: mol_type = other DNA

SEQ ID NO: 201179 - DNA, 80 bp, synthetic construct; identical to SEQ ID NO: 16449
  source 1..80: mol_type = other DNA

SEQ ID NO: 201180 - DNA, 80 bp, synthetic construct; identical to SEQ ID NO: 16450
  source 1..80: mol_type = other DNA

SEQ ID NO: 201181 - DNA, 80 bp, synthetic construct; identical to SEQ ID NO: 16451
  source 1..80: mol_type = other DNA

SEQ ID NO: 201182 - DNA, 80 bp, synthetic construct; identical to SEQ ID NO: 16452
  source 1..80: mol_type = other DNA

SEQ ID NO: 201183 - DNA, 80 bp, synthetic construct; identical to SEQ ID NO: 16453
  source 1..80: mol_type = other DNA

SEQ ID NO: 201184 - DNA, 80 bp, synthetic construct; identical to SEQ ID NO: 16454
  source 1..80: mol_type = other DNA

SEQ ID NO: 201185 - DNA, 80 bp, synthetic construct; identical to SEQ ID NO: 16455
  source 1..80: mol_type = other DNA

SEQ ID NO: 201186 - DNA, 80 bp, synthetic construct; identical to SEQ ID NO: 16456
  source 1..80: mol_type = other DNA

SEQ ID NO: 201187 - DNA, 80 bp, synthetic construct; identical to SEQ ID NO: 16457
  source 1..80: mol_type = other DNA

SEQ ID NO: 201188 - DNA, 80 bp, synthetic construct; identical to SEQ ID NO: 16458
  source 1..80: mol_type = other DNA

SEQ ID NO: 201189 - DNA, 80 bp, synthetic construct; identical to SEQ ID NO: 16459
  source 1..80: mol_type = other DNA

SEQ ID NO: 201190 - DNA, 80 bp, synthetic construct; identical to SEQ ID NO: 16460
  source 1..80: mol_type = other DNA

SEQ ID NO: 201191 - DNA, 80 bp, synthetic construct; identical to SEQ ID NO: 16461
  source 1..80: mol_type = other DNA

SEQ ID NO: 201192 - DNA, 80 bp, synthetic construct; identical to SEQ ID NO: 16462
  source 1..80: mol_type = other DNA

SEQ ID NO: 201193 - DNA, 80 bp, synthetic construct; identical to SEQ ID NO: 16463
  source 1..80: mol_type = other DNA

SEQ ID NO: 201194 - DNA, 80 bp, synthetic construct; identical to SEQ ID NO: 16464
  source 1..80: mol_type = other DNA

SEQ ID NO: 201195 - DNA, 80 bp, synthetic construct; identical to SEQ ID NO: 16465
  source 1..80: mol_type = other DNA

SEQ ID NO: 201196 - DNA, 80 bp, synthetic construct; identical to SEQ ID NO: 16466
  source 1..80: mol_type = other DNA

SEQ ID NO: 201197 - DNA, 80 bp, synthetic construct; identical to SEQ ID NO: 16467
  source 1..80: mol_type = other DNA

SEQ ID NO: 201198 - DNA, 80 bp, synthetic construct; identical to SEQ ID NO: 16468
  source 1..80: mol_type = other DNA

SEQ ID NO: 201199 - DNA, 80 bp, synthetic construct; identical to SEQ ID NO: 16469
  source 1..80: mol_type = other DNA

SEQ ID NO: 201200 - DNA, 80 bp, synthetic construct; identical to SEQ ID NO: 16470
  source 1..80: mol_type = other DNA

SEQ ID NO: 201201 - DNA, 80 bp, synthetic construct; identical to SEQ ID NO: 16471
  source 1..80: mol_type = other DNA

SEQ ID NO: 201202 - DNA, 80 bp, synthetic construct; identical to SEQ ID NO: 16472
  source 1..80: mol_type = other DNA

SEQ ID NO: 201203 - DNA, 80 bp, synthetic construct; identical to SEQ ID NO: 16473
  source 1..80: mol_type = other DNA

SEQ ID NO: 201204 - DNA, 80 bp, synthetic construct; identical to SEQ ID NO: 16474
  source 1..80: mol_type = other DNA

SEQ ID NO: 201205 - DNA, 80 bp, synthetic construct; identical to SEQ ID NO: 16475
  source 1..80: mol_type = other DNA

SEQ ID NO: 201206 - DNA, 80 bp, synthetic construct; identical to SEQ ID NO: 16476
  source 1..80: mol_type = other DNA

SEQ ID NO: 201207 - DNA, 80 bp, synthetic construct; identical to SEQ ID NO: 16477
  source 1..80: mol_type = other DNA

SEQ ID NO: 201208 - DNA, 80 bp, synthetic construct; identical to SEQ ID NO: 16478
  source 1..80: mol_type = other DNA

SEQ ID NO: 201209 - DNA, 80 bp, synthetic construct; identical to SEQ ID NO: 16479
  source 1..80: mol_type = other DNA

SEQ ID NO: 201210 - DNA, 80 bp, synthetic construct; identical to SEQ ID NO: 16480
  source 1..80: mol_type = other DNA

SEQ ID NO: 201211 - DNA, 80 bp, synthetic construct; identical to SEQ ID NO: 16481
  source 1..80: mol_type = other DNA

SEQ ID NO: 201212 - DNA, 80 bp, synthetic construct; identical to SEQ ID NO: 16482
  source 1..80: mol_type = other DNA

SEQ ID NO: 201213 - DNA, 80 bp, synthetic construct; identical to SEQ ID NO: 16483
  source 1..80: mol_type = other DNA

SEQ ID NO: 201214 - DNA, 80 bp, synthetic construct; identical to SEQ ID NO: 16484
  source 1..80: mol_type = other DNA

SEQ ID NO: 201215 - DNA, 80 bp, synthetic construct; identical to SEQ ID NO: 16485
  source 1..80: mol_type = other DNA

SEQ ID NO: 201216 - DNA, 80 bp, synthetic construct; identical to SEQ ID NO: 16486
  source 1..80: mol_type = other DNA

SEQ ID NO: 201217 - DNA, 80 bp, synthetic construct; identical to SEQ ID NO: 16487
  source 1..80: mol_type = other DNA

SEQ ID NO: 201218 - DNA, 80 bp, synthetic construct; identical to SEQ ID NO: 16488
  source 1..80: mol_type = other DNA

SEQ ID NO: 201219 - DNA, 80 bp, synthetic construct; identical to SEQ ID NO: 16489
  source 1..80: mol_type = other DNA

SEQ ID NO: 201220 - DNA, 80 bp, synthetic construct; identical to SEQ ID NO: 16490
  source 1..80: mol_type = other DNA

SEQ ID NO: 201221 - DNA, 80 bp, synthetic construct; identical to SEQ ID NO: 16491
  source 1..80: mol_type = other DNA

SEQ ID NO: 201222 - DNA, 80 bp, synthetic construct; identical to SEQ ID NO: 16492
  source 1..80: mol_type = other DNA

SEQ ID NO: 201223 - DNA, 80 bp, synthetic construct; identical to SEQ ID NO: 16493
  source 1..80: mol_type = other DNA

SEQ ID NO: 201224 - DNA, 80 bp, synthetic construct; identical to SEQ ID NO: 16494
  source 1..80: mol_type = other DNA

SEQ ID NO: 201225 - DNA, 80 bp, synthetic construct; identical to SEQ ID NO: 16495
  source 1..80: mol_type = other DNA

SEQ ID NO: 201226 - DNA, 80 bp, synthetic construct; identical to SEQ ID NO: 16496
  source 1..80: mol_type = other DNA

SEQ ID NO: 201227 - DNA, 80 bp, synthetic construct; identical to SEQ ID NO: 16497
  source 1..80: mol_type = other DNA

SEQ ID NO: 201228 - DNA, 80 bp, synthetic construct; identical to SEQ ID NO: 16498
  source 1..80: mol_type = other DNA

SEQ ID NO: 201229 - DNA, 80 bp, synthetic construct; identical to SEQ ID NO: 16499
  source 1..80: mol_type = other DNA

SEQ ID NO: 201230 - DNA, 80 bp, synthetic construct; identical to SEQ ID NO: 16500
  source 1..80: mol_type = other DNA

SEQ ID NO: 201231 - DNA, 80 bp, synthetic construct; identical to SEQ ID NO: 16501
  source 1..80: mol_type = other DNA

SEQ ID NO: 201232 - DNA, 80 bp, synthetic construct; identical to SEQ ID NO: 16502
  source 1..80: mol_type = other DNA

SEQ ID NO: 201233 - DNA, 80 bp, synthetic construct; identical to SEQ ID NO: 16503
  source 1..80: mol_type = other DNA

SEQ ID NO: 201234 - DNA, 80 bp, synthetic construct; identical to SEQ ID NO: 16504
  source 1..80: mol_type = other DNA

SEQ ID NO: 201235 - DNA, 80 bp, synthetic construct; identical to SEQ ID NO: 16505
  source 1..80: mol_type = other DNA

SEQ ID NO: 201236 - DNA, 80 bp, synthetic construct; identical to SEQ ID NO: 16506
  source 1..80: mol_type = other DNA

SEQ ID NO: 201237 - DNA, 80 bp, synthetic construct; identical to SEQ ID NO: 16507
  source 1..80: mol_type = other DNA

SEQ ID NO: 201238 - DNA, 80 bp, synthetic construct; identical to SEQ ID NO: 16508
  source 1..80: mol_type = other DNA

SEQ ID NO: 201239 - DNA, 80 bp, synthetic construct; identical to SEQ ID NO: 16509
  source 1..80: mol_type = other DNA

SEQ ID NO: 201240 - DNA, 80 bp, synthetic construct; identical to SEQ ID NO: 16510
  source 1..80: mol_type = other DNA

SEQ ID NO: 201241 - DNA, 80 bp, synthetic construct; identical to SEQ ID NO: 16511
  source 1..80: mol_type = other DNA

SEQ ID NO: 201242 - DNA, 80 bp, synthetic construct; identical to SEQ ID NO: 16512
  source 1..80: mol_type = other DNA

SEQ ID NO: 201243 - DNA, 80 bp, synthetic construct; identical to SEQ ID NO: 16513
  source 1..80: mol_type = other DNA

SEQ ID NO: 201244 - DNA, 80 bp, synthetic construct; identical to SEQ ID NO: 16514
  source 1..80: mol_type = other DNA

SEQ ID NO: 201245 - DNA, 80 bp, synthetic construct; identical to SEQ ID NO: 16515
  source 1..80: mol_type = other DNA

SEQ ID NO: 201246 - DNA, 80 bp, synthetic construct; identical to SEQ ID NO: 16516
  source 1..80: mol_type = other DNA

SEQ ID NO: 201247 - DNA, 80 bp, synthetic construct; identical to SEQ ID NO: 16517
  source 1..80: mol_type = other DNA

SEQ ID NO: 201248 - DNA, 80 bp, synthetic construct; identical to SEQ ID NO: 16518
  source 1..80: mol_type = other DNA

SEQ ID NO: 201249 - DNA, 80 bp, synthetic construct; identical to SEQ ID NO: 16519
  source 1..80: mol_type = other DNA

SEQ ID NO: 201250 - DNA, 80 bp, synthetic construct; identical to SEQ ID NO: 16520
  source 1..80: mol_type = other DNA

SEQ ID NO: 201251 - DNA, 80 bp, synthetic construct; identical to SEQ ID NO: 16521
  source 1..80: mol_type = other DNA

SEQ ID NO: 201252 - DNA, 80 bp, synthetic construct; identical to SEQ ID NO: 16522
  source 1..80: mol_type = other DNA

SEQ ID NO: 201253 - DNA, 80 bp, synthetic construct; identical to SEQ ID NO: 16523
  source 1..80: mol_type = other DNA

SEQ ID NO: 201254 - DNA, 80 bp, synthetic construct; identical to SEQ ID NO: 16524
  source 1..80: mol_type = other DNA

SEQ ID NO: 201255 - DNA, 80 bp, synthetic construct; identical to SEQ ID NO: 16525
  source 1..80: mol_type = other DNA

SEQ ID NO: 201256 - DNA, 80 bp, synthetic construct; identical to SEQ ID NO: 16526
  source 1..80: mol_type = other DNA

SEQ ID NO: 201257 - DNA, 80 bp, synthetic construct; identical to SEQ ID NO: 16527
  source 1..80: mol_type = other DNA

SEQ ID NO: 201258 - DNA, 80 bp, synthetic construct; identical to SEQ ID NO: 16528
  source 1..80: mol_type = other DNA

SEQ ID NO: 201259 - DNA, 80 bp, synthetic construct; identical to SEQ ID NO: 16529
  source 1..80: mol_type = other DNA

SEQ ID NO: 201260 - DNA, 80 bp, synthetic construct; identical to SEQ ID NO: 16530
  source 1..80: mol_type = other DNA

SEQ ID NO: 201261 - DNA, 80 bp, synthetic construct; identical to SEQ ID NO: 16531
  source 1..80: mol_type = other DNA

SEQ ID NO: 201262 - DNA, 80 bp, synthetic construct; identical to SEQ ID NO: 16532
  source 1..80: mol_type = other DNA

SEQ ID NO: 201263 - DNA, 80 bp, synthetic construct; identical to SEQ ID NO: 16533
  source 1..80: mol_type = other DNA

SEQ ID NO: 201264 - DNA, 80 bp, synthetic construct; identical to SEQ ID NO: 16534
  source 1..80: mol_type = other DNA

SEQ ID NO: 201265 - DNA, 80 bp, synthetic construct; identical to SEQ ID NO: 16535
  source 1..80: mol_type = other DNA

SEQ ID NO: 201266 - DNA, 80 bp, synthetic construct; identical to SEQ ID NO: 16536
  source 1..80: mol_type = other DNA

SEQ ID NO: 201267 - DNA, 80 bp, synthetic construct; identical to SEQ ID NO: 16537
  source 1..80: mol_type = other DNA

SEQ ID NO: 201268 - DNA, 80 bp, synthetic construct; identical to SEQ ID NO: 16538
  source 1..80: mol_type = other DNA

SEQ ID NO: 201269 - DNA, 80 bp, synthetic construct; identical to SEQ ID NO: 16539
  source 1..80: mol_type = other DNA

SEQ ID NO: 201270 - DNA, 80 bp, synthetic construct; identical to SEQ ID NO: 16540
  source 1..80: mol_type = other DNA

SEQ ID NO: 201271 - DNA, 80 bp, synthetic construct; identical to SEQ ID NO: 16541
  source 1..80: mol_type = other DNA

SEQ ID NO: 201272 - DNA, 80 bp, synthetic construct; identical to SEQ ID NO: 16542
  source 1..80: mol_type = other DNA

SEQ ID NO: 201273 - DNA, 80 bp, synthetic construct; identical to SEQ ID NO: 16543
  source 1..80: mol_type = other DNA

SEQ ID NO: 201274 - DNA, 80 bp, synthetic construct; identical to SEQ ID NO: 16544
  source 1..80: mol_type = other DNA

SEQ ID NO: 201275 - DNA, 80 bp, synthetic construct; identical to SEQ ID NO: 16545
  source 1..80: mol_type = other DNA

SEQ ID NO: 201276 - DNA, 80 bp, synthetic construct; identical to SEQ ID NO: 16546
  source 1..80: mol_type = other DNA

SEQ ID NO: 201277 - DNA, 80 bp, synthetic construct; identical to SEQ ID NO: 16547
  source 1..80: mol_type = other DNA

SEQ ID NO: 201278 - DNA, 80 bp, synthetic construct; identical to SEQ ID NO: 16548
  source 1..80: mol_type = other DNA

SEQ ID NO: 201279 - DNA, 80 bp, synthetic construct; identical to SEQ ID NO: 16549
  source 1..80: mol_type = other DNA

SEQ ID NO: 201280 - DNA, 80 bp, synthetic construct; identical to SEQ ID NO: 16550
  source 1..80: mol_type = other DNA

SEQ ID NO: 201281 - DNA, 80 bp, synthetic construct; identical to SEQ ID NO: 16551
  source 1..80: mol_type = other DNA

SEQ ID NO: 201282 - DNA, 80 bp, synthetic construct; identical to SEQ ID NO: 16552
  source 1..80: mol_type = other DNA

SEQ ID NO: 201283 - DNA, 80 bp, synthetic construct; identical to SEQ ID NO: 16553
  source 1..80: mol_type = other DNA

SEQ ID NO: 201284 - DNA, 80 bp, synthetic construct; identical to SEQ ID NO: 16554
  source 1..80: mol_type = other DNA

SEQ ID NO: 201285 - DNA, 80 bp, synthetic construct; identical to SEQ ID NO: 16555
  source 1..80: mol_type = other DNA

SEQ ID NO: 201286 - DNA, 80 bp, synthetic construct; identical to SEQ ID NO: 16556
  source 1..80: mol_type = other DNA

SEQ ID NO: 201287 - DNA, 80 bp, synthetic construct; identical to SEQ ID NO: 16557
  source 1..80: mol_type = other DNA

SEQ ID NO: 201288 - DNA, 80 bp, synthetic construct; identical to SEQ ID NO: 16558
  source 1..80: mol_type = other DNA

SEQ ID NO: 201289 - DNA, 80 bp, synthetic construct; identical to SEQ ID NO: 16559
  source 1..80: mol_type = other DNA

SEQ ID NO: 201290 - DNA, 80 bp, synthetic construct; identical to SEQ ID NO: 16560
  source 1..80: mol_type = other DNA

SEQ ID NO: 201291 - DNA, 80 bp, synthetic construct; identical to SEQ ID NO: 16561
  source 1..80: mol_type = other DNA

SEQ ID NO: 201292 - DNA, 80 bp, synthetic construct; identical to SEQ ID NO: 16562
  source 1..80: mol_type = other DNA

SEQ ID NO: 201293 - DNA, 80 bp, synthetic construct; identical to SEQ ID NO: 16563
  source 1..80: mol_type = other DNA

SEQ ID NO: 201294 - DNA, 80 bp, synthetic construct; identical to SEQ ID NO: 16564
  source 1..80: mol_type = other DNA

SEQ ID NO: 201295 - DNA, 80 bp, synthetic construct; identical to SEQ ID NO: 16565
  source 1..80: mol_type = other DNA

SEQ ID NO: 201296 - DNA, 80 bp, synthetic construct; identical to SEQ ID NO: 16566
  source 1..80: mol_type = other DNA

SEQ ID NO: 201297 - DNA, 80 bp, synthetic construct; identical to SEQ ID NO: 16567
  source 1..80: mol_type = other DNA

SEQ ID NO: 201298 - DNA, 80 bp, synthetic construct; identical to SEQ ID NO: 16568
  source 1..80: mol_type = other DNA

SEQ ID NO: 201299 - DNA, 80 bp, synthetic construct; identical to SEQ ID NO: 16569
  source 1..80: mol_type = other DNA

SEQ ID NO: 201300 - DNA, 80 bp, synthetic construct; identical to SEQ ID NO: 16570
  source 1..80: mol_type = other DNA

SEQ ID NO: 201301 - DNA, 80 bp, synthetic construct; identical to SEQ ID NO: 16571
  source 1..80: mol_type = other DNA

SEQ ID NO: 201302 - DNA, 80 bp, synthetic construct; identical to SEQ ID NO: 16572
  source 1..80: mol_type = other DNA

SEQ ID NO: 201303 - DNA, 80 bp, synthetic construct; identical to SEQ ID NO: 16573
  source 1..80: mol_type = other DNA

SEQ ID NO: 201304 - DNA, 80 bp, synthetic construct; identical to SEQ ID NO: 16574
  source 1..80: mol_type = other DNA

SEQ ID NO: 201305 - DNA, 80 bp, synthetic construct; identical to SEQ ID NO: 16575
  source 1..80: mol_type = other DNA

SEQ ID NO: 201306 - DNA, 80 bp, synthetic construct; identical to SEQ ID NO: 16576
  source 1..80: mol_type = other DNA

SEQ ID NO: 201307 - DNA, 80 bp, synthetic construct; identical to SEQ ID NO: 16577
  source 1..80: mol_type = other DNA

SEQ ID NO: 201308 - DNA, 80 bp, synthetic construct; identical to SEQ ID NO: 16578
  source 1..80: mol_type = other DNA

SEQ ID NO: 201309 - DNA, 80 bp, synthetic construct; identical to SEQ ID NO: 16579
  source 1..80: mol_type = other DNA

SEQ ID NO: 201310 - DNA, 80 bp, synthetic construct; identical to SEQ ID NO: 16580
  source 1..80: mol_type = other DNA

SEQ ID NO: 201311 - DNA, 80 bp, synthetic construct; identical to SEQ ID NO: 16581
  source 1..80: mol_type = other DNA

SEQ ID NO: 201312 - DNA, 80 bp, synthetic construct; identical to SEQ ID NO: 16582
  source 1..80: mol_type = other DNA

SEQ ID NO: 201313 - DNA, 80 bp, synthetic construct; identical to SEQ ID NO: 16583
  source 1..80: mol_type = other DNA

SEQ ID NO: 201314 - DNA, 80 bp, synthetic construct; identical to SEQ ID NO: 16584
  source 1..80: mol_type = other DNA

SEQ ID NO: 201315 - DNA, 80 bp, synthetic construct; identical to SEQ ID NO: 16585
  source 1..80: mol_type = other DNA

SEQ ID NO: 201316 - DNA, 80 bp, synthetic construct; identical to SEQ ID NO: 16586
  source 1..80: mol_type = other DNA

SEQ ID NO: 201317 - DNA, 80 bp, synthetic construct; identical to SEQ ID NO: 16587
  source 1..80: mol_type = other DNA

SEQ ID NO: 201318 - DNA, 80 bp, synthetic construct; identical to SEQ ID NO: 16588
  source 1..80: mol_type = other DNA

SEQ ID NO: 201319 - DNA, 80 bp, synthetic construct; identical to SEQ ID NO: 16589
  source 1..80: mol_type = other DNA

SEQ ID NO: 201320 - DNA, 80 bp, synthetic construct; identical to SEQ ID NO: 16590
  source 1..80: mol_type = other DNA

SEQ ID NO: 201321 - DNA, 80 bp, synthetic construct; identical to SEQ ID NO: 16591
  source 1..80: mol_type = other DNA

SEQ ID NO: 201322 - DNA, 80 bp, synthetic construct; identical to SEQ ID NO: 16592
  source 1..80: mol_type = other DNA

SEQ ID NO: 201323 - DNA, 80 bp, synthetic construct; identical to SEQ ID NO: 16593
  source 1..80: mol_type = other DNA

SEQ ID NO: 201324 - DNA, 80 bp, synthetic construct; identical to SEQ ID NO: 16594
  source 1..80: mol_type = other DNA

SEQ ID NO: 201325 - DNA, 80 bp, synthetic construct; identical to SEQ ID NO: 16595
  source 1..80: mol_type = other DNA

SEQ ID NO: 201326 - DNA, 80 bp, synthetic construct; identical to SEQ ID NO: 16596
  source 1..80: mol_type = other DNA

SEQ ID NO: 201327 - DNA, 80 bp, synthetic construct; identical to SEQ ID NO: 16597
  source 1..80: mol_type = other DNA

SEQ ID NO: 201328 - DNA, 80 bp, synthetic construct; identical to SEQ ID NO: 16598
  source 1..80: mol_type = other DNA

SEQ ID NO: 201329 - DNA, 80 bp, synthetic construct; identical to SEQ ID NO: 16599
  source 1..80: mol_type = other DNA

SEQ ID NO: 201330 - DNA, 80 bp, synthetic construct; identical to SEQ ID NO: 16600
  source 1..80: mol_type = other DNA

SEQ ID NO: 201331 - DNA, 80 bp, synthetic construct; identical to SEQ ID NO: 16601
  source 1..80: mol_type = other DNA

SEQ ID NO: 201332 - DNA, 80 bp, synthetic construct; identical to SEQ ID NO: 16602
  source 1..80: mol_type = other DNA

SEQ ID NO: 201333 - DNA, 80 bp, synthetic construct; identical to SEQ ID NO: 16603
  source 1..80: mol_type = other DNA

SEQ ID NO: 201334 - DNA, 80 bp, synthetic construct; identical to SEQ ID NO: 16604
  source 1..80: mol_type = other DNA

SEQ ID NO: 201335 - DNA, 80 bp, synthetic construct; identical to SEQ ID NO: 16605
  source 1..80: mol_type = other DNA

SEQ ID NO: 201336 - DNA, 80 bp, synthetic construct; identical to SEQ ID NO: 16606
  source 1..80: mol_type = other DNA

SEQ ID NO: 201337 - DNA, 80 bp, synthetic construct; identical to SEQ ID NO: 16607
  source 1..80: mol_type = other DNA

SEQ ID NO: 201338 - DNA, 80 bp, synthetic construct; identical to SEQ ID NO: 16608
  source 1..80: mol_type = other DNA

SEQ ID NO: 201339 - DNA, 80 bp, synthetic construct; identical to SEQ ID NO: 16609
  source 1..80: mol_type = other DNA

SEQ ID NO: 201340 - DNA, 80 bp, synthetic construct; identical to SEQ ID NO: 16610
  source 1..80: mol_type = other DNA

SEQ ID NO: 201341 - DNA, 80 bp, synthetic construct; identical to SEQ ID NO: 16611
  source 1..80: mol_type = other DNA

SEQ ID NO: 201342 - DNA, 80 bp, synthetic construct; identical to SEQ ID NO: 16612
  source 1..80: mol_type = other DNA

SEQ ID NO: 201343 - DNA, 80 bp, synthetic construct; identical to SEQ ID NO: 16613
  source 1..80: mol_type = other DNA

SEQ ID NO: 201344 - DNA, 80 bp, synthetic construct; identical to SEQ ID NO: 16614
  source 1..80: mol_type = other DNA

SEQ ID NO: 201345 - DNA, 80 bp, synthetic construct; identical to SEQ ID NO: 16615
  source 1..80: mol_type = other DNA

SEQ ID NO: 201346 - DNA, 80 bp, synthetic construct; identical to SEQ ID NO: 16616
  source 1..80: mol_type = other DNA

SEQ ID NO: 201347 - DNA, 80 bp, synthetic construct; identical to SEQ ID NO: 16617
  source 1..80: mol_type = other DNA

SEQ ID NO: 201348 - DNA, 80 bp, synthetic construct; identical to SEQ ID NO: 16618
  source 1..80: mol_type = other DNA

SEQ ID NO: 201349 - DNA, 80 bp, synthetic construct; identical to SEQ ID NO: 16619
  source 1..80: mol_type = other DNA

SEQ ID NO: 201350 - DNA, 80 bp, synthetic construct; identical to SEQ ID NO: 16620
  source 1..80: mol_type = other DNA

SEQ ID NO: 201351 - DNA, 80 bp, synthetic construct; identical to SEQ ID NO: 16621
  source 1..80: mol_type = other DNA

SEQ ID NO: 201352 - DNA, 80 bp, synthetic construct; identical to SEQ ID NO: 16622
  source 1..80: mol_type = other DNA

SEQ ID NO: 201353 - DNA, 80 bp, synthetic construct; identical to SEQ ID NO: 16623
  source 1..80: mol_type = other DNA

SEQ ID NO: 201354 - DNA, 80 bp, synthetic construct; identical to SEQ ID NO: 16624
  source 1..80: mol_type = other DNA

SEQ ID NO: 201355 - DNA, 80 bp, synthetic construct; identical to SEQ ID NO: 16625
  source 1..80: mol_type = other DNA

SEQ ID NO: 201356 - DNA, 80 bp, synthetic construct; identical to SEQ ID NO: 16626
  source 1..80: mol_type = other DNA

SEQ ID NO: 201357 - DNA, 80 bp, synthetic construct; identical to SEQ ID NO: 16627
  source 1..80: mol_type = other DNA

SEQ ID NO: 201358 - DNA, 80 bp, synthetic construct; identical to SEQ ID NO: 16628
  source 1..80: mol_type = other DNA

SEQ ID NO: 201359 - DNA, 80 bp, synthetic construct; identical to SEQ ID NO: 16629
  source 1..80: mol_type = other DNA

SEQ ID NO: 201360 - DNA, 80 bp, synthetic construct; identical to SEQ ID NO: 16630
  source 1..80: mol_type = other DNA

SEQ ID NO: 201361 - DNA, 80 bp, synthetic construct; identical to SEQ ID NO: 16631
  source 1..80: mol_type = other DNA

SEQ ID NO: 201362 - DNA, 80 bp, synthetic construct; identical to SEQ ID NO: 16632
  source 1..80: mol_type = other DNA

SEQ ID NO: 201363 - DNA, 80 bp, synthetic construct; identical to SEQ ID NO: 16633
  source 1..80: mol_type = other DNA

SEQ ID NO: 201364 - DNA, 80 bp, synthetic construct; identical to SEQ ID NO: 16634
  source 1..80: mol_type = other DNA

SEQ ID NO: 201365 - DNA, 80 bp, synthetic construct; identical to SEQ ID NO: 16635
  source 1..80: mol_type = other DNA

SEQ ID NO: 201366 - DNA, 80 bp, synthetic construct; identical to SEQ ID NO: 16636
  source 1..80: mol_type = other DNA

SEQ ID NO: 201367 - DNA, 80 bp, synthetic construct; identical to SEQ ID NO: 16637
  source 1..80: mol_type = other DNA

SEQ ID NO: 201368 - DNA, 80 bp, synthetic construct; identical to SEQ ID NO: 16638
  source 1..80: mol_type = other DNA

SEQ ID NO: 201369 - DNA, 80 bp, synthetic construct; identical to SEQ ID NO: 16639
  source 1..80: mol_type = other DNA

SEQ ID NO: 201370 - DNA, 80 bp, synthetic construct; identical to SEQ ID NO: 16640
  source 1..80: mol_type = other DNA

SEQ ID NO: 201371 - DNA, 80 bp, synthetic construct; identical to SEQ ID NO: 16641
  source 1..80: mol_type = other DNA

SEQ ID NO: 201372 - DNA, 80 bp, synthetic construct; identical to SEQ ID NO: 16642
  source 1..80: mol_type = other DNA

SEQ ID NO: 201373 - DNA, 80 bp, synthetic construct; identical to SEQ ID NO: 16643
  source 1..80: mol_type = other DNA

SEQ ID NO: 201374 - DNA, 80 bp, synthetic construct; identical to SEQ ID NO: 16644
  source 1..80: mol_type = other DNA

SEQ ID NO: 201375 - DNA, 80 bp, synthetic construct; identical to SEQ ID NO: 16645
  source 1..80: mol_type = other DNA

SEQ ID NO: 201376 - DNA, 80 bp, synthetic construct; identical to SEQ ID NO: 16646
  source 1..80: mol_type = other DNA

SEQ ID NO: 201377 - DNA, 80 bp, synthetic construct; identical to SEQ ID NO: 16647
  source 1..80: mol_type = other DNA

SEQ ID NO: 201378 - DNA, 80 bp, synthetic construct; identical to SEQ ID NO: 16648
  source 1..80: mol_type = other DNA

SEQ ID NO: 201379 - DNA, 80 bp, synthetic construct; identical to SEQ ID NO: 16649
  source 1..80: mol_type = other DNA

SEQ ID NO: 201380 - DNA, 80 bp, synthetic construct; identical to SEQ ID NO: 16650
  source 1..80: mol_type = other DNA

SEQ ID NO: 201381 - DNA, 80 bp, synthetic construct; identical to SEQ ID NO: 16651
  source 1..80: mol_type = other DNA

SEQ ID NO: 201382 - DNA, 80 bp, synthetic construct; identical to SEQ ID NO: 16652
  source 1..80: mol_type = other DNA

SEQ ID NO: 201383 - DNA, 80 bp, synthetic construct; identical to SEQ ID NO: 16653
  source 1..80: mol_type = other DNA

SEQ ID NO: 201384 - DNA, 80 bp, synthetic construct; identical to SEQ ID NO: 16654
  source 1..80: mol_type = other DNA

SEQ ID NO: 201385 - DNA, 80 bp, synthetic construct; identical to SEQ ID NO: 16655
  source 1..80: mol_type = other DNA

SEQ ID NO: 201386 - DNA, 80 bp, synthetic construct; identical to SEQ ID NO: 16656
  source 1..80: mol_type = other DNA

SEQ ID NO: 201387 - DNA, 80 bp, synthetic construct; identical to SEQ ID NO: 16657
  source 1..80: mol_type = other DNA

SEQ ID NO: 201388 - DNA, 80 bp, synthetic construct; identical to SEQ ID NO: 16658
  source 1..80: mol_type = other DNA

SEQ ID NO: 201389 - DNA, 80 bp, synthetic construct; identical to SEQ ID NO: 16659
  source 1..80: mol_type = other DNA

SEQ ID NO: 201390 - DNA, 80 bp, synthetic construct; identical to SEQ ID NO: 16660
  source 1..80: mol_type = other DNA

SEQ ID NO: 201391 - DNA, 80 bp, synthetic construct; identical to SEQ ID NO: 16661
  source 1..80: mol_type = other DNA

SEQ ID NO: 201392 - DNA, 80 bp, synthetic construct; identical to SEQ ID NO: 16662
  source 1..80: mol_type = other DNA

SEQ ID NO: 201393 - DNA, 80 bp, synthetic construct; identical to SEQ ID NO: 16663
  source 1..80: mol_type = other DNA

SEQ ID NO: 201394 - DNA, 80 bp, synthetic construct; identical to SEQ ID NO: 16664
  source 1..80: mol_type = other DNA

SEQ ID NO: 201395 - DNA, 80 bp, synthetic construct; identical to SEQ ID NO: 16665
  source 1..80: mol_type = other DNA

SEQ ID NO: 201396 - DNA, 80 bp, synthetic construct; identical to SEQ ID NO: 16666
  source 1..80: mol_type = other DNA

SEQ ID NO: 201397 - DNA, 80 bp, synthetic construct; identical to SEQ ID NO: 16667
  source 1..80: mol_type = other DNA

SEQ ID NO: 201398 - DNA, 80 bp, synthetic construct; identical to SEQ ID NO: 16668
  source 1..80: mol_type = other DNA

SEQ ID NO: 201399 - DNA, 80 bp, synthetic construct; identical to SEQ ID NO: 16669
  source 1..80: mol_type = other DNA

SEQ ID NO: 201400 - DNA, 80 bp, synthetic construct; identical to SEQ ID NO: 16670
  source 1..80: mol_type = other DNA

SEQ ID NO: 201401 - DNA, 80 bp, synthetic construct; identical to SEQ ID NO: 16671
  source 1..80: mol_type = other DNA

SEQ ID NO: 201402 - DNA, 80 bp, synthetic construct; identical to SEQ ID NO: 16672
  source 1..80: mol_type = other DNA

SEQ ID NO: 201403 - DNA, 80 bp, synthetic construct; identical to SEQ ID NO: 16673
  source 1..80: mol_type = other DNA

SEQ ID NO: 201404 - DNA, 80 bp, synthetic construct; identical to SEQ ID NO: 16674
  source 1..80: mol_type = other DNA

SEQ ID NO: 201405 - DNA, 80 bp, synthetic construct; identical to SEQ ID NO: 16675
  source 1..80: mol_type = other DNA

SEQ ID NO: 201406 - DNA, 80 bp, synthetic construct; identical to SEQ ID NO: 16676
  source 1..80: mol_type = other DNA

SEQ ID NO: 201407 - DNA, 80 bp, synthetic construct; identical to SEQ ID NO: 16677
  source 1..80: mol_type = other DNA

SEQ ID NO: 201408 - DNA, 80 bp, synthetic construct; identical to SEQ ID NO: 16678
  source 1..80: mol_type = other DNA

SEQ ID NO: 201409 - DNA, 80 bp, synthetic construct; identical to SEQ ID NO: 16679
  source 1..80: mol_type = other DNA

SEQ ID NO: 201410 - DNA, 80 bp, synthetic construct; identical to SEQ ID NO: 16680
  source 1..80: mol_type = other DNA

SEQ ID NO: 201411 - DNA, 80 bp, synthetic construct; identical to SEQ ID NO: 16681
  source 1..80: mol_type = other DNA

SEQ ID NO: 201412 - DNA, 80 bp, synthetic construct; identical to SEQ ID NO: 16682
  source 1..80: mol_type = other DNA

SEQ ID NO: 201413 - DNA, 80 bp, synthetic construct; identical to SEQ ID NO: 16683
  source 1..80: mol_type = other DNA

SEQ ID NO: 201414 - DNA, 80 bp, synthetic construct; identical to SEQ ID NO: 16684
  source 1..80: mol_type = other DNA

SEQ ID NO: 201415 - DNA, 80 bp, synthetic construct; identical to SEQ ID NO: 16685
  source 1..80: mol_type = other DNA

SEQ ID NO: 201416 - DNA, 80 bp, synthetic construct; identical to SEQ ID NO: 16686
  source 1..80: mol_type = other DNA

SEQ ID NO: 201417 - DNA, 80 bp, synthetic construct; identical to SEQ ID NO: 16687
  source 1..80: mol_type = other DNA

SEQ ID NO: 201418 - DNA, 80 bp, synthetic construct; identical to SEQ ID NO: 16688
  source 1..80: mol_type = other DNA

SEQ ID NO: 201419 - DNA, 80 bp, synthetic construct; identical to SEQ ID NO: 16689
  source 1..80: mol_type = other DNA

SEQ ID NO: 201420 - DNA, 80 bp, synthetic construct; identical to SEQ ID NO: 16690
  source 1..80: mol_type = other DNA

SEQ ID NO: 201421 - DNA, 80 bp, synthetic construct; identical to SEQ ID NO: 16691
  source 1..80: mol_type = other DNA

SEQ ID NO: 201422 - DNA, 80 bp, synthetic construct; identical to SEQ ID NO: 16692
  source 1..80: mol_type = other DNA

SEQ ID NO: 201423 - DNA, 80 bp, synthetic construct; identical to SEQ ID NO: 16693
  source 1..80: mol_type = other DNA

SEQ ID NO: 201424 - DNA, 80 bp, synthetic construct; identical to SEQ ID NO: 16694
  source 1..80: mol_type = other DNA

SEQ ID NO: 201425 - DNA, 80 bp, synthetic construct; identical to SEQ ID NO: 16695
  source 1..80: mol_type = other DNA

SEQ ID NO: 201426 - DNA, 80 bp, synthetic construct; identical to SEQ ID NO: 16696
  source 1..80: mol_type = other DNA

SEQ ID NO: 201427 - DNA, 80 bp, synthetic construct; identical to SEQ ID NO: 16697
  source 1..80: mol_type = other DNA

SEQ ID NO: 201428 - DNA, 80 bp, synthetic construct; identical to SEQ ID NO: 16698
  source 1..80: mol_type = other DNA

SEQ ID NO: 201429 - DNA, 80 bp, synthetic construct; identical to SEQ ID NO: 16699
  source 1..80: mol_type = other DNA

SEQ ID NO: 201430 - DNA, 80 bp, synthetic construct; identical to SEQ ID NO: 16700
  source 1..80: mol_type = other DNA

SEQ ID NO: 201431 - DNA, 80 bp, synthetic construct; identical to SEQ ID NO: 16701
  source 1..80: mol_type = other DNA

SEQ ID NO: 201432 - DNA, 80 bp, synthetic construct; identical to SEQ ID NO: 16702
  source 1..80: mol_type = other DNA

SEQ ID NO: 201433 - DNA, 80 bp, synthetic construct; identical to SEQ ID NO: 16703
  source 1..80: mol_type = other DNA

SEQ ID NO: 201434 - DNA, 80 bp, synthetic construct; identical to SEQ ID NO: 16704
  source 1..80: mol_type = other DNA

SEQ ID NO: 201435 - DNA, 80 bp, synthetic construct; identical to SEQ ID NO: 16705
  source 1..80: mol_type = other DNA

SEQ ID NO: 201436 - DNA, 80 bp, synthetic construct; identical to SEQ ID NO: 16706
  source 1..80: mol_type = other DNA

SEQ ID NO: 201437 - DNA, 80 bp, synthetic construct; identical to SEQ ID NO: 16707
  source 1..80: mol_type = other DNA

SEQ ID NO: 201438 - DNA, 80 bp, synthetic construct; identical to SEQ ID NO: 16708
  source 1..80: mol_type = other DNA

SEQ ID NO: 201439 - DNA, 80 bp, synthetic construct; identical to SEQ ID NO: 16709
  source 1..80: mol_type = other DNA

SEQ ID NO: 201440 - DNA, 80 bp, synthetic construct; identical to SEQ ID NO: 16710
  source 1..80: mol_type = other DNA

SEQ ID NO: 201441 - DNA, 80 bp, synthetic construct; identical to SEQ ID NO: 16711
  source 1..80: mol_type = other DNA

SEQ ID NO: 201442 - DNA, 80 bp, synthetic construct; identical to SEQ ID NO: 16712
  source 1..80: mol_type = other DNA

SEQ ID NO: 201443 - DNA, 80 bp, synthetic construct; identical to SEQ ID NO: 16713
  source 1..80: mol_type = other DNA

SEQ ID NO: 201444 - DNA, 80 bp, synthetic construct; identical to SEQ ID NO: 16714
  source 1..80: mol_type = other DNA

SEQ ID NO: 201445 - DNA, 80 bp, synthetic construct; identical to SEQ ID NO: 16715
  source 1..80: mol_type = other DNA

SEQ ID NO: 201446 - DNA, 80 bp, synthetic construct; identical to SEQ ID NO: 16716
  source 1..80: mol_type = other DNA

SEQ ID NO: 201447 - DNA, 80 bp, synthetic construct; identical to SEQ ID NO: 16717
  source 1..80: mol_type = other DNA

SEQ ID NO: 201448 - DNA, 80 bp, synthetic construct; identical to SEQ ID NO: 16718
  source 1..80: mol_type = other DNA

SEQ ID NO: 201449 - DNA, 80 bp, synthetic construct; identical to SEQ ID NO: 16719
  source 1..80: mol_type = other DNA

SEQ ID NO: 201450 - DNA, 80 bp, synthetic construct; identical to SEQ ID NO: 16720
  source 1..80: mol_type = other DNA

SEQ ID NO: 201451 - DNA, 80 bp, synthetic construct; identical to SEQ ID NO: 16721
  source 1..80: mol_type = other DNA

SEQ ID NO: 201452 - DNA, 80 bp, synthetic construct; identical to SEQ ID NO: 16722
  source 1..80: mol_type = other DNA

SEQ ID NO: 201453 - DNA, 80 bp, synthetic construct; identical to SEQ ID NO: 16723
  source 1..80: mol_type = other DNA

SEQ ID NO: 201454 - DNA, 80 bp, synthetic construct; identical to SEQ ID NO: 16724
  source 1..80: mol_type = other DNA

SEQ ID NO: 201455 - DNA, 80 bp, synthetic construct; identical to SEQ ID NO: 16725
  source 1..80: mol_type = other DNA

SEQ ID NO: 201456 - DNA, 80 bp, synthetic construct; identical to SEQ ID NO: 16726
  source 1..80: mol_type = other DNA

SEQ ID NO: 201457 - DNA, 80 bp, synthetic construct; identical to SEQ ID NO: 16727
  source 1..80: mol_type = other DNA

SEQ ID NO: 201458 - DNA, 80 bp, synthetic construct; identical to SEQ ID NO: 16728
  source 1..80: mol_type = other DNA

SEQ ID NO: 201459 - DNA, 80 bp, synthetic construct; identical to SEQ ID NO: 16729
  source 1..80: mol_type = other DNA

SEQ ID NO: 201460 - DNA, 80 bp, synthetic construct; identical to SEQ ID NO: 16730
  source 1..80: mol_type = other DNA

SEQ ID NO: 201461 - DNA, 80 bp, synthetic construct; identical to SEQ ID NO: 16731
  source 1..80: mol_type = other DNA

SEQ ID NO: 201462 - DNA, 80 bp, synthetic construct; identical to SEQ ID NO: 16732
  source 1..80: mol_type = other DNA

SEQ ID NO: 201463 - DNA, 80 bp, synthetic construct; identical to SEQ ID NO: 16733
  source 1..80: mol_type = other DNA

SEQ ID NO: 201464 - DNA, 80 bp, synthetic construct; identical to SEQ ID NO: 16734
  source 1..80: mol_type = other DNA

SEQ ID NO: 201465 - DNA, 80 bp, synthetic construct; identical to SEQ ID NO: 16735
  source 1..80: mol_type = other DNA

SEQ ID NO: 201466 - DNA, 80 bp, synthetic construct; identical to SEQ ID NO: 16736
  source 1..80: mol_type = other DNA

SEQ ID NO: 201467 - DNA, 80 bp, synthetic construct; identical to SEQ ID NO: 16737
  source 1..80: mol_type = other DNA

SEQ ID NO: 201468 - DNA, 80 bp, synthetic construct; identical to SEQ ID NO: 16738
  source 1..80: mol_type = other DNA

SEQ ID NO: 201469 - DNA, 80 bp, synthetic construct; identical to SEQ ID NO: 16739
  source 1..80: mol_type = other DNA

SEQ ID NO: 201470 - DNA, 80 bp, synthetic construct; identical to SEQ ID NO: 16740
  source 1..80: mol_type = other DNA

SEQ ID NO: 201471 - DNA, 80 bp, synthetic construct; identical to SEQ ID NO: 16741
  source 1..80: mol_type = other DNA

SEQ ID NO: 201472 - DNA, 80 bp, synthetic construct; identical to SEQ ID NO: 16742
  source 1..80: mol_type = other DNA

SEQ ID NO: 201473 - DNA, 80 bp, synthetic construct; identical to SEQ ID NO: 16743
  source 1..80: mol_type = other DNA

SEQ ID NO: 201474 - DNA, 80 bp, synthetic construct; identical to SEQ ID NO: 16744
  source 1..80: mol_type = other DNA

SEQ ID NO: 201475 - DNA, 80 bp, synthetic construct; identical to SEQ ID NO: 16745
  source 1..80: mol_type = other DNA

SEQ ID NO: 201476 - DNA, 80 bp, synthetic construct; identical to SEQ ID NO: 16746
  source 1..80: mol_type = other DNA

SEQ ID NO: 201477 - DNA, 80 bp, synthetic construct; identical to SEQ ID NO: 16747
  source 1..80: mol_type = other DNA

SEQ ID NO: 201478 - DNA, 80 bp, synthetic construct; identical to SEQ ID NO: 16748
  source 1..80: mol_type = other DNA

SEQ ID NO: 201479 - DNA, 80 bp, synthetic construct; identical to SEQ ID NO: 16749
  source 1..80: mol_type = other DNA

SEQ ID NO: 201480 - DNA, 80 bp, synthetic construct; identical to SEQ ID NO: 16750
  source 1..80: mol_type = other DNA

SEQ ID NO: 201481 - DNA, 80 bp, synthetic construct; identical to SEQ ID NO: 16751
  source 1..80: mol_type = other DNA

SEQ ID NO: 201482 - DNA, 80 bp, synthetic construct; identical to SEQ ID NO: 16752
  source 1..80: mol_type = other DNA

SEQ ID NO: 201483 - DNA, 80 bp, synthetic construct; identical to SEQ ID NO: 16753
  source 1..80: mol_type = other DNA

SEQ ID NO: 201484 - DNA, 80 bp, synthetic construct; identical to SEQ ID NO: 16754
  source 1..80: mol_type = other DNA

SEQ ID NO: 201485 - DNA, 80 bp, synthetic construct; identical to SEQ ID NO: 16755
  source 1..80: mol_type = other DNA

SEQ ID NO: 201486 - DNA, 80 bp, synthetic construct; identical to SEQ ID NO: 16756
  source 1..80: mol_type = other DNA

SEQ ID NO: 201487 - DNA, 80 bp, synthetic construct; identical to SEQ ID NO: 16757
  source 1..80: mol_type = other DNA

SEQ ID NO: 201488 - DNA, 80 bp, synthetic construct; identical to SEQ ID NO: 16758
  source 1..80: mol_type = other DNA

SEQ ID NO: 201489 - DNA, 80 bp, synthetic construct; identical to SEQ ID NO: 16759
  source 1..80: mol_type = other DNA

SEQ ID NO: 201490 - DNA, 80 bp, synthetic construct; identical to SEQ ID NO: 16760
  source 1..80: mol_type = other DNA

SEQ ID NO: 201491 - DNA, 80 bp, synthetic construct; identical to SEQ ID NO: 16761
  source 1..80: mol_type = other DNA

SEQ ID NO: 201492 - DNA, 80 bp, synthetic construct; identical to SEQ ID NO: 16762
  source 1..80: mol_type = other DNA

SEQ ID NO: 201493 - DNA, 80 bp, synthetic construct; identical to SEQ ID NO: 16763
  source 1..80: mol_type = other DNA

SEQ ID NO: 201494 - DNA, 80 bp, synthetic construct; identical to SEQ ID NO: 16764
  source 1..80: mol_type = other DNA

SEQ ID NO: 201495 - DNA, 80 bp, synthetic construct; identical to SEQ ID NO: 16765
  source 1..80: mol_type = other DNA

SEQ ID NO: 201496 - DNA, 80 bp, synthetic construct; identical to SEQ ID NO: 16766
  source 1..80: mol_type = other DNA

SEQ ID NO: 201497 - DNA, 80 bp, synthetic construct; identical to SEQ ID NO: 16767
  source 1..80: mol_type = other DNA

SEQ ID NO: 201498 - DNA, 80 bp, synthetic construct; identical to SEQ ID NO: 16768
  source 1..80: mol_type = other DNA

SEQ ID NO: 201499 - DNA, 80 bp, synthetic construct; identical to SEQ ID NO: 16769
  source 1..80: mol_type = other DNA

SEQ ID NO: 201500 - DNA, 80 bp, synthetic construct; identical to SEQ ID NO: 16770
  source 1..80: mol_type = other DNA

SEQ ID NO: 201501 - DNA, 80 bp, synthetic construct; identical to SEQ ID NO: 16771
  source 1..80: mol_type = other DNA

SEQ ID NO: 201502 - DNA, 80 bp, synthetic construct; identical to SEQ ID NO: 16772
  source 1..80: mol_type = other DNA

SEQ ID NO: 201503 - DNA, 80 bp, synthetic construct; identical to SEQ ID NO: 16773
  source 1..80: mol_type = other DNA

SEQ ID NO: 201504 - DNA, 80 bp, synthetic construct; identical to SEQ ID NO: 16774
  source 1..80: mol_type = other DNA

SEQ ID NO: 201505 - DNA, 80 bp, synthetic construct; identical to SEQ ID NO: 16775
  source 1..80: mol_type = other DNA

SEQ ID NO: 201506 - DNA, 80 bp, synthetic construct; identical to SEQ ID NO: 16776
  source 1..80: mol_type = other DNA

SEQ ID NO: 201507 - DNA, 80 bp, synthetic construct; identical to SEQ ID NO: 16777
  source 1..80: mol_type = other DNA

SEQ ID NO: 201508 - DNA, 80 bp, synthetic construct; identical to SEQ ID NO: 16778
  source 1..80: mol_type = other DNA

SEQ ID NO: 201509 - DNA, 80 bp, synthetic construct; identical to SEQ ID NO: 16779
  source 1..80: mol_type = other DNA

SEQ ID NO: 201510 - DNA, 80 bp, synthetic construct; identical to SEQ ID NO: 16780
  source 1..80: mol_type = other DNA

SEQ ID NO: 201511 - DNA, 80 bp, synthetic construct; identical to SEQ ID NO: 16781
  source 1..80: mol_type = other DNA

SEQ ID NO: 201512 - DNA, 80 bp, synthetic construct; identical to SEQ ID NO: 16782
  source 1..80: mol_type = other DNA

SEQ ID NO: 201513 - DNA, 80 bp, synthetic construct; identical to SEQ ID NO: 16783
  source 1..80: mol_type = other DNA

SEQ ID NO: 201514 - DNA, 80 bp, synthetic construct; identical to SEQ ID NO: 16784
  source 1..80: mol_type = other DNA

SEQ ID NO: 201515 - DNA, 80 bp, synthetic construct; identical to SEQ ID NO: 16785
  source 1..80: mol_type = other DNA

SEQ ID NO: 201516 - DNA, 80 bp, synthetic construct; identical to SEQ ID NO: 16786
  source 1..80: mol_type = other DNA

SEQ ID NO: 201517 - DNA, 80 bp, synthetic construct; identical to SEQ ID NO: 16787
  source 1..80: mol_type = other DNA

SEQ ID NO: 201518 - DNA, 80 bp, synthetic construct; identical to SEQ ID NO: 16788
  source 1..80: mol_type = other DNA

SEQ ID NO: 201519 - DNA, 80 bp, synthetic construct; identical to SEQ ID NO: 16789
  source 1..80: mol_type = other DNA

SEQ ID NO: 201520 - DNA, 80 bp, synthetic construct; identical to SEQ ID NO: 16790
  source 1..80: mol_type = other DNA

SEQ ID NO: 201521 - DNA, 80 bp, synthetic construct; identical to SEQ ID NO: 16791
  source 1..80: mol_type = other DNA

SEQ ID NO: 201522 - DNA, 80 bp, synthetic construct; identical to SEQ ID NO: 16792
  source 1..80: mol_type = other DNA

SEQ ID NO: 201523 - DNA, 80 bp, synthetic construct; identical to SEQ ID NO: 16793
  source 1..80: mol_type = other DNA

SEQ ID NO: 201524 - DNA, 80 bp, synthetic construct; identical to SEQ ID NO: 16794
  source 1..80: mol_type = other DNA

SEQ ID NO: 201525 - DNA, 80 bp, synthetic construct; identical to SEQ ID NO: 16795
  source 1..80: mol_type = other DNA

SEQ ID NO: 201526 - DNA, 80 bp, synthetic construct; identical to SEQ ID NO: 16796
  source 1..80: mol_type = other DNA

SEQ ID NO: 201527 - DNA, 80 bp, synthetic construct; identical to SEQ ID NO: 16797
  source 1..80: mol_type = other DNA

SEQ ID NO: 201528 - DNA, 80 bp, synthetic construct; identical to SEQ ID NO: 16798
  source 1..80: mol_type = other DNA

SEQ ID NO: 201529 - DNA, 80 bp, synthetic construct; identical to SEQ ID NO: 16799
  source 1..80: mol_type = other DNA

SEQ ID NO: 201530 - DNA, 80 bp, synthetic construct; identical to SEQ ID NO: 16800
  source 1..80: mol_type = other DNA

SEQ ID NO: 201531 - DNA, 80 bp, synthetic construct; identical to SEQ ID NO: 16801
  source 1..80: mol_type = other DNA

SEQ ID NO: 201532 - DNA, 80 bp, synthetic construct; identical to SEQ ID NO: 16802
  source 1..80: mol_type = other DNA

SEQ ID NO: 201533 - DNA, 80 bp, synthetic construct; identical to SEQ ID NO: 16803
  source 1..80: mol_type = other DNA

SEQ ID NO: 201534 - DNA, 80 bp, synthetic construct; identical to SEQ ID NO: 16804
  source 1..80: mol_type = other DNA

SEQ ID NO: 201535 - DNA, 80 bp, synthetic construct; identical to SEQ ID NO: 16805
  source 1..80: mol_type = other DNA

SEQ ID NO: 201536 - DNA, 80 bp, synthetic construct; identical to SEQ ID NO: 16806
  source 1..80: mol_type = other DNA

SEQ ID NO: 201537 - DNA, 80 bp, synthetic construct; identical to SEQ ID NO: 16807
  source 1..80: mol_type = other DNA

SEQ ID NO: 201538 - DNA, 80 bp, synthetic construct; identical to SEQ ID NO: 16808
  source 1..80: mol_type = other DNA

SEQ ID NO: 201539 - DNA, 80 bp, synthetic construct; identical to SEQ ID NO: 16809
  source 1..80: mol_type = other DNA

SEQ ID NO: 201540 - DNA, 80 bp, synthetic construct; identical to SEQ ID NO: 16810
  source 1..80: mol_type = other DNA

SEQ ID NO: 201541 - DNA, 80 bp, synthetic construct; identical to SEQ ID NO: 16811
  source 1..80: mol_type = other DNA

SEQ ID NO: 201542 - DNA, 80 bp, synthetic construct; identical to SEQ ID NO: 16812
  source 1..80: mol_type = other DNA

SEQ ID NO: 201543 - DNA, 80 bp, synthetic construct; identical to SEQ ID NO: 16813
  source 1..80: mol_type = other DNA

SEQ ID NO: 201544 - DNA, 80 bp, synthetic construct; identical to SEQ ID NO: 16814
  source 1..80: mol_type = other DNA

SEQ ID NO: 201545 - DNA, 80 bp, synthetic construct; identical to SEQ ID NO: 16815
  source 1..80: mol_type = other DNA

SEQ ID NO: 201546 - DNA, 80 bp, synthetic construct; identical to SEQ ID NO: 16816
  source 1..80: mol_type = other DNA

SEQ ID NO: 201547 - DNA, 80 bp, synthetic construct; identical to SEQ ID NO: 16817
  source 1..80: mol_type = other DNA

SEQ ID NO: 201548 - DNA, 80 bp, synthetic construct; identical to SEQ ID NO: 16818
  source 1..80: mol_type = other DNA

SEQ ID NO: 201549 - DNA, 80 bp, synthetic construct; identical to SEQ ID NO: 16819
  source 1..80: mol_type = other DNA

SEQ ID NO: 201550 - DNA, 80 bp, synthetic construct; identical to SEQ ID NO: 16820
  source 1..80: mol_type = other DNA

SEQ ID NO: 201551 - DNA, 80 bp, synthetic construct; identical to SEQ ID NO: 16821
  source 1..80: mol_type = other DNA

SEQ ID NO: 201552 - DNA, 80 bp, synthetic construct; identical to SEQ ID NO: 16822
  source 1..80: mol_type = other DNA

SEQ ID NO: 201553 - DNA, 80 bp, synthetic construct; identical to SEQ ID NO: 16823
  source 1..80: mol_type = other DNA

SEQ ID NO: 201554 - DNA, 80 bp, synthetic construct; identical to SEQ ID NO: 16824
  source 1..80: mol_type = other DNA

SEQ ID NO: 201555 - DNA, 80 bp, synthetic construct; identical to SEQ ID NO: 16825
  source 1..80: mol_type = other DNA

SEQ ID NO: 201556 - DNA, 80 bp, synthetic construct; identical to SEQ ID NO: 16826
  source 1..80: mol_type = other DNA

SEQ ID NO: 201557 - DNA, 80 bp, synthetic construct; identical to SEQ ID NO: 16827
  source 1..80: mol_type = other DNA

SEQ ID NO: 201558 - DNA, 80 bp, synthetic construct; identical to SEQ ID NO: 16828
  source 1..80: mol_type = other DNA

SEQ ID NO: 201559 - DNA, 80 bp, synthetic construct; identical to SEQ ID NO: 16829
  source 1..80: mol_type = other DNA

SEQ ID NO: 201560 - DNA, 80 bp, synthetic construct; identical to SEQ ID NO: 16830
  source 1..80: mol_type = other DNA

SEQ ID NO: 201561 - DNA, 80 bp, synthetic construct; identical to SEQ ID NO: 16831
  source 1..80: mol_type = other DNA

SEQ ID NO: 201562 - DNA, 80 bp, synthetic construct; identical to SEQ ID NO: 16832
  source 1..80: mol_type = other DNA

SEQ ID NO: 201563 - DNA, 80 bp, synthetic construct; identical to SEQ ID NO: 16833
  source 1..80: mol_type = other DNA

SEQ ID NO: 201564 - DNA, 80 bp, synthetic construct; identical to SEQ ID NO: 16834
  source 1..80: mol_type = other DNA

SEQ ID NO: 201565 - DNA, 80 bp, synthetic construct; identical to SEQ ID NO: 16835
  source 1..80: mol_type = other DNA

SEQ ID NO: 201566 - DNA, 80 bp, synthetic construct; identical to SEQ ID NO: 16836
  source 1..80: mol_type = other DNA

SEQ ID NO: 201567 - DNA, 80 bp, synthetic construct; identical to SEQ ID NO: 16837
  source 1..80: mol_type = other DNA

SEQ ID NO: 201568 - DNA, 80 bp, synthetic construct; identical to SEQ ID NO: 16838
  source 1..80: mol_type = other DNA

SEQ ID NO: 201569 - DNA, 80 bp, synthetic construct; identical to SEQ ID NO: 16839
  source 1..80: mol_type = other DNA

SEQ ID NO: 201570 - DNA, 80 bp, synthetic construct; identical to SEQ ID NO: 16840
  source 1..80: mol_type = other DNA

SEQ ID NO: 201571 - DNA, 80 bp, synthetic construct; identical to SEQ ID NO: 16841
  source 1..80: mol_type = other DNA

SEQ ID NO: 201572 - DNA, 80 bp, synthetic construct; identical to SEQ ID NO: 16842
  source 1..80: mol_type = other DNA

SEQ ID NO: 201573 - DNA, 80 bp, synthetic construct; identical to SEQ ID NO: 16843
  source 1..80: mol_type = other DNA

SEQ ID NO: 201574 - DNA, 80 bp, synthetic construct; identical to SEQ ID NO: 16844
  source 1..80: mol_type = other DNA

SEQ ID NO: 201575 - DNA, 80 bp, synthetic construct; identical to SEQ ID NO: 16845
  source 1..80: mol_type = other DNA

SEQ ID NO: 201576 - DNA, 80 bp, synthetic construct; identical to SEQ ID NO: 16846
  source 1..80: mol_type = other DNA

SEQ ID NO: 201577 - DNA, 80 bp, synthetic construct; identical to SEQ ID NO: 16847
  source 1..80: mol_type = other DNA

SEQ ID NO: 201578 - DNA, 80 bp, synthetic construct; identical to SEQ ID NO: 16848
  source 1..80: mol_type = other DNA

SEQ ID NO: 201579 - DNA, 80 bp, synthetic construct; identical to SEQ ID NO: 16849
  source 1..80: mol_type = other DNA

SEQ ID NO: 201580 - DNA, 80 bp, synthetic construct; identical to SEQ ID NO: 16850
  source 1..80: mol_type = other DNA

SEQ ID NO: 201581 - DNA, 80 bp, synthetic construct; identical to SEQ ID NO: 16851
  source 1..80: mol_type = other DNA

SEQ ID NO: 201582 - DNA, 80 bp, synthetic construct; identical to SEQ ID NO: 16852
  source 1..80: mol_type = other DNA

SEQ ID NO: 201583 - DNA, 80 bp, synthetic construct; identical to SEQ ID NO: 16853
  source 1..80: mol_type = other DNA

SEQ ID NO: 201584 - DNA, 80 bp, synthetic construct; identical to SEQ ID NO: 16854
  source 1..80: mol_type = other DNA

SEQ ID NO: 201585 - DNA, 80 bp, synthetic construct; identical to SEQ ID NO: 16855
  source 1..80: mol_type = other DNA

SEQ ID NO: 201586 - DNA, 80 bp, synthetic construct; identical to SEQ ID NO: 16856
  source 1..80: mol_type = other DNA

SEQ ID NO: 201587 - DNA, 80 bp, synthetic construct; identical to SEQ ID NO: 16857
  source 1..80: mol_type = other DNA

SEQ ID NO: 201588 - DNA, 80 bp, synthetic construct; identical to SEQ ID NO: 16858
  source 1..80: mol_type = other DNA

SEQ ID NO: 201589 - DNA, 80 bp, synthetic construct; identical to SEQ ID NO: 16859
  source 1..80: mol_type = other DNA

SEQ ID NO: 201590 - DNA, 80 bp, synthetic construct; identical to SEQ ID NO: 16860
  source 1..80: mol_type = other DNA

SEQ ID NO: 201591 - DNA, 80 bp, synthetic construct; identical to SEQ ID NO: 16861
  source 1..80: mol_type = other DNA

SEQ ID NO: 201592 - DNA, 80 bp, synthetic construct; identical to SEQ ID NO: 16862
  source 1..80: mol_type = other DNA

SEQ ID NO: 201593 - DNA, 80 bp, synthetic construct; identical to SEQ ID NO: 16863
  source 1..80: mol_type = other DNA

SEQ ID NO: 201594 - DNA, 80 bp, synthetic construct; identical to SEQ ID NO: 16864
  source 1..80: mol_type = other DNA

SEQ ID NO: 201595 - DNA, 80 bp, synthetic construct; identical to SEQ ID NO: 16865
  source 1..80: mol_type = other DNA

SEQ ID NO: 201596 - DNA, 80 bp, synthetic construct; identical to SEQ ID NO: 16866
  source 1..80: mol_type = other DNA

SEQ ID NO: 201597 - DNA, 80 bp, synthetic construct; identical to SEQ ID NO: 16867
  source 1..80: mol_type = other DNA

SEQ ID NO: 201598 - DNA, 80 bp, synthetic construct; identical to SEQ ID NO: 16868
  source 1..80: mol_type = other DNA

SEQ ID NO: 201599 - DNA, 80 bp, synthetic construct; identical to SEQ ID NO: 16869
  source 1..80: mol_type = other DNA

SEQ ID NO: 201600 - DNA, 80 bp, synthetic construct; identical to SEQ ID NO: 16870
  source 1..80: mol_type = other DNA

SEQ ID NO: 201601 - DNA, 80 bp, synthetic construct; identical to SEQ ID NO: 16871
  source 1..80: mol_type = other DNA

SEQ ID NO: 201602 - DNA, 80 bp, synthetic construct; identical to SEQ ID NO: 16872
  source 1..80: mol_type = other DNA

SEQ ID NO: 201603 - DNA, 80 bp, synthetic construct; identical to SEQ ID NO: 16873
  source 1..80: mol_type = other DNA

SEQ ID NO: 201604 - DNA, 80 bp, synthetic construct; identical to SEQ ID NO: 16874
  source 1..80: mol_type = other DNA

SEQ ID NO: 201605 - DNA, 80 bp, synthetic construct; identical to SEQ ID NO: 16875
  source 1..80: mol_type = other DNA

SEQ ID NO: 201606 - DNA, 80 bp, synthetic construct; identical to SEQ ID NO: 16876
  source 1..80: mol_type = other DNA

SEQ ID NO: 201607 - DNA, 80 bp, synthetic construct; identical to SEQ ID NO: 16877
  source 1..80: mol_type = other DNA

SEQ ID NO: 201608 - DNA, 80 bp, synthetic construct; identical to SEQ ID NO: 16878
  source 1..80: mol_type = other DNA

SEQ ID NO: 201609 - DNA, 80 bp, synthetic construct; identical to SEQ ID NO: 16879
  source 1..80: mol_type = other DNA

SEQ ID NO: 201610 - DNA, 80 bp, synthetic construct; identical to SEQ ID NO: 16880
  source 1..80: mol_type = other DNA

SEQ ID NO: 201611 - DNA, 80 bp, synthetic construct; identical to SEQ ID NO: 16881
  source 1..80: mol_type = other DNA

SEQ ID NO: 201612 - DNA, 80 bp, synthetic construct; identical to SEQ ID NO: 16882
  source 1..80: mol_type = other DNA

SEQ ID NO: 201613 - DNA, 80 bp, synthetic construct; identical to SEQ ID NO: 16883
  source 1..80: mol_type = other DNA

SEQ ID NO: 201614 - DNA, 80 bp, synthetic construct; identical to SEQ ID NO: 16884
  source 1..80: mol_type = other DNA

SEQ ID NO: 201615 - DNA, 80 bp, synthetic construct; identical to SEQ ID NO: 16885
  source 1..80: mol_type = other DNA

SEQ ID NO: 201616 - DNA, 80 bp, synthetic construct; identical to SEQ ID NO: 16886
  source 1..80: mol_type = other DNA

SEQ ID NO: 201617 - DNA, 80 bp, synthetic construct; identical to SEQ ID NO: 16887
  source 1..80: mol_type = other DNA

SEQ ID NO: 201618 - DNA, 80 bp, synthetic construct; identical to SEQ ID NO: 16888
  source 1..80: mol_type = other DNA

SEQ ID NO: 201619 - DNA, 80 bp, synthetic construct; identical to SEQ ID NO: 16889
  source 1..80: mol_type = other DNA

SEQ ID NO: 201620 - DNA, 80 bp, synthetic construct; identical to SEQ ID NO: 16890
  source 1..80: mol_type = other DNA

SEQ ID NO: 201621 - DNA, 80 bp, synthetic construct; identical to SEQ ID NO: 16891
  source 1..80: mol_type = other DNA

SEQ ID NO: 201622 - DNA, 80 bp, synthetic construct; identical to SEQ ID NO: 16892
  source 1..80: mol_type = other DNA

SEQ ID NO: 201623 - DNA, 80 bp, synthetic construct; identical to SEQ ID NO: 16893
  source 1..80: mol_type = other DNA

SEQ ID NO: 201624 - DNA, 80 bp, synthetic construct; identical to SEQ ID NO: 16894
  source 1..80: mol_type = other DNA

SEQ ID NO: 201625 - DNA, 80 bp, synthetic construct; identical to SEQ ID NO: 16895
  source 1..80: mol_type = other DNA

SEQ ID NO: 201626 - DNA, 80 bp, synthetic construct; identical to SEQ ID NO: 16896
  source 1..80: mol_type = other DNA

SEQ ID NO: 201627 - DNA, 80 bp, synthetic construct; identical to SEQ ID NO: 16897
  source 1..80: mol_type = other DNA

SEQ ID NO: 201628 - DNA, 80 bp, synthetic construct; identical to SEQ ID NO: 16898
  source 1..80: mol_type = other DNA

SEQ ID NO: 201629 - DNA, 80 bp, synthetic construct; identical to SEQ ID NO: 16899
  source 1..80: mol_type = other DNA

SEQ ID NO: 201630 - DNA, 80 bp, synthetic construct; identical to SEQ ID NO: 16900
  source 1..80: mol_type = other DNA

SEQ ID NO: 201631 - DNA, 80 bp, synthetic construct; identical to SEQ ID NO: 16901
  source 1..80: mol_type = other DNA

SEQ ID NO: 201632 - DNA, 80 bp, synthetic construct; identical to SEQ ID NO: 16902
  source 1..80: mol_type = other DNA

SEQ ID NO: 201633 - DNA, 80 bp, synthetic construct; identical to SEQ ID NO: 16903
  source 1..80: mol_type = other DNA

SEQ ID NO: 201634 - DNA, 80 bp, synthetic construct; identical to SEQ ID NO: 16904
  source 1..80: mol_type = other DNA

SEQ ID NO: 201635 - DNA, 80 bp, synthetic construct; identical to SEQ ID NO: 16905
  source 1..80: mol_type = other DNA

SEQ ID NO: 201636 - DNA, 80 bp, synthetic construct; identical to SEQ ID NO: 16906
  source 1..80: mol_type = other DNA

SEQ ID NO: 201637 - DNA, 80 bp, synthetic construct; identical to SEQ ID NO: 16907
  source 1..80: mol_type = other DNA

SEQ ID NO: 201638 - DNA, 80 bp, synthetic construct; identical to SEQ ID NO: 16908
  source 1..80: mol_type = other DNA

SEQ ID NO: 201639 - DNA, 80 bp, synthetic construct; identical to SEQ ID NO: 16909
  source 1..80: mol_type = other DNA

SEQ ID NO: 201640 - DNA, 80 bp, synthetic construct; identical to SEQ ID NO: 16910
  source 1..80: mol_type = other DNA

SEQ ID NO: 201641 - DNA, 80 bp, synthetic construct; identical to SEQ ID NO: 16911
  source 1..80: mol_type = other DNA

SEQ ID NO: 201642 - DNA, 80 bp, synthetic construct; identical to SEQ ID NO: 16912
  source 1..80: mol_type = other DNA

SEQ ID NO: 201643 - DNA, 80 bp, synthetic construct; identical to SEQ ID NO: 16913
  source 1..80: mol_type = other DNA

SEQ ID NO: 201644 - DNA, 80 bp, synthetic construct; identical to SEQ ID NO: 16914
  source 1..80: mol_type = other DNA

SEQ ID NO: 201645 - DNA, 80 bp, synthetic construct; identical to SEQ ID NO: 16915
  source 1..80: mol_type = other DNA

SEQ ID NO: 201646 - DNA, 80 bp, synthetic construct; identical to SEQ ID NO: 16916
  source 1..80: mol_type = other DNA

SEQ ID NO: 201647 - DNA, 80 bp, synthetic construct; identical to SEQ ID NO: 16917
  source 1..80: mol_type = other DNA

SEQ ID NO: 201648 - DNA, 80 bp, synthetic construct; identical to SEQ ID NO: 16918
  source 1..80: mol_type = other DNA

SEQ ID NO: 201649 - DNA, 80 bp, synthetic construct; identical to SEQ ID NO: 16919
  source 1..80: mol_type = other DNA

SEQ ID NO: 201650 - DNA, 80 bp, synthetic construct; identical to SEQ ID NO: 16920
  source 1..80: mol_type = other DNA

SEQ ID NO: 201651 - DNA, 80 bp, synthetic construct; identical to SEQ ID NO: 16921
  source 1..80: mol_type = other DNA

SEQ ID NO: 201652 - DNA, 80 bp, synthetic construct; identical to SEQ ID NO: 16922
  source 1..80: mol_type = other DNA

SEQ ID NO: 201653 - DNA, 80 bp, synthetic construct; identical to SEQ ID NO: 16923
  source 1..80: mol_type = other DNA

SEQ ID NO: 201654 - DNA, 80 bp, synthetic construct; identical to SEQ ID NO: 16924
  source 1..80: mol_type = other DNA

SEQ ID NO: 201655 - DNA, 80 bp, synthetic construct; identical to SEQ ID NO: 16925
  source 1..80: mol_type = other DNA

SEQ ID NO: 201656 - DNA, 80 bp, synthetic construct; identical to SEQ ID NO: 16926
  source 1..80: mol_type = other DNA

SEQ ID NO: 201657 - DNA, 80 bp, synthetic construct; identical to SEQ ID NO: 16927
  source 1..80: mol_type = other DNA

SEQ ID NO: 201658 - DNA, 80 bp, synthetic construct; identical to SEQ ID NO: 16928
  source 1..80: mol_type = other DNA

SEQ ID NO: 201659 - DNA, 80 bp, synthetic construct; identical to SEQ ID NO: 16929
  source 1..80: mol_type = other DNA

SEQ ID NO: 201660 - DNA, 80 bp, synthetic construct; identical to SEQ ID NO: 16930
  source 1..80: mol_type = other DNA

SEQ ID NO: 201661 - DNA, 80 bp, synthetic construct; identical to SEQ ID NO: 16931
  source 1..80: mol_type = other DNA

SEQ ID NO: 201662 - DNA, 80 bp, synthetic construct; identical to SEQ ID NO: 16932
  source 1..80: mol_type = other DNA

SEQ ID NO: 201663 - DNA, 80 bp, synthetic construct; identical to SEQ ID NO: 16933
  source 1..80: mol_type = other DNA

SEQ ID NO: 201664 - DNA, 80 bp, synthetic construct; identical to SEQ ID NO: 16934
  source 1..80: mol_type = other DNA

SEQ ID NO: 201665 - DNA, 80 bp, synthetic construct; identical to SEQ ID NO: 16935
  source 1..80: mol_type = other DNA

SEQ ID NO: 201666 - DNA, 80 bp, synthetic construct; identical to SEQ ID NO: 16936
  source 1..80: mol_type = other DNA

SEQ ID NO: 201667 - DNA, 80 bp, synthetic construct; identical to SEQ ID NO: 16937
  source 1..80: mol_type = other DNA

SEQ ID NO: 201668 - DNA, 80 bp, synthetic construct; identical to SEQ ID NO: 16938
  source 1..80: mol_type = other DNA

SEQ ID NO: 201669 - DNA, 80 bp, synthetic construct; identical to SEQ ID NO: 16939
  source 1..80: mol_type = other DNA

SEQ ID NO: 201670 - DNA, 80 bp, synthetic construct; identical to SEQ ID NO: 16940
  source 1..80: mol_type = other DNA

SEQ ID NO: 201671 - DNA, 80 bp, synthetic construct; identical to SEQ ID NO: 16941
  source 1..80: mol_type = other DNA

SEQ ID NO: 201672 - DNA, 80 bp, synthetic construct; identical to SEQ ID NO: 16942
  source 1..80: mol_type = other DNA

SEQ ID NO: 201673 - DNA, 80 bp, synthetic construct; identical to SEQ ID NO: 16943
  source 1..80: mol_type = other DNA

SEQ ID NO: 201674 - DNA, 80 bp, synthetic construct; identical to SEQ ID NO: 16944
  source 1..80: mol_type = other DNA

SEQ ID NO: 201675 - DNA, 80 bp, synthetic construct; identical to SEQ ID NO: 16945
  source 1..80: mol_type = other DNA

SEQ ID NO: 201676 - DNA, 80 bp, synthetic construct; identical to SEQ ID NO: 16946
  source 1..80: mol_type = other DNA

SEQ ID NO: 201677 - DNA, 80 bp, synthetic construct; identical to SEQ ID NO: 16947
  source 1..80: mol_type = other DNA

SEQ ID NO: 201678 - DNA, 80 bp, synthetic construct; identical to SEQ ID NO: 16948
  source 1..80: mol_type = other DNA

SEQ ID NO: 201679 - DNA, 80 bp, synthetic construct; identical to SEQ ID NO: 16949
  source 1..80: mol_type = other DNA

SEQ ID NO: 201680 - DNA, 80 bp, synthetic construct; identical to SEQ ID NO: 16950
  source 1..80: mol_type = other DNA

SEQ ID NO: 201681 - DNA, 80 bp, synthetic construct; identical to SEQ ID NO: 16951
  source 1..80: mol_type = other DNA

SEQ ID NO: 201682 - DNA, 80 bp, synthetic construct; identical to SEQ ID NO: 16952
  source 1..80: mol_type = other DNA

SEQ ID NO: 201683 - DNA, 80 bp, synthetic construct; identical to SEQ ID NO: 16953
  source 1..80: mol_type = other DNA

SEQ ID NO: 201684 - DNA, 80 bp, synthetic construct; identical to SEQ ID NO: 16954
  source 1..80: mol_type = other DNA

SEQ ID NO: 201685 - DNA, 80 bp, synthetic construct; identical to SEQ ID NO: 16955
  source 1..80: mol_type = other DNA

SEQ ID NO: 201686 - DNA, 80 bp, synthetic construct; identical to SEQ ID NO: 16956
  source 1..80: mol_type = other DNA

SEQ ID NO: 201687 - DNA, 80 bp, synthetic construct; identical to SEQ ID NO: 16957
  source 1..80: mol_type = other DNA

SEQ ID NO: 201688 - DNA, 80 bp, synthetic construct; identical to SEQ ID NO: 16958
  source 1..80: mol_type = other DNA

SEQ ID NO: 201689 - DNA, 80 bp, synthetic construct; identical to SEQ ID NO: 16959
  source 1..80: mol_type = other DNA

SEQ ID NO: 201690 - DNA, 80 bp, synthetic construct; identical to SEQ ID NO: 16960
  source 1..80: mol_type = other DNA

SEQ ID NO: 201691 - DNA, 80 bp, synthetic construct; identical to SEQ ID NO: 16961
  source 1..80: mol_type = other DNA

SEQ ID NO: 201692 - DNA, 80 bp, synthetic construct; identical to SEQ ID NO: 16962
  source 1..80: mol_type = other DNA

SEQ ID NO: 201693 - DNA, 80 bp, synthetic construct; identical to SEQ ID NO: 16963
  source 1..80: mol_type = other DNA

SEQ ID NO: 201694 - DNA, 80 bp, synthetic construct; identical to SEQ ID NO: 16964
  source 1..80: mol_type = other DNA

SEQ ID NO: 201695 - DNA, 80 bp, synthetic construct; identical to SEQ ID NO: 16965
  source 1..80: mol_type = other DNA

SEQ ID NO: 201696 - DNA, 80 bp, synthetic construct; identical to SEQ ID NO: 16966
  source 1..80: mol_type = other DNA

SEQ ID NO: 201697 - DNA, 80 bp, synthetic construct; identical to SEQ ID NO: 16967
  source 1..80: mol_type = other DNA

SEQ ID NO: 201698 - DNA, 80 bp, synthetic construct; identical to SEQ ID NO: 16968
  source 1..80: mol_type = other DNA

SEQ ID NO: 201699 - DNA, 80 bp, synthetic construct; identical to SEQ ID NO: 16969
  source 1..80: mol_type = other DNA

SEQ ID NO: 201700 - DNA, 80 bp, synthetic construct; identical to SEQ ID NO: 16970
  source 1..80: mol_type = other DNA

SEQ ID NO: 201701 - DNA, 80 bp, synthetic construct; identical to SEQ ID NO: 16971
  source 1..80: mol_type = other DNA

SEQ ID NO: 201702 - DNA, 80 bp, synthetic construct; identical to SEQ ID NO: 16972
  source 1..80: mol_type = other DNA

SEQ ID NO: 201703 - DNA, 80 bp, synthetic construct; identical to SEQ ID NO: 16973
  source 1..80: mol_type = other DNA

SEQ ID NO: 201704 - DNA, 80 bp, synthetic construct; identical to SEQ ID NO: 16974
  source 1..80: mol_type = other DNA

SEQ ID NO: 201705 - DNA, 80 bp, synthetic construct; identical to SEQ ID NO: 16975
  source 1..80: mol_type = other DNA

SEQ ID NO: 201706 - DNA, 80 bp, synthetic construct; identical to SEQ ID NO: 16976
  source 1..80: mol_type = other DNA

SEQ ID NO: 201707 - DNA, 80 bp, synthetic construct; identical to SEQ ID NO: 16977
  source 1..80: mol_type = other DNA

SEQ ID NO: 201708 - DNA, 80 bp, synthetic construct; identical to SEQ ID NO: 16978
  source 1..80: mol_type = other DNA

SEQ ID NO: 201709 - DNA, 80 bp, synthetic construct; identical to SEQ ID NO: 16979
  source 1..80: mol_type = other DNA

SEQ ID NO: 201710 - DNA, 80 bp, synthetic construct; identical to SEQ ID NO: 16980
  source 1..80: mol_type = other DNA

SEQ ID NO: 201711 - DNA, 80 bp, synthetic construct; identical to SEQ ID NO: 16981
  source 1..80: mol_type = other DNA

SEQ ID NO: 201712 - DNA, 80 bp, synthetic construct; identical to SEQ ID NO: 16982
  source 1..80: mol_type = other DNA

SEQ ID NO: 201713 - DNA, 80 bp, synthetic construct; identical to SEQ ID NO: 16983
  source 1..80: mol_type = other DNA

SEQ ID NO: 201714 - DNA, 80 bp, synthetic construct; identical to SEQ ID NO: 16984
  source 1..80: mol_type = other DNA

SEQ ID NO: 201715 - DNA, 80 bp, synthetic construct; identical to SEQ ID NO: 16985
  source 1..80: mol_type = other DNA

SEQ ID NO: 201716 - DNA, 80 bp, synthetic construct; identical to SEQ ID NO: 16986
  source 1..80: mol_type = other DNA

SEQ ID NO: 201717 - DNA, 80 bp, synthetic construct; identical to SEQ ID NO: 16987
  source 1..80: mol_type = other DNA

SEQ ID NO: 201718 - DNA, 80 bp, synthetic construct; identical to SEQ ID NO: 16988
  source 1..80: mol_type = other DNA

SEQ ID NO: 201719 - DNA, 80 bp, synthetic construct; identical to SEQ ID NO: 16989
  source 1..80: mol_type = other DNA

SEQ ID NO: 201720 - DNA, 80 bp, synthetic construct; identical to SEQ ID NO: 16990
  source 1..80: mol_type = other DNA

SEQ ID NO: 201721 - DNA, 80 bp, synthetic construct; identical to SEQ ID NO: 16991
  source 1..80: mol_type = other DNA

SEQ ID NO: 201722 - DNA, 80 bp, synthetic construct; identical to SEQ ID NO: 16992
  source 1..80: mol_type = other DNA

SEQ ID NO: 201723 - DNA, 80 bp, synthetic construct; identical to SEQ ID NO: 16993
  source 1..80: mol_type = other DNA

SEQ ID NO: 201724 - DNA, 80 bp, synthetic construct; identical to SEQ ID NO: 16994
  source 1..80: mol_type = other DNA

SEQ ID NO: 201725 - DNA, 80 bp, synthetic construct; identical to SEQ ID NO: 16995
  source 1..80: mol_type = other DNA

SEQ ID NO: 201726 - DNA, 80 bp, synthetic construct; identical to SEQ ID NO: 16996
  source 1..80: mol_type = other DNA

SEQ ID NO: 201727 - DNA, 80 bp, synthetic construct; identical to SEQ ID NO: 16997
  source 1..80: mol_type = other DNA

SEQ ID NO: 201728 - DNA, 80 bp, synthetic construct; identical to SEQ ID NO: 16998
  source 1..80: mol_type = other DNA

SEQ ID NO: 201729 - DNA, 80 bp, synthetic construct; identical to SEQ ID NO: 16999
  source 1..80: mol_type = other DNA

SEQ ID NO: 201730 - DNA, 80 bp, synthetic construct; identical to SEQ ID NO: 17000
  source 1..80: mol_type = other DNA

SEQ ID NO: 201731 - DNA, 80 bp, synthetic construct; identical to SEQ ID NO: 17001
  source 1..80: mol_type = other DNA

SEQ ID NO: 201732 - DNA, 80 bp, synthetic construct; identical to SEQ ID NO: 17002
  source 1..80: mol_type = other DNA

SEQ ID NO: 201733 - DNA, 80 bp, synthetic construct; identical to SEQ ID NO: 17003
  source 1..80: mol_type = other DNA

SEQ ID NO: 201734 - DNA, 80 bp, synthetic construct; identical to SEQ ID NO: 17004
  source 1..80: mol_type = other DNA

SEQ ID NO: 201735 - DNA, 80 bp, synthetic construct; identical to SEQ ID NO: 17005
  source 1..80: mol_type = other DNA

SEQ ID NO: 201736 - DNA, 80 bp, synthetic construct; identical to SEQ ID NO: 17006
  source 1..80: mol_type = other DNA

SEQ ID NO: 201737 - DNA, 80 bp, synthetic construct; identical to SEQ ID NO: 17007
  source 1..80: mol_type = other DNA

SEQ ID NO: 201738 - DNA, 80 bp, synthetic construct; identical to SEQ ID NO: 17008
  source 1..80: mol_type = other DNA

SEQ ID NO: 201739 - DNA, 80 bp, synthetic construct; identical to SEQ ID NO: 17009
  source 1..80: mol_type = other DNA

SEQ ID NO: 201740 - DNA, 80 bp, synthetic construct; identical to SEQ ID NO: 17010
  source 1..80: mol_type = other DNA

SEQ ID NO: 201741 - DNA, 80 bp, synthetic construct; identical to SEQ ID NO: 17011
  source 1..80: mol_type = other DNA

SEQ ID NO: 201742 - DNA, 80 bp, synthetic construct; identical to SEQ ID NO: 17012
  source 1..80: mol_type = other DNA

SEQ ID NO: 201743 - DNA, 80 bp, synthetic construct; identical to SEQ ID NO: 17013
  source 1..80: mol_type = other DNA

SEQ ID NO: 201744 - DNA, 80 bp, synthetic construct; identical to SEQ ID NO: 17014
  source 1..80: mol_type = other DNA

SEQ ID NO: 201745 - DNA, 80 bp, synthetic construct; identical to SEQ ID NO: 17015
  source 1..80: mol_type = other DNA

SEQ ID NO: 201746 - DNA, 80 bp, synthetic construct; identical to SEQ ID NO: 17016
  source 1..80: mol_type = other DNA

SEQ ID NO: 201747 - DNA, 80 bp, synthetic construct; identical to SEQ ID NO: 17017
  source 1..80: mol_type = other DNA

SEQ ID NO: 201748 - DNA, 80 bp, synthetic construct; identical to SEQ ID NO: 17018
  source 1..80: mol_type = other DNA

SEQ ID NO: 201749 - DNA, 80 bp, synthetic construct; identical to SEQ ID NO: 17019
  source 1..80: mol_type = other DNA

SEQ ID NO: 201750 - DNA, 80 bp, synthetic construct; identical to SEQ ID NO: 17020
  source 1..80: mol_type = other DNA

SEQ ID NO: 201751 - DNA, 80 bp, synthetic construct; identical to SEQ ID NO: 17021
  source 1..80: mol_type = other DNA

SEQ ID NO: 201752 - DNA, 80 bp, synthetic construct; identical to SEQ ID NO: 17022
  source 1..80: mol_type = other DNA

SEQ ID NO: 201753 - DNA, 80 bp, synthetic construct; identical to SEQ ID NO: 17023
  source 1..80: mol_type = other DNA

SEQ ID NO: 201754 - DNA, 80 bp, synthetic construct; identical to SEQ ID NO: 17024
  source 1..80: mol_type = other DNA

SEQ ID NO: 201755 - DNA, 80 bp, synthetic construct; identical to SEQ ID NO: 17025
  source 1..80: mol_type = other DNA

SEQ ID NO: 201756 - DNA, 80 bp, synthetic construct; identical to SEQ ID NO: 17026
  source 1..80: mol_type = other DNA

SEQ ID NO: 201757 - DNA, 80 bp, synthetic construct; identical to SEQ ID NO: 17027
  source 1..80: mol_type = other DNA

SEQ ID NO: 201758 - DNA, 80 bp, synthetic construct; identical to SEQ ID NO: 17028
  source 1..80: mol_type = other DNA

SEQ ID NO: 201759 - DNA, 80 bp, synthetic construct; identical to SEQ ID NO: 17029
  source 1..80: mol_type = other DNA

SEQ ID NO: 201760 - DNA, 80 bp, synthetic construct; identical to SEQ ID NO: 17030
  source 1..80: mol_type = other DNA

SEQ ID NO: 201761 - DNA, 80 bp, synthetic construct; identical to SEQ ID NO: 17031
  source 1..80: mol_type = other DNA

SEQ ID NO: 201762 - DNA, 80 bp, synthetic construct; identical to SEQ ID NO: 17032
  source 1..80: mol_type = other DNA

SEQ ID NO: 201763 - DNA, 80 bp, synthetic construct; identical to SEQ ID NO: 17033
  source 1..80: mol_type = other DNA

SEQ ID NO: 201764 - DNA, 80 bp, synthetic construct; identical to SEQ ID NO: 17034
  source 1..80: mol_type = other DNA

SEQ ID NO: 201765 - DNA, 80 bp, synthetic construct; identical to SEQ ID NO: 17035
  source 1..80: mol_type = other DNA

SEQ ID NO: 201766 - DNA, 80 bp, synthetic construct; identical to SEQ ID NO: 17036
  source 1..80: mol_type = other DNA

SEQ ID NO: 201767 - DNA, 80 bp, synthetic construct; identical to SEQ ID NO: 17037
  source 1..80: mol_type = other DNA

SEQ ID NO: 201768 - DNA, 80 bp, synthetic construct; identical to SEQ ID NO: 17038
  source 1..80: mol_type = other DNA

SEQ ID NO: 201769 - DNA, 80 bp, synthetic construct; identical to SEQ ID NO: 17039
  source 1..80: mol_type = other DNA

SEQ ID NO: 201770 - DNA, 80 bp, synthetic construct; identical to SEQ ID NO: 17040
  source 1..80: mol_type = other DNA

SEQ ID NO: 201771 - DNA, 80 bp, synthetic construct; identical to SEQ ID NO: 17041
  source 1..80: mol_type = other DNA

SEQ ID NO: 201772 - DNA, 80 bp, synthetic construct; identical to SEQ ID NO: 17042
  source 1..80: mol_type = other DNA

SEQ ID NO: 201773 - DNA, 80 bp, synthetic construct; identical to SEQ ID NO: 17043
  source 1..80: mol_type = other DNA

SEQ ID NO: 201774 - DNA, 80 bp, synthetic construct; identical to SEQ ID NO: 17044
  source 1..80: mol_type = other DNA

SEQ ID NO: 201775 - DNA, 80 bp, synthetic construct; identical to SEQ ID NO: 17045
  source 1..80: mol_type = other DNA

SEQ ID NO: 201776 - DNA, 80 bp, synthetic construct; identical to SEQ ID NO: 17046
  source 1..80: mol_type = other DNA

SEQ ID NO: 201777 - DNA, 80 bp, synthetic construct; identical to SEQ ID NO: 17047
  source 1..80: mol_type = other DNA

SEQ ID NO: 201778 - DNA, 80 bp, synthetic construct; identical to SEQ ID NO: 17048
  source 1..80: mol_type = other DNA

SEQ ID NO: 201779 - DNA, 80 bp, synthetic construct; identical to SEQ ID NO: 17049
  source 1..80: mol_type = other DNA

SEQ ID NO: 201780 - DNA, 80 bp, synthetic construct; identical to SEQ ID NO: 17050
  source 1..80: mol_type = other DNA

SEQ ID NO: 201781 - DNA, 80 bp, synthetic construct; identical to SEQ ID NO: 17051
  source 1..80: mol_type = other DNA

SEQ ID NO: 201782 - DNA, 80 bp, synthetic construct; identical to SEQ ID NO: 17052
  source 1..80: mol_type = other DNA

SEQ ID NO: 201783 - DNA, 80 bp, synthetic construct; identical to SEQ ID NO: 17053
  source 1..80: mol_type = other DNA

SEQ ID NO: 201784 - DNA, 80 bp, synthetic construct; identical to SEQ ID NO: 17054
  source 1..80: mol_type = other DNA

SEQ ID NO: 201785 - DNA, 80 bp, synthetic construct; identical to SEQ ID NO: 17055
  source 1..80: mol_type = other DNA

SEQ ID NO: 201786 - DNA, 80 bp, synthetic construct; identical to SEQ ID NO: 17056
  source 1..80: mol_type = other DNA

SEQ ID NO: 201787 - DNA, 80 bp, synthetic construct; identical to SEQ ID NO: 17057
  source 1..80: mol_type = other DNA

SEQ ID NO: 201788 - DNA, 80 bp, synthetic construct; identical to SEQ ID NO: 17058
  source 1..80: mol_type = other DNA

SEQ ID NO: 201789 - DNA, 80 bp, synthetic construct; identical to SEQ ID NO: 17059
  source 1..80: mol_type = other DNA

SEQ ID NO: 201790 - DNA, 80 bp, synthetic construct; identical to SEQ ID NO: 17060
  source 1..80: mol_type = other DNA

SEQ ID NO: 201791 - DNA, 80 bp, synthetic construct; identical to SEQ ID NO: 17061
  source 1..80: mol_type = other DNA

SEQ ID NO: 201792 - DNA, 80 bp, synthetic construct; identical to SEQ ID NO: 17062
  source 1..80: mol_type = other DNA

SEQ ID NO: 201793 - DNA, 80 bp, synthetic construct; identical to SEQ ID NO: 17063
  source 1..80: mol_type = other DNA

SEQ ID NO: 201794 - DNA, 80 bp, synthetic construct; identical to SEQ ID NO: 17064
  source 1..80: mol_type = other DNA

SEQ ID NO: 201795 - DNA, 80 bp, synthetic construct; identical to SEQ ID NO: 17065
  source 1..80: mol_type = other DNA

SEQ ID NO: 201796 - DNA, 80 bp, synthetic construct; identical to SEQ ID NO: 17066
  source 1..80: mol_type = other DNA

SEQ ID NO: 201797 - DNA, 80 bp, synthetic construct; identical to SEQ ID NO: 17067
  source 1..80: mol_type = other DNA

SEQ ID NO: 201798 - DNA, 80 bp, synthetic construct; identical to SEQ ID NO: 17068
  source 1..80: mol_type = other DNA

SEQ ID NO: 201799 - DNA, 80 bp, synthetic construct; identical to SEQ ID NO: 17069
  source 1..80: mol_type = other DNA

SEQ ID NO: 201800 - DNA, 80 bp, synthetic construct; identical to SEQ ID NO: 17070
  source 1..80: mol_type = other DNA

SEQ ID NO: 201801 - DNA, 80 bp, synthetic construct; identical to SEQ ID NO: 17071
  source 1..80: mol_type = other DNA

SEQ ID NO: 201802 - DNA, 80 bp, synthetic construct; identical to SEQ ID NO: 17072
  source 1..80: mol_type = other DNA

SEQ ID NO: 201803 - DNA, 80 bp, synthetic construct; identical to SEQ ID NO: 17073
  source 1..80: mol_type = other DNA

SEQ ID NO: 201804 - DNA, 80 bp, synthetic construct; identical to SEQ ID NO: 17074
  source 1..80: mol_type = other DNA

SEQ ID NO: 201805 - DNA, 80 bp, synthetic construct; identical to SEQ ID NO: 17075
  source 1..80: mol_type = other DNA

SEQ ID NO: 201806 - DNA, 80 bp, synthetic construct; identical to SEQ ID NO: 17076
  source 1..80: mol_type = other DNA

SEQ ID NO: 201807 - DNA, 80 bp, synthetic construct; identical to SEQ ID NO: 17077
  source 1..80: mol_type = other DNA

SEQ ID NO: 201808 - DNA, 80 bp, synthetic construct; identical to SEQ ID NO: 17078
  source 1..80: mol_type = other DNA

SEQ ID NO: 201809 - DNA, 80 bp, synthetic construct; identical to SEQ ID NO: 17079
  source 1..80: mol_type = other DNA

SEQ ID NO: 201810 - DNA, 80 bp, synthetic construct; identical to SEQ ID NO: 17080
  source 1..80: mol_type = other DNA

SEQ ID NO: 201811 - DNA, 80 bp, synthetic construct; identical to SEQ ID NO: 17081
  source 1..80: mol_type = other DNA

SEQ ID NO: 201812 - DNA, 80 bp, synthetic construct; identical to SEQ ID NO: 17082
  source 1..80: mol_type = other DNA

SEQ ID NO: 201813 - DNA, 80 bp, synthetic construct; identical to SEQ ID NO: 17083
  source 1..80: mol_type = other DNA

SEQ ID NO: 201814 - DNA, 80 bp, synthetic construct; identical to SEQ ID NO: 17084
  source 1..80: mol_type = other DNA

SEQ ID NO: 201815 - DNA, 80 bp, synthetic construct; identical to SEQ ID NO: 17085
  source 1..80: mol_type = other DNA

SEQ ID NO: 201816 - DNA, 80 bp, synthetic construct; identical to SEQ ID NO: 17086
  source 1..80: mol_type = other DNA

SEQ ID NO: 201817 - DNA, 80 bp, synthetic construct; identical to SEQ ID NO: 17087
  source 1..80: mol_type = other DNA

SEQ ID NO: 201818 - DNA, 80 bp, synthetic construct; identical to SEQ ID NO: 17088
  source 1..80: mol_type = other DNA

SEQ ID NO: 201819 - DNA, 80 bp, synthetic construct; identical to SEQ ID NO: 17089
  source 1..80: mol_type = other DNA

SEQ ID NO: 201820 - DNA, 80 bp, synthetic construct; identical to SEQ ID NO: 17090
  source 1..80: mol_type = other DNA

SEQ ID NO: 201821 - DNA, 80 bp, synthetic construct; identical to SEQ ID NO: 17091
  source 1..80: mol_type = other DNA

SEQ ID NO: 201822 - DNA, 80 bp, synthetic construct; identical to SEQ ID NO: 17092
  source 1..80: mol_type = other DNA

SEQ ID NO: 201823 - DNA, 80 bp, synthetic construct; identical to SEQ ID NO: 17093
  source 1..80: mol_type = other DNA

SEQ ID NO: 201824 - DNA, 80 bp, synthetic construct; identical to SEQ ID NO: 17094
  source 1..80: mol_type = other DNA

SEQ ID NO: 201825 - DNA, 80 bp, synthetic construct; identical to SEQ ID NO: 17095
  source 1..80: mol_type = other DNA

SEQ ID NO: 201826 - DNA, 80 bp, synthetic construct; identical to SEQ ID NO: 17096
  source 1..80: mol_type = other DNA

SEQ ID NO: 201827 - DNA, 80 bp, synthetic construct; identical to SEQ ID NO: 17097
  source 1..80: mol_type = other DNA

SEQ ID NO: 201828 - DNA, 80 bp, synthetic construct; identical to SEQ ID NO: 17098
  source 1..80: mol_type = other DNA

SEQ ID NO: 201829 - DNA, 80 bp, synthetic construct; identical to SEQ ID NO: 17099
  source 1..80: mol_type = other DNA

SEQ ID NO: 201830 - DNA, 80 bp, synthetic construct; identical to SEQ ID NO: 17100
  source 1..80: mol_type = other DNA

SEQ ID NO: 201831 - DNA, 80 bp, synthetic construct; identical to SEQ ID NO: 17101
  source 1..80: mol_type = other DNA

SEQ ID NO: 201832 - DNA, 80 bp, synthetic construct; identical to SEQ ID NO: 17102
  source 1..80: mol_type = other DNA

SEQ ID NO: 201833 - DNA, 80 bp, synthetic construct; identical to SEQ ID NO: 17103
  source 1..80: mol_type = other DNA

SEQ ID NO: 201834 - DNA, 80 bp, synthetic construct; identical to SEQ ID NO: 17104
  source 1..80: mol_type = other DNA

SEQ ID NO: 201835 - DNA, 80 bp, synthetic construct; identical to SEQ ID NO: 17105
  source 1..80: mol_type = other DNA

SEQ ID NO: 201836 - DNA, 80 bp, synthetic construct; identical to SEQ ID NO: 17106
  source 1..80: mol_type = other DNA

SEQ ID NO: 201837 - DNA, 80 bp, synthetic construct; identical to SEQ ID NO: 17107
  source 1..80: mol_type = other DNA

SEQ ID NO: 201838 - DNA, 80 bp, synthetic construct; identical to SEQ ID NO: 17108
  source 1..80: mol_type = other DNA

SEQ ID NO: 201839 - DNA, 80 bp, synthetic construct; identical to SEQ ID NO: 17109
  source 1..80: mol_type = other DNA

SEQ ID NO: 201840 - DNA, 80 bp, synthetic construct; identical to SEQ ID NO: 17110
  source 1..80: mol_type = other DNA

SEQ ID NO: 201841 - DNA, 80 bp, synthetic construct; identical to SEQ ID NO: 17111
  source 1..80: mol_type = other DNA

SEQ ID NO: 201842 - DNA, 80 bp, synthetic construct; identical to SEQ ID NO: 17112
  source 1..80: mol_type = other DNA

SEQ ID NO: 201843 - DNA, 80 bp, synthetic construct; identical to SEQ ID NO: 17113
  source 1..80: mol_type = other DNA

SEQ ID NO: 201844 - DNA, 80 bp, synthetic construct; identical to SEQ ID NO: 17114
  source 1..80: mol_type = other DNA

SEQ ID NO: 201845 - DNA, 80 bp, synthetic construct; identical to SEQ ID NO: 17115
  source 1..80: mol_type = other DNA

SEQ ID NO: 201846 - DNA, 80 bp, synthetic construct; identical to SEQ ID NO: 17116
  source 1..80: mol_type = other DNA

SEQ ID NO: 201847 - DNA, 80 bp, synthetic construct; identical to SEQ ID NO: 17117
  source 1..80: mol_type = other DNA

SEQ ID NO: 201848 - DNA, 80 bp, synthetic construct; identical to SEQ ID NO: 17118
  source 1..80: mol_type = other DNA

SEQ ID NO: 201849 - DNA, 80 bp, synthetic construct; identical to SEQ ID NO: 17119
  source 1..80: mol_type = other DNA

SEQ ID NO: 201850 - DNA, 80 bp, synthetic construct; identical to SEQ ID NO: 17120
  source 1..80: mol_type = other DNA

SEQ ID NO: 201851 - DNA, 80 bp, synthetic construct; identical to SEQ ID NO: 17121
  source 1..80: mol_type = other DNA

SEQ ID NO: 201852 - DNA, 80 bp, synthetic construct; identical to SEQ ID NO: 17122
  source 1..80: mol_type = other DNA

SEQ ID NO: 201853 - DNA, 80 bp, synthetic construct; identical to SEQ ID NO: 17123
  source 1..80: mol_type = other DNA

SEQ ID NO: 201854 - DNA, 80 bp, synthetic construct; identical to SEQ ID NO: 17124
  source 1..80: mol_type = other DNA

SEQ ID NO: 201855 - DNA, 80 bp, synthetic construct; identical to SEQ ID NO: 17125
  source 1..80: mol_type = other DNA

SEQ ID NO: 201856 - DNA, 80 bp, synthetic construct; identical to SEQ ID NO: 17126
  source 1..80: mol_type = other DNA

SEQ ID NO: 201857 - DNA, 80 bp, synthetic construct; identical to SEQ ID NO: 17127
  source 1..80: mol_type = other DNA

SEQ ID NO: 201858 - DNA, 80 bp, synthetic construct; identical to SEQ ID NO: 17128
  source 1..80: mol_type = other DNA

SEQ ID NO: 201859 - DNA, 80 bp, synthetic construct; identical to SEQ ID NO: 17129
  source 1..80: mol_type = other DNA

SEQ ID NO: 201860 - DNA, 80 bp, synthetic construct; identical to SEQ ID NO: 17130
  source 1..80: mol_type = other DNA

SEQ ID NO: 201861 - DNA, 80 bp, synthetic construct; identical to SEQ ID NO: 17131
  source 1..80: mol_type = other DNA

SEQ ID NO: 201862 - DNA, 80 bp, synthetic construct; identical to SEQ ID NO: 17132
  source 1..80: mol_type = other DNA

SEQ ID NO: 201863 - DNA, 80 bp, synthetic construct; identical to SEQ ID NO: 17133
  source 1..80: mol_type = other DNA

SEQ ID NO: 201864 - DNA, 80 bp, synthetic construct; identical to SEQ ID NO: 17134
  source 1..80: mol_type = other DNA

SEQ ID NO: 201865 - DNA, 80 bp, synthetic construct; identical to SEQ ID NO: 17135
  source 1..80: mol_type = other DNA

SEQ ID NO: 201866 - DNA, 80 bp, synthetic construct; identical to SEQ ID NO: 17136
  source 1..80: mol_type = other DNA

SEQ ID NO: 201867 - DNA, 80 bp, synthetic construct; identical to SEQ ID NO: 17137
  source 1..80: mol_type = other DNA

SEQ ID NO: 201868 - DNA, 80 bp, synthetic construct; identical to SEQ ID NO: 17138
  source 1..80: mol_type = other DNA

SEQ ID NO: 201869 - DNA, 80 bp, synthetic construct; identical to SEQ ID NO: 17139
  source 1..80: mol_type = other DNA

SEQ ID NO: 201870 - DNA, 80 bp, synthetic construct; identical to SEQ ID NO: 17140
  source 1..80: mol_type = other DNA

SEQ ID NO: 201871 - DNA, 80 bp, synthetic construct; identical to SEQ ID NO: 17141
  source 1..80: mol_type = other DNA

SEQ ID NO: 201872 - DNA, 80 bp, synthetic construct; identical to SEQ ID NO: 17142
  source 1..80: mol_type = other DNA

SEQ ID NO: 201873 - DNA, 80 bp, synthetic construct; identical to SEQ ID NO: 17143
  source 1..80: mol_type = other DNA

SEQ ID NO: 201874 - DNA, 80 bp, synthetic construct; identical to SEQ ID NO: 17144
  source 1..80: mol_type = other DNA

SEQ ID NO: 201875 - DNA, 80 bp, synthetic construct; identical to SEQ ID NO: 17145
  source 1..80: mol_type = other DNA

SEQ ID NO: 201876 - DNA, 80 bp, synthetic construct; identical to SEQ ID NO: 17146
  source 1..80: mol_type = other DNA

SEQ ID NO: 201877 - DNA, 80 bp, synthetic construct; identical to SEQ ID NO: 17147
  source 1..80: mol_type = other DNA

SEQ ID NO: 201878 - DNA, 80 bp, synthetic construct; identical to SEQ ID NO: 17148
  source 1..80: mol_type = other DNA

SEQ ID NO: 201879 - DNA, 80 bp, synthetic construct; identical to SEQ ID NO: 17149
  source 1..80: mol_type = other DNA

SEQ ID NO: 201880 - DNA, 80 bp, synthetic construct; identical to SEQ ID NO: 17150
  source 1..80: mol_type = other DNA

SEQ ID NO: 201881 - DNA, 80 bp, synthetic construct; identical to SEQ ID NO: 17151
  source 1..80: mol_type = other DNA

SEQ ID NO: 201882 - DNA, 80 bp, synthetic construct; identical to SEQ ID NO: 17152
  source 1..80: mol_type = other DNA

SEQ ID NO: 201883 - DNA, 80 bp, synthetic construct; identical to SEQ ID NO: 17153
  source 1..80: mol_type = other DNA

SEQ ID NO: 201884 - DNA, 80 bp, synthetic construct; identical to SEQ ID NO: 17154
  source 1..80: mol_type = other DNA

SEQ ID NO: 201885 - DNA, 80 bp, synthetic construct; identical to SEQ ID NO: 17155
  source 1..80: mol_type = other DNA

SEQ ID NO: 201886 - DNA, 80 bp, synthetic construct; identical to SEQ ID NO: 17156
  source 1..80: mol_type = other DNA

SEQ ID NO: 201887 - DNA, 80 bp, synthetic construct; identical to SEQ ID NO: 17157
  source 1..80: mol_type = other DNA

SEQ ID NO: 201888 - DNA, 80 bp, synthetic construct; identical to SEQ ID NO: 17158
  source 1..80: mol_type = other DNA

SEQ ID NO: 201889 - DNA, 80 bp, synthetic construct; identical to SEQ ID NO: 17159
  source 1..80: mol_type = other DNA

SEQ ID NO: 201890 - DNA, 80 bp, synthetic construct; identical to SEQ ID NO: 17160
  source 1..80: mol_type = other DNA

SEQ ID NO: 201891 - DNA, 80 bp, synthetic construct; identical to SEQ ID NO: 17161
  source 1..80: mol_type = other DNA

SEQ ID NO: 201892 - DNA, 80 bp, synthetic construct; identical to SEQ ID NO: 17162
  source 1..80: mol_type = other DNA

SEQ ID NO: 201893 - DNA, 80 bp, synthetic construct; identical to SEQ ID NO: 17163
  source 1..80: mol_type = other DNA

SEQ ID NO: 201894 - DNA, 80 bp, synthetic construct; identical to SEQ ID NO: 17164
  source 1..80: mol_type = other DNA

SEQ ID NO: 201895 - DNA, 80 bp, synthetic construct; identical to SEQ ID NO: 17165
  source 1..80: mol_type = other DNA

SEQ ID NO: 201896 - DNA, 80 bp, synthetic construct; identical to SEQ ID NO: 17166
  source 1..80: mol_type = other DNA

SEQ ID NO: 201897 - DNA, 80 bp, synthetic construct; identical to SEQ ID NO: 17167
  source 1..80: mol_type = other DNA

SEQ ID NO: 201898 - DNA, 80 bp, synthetic construct; identical to SEQ ID NO: 17168
  source 1..80: mol_type = other DNA

SEQ ID NO: 201899 - DNA, 80 bp, synthetic construct; identical to SEQ ID NO: 17169
  source 1..80: mol_type = other DNA

SEQ ID NO: 201900 - DNA, 80 bp, synthetic construct; identical to SEQ ID NO: 17170
  source 1..80: mol_type = other DNA

SEQ ID NO: 201901 - DNA, 80 bp, synthetic construct; identical to SEQ ID NO: 17171
  source 1..80: mol_type = other DNA

SEQ ID NO: 201902 - DNA, 80 bp, synthetic construct; identical to SEQ ID NO: 17172
  source 1..80: mol_type = other DNA

SEQ ID NO: 201903 - DNA, 80 bp, synthetic construct; identical to SEQ ID NO: 17173
  source 1..80: mol_type = other DNA

SEQ ID NO: 201904 - DNA, 80 bp, synthetic construct; identical to SEQ ID NO: 17174
  source 1..80: mol_type = other DNA

SEQ ID NO: 201905 - DNA, 80 bp, synthetic construct; identical to SEQ ID NO: 17175
  source 1..80: mol_type = other DNA

SEQ ID NO: 201906 - DNA, 80 bp, synthetic construct; identical to SEQ ID NO: 17176
  source 1..80: mol_type = other DNA

SEQ ID NO: 201907 - DNA, 80 bp, synthetic construct; identical to SEQ ID NO: 17177
  source 1..80: mol_type = other DNA

SEQ ID NO: 201908 - DNA, 80 bp, synthetic construct; identical to SEQ ID NO: 17178
  source 1..80: mol_type = other DNA

SEQ ID NO: 201909 - DNA, 80 bp, synthetic construct; identical to SEQ ID NO: 17179
  source 1..80: mol_type = other DNA

SEQ ID NO: 201910 - DNA, 80 bp, synthetic construct; identical to SEQ ID NO: 17180
  source 1..80: mol_type = other DNA

SEQ ID NO: 201911 - DNA, 80 bp, synthetic construct; identical to SEQ ID NO: 17181
  source 1..80: mol_type = other DNA

SEQ ID NO: 201912 - DNA, 80 bp, synthetic construct; identical to SEQ ID NO: 17182
  source 1..80: mol_type = other DNA

SEQ ID NO: 201913 - DNA, 80 bp, synthetic construct; identical to SEQ ID NO: 17183
  source 1..80: mol_type = other DNA

SEQ ID NO: 201914 - DNA, 80 bp, synthetic construct; identical to SEQ ID NO: 17184
  source 1..80: mol_type = other DNA

SEQ ID NO: 201915 - DNA, 80 bp, synthetic construct; identical to SEQ ID NO: 17185
  source 1..80: mol_type = other DNA

SEQ ID NO: 201916 - DNA, 80 bp, synthetic construct; identical to SEQ ID NO: 17186
  source 1..80: mol_type = other DNA

SEQ ID NO: 201917 - DNA, 80 bp, synthetic construct; identical to SEQ ID NO: 17187
  source 1..80: mol_type = other DNA

SEQ ID NO: 201918 - DNA, 80 bp, synthetic construct; identical to SEQ ID NO: 17188
  source 1..80: mol_type = other DNA

SEQ ID NO: 201919 - DNA, 80 bp, synthetic construct; identical to SEQ ID NO: 17189
  source 1..80: mol_type = other DNA

SEQ ID NO: 201920 - DNA, 80 bp, synthetic construct; identical to SEQ ID NO: 17190
  source 1..80: mol_type = other DNA

SEQ ID NO: 201921 - DNA, 80 bp, synthetic construct; identical to SEQ ID NO: 17191
  source 1..80: mol_type = other DNA

SEQ ID NO: 201922 - DNA, 80 bp, synthetic construct; identical to SEQ ID NO: 17192
  source 1..80: mol_type = other DNA

SEQ ID NO: 201923 - DNA, 80 bp, synthetic construct; identical to SEQ ID NO: 17193
  source 1..80: mol_type = other DNA

SEQ ID NO: 201924 - DNA, 80 bp, synthetic construct; identical to SEQ ID NO: 17194
  source 1..80: mol_type = other DNA

SEQ ID NO: 201925 - DNA, 80 bp, synthetic construct; identical to SEQ ID NO: 17195
  source 1..80: mol_type = other DNA

SEQ ID NO: 201926 - DNA, 80 bp, synthetic construct; identical to SEQ ID NO: 17196
  source 1..80: mol_type = other DNA

SEQ ID NO: 201927 - DNA, 80 bp, synthetic construct; identical to SEQ ID NO: 17197
  source 1..80: mol_type = other DNA

SEQ ID NO: 201928 - DNA, 80 bp, synthetic construct; identical to SEQ ID NO: 17198
  source 1..80: mol_type = other DNA

SEQ ID NO: 201929 - DNA, 80 bp, synthetic construct; identical to SEQ ID NO: 17199
  source 1..80: mol_type = other DNA

SEQ ID NO: 201930 - DNA, 80 bp, synthetic construct; identical to SEQ ID NO: 17200
  source 1..80: mol_type = other DNA

SEQ ID NO: 201931 - DNA, 80 bp, synthetic construct; identical to SEQ ID NO: 17201
  source 1..80: mol_type = other DNA

SEQ ID NO: 201932 - DNA, 80 bp, synthetic construct; identical to SEQ ID NO: 17202
  source 1..80: mol_type = other DNA

SEQ ID NO: 201933 - DNA, 80 bp, synthetic construct; identical to SEQ ID NO: 17203
  source 1..80: mol_type = other DNA

SEQ ID NO: 201934 - DNA, 80 bp, synthetic construct; identical to SEQ ID NO: 17204
  source 1..80: mol_type = other DNA

SEQ ID NO: 201935 - DNA, 80 bp, synthetic construct; identical to SEQ ID NO: 17205
  source 1..80: mol_type = other DNA

SEQ ID NO: 201936 - DNA, 80 bp, synthetic construct; identical to SEQ ID NO: 17206
  source 1..80: mol_type = other DNA

SEQ ID NO: 201937 - DNA, 80 bp, synthetic construct; identical to SEQ ID NO: 17207
  source 1..80: mol_type = other DNA

SEQ ID NO: 201938 - DNA, 80 bp, synthetic construct; identical to SEQ ID NO: 17208
  source 1..80: mol_type = other DNA

SEQ ID NO: 201939 - DNA, 80 bp, synthetic construct; identical to SEQ ID NO: 17209
  source 1..80: mol_type = other DNA

SEQ ID NO: 201940 - DNA, 80 bp, synthetic construct; identical to SEQ ID NO: 17210
  source 1..80: mol_type = other DNA

SEQ ID NO: 201941 - DNA, 80 bp, synthetic construct; identical to SEQ ID NO: 17211
  source 1..80: mol_type = other DNA

SEQ ID NO: 201942 - DNA, 80 bp, synthetic construct; identical to SEQ ID NO: 17212
  source 1..80: mol_type = other DNA

SEQ ID NO: 201943 - DNA, 80 bp, synthetic construct; identical to SEQ ID NO: 17213
  source 1..80: mol_type = other DNA

SEQ ID NO: 201944 - DNA, 80 bp, synthetic construct; identical to SEQ ID NO: 17214
  source 1..80: mol_type = other DNA

SEQ ID NO: 201945 - DNA, 80 bp, synthetic construct; identical to SEQ ID NO: 17215
  source 1..80: mol_type = other DNA

SEQ ID NO: 201946 - DNA, 80 bp, synthetic construct; identical to SEQ ID NO: 17216
  source 1..80: mol_type = other DNA

SEQ ID NO: 201947 - DNA, 80 bp, synthetic construct; identical to SEQ ID NO: 17217
  source 1..80: mol_type = other DNA

SEQ ID NO: 201948 - DNA, 80 bp, synthetic construct; identical to SEQ ID NO: 17218
  source 1..80: mol_type = other DNA

SEQ ID NO: 201949 - DNA, 80 bp, synthetic construct; identical to SEQ ID NO: 17219
  source 1..80: mol_type = other DNA

SEQ ID NO: 201950 - DNA, 80 bp, synthetic construct; identical to SEQ ID NO: 17220
  source 1..80: mol_type = other DNA

SEQ ID NO: 201951 - DNA, 80 bp, synthetic construct; identical to SEQ ID NO: 17221
  source 1..80: mol_type = other DNA

SEQ ID NO: 201952 - DNA, 80 bp, synthetic construct; identical to SEQ ID NO: 17222
  source 1..80: mol_type = other DNA

SEQ ID NO: 201953 - DNA, 80 bp, synthetic construct; identical to SEQ ID NO: 17223
  source 1..80: mol_type = other DNA

SEQ ID NO: 201954 - DNA, 80 bp, synthetic construct; identical to SEQ ID NO: 17224
  source 1..80: mol_type = other DNA

SEQ ID NO: 201955 - DNA, 80 bp, synthetic construct; identical to SEQ ID NO: 17225
  source 1..80: mol_type = other DNA

SEQ ID NO: 201956 - DNA, 80 bp, synthetic construct; identical to SEQ ID NO: 17226
  source 1..80: mol_type = other DNA

SEQ ID NO: 201957 - DNA, 80 bp, synthetic construct; identical to SEQ ID NO: 17227
  source 1..80: mol_type = other DNA

SEQ ID NO: 201958 - DNA, 80 bp, synthetic construct; identical to SEQ ID NO: 17228
  source 1..80: mol_type = other DNA

SEQ ID NO: 201959 - DNA, 80 bp, synthetic construct; identical to SEQ ID NO: 17229
  source 1..80: mol_type = other DNA

SEQ ID NO: 201960 - DNA, 80 bp, synthetic construct; identical to SEQ ID NO: 17230
  source 1..80: mol_type = other DNA

SEQ ID NO: 201961 - DNA, 80 bp, synthetic construct; identical to SEQ ID NO: 17231
  source 1..80: mol_type = other DNA

SEQ ID NO: 201962 - DNA, 80 bp, synthetic construct; identical to SEQ ID NO: 17232
  source 1..80: mol_type = other DNA

SEQ ID NO: 201963 - DNA, 80 bp, synthetic construct; identical to SEQ ID NO: 17233
  source 1..80: mol_type = other DNA

SEQ ID NO: 201964 - DNA, 80 bp, synthetic construct; identical to SEQ ID NO: 17234
  source 1..80: mol_type = other DNA

SEQ ID NO: 201965 - DNA, 80 bp, synthetic construct; identical to SEQ ID NO: 17235
  source 1..80: mol_type = other DNA

SEQ ID NO: 201966 - DNA, 80 bp, synthetic construct; identical to SEQ ID NO: 17236
  source 1..80: mol_type = other DNA

SEQ ID NO: 201967 - DNA, 80 bp, synthetic construct; identical to SEQ ID NO: 17237
  source 1..80: mol_type = other DNA

SEQ ID NO: 201968 - DNA, 80 bp, synthetic construct; identical to SEQ ID NO: 17238
  source 1..80: mol_type = other DNA

SEQ ID NO: 201969 - DNA, 80 bp, synthetic construct; identical to SEQ ID NO: 17239
  source 1..80: mol_type = other DNA

SEQ ID NO: 201970 - DNA, 80 bp, synthetic construct; identical to SEQ ID NO: 17240
  source 1..80: mol_type = other DNA

SEQ ID NO: 201971 - DNA, 80 bp, synthetic construct; identical to SEQ ID NO: 17241
  source 1..80: mol_type = other DNA

SEQ ID NO: 201972 - DNA, 80 bp, synthetic construct; identical to SEQ ID NO: 17242
  source 1..80: mol_type = other DNA

SEQ ID NO: 201973 - DNA, 80 bp, synthetic construct; identical to SEQ ID NO: 17243
  source 1..80: mol_type = other DNA

SEQ ID NO: 201974 - DNA, 80 bp, synthetic construct; identical to SEQ ID NO: 17244
  source 1..80: mol_type = other DNA

SEQ ID NO: 201975 - DNA, 80 bp, synthetic construct; identical to SEQ ID NO: 17245
  source 1..80: mol_type = other DNA

SEQ ID NO: 201976 - DNA, 80 bp, synthetic construct; identical to SEQ ID NO: 17246
  source 1..80: mol_type = other DNA

SEQ ID NO: 201977 - DNA, 80 bp, synthetic construct; identical to SEQ ID NO: 17247
  source 1..80: mol_type = other DNA

SEQ ID NO: 201978 - DNA, 80 bp, synthetic construct; identical to SEQ ID NO: 17248
  source 1..80: mol_type = other DNA

SEQ ID NO: 201979 - DNA, 80 bp, synthetic construct; identical to SEQ ID NO: 17249
  source 1..80: mol_type = other DNA

SEQ ID NO: 201980 - DNA, 80 bp, synthetic construct; identical to SEQ ID NO: 17250
  source 1..80: mol_type = other DNA

SEQ ID NO: 201981 - DNA, 80 bp, synthetic construct; identical to SEQ ID NO: 17251
  source 1..80: mol_type = other DNA

SEQ ID NO: 201982 - DNA, 80 bp, synthetic construct; identical to SEQ ID NO: 17252
  source 1..80: mol_type = other DNA

SEQ ID NO: 201983 - DNA, 80 bp, synthetic construct; identical to SEQ ID NO: 17253
  source 1..80: mol_type = other DNA

SEQ ID NO: 201984 - DNA, 80 bp, synthetic construct; identical to SEQ ID NO: 17254
  source 1..80: mol_type = other DNA

SEQ ID NO: 201985 - DNA, 80 bp, synthetic construct; identical to SEQ ID NO: 17255
  source 1..80: mol_type = other DNA

SEQ ID NO: 201986 - DNA, 80 bp, synthetic construct; identical to SEQ ID NO: 17256
  source 1..80: mol_type = other DNA

SEQ ID NO: 201987 - DNA, 80 bp, synthetic construct; identical to SEQ ID NO: 17257
  source 1..80: mol_type = other DNA

SEQ ID NO: 201988 - DNA, 80 bp, synthetic construct; identical to SEQ ID NO: 17258
  source 1..80: mol_type = other DNA

SEQ ID NO: 201989 - DNA, 80 bp, synthetic construct; identical to SEQ ID NO: 17259
  source 1..80: mol_type = other DNA

SEQ ID NO: 201990 - DNA, 80 bp, synthetic construct; identical to SEQ ID NO: 17260
  source 1..80: mol_type = other DNA

SEQ ID NO: 201991 - DNA, 80 bp, synthetic construct; identical to SEQ ID NO: 17261
  source 1..80: mol_type = other DNA

SEQ ID NO: 201992 - DNA, 80 bp, synthetic construct; identical to SEQ ID NO: 17262
  source 1..80: mol_type = other DNA

SEQ ID NO: 201993 - DNA, 80 bp, synthetic construct; identical to SEQ ID NO: 17263
  source 1..80: mol_type = other DNA

SEQ ID NO: 201994 - DNA, 80 bp, synthetic construct; identical to SEQ ID NO: 17264
  source 1..80: mol_type = other DNA

SEQ ID NO: 201995 - DNA, 80 bp, synthetic construct; identical to SEQ ID NO: 17265
  source 1..80: mol_type = other DNA

SEQ ID NO: 201996 - DNA, 80 bp, synthetic construct; identical to SEQ ID NO: 17266
  source 1..80: mol_type = other DNA

SEQ ID NO: 201997 - DNA, 80 bp, synthetic construct; identical to SEQ ID NO: 17267
  source 1..80: mol_type = other DNA

SEQ ID NO: 201998 - DNA, 80 bp, synthetic construct; identical to SEQ ID NO: 17268
  source 1..80: mol_type = other DNA

SEQ ID NO: 201999 - DNA, 80 bp, synthetic construct; identical to SEQ ID NO: 17269
  source 1..80: mol_type = other DNA

SEQ ID NO: 202000 - DNA, 80 bp, synthetic construct; identical to SEQ ID NO: 17270
  source 1..80: mol_type = other DNA

SEQ ID NO: 202001 - DNA, 80 bp, synthetic construct; identical to SEQ ID NO: 17271
  source 1..80: mol_type = other DNA

SEQ ID NO: 202002 - DNA, 80 bp, synthetic construct; identical to SEQ ID NO: 17272
  source 1..80: mol_type = other DNA

SEQ ID NO: 202003 - DNA, 80 bp, synthetic construct; identical to SEQ ID NO: 17273
  source 1..80: mol_type = other DNA

SEQ ID NO: 202004 - DNA, 80 bp, synthetic construct; identical to SEQ ID NO: 17274
  source 1..80: mol_type = other DNA

SEQ ID NO: 202005 - DNA, 80 bp, synthetic construct; identical to SEQ ID NO: 17275
  source 1..80: mol_type = other DNA

SEQ ID NO: 202006 - DNA, 80 bp, synthetic construct; identical to SEQ ID NO: 17276
  source 1..80: mol_type = other DNA

SEQ ID NO: 202007 - DNA, 80 bp, synthetic construct; identical to SEQ ID NO: 17277
  source 1..80: mol_type = other DNA

SEQ ID NO: 202008 - DNA, 80 bp, synthetic construct; identical to SEQ ID NO: 17278
  source 1..80: mol_type = other DNA

SEQ ID NO: 202009 - DNA, 80 bp, synthetic construct; identical to SEQ ID NO: 17279
  source 1..80: mol_type = other DNA

SEQ ID NO: 202010 - DNA, 80 bp, synthetic construct; identical to SEQ ID NO: 17280
  source 1..80: mol_type = other DNA

SEQ ID NO: 202011 - DNA, 80 bp, synthetic construct; identical to SEQ ID NO: 17281
  source 1..80: mol_type = other DNA

SEQ ID NO: 202012 - DNA, 80 bp, synthetic construct; identical to SEQ ID NO: 17282
  source 1..80: mol_type = other DNA

SEQ ID NO: 202013 - DNA, 80 bp, synthetic construct; identical to SEQ ID NO: 17283
  source 1..80: mol_type = other DNA

SEQ ID NO: 202014 - DNA, 80 bp, synthetic construct; identical to SEQ ID NO: 17284
  source 1..80: mol_type = other DNA

SEQ ID NO: 202015 - DNA, 80 bp, synthetic construct; identical to SEQ ID NO: 17285
  source 1..80: mol_type = other DNA

SEQ ID NO: 202016 - DNA, 80 bp, synthetic construct; identical to SEQ ID NO: 17286
  source 1..80: mol_type = other DNA

SEQ ID NO: 202017 - DNA, 80 bp, synthetic construct; identical to SEQ ID NO: 17287
  source 1..80: mol_type = other DNA

SEQ ID NO: 202018 - DNA, 80 bp, synthetic construct; identical to SEQ ID NO: 17288
  source 1..80: mol_type = other DNA

SEQ ID NO: 202019 - DNA, 80 bp, synthetic construct; identical to SEQ ID NO: 17289
  source 1..80: mol_type = other DNA

SEQ ID NO: 202020 - DNA, 80 bp, synthetic construct; identical to SEQ ID NO: 17290
  source 1..80: mol_type = other DNA

SEQ ID NO: 202021 - DNA, 80 bp, synthetic construct; identical to SEQ ID NO: 17291
  source 1..80: mol_type = other DNA

SEQ ID NO: 202022 - DNA, 80 bp, synthetic construct; identical to SEQ ID NO: 17292
  source 1..80: mol_type = other DNA

SEQ ID NO: 202023 - DNA, 80 bp, synthetic construct; identical to SEQ ID NO: 17293
  source 1..80: mol_type = other DNA

SEQ ID NO: 202024 - DNA, 80 bp, synthetic construct; identical to SEQ ID NO: 17294
  source 1..80: mol_type = other DNA

SEQ ID NO: 202025 - DNA, 80 bp, synthetic construct; identical to SEQ ID NO: 17295
  source 1..80: mol_type = other DNA

SEQ ID NO: 202026 - DNA, 80 bp, synthetic construct; identical to SEQ ID NO: 17296
  source 1..80: mol_type = other DNA

SEQ ID NO: 202027 - DNA, 80 bp, synthetic construct; identical to SEQ ID NO: 17297
  source 1..80: mol_type = other DNA

SEQ ID NO: 202028 - DNA, 80 bp, synthetic construct; identical to SEQ ID NO: 17298
  source 1..80: mol_type = other DNA

SEQ ID NO: 202029 - DNA, 80 bp, synthetic construct; identical to SEQ ID NO: 17299
  source 1..80: mol_type = other DNA

SEQ ID NO: 202030 - DNA, 80 bp, synthetic construct; identical to SEQ ID NO: 17300
  source 1..80: mol_type = other DNA

SEQ ID NO: 202031 - DNA, 80 bp, synthetic construct; identical to SEQ ID NO: 17301
  source 1..80: mol_type = other DNA

SEQ ID NO: 202032 - DNA, 80 bp, synthetic construct; identical to SEQ ID NO: 17302
  source 1..80: mol_type = other DNA

SEQ ID NO: 202033 - DNA, 80 bp, synthetic construct; identical to SEQ ID NO: 17303
  source 1..80: mol_type = other DNA

SEQ ID NO: 202034 - DNA, 80 bp, synthetic construct; identical to SEQ ID NO: 17304
  source 1..80: mol_type = other DNA

SEQ ID NO: 202035 - DNA, 80 bp, synthetic construct; identical to SEQ ID NO: 17305
  source 1..80: mol_type = other DNA

SEQ ID NO: 202036 - DNA, 80 bp, synthetic construct; identical to SEQ ID NO: 17306
  source 1..80: mol_type = other DNA

SEQ ID NO: 202037 - DNA, 80 bp, synthetic construct; identical to SEQ ID NO: 17307
  source 1..80: mol_type = other DNA

SEQ ID NO: 202038 - DNA, 80 bp, synthetic construct; identical to SEQ ID NO: 17308
  source 1..80: mol_type = other DNA

SEQ ID NO: 202039 - DNA, 80 bp, synthetic construct; identical to SEQ ID NO: 17309
  source 1..80: mol_type = other DNA

SEQ ID NO: 202040 - DNA, 80 bp, synthetic construct; identical to SEQ ID NO: 17310
  source 1..80: mol_type = other DNA

SEQ ID NO: 202041 - DNA, 80 bp, synthetic construct; identical to SEQ ID NO: 17311
  source 1..80: mol_type = other DNA

SEQ ID NO: 202042 - DNA, 80 bp, synthetic construct; identical to SEQ ID NO: 17312
  source 1..80: mol_type = other DNA

SEQ ID NO: 202043 - DNA, 80 bp, synthetic construct; identical to SEQ ID NO: 17313
  source 1..80: mol_type = other DNA

SEQ ID NO: 202044 - DNA, 80 bp, synthetic construct; identical to SEQ ID NO: 17314
  source 1..80: mol_type = other DNA

SEQ ID NO: 202045 - DNA, 80 bp, synthetic construct; identical to SEQ ID NO: 17315
  source 1..80: mol_type = other DNA

SEQ ID NO: 202046 - DNA, 80 bp, synthetic construct; identical to SEQ ID NO: 17316
  source 1..80: mol_type = other DNA

SEQ ID NO: 202047 - DNA, 80 bp, synthetic construct; identical to SEQ ID NO: 17317
  source 1..80: mol_type = other DNA

SEQ ID NO: 202048 - DNA, 80 bp, synthetic construct; identical to SEQ ID NO: 17318
  source 1..80: mol_type = other DNA

SEQ ID NO: 202049 - DNA, 80 bp, synthetic construct; identical to SEQ ID NO: 17319
  source 1..80: mol_type = other DNA

SEQ ID NO: 202050 - DNA, 80 bp, synthetic construct; identical to SEQ ID NO: 17320
  source 1..80: mol_type = other DNA

SEQ ID NO: 202051 - DNA, 80 bp, synthetic construct; identical to SEQ ID NO: 17321
  source 1..80: mol_type = other DNA

SEQ ID NO: 202052 - DNA, 80 bp, synthetic construct; identical to SEQ ID NO: 17322
  source 1..80: mol_type = other DNA

SEQ ID NO: 202053 - DNA, 80 bp, synthetic construct; identical to SEQ ID NO: 17323
  source 1..80: mol_type = other DNA

SEQ ID NO: 202054 - DNA, 80 bp, synthetic construct; identical to SEQ ID NO: 17324
  source 1..80: mol_type = other DNA

SEQ ID NO: 202055 - DNA, 80 bp, synthetic construct; identical to SEQ ID NO: 17325
  source 1..80: mol_type = other DNA

SEQ ID NO: 202056 - DNA, 80 bp, synthetic construct; identical to SEQ ID NO: 17326
  source 1..80: mol_type = other DNA

SEQ ID NO: 202057 - DNA, 80 bp, synthetic construct; identical to SEQ ID NO: 17327
  source 1..80: mol_type = other DNA

SEQ ID NO: 202058 - DNA, 80 bp, synthetic construct; identical to SEQ ID NO: 17328
  source 1..80: mol_type = other DNA

SEQ ID NO: 202059 - DNA, 80 bp, synthetic construct; identical to SEQ ID NO: 17329
  source 1..80: mol_type = other DNA

SEQ ID NO: 202060 - DNA, 80 bp, synthetic construct; identical to SEQ ID NO: 17330
  source 1..80: mol_type = other DNA

SEQ ID NO: 202061 - DNA, 80 bp, synthetic construct; identical to SEQ ID NO: 17331
  source 1..80: mol_type = other DNA

SEQ ID NO: 202062 - DNA, 80 bp, synthetic construct; identical to SEQ ID NO: 17332
  source 1..80: mol_type = other DNA

SEQ ID NO: 202063 - DNA, 80 bp, synthetic construct; identical to SEQ ID NO: 17333
  source 1..80: mol_type = other DNA

SEQ ID NO: 202064 - DNA, 80 bp, synthetic construct; identical to SEQ ID NO: 17334
  source 1..80: mol_type = other DNA

SEQ ID NO: 202065 - DNA, 80 bp, synthetic construct; identical to SEQ ID NO: 17335
  source 1..80: mol_type = other DNA

SEQ ID NO: 202066 - DNA, 80 bp, synthetic construct; identical to SEQ ID NO: 17336
  source 1..80: mol_type = other DNA

SEQ ID NO: 202067 - DNA, 80 bp, synthetic construct; identical to SEQ ID NO: 17337
  source 1..80: mol_type = other DNA

SEQ ID NO: 202068 - DNA, 80 bp, synthetic construct; identical to SEQ ID NO: 17338
  source 1..80: mol_type = other DNA

SEQ ID NO: 202069 - DNA, 80 bp, synthetic construct; identical to SEQ ID NO: 17339
  source 1..80: mol_type = other DNA

SEQ ID NO: 202070 - DNA, 80 bp, synthetic construct; identical to SEQ ID NO: 17340
  source 1..80: mol_type = other DNA

SEQ ID NO: 202071 - DNA, 80 bp, synthetic construct; identical to SEQ ID NO: 17341
  source 1..80: mol_type = other DNA

SEQ ID NO: 202072 - DNA, 80 bp, synthetic construct; identical to SEQ ID NO: 17342
  source 1..80: mol_type = other DNA

SEQ ID NO: 202073 - DNA, 80 bp, synthetic construct; identical to SEQ ID NO: 17343
  source 1..80: mol_type = other DNA

SEQ ID NO: 202074 - DNA, 80 bp, synthetic construct; identical to SEQ ID NO: 17344
  source 1..80: mol_type = other DNA

SEQ ID NO: 202075 - DNA, 80 bp, synthetic construct; identical to SEQ ID NO: 17345
  source 1..80: mol_type = other DNA

SEQ ID NO: 202076 - DNA, 80 bp, synthetic construct; identical to SEQ ID NO: 17346
  source 1..80: mol_type = other DNA

SEQ ID NO: 202077 - DNA, 80 bp, synthetic construct; identical to SEQ ID NO: 17347
  source 1..80: mol_type = other DNA

SEQ ID NO: 202078 - DNA, 80 bp, synthetic construct; identical to SEQ ID NO: 17348
  source 1..80: mol_type = other DNA

SEQ ID NO: 202079 - DNA, 80 bp, synthetic construct; identical to SEQ ID NO: 17349
  source 1..80: mol_type = other DNA

SEQ ID NO: 202080 - DNA, 80 bp, synthetic construct; identical to SEQ ID NO: 17350
  source 1..80: mol_type = other DNA

SEQ ID NO: 202081 - DNA, 80 bp, synthetic construct; identical to SEQ ID NO: 17351
  source 1..80: mol_type = other DNA

SEQ ID NO: 202082 - DNA, 80 bp, synthetic construct; identical to SEQ ID NO: 17352
  source 1..80: mol_type = other DNA

SEQ ID NO: 202083 - DNA, 80 bp, synthetic construct; identical to SEQ ID NO: 17353
  source 1..80: mol_type = other DNA

SEQ ID NO: 202084 - DNA, 80 bp, synthetic construct; identical to SEQ ID NO: 17354
  source 1..80: mol_type = other DNA

SEQ ID NO: 202085 - DNA, 80 bp, synthetic construct; identical to SEQ ID NO: 17355
  source 1..80: mol_type = other DNA

SEQ ID NO: 202086 - DNA, 80 bp, synthetic construct; identical to SEQ ID NO: 17356
  source 1..80: mol_type = other DNA

SEQ ID NO: 202087 - DNA, 80 bp, synthetic construct; identical to SEQ ID NO: 17357
  source 1..80: mol_type = other DNA

SEQ ID NO: 202088 - DNA, 80 bp, synthetic construct; identical to SEQ ID NO: 17358
  source 1..80: mol_type = other DNA

SEQ ID NO: 202089 - DNA, 80 bp, synthetic construct; identical to SEQ ID NO: 17359
  source 1..80: mol_type = other DNA

SEQ ID NO: 202090 - DNA, 80 bp, synthetic construct; identical to SEQ ID NO: 17360
  source 1..80: mol_type = other DNA

SEQ ID NO: 202091 - DNA, 80 bp, synthetic construct; identical to SEQ ID NO: 17361
  source 1..80: mol_type = other DNA

SEQ ID NO: 202092 - DNA, 80 bp, synthetic construct; identical to SEQ ID NO: 17362
  source 1..80: mol_type = other DNA

SEQ ID NO: 202093 - DNA, 80 bp, synthetic construct; identical to SEQ ID NO: 17363
  source 1..80: mol_type = other DNA

SEQ ID NO: 202094 - DNA, 80 bp, synthetic construct; identical to SEQ ID NO: 17364
  source 1..80: mol_type = other DNA

SEQ ID NO: 202095 - DNA, 80 bp, synthetic construct; identical to SEQ ID NO: 17365
  source 1..80: mol_type = other DNA

SEQ ID NO: 202096 - DNA, 80 bp, synthetic construct; identical to SEQ ID NO: 17366
  source 1..80: mol_type = other DNA

SEQ ID NO: 202097 - DNA, 80 bp, synthetic construct; identical to SEQ ID NO: 17367
  source 1..80: mol_type = other DNA

SEQ ID NO: 202098 - DNA, 80 bp, synthetic construct; identical to SEQ ID NO: 17368
  source 1..80: mol_type = other DNA

SEQ ID NO: 202099 - DNA, 80 bp, synthetic construct; identical to SEQ ID NO: 17369
  source 1..80: mol_type = other DNA

SEQ ID NO: 202100 - DNA, 80 bp, synthetic construct; identical to SEQ ID NO: 17370
  source 1..80: mol_type = other DNA

SEQ ID NO: 202101 - DNA, 80 bp, synthetic construct; identical to SEQ ID NO: 17371
  source 1..80: mol_type = other DNA

SEQ ID NO: 202102 - DNA, 80 bp, synthetic construct; identical to SEQ ID NO: 17372
  source 1..80: mol_type = other DNA

SEQ ID NO: 202103 - DNA, 80 bp, synthetic construct; identical to SEQ ID NO: 17373
  source 1..80: mol_type = other DNA

SEQ ID NO: 202104 - DNA, 80 bp, synthetic construct; identical to SEQ ID NO: 17374
  source 1..80: mol_type = other DNA

SEQ ID NO: 202105 - DNA, 80 bp, synthetic construct; identical to SEQ ID NO: 17375
  source 1..80: mol_type = other DNA

SEQ ID NO: 202106 - DNA, 80 bp, synthetic construct; identical to SEQ ID NO: 17376
  source 1..80: mol_type = other DNA

SEQ ID NO: 202107 - DNA, 80 bp, synthetic construct; identical to SEQ ID NO: 17377
  source 1..80: mol_type = other DNA

SEQ ID NO: 202108 - DNA, 80 bp, synthetic construct; identical to SEQ ID NO: 17378
  source 1..80: mol_type = other DNA

SEQ ID NO: 202109 - DNA, 80 bp, synthetic construct; identical to SEQ ID NO: 17379
  source 1..80: mol_type = other DNA

SEQ ID NO: 202110 - DNA, 80 bp, synthetic construct; identical to SEQ ID NO: 17380
  source 1..80: mol_type = other DNA

SEQ ID NO: 202111 - DNA, 80 bp, synthetic construct; identical to SEQ ID NO: 17381
  source 1..80: mol_type = other DNA

SEQ ID NO: 202112 - DNA, 80 bp, synthetic construct; identical to SEQ ID NO: 17382
  source 1..80: mol_type = other DNA

SEQ ID NO: 202113 - DNA, 80 bp, synthetic construct; identical to SEQ ID NO: 17383
  source 1..80: mol_type = other DNA

SEQ ID NO: 202114 - DNA, 80 bp, synthetic construct; identical to SEQ ID NO: 17384
  source 1..80: mol_type = other DNA

SEQ ID NO: 202115 - DNA, 80 bp, synthetic construct; identical to SEQ ID NO: 17385
  source 1..80: mol_type = other DNA

SEQ ID NO: 202116 - DNA, 80 bp, synthetic construct; identical to SEQ ID NO: 17386
  source 1..80: mol_type = other DNA

SEQ ID NO: 202117 - DNA, 80 bp, synthetic construct; identical to SEQ ID NO: 17387
  source 1..80: mol_type = other DNA

SEQ ID NO: 202118 - DNA, 80 bp, synthetic construct; identical to SEQ ID NO: 17388
  source 1..80: mol_type = other DNA

SEQ ID NO: 202119 - DNA, 80 bp, synthetic construct; identical to SEQ ID NO: 17389
  source 1..80: mol_type = other DNA

SEQ ID NO: 202120 - DNA, 80 bp, synthetic construct; identical to SEQ ID NO: 17390
  source 1..80: mol_type = other DNA

SEQ ID NO: 202121 - DNA, 80 bp, synthetic construct; identical to SEQ ID NO: 17391
  source 1..80: mol_type = other DNA

SEQ ID NO: 202122 - DNA, 80 bp, synthetic construct; identical to SEQ ID NO: 17392
  source 1..80: mol_type = other DNA

SEQ ID NO: 202123 - DNA, 80 bp, synthetic construct; identical to SEQ ID NO: 17393
  source 1..80: mol_type = other DNA

SEQ ID NO: 202124 - DNA, 80 bp, synthetic construct; identical to SEQ ID NO: 17394
  source 1..80: mol_type = other DNA

SEQ ID NO: 202125 - DNA, 80 bp, synthetic construct; identical to SEQ ID NO: 17395
  source 1..80: mol_type = other DNA

SEQ ID NO: 202126 - DNA, 80 bp, synthetic construct; identical to SEQ ID NO: 17396
  source 1..80: mol_type = other DNA

SEQ ID NO: 202127 - DNA, 80 bp, synthetic construct; identical to SEQ ID NO: 17397
  source 1..80: mol_type = other DNA

SEQ ID NO: 202128 - DNA, 80 bp, synthetic construct; identical to SEQ ID NO: 17398
  source 1..80: mol_type = other DNA

SEQ ID NO: 202129 - DNA, 80 bp, synthetic construct; identical to SEQ ID NO: 17399
  source 1..80: mol_type = other DNA

SEQ ID NO: 202130 - DNA, 80 bp, synthetic construct; identical to SEQ ID NO: 17400
  source 1..80: mol_type = other DNA

SEQ ID NO: 202131 - DNA, 80 bp, synthetic construct; identical to SEQ ID NO: 17401
  source 1..80: mol_type = other DNA

SEQ ID NO: 202132 - DNA, 80 bp, synthetic construct; identical to SEQ ID NO: 17402
  source 1..80: mol_type = other DNA

SEQ ID NO: 202133 - DNA, 80 bp, synthetic construct; identical to SEQ ID NO: 17403
  source 1..80: mol_type = other DNA

SEQ ID NO: 202134 - DNA, 80 bp, synthetic construct; identical to SEQ ID NO: 17404
  source 1..80: mol_type = other DNA

SEQ ID NO: 202135 - DNA, 80 bp, synthetic construct; identical to SEQ ID NO: 17405
  source 1..80: mol_type = other DNA

SEQ ID NO: 202136 - DNA, 80 bp, synthetic construct; identical to SEQ ID NO: 17406
  source 1..80: mol_type = other DNA

SEQ ID NO: 202137 - DNA, 80 bp, synthetic construct; identical to SEQ ID NO: 17407
  source 1..80: mol_type = other DNA

SEQ ID NO: 202138 - DNA, 80 bp, synthetic construct; identical to SEQ ID NO: 17408
  source 1..80: mol_type = other DNA

SEQ ID NO: 202139 - DNA, 80 bp, synthetic construct; identical to SEQ ID NO: 17409
  source 1..80: mol_type = other DNA

SEQ ID NO: 202140 - DNA, 80 bp, synthetic construct; identical to SEQ ID NO: 17410
  source 1..80: mol_type = other DNA

SEQ ID NO: 202141 - DNA, 80 bp, synthetic construct; identical to SEQ ID NO: 17411
  source 1..80: mol_type = other DNA

SEQ ID NO: 202142 - DNA, 80 bp, synthetic construct; identical to SEQ ID NO: 17412
  source 1..80: mol_type = other DNA

SEQ ID NO: 202143 - DNA, 80 bp, synthetic construct; identical to SEQ ID NO: 17413
  source 1..80: mol_type = other DNA

SEQ ID NO: 202144 - DNA, 80 bp, synthetic construct; identical to SEQ ID NO: 17414
  source 1..80: mol_type = other DNA

SEQ ID NO: 202145 - DNA, 80 bp, synthetic construct; identical to SEQ ID NO: 17415
  source 1..80: mol_type = other DNA

SEQ ID NO: 202146 - DNA, 80 bp, synthetic construct; identical to SEQ ID NO: 17416
  source 1..80: mol_type = other DNA

SEQ ID NO: 202147 - DNA, 80 bp, synthetic construct; identical to SEQ ID NO: 17417
  source 1..80: mol_type = other DNA

SEQ ID NO: 202148 - DNA, 80 bp, synthetic construct; identical to SEQ ID NO: 17418
  source 1..80: mol_type = other DNA

SEQ ID NO: 202149 - DNA, 80 bp, synthetic construct; identical to SEQ ID NO: 17419
  source 1..80: mol_type = other DNA

SEQ ID NO: 202150 - DNA, 80 bp, synthetic construct; identical to SEQ ID NO: 17420
  source 1..80: mol_type = other DNA

SEQ ID NO: 202151 - DNA, 80 bp, synthetic construct; identical to SEQ ID NO: 17421
  source 1..80: mol_type = other DNA

SEQ ID NO: 202152 - DNA, 80 bp, synthetic construct; identical to SEQ ID NO: 17422
  source 1..80: mol_type = other DNA

SEQ ID NO: 202153 - DNA, 80 bp, synthetic construct; identical to SEQ ID NO: 17423
  source 1..80: mol_type = other DNA

SEQ ID NO: 202154 - DNA, 80 bp, synthetic construct; identical to SEQ ID NO: 17424
  source 1..80: mol_type = other DNA

SEQ ID NO: 202155 - DNA, 80 bp, synthetic construct; identical to SEQ ID NO: 17425
  source 1..80: mol_type = other DNA

SEQ ID NO: 202156 - DNA, 80 bp, synthetic construct; identical to SEQ ID NO: 17426
  source 1..80: mol_type = other DNA

SEQ ID NO: 202157 - DNA, 80 bp, synthetic construct; identical to SEQ ID NO: 17427
  source 1..80: mol_type = other DNA

SEQ ID NO: 202158 - DNA, 80 bp, synthetic construct; identical to SEQ ID NO: 17428
  source 1..80: mol_type = other DNA

SEQ ID NO: 202159 - DNA, 80 bp, synthetic construct; identical to SEQ ID NO: 17429
  source 1..80: mol_type = other DNA

SEQ ID NO: 202160 - DNA, 80 bp, synthetic construct; identical to SEQ ID NO: 17430
  source 1..80: mol_type = other DNA

SEQ ID NO: 202161 - DNA, 80 bp, synthetic construct; identical to SEQ ID NO: 17431
  source 1..80: mol_type = other DNA

SEQ ID NO: 202162 - DNA, 80 bp, synthetic construct; identical to SEQ ID NO: 17432
  source 1..80: mol_type = other DNA

SEQ ID NO: 202163 - DNA, 80 bp, synthetic construct; identical to SEQ ID NO: 17433
  source 1..80: mol_type = other DNA

SEQ ID NO: 202164 - DNA, 80 bp, synthetic construct; identical to SEQ ID NO: 17434
  source 1..80: mol_type = other DNA

SEQ ID NO: 202165 - DNA, 80 bp, synthetic construct; identical to SEQ ID NO: 17435
  source 1..80: mol_type = other DNA

SEQ ID NO: 202166 - DNA, 80 bp, synthetic construct; identical to SEQ ID NO: 17436
  source 1..80: mol_type = other DNA

SEQ ID NO: 202167 - DNA, 80 bp, synthetic construct; identical to SEQ ID NO: 17437
  source 1..80: mol_type = other DNA

SEQ ID NO: 202168 - DNA, 80 bp, synthetic construct; identical to SEQ ID NO: 17438
  source 1..80: mol_type = other DNA

SEQ ID NO: 202169 - DNA, 80 bp, synthetic construct; identical to SEQ ID NO: 17439
  source 1..80: mol_type = other DNA

SEQ ID NO: 202170 - DNA, 80 bp, synthetic construct; identical to SEQ ID NO: 17440
  source 1..80: mol_type = other DNA

SEQ ID NO: 202171 - DNA, 80 bp, synthetic construct; identical to SEQ ID NO: 17441
  source 1..80: mol_type = other DNA

SEQ ID NO: 202172 - DNA, 80 bp, synthetic construct; identical to SEQ ID NO: 17442
  source 1..80: mol_type = other DNA

SEQ ID NO: 202173 - DNA, 80 bp, synthetic construct; identical to SEQ ID NO: 17443
  source 1..80: mol_type = other DNA

SEQ ID NO: 202174 - DNA, 80 bp, synthetic construct; identical to SEQ ID NO: 17444
  source 1..80: mol_type = other DNA

SEQ ID NO: 202175 - DNA, 80 bp, synthetic construct; identical to SEQ ID NO: 17445
  source 1..80: mol_type = other DNA

SEQ ID NO: 202176 - DNA, 80 bp, synthetic construct; identical to SEQ ID NO: 17446
  source 1..80: mol_type = other DNA

SEQ ID NO: 202177 - DNA, 80 bp, synthetic construct; identical to SEQ ID NO: 17447
  source 1..80: mol_type = other DNA

SEQ ID NO: 202178 - DNA, 80 bp, synthetic construct; identical to SEQ ID NO: 17448
  source 1..80: mol_type = other DNA

SEQ ID NO: 202179 - DNA, 80 bp, synthetic construct; identical to SEQ ID NO: 17449
  source 1..80: mol_type = other DNA

SEQ ID NO: 202180 - DNA, 80 bp, synthetic construct; identical to SEQ ID NO: 17450
  source 1..80: mol_type = other DNA

SEQ ID NO: 202181 - DNA, 80 bp, synthetic construct; identical to SEQ ID NO: 17451
  source 1..80: mol_type = other DNA

SEQ ID NO: 202182 - DNA, 80 bp, synthetic construct; identical to SEQ ID NO: 17452
  source 1..80: mol_type = other DNA

SEQ ID NO: 202183 - DNA, 80 bp, synthetic construct; identical to SEQ ID NO: 17453
  source 1..80: mol_type = other DNA

SEQ ID NO: 202184 - DNA, 80 bp, synthetic construct; identical to SEQ ID NO: 17454
  source 1..80: mol_type = other DNA

SEQ ID NO: 202185 - DNA, 80 bp, synthetic construct; identical to SEQ ID NO: 17455
  source 1..80: mol_type = other DNA

SEQ ID NO: 202186 - DNA, 80 bp, synthetic construct; identical to SEQ ID NO: 17456
  source 1..80: mol_type = other DNA

SEQ ID NO: 202187 - DNA, 80 bp, synthetic construct; identical to SEQ ID NO: 17457
  source 1..80: mol_type = other DNA

SEQ ID NO: 202188 - DNA, 80 bp, synthetic construct; identical to SEQ ID NO: 17458
  source 1..80: mol_type = other DNA

SEQ ID NO: 202189 - DNA, 80 bp, synthetic construct; identical to SEQ ID NO: 17459
  source 1..80: mol_type = other DNA

SEQ ID NO: 202190 - DNA, 80 bp, synthetic construct; identical to SEQ ID NO: 17460
  source 1..80: mol_type = other DNA

SEQ ID NO: 202191 - DNA, 80 bp, synthetic construct; identical to SEQ ID NO: 17461
  source 1..80: mol_type = other DNA

SEQ ID NO: 202192 - DNA, 80 bp, synthetic construct; identical to SEQ ID NO: 17462
  source 1..80: mol_type = other DNA

SEQ ID NO: 202193 - DNA, 80 bp, synthetic construct; identical to SEQ ID NO: 17463
  source 1..80: mol_type = other DNA

SEQ ID NO: 202194 - DNA, 80 bp, synthetic construct; identical to SEQ ID NO: 17464
  source 1..80: mol_type = other DNA

SEQ ID NO: 202195 - DNA, 80 bp, synthetic construct; identical to SEQ ID NO: 17465
  source 1..80: mol_type = other DNA

SEQ ID NO: 202196 - DNA, 80 bp, synthetic construct; identical to SEQ ID NO: 17466
  source 1..80: mol_type = other DNA

SEQ ID NO: 202197 - DNA, 80 bp, synthetic construct; identical to SEQ ID NO: 17467
  source 1..80: mol_type = other DNA

SEQ ID NO: 202198 - DNA, 80 bp, synthetic construct; identical to SEQ ID NO: 17468
  source 1..80: mol_type = other DNA

SEQ ID NO: 202199 - DNA, 80 bp, synthetic construct; identical to SEQ ID NO: 17469
  source 1..80: mol_type = other DNA

SEQ ID NO: 202200 - DNA, 80 bp, synthetic construct; identical to SEQ ID NO: 17470
  source 1..80: mol_type = other DNA

SEQ ID NO: 202201 - DNA, 80 bp, synthetic construct; identical to SEQ ID NO: 17471
  source 1..80: mol_type = other DNA

SEQ ID NO: 202202 - DNA, 80 bp, synthetic construct; identical to SEQ ID NO: 17472
  source 1..80: mol_type = other DNA

SEQ ID NO: 202203 - DNA, 80 bp, synthetic construct; identical to SEQ ID NO: 17473
  source 1..80: mol_type = other DNA

SEQ ID NO: 202204 - DNA, 80 bp, synthetic construct; identical to SEQ ID NO: 17474
  source 1..80: mol_type = other DNA

SEQ ID NO: 202205 - DNA, 80 bp, synthetic construct; identical to SEQ ID NO: 17475
  source 1..80: mol_type = other DNA

SEQ ID NO: 202206 - DNA, 80 bp, synthetic construct; identical to SEQ ID NO: 17476
  source 1..80: mol_type = other DNA

SEQ ID NO: 202207 - DNA, 80 bp, synthetic construct; identical to SEQ ID NO: 17477
  source 1..80: mol_type = other DNA

SEQ ID NO: 202208 - DNA, 80 bp, synthetic construct; identical to SEQ ID NO: 17478
  source 1..80: mol_type = other DNA

SEQ ID NO: 202209 - DNA, 80 bp, synthetic construct; identical to SEQ ID NO: 17479
  source 1..80: mol_type = other DNA

SEQ ID NO: 202210 - DNA, 80 bp, synthetic construct; identical to SEQ ID NO: 17480
  source 1..80: mol_type = other DNA

SEQ ID NO: 202211 - DNA, 80 bp, synthetic construct; identical to SEQ ID NO: 17481
  source 1..80: mol_type = other DNA

SEQ ID NO: 202212 - DNA, 80 bp, synthetic construct; identical to SEQ ID NO: 17482
  source 1..80: mol_type = other DNA

SEQ ID NO: 202213 - DNA, 80 bp, synthetic construct; identical to SEQ ID NO: 17483
  source 1..80: mol_type = other DNA

SEQ ID NO: 202214 - DNA, 80 bp, synthetic construct; identical to SEQ ID NO: 17484
  source 1..80: mol_type = other DNA

SEQ ID NO: 202215 - DNA, 80 bp, synthetic construct; identical to SEQ ID NO: 17485
  source 1..80: mol_type = other DNA

SEQ ID NO: 202216 - DNA, 80 bp, synthetic construct; identical to SEQ ID NO: 17486
  source 1..80: mol_type = other DNA

SEQ ID NO: 202217 - DNA, 80 bp, synthetic construct; identical to SEQ ID NO: 17487
  source 1..80: mol_type = other DNA

SEQ ID NO: 202218 - DNA, 80 bp, synthetic construct; identical to SEQ ID NO: 17488
  source 1..80: mol_type = other DNA

SEQ ID NO: 202219 - DNA, 80 bp, synthetic construct; identical to SEQ ID NO: 17489
  source 1..80: mol_type = other DNA

SEQ ID NO: 202220 - DNA, 80 bp, synthetic construct; identical to SEQ ID NO: 17490
  source 1..80: mol_type = other DNA

SEQ ID NO: 202221 - DNA, 80 bp, synthetic construct; identical to SEQ ID NO: 17491
  source 1..80: mol_type = other DNA

SEQ ID NO: 202222 - DNA, 80 bp, synthetic construct; identical to SEQ ID NO: 17492
  source 1..80: mol_type = other DNA

SEQ ID NO: 202223 - DNA, 80 bp, synthetic construct; identical to SEQ ID NO: 17493
  source 1..80: mol_type = other DNA

SEQ ID NO: 202224 - DNA, 80 bp, synthetic construct; identical to SEQ ID NO: 17494
  source 1..80: mol_type = other DNA

SEQ ID NO: 202225 - DNA, 80 bp, synthetic construct; identical to SEQ ID NO: 17495
  source 1..80: mol_type = other DNA

SEQ ID NO: 202226 - DNA, 80 bp, synthetic construct; identical to SEQ ID NO: 17496
  source 1..80: mol_type = other DNA

SEQ ID NO: 202227 - DNA, 80 bp, synthetic construct; identical to SEQ ID NO: 17497
  source 1..80: mol_type = other DNA

SEQ ID NO: 202228 - DNA, 80 bp, synthetic construct; identical to SEQ ID NO: 17498
  source 1..80: mol_type = other DNA

SEQ ID NO: 202229 - DNA, 80 bp, synthetic construct; identical to SEQ ID NO: 17499
  source 1..80: mol_type = other DNA

SEQ ID NO: 202230 - DNA, 80 bp, synthetic construct; identical to SEQ ID NO: 17500
  source 1..80: mol_type = other DNA

SEQ ID NO: 202231 - DNA, 80 bp, synthetic construct; identical to SEQ ID NO: 17501
  source 1..80: mol_type = other DNA

SEQ ID NO: 202232 - DNA, 80 bp, synthetic construct; identical to SEQ ID NO: 17502
  source 1..80: mol_type = other DNA

SEQ ID NO: 202233 - DNA, 80 bp, synthetic construct; identical to SEQ ID NO: 17503
  source 1..80: mol_type = other DNA

SEQ ID NO: 202234 - DNA, 80 bp, synthetic construct; identical to SEQ ID NO: 17504
  source 1..80: mol_type = other DNA

SEQ ID NO: 202235 - DNA, 80 bp, synthetic construct; identical to SEQ ID NO: 17505
  source 1..80: mol_type = other DNA

SEQ ID NO: 202236 - DNA, 80 bp, synthetic construct; identical to SEQ ID NO: 17506
  source 1..80: mol_type = other DNA

SEQ ID NO: 202237 - DNA, 80 bp, synthetic construct; identical to SEQ ID NO: 17507
  source 1..80: mol_type = other DNA

SEQ ID NO: 202238 - DNA, 80 bp, synthetic construct; identical to SEQ ID NO: 17508
  source 1..80: mol_type = other DNA

SEQ ID NO: 202239 - DNA, 80 bp, synthetic construct; identical to SEQ ID NO: 17509
  source 1..80: mol_type = other DNA

SEQ ID NO: 202240 - DNA, 80 bp, synthetic construct; identical to SEQ ID NO: 17510
  source 1..80: mol_type = other DNA

SEQ ID NO: 202241 - DNA, 80 bp, synthetic construct; identical to SEQ ID NO: 17511
  source 1..80: mol_type = other DNA

SEQ ID NO: 202242 - DNA, 80 bp, synthetic construct; identical to SEQ ID NO: 17512
  source 1..80: mol_type = other DNA

SEQ ID NO: 202243 - DNA, 80 bp, synthetic construct; identical to SEQ ID NO: 17513
  source 1..80: mol_type = other DNA

SEQ ID NO: 202244 - DNA, 80 bp, synthetic construct; identical to SEQ ID NO: 17514
  source 1..80: mol_type = other DNA

SEQ ID NO: 202245 - DNA, 80 bp, synthetic construct; identical to SEQ ID NO: 17515
  source 1..80: mol_type = other DNA

SEQ ID NO: 202246 - DNA, 80 bp, synthetic construct; identical to SEQ ID NO: 17516
  source 1..80: mol_type = other DNA

SEQ ID NO: 202247 - DNA, 80 bp, synthetic construct; identical to SEQ ID NO: 17517
  source 1..80: mol_type = other DNA

SEQ ID NO: 202248 - DNA, 80 bp, synthetic construct; identical to SEQ ID NO: 17518
  source 1..80: mol_type = other DNA

SEQ ID NO: 202249 - DNA, 80 bp, synthetic construct; identical to SEQ ID NO: 17519
  source 1..80: mol_type = other DNA

SEQ ID NO: 202250 - DNA, 80 bp, synthetic construct; identical to SEQ ID NO: 17520
  source 1..80: mol_type = other DNA

SEQ ID NO: 202251 - DNA, 80 bp, synthetic construct; identical to SEQ ID NO: 17521
  source 1..80: mol_type = other DNA

SEQ ID NO: 202252 - DNA, 80 bp, synthetic construct; identical to SEQ ID NO: 17522
  source 1..80: mol_type = other DNA

SEQ ID NO: 202253 - DNA, 80 bp, synthetic construct; identical to SEQ ID NO: 17523
  source 1..80: mol_type = other DNA

SEQ ID NO: 202254 - DNA, 80 bp, synthetic construct; identical to SEQ ID NO: 17524
  source 1..80: mol_type = other DNA

SEQ ID NO: 202255 - DNA, 80 bp, synthetic construct; identical to SEQ ID NO: 17525
  source 1..80: mol_type = other DNA

SEQ ID NO: 202256 - DNA, 80 bp, synthetic construct; identical to SEQ ID NO: 17526
  source 1..80: mol_type = other DNA

SEQ ID NO: 202257 - DNA, 80 bp, synthetic construct; identical to SEQ ID NO: 17527
  source 1..80: mol_type = other DNA

SEQ ID NO: 202258 - DNA, 80 bp, synthetic construct; identical to SEQ ID NO: 17528
  source 1..80: mol_type = other DNA

SEQ ID NO: 202259 - DNA, 80 bp, synthetic construct; identical to SEQ ID NO: 17529
  source 1..80: mol_type = other DNA

SEQ ID NO: 202260 - DNA, 80 bp, synthetic construct; identical to SEQ ID NO: 17530
  source 1..80: mol_type = other DNA

SEQ ID NO: 202261 - DNA, 80 bp, synthetic construct; identical to SEQ ID NO: 17531
  source 1..80: mol_type = other DNA

SEQ ID NO: 202262 - DNA, 80 bp, synthetic construct; identical to SEQ ID NO: 17532
  source 1..80: mol_type = other DNA

SEQ ID NO: 202263 - DNA, 80 bp, synthetic construct; identical to SEQ ID NO: 17533
  source 1..80: mol_type = other DNA

SEQ ID NO: 202264 - DNA, 80 bp, synthetic construct; identical to SEQ ID NO: 17534
  source 1..80: mol_type = other DNA

SEQ ID NO: 202265 - DNA, 80 bp, synthetic construct; identical to SEQ ID NO: 17535
  source 1..80: mol_type = other DNA

SEQ ID NO: 202266 - DNA, 80 bp, synthetic construct; identical to SEQ ID NO: 17536
  source 1..80: mol_type = other DNA

SEQ ID NO: 202267 - DNA, 80 bp, synthetic construct; identical to SEQ ID NO: 17537
  source 1..80: mol_type = other DNA

SEQ ID NO: 202268 - DNA, 80 bp, synthetic construct; identical to SEQ ID NO: 17538
  source 1..80: mol_type = other DNA

SEQ ID NO: 202269 - DNA, 80 bp, synthetic construct; identical to SEQ ID NO: 17539
  source 1..80: mol_type = other DNA

SEQ ID NO: 202270 - DNA, 80 bp, synthetic construct; identical to SEQ ID NO: 17540
  source 1..80: mol_type = other DNA

SEQ ID NO: 202271 - DNA, 80 bp, synthetic construct; identical to SEQ ID NO: 17541
  source 1..80: mol_type = other DNA

SEQ ID NO: 202272 - DNA, 80 bp, synthetic construct; identical to SEQ ID NO: 17542
  source 1..80: mol_type = other DNA

SEQ ID NO: 202273 - DNA, 80 bp, synthetic construct; identical to SEQ ID NO: 17543
  source 1..80: mol_type = other DNA

SEQ ID NO: 202274 - DNA, 80 bp, synthetic construct; identical to SEQ ID NO: 17544
  source 1..80: mol_type = other DNA

SEQ ID NO: 202275 - DNA, 80 bp, synthetic construct; identical to SEQ ID NO: 17545
  source 1..80: mol_type = other DNA

SEQ ID NO: 202276 - DNA, 80 bp, synthetic construct; identical to SEQ ID NO: 17546
  source 1..80: mol_type = other DNA

SEQ ID NO: 202277 - DNA, 80 bp, synthetic construct; identical to SEQ ID NO: 17547
  source 1..80: mol_type = other DNA

SEQ ID NO: 202278 - DNA, 80 bp, synthetic construct; identical to SEQ ID NO: 17548
  source 1..80: mol_type = other DNA

SEQ ID NO: 202279 - DNA, 80 bp, synthetic construct; identical to SEQ ID NO: 17549
  source 1..80: mol_type = other DNA

SEQ ID NO: 202280 - DNA, 80 bp, synthetic construct; identical to SEQ ID NO: 17550
  source 1..80: mol_type = other DNA

SEQ ID NO: 202281 - DNA, 80 bp, synthetic construct; identical to SEQ ID NO: 17551
  source 1..80: mol_type = other DNA

SEQ ID NO: 202282 - DNA, 80 bp, synthetic construct; identical to SEQ ID NO: 17552
  source 1..80: mol_type = other DNA

SEQ ID NO: 202283 - DNA, 80 bp, synthetic construct; identical to SEQ ID NO: 17553
  source 1..80: mol_type = other DNA

SEQ ID NO: 202284 - DNA, 80 bp, synthetic construct; identical to SEQ ID NO: 17554
  source 1..80: mol_type = other DNA

SEQ ID NO: 202285 - DNA, 80 bp, synthetic construct; identical to SEQ ID NO: 17555
  source 1..80: mol_type = other DNA

SEQ ID NO: 202286 - DNA, 80 bp, synthetic construct; identical to SEQ ID NO: 17556
  source 1..80: mol_type = other DNA

SEQ ID NO: 202287 - DNA, 80 bp, synthetic construct; identical to SEQ ID NO: 17557
  source 1..80: mol_type = other DNA

SEQ ID NO: 202288 - DNA, 80 bp, synthetic construct; identical to SEQ ID NO: 17558
  source 1..80: mol_type = other DNA

SEQ ID NO: 202289 - DNA, 80 bp, synthetic construct; identical to SEQ ID NO: 17559
  source 1..80: mol_type = other DNA

SEQ ID NO: 202290 - DNA, 80 bp, synthetic construct; identical to SEQ ID NO: 17560
  source 1..80: mol_type = other DNA

SEQ ID NO: 202291 - DNA, 80 bp, synthetic construct; identical to SEQ ID NO: 17561
  source 1..80: mol_type = other DNA

SEQ ID NO: 202292 - DNA, 80 bp, synthetic construct; identical to SEQ ID NO: 17562
  source 1..80: mol_type = other DNA

SEQ ID NO: 202293 - DNA, 80 bp, synthetic construct; identical to SEQ ID NO: 17563
  source 1..80: mol_type = other DNA

SEQ ID NO: 202294 - DNA, 80 bp, synthetic construct; identical to SEQ ID NO: 17564
  source 1..80: mol_type = other DNA

SEQ ID NO: 202295 - DNA, 80 bp, synthetic construct; identical to SEQ ID NO: 17565
  source 1..80: mol_type = other DNA

SEQ ID NO: 202296 - DNA, 80 bp, synthetic construct; identical to SEQ ID NO: 17566
  source 1..80: mol_type = other DNA

SEQ ID NO: 202297 - DNA, 80 bp, synthetic construct; identical to SEQ ID NO: 17567
  source 1..80: mol_type = other DNA

SEQ ID NO: 202298 - DNA, 80 bp, synthetic construct; identical to SEQ ID NO: 17568
  source 1..80: mol_type = other DNA

SEQ ID NO: 202299 - DNA, 80 bp, synthetic construct; identical to SEQ ID NO: 17569
  source 1..80: mol_type = other DNA

SEQ ID NO: 202300 - DNA, 80 bp, synthetic construct; identical to SEQ ID NO: 17570
  source 1..80: mol_type = other DNA

SEQ ID NO: 202301 - DNA, 80 bp, synthetic construct; identical to SEQ ID NO: 17571
  source 1..80: mol_type = other DNA

SEQ ID NO: 202302 - DNA, 80 bp, synthetic construct; identical to SEQ ID NO: 17572
  source 1..80: mol_type = other DNA

SEQ ID NO: 202303 - DNA, 80 bp, synthetic construct; identical to SEQ ID NO: 17573
  source 1..80: mol_type = other DNA

SEQ ID NO: 202304 - DNA, 80 bp, synthetic construct; identical to SEQ ID NO: 17574
  source 1..80: mol_type = other DNA

SEQ ID NO: 202305 - DNA, 80 bp, synthetic construct; identical to SEQ ID NO: 17575
  source 1..80: mol_type = other DNA

SEQ ID NO: 202306 - DNA, 80 bp, synthetic construct; identical to SEQ ID NO: 17576
  source 1..80: mol_type = other DNA

SEQ ID NO: 202307 - DNA, 80 bp, synthetic construct; identical to SEQ ID NO: 17577
  source 1..80: mol_type = other DNA

SEQ ID NO: 202308 - DNA, 80 bp, synthetic construct; identical to SEQ ID NO: 17578
  source 1..80: mol_type = other DNA

SEQ ID NO: 202309 - DNA, 80 bp, synthetic construct; identical to SEQ ID NO: 17579
  source 1..80: mol_type = other DNA

SEQ ID NO: 202310 - DNA, 80 bp, synthetic construct; identical to SEQ ID NO: 17580
  source 1..80: mol_type = other DNA

SEQ ID NO: 202311 - DNA, 80 bp, synthetic construct; identical to SEQ ID NO: 17581
  source 1..80: mol_type = other DNA

SEQ ID NO: 202312 - DNA, 80 bp, synthetic construct; identical to SEQ ID NO: 17582
  source 1..80: mol_type = other DNA

SEQ ID NO: 202313 - DNA, 80 bp, synthetic construct; identical to SEQ ID NO: 17583
  source 1..80: mol_type = other DNA

SEQ ID NO: 202314 - DNA, 80 bp, synthetic construct; identical to SEQ ID NO: 17584
  source 1..80: mol_type = other DNA

SEQ ID NO: 202315 - DNA, 80 bp, synthetic construct; identical to SEQ ID NO: 17585
  source 1..80: mol_type = other DNA

SEQ ID NO: 202316 - DNA, 80 bp, synthetic construct; identical to SEQ ID NO: 17586
  source 1..80: mol_type = other DNA

SEQ ID NO: 202317 - DNA, 80 bp, synthetic construct; identical to SEQ ID NO: 17587
  source 1..80: mol_type = other DNA

SEQ ID NO: 202318 - DNA, 80 bp, synthetic construct; identical to SEQ ID NO: 17588
  source 1..80: mol_type = other DNA

SEQ ID NO: 202319 - DNA, 80 bp, synthetic construct; identical to SEQ ID NO: 17589
  source 1..80: mol_type = other DNA

SEQ ID NO: 202320 - DNA, 80 bp, synthetic construct; identical to SEQ ID NO: 17590
  source 1..80: mol_type = other DNA

SEQ ID NO: 202321 - DNA, 80 bp, synthetic construct; identical to SEQ ID NO: 17591
  source 1..80: mol_type = other DNA

SEQ ID NO: 202322 - DNA, 80 bp, synthetic construct; identical to SEQ ID NO: 17592
  source 1..80: mol_type = other DNA

SEQ ID NO: 202323 - DNA, 80 bp, synthetic construct; identical to SEQ ID NO: 17593
  source 1..80: mol_type = other DNA

SEQ ID NO: 202324 - DNA, 80 bp, synthetic construct; identical to SEQ ID NO: 17594
  source 1..80: mol_type = other DNA

SEQ ID NO: 202325 - DNA, 80 bp, synthetic construct; identical to SEQ ID NO: 17595
  source 1..80: mol_type = other DNA

SEQ ID NO: 202326 - DNA, 80 bp, synthetic construct; identical to SEQ ID NO: 17596
  source 1..80: mol_type = other DNA

SEQ ID NO: 202327 - DNA, 80 bp, synthetic construct; identical to SEQ ID NO: 17597
  source 1..80: mol_type = other DNA

SEQ ID NO: 202328 - DNA, 80 bp, synthetic construct; identical to SEQ ID NO: 17598
  source 1..80: mol_type = other DNA

SEQ ID NO: 202329 - DNA, 80 bp, synthetic construct; identical to SEQ ID NO: 17599
  source 1..80: mol_type = other DNA

SEQ ID NO: 202330 - DNA, 80 bp, synthetic construct; identical to SEQ ID NO: 17600
  source 1..80: mol_type = other DNA

SEQ ID NO: 202331 - DNA, 80 bp, synthetic construct; identical to SEQ ID NO: 17601
  source 1..80: mol_type = other DNA

SEQ ID NO: 202332 - DNA, 80 bp, synthetic construct; identical to SEQ ID NO: 17602
  source 1..80: mol_type = other DNA

SEQ ID NO: 202333 - DNA, 80 bp, synthetic construct; identical to SEQ ID NO: 17603
  source 1..80: mol_type = other DNA

SEQ ID NO: 202334 - DNA, 80 bp, synthetic construct; identical to SEQ ID NO: 17604
  source 1..80: mol_type = other DNA

SEQ ID NO: 202335 - DNA, 80 bp, synthetic construct; identical to SEQ ID NO: 17605
  source 1..80: mol_type = other DNA

SEQ ID NO: 202336 - DNA, 80 bp, synthetic construct; identical to SEQ ID NO: 17606
  source 1..80: mol_type = other DNA

SEQ ID NO: 202337 - DNA, 80 bp, synthetic construct; identical to SEQ ID NO: 17607
  source 1..80: mol_type = other DNA

SEQ ID NO: 202338 - DNA, 80 bp, synthetic construct; identical to SEQ ID NO: 17608
  source 1..80: mol_type = other DNA

SEQ ID NO: 202339 - DNA, 80 bp, synthetic construct; identical to SEQ ID NO: 17609
  source 1..80: mol_type = other DNA

SEQ ID NO: 202340 - DNA, 80 bp, synthetic construct; identical to SEQ ID NO: 17610
  source 1..80: mol_type = other DNA

SEQ ID NO: 202341 - DNA, 80 bp, synthetic construct; identical to SEQ ID NO: 17611
  source 1..80: mol_type = other DNA

SEQ ID NO: 202342 - DNA, 80 bp, synthetic construct; identical to SEQ ID NO: 17612
  source 1..80: mol_type = other DNA

SEQ ID NO: 202343 - DNA, 80 bp, synthetic construct; identical to SEQ ID NO: 17613
  source 1..80: mol_type = other DNA

SEQ ID NO: 202344 - DNA, 80 bp, synthetic construct; identical to SEQ ID NO: 17614
  source 1..80: mol_type = other DNA

SEQ ID NO: 202345 - DNA, 80 bp, synthetic construct; identical to SEQ ID NO: 17615
  source 1..80: mol_type = other DNA

SEQ ID NO: 202346 - DNA, 80 bp, synthetic construct; identical to SEQ ID NO: 17616
  source 1..80: mol_type = other DNA

SEQ ID NO: 202347 - DNA, 80 bp, synthetic construct; identical to SEQ ID NO: 17617
  source 1..80: mol_type = other DNA

SEQ ID NO: 202348 - DNA, 80 bp, synthetic construct; identical to SEQ ID NO: 17618
  source 1..80: mol_type = other DNA

SEQ ID NO: 202349 - DNA, 80 bp, synthetic construct; identical to SEQ ID NO: 17619
  source 1..80: mol_type = other DNA

SEQ ID NO: 202350 - DNA, 80 bp, synthetic construct; identical to SEQ ID NO: 17620
  source 1..80: mol_type = other DNA

SEQ ID NO: 202351 - DNA, 80 bp, synthetic construct; identical to SEQ ID NO: 17621
  source 1..80: mol_type = other DNA

SEQ ID NO: 202352 - DNA, 80 bp, synthetic construct; identical to SEQ ID NO: 17622
  source 1..80: mol_type = other DNA

SEQ ID NO: 202353 - DNA, 80 bp, synthetic construct; identical to SEQ ID NO: 17623
  source 1..80: mol_type = other DNA

SEQ ID NO: 202354 - DNA, 80 bp, synthetic construct; identical to SEQ ID NO: 17624
  source 1..80: mol_type = other DNA

SEQ ID NO: 202355 - DNA, 80 bp, synthetic construct; identical to SEQ ID NO: 17625
  source 1..80: mol_type = other DNA

SEQ ID NO: 202356 - DNA, 80 bp, synthetic construct; identical to SEQ ID NO: 17626
  source 1..80: mol_type = other DNA

SEQ ID NO: 202357 - DNA, 80 bp, synthetic construct; identical to SEQ ID NO: 17627
  source 1..80: mol_type = other DNA

SEQ ID NO: 202358 - DNA, 80 bp, synthetic construct; identical to SEQ ID NO: 17628
  source 1..80: mol_type = other DNA

SEQ ID NO: 202359 - DNA, 80 bp, synthetic construct; identical to SEQ ID NO: 17629
  source 1..80: mol_type = other DNA

SEQ ID NO: 202360 - DNA, 80 bp, synthetic construct; identical to SEQ ID NO: 17630
  source 1..80: mol_type = other DNA

SEQ ID NO: 202361 - DNA, 80 bp, synthetic construct; identical to SEQ ID NO: 17631
  source 1..80: mol_type = other DNA

SEQ ID NO: 202362 - DNA, 80 bp, synthetic construct; identical to SEQ ID NO: 17632
  source 1..80: mol_type = other DNA

SEQ ID NO: 202363 - DNA, 80 bp, synthetic construct; identical to SEQ ID NO: 17633
  source 1..80: mol_type = other DNA

SEQ ID NO: 202364 - DNA, 80 bp, synthetic construct; identical to SEQ ID NO: 17634
  source 1..80: mol_type = other DNA

SEQ ID NO: 202365 - DNA, 80 bp, synthetic construct; identical to SEQ ID NO: 17635
  source 1..80: mol_type = other DNA

SEQ ID NO: 202366 - DNA, 80 bp, synthetic construct; identical to SEQ ID NO: 17636
  source 1..80: mol_type = other DNA

SEQ ID NO: 202367 - DNA, 80 bp, synthetic construct; identical to SEQ ID NO: 17637
  source 1..80: mol_type = other DNA

SEQ ID NO: 202368 - DNA, 80 bp, synthetic construct; identical to SEQ ID NO: 17638
  source 1..80: mol_type = other DNA

SEQ ID NO: 202369 - DNA, 80 bp, synthetic construct; identical to SEQ ID NO: 17639
  source 1..80: mol_type = other DNA

SEQ ID NO: 202370 - DNA, 80 bp, synthetic construct; identical to SEQ ID NO: 17640
  source 1..80: mol_type = other DNA

SEQ ID NO: 202371 - DNA, 80 bp, synthetic construct; identical to SEQ ID NO: 17641
  source 1..80: mol_type = other DNA

SEQ ID NO: 202372 - DNA, 80 bp, synthetic construct; identical to SEQ ID NO: 17642
  source 1..80: mol_type = other DNA

SEQ ID NO: 202373 - DNA, 80 bp, synthetic construct; identical to SEQ ID NO: 17643
  source 1..80: mol_type = other DNA

SEQ ID NO: 202374 - DNA, 80 bp, synthetic construct; identical to SEQ ID NO: 17644
  source 1..80: mol_type = other DNA

SEQ ID NO: 202375 - DNA, 80 bp, synthetic construct; identical to SEQ ID NO: 17645
  source 1..80: mol_type = other DNA

SEQ ID NO: 202376 - DNA, 80 bp, synthetic construct; identical to SEQ ID NO: 17646
  source 1..80: mol_type = other DNA

SEQ ID NO: 202377 - DNA, 80 bp, synthetic construct; identical to SEQ ID NO: 17647
  source 1..80: mol_type = other DNA

SEQ ID NO: 202378 - DNA, 80 bp, synthetic construct; identical to SEQ ID NO: 17648
  source 1..80: mol_type = other DNA

SEQ ID NO: 202379 - DNA, 80 bp, synthetic construct; identical to SEQ ID NO: 17649
  source 1..80: mol_type = other DNA

SEQ ID NO: 202380 - DNA, 80 bp, synthetic construct; identical to SEQ ID NO: 17650
  source 1..80: mol_type = other DNA

SEQ ID NO: 202381 - DNA, 80 bp, synthetic construct; identical to SEQ ID NO: 17651
  source 1..80: mol_type = other DNA

SEQ ID NO: 202382 - DNA, 80 bp, synthetic construct; identical to SEQ ID NO: 17652
  source 1..80: mol_type = other DNA

SEQ ID NO: 202383 - DNA, 80 bp, synthetic construct; identical to SEQ ID NO: 17653
  source 1..80: mol_type = other DNA

SEQ ID NO: 202384 - DNA, 80 bp, synthetic construct; identical to SEQ ID NO: 17654
  source 1..80: mol_type = other DNA

SEQ ID NO: 202385 - DNA, 80 bp, synthetic construct; identical to SEQ ID NO: 17655
  source 1..80: mol_type = other DNA

SEQ ID NO: 202386 - DNA, 80 bp, synthetic construct; identical to SEQ ID NO: 17656
  source 1..80: mol_type = other DNA

SEQ ID NO: 202387 - DNA, 80 bp, synthetic construct; identical to SEQ ID NO: 17657
  source 1..80: mol_type = other DNA

SEQ ID NO: 202388 - DNA, 80 bp, synthetic construct; identical to SEQ ID NO: 17658
  source 1..80: mol_type = other DNA

SEQ ID NO: 202389 - DNA, 80 bp, synthetic construct; identical to SEQ ID NO: 17659
  source 1..80: mol_type = other DNA

SEQ ID NO: 202390 - DNA, 80 bp, synthetic construct; identical to SEQ ID NO: 17660
  source 1..80: mol_type = other DNA

SEQ ID NO: 202391 - DNA, 80 bp, synthetic construct; identical to SEQ ID NO: 17661
  source 1..80: mol_type = other DNA

SEQ ID NO: 202392 - DNA, 80 bp, synthetic construct; identical to SEQ ID NO: 17662
  source 1..80: mol_type = other DNA

SEQ ID NO: 202393 - DNA, 80 bp, synthetic construct; identical to SEQ ID NO: 17663
  source 1..80: mol_type = other DNA

SEQ ID NO: 202394 - DNA, 80 bp, synthetic construct; identical to SEQ ID NO: 17664
  source 1..80: mol_type = other DNA

SEQ ID NO: 202395 - DNA, 80 bp, synthetic construct; identical to SEQ ID NO: 17665
  source 1..80: mol_type = other DNA

SEQ ID NO: 202396 - DNA, 80 bp, synthetic construct; identical to SEQ ID NO: 17666
  source 1..80: mol_type = other DNA

SEQ ID NO: 202397 - DNA, 80 bp, synthetic construct; identical to SEQ ID NO: 17667
  source 1..80: mol_type = other DNA

SEQ ID NO: 202398 - DNA, 80 bp, synthetic construct; identical to SEQ ID NO: 17668
  source 1..80: mol_type = other DNA

SEQ ID NO: 202399 - DNA, 80 bp, synthetic construct; identical to SEQ ID NO: 17669
  source 1..80: mol_type = other DNA

SEQ ID NO: 202400 - DNA, 80 bp, synthetic construct; identical to SEQ ID NO: 17670
  source 1..80: mol_type = other DNA

SEQ ID NO: 202401 - DNA, 80 bp, synthetic construct; identical to SEQ ID NO: 17671
  source 1..80: mol_type = other DNA

SEQ ID NO: 202402 - DNA, 80 bp, synthetic construct; identical to SEQ ID NO: 17672
  source 1..80: mol_type = other DNA

SEQ ID NO: 202403 - DNA, 80 bp, synthetic construct; identical to SEQ ID NO: 17673
  source 1..80: mol_type = other DNA

SEQ ID NO: 202404 - DNA, 80 bp, synthetic construct; identical to SEQ ID NO: 17674
  source 1..80: mol_type = other DNA

SEQ ID NO: 202405 - DNA, 80 bp, synthetic construct; identical to SEQ ID NO: 17675
  source 1..80: mol_type = other DNA

SEQ ID NO: 202406 - DNA, 80 bp, synthetic construct; identical to SEQ ID NO: 17676
  source 1..80: mol_type = other DNA

SEQ ID NO: 202407 - DNA, 80 bp, synthetic construct; identical to SEQ ID NO: 17677
  source 1..80: mol_type = other DNA

SEQ ID NO: 202408 - DNA, 80 bp, synthetic construct; identical to SEQ ID NO: 17678
  source 1..80: mol_type = other DNA

SEQ ID NO: 202409 - DNA, 80 bp, synthetic construct; identical to SEQ ID NO: 17679
  source 1..80: mol_type = other DNA

SEQ ID NO: 202410 - DNA, 80 bp, synthetic construct; identical to SEQ ID NO: 17680
  source 1..80: mol_type = other DNA

SEQ ID NO: 202411 - DNA, 80 bp, synthetic construct; identical to SEQ ID NO: 17681
  source 1..80: mol_type = other DNA

SEQ ID NO: 202412 - DNA, 80 bp, synthetic construct; identical to SEQ ID NO: 17682
  source 1..80: mol_type = other DNA

SEQ ID NO: 202413 - DNA, 80 bp, synthetic construct; identical to SEQ ID NO: 17683
  source 1..80: mol_type = other DNA

SEQ ID NO: 202414 - DNA, 80 bp, synthetic construct; identical to SEQ ID NO: 17684
  source 1..80: mol_type = other DNA

SEQ ID NO: 202415 - DNA, 80 bp, synthetic construct; identical to SEQ ID NO: 17685
  source 1..80: mol_type = other DNA

SEQ ID NO: 202416 - DNA, 80 bp, synthetic construct; identical to SEQ ID NO: 17686
  source 1..80: mol_type = other DNA

SEQ ID NO: 202417 - DNA, 80 bp, synthetic construct; identical to SEQ ID NO: 17687
  source 1..80: mol_type = other DNA

SEQ ID NO: 202418 - DNA, 80 bp, synthetic construct; identical to SEQ ID NO: 17688
  source 1..80: mol_type = other DNA

SEQ ID NO: 202419 - DNA, 80 bp, synthetic construct; identical to SEQ ID NO: 17689
  source 1..80: mol_type = other DNA

SEQ ID NO: 202420 - DNA, 80 bp, synthetic construct; identical to SEQ ID NO: 17690
  source 1..80: mol_type = other DNA

SEQ ID NO: 202421 - DNA, 80 bp, synthetic construct; identical to SEQ ID NO: 17691
  source 1..80: mol_type = other DNA

SEQ ID NO: 202422 - DNA, 80 bp, synthetic construct; identical to SEQ ID NO: 17692
  source 1..80: mol_type = other DNA

SEQ ID NO: 202423 - DNA, 80 bp, synthetic construct; identical to SEQ ID NO: 17693
  source 1..80: mol_type = other DNA

SEQ ID NO: 202424 - DNA, 80 bp, synthetic construct; identical to SEQ ID NO: 17694
  source 1..80: mol_type = other DNA

SEQ ID NO: 202425 - DNA, 80 bp, synthetic construct; identical to SEQ ID NO: 17695
  source 1..80: mol_type = other DNA

SEQ ID NO: 202426 - DNA, 80 bp, synthetic construct; identical to SEQ ID NO: 17696
  source 1..80: mol_type = other DNA

SEQ ID NO: 202427 - DNA, 80 bp, synthetic construct; identical to SEQ ID NO: 17697
  source 1..80: mol_type = other DNA

SEQ ID NO: 202428 - DNA, 80 bp, synthetic construct; identical to SEQ ID NO: 17698
  source 1..80: mol_type = other DNA

SEQ ID NO: 202429 - DNA, 80 bp, synthetic construct; identical to SEQ ID NO: 17699
  source 1..80: mol_type = other DNA

SEQ ID NO: 202430 - DNA, 80 bp, synthetic construct; identical to SEQ ID NO: 17700
  source 1..80: mol_type = other DNA

SEQ ID NO: 202431 - DNA, 80 bp, synthetic construct; identical to SEQ ID NO: 17701
  source 1..80: mol_type = other DNA

SEQ ID NO: 202432 - DNA, 80 bp, synthetic construct; identical to SEQ ID NO: 17702
  source 1..80: mol_type = other DNA

SEQ ID NO: 202433 - DNA, 80 bp, synthetic construct; identical to SEQ ID NO: 17703
  source 1..80: mol_type = other DNA

SEQ ID NO: 202434 - DNA, 80 bp, synthetic construct; identical to SEQ ID NO: 17704
  source 1..80: mol_type = other DNA

SEQ ID NO: 202435 - DNA, 80 bp, synthetic construct; identical to SEQ ID NO: 17705
  source 1..80: mol_type = other DNA

SEQ ID NO: 202436 - DNA, 80 bp, synthetic construct; identical to SEQ ID NO: 17706
  source 1..80: mol_type = other DNA

SEQ ID NO: 202437 - DNA, 80 bp, synthetic construct; identical to SEQ ID NO: 17707
  source 1..80: mol_type = other DNA

SEQ ID NO: 202438 - DNA, 80 bp, synthetic construct; identical to SEQ ID NO: 17708
  source 1..80: mol_type = other DNA

SEQ ID NO: 202439 - DNA, 80 bp, synthetic construct; identical to SEQ ID NO: 17709
  source 1..80: mol_type = other DNA

SEQ ID NO: 202440 - DNA, 80 bp, synthetic construct; identical to SEQ ID NO: 17710
  source 1..80: mol_type = other DNA

SEQ ID NO: 202441 - DNA, 80 bp, synthetic construct; identical to SEQ ID NO: 17711
  source 1..80: mol_type = other DNA

SEQ ID NO: 202442 - DNA, 80 bp, synthetic construct; identical to SEQ ID NO: 17712
  source 1..80: mol_type = other DNA

SEQ ID NO: 202443 - DNA, 80 bp, synthetic construct; identical to SEQ ID NO: 17713
  source 1..80: mol_type = other DNA

SEQ ID NO: 202444 - DNA, 80 bp, synthetic construct; identical to SEQ ID NO: 17714
  source 1..80: mol_type = other DNA

SEQ ID NO: 202445 - DNA, 80 bp, synthetic construct; identical to SEQ ID NO: 17715
  source 1..80: mol_type = other DNA

SEQ ID NO: 202446 - DNA, 80 bp, synthetic construct; identical to SEQ ID NO: 17716
  source 1..80: mol_type = other DNA

SEQ ID NO: 202447 - DNA, 80 bp, synthetic construct; identical to SEQ ID NO: 17717
  source 1..80: mol_type = other DNA

SEQ ID NO: 202448 - DNA, 80 bp, synthetic construct; identical to SEQ ID NO: 17718
  source 1..80: mol_type = other DNA

SEQ ID NO: 202449 - DNA, 80 bp, synthetic construct; identical to SEQ ID NO: 17719
  source 1..80: mol_type = other DNA

SEQ ID NO: 202450 - DNA, 80 bp, synthetic construct; identical to SEQ ID NO: 17720
  source 1..80: mol_type = other DNA

SEQ ID NO: 202451 - DNA, 80 bp, synthetic construct; identical to SEQ ID NO: 17721
  source 1..80: mol_type = other DNA

SEQ ID NO: 202452 - DNA, 80 bp, synthetic construct; identical to SEQ ID NO: 17722
  source 1..80: mol_type = other DNA

SEQ ID NO: 202453 - DNA, 80 bp, synthetic construct; identical to SEQ ID NO: 17723
  source 1..80: mol_type = other DNA

SEQ ID NO: 202454 - DNA, 80 bp, synthetic construct; identical to SEQ ID NO: 17724
  source 1..80: mol_type = other DNA

SEQ ID NO: 202455 - DNA, 80 bp, synthetic construct; identical to SEQ ID NO: 17725
  source 1..80: mol_type = other DNA

SEQ ID NO: 202456 - DNA, 80 bp, synthetic construct; identical to SEQ ID NO: 17726
  source 1..80: mol_type = other DNA

SEQ ID NO: 202457 - DNA, 80 bp, synthetic construct; identical to SEQ ID NO: 17727
  source 1..80: mol_type = other DNA

SEQ ID NO: 202458 - DNA, 80 bp, synthetic construct; identical to SEQ ID NO: 17728
  source 1..80: mol_type = other DNA

SEQ ID NO: 202459 - DNA, 80 bp, synthetic construct; identical to SEQ ID NO: 17729
  source 1..80: mol_type = other DNA

SEQ ID NO: 202460 - DNA, 80 bp, synthetic construct; identical to SEQ ID NO: 17730
  source 1..80: mol_type = other DNA

SEQ ID NO: 202461 - DNA, 80 bp, synthetic construct; identical to SEQ ID NO: 17731
  source 1..80: mol_type = other DNA

SEQ ID NO: 202462 - DNA, 80 bp, synthetic construct; identical to SEQ ID NO: 17732
  source 1..80: mol_type = other DNA

SEQ ID NO: 202463 - DNA, 80 bp, synthetic construct; identical to SEQ ID NO: 17733
  source 1..80: mol_type = other DNA

SEQ ID NO: 202464 - DNA, 80 bp, synthetic construct; identical to SEQ ID NO: 17734
  source 1..80: mol_type = other DNA

SEQ ID NO: 202465 - DNA, 80 bp, synthetic construct; identical to SEQ ID NO: 17735
  source 1..80: mol_type = other DNA

SEQ ID NO: 202466 - DNA, 80 bp, synthetic construct; identical to SEQ ID NO: 17736
  source 1..80: mol_type = other DNA

SEQ ID NO: 202467 - DNA, 80 bp, synthetic construct; identical to SEQ ID NO: 17737
  source 1..80: mol_type = other DNA

SEQ ID NO: 202468 - DNA, 80 bp, synthetic construct; identical to SEQ ID NO: 17738
  source 1..80: mol_type = other DNA

SEQ ID NO: 202469 - DNA, 80 bp, synthetic construct; identical to SEQ ID NO: 17739
  source 1..80: mol_type = other DNA

SEQ ID NO: 202470 - DNA, 80 bp, synthetic construct; identical to SEQ ID NO: 17740
  source 1..80: mol_type = other DNA

SEQ ID NO: 202471 - DNA, 80 bp, synthetic construct; identical to SEQ ID NO: 17741
  source 1..80: mol_type = other DNA

SEQ ID NO: 202472 - DNA, 80 bp, synthetic construct; identical to SEQ ID NO: 17742
  source 1..80: mol_type = other DNA

SEQ ID NO: 202473 - DNA, 80 bp, synthetic construct; identical to SEQ ID NO: 17743
  source 1..80: mol_type = other DNA

SEQ ID NO: 202474 - DNA, 80 bp, synthetic construct; identical to SEQ ID NO: 17744
  source 1..80: mol_type = other DNA

SEQ ID NO: 202475 - DNA, 80 bp, synthetic construct; identical to SEQ ID NO: 17745
  source 1..80: mol_type = other DNA

SEQ ID NO: 202476 - DNA, 80 bp, synthetic construct; identical to SEQ ID NO: 17746
  source 1..80: mol_type = other DNA

SEQ ID NO: 202477 - DNA, 80 bp, synthetic construct; identical to SEQ ID NO: 17747
  source 1..80: mol_type = other DNA

SEQ ID NO: 202478 - DNA, 80 bp, synthetic construct; identical to SEQ ID NO: 17748
  source 1..80: mol_type = other DNA

SEQ ID NO: 202479 - DNA, 80 bp, synthetic construct; identical to SEQ ID NO: 17749
  source 1..80: mol_type = other DNA

SEQ ID NO: 202480 - DNA, 80 bp, synthetic construct; identical to SEQ ID NO: 17750
  source 1..80: mol_type = other DNA

SEQ ID NO: 202481 - DNA, 80 bp, synthetic construct; identical to SEQ ID NO: 17751
  source 1..80: mol_type = other DNA

SEQ ID NO: 202482 - DNA, 80 bp, synthetic construct; identical to SEQ ID NO: 17752
  source 1..80: mol_type = other DNA

SEQ ID NO: 202483 - DNA, 80 bp, synthetic construct; identical to SEQ ID NO: 17753
  source 1..80: mol_type = other DNA

SEQ ID NO: 202484 - DNA, 80 bp, synthetic construct; identical to SEQ ID NO: 17754
  source 1..80: mol_type = other DNA

SEQ ID NO: 202485 - DNA, 80 bp, synthetic construct; identical to SEQ ID NO: 17755
  source 1..80: mol_type = other DNA

SEQ ID NO: 202486 - DNA, 80 bp, synthetic construct; identical to SEQ ID NO: 17756
  source 1..80: mol_type = other DNA

SEQ ID NO: 202487 - DNA, 80 bp, synthetic construct; identical to SEQ ID NO: 17757
  source 1..80: mol_type = other DNA

SEQ ID NO: 202488 - DNA, 80 bp, synthetic construct; identical to SEQ ID NO: 17758
  source 1..80: mol_type = other DNA

SEQ ID NO: 202489 - DNA, 80 bp, synthetic construct; identical to SEQ ID NO: 17759
  source 1..80: mol_type = other DNA

SEQ ID NO: 202490 - DNA, 80 bp, synthetic construct; identical to SEQ ID NO: 17760
  source 1..80: mol_type = other DNA

SEQ ID NO: 202491 - DNA, 80 bp, synthetic construct; identical to SEQ ID NO: 17761
  source 1..80: mol_type = other DNA

SEQ ID NO: 202492 - DNA, 80 bp, synthetic construct; identical to SEQ ID NO: 17762
  source 1..80: mol_type = other DNA

SEQ ID NO: 202493 - DNA, 80 bp, synthetic construct; identical to SEQ ID NO: 17763
  source 1..80: mol_type = other DNA

SEQ ID NO: 202494 - DNA, 80 bp, synthetic construct; identical to SEQ ID NO: 17764
  source 1..80: mol_type = other DNA

SEQ ID NO: 202495 - DNA, 80 bp, synthetic construct; identical to SEQ ID NO: 17765
  source 1..80: mol_type = other DNA

SEQ ID NO: 202496 - DNA, 80 bp, synthetic construct; identical to SEQ ID NO: 17766
  source 1..80: mol_type = other DNA

SEQ ID NO: 202497 - DNA, 80 bp, synthetic construct; identical to SEQ ID NO: 17767
  source 1..80: mol_type = other DNA

SEQ ID NO: 202498 - DNA, 80 bp, synthetic construct; identical to SEQ ID NO: 17768
  source 1..80: mol_type = other DNA

SEQ ID NO: 202499 - DNA, 80 bp, synthetic construct; identical to SEQ ID NO: 17769
  source 1..80: mol_type = other DNA

SEQ ID NO: 202500 - DNA, 80 bp, synthetic construct; identical to SEQ ID NO: 17770
  source 1..80: mol_type = other DNA

SEQ ID NO: 202501 - DNA, 80 bp, synthetic construct; identical to SEQ ID NO: 17771
  source 1..80: mol_type = other DNA

SEQ ID NO: 202502 - DNA, 80 bp, synthetic construct; identical to SEQ ID NO: 17772
  source 1..80: mol_type = other DNA

SEQ ID NO: 202503 - DNA, 80 bp, synthetic construct; identical to SEQ ID NO: 17773
  source 1..80: mol_type = other DNA

SEQ ID NO: 202504 - DNA, 80 bp, synthetic construct; identical to SEQ ID NO: 17774
  source 1..80: mol_type = other DNA

SEQ ID NO: 202505 - DNA, 80 bp, synthetic construct; identical to SEQ ID NO: 17775
  source 1..80: mol_type = other DNA

SEQ ID NO: 202506 - DNA, 80 bp, synthetic construct; identical to SEQ ID NO: 17776
  source 1..80: mol_type = other DNA

SEQ ID NO: 202507 - DNA, 80 bp, synthetic construct; identical to SEQ ID NO: 17777
  source 1..80: mol_type = other DNA

SEQ ID NO: 202508 - DNA, 80 bp, synthetic construct; identical to SEQ ID NO: 17778
  source 1..80: mol_type = other DNA

SEQ ID NO: 202509 - DNA, 80 bp, synthetic construct; identical to SEQ ID NO: 17779
  source 1..80: mol_type = other DNA

SEQ ID NO: 202510 - DNA, 80 bp, synthetic construct; identical to SEQ ID NO: 17780
  source 1..80: mol_type = other DNA

SEQ ID NO: 202511 - DNA, 80 bp, synthetic construct; identical to SEQ ID NO: 17781
  source 1..80: mol_type = other DNA

SEQ ID NO: 202512 - DNA, 80 bp, synthetic construct; identical to SEQ ID NO: 17782
  source 1..80: mol_type = other DNA

SEQ ID NO: 202513 - DNA, 80 bp, synthetic construct; identical to SEQ ID NO: 17783
  source 1..80: mol_type = other DNA

SEQ ID NO: 202514 - DNA, 80 bp, synthetic construct; identical to SEQ ID NO: 17784
  source 1..80: mol_type = other DNA

SEQ ID NO: 202515 - DNA, 80 bp, synthetic construct; identical to SEQ ID NO: 17785
  source 1..80: mol_type = other DNA

SEQ ID NO: 202516 - DNA, 80 bp, synthetic construct; identical to SEQ ID NO: 17786
  source 1..80: mol_type = other DNA

SEQ ID NO: 202517 - DNA, 80 bp, synthetic construct; identical to SEQ ID NO: 17787
  source 1..80: mol_type = other DNA

SEQ ID NO: 202518 - DNA, 80 bp, synthetic construct; identical to SEQ ID NO: 17788
  source 1..80: mol_type = other DNA

SEQ ID NO: 202519 - DNA, 80 bp, synthetic construct; identical to SEQ ID NO: 17789
  source 1..80: mol_type = other DNA

SEQ ID NO: 202520 - DNA, 80 bp, synthetic construct; identical to SEQ ID NO: 17790
  source 1..80: mol_type = other DNA

SEQ ID NO: 202521 - DNA, 80 bp, synthetic construct; identical to SEQ ID NO: 17791
  source 1..80: mol_type = other DNA

SEQ ID NO: 202522 - DNA, 80 bp, synthetic construct; identical to SEQ ID NO: 17792
  source 1..80: mol_type = other DNA

SEQ ID NO: 202523 - DNA, 80 bp, synthetic construct; identical to SEQ ID NO: 17793
  source 1..80: mol_type = other DNA

SEQ ID NO: 202524 - DNA, 80 bp, synthetic construct; identical to SEQ ID NO: 17794
  source 1..80: mol_type = other DNA

SEQ ID NO: 202525 - DNA, 80 bp, synthetic construct; identical to SEQ ID NO: 17795
  source 1..80: mol_type = other DNA

SEQ ID NO: 202526 - DNA, 80 bp, synthetic construct; identical to SEQ ID NO: 17796
  source 1..80: mol_type = other DNA

SEQ ID NO: 202527 - DNA, 80 bp, synthetic construct; identical to SEQ ID NO: 17797
  source 1..80: mol_type = other DNA

SEQ ID NO: 202528 - DNA, 80 bp, synthetic construct; identical to SEQ ID NO: 17798
  source 1..80: mol_type = other DNA

SEQ ID NO: 202529 - DNA, 80 bp, synthetic construct; identical to SEQ ID NO: 17799
  source 1..80: mol_type = other DNA

SEQ ID NO: 202530 - DNA, 80 bp, synthetic construct; identical to SEQ ID NO: 17800
  source 1..80: mol_type = other DNA

SEQ ID NO: 202531 - DNA, 80 bp, synthetic construct; identical to SEQ ID NO: 17801
  source 1..80: mol_type = other DNA

SEQ ID NO: 202532 - DNA, 80 bp, synthetic construct; identical to SEQ ID NO: 17802
  source 1..80: mol_type = other DNA

SEQ ID NO: 202533 - DNA, 80 bp, synthetic construct; identical to SEQ ID NO: 17803
  source 1..80: mol_type = other DNA

SEQ ID NO: 202534 - DNA, 80 bp, synthetic construct; identical to SEQ ID NO: 17804
  source 1..80: mol_type = other DNA

SEQ ID NO: 202535 - DNA, 80 bp, synthetic construct; identical to SEQ ID NO: 17805
  source 1..80: mol_type = other DNA

SEQ ID NO: 202536 - DNA, 80 bp, synthetic construct; identical to SEQ ID NO: 17806
  source 1..80: mol_type = other DNA

SEQ ID NO: 202537 - DNA, 80 bp, synthetic construct; identical to SEQ ID NO: 17807
  source 1..80: mol_type = other DNA

SEQ ID NO: 202538 - DNA, 80 bp, synthetic construct; identical to SEQ ID NO: 17808
  source 1..80: mol_type = other DNA

SEQ ID NO: 202539 - DNA, 80 bp, synthetic construct; identical to SEQ ID NO: 17809
  source 1..80: mol_type = other DNA

SEQ ID NO: 202540 - DNA, 80 bp, synthetic construct; identical to SEQ ID NO: 17810
  source 1..80: mol_type = other DNA

SEQ ID NO: 202541 - DNA, 80 bp, synthetic construct; identical to SEQ ID NO: 17811
  source 1..80: mol_type = other DNA

SEQ ID NO: 202542 - DNA, 80 bp, synthetic construct; identical to SEQ ID NO: 17812
  source 1..80: mol_type = other DNA

SEQ ID NO: 202543 - DNA, 80 bp, synthetic construct; identical to SEQ ID NO: 17813
  source 1..80: mol_type = other DNA

SEQ ID NO: 202544 - DNA, 80 bp, synthetic construct; identical to SEQ ID NO: 17814
  source 1..80: mol_type = other DNA

SEQ ID NO: 202545 - DNA, 80 bp, synthetic construct; identical to SEQ ID NO: 17815
  source 1..80: mol_type = other DNA

SEQ ID NO: 202546 - DNA, 80 bp, synthetic construct; identical to SEQ ID NO: 17816
  source 1..80: mol_type = other DNA

SEQ ID NO: 202547 - DNA, 80 bp, synthetic construct; identical to SEQ ID NO: 17817
  source 1..80: mol_type = other DNA

SEQ ID NO: 202548 - DNA, 80 bp, synthetic construct; identical to SEQ ID NO: 17818
  source 1..80: mol_type = other DNA

SEQ ID NO: 202549 - DNA, 80 bp, synthetic construct; identical to SEQ ID NO: 17819
  source 1..80: mol_type = other DNA

SEQ ID NO: 202550 - DNA, 80 bp, synthetic construct; identical to SEQ ID NO: 17820
  source 1..80: mol_type = other DNA

SEQ ID NO: 202551 - DNA, 80 bp, synthetic construct; identical to SEQ ID NO: 17821
  source 1..80: mol_type = other DNA

SEQ ID NO: 202552 - DNA, 80 bp, synthetic construct; identical to SEQ ID NO: 17822
  source 1..80: mol_type = other DNA

SEQ ID NO: 202553 - DNA, 80 bp, synthetic construct; identical to SEQ ID NO: 17823
  source 1..80: mol_type = other DNA

SEQ ID NO: 202554 - DNA, 80 bp, synthetic construct; identical to SEQ ID NO: 17824
  source 1..80: mol_type = other DNA

SEQ ID NO: 202555 - DNA, 80 bp, synthetic construct; identical to SEQ ID NO: 17825
  source 1..80: mol_type = other DNA

SEQ ID NO: 202556 - DNA, 80 bp, synthetic construct; identical to SEQ ID NO: 17826
  source 1..80: mol_type = other DNA

SEQ ID NO: 202557 - DNA, 80 bp, synthetic construct; identical to SEQ ID NO: 17827
  source 1..80: mol_type = other DNA

SEQ ID NO: 202558 - DNA, 80 bp, synthetic construct; identical to SEQ ID NO: 17828
  source 1..80: mol_type = other DNA

SEQ ID NO: 202559 - DNA, 80 bp, synthetic construct; identical to SEQ ID NO: 17829
  source 1..80: mol_type = other DNA

SEQ ID NO: 202560 - DNA, 80 bp, synthetic construct; identical to SEQ ID NO: 17830
  source 1..80: mol_type = other DNA

SEQ ID NO: 202561 - DNA, 80 bp, synthetic construct; identical to SEQ ID NO: 17831
  source 1..80: mol_type = other DNA

SEQ ID NO: 202562 - DNA, 80 bp, synthetic construct; identical to SEQ ID NO: 17832
  source 1..80: mol_type = other DNA

SEQ ID NO: 202563 - DNA, 80 bp, synthetic construct; identical to SEQ ID NO: 17833
  source 1..80: mol_type = other DNA

SEQ ID NO: 202564 - DNA, 80 bp, synthetic construct; identical to SEQ ID NO: 17834
  source 1..80: mol_type = other DNA

SEQ ID NO: 202565 - DNA, 80 bp, synthetic construct; identical to SEQ ID NO: 17835
  source 1..80: mol_type = other DNA

SEQ ID NO: 202566 - DNA, 80 bp, synthetic construct; identical to SEQ ID NO: 17836
  source 1..80: mol_type = other DNA

SEQ ID NO: 202567 - DNA, 80 bp, synthetic construct; identical to SEQ ID NO: 17837
  source 1..80: mol_type = other DNA

SEQ ID NO: 202568 - DNA, 80 bp, synthetic construct; identical to SEQ ID NO: 17838
  source 1..80: mol_type = other DNA

SEQ ID NO: 202569 - DNA, 80 bp, synthetic construct; identical to SEQ ID NO: 17839
  source 1..80: mol_type = other DNA

SEQ ID NO: 202570 - DNA, 80 bp, synthetic construct; identical to SEQ ID NO: 17840
  source 1..80: mol_type = other DNA

SEQ ID NO: 202571 - DNA, 80 bp, synthetic construct; identical to SEQ ID NO: 17841
  source 1..80: mol_type = other DNA

SEQ ID NO: 202572 - DNA, 80 bp, synthetic construct; identical to SEQ ID NO: 17842
  source 1..80: mol_type = other DNA

SEQ ID NO: 202573 - DNA, 80 bp, synthetic construct; identical to SEQ ID NO: 17843
  source 1..80: mol_type = other DNA

SEQ ID NO: 202574 - DNA, 80 bp, synthetic construct; identical to SEQ ID NO: 17844
  source 1..80: mol_type = other DNA

SEQ ID NO: 202575 - DNA, 80 bp, synthetic construct; identical to SEQ ID NO: 17845
  source 1..80: mol_type = other DNA

SEQ ID NO: 202576 - DNA, 80 bp, synthetic construct; identical to SEQ ID NO: 17846
  source 1..80: mol_type = other DNA

SEQ ID NO: 202577 - DNA, 80 bp, synthetic construct; identical to SEQ ID NO: 17847
  source 1..80: mol_type = other DNA

SEQ ID NO: 202578 - DNA, 80 bp, synthetic construct; identical to SEQ ID NO: 17848
  source 1..80: mol_type = other DNA

SEQ ID NO: 202579 - DNA, 80 bp, synthetic construct; identical to SEQ ID NO: 17849
  source 1..80: mol_type = other DNA

SEQ ID NO: 202580 - DNA, 80 bp, synthetic construct; identical to SEQ ID NO: 17850
  source 1..80: mol_type = other DNA

SEQ ID NO: 202581 - DNA, 80 bp, synthetic construct; identical to SEQ ID NO: 17851
  source 1..80: mol_type = other DNA

SEQ ID NO: 202582 - DNA, 80 bp, synthetic construct; identical to SEQ ID NO: 17852
  source 1..80: mol_type = other DNA

SEQ ID NO: 202583 - DNA, 80 bp, synthetic construct; identical to SEQ ID NO: 17853
  source 1..80: mol_type = other DNA

SEQ ID NO: 202584 - DNA, 80 bp, synthetic construct; identical to SEQ ID NO: 17854
  source 1..80: mol_type = other DNA

SEQ ID NO: 202585 - DNA, 80 bp, synthetic construct; identical to SEQ ID NO: 17855
  source 1..80: mol_type = other DNA

SEQ ID NO: 202586 - DNA, 80 bp, synthetic construct; identical to SEQ ID NO: 17856
  source 1..80: mol_type = other DNA

SEQ ID NO: 202587 - DNA, 80 bp, synthetic construct; identical to SEQ ID NO: 17857
  source 1..80: mol_type = other DNA

SEQ ID NO: 202588 - DNA, 80 bp, synthetic construct; identical to SEQ ID NO: 17858
  source 1..80: mol_type = other DNA

SEQ ID NO: 202589 - DNA, 80 bp, synthetic construct; identical to SEQ ID NO: 17859
  source 1..80: mol_type = other DNA

SEQ ID NO: 202590 - DNA, 80 bp, synthetic construct; identical to SEQ ID NO: 17860
  source 1..80: mol_type = other DNA

SEQ ID NO: 202591 - DNA, 80 bp, synthetic construct; identical to SEQ ID NO: 17861
  source 1..80: mol_type = other DNA

SEQ ID NO: 202592 - DNA, 80 bp, synthetic construct; identical to SEQ ID NO: 17862
  source 1..80: mol_type = other DNA

SEQ ID NO: 202593 - DNA, 80 bp, synthetic construct; identical to SEQ ID NO: 17863
  source 1..80: mol_type = other DNA

SEQ ID NO: 202594 - DNA, 80 bp, synthetic construct; identical to SEQ ID NO: 17864
  source 1..80: mol_type = other DNA

SEQ ID NO: 202595 - DNA, 80 bp, synthetic construct; identical to SEQ ID NO: 17865
  source 1..80: mol_type = other DNA

SEQ ID NO: 202596 - DNA, 80 bp, synthetic construct; identical to SEQ ID NO: 17866
  source 1..80: mol_type = other DNA

SEQ ID NO: 202597 - DNA, 80 bp, synthetic construct; identical to SEQ ID NO: 17867
  source 1..80: mol_type = other DNA

SEQ ID NO: 202598 - DNA, 80 bp, synthetic construct; identical to SEQ ID NO: 17868
  source 1..80: mol_type = other DNA

SEQ ID NO: 202599 - DNA, 80 bp, synthetic construct; identical to SEQ ID NO: 17869
  source 1..80: mol_type = other DNA

SEQ ID NO: 202600 - DNA, 80 bp, synthetic construct; identical to SEQ ID NO: 17870
  source 1..80: mol_type = other DNA

SEQ ID NO: 202601 - DNA, 80 bp, synthetic construct; identical to SEQ ID NO: 17871
  source 1..80: mol_type = other DNA

SEQ ID NO: 202602 - DNA, 80 bp, synthetic construct; identical to SEQ ID NO: 17872
  source 1..80: mol_type = other DNA

SEQ ID NO: 202603 - DNA, 80 bp, synthetic construct; identical to SEQ ID NO: 17873
  source 1..80: mol_type = other DNA

SEQ ID NO: 202604 - DNA, 80 bp, synthetic construct; identical to SEQ ID NO: 17874
  source 1..80: mol_type = other DNA

SEQ ID NO: 202605 - DNA, 80 bp, synthetic construct; identical to SEQ ID NO: 17875
  source 1..80: mol_type = other DNA

SEQ ID NO: 202606 - DNA, 80 bp, synthetic construct; identical to SEQ ID NO: 17876
  source 1..80: mol_type = other DNA

SEQ ID NO: 202607 - DNA, 80 bp, synthetic construct; identical to SEQ ID NO: 17877
  source 1..80: mol_type = other DNA

SEQ ID NO: 202608 - DNA, 80 bp, synthetic construct; identical to SEQ ID NO: 17878
  source 1..80: mol_type = other DNA

SEQ ID NO: 202609 - DNA, 80 bp, synthetic construct; identical to SEQ ID NO: 17879
  source 1..80: mol_type = other DNA

SEQ ID NO: 202610 - DNA, 80 bp, synthetic construct; identical to SEQ ID NO: 17880
  source 1..80: mol_type = other DNA

SEQ ID NO: 202611 - DNA, 80 bp, synthetic construct; identical to SEQ ID NO: 17881
  source 1..80: mol_type = other DNA

SEQ ID NO: 202612 - DNA, 80 bp, synthetic construct; identical to SEQ ID NO: 17882
  source 1..80: mol_type = other DNA

SEQ ID NO: 202613 - DNA, 80 bp, synthetic construct; identical to SEQ ID NO: 17883
  source 1..80: mol_type = other DNA

SEQ ID NO: 202614 - DNA, 80 bp, synthetic construct; identical to SEQ ID NO: 17884
  source 1..80: mol_type = other DNA

SEQ ID NO: 202615 - DNA, 80 bp, synthetic construct; identical to SEQ ID NO: 17885
  source 1..80: mol_type = other DNA

SEQ ID NO: 202616 - DNA, 80 bp, synthetic construct; identical to SEQ ID NO: 17886
  source 1..80: mol_type = other DNA

SEQ ID NO: 202617 - DNA, 80 bp, synthetic construct; identical to SEQ ID NO: 17887
  source 1..80: mol_type = other DNA

SEQ ID NO: 202618 - DNA, 80 bp, synthetic construct; identical to SEQ ID NO: 17888
  source 1..80: mol_type = other DNA

SEQ ID NO: 202619 - DNA, 80 bp, synthetic construct; identical to SEQ ID NO: 17889
  source 1..80: mol_type = other DNA

SEQ ID NO: 202620 - DNA, 80 bp, synthetic construct; identical to SEQ ID NO: 17890
  source 1..80: mol_type = other DNA

SEQ ID NO: 202621 - DNA, 80 bp, synthetic construct; identical to SEQ ID NO: 17891
  source 1..80: mol_type = other DNA

SEQ ID NO: 202622 - DNA, 80 bp, synthetic construct; identical to SEQ ID NO: 17892
  source 1..80: mol_type = other DNA

SEQ ID NO: 202623 - DNA, 80 bp, synthetic construct; identical to SEQ ID NO: 17893
  source 1..80: mol_type = other DNA

SEQ ID NO: 202624 - DNA, 80 bp, synthetic construct; identical to SEQ ID NO: 17894
  source 1..80: mol_type = other DNA

SEQ ID NO: 202625 - DNA, 80 bp, synthetic construct; identical to SEQ ID NO: 17895
  source 1..80: mol_type = other DNA

SEQ ID NO: 202626 - DNA, 80 bp, synthetic construct; identical to SEQ ID NO: 17896
  source 1..80: mol_type = other DNA

SEQ ID NO: 202627 - DNA, 80 bp, synthetic construct; identical to SEQ ID NO: 17897
  source 1..80: mol_type = other DNA

SEQ ID NO: 202628 - DNA, 80 bp, synthetic construct; identical to SEQ ID NO: 17898
  source 1..80: mol_type = other DNA

SEQ ID NO: 202629 - DNA, 80 bp, synthetic construct; identical to SEQ ID NO: 17899
  source 1..80: mol_type = other DNA

SEQ ID NO: 202630 - DNA, 80 bp, synthetic construct; identical to SEQ ID NO: 17900
  source 1..80: mol_type = other DNA

SEQ ID NO: 202631 - DNA, 80 bp, synthetic construct; identical to SEQ ID NO: 17901
  source 1..80: mol_type = other DNA

SEQ ID NO: 202632 - DNA, 80 bp, synthetic construct; identical to SEQ ID NO: 17902
  source 1..80: mol_type = other DNA

SEQ ID NO: 202633 - DNA, 80 bp, synthetic construct; identical to SEQ ID NO: 17903
  source 1..80: mol_type = other DNA

SEQ ID NO: 202634 - DNA, 80 bp, synthetic construct; identical to SEQ ID NO: 17904
  source 1..80: mol_type = other DNA

SEQ ID NO: 202635 - DNA, 80 bp, synthetic construct; identical to SEQ ID NO: 17905
  source 1..80: mol_type = other DNA

SEQ ID NO: 202636 - DNA, 80 bp, synthetic construct; identical to SEQ ID NO: 17906
  source 1..80: mol_type = other DNA

SEQ ID NO: 202637 - DNA, 80 bp, synthetic construct; identical to SEQ ID NO: 17907
  source 1..80: mol_type = other DNA

SEQ ID NO: 202638 - DNA, 80 bp, synthetic construct; identical to SEQ ID NO: 17908
  source 1..80: mol_type = other DNA

SEQ ID NO: 202639 - DNA, 80 bp, synthetic construct; identical to SEQ ID NO: 17909
  source 1..80: mol_type = other DNA

SEQ ID NO: 202640 - DNA, 80 bp, synthetic construct; identical to SEQ ID NO: 17910
  source 1..80: mol_type = other DNA

SEQ ID NO: 202641 - DNA, 80 bp, synthetic construct; identical to SEQ ID NO: 17911
  source 1..80: mol_type = other DNA

SEQ ID NO: 202642 - DNA, 80 bp, synthetic construct; identical to SEQ ID NO: 17912
  source 1..80: mol_type = other DNA

SEQ ID NO: 202643 - DNA, 80 bp, synthetic construct; identical to SEQ ID NO: 17913
  source 1..80: mol_type = other DNA

SEQ ID NO: 202644 - DNA, 80 bp, synthetic construct; identical to SEQ ID NO: 17914
  source 1..80: mol_type = other DNA

SEQ ID NO: 202645 - DNA, 80 bp, synthetic construct; identical to SEQ ID NO: 17915
  source 1..80: mol_type = other DNA

SEQ ID NO: 202646 - DNA, 80 bp, synthetic construct; identical to SEQ ID NO: 17916
  source 1..80: mol_type = other DNA

SEQ ID NO: 202647 - DNA, 80 bp, synthetic construct; identical to SEQ ID NO: 17917
  source 1..80: mol_type = other DNA

SEQ ID NO: 202648 - DNA, 80 bp, synthetic construct; identical to SEQ ID NO: 17918
  source 1..80: mol_type = other DNA

SEQ ID NO: 202649 - DNA, 80 bp, synthetic construct; identical to SEQ ID NO: 17919
  source 1..80: mol_type = other DNA

SEQ ID NO: 202650 - DNA, 80 bp, synthetic construct; identical to SEQ ID NO: 17920
  source 1..80: mol_type = other DNA

SEQ ID NO: 202651 - DNA, 80 bp, synthetic construct; identical to SEQ ID NO: 17921
  source 1..80: mol_type = other DNA

SEQ ID NO: 202652 - DNA, 80 bp, synthetic construct; identical to SEQ ID NO: 17922
  source 1..80: mol_type = other DNA

SEQ ID NO: 202653 - DNA, 80 bp, synthetic construct; identical to SEQ ID NO: 17923
  source 1..80: mol_type = other DNA

SEQ ID NO: 202654 - DNA, 80 bp, synthetic construct; identical to SEQ ID NO: 17924
  source 1..80: mol_type = other DNA

SEQ ID NO: 202655 - DNA, 80 bp, synthetic construct; identical to SEQ ID NO: 17925
  source 1..80: mol_type = other DNA

SEQ ID NO: 202656 - DNA, 80 bp, synthetic construct; identical to SEQ ID NO: 17926
  source 1..80: mol_type = other DNA

SEQ ID NO: 202657 - DNA, 80 bp, synthetic construct; identical to SEQ ID NO: 17927
  source 1..80: mol_type = other DNA

SEQ ID NO: 202658 - DNA, 80 bp, synthetic construct; identical to SEQ ID NO: 17928
  source 1..80: mol_type = other DNA

SEQ ID NO: 202659 - DNA, 80 bp, synthetic construct; identical to SEQ ID NO: 17929
  source 1..80: mol_type = other DNA

SEQ ID NO: 202660 - DNA, 80 bp, synthetic construct; identical to SEQ ID NO: 17930
  source 1..80: mol_type = other DNA

SEQ ID NO: 202661 - DNA, 80 bp, synthetic construct; identical to SEQ ID NO: 17931
  source 1..80: mol_type = other DNA

SEQ ID NO: 202662 - DNA, 80 bp, synthetic construct; identical to SEQ ID NO: 17932
  source 1..80: mol_type = other DNA

SEQ ID NO: 202663 - DNA, 80 bp, synthetic construct; identical to SEQ ID NO: 17933
  source 1..80: mol_type = other DNA

SEQ ID NO: 202664 - DNA, 80 bp, synthetic construct; identical to SEQ ID NO: 17934
  source 1..80: mol_type = other DNA

SEQ ID NO: 202665 - DNA, 80 bp, synthetic construct; identical to SEQ ID NO: 17935
  source 1..80: mol_type = other DNA

SEQ ID NO: 202666 - DNA, 80 bp, synthetic construct; identical to SEQ ID NO: 17936
  source 1..80: mol_type = other DNA

SEQ ID NO: 202667 - DNA, 80 bp, synthetic construct; identical to SEQ ID NO: 17937
  source 1..80: mol_type = other DNA

SEQ ID NO: 202668 - DNA, 80 bp, synthetic construct; identical to SEQ ID NO: 17938
  source 1..80: mol_type = other DNA

SEQ ID NO: 202669 - DNA, 80 bp, synthetic construct; identical to SEQ ID NO: 17939
  source 1..80: mol_type = other DNA

SEQ ID NO: 202670 - DNA, 80 bp, synthetic construct; identical to SEQ ID NO: 17940
  source 1..80: mol_type = other DNA

SEQ ID NO: 202671 - DNA, 80 bp, synthetic construct; identical to SEQ ID NO: 17941
  source 1..80: mol_type = other DNA

SEQ ID NO: 202672 - DNA, 80 bp, synthetic construct; identical to SEQ ID NO: 17942
  source 1..80: mol_type = other DNA

SEQ ID NO: 202673 - DNA, 80 bp, synthetic construct; identical to SEQ ID NO: 17943
  source 1..80: mol_type = other DNA

SEQ ID NO: 202674 - DNA, 80 bp, synthetic construct; identical to SEQ ID NO: 17944
  source 1..80: mol_type = other DNA

SEQ ID NO: 202675 - DNA, 80 bp, synthetic construct; identical to SEQ ID NO: 17945
  source 1..80: mol_type = other DNA

SEQ ID NO: 202676 - DNA, 80 bp, synthetic construct; identical to SEQ ID NO: 17946
  source 1..80: mol_type = other DNA

SEQ ID NO: 202677 - DNA, 80 bp, synthetic construct; identical to SEQ ID NO: 17947
  source 1..80: mol_type = other DNA

SEQ ID NO: 202678 - DNA, 80 bp, synthetic construct; identical to SEQ ID NO: 17948
  source 1..80: mol_type = other DNA

SEQ ID NO: 202679 - DNA, 80 bp, synthetic construct; identical to SEQ ID NO: 17949
  source 1..80: mol_type = other DNA

SEQ ID NO: 202680 - DNA, 80 bp, synthetic construct; identical to SEQ ID NO: 17950
  source 1..80: mol_type = other DNA

SEQ ID NO: 202681 - DNA, 80 bp, synthetic construct; identical to SEQ ID NO: 17951
  source 1..80: mol_type = other DNA

SEQ ID NO: 202682 - DNA, 80 bp, synthetic construct; identical to SEQ ID NO: 17952
  source 1..80: mol_type = other DNA

SEQ ID NO: 202683 - DNA, 80 bp, synthetic construct; identical to SEQ ID NO: 17953
  source 1..80: mol_type = other DNA

SEQ ID NO: 202684 - DNA, 80 bp, synthetic construct; identical to SEQ ID NO: 17954
  source 1..80: mol_type = other DNA

SEQ ID NO: 202685 - DNA, 80 bp, synthetic construct; identical to SEQ ID NO: 17955
  source 1..80: mol_type = other DNA

SEQ ID NO: 202686 - DNA, 80 bp, synthetic construct; identical to SEQ ID NO: 17956
  source 1..80: mol_type = other DNA

SEQ ID NO: 202687 - DNA, 80 bp, synthetic construct; identical to SEQ ID NO: 17957
  source 1..80: mol_type = other DNA

SEQ ID NO: 202688 - DNA, 80 bp, synthetic construct; identical to SEQ ID NO: 17958
  source 1..80: mol_type = other DNA

SEQ ID NO: 202689 - DNA, 80 bp, synthetic construct; identical to SEQ ID NO: 17959
  source 1..80: mol_type = other DNA

SEQ ID NO: 202690 - DNA, 80 bp, synthetic construct; identical to SEQ ID NO: 17960
  source 1..80: mol_type = other DNA

SEQ ID NO: 202691 - DNA, 80 bp, synthetic construct; identical to SEQ ID NO: 17961
  source 1..80: mol_type = other DNA

SEQ ID NO: 202692 - DNA, 80 bp, synthetic construct; identical to SEQ ID NO: 17962
  source 1..80: mol_type = other DNA

SEQ ID NO: 202693 - DNA, 80 bp, synthetic construct; identical to SEQ ID NO: 17963
  source 1..80: mol_type = other DNA

SEQ ID NO: 202694 - DNA, 80 bp, synthetic construct; identical to SEQ ID NO: 17964
  source 1..80: mol_type = other DNA

SEQ ID NO: 202695 - DNA, 80 bp, synthetic construct; identical to SEQ ID NO: 17965
  source 1..80: mol_type = other DNA

SEQ ID NO: 202696 - DNA, 80 bp, synthetic construct; identical to SEQ ID NO: 17966
  source 1..80: mol_type = other DNA

SEQ ID NO: 202697 - DNA, 80 bp, synthetic construct; identical to SEQ ID NO: 17967
  source 1..80: mol_type = other DNA

SEQ ID NO: 202698 - DNA, 80 bp, synthetic construct; identical to SEQ ID NO: 17968
  source 1..80: mol_type = other DNA

SEQ ID NO: 202699 - DNA, 80 bp, synthetic construct; identical to SEQ ID NO: 17969
  source 1..80: mol_type = other DNA

SEQ ID NO: 202700 - DNA, 80 bp, synthetic construct; identical to SEQ ID NO: 17970
  source 1..80: mol_type = other DNA

SEQ ID NO: 202701 - DNA, 80 bp, synthetic construct; identical to SEQ ID NO: 17971
  source 1..80: mol_type = other DNA

SEQ ID NO: 202702 - DNA, 80 bp, synthetic construct; identical to SEQ ID NO: 17972
  source 1..80: mol_type = other DNA

SEQ ID NO: 202703 - DNA, 80 bp, synthetic construct; identical to SEQ ID NO: 17973
  source 1..80: mol_type = other DNA

SEQ ID NO: 202704 - DNA, 80 bp, synthetic construct; identical to SEQ ID NO: 17974
  source 1..80: mol_type = other DNA

SEQ ID NO: 202705 - DNA, 80 bp, synthetic construct; identical to SEQ ID NO: 17975
  source 1..80: mol_type = other DNA

SEQ ID NO: 202706 - DNA, 80 bp, synthetic construct; identical to SEQ ID NO: 17976
  source 1..80: mol_type = other DNA

SEQ ID NO: 202707 - DNA, 80 bp, synthetic construct; identical to SEQ ID NO: 17977
  source 1..80: mol_type = other DNA

SEQ ID NO: 202708 - DNA, 80 bp, synthetic construct; identical to SEQ ID NO: 17978
  source 1..80: mol_type = other DNA

SEQ ID NO: 202709 - DNA, 80 bp, synthetic construct; identical to SEQ ID NO: 17979
  source 1..80: mol_type = other DNA

SEQ ID NO: 202710 - DNA, 80 bp, synthetic construct; identical to SEQ ID NO: 17980
  source 1..80: mol_type = other DNA

SEQ ID NO: 202711 - DNA, 80 bp, synthetic construct; identical to SEQ ID NO: 17981
  source 1..80: mol_type = other DNA

SEQ ID NO: 202712 - DNA, 80 bp, synthetic construct; identical to SEQ ID NO: 17982
  source 1..80: mol_type = other DNA

SEQ ID NO: 202713 - DNA, 80 bp, synthetic construct; identical to SEQ ID NO: 17983
  source 1..80: mol_type = other DNA

SEQ ID NO: 202714 - DNA, 80 bp, synthetic construct; identical to SEQ ID NO: 17984
  source 1..80: mol_type = other DNA

SEQ ID NO: 202715 - DNA, 80 bp, synthetic construct; identical to SEQ ID NO: 17985
  source 1..80: mol_type = other DNA

SEQ ID NO: 202716 - DNA, 80 bp, synthetic construct; identical to SEQ ID NO: 17986
  source 1..80: mol_type = other DNA

SEQ ID NO: 202717 - DNA, 80 bp, synthetic construct; identical to SEQ ID NO: 17987
  source 1..80: mol_type = other DNA

SEQ ID NO: 202718 - DNA, 80 bp, synthetic construct; identical to SEQ ID NO: 17988
  source 1..80: mol_type = other DNA

SEQ ID NO: 202719 - DNA, 80 bp, synthetic construct; identical to SEQ ID NO: 17989
  source 1..80: mol_type = other DNA

SEQ ID NO: 202720 - DNA, 80 bp, synthetic construct; identical to SEQ ID NO: 17990
  source 1..80: mol_type = other DNA

SEQ ID NO: 202721 - DNA, 80 bp, synthetic construct; identical to SEQ ID NO: 17991
  source 1..80: mol_type = other DNA

SEQ ID NO: 202722 - DNA, 80 bp, synthetic construct; identical to SEQ ID NO: 17992
  source 1..80: mol_type = other DNA

SEQ ID NO: 202723 - DNA, 80 bp, synthetic construct; identical to SEQ ID NO: 17993
  source 1..80: mol_type = other DNA

SEQ ID NO: 202724 - DNA, 80 bp, synthetic construct; identical to SEQ ID NO: 17994
  source 1..80: mol_type = other DNA

SEQ ID NO: 202725 - DNA, 80 bp, synthetic construct; identical to SEQ ID NO: 17995
  source 1..80: mol_type = other DNA

SEQ ID NO: 202726 - DNA, 80 bp, synthetic construct; identical to SEQ ID NO: 17996
  source 1..80: mol_type = other DNA

SEQ ID NO: 202727 - DNA, 80 bp, synthetic construct; identical to SEQ ID NO: 17997
  source 1..80: mol_type = other DNA

SEQ ID NO: 202728 - DNA, 80 bp, synthetic construct; identical to SEQ ID NO: 17998
  source 1..80: mol_type = other DNA

SEQ ID NO: 202729 - DNA, 80 bp, synthetic construct; identical to SEQ ID NO: 17999
  source 1..80: mol_type = other DNA

SEQ ID NO: 202730 - DNA, 80 bp, synthetic construct; identical to SEQ ID NO: 18000
  source 1..80: mol_type = other DNA

SEQ ID NO: 202731 - DNA, 80 bp, synthetic construct; identical to SEQ ID NO: 18001
  source 1..80: mol_type = other DNA

SEQ ID NO: 202732 - DNA, 80 bp, synthetic construct; identical to SEQ ID NO: 18002
  source 1..80: mol_type = other DNA

SEQ ID NO: 202733 - DNA, 80 bp, synthetic construct; identical to SEQ ID NO: 18003
  source 1..80: mol_type = other DNA

SEQ ID NO: 202734 - DNA, 80 bp, synthetic construct; identical to SEQ ID NO: 18004
  source 1..80: mol_type = other DNA

SEQ ID NO: 202735 - DNA, 80 bp, synthetic construct; identical to SEQ ID NO: 18005
  source 1..80: mol_type = other DNA

SEQ ID NO: 202736 - DNA, 80 bp, synthetic construct; identical to SEQ ID NO: 18006
  source 1..80: mol_type = other DNA

SEQ ID NO: 202737 - DNA, 80 bp, synthetic construct; identical to SEQ ID NO: 18007
  source 1..80: mol_type = other DNA

SEQ ID NO: 202738 - DNA, 80 bp, synthetic construct; identical to SEQ ID NO: 18008
  source 1..80: mol_type = other DNA

SEQ ID NO: 202739 - DNA, 80 bp, synthetic construct; identical to SEQ ID NO: 18009
  source 1..80: mol_type = other DNA

SEQ ID NO: 202740 - DNA, 80 bp, synthetic construct; identical to SEQ ID NO: 18010
  source 1..80: mol_type = other DNA

SEQ ID NO: 202741 - DNA, 80 bp, synthetic construct; identical to SEQ ID NO: 18011
  source 1..80: mol_type = other DNA

SEQ ID NO: 202742 - DNA, 80 bp, synthetic construct; identical to SEQ ID NO: 18012
  source 1..80: mol_type = other DNA

SEQ ID NO: 202743 - DNA, 80 bp, synthetic construct; identical to SEQ ID NO: 18013
  source 1..80: mol_type = other DNA

SEQ ID NO: 202744 - DNA, 80 bp, synthetic construct; identical to SEQ ID NO: 18014
  source 1..80: mol_type = other DNA

SEQ ID NO: 202745 - DNA, 80 bp, synthetic construct; identical to SEQ ID NO: 18015
  source 1..80: mol_type = other DNA

SEQ ID NO: 202746 - DNA, 80 bp, synthetic construct; identical to SEQ ID NO: 18016
  source 1..80: mol_type = other DNA

SEQ ID NO: 202747 - DNA, 80 bp, synthetic construct; identical to SEQ ID NO: 18017
  source 1..80: mol_type = other DNA

SEQ ID NO: 202748 - DNA, 80 bp, synthetic construct; identical to SEQ ID NO: 18018
  source 1..80: mol_type = other DNA

SEQ ID NO: 202749 - DNA, 80 bp, synthetic construct; identical to SEQ ID NO: 18019
  source 1..80: mol_type = other DNA

SEQ ID NO: 202750 - DNA, 80 bp, synthetic construct; identical to SEQ ID NO: 18020
  source 1..80: mol_type = other DNA

SEQ ID NO: 202751 - DNA, 80 bp, synthetic construct; identical to SEQ ID NO: 18021
  source 1..80: mol_type = other DNA

SEQ ID NO: 202752 - DNA, 80 bp, synthetic construct; identical to SEQ ID NO: 18022
  source 1..80: mol_type = other DNA

SEQ ID NO: 202753 - DNA, 80 bp, synthetic construct; identical to SEQ ID NO: 18023
  source 1..80: mol_type = other DNA

SEQ ID NO: 202754 - DNA, 80 bp, synthetic construct; identical to SEQ ID NO: 18024
  source 1..80: mol_type = other DNA

SEQ ID NO: 202755 - DNA, 80 bp, synthetic construct; identical to SEQ ID NO: 18025
  source 1..80: mol_type = other DNA

SEQ ID NO: 202756 - DNA, 80 bp, synthetic construct; identical to SEQ ID NO: 18026
  source 1..80: mol_type = other DNA

SEQ ID NO: 202757 - DNA, 80 bp, synthetic construct; identical to SEQ ID NO: 18027
  source 1..80: mol_type = other DNA

SEQ ID NO: 202758 - DNA, 80 bp, synthetic construct; identical to SEQ ID NO: 18028
  source 1..80: mol_type = other DNA

SEQ ID NO: 202759 - DNA, 80 bp, synthetic construct; identical to SEQ ID NO: 18029
  source 1..80: mol_type = other DNA

SEQ ID NO: 202760 - DNA, 80 bp, synthetic construct; identical to SEQ ID NO: 18030
  source 1..80: mol_type = other DNA

SEQ ID NO: 202761 - DNA, 80 bp, synthetic construct; identical to SEQ ID NO: 18031
  source 1..80: mol_type = other DNA

SEQ ID NO: 202762 - DNA, 80 bp, synthetic construct; identical to SEQ ID NO: 18032
  source 1..80: mol_type = other DNA

SEQ ID NO: 202763 - DNA, 80 bp, synthetic construct; identical to SEQ ID NO: 18033
  source 1..80: mol_type = other DNA

SEQ ID NO: 202764 - DNA, 80 bp, synthetic construct; identical to SEQ ID NO: 18034
  source 1..80: mol_type = other DNA

SEQ ID NO: 202765 - DNA, 80 bp, synthetic construct; identical to SEQ ID NO: 18035
  source 1..80: mol_type = other DNA

SEQ ID NO: 202766 - DNA, 80 bp, synthetic construct; identical to SEQ ID NO: 18036
  source 1..80: mol_type = other DNA

SEQ ID NO: 202767 - DNA, 80 bp, synthetic construct; identical to SEQ ID NO: 18037
  source 1..80: mol_type = other DNA

SEQ ID NO: 202768 - DNA, 80 bp, synthetic construct; identical to SEQ ID NO: 18038
  source 1..80: mol_type = other DNA

SEQ ID NO: 202769 - DNA, 80 bp, synthetic construct; identical to SEQ ID NO: 18039
  source 1..80: mol_type = other DNA

SEQ ID NO: 202770 - DNA, 80 bp, synthetic construct; identical to SEQ ID NO: 18040
  source 1..80: mol_type = other DNA

SEQ ID NO: 202771 - DNA, 80 bp, synthetic construct; identical to SEQ ID NO: 18041
  source 1..80: mol_type = other DNA

SEQ ID NO: 202772 - DNA, 80 bp, synthetic construct; identical to SEQ ID NO: 18042
  source 1..80: mol_type = other DNA

SEQ ID NO: 202773 - DNA, 80 bp, synthetic construct; identical to SEQ ID NO: 18043
  source 1..80: mol_type = other DNA

SEQ ID NO: 202774 - DNA, 80 bp, synthetic construct; identical to SEQ ID NO: 18044
  source 1..80: mol_type = other DNA

SEQ ID NO: 202775 - DNA, 80 bp, synthetic construct; identical to SEQ ID NO: 18045
  source 1..80: mol_type = other DNA

SEQ ID NO: 202776 - DNA, 80 bp, synthetic construct; identical to SEQ ID NO: 18046
  source 1..80: mol_type = other DNA

SEQ ID NO: 202777 - DNA, 80 bp, synthetic construct; identical to SEQ ID NO: 18047
  source 1..80: mol_type = other DNA

SEQ ID NO: 202778 - DNA, 80 bp, synthetic construct; identical to SEQ ID NO: 18048
  source 1..80: mol_type = other DNA

SEQ ID NO: 202779 - DNA, 80 bp, synthetic construct; identical to SEQ ID NO: 18049
  source 1..80: mol_type = other DNA

SEQ ID NO: 202780 - DNA, 80 bp, synthetic construct; identical to SEQ ID NO: 18050
  source 1..80: mol_type = other DNA

SEQ ID NO: 202781 - DNA, 80 bp, synthetic construct; identical to SEQ ID NO: 18051
  source 1..80: mol_type = other DNA

SEQ ID NO: 202782 - DNA, 80 bp, synthetic construct; identical to SEQ ID NO: 18052
  source 1..80: mol_type = other DNA

SEQ ID NO: 202783 - DNA, 80 bp, synthetic construct; identical to SEQ ID NO: 18053
  source 1..80: mol_type = other DNA

SEQ ID NO: 202784 - DNA, 80 bp, synthetic construct; identical to SEQ ID NO: 18054
  source 1..80: mol_type = other DNA

SEQ ID NO: 202785 - DNA, 80 bp, synthetic construct; identical to SEQ ID NO: 18055
  source 1..80: mol_type = other DNA

SEQ ID NO: 202786 - DNA, 80 bp, synthetic construct; identical to SEQ ID NO: 18056
  source 1..80: mol_type = other DNA

SEQ ID NO: 202787 - DNA, 80 bp, synthetic construct; identical to SEQ ID NO: 18057
  source 1..80: mol_type = other DNA

SEQ ID NO: 202788 - DNA, 80 bp, synthetic construct; identical to SEQ ID NO: 18058
  source 1..80: mol_type = other DNA

SEQ ID NO: 202789 - DNA, 80 bp, synthetic construct; identical to SEQ ID NO: 18059
  source 1..80: mol_type = other DNA

SEQ ID NO: 202790 - DNA, 80 bp, synthetic construct; identical to SEQ ID NO: 18060
  source 1..80: mol_type = other DNA

SEQ ID NO: 202791 - DNA, 80 bp, synthetic construct; identical to SEQ ID NO: 18061
  source 1..80: mol_type = other DNA

SEQ ID NO: 202792 - DNA, 80 bp, synthetic construct; identical to SEQ ID NO: 18062
  source 1..80: mol_type = other DNA

SEQ ID NO: 202793 - DNA, 80 bp, synthetic construct; identical to SEQ ID NO: 18063
  source 1..80: mol_type = other DNA

SEQ ID NO: 202794 - DNA, 80 bp, synthetic construct; identical to SEQ ID NO: 18064
  source 1..80: mol_type = other DNA

SEQ ID NO: 202795 - DNA, 80 bp, synthetic construct; identical to SEQ ID NO: 18065
  source 1..80: mol_type = other DNA

SEQ ID NO: 202796 - DNA, 80 bp, synthetic construct; identical to SEQ ID NO: 18066
  source 1..80: mol_type = other DNA

SEQ ID NO: 202797 - DNA, 80 bp, synthetic construct; identical to SEQ ID NO: 18067
  source 1..80: mol_type = other DNA

SEQ ID NO: 202798 - DNA, 80 bp, synthetic construct; identical to SEQ ID NO: 18068
  source 1..80: mol_type = other DNA

SEQ ID NO: 202799 - DNA, 80 bp, synthetic construct; identical to SEQ ID NO: 18069
  source 1..80: mol_type = other DNA

SEQ ID NO: 202800 - DNA, 80 bp, synthetic construct; identical to SEQ ID NO: 18070
  source 1..80: mol_type = other DNA

SEQ ID NO: 202801 - DNA, 80 bp, synthetic construct; identical to SEQ ID NO: 18071
  source 1..80: mol_type = other DNA

SEQ ID NO: 202802 - DNA, 80 bp, synthetic construct; identical to SEQ ID NO: 18072
  source 1..80: mol_type = other DNA

SEQ ID NO: 202803 - DNA, 80 bp, synthetic construct; identical to SEQ ID NO: 18073
  source 1..80: mol_type = other DNA

SEQ ID NO: 202804 - DNA, 80 bp, synthetic construct; identical to SEQ ID NO: 18074
  source 1..80: mol_type = other DNA

SEQ ID NO: 202805 - DNA, 80 bp, synthetic construct; identical to SEQ ID NO: 18075
  source 1..80: mol_type = other DNA

SEQ ID NO: 202806 - DNA, 80 bp, synthetic construct; identical to SEQ ID NO: 18076
  source 1..80: mol_type = other DNA

SEQ ID NO: 202807 - DNA, 80 bp, synthetic construct; identical to SEQ ID NO: 18077
  source 1..80: mol_type = other DNA

SEQ ID NO: 202808 - DNA, 80 bp, synthetic construct; identical to SEQ ID NO: 18078
  source 1..80: mol_type = other DNA

SEQ ID NO: 202809 - DNA, 80 bp, synthetic construct; identical to SEQ ID NO: 18079
  source 1..80: mol_type = other DNA

SEQ ID NO: 202810 - DNA, 80 bp, synthetic construct; identical to SEQ ID NO: 18080
  source 1..80: mol_type = other DNA

SEQ ID NO: 202811 - DNA, 80 bp, synthetic construct; identical to SEQ ID NO: 18081
  source 1..80: mol_type = other DNA

SEQ ID NO: 202812 - DNA, 80 bp, synthetic construct; identical to SEQ ID NO: 18082
  source 1..80: mol_type = other DNA

SEQ ID NO: 202813 - DNA, 80 bp, synthetic construct; identical to SEQ ID NO: 18083
  source 1..80: mol_type = other DNA

SEQ ID NO: 202814 - DNA, 80 bp, synthetic construct; identical to SEQ ID NO: 18084
  source 1..80: mol_type = other DNA

SEQ ID NO: 202815 - DNA, 80 bp, synthetic construct; identical to SEQ ID NO: 18085
  source 1..80: mol_type = other DNA

SEQ ID NO: 202816 - DNA, 80 bp, synthetic construct; identical to SEQ ID NO: 18086
  source 1..80: mol_type = other DNA

SEQ ID NO: 202817 - DNA, 80 bp, synthetic construct; identical to SEQ ID NO: 18087
  source 1..80: mol_type = other DNA

SEQ ID NO: 202818 - DNA, 80 bp, synthetic construct; identical to SEQ ID NO: 18088
  source 1..80: mol_type = other DNA

SEQ ID NO: 202819 - DNA, 80 bp, synthetic construct; identical to SEQ ID NO: 18089
  source 1..80: mol_type = other DNA

SEQ ID NO: 202820 - DNA, 80 bp, synthetic construct; identical to SEQ ID NO: 18090
  source 1..80: mol_type = other DNA

SEQ ID NO: 202821 - DNA, 80 bp, synthetic construct; identical to SEQ ID NO: 18091
  source 1..80: mol_type = other DNA

SEQ ID NO: 202822 - DNA, 80 bp, synthetic construct; identical to SEQ ID NO: 18092
  source 1..80: mol_type = other DNA

SEQ ID NO: 202823 - DNA, 80 bp, synthetic construct; identical to SEQ ID NO: 18093
  source 1..80: mol_type = other DNA

SEQ ID NO: 202824 - DNA, 80 bp, synthetic construct; identical to SEQ ID NO: 18094
  source 1..80: mol_type = other DNA

SEQ ID NO: 202825 - DNA, 80 bp, synthetic construct; identical to SEQ ID NO: 18095
  source 1..80: mol_type = other DNA

SEQ ID NO: 202826 - DNA, 80 bp, synthetic construct; identical to SEQ ID NO: 18096
  source 1..80: mol_type = other DNA

SEQ ID NO: 202827 - DNA, 80 bp, synthetic construct; identical to SEQ ID NO: 18097
  source 1..80: mol_type = other DNA

SEQ ID NO: 202828 - DNA, 80 bp, synthetic construct; identical to SEQ ID NO: 18098
  source 1..80: mol_type = other DNA

SEQ ID NO: 202829 - DNA, 80 bp, synthetic construct; identical to SEQ ID NO: 18099
  source 1..80: mol_type = other DNA

SEQ ID NO: 202830 - DNA, 80 bp, synthetic construct; identical to SEQ ID NO: 18100
  source 1..80: mol_type = other DNA

SEQ ID NO: 202831 - DNA, 80 bp, synthetic construct; identical to SEQ ID NO: 18101
  source 1..80: mol_type = other DNA

SEQ ID NO: 202832 - DNA, 80 bp, synthetic construct; identical to SEQ ID NO: 18102
  source 1..80: mol_type = other DNA

SEQ ID NO: 202833 - DNA, 80 bp, synthetic construct; identical to SEQ ID NO: 18103
  source 1..80: mol_type = other DNA

SEQ ID NO: 202834 - DNA, 80 bp, synthetic construct; identical to SEQ ID NO: 18104
  source 1..80: mol_type = other DNA

SEQ ID NO: 202835 - DNA, 80 bp, synthetic construct; identical to SEQ ID NO: 18105
  source 1..80: mol_type = other DNA

SEQ ID NO: 202836 - DNA, 80 bp, synthetic construct; identical to SEQ ID NO: 18106
  source 1..80: mol_type = other DNA

SEQ ID NO: 202837 - DNA, 80 bp, synthetic construct; identical to SEQ ID NO: 18107
  source 1..80: mol_type = other DNA

SEQ ID NO: 202838 - DNA, 80 bp, synthetic construct; identical to SEQ ID NO: 18108
  source 1..80: mol_type = other DNA

SEQ ID NO: 202839 - DNA, 80 bp, synthetic construct; identical to SEQ ID NO: 18109
  source 1..80: mol_type = other DNA

SEQ ID NO: 202840 - DNA, 80 bp, synthetic construct; identical to SEQ ID NO: 18110
  source 1..80: mol_type = other DNA

SEQ ID NO: 202841 - DNA, 80 bp, synthetic construct; identical to SEQ ID NO: 18111
  source 1..80: mol_type = other DNA

SEQ ID NO: 202842 - DNA, 80 bp, synthetic construct; identical to SEQ ID NO: 18112
  source 1..80: mol_type = other DNA

SEQ ID NO: 202843 - DNA, 80 bp, synthetic construct; identical to SEQ ID NO: 18113
  source 1..80: mol_type = other DNA

SEQ ID NO: 202844 - DNA, 80 bp, synthetic construct; identical to SEQ ID NO: 18114
  source 1..80: mol_type = other DNA

SEQ ID NO: 202845 - DNA, 80 bp, synthetic construct; identical to SEQ ID NO: 18115
  source 1..80: mol_type = other DNA

SEQ ID NO: 202846 - DNA, 80 bp, synthetic construct; identical to SEQ ID NO: 18116
  source 1..80: mol_type = other DNA

SEQ ID NO: 202847 - DNA, 80 bp, synthetic construct; identical to SEQ ID NO: 18117
  source 1..80: mol_type = other DNA

SEQ ID NO: 202848 - DNA, 80 bp, synthetic construct; identical to SEQ ID NO: 18118
  source 1..80: mol_type = other DNA

SEQ ID NO: 202849 - DNA, 80 bp, synthetic construct; identical to SEQ ID NO: 18119
  source 1..80: mol_type = other DNA

SEQ ID NO: 202850 - DNA, 80 bp, synthetic construct; identical to SEQ ID NO: 18120
  source 1..80: mol_type = other DNA

SEQ ID NO: 202851 - DNA, 80 bp, synthetic construct; identical to SEQ ID NO: 18121
  source 1..80: mol_type = other DNA

SEQ ID NO: 202852 - DNA, 80 bp, synthetic construct; identical to SEQ ID NO: 18122
  source 1..80: mol_type = other DNA

SEQ ID NO: 202853 - DNA, 80 bp, synthetic construct; identical to SEQ ID NO: 18123
  source 1..80: mol_type = other DNA

SEQ ID NO: 202854 - DNA, 80 bp, synthetic construct; identical to SEQ ID NO: 18124
  source 1..80: mol_type = other DNA

SEQ ID NO: 202855 - DNA, 80 bp, synthetic construct; identical to SEQ ID NO: 18125
  source 1..80: mol_type = other DNA

SEQ ID NO: 202856 - DNA, 80 bp, synthetic construct; identical to SEQ ID NO: 18126
  source 1..80: mol_type = other DNA

SEQ ID NO: 202857 - DNA, 80 bp, synthetic construct; identical to SEQ ID NO: 18127
  source 1..80: mol_type = other DNA

SEQ ID NO: 202858 - DNA, 80 bp, synthetic construct; identical to SEQ ID NO: 18128
  source 1..80: mol_type = other DNA

SEQ ID NO: 202859 - DNA, 80 bp, synthetic construct; identical to SEQ ID NO: 18129
  source 1..80: mol_type = other DNA

SEQ ID NO: 202860 - DNA, 80 bp, synthetic construct; identical to SEQ ID NO: 18130
  source 1..80: mol_type = other DNA

SEQ ID NO: 202861 - DNA, 80 bp, synthetic construct; identical to SEQ ID NO: 18131
  source 1..80: mol_type = other DNA

SEQ ID NO: 202862 - DNA, 80 bp, synthetic construct; identical to SEQ ID NO: 18132
  source 1..80: mol_type = other DNA

SEQ ID NO: 202863 - DNA, 80 bp, synthetic construct; identical to SEQ ID NO: 18133
  source 1..80: mol_type = other DNA

SEQ ID NO: 202864 - DNA, 80 bp, synthetic construct; identical to SEQ ID NO: 18134
  source 1..80: mol_type = other DNA

SEQ ID NO: 202865 - DNA, 80 bp, synthetic construct; identical to SEQ ID NO: 18135
  source 1..80: mol_type = other DNA

SEQ ID NO: 202866 - DNA, 80 bp, synthetic construct; identical to SEQ ID NO: 18136
  source 1..80: mol_type = other DNA

SEQ ID NO: 202867 - DNA, 80 bp, synthetic construct; identical to SEQ ID NO: 18137
  source 1..80: mol_type = other DNA

SEQ ID NO: 202868 - DNA, 80 bp, synthetic construct; identical to SEQ ID NO: 18138
  source 1..80: mol_type = other DNA

SEQ ID NO: 202869 - DNA, 80 bp, synthetic construct; identical to SEQ ID NO: 18139
  source 1..80: mol_type = other DNA

SEQ ID NO: 202870 - DNA, 80 bp, synthetic construct; identical to SEQ ID NO: 18140
  source 1..80: mol_type = other DNA

SEQ ID NO: 202871 - DNA, 80 bp, synthetic construct; identical to SEQ ID NO: 18141
  source 1..80: mol_type = other DNA

SEQ ID NO: 202872 - DNA, 80 bp, synthetic construct; identical to SEQ ID NO: 18142
  source 1..80: mol_type = other DNA

SEQ ID NO: 202873 - DNA, 80 bp, synthetic construct; identical to SEQ ID NO: 18143
  source 1..80: mol_type = other DNA

SEQ ID NO: 202874 - DNA, 80 bp, synthetic construct; identical to SEQ ID NO: 18144
  source 1..80: mol_type = other DNA

SEQ ID NO: 202875 - DNA, 80 bp, synthetic construct; identical to SEQ ID NO: 18145
  source 1..80: mol_type = other DNA

SEQ ID NO: 202876 - DNA, 80 bp, synthetic construct; identical to SEQ ID NO: 18146
  source 1..80: mol_type = other DNA

SEQ ID NO: 202877 - DNA, 80 bp, synthetic construct; identical to SEQ ID NO: 18147
  source 1..80: mol_type = other DNA

SEQ ID NO: 202878 - DNA, 80 bp, synthetic construct; identical to SEQ ID NO: 18148
  source 1..80: mol_type = other DNA

SEQ ID NO: 202879 - DNA, 80 bp, synthetic construct; identical to SEQ ID NO: 18149
  source 1..80: mol_type = other DNA

SEQ ID NO: 202880 - DNA, 80 bp, synthetic construct; identical to SEQ ID NO: 18150
  source 1..80: mol_type = other DNA

SEQ ID NO: 202881 - DNA, 80 bp, synthetic construct; identical to SEQ ID NO: 18151
  source 1..80: mol_type = other DNA

SEQ ID NO: 202882 - DNA, 80 bp, synthetic construct; identical to SEQ ID NO: 18152
  source 1..80: mol_type = other DNA

SEQ ID NO: 202883 - DNA, 80 bp, synthetic construct; identical to SEQ ID NO: 18153
  source 1..80: mol_type = other DNA

SEQ ID NO: 202884 - DNA, 80 bp, synthetic construct; identical to SEQ ID NO: 18154
  source 1..80: mol_type = other DNA

SEQ ID NO: 202885 - DNA, 80 bp, synthetic construct; identical to SEQ ID NO: 18155
  source 1..80: mol_type = other DNA

SEQ ID NO: 202886 - DNA, 80 bp, synthetic construct; identical to SEQ ID NO: 18156
  source 1..80: mol_type = other DNA

SEQ ID NO: 202887 - DNA, 80 bp, synthetic construct; identical to SEQ ID NO: 18157
  source 1..80: mol_type = other DNA

SEQ ID NO: 202888 - DNA, 80 bp, synthetic construct; identical to SEQ ID NO: 18158
  source 1..80: mol_type = other DNA

SEQ ID NO: 202889 - DNA, 80 bp, synthetic construct; identical to SEQ ID NO: 18159
  source 1..80: mol_type = other DNA

SEQ ID NO: 202890 - DNA, 80 bp, synthetic construct; identical to SEQ ID NO: 18160
  source 1..80: mol_type = other DNA

SEQ ID NO: 202891 - DNA, 80 bp, synthetic construct; identical to SEQ ID NO: 18161
  source 1..80: mol_type = other DNA

SEQ ID NO: 202892 - DNA, 80 bp, synthetic construct; identical to SEQ ID NO: 18162
  source 1..80: mol_type = other DNA

SEQ ID NO: 202893 - DNA, 80 bp, synthetic construct; identical to SEQ ID NO: 18163
  source 1..80: mol_type = other DNA

SEQ ID NO: 202894 - DNA, 80 bp, synthetic construct; identical to SEQ ID NO: 18164
  source 1..80: mol_type = other DNA

SEQ ID NO: 202895 - DNA, 80 bp, synthetic construct; identical to SEQ ID NO: 18165
  source 1..80: mol_type = other DNA

SEQ ID NO: 202896 - DNA, 80 bp, synthetic construct; identical to SEQ ID NO: 18166
  source 1..80: mol_type = other DNA

SEQ ID NO: 202897 - DNA, 80 bp, synthetic construct; identical to SEQ ID NO: 18167
  source 1..80: mol_type = other DNA

SEQ ID NO: 202898 - DNA, 80 bp, synthetic construct; identical to SEQ ID NO: 18168
  source 1..80: mol_type = other DNA

SEQ ID NO: 202899 - DNA, 80 bp, synthetic construct; identical to SEQ ID NO: 18169
  source 1..80: mol_type = other DNA

SEQ ID NO: 202900 - DNA, 80 bp, synthetic construct; identical to SEQ ID NO: 18170
  source 1..80: mol_type = other DNA

SEQ ID NO: 202901 - DNA, 80 bp, synthetic construct; identical to SEQ ID NO: 18171
  source 1..80: mol_type = other DNA

SEQ ID NO: 202902 - DNA, 80 bp, synthetic construct; identical to SEQ ID NO: 18172
  source 1..80: mol_type = other DNA

SEQ ID NO: 202903 - DNA, 80 bp, synthetic construct; identical to SEQ ID NO: 18173
  source 1..80: mol_type = other DNA

SEQ ID NO: 202904 - DNA, 80 bp, synthetic construct; identical to SEQ ID NO: 18174
  source 1..80: mol_type = other DNA

SEQ ID NO: 202905 - DNA, 80 bp, synthetic construct; identical to SEQ ID NO: 18175
  source 1..80: mol_type = other DNA

SEQ ID NO: 202906 - DNA, 80 bp, synthetic construct; identical to SEQ ID NO: 18176
  source 1..80: mol_type = other DNA

SEQ ID NO: 202907 - DNA, 80 bp, synthetic construct; identical to SEQ ID NO: 18177
  source 1..80: mol_type = other DNA

SEQ ID NO: 202908 - DNA, 80 bp, synthetic construct; identical to SEQ ID NO: 18178
  source 1..80: mol_type = other DNA

SEQ ID NO: 202909 - DNA, 80 bp, synthetic construct; identical to SEQ ID NO: 18179
  source 1..80: mol_type = other DNA

SEQ ID NO: 202910 - DNA, 80 bp, synthetic construct; identical to SEQ ID NO: 18180
  source 1..80: mol_type = other DNA

SEQ ID NO: 202911 - DNA, 80 bp, synthetic construct; identical to SEQ ID NO: 18181
  source 1..80: mol_type = other DNA

SEQ ID NO: 202912 - DNA, 80 bp, synthetic construct; identical to SEQ ID NO: 18182
  source 1..80: mol_type = other DNA

SEQ ID NO: 202913 - DNA, 80 bp, synthetic construct; identical to SEQ ID NO: 18183
  source 1..80: mol_type = other DNA

SEQ ID NO: 202914 - DNA, 80 bp, synthetic construct; identical to SEQ ID NO: 18184
  source 1..80: mol_type = other DNA

SEQ ID NO: 202915 - DNA, 80 bp, synthetic construct; identical to SEQ ID NO: 18185
  source 1..80: mol_type = other DNA

SEQ ID NO: 202916 - DNA, 80 bp, synthetic construct; identical to SEQ ID NO: 18186
  source 1..80: mol_type = other DNA

SEQ ID NO: 202917 - DNA, 80 bp, synthetic construct; identical to SEQ ID NO: 18187
  source 1..80: mol_type = other DNA

SEQ ID NO: 202918 - DNA, 80 bp, synthetic construct; identical to SEQ ID NO: 18188
  source 1..80: mol_type = other DNA

SEQ ID NO: 202919 - DNA, 80 bp, synthetic construct; identical to SEQ ID NO: 18189
  source 1..80: mol_type = other DNA

SEQ ID NO: 202920 - DNA, 80 bp, synthetic construct; identical to SEQ ID NO: 18190
  source 1..80: mol_type = other DNA

SEQ ID NO: 202921 - DNA, 80 bp, synthetic construct; identical to SEQ ID NO: 18191
  source 1..80: mol_type = other DNA

SEQ ID NO: 202922 - DNA, 80 bp, synthetic construct; identical to SEQ ID NO: 18192
  source 1..80: mol_type = other DNA

SEQ ID NO: 202923 - DNA, 80 bp, synthetic construct; identical to SEQ ID NO: 18193
  source 1..80: mol_type = other DNA

SEQ ID NO: 202924 - DNA, 80 bp, synthetic construct; identical to SEQ ID NO: 18194
  source 1..80: mol_type = other DNA

SEQ ID NO: 202925 - DNA, 80 bp, synthetic construct; identical to SEQ ID NO: 18195
  source 1..80: mol_type = other DNA

SEQ ID NO: 202926 - DNA, 80 bp, synthetic construct; identical to SEQ ID NO: 18196
  source 1..80: mol_type = other DNA

SEQ ID NO: 202927 - DNA, 80 bp, synthetic construct; identical to SEQ ID NO: 18197
  source 1..80: mol_type = other DNA

SEQ ID NO: 202928 - DNA, 80 bp, synthetic construct; identical to SEQ ID NO: 18198
  source 1..80: mol_type = other DNA

SEQ ID NO: 202929 - DNA, 80 bp, synthetic construct; identical to SEQ ID NO: 18199
  source 1..80: mol_type = other DNA

SEQ ID NO: 202930 - DNA, 80 bp, synthetic construct; identical to SEQ ID NO: 18200
  source 1..80: mol_type = other DNA

SEQ ID NO: 202931 - DNA, 80 bp, synthetic construct; identical to SEQ ID NO: 18201
  source 1..80: mol_type = other DNA

SEQ ID NO: 202932 - DNA, 80 bp, synthetic construct; identical to SEQ ID NO: 18202
  source 1..80: mol_type = other DNA

SEQ ID NO: 202933 - DNA, 80 bp, synthetic construct; identical to SEQ ID NO: 18203
  source 1..80: mol_type = other DNA

SEQ ID NO: 202934 - DNA, 80 bp, synthetic construct; identical to SEQ ID NO: 18204
  source 1..80: mol_type = other DNA

SEQ ID NO: 202935 - DNA, 80 bp, synthetic construct; identical to SEQ ID NO: 18205
  source 1..80: mol_type = other DNA

SEQ ID NO: 202936 - DNA, 80 bp, synthetic construct; identical to SEQ ID NO: 18206
  source 1..80: mol_type = other DNA

SEQ ID NO: 202937 - DNA, 80 bp, synthetic construct; identical to SEQ ID NO: 18207
  source 1..80: mol_type = other DNA

SEQ ID NO: 202938 - DNA, 80 bp, synthetic construct; identical to SEQ ID NO: 18208
  source 1..80: mol_type = other DNA

SEQ ID NO: 202939 - DNA, 80 bp, synthetic construct; identical to SEQ ID NO: 18209
  source 1..80: mol_type = other DNA

SEQ ID NO: 202940 - DNA, 80 bp, synthetic construct; identical to SEQ ID NO: 18210
  source 1..80: mol_type = other DNA

SEQ ID NO: 202941 - DNA, 80 bp, synthetic construct; identical to SEQ ID NO: 18211
  source 1..80: mol_type = other DNA

SEQ ID NO: 202942 - DNA, 80 bp, synthetic construct; identical to SEQ ID NO: 18212
  source 1..80: mol_type = other DNA

SEQ ID NO: 202943 - DNA, 80 bp, synthetic construct; identical to SEQ ID NO: 18213
  source 1..80: mol_type = other DNA

SEQ ID NO: 202944 - DNA, 80 bp, synthetic construct; identical to SEQ ID NO: 18214
  source 1..80: mol_type = other DNA

SEQ ID NO: 202945 - DNA, 80 bp, synthetic construct; identical to SEQ ID NO: 18215
  source 1..80: mol_type = other DNA

SEQ ID NO: 202946 - DNA, 80 bp, synthetic construct; identical to SEQ ID NO: 18216
  source 1..80: mol_type = other DNA

SEQ ID NO: 202947 - DNA, 80 bp, synthetic construct; identical to SEQ ID NO: 18217
  source 1..80: mol_type = other DNA

SEQ ID NO: 202948 - DNA, 80 bp, synthetic construct; identical to SEQ ID NO: 18218
  source 1..80: mol_type = other DNA

SEQ ID NO: 202949 - DNA, 80 bp, synthetic construct; identical to SEQ ID NO: 18219
  source 1..80: mol_type = other DNA

SEQ ID NO: 202950 - DNA, 80 bp, synthetic construct; identical to SEQ ID NO: 18220
  source 1..80: mol_type = other DNA

SEQ ID NO: 202951 - DNA, 80 bp, synthetic construct; identical to SEQ ID NO: 18221
  source 1..80: mol_type = other DNA

SEQ ID NO: 202952 - DNA, 80 bp, synthetic construct; identical to SEQ ID NO: 18222
  source 1..80: mol_type = other DNA

SEQ ID NO: 202953 - DNA, 80 bp, synthetic construct; identical to SEQ ID NO: 18223
  source 1..80: mol_type = other DNA

SEQ ID NO: 202954 - DNA, 80 bp, synthetic construct; identical to SEQ ID NO: 18224
  source 1..80: mol_type = other DNA

SEQ ID NO: 202955 - DNA, 80 bp, synthetic construct; identical to SEQ ID NO: 18225
  source 1..80: mol_type = other DNA

SEQ ID NO: 202956 - DNA, 80 bp, synthetic construct; identical to SEQ ID NO: 18226
  source 1..80: mol_type = other DNA

SEQ ID NO: 202957 - DNA, 80 bp, synthetic construct; identical to SEQ ID NO: 18227
  source 1..80: mol_type = other DNA

SEQ ID NO: 202958 - DNA, 80 bp, synthetic construct; identical to SEQ ID NO: 18228
  source 1..80: mol_type = other DNA

SEQ ID NO: 202959 - DNA, 80 bp, synthetic construct; identical to SEQ ID NO: 18229
  source 1..80: mol_type = other DNA

SEQ ID NO: 202960 - DNA, 80 bp, synthetic construct; identical to SEQ ID NO: 18230
  source 1..80: mol_type = other DNA

SEQ ID NO: 202961 - DNA, 80 bp, synthetic construct; identical to SEQ ID NO: 18231
  source 1..80: mol_type = other DNA

SEQ ID NO: 202962 - DNA, 80 bp, synthetic construct; identical to SEQ ID NO: 18232
  source 1..80: mol_type = other DNA

SEQ ID NO: 202963 - DNA, 80 bp, synthetic construct; identical to SEQ ID NO: 18233
  source 1..80: mol_type = other DNA

SEQ ID NO: 202964 - DNA, 80 bp, synthetic construct; identical to SEQ ID NO: 18234
  source 1..80: mol_type = other DNA

SEQ ID NO: 202965 - DNA, 80 bp, synthetic construct; identical to SEQ ID NO: 18235
  source 1..80: mol_type = other DNA

SEQ ID NO: 202966 - DNA, 80 bp, synthetic construct; identical to SEQ ID NO: 18236
  source 1..80: mol_type = other DNA

SEQ ID NO: 202967 - DNA, 80 bp, synthetic construct; identical to SEQ ID NO: 18237
  source 1..80: mol_type = other DNA

SEQ ID NO: 202968 - DNA, 80 bp, synthetic construct; identical to SEQ ID NO: 18238
  source 1..80: mol_type = other DNA

SEQ ID NO: 202969 - DNA, 80 bp, synthetic construct; identical to SEQ ID NO: 18239
  source 1..80: mol_type = other DNA

SEQ ID NO: 202970 - DNA, 80 bp, synthetic construct; identical to SEQ ID NO: 18240
  source 1..80: mol_type = other DNA

SEQ ID NO: 202971 - DNA, 80 bp, synthetic construct; identical to SEQ ID NO: 18241
  source 1..80: mol_type = other DNA

SEQ ID NO: 202972 - DNA, 80 bp, synthetic construct; identical to SEQ ID NO: 18242
  source 1..80: mol_type = other DNA

SEQ ID NO: 202973 - DNA, 80 bp, synthetic construct; identical to SEQ ID NO: 18243
  source 1..80: mol_type = other DNA

SEQ ID NO: 202974 - DNA, 80 bp, synthetic construct; identical to SEQ ID NO: 18244
  source 1..80: mol_type = other DNA

SEQ ID NO: 202975 - DNA, 80 bp, synthetic construct; identical to SEQ ID NO: 18245
  source 1..80: mol_type = other DNA

SEQ ID NO: 202976 - DNA, 80 bp, synthetic construct; identical to SEQ ID NO: 18246
  source 1..80: mol_type = other DNA

SEQ ID NO: 202977 - DNA, 80 bp, synthetic construct; identical to SEQ ID NO: 18247
  source 1..80: mol_type = other DNA

SEQ ID NO: 202978 - DNA, 80 bp, synthetic construct; identical to SEQ ID NO: 18248
  source 1..80: mol_type = other DNA

SEQ ID NO: 202979 - DNA, 80 bp, synthetic construct; identical to SEQ ID NO: 18249
  source 1..80: mol_type = other DNA

SEQ ID NO: 202980 - DNA, 80 bp, synthetic construct; identical to SEQ ID NO: 18250
  source 1..80: mol_type = other DNA

SEQ ID NO: 202981 - DNA, 80 bp, synthetic construct; identical to SEQ ID NO: 18251
  source 1..80: mol_type = other DNA

SEQ ID NO: 202982 - DNA, 80 bp, synthetic construct; identical to SEQ ID NO: 18252
  source 1..80: mol_type = other DNA

SEQ ID NO: 202983 - DNA, 80 bp, synthetic construct; identical to SEQ ID NO: 18253
  source 1..80: mol_type = other DNA

SEQ ID NO: 202984 - DNA, 80 bp, synthetic construct; identical to SEQ ID NO: 18254
  source 1..80: mol_type = other DNA

SEQ ID NO: 202985 - DNA, 80 bp, synthetic construct; identical to SEQ ID NO: 18255
  source 1..80: mol_type = other DNA

SEQ ID NO: 202986 - DNA, 80 bp, synthetic construct; identical to SEQ ID NO: 18256
  source 1..80: mol_type = other DNA

SEQ ID NO: 202987 - DNA, 80 bp, synthetic construct; identical to SEQ ID NO: 18257
  source 1..80: mol_type = other DNA

SEQ ID NO: 202988 - DNA, 80 bp, synthetic construct; identical to SEQ ID NO: 18258
  source 1..80: mol_type = other DNA

SEQ ID NO: 202989 - DNA, 80 bp, synthetic construct; identical to SEQ ID NO: 18259
  source 1..80: mol_type = other DNA

SEQ ID NO: 202990 - DNA, 80 bp, synthetic construct; identical to SEQ ID NO: 18260
  source 1..80: mol_type = other DNA

SEQ ID NO: 202991 - DNA, 80 bp, synthetic construct; identical to SEQ ID NO: 18261
  source 1..80: mol_type = other DNA

SEQ ID NO: 202992 - DNA, 80 bp, synthetic construct; identical to SEQ ID NO: 18262
  source 1..80: mol_type = other DNA

SEQ ID NO: 202993 - DNA, 80 bp, synthetic construct; identical to SEQ ID NO: 18263
  source 1..80: mol_type = other DNA

SEQ ID NO: 202994 - DNA, 80 bp, synthetic construct; identical to SEQ ID NO: 18264
  source 1..80: mol_type = other DNA

SEQ ID NO: 202995 - DNA, 80 bp, synthetic construct; identical to SEQ ID NO: 18265
  source 1..80: mol_type = other DNA

SEQ ID NO: 202996 - DNA, 80 bp, synthetic construct; identical to SEQ ID NO: 18266
  source 1..80: mol_type = other DNA

SEQ ID NO: 202997 - DNA, 80 bp, synthetic construct; identical to SEQ ID NO: 18267
  source 1..80: mol_type = other DNA

SEQ ID NO: 202998 - DNA, 80 bp, synthetic construct; identical to SEQ ID NO: 18268
  source 1..80: mol_type = other DNA

SEQ ID NO: 202999 - DNA, 80 bp, synthetic construct; identical to SEQ ID NO: 18269
  source 1..80: mol_type = other DNA

SEQ ID NO: 203000 - DNA, 80 bp, synthetic construct; identical to SEQ ID NO: 18270
  source 1..80: mol_type = other DNA

SEQ ID NO: 203001 - DNA, 80 bp, synthetic construct; identical to SEQ ID NO: 18271
  source 1..80: mol_type = other DNA

SEQ ID NO: 203002 - DNA, 80 bp, synthetic construct; identical to SEQ ID NO: 18272
  source 1..80: mol_type = other DNA

SEQ ID NO: 203003 - DNA, 80 bp, synthetic construct; identical to SEQ ID NO: 18273
  source 1..80: mol_type = other DNA

SEQ ID NO: 203004 - DNA, 80 bp, synthetic construct; identical to SEQ ID NO: 18274
  source 1..80: mol_type = other DNA

SEQ ID NO: 203005 - DNA, 80 bp, synthetic construct; identical to SEQ ID NO: 18275
  source 1..80: mol_type = other DNA

SEQ ID NO: 203006 - DNA, 80 bp, synthetic construct; identical to SEQ ID NO: 18276
  source 1..80: mol_type = other DNA

SEQ ID NO: 203007 - DNA, 80 bp, synthetic construct; identical to SEQ ID NO: 18277
  source 1..80: mol_type = other DNA

SEQ ID NO: 203008 - DNA, 80 bp, synthetic construct; identical to SEQ ID NO: 18278
  source 1..80: mol_type = other DNA

SEQ ID NO: 203009 - DNA, 80 bp, synthetic construct; identical to SEQ ID NO: 18279
  source 1..80: mol_type = other DNA

SEQ ID NO: 203010 - DNA, 80 bp, synthetic construct; identical to SEQ ID NO: 18280
  source 1..80: mol_type = other DNA

SEQ ID NO: 203011 - DNA, 80 bp, synthetic construct; identical to SEQ ID NO: 18281
  source 1..80: mol_type = other DNA

SEQ ID NO: 203012 - DNA, 80 bp, synthetic construct; identical to SEQ ID NO: 18282
  source 1..80: mol_type = other DNA

SEQ ID NO: 203013 - DNA, 80 bp, synthetic construct; identical to SEQ ID NO: 18283
  source 1..80: mol_type = other DNA

SEQ ID NO: 203014 - DNA, 80 bp, synthetic construct; identical to SEQ ID NO: 18284
  source 1..80: mol_type = other DNA

SEQ ID NO: 203015 - DNA, 80 bp, synthetic construct; identical to SEQ ID NO: 18285
  source 1..80: mol_type = other DNA

SEQ ID NO: 203016 - DNA, 80 bp, synthetic construct; identical to SEQ ID NO: 18286
  source 1..80: mol_type = other DNA

SEQ ID NO: 203017 - DNA, 80 bp, synthetic construct; identical to SEQ ID NO: 18287
  source 1..80: mol_type = other DNA

SEQ ID NO: 203018 - DNA, 80 bp, synthetic construct; identical to SEQ ID NO: 18288
  source 1..80: mol_type = other DNA

SEQ ID NO: 203019 - DNA, 80 bp, synthetic construct; identical to SEQ ID NO: 18289
  source 1..80: mol_type = other DNA

SEQ ID NO: 203020 - DNA, 80 bp, synthetic construct; identical to SEQ ID NO: 18290
  source 1..80: mol_type = other DNA

SEQ ID NO: 203021 - DNA, 80 bp, synthetic construct; identical to SEQ ID NO: 18291
  source 1..80: mol_type = other DNA

SEQ ID NO: 203022 - DNA, 80 bp, synthetic construct; identical to SEQ ID NO: 18292
  source 1..80: mol_type = other DNA

SEQ ID NO: 203023 - DNA, 80 bp, synthetic construct; identical to SEQ ID NO: 18293
  source 1..80: mol_type = other DNA

SEQ ID NO: 203024 - DNA, 80 bp, synthetic construct; identical to SEQ ID NO: 18294
  source 1..80: mol_type = other DNA

SEQ ID NO: 203025 - DNA, 80 bp, synthetic construct; identical to SEQ ID NO: 18295
  source 1..80: mol_type = other DNA

SEQ ID NO: 203026 - DNA, 80 bp, synthetic construct; identical to SEQ ID NO: 18296
  source 1..80: mol_type = other DNA

SEQ ID NO: 203027 - DNA, 80 bp, synthetic construct; identical to SEQ ID NO: 18297
  source 1..80: mol_type = other DNA

SEQ ID NO: 203028 - DNA, 80 bp, synthetic construct; identical to SEQ ID NO: 18298
  source 1..80: mol_type = other DNA

SEQ ID NO: 203029 - DNA, 80 bp, synthetic construct; identical to SEQ ID NO: 18299
  source 1..80: mol_type = other DNA

SEQ ID NO: 203030 - DNA, 80 bp, synthetic construct; identical to SEQ ID NO: 18300
  source 1..80: mol_type = other DNA

SEQ ID NO: 203031 - DNA, 80 bp, synthetic construct; identical to SEQ ID NO: 18301
  source 1..80: mol_type = other DNA

SEQ ID NO: 203032 - DNA, 80 bp, synthetic construct; identical to SEQ ID NO: 18302
  source 1..80: mol_type = other DNA

SEQ ID NO: 203033 - DNA, 80 bp, synthetic construct; identical to SEQ ID NO: 18303
  source 1..80: mol_type = other DNA

SEQ ID NO: 203034 - DNA, 80 bp, synthetic construct; identical to SEQ ID NO: 18304
  source 1..80: mol_type = other DNA

SEQ ID NO: 203035 - DNA, 80 bp, synthetic construct; identical to SEQ ID NO: 18305
  source 1..80: mol_type = other DNA

SEQ ID NO: 203036 - DNA, 80 bp, synthetic construct; identical to SEQ ID NO: 18306
  source 1..80: mol_type = other DNA

SEQ ID NO: 203037 - DNA, 80 bp, synthetic construct; identical to SEQ ID NO: 18307
  source 1..80: mol_type = other DNA

SEQ ID NO: 203038 - DNA, 80 bp, synthetic construct; identical to SEQ ID NO: 18308
  source 1..80: mol_type = other DNA

SEQ ID NO: 203039 - DNA, 80 bp, synthetic construct; identical to SEQ ID NO: 18309
  source 1..80: mol_type = other DNA

SEQ ID NO: 203040 - DNA, 80 bp, synthetic construct; identical to SEQ ID NO: 18310
  source 1..80: mol_type = other DNA

SEQ ID NO: 203041 - DNA, 80 bp, synthetic construct; identical to SEQ ID NO: 18311
  source 1..80: mol_type = other DNA

SEQ ID NO: 203042 - DNA, 80 bp, synthetic construct; identical to SEQ ID NO: 18312
  source 1..80: mol_type = other DNA

SEQ ID NO: 203043 - DNA, 80 bp, synthetic construct; identical to SEQ ID NO: 18313
  source 1..80: mol_type = other DNA

SEQ ID NO: 203044 - DNA, 80 bp, synthetic construct; identical to SEQ ID NO: 18314
  source 1..80: mol_type = other DNA

SEQ ID NO: 203045 - DNA, 80 bp, synthetic construct; identical to SEQ ID NO: 18315
  source 1..80: mol_type = other DNA

SEQ ID NO: 203046 - DNA, 80 bp, synthetic construct; identical to SEQ ID NO: 18316
  source 1..80: mol_type = other DNA

SEQ ID NO: 203047 - DNA, 80 bp, synthetic construct; identical to SEQ ID NO: 18317
  source 1..80: mol_type = other DNA

SEQ ID NO: 203048 - DNA, 80 bp, synthetic construct; identical to SEQ ID NO: 18318
  source 1..80: mol_type = other DNA

SEQ ID NO: 203049 - DNA, 80 bp, synthetic construct; identical to SEQ ID NO: 18319
  source 1..80: mol_type = other DNA

SEQ ID NO: 203050 - DNA, 80 bp, synthetic construct; identical to SEQ ID NO: 18320
  source 1..80: mol_type = other DNA

SEQ ID NO: 203051 - DNA, 80 bp, synthetic construct; identical to SEQ ID NO: 18321
  source 1..80: mol_type = other DNA

SEQ ID NO: 203052 - DNA, 80 bp, synthetic construct; identical to SEQ ID NO: 18322
  source 1..80: mol_type = other DNA

SEQ ID NO: 203053 - DNA, 80 bp, synthetic construct; identical to SEQ ID NO: 18323
  source 1..80: mol_type = other DNA

SEQ ID NO: 203054 - DNA, 80 bp, synthetic construct; identical to SEQ ID NO: 18324
  source 1..80: mol_type = other DNA

SEQ ID NO: 203055 - DNA, 80 bp, synthetic construct; identical to SEQ ID NO: 18325
  source 1..80: mol_type = other DNA

SEQ ID NO: 203056 - DNA, 80 bp, synthetic construct; identical to SEQ ID NO: 18326
  source 1..80: mol_type = other DNA

SEQ ID NO: 203057 - DNA, 80 bp, synthetic construct; identical to SEQ ID NO: 18327
  source 1..80: mol_type = other DNA

SEQ ID NO: 203058 - DNA, 80 bp, synthetic construct; identical to SEQ ID NO: 18328
  source 1..80: mol_type = other DNA

SEQ ID NO: 203059 - DNA, 80 bp, synthetic construct; identical to SEQ ID NO: 18329
  source 1..80: mol_type = other DNA

SEQ ID NO: 203060 - DNA, 80 bp, synthetic construct; identical to SEQ ID NO: 18330
  source 1..80: mol_type = other DNA

SEQ ID NO: 203061 - DNA, 80 bp, synthetic construct; identical to SEQ ID NO: 18331
  source 1..80: mol_type = other DNA

SEQ ID NO: 203062 - DNA, 80 bp, synthetic construct; identical to SEQ ID NO: 18332
  source 1..80: mol_type = other DNA

SEQ ID NO: 203063 - DNA, 80 bp, synthetic construct; identical to SEQ ID NO: 18333
  source 1..80: mol_type = other DNA

SEQ ID NO: 203064 - DNA, 80 bp, synthetic construct; identical to SEQ ID NO: 18334
  source 1..80: mol_type = other DNA

SEQ ID NO: 203065 - DNA, 80 bp, synthetic construct; identical to SEQ ID NO: 18335
  source 1..80: mol_type = other DNA

SEQ ID NO: 203066 - DNA, 80 bp, synthetic construct; identical to SEQ ID NO: 18336
  source 1..80: mol_type = other DNA

SEQ ID NO: 203067 - DNA, 80 bp, synthetic construct; identical to SEQ ID NO: 18337
  source 1..80: mol_type = other DNA

SEQ ID NO: 203068 - DNA, 80 bp, synthetic construct; identical to SEQ ID NO: 18338
  source 1..80: mol_type = other DNA

SEQ ID NO: 203069 - DNA, 80 bp, synthetic construct; identical to SEQ ID NO: 18339
  source 1..80: mol_type = other DNA

SEQ ID NO: 203070 - DNA, 80 bp, synthetic construct; identical to SEQ ID NO: 18340
  source 1..80: mol_type = other DNA

SEQ ID NO: 203071 - DNA, 80 bp, synthetic construct; identical to SEQ ID NO: 18341
  source 1..80: mol_type = other DNA

SEQ ID NO: 203072 - DNA, 80 bp, synthetic construct; identical to SEQ ID NO: 18342
  source 1..80: mol_type = other DNA

SEQ ID NO: 203073 - DNA, 80 bp, synthetic construct; identical to SEQ ID NO: 18343
  source 1..80: mol_type = other DNA

SEQ ID NO: 203074 - DNA, 80 bp, synthetic construct; identical to SEQ ID NO: 18344
  source 1..80: mol_type = other DNA

SEQ ID NO: 203075 - DNA, 80 bp, synthetic construct; identical to SEQ ID NO: 18345
  source 1..80: mol_type = other DNA

SEQ ID NO: 203076 - DNA, 80 bp, synthetic construct; identical to SEQ ID NO: 18346
  source 1..80: mol_type = other DNA

SEQ ID NO: 203077 - DNA, 80 bp, synthetic construct; identical to SEQ ID NO: 18347
  source 1..80: mol_type = other DNA

SEQ ID NO: 203078 - DNA, 80 bp, synthetic construct; identical to SEQ ID NO: 18348
  source 1..80: mol_type = other DNA

SEQ ID NO: 203079 - DNA, 80 bp, synthetic construct; identical to SEQ ID NO: 18349
  source 1..80: mol_type = other DNA

SEQ ID NO: 203080 - DNA, 80 bp, synthetic construct; identical to SEQ ID NO: 18350
  source 1..80: mol_type = other DNA

SEQ ID NO: 203081 - DNA, 80 bp, synthetic construct; identical to SEQ ID NO: 18351
  source 1..80: mol_type = other DNA

SEQ ID NO: 203082 - DNA, 80 bp, synthetic construct; identical to SEQ ID NO: 18352
  source 1..80: mol_type = other DNA

SEQ ID NO: 203083 - DNA, 80 bp, synthetic construct; identical to SEQ ID NO: 18353
  source 1..80: mol_type = other DNA

SEQ ID NO: 203084 - DNA, 80 bp, synthetic construct; identical to SEQ ID NO: 18354
  source 1..80: mol_type = other DNA

SEQ ID NO: 203085 - DNA, 80 bp, synthetic construct; identical to SEQ ID NO: 18355
  source 1..80: mol_type = other DNA

SEQ ID NO: 203086 - DNA, 80 bp, synthetic construct; identical to SEQ ID NO: 18356
  source 1..80: mol_type = other DNA

SEQ ID NO: 203087 - DNA, 80 bp, synthetic construct; identical to SEQ ID NO: 18357
  source 1..80: mol_type = other DNA

SEQ ID NO: 203088 - DNA, 80 bp, synthetic construct; identical to SEQ ID NO: 18358
  source 1..80: mol_type = other DNA

SEQ ID NO: 203089 - DNA, 80 bp, synthetic construct; identical to SEQ ID NO: 18359
  source 1..80: mol_type = other DNA

SEQ ID NO: 203090 - DNA, 80 bp, synthetic construct; identical to SEQ ID NO: 18360
  source 1..80: mol_type = other DNA

SEQ ID NO: 203091 - DNA, 80 bp, synthetic construct; identical to SEQ ID NO: 18361
  source 1..80: mol_type = other DNA

SEQ ID NO: 203092 - DNA, 80 bp, synthetic construct; identical to SEQ ID NO: 18362
  source 1..80: mol_type = other DNA

SEQ ID NO: 203093 - DNA, 80 bp, synthetic construct; identical to SEQ ID NO: 18363
  source 1..80: mol_type = other DNA

SEQ ID NO: 203094 - DNA, 80 bp, synthetic construct; identical to SEQ ID NO: 18364
  source 1..80: mol_type = other DNA

SEQ ID NO: 203095 - DNA, 80 bp, synthetic construct; identical to SEQ ID NO: 18365
  source 1..80: mol_type = other DNA

SEQ ID NO: 203096 - DNA, 80 bp, synthetic construct; identical to SEQ ID NO: 18366
  source 1..80: mol_type = other DNA

SEQ ID NO: 203097 - DNA, 80 bp, synthetic construct; identical to SEQ ID NO: 18367
  source 1..80: mol_type = other DNA

SEQ ID NO: 203098 - DNA, 80 bp, synthetic construct; identical to SEQ ID NO: 18368
  source 1..80: mol_type = other DNA

SEQ ID NO: 203099 - DNA, 80 bp, synthetic construct; identical to SEQ ID NO: 18369
  source 1..80: mol_type = other DNA

SEQ ID NO: 203100 - DNA, 80 bp, synthetic construct; identical to SEQ ID NO: 18370
  source 1..80: mol_type = other DNA

SEQ ID NO: 203101 - DNA, 80 bp, synthetic construct; identical to SEQ ID NO: 18371
  source 1..80: mol_type = other DNA

SEQ ID NO: 203102 - DNA, 80 bp, synthetic construct; identical to SEQ ID NO: 18372
  source 1..80: mol_type = other DNA

SEQ ID NO: 203103 - DNA, 80 bp, synthetic construct; identical to SEQ ID NO: 18373
  source 1..80: mol_type = other DNA

SEQ ID NO: 203104 - DNA, 80 bp, synthetic construct; identical to SEQ ID NO: 18374
  source 1..80: mol_type = other DNA

SEQ ID NO: 203105 - DNA, 80 bp, synthetic construct; identical to SEQ ID NO: 18375
  source 1..80: mol_type = other DNA

SEQ ID NO: 203106 - DNA, 80 bp, synthetic construct; identical to SEQ ID NO: 18376
  source 1..80: mol_type = other DNA

SEQ ID NO: 203107 - DNA, 80 bp, synthetic construct; identical to SEQ ID NO: 18377
  source 1..80: mol_type = other DNA

SEQ ID NO: 203108 - DNA, 80 bp, synthetic construct; identical to SEQ ID NO: 18378
  source 1..80: mol_type = other DNA

SEQ ID NO: 203109 - DNA, 80 bp, synthetic construct; identical to SEQ ID NO: 18379
  source 1..80: mol_type = other DNA

SEQ ID NO: 203110 - DNA, 80 bp, synthetic construct; identical to SEQ ID NO: 18380
  source 1..80: mol_type = other DNA

SEQ ID NO: 203111 - DNA, 80 bp, synthetic construct; identical to SEQ ID NO: 18381
  source 1..80: mol_type = other DNA

SEQ ID NO: 203112 - DNA, 80 bp, synthetic construct; identical to SEQ ID NO: 18382
  source 1..80: mol_type = other DNA

SEQ ID NO: 203113 - DNA, 80 bp, synthetic construct; identical to SEQ ID NO: 18383
  source 1..80: mol_type = other DNA

SEQ ID NO: 203114 - DNA, 80 bp, synthetic construct; identical to SEQ ID NO: 18384
  source 1..80: mol_type = other DNA

SEQ ID NO: 203115 - DNA, 80 bp, synthetic construct; identical to SEQ ID NO: 18385
  source 1..80: mol_type = other DNA

SEQ ID NO: 203116 - DNA, 80 bp, synthetic construct; identical to SEQ ID NO: 18386
  source 1..80: mol_type = other DNA

SEQ ID NO: 203117 - DNA, 80 bp, synthetic construct; identical to SEQ ID NO: 18387
  source 1..80: mol_type = other DNA

SEQ ID NO: 203118 - DNA, 80 bp, synthetic construct; identical to SEQ ID NO: 18388
  source 1..80: mol_type = other DNA

SEQ ID NO: 203119 - DNA, 80 bp, synthetic construct; identical to SEQ ID NO: 18389
  source 1..80: mol_type = other DNA

SEQ ID NO: 203120 - DNA, 80 bp, synthetic construct; identical to SEQ ID NO: 18390
  source 1..80: mol_type = other DNA

SEQ ID NO: 203121 - DNA, 80 bp, synthetic construct; identical to SEQ ID NO: 18391
  source 1..80: mol_type = other DNA

SEQ ID NO: 203122 - DNA, 80 bp, synthetic construct; identical to SEQ ID NO: 18392
  source 1..80: mol_type = other DNA

SEQ ID NO: 203123 - DNA, 80 bp, synthetic construct; identical to SEQ ID NO: 18393
  source 1..80: mol_type = other DNA

SEQ ID NO: 203124 - DNA, 80 bp, synthetic construct; identical to SEQ ID NO: 18394
  source 1..80: mol_type = other DNA

SEQ ID NO: 203125 - DNA, 80 bp, synthetic construct; identical to SEQ ID NO: 18395
  source 1..80: mol_type = other DNA

SEQ ID NO: 203126 - DNA, 80 bp, synthetic construct; identical to SEQ ID NO: 18396
  source 1..80: mol_type = other DNA

SEQ ID NO: 203127 - DNA, 80 bp, synthetic construct; identical to SEQ ID NO: 18397
  source 1..80: mol_type = other DNA

SEQ ID NO: 203128 - DNA, 80 bp, synthetic construct; identical to SEQ ID NO: 18398
  source 1..80: mol_type = other DNA

SEQ ID NO: 203129 - DNA, 80 bp, synthetic construct; identical to SEQ ID NO: 18399
  source 1..80: mol_type = other DNA

SEQ ID NO: 203130 - DNA, 80 bp, synthetic construct; identical to SEQ ID NO: 18400
  source 1..80: mol_type = other DNA

SEQ ID NO: 203131 - DNA, 80 bp, synthetic construct; identical to SEQ ID NO: 18401
  source 1..80: mol_type = other DNA

SEQ ID NO: 203132 - DNA, 80 bp, synthetic construct; identical to SEQ ID NO: 18402
  source 1..80: mol_type = other DNA

SEQ ID NO: 203133 - DNA, 80 bp, synthetic construct; identical to SEQ ID NO: 18403
  source 1..80: mol_type = other DNA

SEQ ID NO: 203134 - DNA, 80 bp, synthetic construct; identical to SEQ ID NO: 18404
  source 1..80: mol_type = other DNA

SEQ ID NO: 203135 - DNA, 80 bp, synthetic construct; identical to SEQ ID NO: 18405
  source 1..80: mol_type = other DNA

SEQ ID NO: 203136 - DNA, 80 bp, synthetic construct; identical to SEQ ID NO: 18406
  source 1..80: mol_type = other DNA

SEQ ID NO: 203137 - DNA, 80 bp, synthetic construct; identical to SEQ ID NO: 18407
  source 1..80: mol_type = other DNA

SEQ ID NO: 203138 - DNA, 80 bp, synthetic construct; identical to SEQ ID NO: 18408
  source 1..80: mol_type = other DNA

SEQ ID NO: 203139 - DNA, 80 bp, synthetic construct; identical to SEQ ID NO: 18409
  source 1..80: mol_type = other DNA

SEQ ID NO: 203140 - DNA, 80 bp, synthetic construct; identical to SEQ ID NO: 18410
  source 1..80: mol_type = other DNA

SEQ ID NO: 203141 - DNA, 80 bp, synthetic construct; identical to SEQ ID NO: 18411
  source 1..80: mol_type = other DNA

SEQ ID NO: 203142 - DNA, 80 bp, synthetic construct; identical to SEQ ID NO: 18412
  source 1..80: mol_type = other DNA

SEQ ID NO: 203143 - DNA, 80 bp, synthetic construct; identical to SEQ ID NO: 18413
  source 1..80: mol_type = other DNA

SEQ ID NO: 203144 - DNA, 80 bp, synthetic construct; identical to SEQ ID NO: 18414
  source 1..80: mol_type = other DNA

SEQ ID NO: 203145 - DNA, 80 bp, synthetic construct; identical to SEQ ID NO: 18415
  source 1..80: mol_type = other DNA

SEQ ID NO: 203146 - DNA, 80 bp, synthetic construct; identical to SEQ ID NO: 18416
  source 1..80: mol_type = other DNA

SEQ ID NO: 203147 - DNA, 80 bp, synthetic construct; identical to SEQ ID NO: 18417
  source 1..80: mol_type = other DNA

SEQ ID NO: 203148 - DNA, 80 bp, synthetic construct; identical to SEQ ID NO: 18418
  source 1..80: mol_type = other DNA

SEQ ID NO: 203149 - DNA, 80 bp, synthetic construct; identical to SEQ ID NO: 18419
  source 1..80: mol_type = other DNA

SEQ ID NO: 203150 - DNA, 80 bp, synthetic construct; identical to SEQ ID NO: 18420
  source 1..80: mol_type = other DNA

SEQ ID NO: 203151 - DNA, 80 bp, synthetic construct; identical to SEQ ID NO: 18421
  source 1..80: mol_type = other DNA

SEQ ID NO: 203152 - DNA, 80 bp, synthetic construct; identical to SEQ ID NO: 18422
  source 1..80: mol_type = other DNA

SEQ ID NO: 203153 - DNA, 80 bp, synthetic construct; identical to SEQ ID NO: 18423
  source 1..80: mol_type = other DNA

SEQ ID NO: 203154 - DNA, 80 bp, synthetic construct; identical to SEQ ID NO: 18424
  source 1..80: mol_type = other DNA

SEQ ID NO: 203155 - DNA, 80 bp, synthetic construct; identical to SEQ ID NO: 18425
  source 1..80: mol_type = other DNA

SEQ ID NO: 203156 - DNA, 80 bp, synthetic construct; identical to SEQ ID NO: 18426
  source 1..80: mol_type = other DNA

SEQ ID NO: 203157 - DNA, 80 bp, synthetic construct; identical to SEQ ID NO: 18427
  source 1..80: mol_type = other DNA

SEQ ID NO: 203158 - DNA, 80 bp, synthetic construct; identical to SEQ ID NO: 18428
  source 1..80: mol_type = other DNA

SEQ ID NO: 203159 - DNA, 80 bp, synthetic construct; identical to SEQ ID NO: 18429
  source 1..80: mol_type = other DNA

SEQ ID NO: 203160 - DNA, 80 bp, synthetic construct; identical to SEQ ID NO: 18430
  source 1..80: mol_type = other DNA

SEQ ID NO: 203161 - DNA, 80 bp, synthetic construct; identical to SEQ ID NO: 18431
  source 1..80: mol_type = other DNA

SEQ ID NO: 203162 - DNA, 80 bp, synthetic construct; identical to SEQ ID NO: 18432
  source 1..80: mol_type = other DNA

SEQ ID NO: 203163 - DNA, 80 bp, synthetic construct; identical to SEQ ID NO: 18433
  source 1..80: mol_type = other DNA

SEQ ID NO: 203164 - DNA, 80 bp, synthetic construct; identical to SEQ ID NO: 18434
  source 1..80: mol_type = other DNA

SEQ ID NO: 203165 - DNA, 80 bp, synthetic construct; identical to SEQ ID NO: 18435
  source 1..80: mol_type = other DNA

SEQ ID NO: 203166 - DNA, 80 bp, synthetic construct; identical to SEQ ID NO: 18436
  source 1..80: mol_type = other DNA

SEQ ID NO: 203167 - DNA, 80 bp, synthetic construct; identical to SEQ ID NO: 18437
  source 1..80: mol_type = other DNA

SEQ ID NO: 203168 - DNA, 80 bp, synthetic construct; identical to SEQ ID NO: 18438
  source 1..80: mol_type = other DNA

SEQ ID NO: 203169 - DNA, 80 bp, synthetic construct; identical to SEQ ID NO: 18439
  source 1..80: mol_type = other DNA

SEQ ID NO: 203170 - DNA, 80 bp, synthetic construct; identical to SEQ ID NO: 18440
  source 1..80: mol_type = other DNA

SEQ ID NO: 203171 - DNA, 80 bp, synthetic construct; identical to SEQ ID NO: 18441
  source 1..80: mol_type = other DNA

SEQ ID NO: 203172 - DNA, 80 bp, synthetic construct; identical to SEQ ID NO: 18442
  source 1..80: mol_type = other DNA

SEQ ID NO: 203173 - DNA, 80 bp, synthetic construct; identical to SEQ ID NO: 18443
  source 1..80: mol_type = other DNA

SEQ ID NO: 203174 - DNA, 80 bp, synthetic construct; identical to SEQ ID NO: 18444
  source 1..80: mol_type = other DNA

SEQ ID NO: 203175 - DNA, 80 bp, synthetic construct; identical to SEQ ID NO: 18445
  source 1..80: mol_type = other DNA

SEQ ID NO: 203176 - DNA, 80 bp, synthetic construct; identical to SEQ ID NO: 18446
  source 1..80: mol_type = other DNA

SEQ ID NO: 203177 - DNA, 80 bp, synthetic construct; identical to SEQ ID NO: 18447
  source 1..80: mol_type = other DNA

SEQ ID NO: 203178 - DNA, 80 bp, synthetic construct; identical to SEQ ID NO: 18448
  source 1..80: mol_type = other DNA

SEQ ID NO: 203179 - DNA, 80 bp, synthetic construct; identical to SEQ ID NO: 18449
  source 1..80: mol_type = other DNA

SEQ ID NO: 203180 - DNA, 80 bp, synthetic construct; identical to SEQ ID NO: 18450
  source 1..80: mol_type = other DNA

SEQ ID NO: 203181 - DNA, 80 bp, synthetic construct; identical to SEQ ID NO: 18451
  source 1..80: mol_type = other DNA

SEQ ID NO: 203182 - DNA, 80 bp, synthetic construct; identical to SEQ ID NO: 18452
  source 1..80: mol_type = other DNA

SEQ ID NO: 203183 - DNA, 80 bp, synthetic construct; identical to SEQ ID NO: 18453
  source 1..80: mol_type = other DNA

SEQ ID NO: 203184 - DNA, 80 bp, synthetic construct; identical to SEQ ID NO: 18454
  source 1..80: mol_type = other DNA

SEQ ID NO: 203185 - DNA, 80 bp, synthetic construct; identical to SEQ ID NO: 18455
  source 1..80: mol_type = other DNA

SEQ ID NO: 203186 - DNA, 80 bp, synthetic construct; identical to SEQ ID NO: 18456
  source 1..80: mol_type = other DNA

SEQ ID NO: 203187 - DNA, 80 bp, synthetic construct; identical to SEQ ID NO: 18457
  source 1..80: mol_type = other DNA

SEQ ID NO: 203188 - DNA, 80 bp, synthetic construct; identical to SEQ ID NO: 18458
  source 1..80: mol_type = other DNA

SEQ ID NO: 203189 - DNA, 80 bp, synthetic construct; identical to SEQ ID NO: 18459
  source 1..80: mol_type = other DNA

SEQ ID NO: 203190 - DNA, 80 bp, synthetic construct; identical to SEQ ID NO: 18460
  source 1..80: mol_type = other DNA

SEQ ID NO: 203191 - DNA, 80 bp, synthetic construct; identical to SEQ ID NO: 18461
  source 1..80: mol_type = other DNA

SEQ ID NO: 203192 - DNA, 80 bp, synthetic construct; identical to SEQ ID NO: 18462
  source 1..80: mol_type = other DNA

SEQ ID NO: 203193 - DNA, 80 bp, synthetic construct; identical to SEQ ID NO: 18463
  source 1..80: mol_type = other DNA

SEQ ID NO: 203194 - DNA, 80 bp, synthetic construct; identical to SEQ ID NO: 18464
  source 1..80: mol_type = other DNA

SEQ ID NO: 203195 - DNA, 80 bp, synthetic construct; identical to SEQ ID NO: 18465
  source 1..80: mol_type = other DNA

SEQ ID NO: 203196 - DNA, 80 bp, synthetic construct; identical to SEQ ID NO: 18466
  source 1..80: mol_type = other DNA

SEQ ID NO: 203197 - DNA, 80 bp, synthetic construct; identical to SEQ ID NO: 18467
  source 1..80: mol_type = other DNA

SEQ ID NO: 203198 - DNA, 80 bp, synthetic construct; identical to SEQ ID NO: 18468
  source 1..80: mol_type = other DNA

SEQ ID NO: 203199 - DNA, 80 bp, synthetic construct; identical to SEQ ID NO: 18469
  source 1..80: mol_type = other DNA

SEQ ID NO: 203200 - DNA, 80 bp, synthetic construct; identical to SEQ ID NO: 18470
  source 1..80: mol_type = other DNA

SEQ ID NO: 203201 - DNA, 80 bp, synthetic construct; identical to SEQ ID NO: 18471
  source 1..80: mol_type = other DNA

SEQ ID NO: 203202 - DNA, 80 bp, synthetic construct; identical to SEQ ID NO: 18472
  source 1..80: mol_type = other DNA

SEQ ID NO: 203203 - DNA, 80 bp, synthetic construct; identical to SEQ ID NO: 18473
  source 1..80: mol_type = other DNA

SEQ ID NO: 203204 - DNA, 80 bp, synthetic construct; identical to SEQ ID NO: 18474
  source 1..80: mol_type = other DNA

SEQ ID NO: 203205 - DNA, 80 bp, synthetic construct; identical to SEQ ID NO: 18475
  source 1..80: mol_type = other DNA

SEQ ID NO: 203206 - DNA, 80 bp, synthetic construct; identical to SEQ ID NO: 18476
  source 1..80: mol_type = other DNA

SEQ ID NO: 203207 - DNA, 80 bp, synthetic construct; identical to SEQ ID NO: 18477
  source 1..80: mol_type = other DNA

SEQ ID NO: 203208 - DNA, 80 bp, synthetic construct; identical to SEQ ID NO: 18478
  source 1..80: mol_type = other DNA

SEQ ID NO: 203209 - DNA, 80 bp, synthetic construct; identical to SEQ ID NO: 18479
  source 1..80: mol_type = other DNA

SEQ ID NO: 203210 - DNA, 80 bp, synthetic construct; identical to SEQ ID NO: 18480
  source 1..80: mol_type = other DNA

SEQ ID NO: 203211 - DNA, 80 bp, synthetic construct; identical to SEQ ID NO: 18481
  source 1..80: mol_type = other DNA

SEQ ID NO: 203212 - DNA, 80 bp, synthetic construct; identical to SEQ ID NO: 18482
  source 1..80: mol_type = other DNA

SEQ ID NO: 203213 - DNA, 80 bp, synthetic construct; identical to SEQ ID NO: 18483
  source 1..80: mol_type = other DNA

SEQ ID NO: 203214 - DNA, 80 bp, synthetic construct; identical to SEQ ID NO: 18484
  source 1..80: mol_type = other DNA

SEQ ID NO: 203215 - DNA, 80 bp, synthetic construct; identical to SEQ ID NO: 18485
  source 1..80: mol_type = other DNA

SEQ ID NO: 203216 - DNA, 80 bp, synthetic construct; identical to SEQ ID NO: 18486
  source 1..80: mol_type = other DNA

SEQ ID NO: 203217 - DNA, 80 bp, synthetic construct; identical to SEQ ID NO: 18487
  source 1..80: mol_type = other DNA

SEQ ID NO: 203218 - DNA, 80 bp, synthetic construct; identical to SEQ ID NO: 18488
  source 1..80: mol_type = other DNA

SEQ ID NO: 203219 - DNA, 80 bp, synthetic construct; identical to SEQ ID NO: 18489
  source 1..80: mol_type = other DNA

SEQ ID NO: 203220 - DNA, 80 bp, synthetic construct; identical to SEQ ID NO: 18490
  source 1..80: mol_type = other DNA

SEQ ID NO: 203221 - DNA, 80 bp, synthetic construct; identical to SEQ ID NO: 18491
  source 1..80: mol_type = other DNA

SEQ ID NO: 203222 - DNA, 80 bp, synthetic construct; identical to SEQ ID NO: 18492
  source 1..80: mol_type = other DNA

SEQ ID NO: 203223 - DNA, 80 bp, synthetic construct; identical to SEQ ID NO: 18493
  source 1..80: mol_type = other DNA

SEQ ID NO: 203224 - DNA, 80 bp, synthetic construct; identical to SEQ ID NO: 18494
  source 1..80: mol_type = other DNA

SEQ ID NO: 203225 - DNA, 80 bp, synthetic construct; identical to SEQ ID NO: 18495
  source 1..80: mol_type = other DNA

SEQ ID NO: 203226 - DNA, 80 bp, synthetic construct; identical to SEQ ID NO: 18496
  source 1..80: mol_type = other DNA

SEQ ID NO: 203227 - DNA, 80 bp, synthetic construct; identical to SEQ ID NO: 18497
  source 1..80: mol_type = other DNA

SEQ ID NO: 203228 - DNA, 80 bp, synthetic construct; identical to SEQ ID NO: 18498
  source 1..80: mol_type = other DNA

SEQ ID NO: 203229 - DNA, 80 bp, synthetic construct; identical to SEQ ID NO: 18499
  source 1..80: mol_type = other DNA

SEQ ID NO: 203230 - DNA, 80 bp, synthetic construct; identical to SEQ ID NO: 18500
  source 1..80: mol_type = other DNA

SEQ ID NO: 203231 - DNA, 80 bp, synthetic construct; identical to SEQ ID NO: 18501
  source 1..80: mol_type = other DNA

SEQ ID NO: 203232 - DNA, 80 bp, synthetic construct; identical to SEQ ID NO: 18502
  source 1..80: mol_type = other DNA

SEQ ID NO: 203233 - DNA, 80 bp, synthetic construct; identical to SEQ ID NO: 18503
  source 1..80: mol_type = other DNA

SEQ ID NO: 203234 - DNA, 80 bp, synthetic construct; identical to SEQ ID NO: 18504
  source 1..80: mol_type = other DNA

SEQ ID NO: 203235 - DNA, 80 bp, synthetic construct; identical to SEQ ID NO: 18505
  source 1..80: mol_type = other DNA

SEQ ID NO: 203236 - DNA, 80 bp, synthetic construct; identical to SEQ ID NO: 18506
  source 1..80: mol_type = other DNA

SEQ ID NO: 203237 - DNA, 80 bp, synthetic construct; identical to SEQ ID NO: 18507
  source 1..80: mol_type = other DNA

SEQ ID NO: 203238 - DNA, 80 bp, synthetic construct; identical to SEQ ID NO: 18508
  source 1..80: mol_type = other DNA

SEQ ID NO: 203239 - DNA, 80 bp, synthetic construct; identical to SEQ ID NO: 18509
  source 1..80: mol_type = other DNA

SEQ ID NO: 203240 - DNA, 80 bp, synthetic construct; identical to SEQ ID NO: 18510
  source 1..80: mol_type = other DNA

SEQ ID NO: 203241 - DNA, 80 bp, synthetic construct; identical to SEQ ID NO: 18511
  source 1..80: mol_type = other DNA

SEQ ID NO: 203242 - DNA, 80 bp, synthetic construct; identical to SEQ ID NO: 18512
  source 1..80: mol_type = other DNA

SEQ ID NO: 203243 - DNA, 80 bp, synthetic construct; identical to SEQ ID NO: 18513
  source 1..80: mol_type = other DNA

SEQ ID NO: 203244 - DNA, 80 bp, synthetic construct; identical to SEQ ID NO: 18514
  source 1..80: mol_type = other DNA

SEQ ID NO: 203245 - DNA, 80 bp, synthetic construct; identical to SEQ ID NO: 18515
  source 1..80: mol_type = other DNA

SEQ ID NO: 203246 - DNA, 80 bp, synthetic construct; identical to SEQ ID NO: 18516
  source 1..80: mol_type = other DNA

SEQ ID NO: 203247 - DNA, 80 bp, synthetic construct; identical to SEQ ID NO: 18517
  source 1..80: mol_type = other DNA

SEQ ID NO: 203248 - DNA, 80 bp, synthetic construct; identical to SEQ ID NO: 18518
  source 1..80: mol_type = other DNA

SEQ ID NO: 203249 - DNA, 80 bp, synthetic construct; identical to SEQ ID NO: 18519
  source 1..80: mol_type = other DNA

SEQ ID NO: 203250 - DNA, 80 bp, synthetic construct; identical to SEQ ID NO: 18520
  source 1..80: mol_type = other DNA

SEQ ID NO: 203251 - DNA, 80 bp, synthetic construct; identical to SEQ ID NO: 18521
  source 1..80: mol_type = other DNA

SEQ ID NO: 203252 - DNA, 80 bp, synthetic construct; identical to SEQ ID NO: 18522
  source 1..80: mol_type = other DNA

SEQ ID NO: 203253 - DNA, 80 bp, synthetic construct; identical to SEQ ID NO: 18523
  source 1..80: mol_type = other DNA

SEQ ID NO: 203254 - DNA, 80 bp, synthetic construct; identical to SEQ ID NO: 18524
  source 1..80: mol_type = other DNA

SEQ ID NO: 203255 - DNA, 80 bp, synthetic construct; identical to SEQ ID NO: 18525
  source 1..80: mol_type = other DNA

SEQ ID NO: 203256 - DNA, 80 bp, synthetic construct; identical to SEQ ID NO: 18526
  source 1..80: mol_type = other DNA

SEQ ID NO: 203257 - DNA, 80 bp, synthetic construct; identical to SEQ ID NO: 18527
  source 1..80: mol_type = other DNA

SEQ ID NO: 203258 - DNA, 80 bp, synthetic construct; identical to SEQ ID NO: 18528
  source 1..80: mol_type = other DNA

SEQ ID NO: 203259 - DNA, 80 bp, synthetic construct; identical to SEQ ID NO: 18529
  source 1..80: mol_type = other DNA

SEQ ID NO: 203260 - DNA, 80 bp, synthetic construct; identical to SEQ ID NO: 18530
  source 1..80: mol_type = other DNA

SEQ ID NO: 203261 - DNA, 80 bp, synthetic construct; identical to SEQ ID NO: 18531
  source 1..80: mol_type = other DNA

SEQ ID NO: 203262 - DNA, 80 bp, synthetic construct; identical to SEQ ID NO: 18532
  source 1..80: mol_type = other DNA

SEQ ID NO: 203263 - DNA, 80 bp, synthetic construct; identical to SEQ ID NO: 18533
  source 1..80: mol_type = other DNA

SEQ ID NO: 203264 - DNA, 80 bp, synthetic construct; identical to SEQ ID NO: 18534
  source 1..80: mol_type = other DNA

SEQ ID NO: 203265 - DNA, 80 bp, synthetic construct; identical to SEQ ID NO: 18535
  source 1..80: mol_type = other DNA

SEQ ID NO: 203266 - DNA, 80 bp, synthetic construct; identical to SEQ ID NO: 18536
  source 1..80: mol_type = other DNA

SEQ ID NO: 203267 - DNA, 80 bp, synthetic construct; identical to SEQ ID NO: 18537
  source 1..80: mol_type = other DNA

SEQ ID NO: 203268 - DNA, 80 bp, synthetic construct; identical to SEQ ID NO: 18538
  source 1..80: mol_type = other DNA

SEQ ID NO: 203269 - DNA, 80 bp, synthetic construct; identical to SEQ ID NO: 18539
  source 1..80: mol_type = other DNA

SEQ ID NO: 203270 - DNA, 80 bp, synthetic construct; identical to SEQ ID NO: 18540
  source 1..80: mol_type = other DNA

SEQ ID NO: 203271 - DNA, 80 bp, synthetic construct; identical to SEQ ID NO: 18541
  source 1..80: mol_type = other DNA

SEQ ID NO: 203272 - DNA, 80 bp, synthetic construct; identical to SEQ ID NO: 18542
  source 1..80: mol_type = other DNA

SEQ ID NO: 203273 - DNA, 80 bp, synthetic construct; identical to SEQ ID NO: 18543
  source 1..80: mol_type = other DNA

SEQ ID NO: 203274 - DNA, 80 bp, synthetic construct; identical to SEQ ID NO: 18544
  source 1..80: mol_type = other DNA

SEQ ID NO: 203275 - DNA, 80 bp, synthetic construct; identical to SEQ ID NO: 18545
  source 1..80: mol_type = other DNA

SEQ ID NO: 203276 - DNA, 80 bp, synthetic construct; identical to SEQ ID NO: 18546
  source 1..80: mol_type = other DNA

SEQ ID NO: 203277 - DNA, 80 bp, synthetic construct; identical to SEQ ID NO: 18547
  source 1..80: mol_type = other DNA

SEQ ID NO: 203278 - DNA, 80 bp, synthetic construct; identical to SEQ ID NO: 18548
  source 1..80: mol_type = other DNA

SEQ ID NO: 203279 - DNA, 80 bp, synthetic construct; identical to SEQ ID NO: 18549
  source 1..80: mol_type = other DNA

SEQ ID NO: 203280 - DNA, 80 bp, synthetic construct; identical to SEQ ID NO: 18550
  source 1..80: mol_type = other DNA

SEQ ID NO: 203281 - DNA, 80 bp, synthetic construct; identical to SEQ ID NO: 18551
  source 1..80: mol_type = other DNA

SEQ ID NO: 203282 - DNA, 80 bp, synthetic construct; identical to SEQ ID NO: 18552
  source 1..80: mol_type = other DNA

SEQ ID NO: 203283 - DNA, 80 bp, synthetic construct; identical to SEQ ID NO: 18553
  source 1..80: mol_type = other DNA

SEQ ID NO: 203284 - DNA, 80 bp, synthetic construct; identical to SEQ ID NO: 18554
  source 1..80: mol_type = other DNA

SEQ ID NO: 203285 - DNA, 80 bp, synthetic construct; identical to SEQ ID NO: 18555
  source 1..80: mol_type = other DNA

SEQ ID NO: 203286 - DNA, 80 bp, synthetic construct; identical to SEQ ID NO: 18556
  source 1..80: mol_type = other DNA

SEQ ID NO: 203287 - DNA, 80 bp, synthetic construct; identical to SEQ ID NO: 18557
  source 1..80: mol_type = other DNA

SEQ ID NO: 203288 - DNA, 80 bp, synthetic construct; identical to SEQ ID NO: 18558
  source 1..80: mol_type = other DNA

SEQ ID NO: 203289 - DNA, 80 bp, synthetic construct; identical to SEQ ID NO: 18559
  source 1..80: mol_type = other DNA

SEQ ID NO: 203290 - DNA, 80 bp, synthetic construct; identical to SEQ ID NO: 18560
  source 1..80: mol_type = other DNA

SEQ ID NO: 203291 - DNA, 80 bp, synthetic construct; identical to SEQ ID NO: 18561
  source 1..80: mol_type = other DNA

SEQ ID NO: 203292 - DNA, 80 bp, synthetic construct; identical to SEQ ID NO: 18562
  source 1..80: mol_type = other DNA

SEQ ID NO: 203293 - DNA, 80 bp, synthetic construct; identical to SEQ ID NO: 18563
  source 1..80: mol_type = other DNA

SEQ ID NO: 203294 - DNA, 80 bp, synthetic construct; identical to SEQ ID NO: 18564
  source 1..80: mol_type = other DNA

SEQ ID NO: 203295 - DNA, 80 bp, synthetic construct; identical to SEQ ID NO: 18565
  source 1..80: mol_type = other DNA

SEQ ID NO: 203296 - DNA, 80 bp, synthetic construct; identical to SEQ ID NO: 18566
  source 1..80: mol_type = other DNA

SEQ ID NO: 203297 - DNA, 80 bp, synthetic construct; identical to SEQ ID NO: 18567
  source 1..80: mol_type = other DNA

SEQ ID NO: 203298 - DNA, 80 bp, synthetic construct; identical to SEQ ID NO: 18568
  source 1..80: mol_type = other DNA

SEQ ID NO: 203299 - DNA, 80 bp, synthetic construct; identical to SEQ ID NO: 18569
  source 1..80: mol_type = other DNA

SEQ ID NO: 203300 - DNA, 80 bp, synthetic construct; identical to SEQ ID NO: 18570
  source 1..80: mol_type = other DNA

SEQ ID NO: 203301 - DNA, 80 bp, synthetic construct; identical to SEQ ID NO: 18571
  source 1..80: mol_type = other DNA

SEQ ID NO: 203302 - DNA, 80 bp, synthetic construct; identical to SEQ ID NO: 18572
  source 1..80: mol_type = other DNA

SEQ ID NO: 203303 - DNA, 80 bp, synthetic construct; identical to SEQ ID NO: 18573
  source 1..80: mol_type = other DNA

SEQ ID NO: 203304 - DNA, 80 bp, synthetic construct; identical to SEQ ID NO: 18574
  source 1..80: mol_type = other DNA

SEQ ID NO: 203305 - DNA, 80 bp, synthetic construct; identical to SEQ ID NO: 18575
  source 1..80: mol_type = other DNA

SEQ ID NO: 203306 - DNA, 80 bp, synthetic construct; identical to SEQ ID NO: 18576
  source 1..80: mol_type = other DNA

SEQ ID NO: 203307 - DNA, 80 bp, synthetic construct; identical to SEQ ID NO: 18577
  source 1..80: mol_type = other DNA

SEQ ID NO: 203308 - DNA, 80 bp, synthetic construct; identical to SEQ ID NO: 18578
  source 1..80: mol_type = other DNA

SEQ ID NO: 203309 - DNA, 80 bp, synthetic construct; identical to SEQ ID NO: 18579
  source 1..80: mol_type = other DNA

SEQ ID NO: 203310 - DNA, 80 bp, synthetic construct; identical to SEQ ID NO: 18580
  source 1..80: mol_type = other DNA

SEQ ID NO: 203311 - DNA, 80 bp, synthetic construct; identical to SEQ ID NO: 18581
  source 1..80: mol_type = other DNA

SEQ ID NO: 203312 - DNA, 80 bp, synthetic construct; identical to SEQ ID NO: 18582
  source 1..80: mol_type = other DNA

SEQ ID NO: 203313 - DNA, 80 bp, synthetic construct; identical to SEQ ID NO: 18583
  source 1..80: mol_type = other DNA

SEQ ID NO: 203314 - DNA, 80 bp, synthetic construct; identical to SEQ ID NO: 18584
  source 1..80: mol_type = other DNA

SEQ ID NO: 203315 - DNA, 80 bp, synthetic construct; identical to SEQ ID NO: 18585
  source 1..80: mol_type = other DNA

SEQ ID NO: 203316 - DNA, 80 bp, synthetic construct; identical to SEQ ID NO: 18586
  source 1..80: mol_type = other DNA

SEQ ID NO: 203317 - DNA, 80 bp, synthetic construct; identical to SEQ ID NO: 18587
  source 1..80: mol_type = other DNA

SEQ ID NO: 203318 - DNA, 80 bp, synthetic construct; identical to SEQ ID NO: 18588
  source 1..80: mol_type = other DNA

SEQ ID NO: 203319 - DNA, 80 bp, synthetic construct; identical to SEQ ID NO: 18589
  source 1..80: mol_type = other DNA

SEQ ID NO: 203320 - DNA, 80 bp, synthetic construct; identical to SEQ ID NO: 18590
  source 1..80: mol_type = other DNA

SEQ ID NO: 203321 - DNA, 80 bp, synthetic construct; identical to SEQ ID NO: 18591
  source 1..80: mol_type = other DNA

SEQ ID NO: 203322 - DNA, 80 bp, synthetic construct; identical to SEQ ID NO: 18592
  source 1..80: mol_type = other DNA

SEQ ID NO: 203323 - DNA, 80 bp, synthetic construct; identical to SEQ ID NO: 18593
  source 1..80: mol_type = other DNA

SEQ ID NO: 203324 - DNA, 80 bp, synthetic construct; identical to SEQ ID NO: 18594
  source 1..80: mol_type = other DNA

SEQ ID NO: 203325 - DNA, 80 bp, synthetic construct; identical to SEQ ID NO: 18595
  source 1..80: mol_type = other DNA

SEQ ID NO: 203326 - DNA, 80 bp, synthetic construct; identical to SEQ ID NO: 18596
  source 1..80: mol_type = other DNA

SEQ ID NO: 203327 - DNA, 80 bp, synthetic construct; identical to SEQ ID NO: 18597
  source 1..80: mol_type = other DNA

SEQ ID NO: 203328 - DNA, 80 bp, synthetic construct; identical to SEQ ID NO: 18598
  source 1..80: mol_type = other DNA

SEQ ID NO: 203329 - DNA, 80 bp, synthetic construct; identical to SEQ ID NO: 18599
  source 1..80: mol_type = other DNA

SEQ ID NO: 203330 - DNA, 80 bp, synthetic construct; identical to SEQ ID NO: 18600
  source 1..80: mol_type = other DNA

SEQ ID NO: 203331 - DNA, 80 bp, synthetic construct; identical to SEQ ID NO: 18601
  source 1..80: mol_type = other DNA

SEQ ID NO: 203332 - DNA, 80 bp, synthetic construct; identical to SEQ ID NO: 18602
  source 1..80: mol_type = other DNA

SEQ ID NO: 203333 - DNA, 80 bp, synthetic construct; identical to SEQ ID NO: 18603
  source 1..80: mol_type = other DNA

SEQ ID NO: 203334 - DNA, 80 bp, synthetic construct; identical to SEQ ID NO: 18604
  source 1..80: mol_type = other DNA

SEQ ID NO: 203335 - DNA, 80 bp, synthetic construct; identical to SEQ ID NO: 18605
  source 1..80: mol_type = other DNA

SEQ ID NO: 203336 - DNA, 80 bp, synthetic construct; identical to SEQ ID NO: 18606
  source 1..80: mol_type = other DNA

SEQ ID NO: 203337 - DNA, 80 bp, synthetic construct; identical to SEQ ID NO: 18607
  source 1..80: mol_type = other DNA

SEQ ID NO: 203338 - DNA, 80 bp, synthetic construct; identical to SEQ ID NO: 18608
  source 1..80: mol_type = other DNA

SEQ ID NO: 203339 - DNA, 80 bp, synthetic construct; identical to SEQ ID NO: 18609
  source 1..80: mol_type = other DNA

SEQ ID NO: 203340 - DNA, 80 bp, synthetic construct; identical to SEQ ID NO: 18610
  source 1..80: mol_type = other DNA

SEQ ID NO: 203341 - DNA, 80 bp, synthetic construct; identical to SEQ ID NO: 18611
  source 1..80: mol_type = other DNA

SEQ ID NO: 203342 - DNA, 80 bp, synthetic construct; identical to SEQ ID NO: 18612
  source 1..80: mol_type = other DNA

SEQ ID NO: 203343 - DNA, 80 bp, synthetic construct; identical to SEQ ID NO: 18613
  source 1..80: mol_type = other DNA

SEQ ID NO: 203344 - DNA, 80 bp, synthetic construct; identical to SEQ ID NO: 18614
  source 1..80: mol_type = other DNA

SEQ ID NO: 203345 - DNA, 80 bp, synthetic construct; identical to SEQ ID NO: 18615
  source 1..80: mol_type = other DNA

SEQ ID NO: 203346 - DNA, 80 bp, synthetic construct; identical to SEQ ID NO: 18616
  source 1..80: mol_type = other DNA

SEQ ID NO: 203347 - DNA, 80 bp, synthetic construct; identical to SEQ ID NO: 18617
  source 1..80: mol_type = other DNA

SEQ ID NO: 203348 - DNA, 80 bp, synthetic construct; identical to SEQ ID NO: 18618
  source 1..80: mol_type = other DNA

SEQ ID NO: 203349 - DNA, 80 bp, synthetic construct; identical to SEQ ID NO: 18619
  source 1..80: mol_type = other DNA

SEQ ID NO: 203350 - DNA, 80 bp, synthetic construct; identical to SEQ ID NO: 18620
  source 1..80: mol_type = other DNA

SEQ ID NO: 203351 - DNA, 80 bp, synthetic construct; identical to SEQ ID NO: 18621
  source 1..80: mol_type = other DNA

SEQ ID NO: 203352 - DNA, 80 bp, synthetic construct; identical to SEQ ID NO: 18622
  source 1..80: mol_type = other DNA

SEQ ID NO: 203353 - DNA, 80 bp, synthetic construct; identical to SEQ ID NO: 18623
  source 1..80: mol_type = other DNA

SEQ ID NO: 203354 - DNA, 80 bp, synthetic construct; identical to SEQ ID NO: 18624
  source 1..80: mol_type = other DNA

SEQ ID NO: 203355 - DNA, 80 bp, synthetic construct; identical to SEQ ID NO: 18625
  source 1..80: mol_type = other DNA

SEQ ID NO: 203356 - DNA, 80 bp, synthetic construct; identical to SEQ ID NO: 18626
  source 1..80: mol_type = other DNA

SEQ ID NO: 203357 - DNA, 80 bp, synthetic construct; identical to SEQ ID NO: 18627
  source 1..80: mol_type = other DNA

SEQ ID NO: 203358 - DNA, 80 bp, synthetic construct; identical to SEQ ID NO: 18628
  source 1..80: mol_type = other DNA

SEQ ID NO: 203359 - DNA, 80 bp, synthetic construct; identical to SEQ ID NO: 18629
  source 1..80: mol_type = other DNA

SEQ ID NO: 203360 - DNA, 80 bp, synthetic construct; identical to SEQ ID NO: 18630
  source 1..80: mol_type = other DNA

SEQ ID NO: 203361 - DNA, 80 bp, synthetic construct; identical to SEQ ID NO: 18631
  source 1..80: mol_type = other DNA

SEQ ID NO: 203362 - DNA, 80 bp, synthetic construct; identical to SEQ ID NO: 18632
  source 1..80: mol_type = other DNA

SEQ ID NO: 203363 - DNA, 80 bp, synthetic construct; identical to SEQ ID NO: 18633
  source 1..80: mol_type = other DNA

SEQ ID NO: 203364 - DNA, 80 bp, synthetic construct; identical to SEQ ID NO: 18634
  source 1..80: mol_type = other DNA

SEQ ID NO: 203365 - DNA, 80 bp, synthetic construct; identical to SEQ ID NO: 18635
  source 1..80: mol_type = other DNA

SEQ ID NO: 203366 - DNA, 80 bp, synthetic construct; identical to SEQ ID NO: 18636
  source 1..80: mol_type = other DNA

SEQ ID NO: 203367 - DNA, 80 bp, synthetic construct; identical to SEQ ID NO: 18637
  source 1..80: mol_type = other DNA

SEQ ID NO: 203368 - DNA, 80 bp, synthetic construct; identical to SEQ ID NO: 18638
  source 1..80: mol_type = other DNA

SEQ ID NO: 203369 - DNA, 80 bp, synthetic construct; identical to SEQ ID NO: 18639
  source 1..80: mol_type = other DNA

SEQ ID NO: 203370 - DNA, 80 bp, synthetic construct; identical to SEQ ID NO: 18640
  source 1..80: mol_type = other DNA

SEQ ID NO: 203371 - DNA, 80 bp, synthetic construct; identical to SEQ ID NO: 18641
  source 1..80: mol_type = other DNA

SEQ ID NO: 203372 - DNA, 80 bp, synthetic construct; identical to SEQ ID NO: 18642
  source 1..80: mol_type = other DNA

SEQ ID NO: 203373 - DNA, 80 bp, synthetic construct; identical to SEQ ID NO: 18643
  source 1..80: mol_type = other DNA

SEQ ID NO: 203374 - DNA, 80 bp, synthetic construct; identical to SEQ ID NO: 18644
  source 1..80: mol_type = other DNA

SEQ ID NO: 203375 - DNA, 80 bp, synthetic construct; identical to SEQ ID NO: 18645
  source 1..80: mol_type = other DNA

SEQ ID NO: 203376 - DNA, 80 bp, synthetic construct; identical to SEQ ID NO: 18646
  source 1..80: mol_type = other DNA

SEQ ID NO: 203377 - DNA, 80 bp, synthetic construct; identical to SEQ ID NO: 18647
  source 1..80: mol_type = other DNA

SEQ ID NO: 203378 - DNA, 80 bp, synthetic construct; identical to SEQ ID NO: 18648
  source 1..80: mol_type = other DNA

SEQ ID NO: 203379 - DNA, 80 bp, synthetic construct; identical to SEQ ID NO: 18649
  source 1..80: mol_type = other DNA

SEQ ID NO: 203380 - DNA, 80 bp, synthetic construct; identical to SEQ ID NO: 18650
  source 1..80: mol_type = other DNA

SEQ ID NO: 203381 - DNA, 80 bp, synthetic construct; identical to SEQ ID NO: 18651
  source 1..80: mol_type = other DNA

SEQ ID NO: 203382 - DNA, 80 bp, synthetic construct; identical to SEQ ID NO: 18652
  source 1..80: mol_type = other DNA

SEQ ID NO: 203383 - DNA, 80 bp, synthetic construct; identical to SEQ ID NO: 18653
  source 1..80: mol_type = other DNA

SEQ ID NO: 203384 - DNA, 80 bp, synthetic construct; identical to SEQ ID NO: 18654
  source 1..80: mol_type = other DNA

SEQ ID NO: 203385 - DNA, 80 bp, synthetic construct; identical to SEQ ID NO: 18655
  source 1..80: mol_type = other DNA

SEQ ID NO: 203386 - DNA, 80 bp, synthetic construct; identical to SEQ ID NO: 18656
  source 1..80: mol_type = other DNA

SEQ ID NO: 203387 - DNA, 80 bp, synthetic construct; identical to SEQ ID NO: 18657
  source 1..80: mol_type = other DNA

SEQ ID NO: 203388 - DNA, 80 bp, synthetic construct; identical to SEQ ID NO: 18658
  source 1..80: mol_type = other DNA

SEQ ID NO: 203389 - DNA, 80 bp, synthetic construct; identical to SEQ ID NO: 18659
  source 1..80: mol_type = other DNA

SEQ ID NO: 203390 - DNA, 80 bp, synthetic construct; identical to SEQ ID NO: 18660
  source 1..80: mol_type = other DNA

SEQ ID NO: 203391 - DNA, 80 bp, synthetic construct; identical to SEQ ID NO: 18661
  source 1..80: mol_type = other DNA

SEQ ID NO: 203392 - DNA, 80 bp, synthetic construct; identical to SEQ ID NO: 18662
  source 1..80: mol_type = other DNA

SEQ ID NO: 203393 - DNA, 80 bp, synthetic construct; identical to SEQ ID NO: 18663
  source 1..80: mol_type = other DNA

SEQ ID NO: 203394 - DNA, 80 bp, synthetic construct; identical to SEQ ID NO: 18664
  source 1..80: mol_type = other DNA

SEQ ID NO: 203395 - DNA, 80 bp, synthetic construct; identical to SEQ ID NO: 18665
  source 1..80: mol_type = other DNA

SEQ ID NO: 203396 - DNA, 80 bp, synthetic construct; identical to SEQ ID NO: 18666
  source 1..80: mol_type = other DNA

SEQ ID NO: 203397 - DNA, 80 bp, synthetic construct; identical to SEQ ID NO: 18667
  source 1..80: mol_type = other DNA

SEQ ID NO: 203398 - DNA, 80 bp, synthetic construct; identical to SEQ ID NO: 18668
  source 1..80: mol_type = other DNA

SEQ ID NO: 203399 - DNA, 80 bp, synthetic construct; identical to SEQ ID NO: 18669
  source 1..80: mol_type = other DNA

SEQ ID NO: 203400 - DNA, 80 bp, synthetic construct; identical to SEQ ID NO: 18670
  source 1..80: mol_type = other DNA

SEQ ID NO: 203401 - DNA, 80 bp, synthetic construct; identical to SEQ ID NO: 18671
  source 1..80: mol_type = other DNA

SEQ ID NO: 203402 - DNA, 80 bp, synthetic construct; identical to SEQ ID NO: 18672
  source 1..80: mol_type = other DNA

SEQ ID NO: 203403 - DNA, 80 bp, synthetic construct; identical to SEQ ID NO: 18673
  source 1..80: mol_type = other DNA

SEQ ID NO: 203404 - DNA, 80 bp, synthetic construct; identical to SEQ ID NO: 18674
  source 1..80: mol_type = other DNA

SEQ ID NO: 203405 - DNA, 80 bp, synthetic construct; identical to SEQ ID NO: 18675
  source 1..80: mol_type = other DNA

SEQ ID NO: 203406 - DNA, 80 bp, synthetic construct; identical to SEQ ID NO: 18676
  source 1..80: mol_type = other DNA

SEQ ID NO: 203407 - DNA, 80 bp, synthetic construct; identical to SEQ ID NO: 18677
  source 1..80: mol_type = other DNA

SEQ ID NO: 203408 - DNA, 80 bp, synthetic construct; identical to SEQ ID NO: 18678
  source 1..80: mol_type = other DNA

SEQ ID NO: 203409 - DNA, 80 bp, synthetic construct; identical to SEQ ID NO: 18679
  source 1..80: mol_type = other DNA

SEQ ID NO: 203410 - DNA, 80 bp, synthetic construct; identical to SEQ ID NO: 18680
  source 1..80: mol_type = other DNA

SEQ ID NO: 203411 - DNA, 80 bp, synthetic construct; identical to SEQ ID NO: 18681
  source 1..80: mol_type = other DNA

SEQ ID NO: 203412 - DNA, 80 bp, synthetic construct; identical to SEQ ID NO: 18682
  source 1..80: mol_type = other DNA

SEQ ID NO: 203413 - DNA, 80 bp, synthetic construct; identical to SEQ ID NO: 18683
  source 1..80: mol_type = other DNA

SEQ ID NO: 203414 - DNA, 80 bp, synthetic construct; identical to SEQ ID NO: 18684
  source 1..80: mol_type = other DNA

SEQ ID NO: 203415 - DNA, 80 bp, synthetic construct; identical to SEQ ID NO: 18685
  source 1..80: mol_type = other DNA

SEQ ID NO: 203416 - DNA, 80 bp, synthetic construct; identical to SEQ ID NO: 18686
  source 1..80: mol_type = other DNA

SEQ ID NO: 203417 - DNA, 80 bp, synthetic construct; identical to SEQ ID NO: 18687
  source 1..80: mol_type = other DNA

SEQ ID NO: 203418 - DNA, 80 bp, synthetic construct; identical to SEQ ID NO: 18688
  source 1..80: mol_type = other DNA

SEQ ID NO: 203419 - DNA, 80 bp, synthetic construct; identical to SEQ ID NO: 18689
  source 1..80: mol_type = other DNA

SEQ ID NO: 203420 - DNA, 80 bp, synthetic construct; identical to SEQ ID NO: 18690
  source 1..80: mol_type = other DNA

SEQ ID NO: 203421 - DNA, 80 bp, synthetic construct; identical to SEQ ID NO: 18691
  source 1..80: mol_type = other DNA

SEQ ID NO: 203422 - DNA, 80 bp, synthetic construct; identical to SEQ ID NO: 18692
  source 1..80: mol_type = other DNA

SEQ ID NO: 203423 - DNA, 80 bp, synthetic construct; identical to SEQ ID NO: 18693
  source 1..80: mol_type = other DNA

SEQ ID NO: 203424 - DNA, 80 bp, synthetic construct; identical to SEQ ID NO: 18694
  source 1..80: mol_type = other DNA

SEQ ID NO: 203425 - DNA, 80 bp, synthetic construct; identical to SEQ ID NO: 18695
  source 1..80: mol_type = other DNA

SEQ ID NO: 203426 - DNA, 80 bp, synthetic construct; identical to SEQ ID NO: 18696
  source 1..80: mol_type = other DNA

SEQ ID NO: 203427 - DNA, 80 bp, synthetic construct; identical to SEQ ID NO: 18697
  source 1..80: mol_type = other DNA

SEQ ID NO: 203428 - DNA, 80 bp, synthetic construct; identical to SEQ ID NO: 18698
  source 1..80: mol_type = other DNA

SEQ ID NO: 203429 - DNA, 80 bp, synthetic construct; identical to SEQ ID NO: 18699
  source 1..80: mol_type = other DNA

SEQ ID NO: 203430 - DNA, 80 bp, synthetic construct; identical to SEQ ID NO: 18700
  source 1..80: mol_type = other DNA

SEQ ID NO: 203431 - DNA, 80 bp, synthetic construct; identical to SEQ ID NO: 18701
  source 1..80: mol_type = other DNA

SEQ ID NO: 203432 - DNA, 80 bp, synthetic construct; identical to SEQ ID NO: 18702
  source 1..80: mol_type = other DNA

SEQ ID NO: 203433 - DNA, 80 bp, synthetic construct; identical to SEQ ID NO: 18703
  source 1..80: mol_type = other DNA

SEQ ID NO: 203434 - DNA, 80 bp, synthetic construct; identical to SEQ ID NO: 18704
  source 1..80: mol_type = other DNA

SEQ ID NO: 203435 - DNA, 80 bp, synthetic construct; identical to SEQ ID NO: 18705
  source 1..80: mol_type = other DNA

SEQ ID NO: 203436 - DNA, 80 bp, synthetic construct; identical to SEQ ID NO: 18706
  source 1..80: mol_type = other DNA

SEQ ID NO: 203437 - DNA, 80 bp, synthetic construct; identical to SEQ ID NO: 18707
  source 1..80: mol_type = other DNA

SEQ ID NO: 203438 - DNA, 80 bp, synthetic construct; identical to SEQ ID NO: 18708
  source 1..80: mol_type = other DNA

SEQ ID NO: 203439 - DNA, 80 bp, synthetic construct; identical to SEQ ID NO: 18709
  source 1..80: mol_type = other DNA

SEQ ID NO: 203440 - DNA, 80 bp, synthetic construct; identical to SEQ ID NO: 18710
  source 1..80: mol_type = other DNA

SEQ ID NO: 203441 - DNA, 80 bp, synthetic construct; identical to SEQ ID NO: 18711
  source 1..80: mol_type = other DNA

SEQ ID NO: 203442 - DNA, 80 bp, synthetic construct; identical to SEQ ID NO: 18712
  source 1..80: mol_type = other DNA

SEQ ID NO: 203443 - DNA, 80 bp, synthetic construct; identical to SEQ ID NO: 18713
  source 1..80: mol_type = other DNA

SEQ ID NO: 203444 - DNA, 80 bp, synthetic construct; identical to SEQ ID NO: 18714
  source 1..80: mol_type = other DNA

SEQ ID NO: 203445 - DNA, 80 bp, synthetic construct; identical to SEQ ID NO: 18715
  source 1..80: mol_type = other DNA

SEQ ID NO: 203446 - DNA, 80 bp, synthetic construct; identical to SEQ ID NO: 18716
  source 1..80: mol_type = other DNA

SEQ ID NO: 203447 - DNA, 80 bp, synthetic construct; identical to SEQ ID NO: 18717
  source 1..80: mol_type = other DNA

SEQ ID NO: 203448 - DNA, 80 bp, synthetic construct; identical to SEQ ID NO: 18718
  source 1..80: mol_type = other DNA

SEQ ID NO: 203449 - DNA, 80 bp, synthetic construct; identical to SEQ ID NO: 18719
  source 1..80: mol_type = other DNA

SEQ ID NO: 203450 - DNA, 80 bp, synthetic construct; identical to SEQ ID NO: 18720
  source 1..80: mol_type = other DNA

SEQ ID NO: 203451 - DNA, 80 bp, synthetic construct; identical to SEQ ID NO: 18721
  source 1..80: mol_type = other DNA

SEQ ID NO: 203452 - DNA, 80 bp, synthetic construct; identical to SEQ ID NO: 18722
  source 1..80: mol_type = other DNA

SEQ ID NO: 203453 - DNA, 80 bp, synthetic construct; identical to SEQ ID NO: 18723
  source 1..80: mol_type = other DNA

SEQ ID NO: 203454 - DNA, 80 bp, synthetic construct; identical to SEQ ID NO: 18724
  source 1..80: mol_type = other DNA

SEQ ID NO: 203455 - DNA, 80 bp, synthetic construct; identical to SEQ ID NO: 18725
  source 1..80: mol_type = other DNA

SEQ ID NO: 203456 - DNA, 80 bp, synthetic construct; identical to SEQ ID NO: 18726
  source 1..80: mol_type = other DNA

SEQ ID NO: 203457 - DNA, 80 bp, synthetic construct; identical to SEQ ID NO: 18727
  source 1..80: mol_type = other DNA

SEQ ID NO: 203458 - DNA, 80 bp, synthetic construct; identical to SEQ ID NO: 18728
  source 1..80: mol_type = other DNA

SEQ ID NO: 203459 - DNA, 80 bp, synthetic construct; identical to SEQ ID NO: 18729
  source 1..80: mol_type = other DNA

SEQ ID NO: 203460 - DNA, 80 bp, synthetic construct; identical to SEQ ID NO: 18730
  source 1..80: mol_type = other DNA

SEQ ID NO: 203461 - DNA, 80 bp, synthetic construct; identical to SEQ ID NO: 18731
  source 1..80: mol_type = other DNA

SEQ ID NO: 203462 - DNA, 80 bp, synthetic construct; identical to SEQ ID NO: 18732
  source 1..80: mol_type = other DNA

SEQ ID NO: 203463 - DNA, 80 bp, synthetic construct; identical to SEQ ID NO: 18733
  source 1..80: mol_type = other DNA

SEQ ID NO: 203464 - DNA, 80 bp, synthetic construct; identical to SEQ ID NO: 18734
  source 1..80: mol_type = other DNA

SEQ ID NO: 203465 - DNA, 80 bp, synthetic construct; identical to SEQ ID NO: 18735
  source 1..80: mol_type = other DNA

SEQ ID NO: 203466 - DNA, 80 bp, synthetic construct; identical to SEQ ID NO: 18736
  source 1..80: mol_type = other DNA

SEQ ID NO: 203467 - DNA, 80 bp, synthetic construct; identical to SEQ ID NO: 18737
  source 1..80: mol_type = other DNA

SEQ ID NO: 203468 - DNA, 80 bp, synthetic construct; identical to SEQ ID NO: 18738
  source 1..80: mol_type = other DNA

SEQ ID NO: 203469 - DNA, 80 bp, synthetic construct; identical to SEQ ID NO: 18739
  source 1..80: mol_type = other DNA

SEQ ID NO: 203470 - DNA, 80 bp, synthetic construct; identical to SEQ ID NO: 18740
  source 1..80: mol_type = other DNA

SEQ ID NO: 203471 - DNA, 80 bp, synthetic construct; identical to SEQ ID NO: 18741
  source 1..80: mol_type = other DNA

SEQ ID NO: 203472 - DNA, 80 bp, synthetic construct; identical to SEQ ID NO: 18742
  source 1..80: mol_type = other DNA

SEQ ID NO: 203473 - DNA, 80 bp, synthetic construct; identical to SEQ ID NO: 18743
  source 1..80: mol_type = other DNA

SEQ ID NO: 203474 - DNA, 80 bp, synthetic construct; identical to SEQ ID NO: 18744
  source 1..80: mol_type = other DNA

SEQ ID NO: 203475 - DNA, 80 bp, synthetic construct; identical to SEQ ID NO: 18745
  source 1..80: mol_type = other DNA

SEQ ID NO: 203476 - DNA, 80 bp, synthetic construct; identical to SEQ ID NO: 18746
  source 1..80: mol_type = other DNA

SEQ ID NO: 203477 - DNA, 80 bp, synthetic construct; identical to SEQ ID NO: 18747
  source 1..80: mol_type = other DNA

SEQ ID NO: 203478 - DNA, 80 bp, synthetic construct; identical to SEQ ID NO: 18748
  source 1..80: mol_type = other DNA

SEQ ID NO: 203479 - DNA, 80 bp, synthetic construct; identical to SEQ ID NO: 18749
  source 1..80: mol_type = other DNA

SEQ ID NO: 203480 - DNA, 80 bp, synthetic construct; identical to SEQ ID NO: 18750
  source 1..80: mol_type = other DNA

SEQ ID NO: 203481 - DNA, 80 bp, synthetic construct; identical to SEQ ID NO: 18751
  source 1..80: mol_type = other DNA

SEQ ID NO: 203482 - DNA, 80 bp, synthetic construct; identical to SEQ ID NO: 18752
  source 1..80: mol_type = other DNA

SEQ ID NO: 203483 - DNA, 80 bp, synthetic construct; identical to SEQ ID NO: 18753
  source 1..80: mol_type = other DNA

SEQ ID NO: 203484 - DNA, 80 bp, synthetic construct; identical to SEQ ID NO: 18754
  source 1..80: mol_type = other DNA

SEQ ID NO: 203485 - DNA, 80 bp, synthetic construct; identical to SEQ ID NO: 18755
  source 1..80: mol_type = other DNA

SEQ ID NO: 203486 - DNA, 80 bp, synthetic construct; identical to SEQ ID NO: 18756
  source 1..80: mol_type = other DNA

SEQ ID NO: 203487 - DNA, 80 bp, synthetic construct; identical to SEQ ID NO: 18757
  source 1..80: mol_type = other DNA

SEQ ID NO: 203488 - DNA, 80 bp, synthetic construct; identical to SEQ ID NO: 18758
  source 1..80: mol_type = other DNA

SEQ ID NO: 203489 - DNA, 80 bp, synthetic construct; identical to SEQ ID NO: 18759
  source 1..80: mol_type = other DNA

SEQ ID NO: 203490 - DNA, 80 bp, synthetic construct; identical to SEQ ID NO: 18760
  source 1..80: mol_type = other DNA

SEQ ID NO: 203491 - DNA, 80 bp, synthetic construct; identical to SEQ ID NO: 18761
  source 1..80: mol_type = other DNA

SEQ ID NO: 203492 - DNA, 80 bp, synthetic construct; identical to SEQ ID NO: 18762
  source 1..80: mol_type = other DNA

SEQ ID NO: 203493 - DNA, 80 bp, synthetic construct; identical to SEQ ID NO: 18763
  source 1..80: mol_type = other DNA

SEQ ID NO: 203494 - DNA, 80 bp, synthetic construct; identical to SEQ ID NO: 18764
  source 1..80: mol_type = other DNA

SEQ ID NO: 203495 - DNA, 80 bp, synthetic construct; identical to SEQ ID NO: 18765
  source 1..80: mol_type = other DNA

SEQ ID NO: 203496 - DNA, 80 bp, synthetic construct; identical to SEQ ID NO: 18766
  source 1..80: mol_type = other DNA

SEQ ID NO: 203497 - DNA, 80 bp, synthetic construct; identical to SEQ ID NO: 18767
  source 1..80: mol_type = other DNA

SEQ ID NO: 203498 - DNA, 80 bp, synthetic construct; identical to SEQ ID NO: 18768
  source 1..80: mol_type = other DNA

SEQ ID NO: 203499 - DNA, 80 bp, synthetic construct; identical to SEQ ID NO: 18769
  source 1..80: mol_type = other DNA

SEQ ID NO: 203500 - DNA, 80 bp, synthetic construct; identical to SEQ ID NO: 18770
  source 1..80: mol_type = other DNA

SEQ ID NO: 203501 - DNA, 80 bp, synthetic construct; identical to SEQ ID NO: 18771
  source 1..80: mol_type = other DNA

SEQ ID NO: 203502 - DNA, 80 bp, synthetic construct; identical to SEQ ID NO: 18772
  source 1..80: mol_type = other DNA

SEQ ID NO: 203503 - DNA, 80 bp, synthetic construct; identical to SEQ ID NO: 18773
  source 1..80: mol_type = other DNA

SEQ ID NO: 203504 - DNA, 80 bp, synthetic construct; identical to SEQ ID NO: 18774
  source 1..80: mol_type = other DNA

SEQ ID NO: 203505 - DNA, 80 bp, synthetic construct; identical to SEQ ID NO: 18775
  source 1..80: mol_type = other DNA

SEQ ID NO: 203506 - DNA, 80 bp, synthetic construct; identical to SEQ ID NO: 18776
  source 1..80: mol_type = other DNA

SEQ ID NO: 203507 - DNA, 80 bp, synthetic construct; identical to SEQ ID NO: 18777
  source 1..80: mol_type = other DNA

SEQ ID NO: 203508 - DNA, 80 bp, synthetic construct; identical to SEQ ID NO: 18778
  source 1..80: mol_type = other DNA

SEQ ID NO: 203509 - DNA, 80 bp, synthetic construct; identical to SEQ ID NO: 18779
  source 1..80: mol_type = other DNA

SEQ ID NO: 203510 - DNA, 80 bp, synthetic construct; identical to SEQ ID NO: 18780
  source 1..80: mol_type = other DNA

SEQ ID NO: 203511 - DNA, 80 bp, synthetic construct; identical to SEQ ID NO: 18781
  source 1..80: mol_type = other DNA

SEQ ID NO: 203512 - DNA, 80 bp, synthetic construct; identical to SEQ ID NO: 18782
  source 1..80: mol_type = other DNA

SEQ ID NO: 203513 - DNA, 80 bp, synthetic construct; identical to SEQ ID NO: 18783
  source 1..80: mol_type = other DNA

SEQ ID NO: 203514 - DNA, 80 bp, synthetic construct; identical to SEQ ID NO: 18784
  source 1..80: mol_type = other DNA

SEQ ID NO: 203515 - DNA, 80 bp, synthetic construct; identical to SEQ ID NO: 18785
  source 1..80: mol_type = other DNA

SEQ ID NO: 203516 - DNA, 80 bp, synthetic construct; identical to SEQ ID NO: 18786
  source 1..80: mol_type = other DNA

SEQ ID NO: 203517 - DNA, 80 bp, synthetic construct; identical to SEQ ID NO: 18787
  source 1..80: mol_type = other DNA

SEQ ID NO: 203518 - DNA, 80 bp, synthetic construct; identical to SEQ ID NO: 18788
  source 1..80: mol_type = other DNA

SEQ ID NO: 203519 - DNA, 80 bp, synthetic construct; identical to SEQ ID NO: 18789
  source 1..80: mol_type = other DNA

SEQ ID NO: 203520 - DNA, 80 bp, synthetic construct; identical to SEQ ID NO: 18790
  source 1..80: mol_type = other DNA

SEQ ID NO: 203521 - DNA, 80 bp, synthetic construct; identical to SEQ ID NO: 18791
  source 1..80: mol_type = other DNA

SEQ ID NO: 203522 - DNA, 80 bp, synthetic construct; identical to SEQ ID NO: 18792
  source 1..80: mol_type = other DNA

SEQ ID NO: 203523 - DNA, 80 bp, synthetic construct; identical to SEQ ID NO: 18793
  source 1..80: mol_type = other DNA

SEQ ID NO: 203524 - DNA, 80 bp, synthetic construct; identical to SEQ ID NO: 18794
  source 1..80: mol_type = other DNA

SEQ ID NO: 203525 - DNA, 80 bp, synthetic construct; identical to SEQ ID NO: 18795
  source 1..80: mol_type = other DNA

SEQ ID NO: 203526 - DNA, 80 bp, synthetic construct; identical to SEQ ID NO: 18796
  source 1..80: mol_type = other DNA

SEQ ID NO: 203527 - DNA, 80 bp, synthetic construct; identical to SEQ ID NO: 18797
  source 1..80: mol_type = other DNA

SEQ ID NO: 203528 - DNA, 80 bp, synthetic construct; identical to SEQ ID NO: 18798
  source 1..80: mol_type = other DNA

SEQ ID NO: 203529 - DNA, 80 bp, synthetic construct; identical to SEQ ID NO: 18799
  source 1..80: mol_type = other DNA

SEQ ID NO: 203530 - DNA, 80 bp, synthetic construct; identical to SEQ ID NO: 18800
  source 1..80: mol_type = other DNA

SEQ ID NO: 203531 - DNA, 80 bp, synthetic construct; identical to SEQ ID NO: 18801
  source 1..80: mol_type = other DNA

SEQ ID NO: 203532 - DNA, 80 bp, synthetic construct; identical to SEQ ID NO: 18802
  source 1..80: mol_type = other DNA

SEQ ID NO: 203533 - DNA, 80 bp, synthetic construct; identical to SEQ ID NO: 18803
  source 1..80: mol_type = other DNA

SEQ ID NO: 203534 - DNA, 80 bp, synthetic construct; identical to SEQ ID NO: 18804
  source 1..80: mol_type = other DNA

SEQ ID NO: 203535 - DNA, 80 bp, synthetic construct; identical to SEQ ID NO: 18805
  source 1..80: mol_type = other DNA

SEQ ID NO: 203536 - DNA, 80 bp, synthetic construct; identical to SEQ ID NO: 18806
  source 1..80: mol_type = other DNA

SEQ ID NO: 203537 - DNA, 80 bp, synthetic construct; identical to SEQ ID NO: 18807
  source 1..80: mol_type = other DNA

SEQ ID NO: 203538 - DNA, 80 bp, synthetic construct; identical to SEQ ID NO: 18808
  source 1..80: mol_type = other DNA

SEQ ID NO: 203539 - DNA, 80 bp, synthetic construct; identical to SEQ ID NO: 18809
  source 1..80: mol_type = other DNA

SEQ ID NO: 203540 - DNA, 80 bp, synthetic construct; identical to SEQ ID NO: 18810
  source 1..80: mol_type = other DNA

SEQ ID NO: 203541 - DNA, 80 bp, synthetic construct; identical to SEQ ID NO: 18811
  source 1..80: mol_type = other DNA

SEQ ID NO: 203542 - DNA, 80 bp, synthetic construct; identical to SEQ ID NO: 18812
  source 1..80: mol_type = other DNA

SEQ ID NO: 203543 - DNA, 80 bp, synthetic construct; identical to SEQ ID NO: 18813
  source 1..80: mol_type = other DNA

SEQ ID NO: 203544 - DNA, 80 bp, synthetic construct; identical to SEQ ID NO: 18814
  source 1..80: mol_type = other DNA

SEQ ID NO: 203545 - DNA, 80 bp, synthetic construct; identical to SEQ ID NO: 18815
  source 1..80: mol_type = other DNA

SEQ ID NO: 203546 - DNA, 80 bp, synthetic construct; identical to SEQ ID NO: 18816
  source 1..80: mol_type = other DNA

SEQ ID NO: 203547 - DNA, 80 bp, synthetic construct; identical to SEQ ID NO: 18817
  source 1..80: mol_type = other DNA

SEQ ID NO: 203548 - DNA, 80 bp, synthetic construct; identical to SEQ ID NO: 18818
  source 1..80: mol_type = other DNA

SEQ ID NO: 203549 - DNA, 80 bp, synthetic construct; identical to SEQ ID NO: 18819
  source 1..80: mol_type = other DNA

SEQ ID NO: 203550 - DNA, 80 bp, synthetic construct; identical to SEQ ID NO: 18820
  source 1..80: mol_type = other DNA

SEQ ID NO: 203551 - DNA, 80 bp, synthetic construct; identical to SEQ ID NO: 18821
  source 1..80: mol_type = other DNA

SEQ ID NO: 203552 - DNA, 80 bp, synthetic construct; identical to SEQ ID NO: 18822
  source 1..80: mol_type = other DNA

SEQ ID NO: 203553 - DNA, 80 bp, synthetic construct; identical to SEQ ID NO: 18823
  source 1..80: mol_type = other DNA

SEQ ID NO: 203554 - DNA, 80 bp, synthetic construct; identical to SEQ ID NO: 18824
  source 1..80: mol_type = other DNA

SEQ ID NO: 203555 - DNA, 80 bp, synthetic construct; identical to SEQ ID NO: 18825
  source 1..80: mol_type = other DNA

SEQ ID NO: 203556 - DNA, 80 bp, synthetic construct; identical to SEQ ID NO: 18826
  source 1..80: mol_type = other DNA

SEQ ID NO: 203557 - DNA, 80 bp, synthetic construct; identical to SEQ ID NO: 18827
  source 1..80: mol_type = other DNA

SEQ ID NO: 203558 - DNA, 80 bp, synthetic construct; identical to SEQ ID NO: 18828
  source 1..80: mol_type = other DNA

SEQ ID NO: 203559 - DNA, 80 bp, synthetic construct; identical to SEQ ID NO: 18829
  source 1..80: mol_type = other DNA

SEQ ID NO: 203560 - DNA, 80 bp, synthetic construct; identical to SEQ ID NO: 18830
  source 1..80: mol_type = other DNA

SEQ ID NO: 203561 - DNA, 80 bp, synthetic construct; identical to SEQ ID NO: 18831
  source 1..80: mol_type = other DNA

SEQ ID NO: 203562 - DNA, 80 bp, synthetic construct; identical to SEQ ID NO: 18832
  source 1..80: mol_type = other DNA

SEQ ID NO: 203563 - DNA, 80 bp, synthetic construct; identical to SEQ ID NO: 18833
  source 1..80: mol_type = other DNA

SEQ ID NO: 203564 - DNA, 80 bp, synthetic construct; identical to SEQ ID NO: 18834
  source 1..80: mol_type = other DNA

SEQ ID NO: 203565 - DNA, 80 bp, synthetic construct; identical to SEQ ID NO: 18835
  source 1..80: mol_type = other DNA

SEQ ID NO: 203566 - DNA, 80 bp, synthetic construct; identical to SEQ ID NO: 18836
  source 1..80: mol_type = other DNA

SEQ ID NO: 203567 - DNA, 80 bp, synthetic construct; identical to SEQ ID NO: 18837
  source 1..80: mol_type = other DNA

SEQ ID NO: 203568 - DNA, 80 bp, synthetic construct; identical to SEQ ID NO: 18838
  source 1..80: mol_type = other DNA

SEQ ID NO: 203569 - DNA, 80 bp, synthetic construct; identical to SEQ ID NO: 18839
  source 1..80: mol_type = other DNA

SEQ ID NO: 203570 - DNA, 80 bp, synthetic construct; identical to SEQ ID NO: 18840
  source 1..80: mol_type = other DNA

SEQ ID NO: 203571 - DNA, 80 bp, synthetic construct; identical to SEQ ID NO: 18841
  source 1..80: mol_type = other DNA

SEQ ID NO: 203572 - DNA, 80 bp, synthetic construct; identical to SEQ ID NO: 18842
  source 1..80: mol_type = other DNA

SEQ ID NO: 203573 - DNA, 80 bp, synthetic construct; identical to SEQ ID NO: 18843
  source 1..80: mol_type = other DNA

SEQ ID NO: 203574 - DNA, 80 bp, synthetic construct; identical to SEQ ID NO: 18844
  source 1..80: mol_type = other DNA

SEQ ID NO: 203575 - DNA, 80 bp, synthetic construct; identical to SEQ ID NO: 18845
  source 1..80: mol_type = other DNA

SEQ ID NO: 203576 - DNA, 80 bp, synthetic construct; identical to SEQ ID NO: 18846
  source 1..80: mol_type = other DNA

SEQ ID NO: 203577 - DNA, 80 bp, synthetic construct; identical to SEQ ID NO: 18847
  source 1..80: mol_type = other DNA

SEQ ID NO: 203578 - DNA, 80 bp, synthetic construct; identical to SEQ ID NO: 18848
  source 1..80: mol_type = other DNA

SEQ ID NO: 203579 - DNA, 80 bp, synthetic construct; identical to SEQ ID NO: 18849
  source 1..80: mol_type = other DNA

SEQ ID NO: 203580 - DNA, 80 bp, synthetic construct; identical to SEQ ID NO: 18850
  source 1..80: mol_type = other DNA

SEQ ID NO: 203581 - DNA, 80 bp, synthetic construct; identical to SEQ ID NO: 18851
  source 1..80: mol_type = other DNA

SEQ ID NO: 203582 - DNA, 80 bp, synthetic construct; identical to SEQ ID NO: 18852
  source 1..80: mol_type = other DNA

SEQ ID NO: 203583 - DNA, 80 bp, synthetic construct; identical to SEQ ID NO: 18853
  source 1..80: mol_type = other DNA

SEQ ID NO: 203584 - DNA, 80 bp, synthetic construct; identical to SEQ ID NO: 18854
  source 1..80: mol_type = other DNA

SEQ ID NO: 203585 - DNA, 80 bp, synthetic construct; identical to SEQ ID NO: 18855
  source 1..80: mol_type = other DNA

SEQ ID NO: 203586 - DNA, 80 bp, synthetic construct; identical to SEQ ID NO: 18856
  source 1..80: mol_type = other DNA

SEQ ID NO: 203587 - DNA, 80 bp, synthetic construct; identical to SEQ ID NO: 18857
  source 1..80: mol_type = other DNA

SEQ ID NO: 203588 - DNA, 80 bp, synthetic construct; identical to SEQ ID NO: 18858
  source 1..80: mol_type = other DNA

SEQ ID NO: 203589 - DNA, 80 bp, synthetic construct; identical to SEQ ID NO: 18859
  source 1..80: mol_type = other DNA

SEQ ID NO: 203590 - DNA, 80 bp, synthetic construct; identical to SEQ ID NO: 18860
  source 1..80: mol_type = other DNA

SEQ ID NO: 203591 - DNA, 80 bp, synthetic construct; identical to SEQ ID NO: 18861
  source 1..80: mol_type = other DNA

SEQ ID NO: 203592 - DNA, 80 bp, synthetic construct; identical to SEQ ID NO: 18862
  source 1..80: mol_type = other DNA

SEQ ID NO: 203593 - DNA, 80 bp, synthetic construct; identical to SEQ ID NO: 18863
  source 1..80: mol_type = other DNA

SEQ ID NO: 203594 - DNA, 80 bp, synthetic construct; identical to SEQ ID NO: 18864
  source 1..80: mol_type = other DNA

SEQ ID NO: 203595 - DNA, 80 bp, synthetic construct; identical to SEQ ID NO: 18865
  source 1..80: mol_type = other DNA

SEQ ID NO: 203596 - DNA, 80 bp, synthetic construct; identical to SEQ ID NO: 18866
  source 1..80: mol_type = other DNA

SEQ ID NO: 203597 - DNA, 80 bp, synthetic construct; identical to SEQ ID NO: 18867
  source 1..80: mol_type = other DNA

SEQ ID NO: 203598 - DNA, 80 bp, synthetic construct; identical to SEQ ID NO: 18868
  source 1..80: mol_type = other DNA

SEQ ID NO: 203599 - DNA, 80 bp, synthetic construct; identical to SEQ ID NO: 18869
  source 1..80: mol_type = other DNA

SEQ ID NO: 203600 - DNA, 80 bp, synthetic construct; identical to SEQ ID NO: 18870
  source 1..80: mol_type = other DNA

SEQ ID NO: 203601 - DNA, 80 bp, synthetic construct; identical to SEQ ID NO: 18871
  source 1..80: mol_type = other DNA

SEQ ID NO: 203602 - DNA, 80 bp, synthetic construct; identical to SEQ ID NO: 18872
  source 1..80: mol_type = other DNA

SEQ ID NO: 203603 - DNA, 80 bp, synthetic construct; identical to SEQ ID NO: 18873
  source 1..80: mol_type = other DNA

SEQ ID NO: 203604 - DNA, 80 bp, synthetic construct; identical to SEQ ID NO: 18874
  source 1..80: mol_type = other DNA

SEQ ID NO: 203605 - DNA, 80 bp, synthetic construct; identical to SEQ ID NO: 18875
  source 1..80: mol_type = other DNA

SEQ ID NO: 203606 - DNA, 80 bp, synthetic construct; identical to SEQ ID NO: 18876
  source 1..80: mol_type = other DNA

SEQ ID NO: 203607 - DNA, 80 bp, synthetic construct; identical to SEQ ID NO: 18877
  source 1..80: mol_type = other DNA

SEQ ID NO: 203608 - DNA, 80 bp, synthetic construct; identical to SEQ ID NO: 18878
  source 1..80: mol_type = other DNA

SEQ ID NO: 203609 - DNA, 80 bp, synthetic construct; identical to SEQ ID NO: 18879
  source 1..80: mol_type = other DNA

SEQ ID NO: 203610 - DNA, 80 bp, synthetic construct; identical to SEQ ID NO: 18880
  source 1..80: mol_type = other DNA

SEQ ID NO: 203611 - DNA, 80 bp, synthetic construct; identical to SEQ ID NO: 18881
  source 1..80: mol_type = other DNA

SEQ ID NO: 203612 - DNA, 80 bp, synthetic construct; identical to SEQ ID NO: 18882
  source 1..80: mol_type = other DNA

SEQ ID NO: 203613 - DNA, 80 bp, synthetic construct; identical to SEQ ID NO: 18883
  source 1..80: mol_type = other DNA

SEQ ID NO: 203614 - DNA, 80 bp, synthetic construct; identical to SEQ ID NO: 18884
  source 1..80: mol_type = other DNA

SEQ ID NO: 203615 - DNA, 80 bp, synthetic construct; identical to SEQ ID NO: 18885
  source 1..80: mol_type = other DNA

SEQ ID NO: 203616 - DNA, 80 bp, synthetic construct; identical to SEQ ID NO: 18886
  source 1..80: mol_type = other DNA

SEQ ID NO: 203617 - DNA, 80 bp, synthetic construct; identical to SEQ ID NO: 18887
  source 1..80: mol_type = other DNA

SEQ ID NO: 203618 - DNA, 80 bp, synthetic construct; identical to SEQ ID NO: 18888
  source 1..80: mol_type = other DNA

SEQ ID NO: 203619 - DNA, 80 bp, synthetic construct; identical to SEQ ID NO: 18889
  source 1..80: mol_type = other DNA

SEQ ID NO: 203620 - DNA, 80 bp, synthetic construct; identical to SEQ ID NO: 18890
  source 1..80: mol_type = other DNA

SEQ ID NO: 203621 - DNA, 80 bp, synthetic construct; identical to SEQ ID NO: 18891
  source 1..80: mol_type = other DNA

SEQ ID NO: 203622 - DNA, 80 bp, synthetic construct; identical to SEQ ID NO: 18892
  source 1..80: mol_type = other DNA

SEQ ID NO: 203623 - DNA, 80 bp, synthetic construct; identical to SEQ ID NO: 18893
  source 1..80: mol_type = other DNA

SEQ ID NO: 203624 - DNA, 80 bp, synthetic construct; identical to SEQ ID NO: 18894
  source 1..80: mol_type = other DNA

SEQ ID NO: 203625 - DNA, 80 bp, synthetic construct; identical to SEQ ID NO: 18895
  source 1..80: mol_type = other DNA

SEQ ID NO: 203626 - DNA, 80 bp, synthetic construct; identical to SEQ ID NO: 18896
  source 1..80: mol_type = other DNA

SEQ ID NO: 203627 - DNA, 80 bp, synthetic construct; identical to SEQ ID NO: 18897
  source 1..80: mol_type = other DNA

SEQ ID NO: 203628 - DNA, 80 bp, synthetic construct; identical to SEQ ID NO: 18898
  source 1..80: mol_type = other DNA

SEQ ID NO: 203629 - DNA, 80 bp, synthetic construct; identical to SEQ ID NO: 18899
  source 1..80: mol_type = other DNA

SEQ ID NO: 203630 - DNA, 80 bp, synthetic construct; identical to SEQ ID NO: 18900
  source 1..80: mol_type = other DNA

SEQ ID NO: 203631 - DNA, 80 bp, synthetic construct; identical to SEQ ID NO: 18901
  source 1..80: mol_type = other DNA

SEQ ID NO: 203632 - DNA, 80 bp, synthetic construct; identical to SEQ ID NO: 18902
  source 1..80: mol_type = other DNA

SEQ ID NO: 203633 - DNA, 80 bp, synthetic construct; identical to SEQ ID NO: 18903
  source 1..80: mol_type = other DNA

SEQ ID NO: 203634 - DNA, 80 bp, synthetic construct; identical to SEQ ID NO: 18904
  source 1..80: mol_type = other DNA

SEQ ID NO: 203635 - DNA, 80 bp, synthetic construct; identical to SEQ ID NO: 18905
  source 1..80: mol_type = other DNA

SEQ ID NO: 203636 - DNA, 80 bp, synthetic construct; identical to SEQ ID NO: 18906
  source 1..80: mol_type = other DNA

SEQ ID NO: 203637 - DNA, 80 bp, synthetic construct; identical to SEQ ID NO: 18907
  source 1..80: mol_type = other DNA

SEQ ID NO: 203638 - DNA, 80 bp, synthetic construct; identical to SEQ ID NO: 18908
  source 1..80: mol_type = other DNA

SEQ ID NO: 203639 - DNA, 80 bp, synthetic construct; identical to SEQ ID NO: 18909
  source 1..80: mol_type = other DNA

SEQ ID NO: 203640 - DNA, 80 bp, synthetic construct; identical to SEQ ID NO: 18910
  source 1..80: mol_type = other DNA

SEQ ID NO: 203641 - DNA, 80 bp, synthetic construct; identical to SEQ ID NO: 18911
  source 1..80: mol_type = other DNA

SEQ ID NO: 203642 - DNA, 80 bp, synthetic construct; identical to SEQ ID NO: 18912
  source 1..80: mol_type = other DNA

SEQ ID NO: 203643 - DNA, 80 bp, synthetic construct; identical to SEQ ID NO: 18913
  source 1..80: mol_type = other DNA

SEQ ID NO: 203644 - DNA, 80 bp, synthetic construct; identical to SEQ ID NO: 18914
  source 1..80: mol_type = other DNA

SEQ ID NO: 203645 - DNA, 80 bp, synthetic construct; identical to SEQ ID NO: 18915
  source 1..80: mol_type = other DNA

SEQ ID NO: 203646 - DNA, 80 bp, synthetic construct; identical to SEQ ID NO: 18916
  source 1..80: mol_type = other DNA

SEQ ID NO: 203647 - DNA, 80 bp, synthetic construct; identical to SEQ ID NO: 18917
  source 1..80: mol_type = other DNA

SEQ ID NO: 203648 - DNA, 80 bp, synthetic construct; identical to SEQ ID NO: 18918
  source 1..80: mol_type = other DNA

SEQ ID NO: 203649 - DNA, 80 bp, synthetic construct; identical to SEQ ID NO: 18919
  source 1..80: mol_type = other DNA

SEQ ID NO: 203650 - DNA, 80 bp, synthetic construct; identical to SEQ ID NO: 18920
  source 1..80: mol_type = other DNA

SEQ ID NO: 203651 - DNA, 80 bp, synthetic construct; identical to SEQ ID NO: 18921
  source 1..80: mol_type = other DNA

SEQ ID NO: 203652 - DNA, 80 bp, synthetic construct; identical to SEQ ID NO: 18922
  source 1..80: mol_type = other DNA

SEQ ID NO: 203653 - DNA, 80 bp, synthetic construct; identical to SEQ ID NO: 18923
  source 1..80: mol_type = other DNA

SEQ ID NO: 203654 - DNA, 80 bp, synthetic construct; identical to SEQ ID NO: 18924
  source 1..80: mol_type = other DNA

SEQ ID NO: 203655 - DNA, 80 bp, synthetic construct; identical to SEQ ID NO: 18925
  source 1..80: mol_type = other DNA

SEQ ID NO: 203656 - DNA, 80 bp, synthetic construct; identical to SEQ ID NO: 18926
  source 1..80: mol_type = other DNA

SEQ ID NO: 203657 - DNA, 80 bp, synthetic construct; identical to SEQ ID NO: 18927
  source 1..80: mol_type = other DNA

SEQ ID NO: 203658 - DNA, 80 bp, synthetic construct; identical to SEQ ID NO: 18928
  source 1..80: mol_type = other DNA

SEQ ID NO: 203659 - DNA, 80 bp, synthetic construct; identical to SEQ ID NO: 18929
  source 1..80: mol_type = other DNA

SEQ ID NO: 203660 - DNA, 80 bp, synthetic construct; identical to SEQ ID NO: 18930
  source 1..80: mol_type = other DNA

SEQ ID NO: 203661 - DNA, 80 bp, synthetic construct; identical to SEQ ID NO: 18931
  source 1..80: mol_type = other DNA

SEQ ID NO: 203662 - DNA, 80 bp, synthetic construct; identical to SEQ ID NO: 18932
  source 1..80: mol_type = other DNA

SEQ ID NO: 203663 - DNA, 80 bp, synthetic construct; identical to SEQ ID NO: 18933
  source 1..80: mol_type = other DNA

SEQ ID NO: 203664 - DNA, 80 bp, synthetic construct; identical to SEQ ID NO: 18934
  source 1..80: mol_type = other DNA

SEQ ID NO: 203665 - DNA, 80 bp, synthetic construct; identical to SEQ ID NO: 18935
  source 1..80: mol_type = other DNA

SEQ ID NO: 203666 - DNA, 80 bp, synthetic construct; identical to SEQ ID NO: 18936
  source 1..80: mol_type = other DNA

SEQ ID NO: 203667 - DNA, 80 bp, synthetic construct; identical to SEQ ID NO: 18937
  source 1..80: mol_type = other DNA

SEQ ID NO: 203668 - DNA, 80 bp, synthetic construct; identical to SEQ ID NO: 18938
  source 1..80: mol_type = other DNA

SEQ ID NO: 203669 - DNA, 80 bp, synthetic construct; identical to SEQ ID NO: 18939
  source 1..80: mol_type = other DNA

SEQ ID NO: 203670 - DNA, 80 bp, synthetic construct; identical to SEQ ID NO: 18940
  source 1..80: mol_type = other DNA

SEQ ID NO: 203671 - DNA, 80 bp, synthetic construct; identical to SEQ ID NO: 18941
  source 1..80: mol_type = other DNA

SEQ ID NO: 203672 - DNA, 80 bp, synthetic construct; identical to SEQ ID NO: 18942
  source 1..80: mol_type = other DNA

SEQ ID NO: 203673 - DNA, 80 bp, synthetic construct; identical to SEQ ID NO: 18943
  source 1..80: mol_type = other DNA

SEQ ID NO: 203674 - DNA, 80 bp, synthetic construct; identical to SEQ ID NO: 18944
  source 1..80: mol_type = other DNA

SEQ ID NO: 203675 - DNA, 80 bp, synthetic construct; identical to SEQ ID NO: 18945
  source 1..80: mol_type = other DNA

SEQ ID NO: 203676 - DNA, 80 bp, synthetic construct; identical to SEQ ID NO: 18946
  source 1..80: mol_type = other DNA

SEQ ID NO: 203677 - DNA, 80 bp, synthetic construct; identical to SEQ ID NO: 18947
  source 1..80: mol_type = other DNA

SEQ ID NO: 203678 - DNA, 80 bp, synthetic construct; identical to SEQ ID NO: 18948
  source 1..80: mol_type = other DNA

SEQ ID NO: 203679 - DNA, 80 bp, synthetic construct; identical to SEQ ID NO: 18949
  source 1..80: mol_type = other DNA

SEQ ID NO: 203680 - DNA, 80 bp, synthetic construct; identical to SEQ ID NO: 18950
  source 1..80: mol_type = other DNA

SEQ ID NO: 203681 - DNA, 80 bp, synthetic construct; identical to SEQ ID NO: 18951
  source 1..80: mol_type = other DNA

SEQ ID NO: 203682 - DNA, 80 bp, synthetic construct; identical to SEQ ID NO: 18952
  source 1..80: mol_type = other DNA

SEQ ID NO: 203683 - DNA, 80 bp, synthetic construct; identical to SEQ ID NO: 18953
  source 1..80: mol_type = other DNA

SEQ ID NO: 203684 - DNA, 80 bp, synthetic construct; identical to SEQ ID NO: 18954
  source 1..80: mol_type = other DNA

SEQ ID NO: 203685 - DNA, 80 bp, synthetic construct; identical to SEQ ID NO: 18955
  source 1..80: mol_type = other DNA

SEQ ID NO: 203686 - DNA, 80 bp, synthetic construct; identical to SEQ ID NO: 18956
  source 1..80: mol_type = other DNA

SEQ ID NO: 203687 - DNA, 80 bp, synthetic construct; identical to SEQ ID NO: 18957
  source 1..80: mol_type = other DNA

SEQ ID NO: 203688 - DNA, 80 bp, synthetic construct; identical to SEQ ID NO: 18958
  source 1..80: mol_type = other DNA

SEQ ID NO: 203689 - DNA, 80 bp, synthetic construct; identical to SEQ ID NO: 18959
  source 1..80: mol_type = other DNA

SEQ ID NO: 203690 - DNA, 80 bp, synthetic construct; identical to SEQ ID NO: 18960
  source 1..80: mol_type = other DNA

SEQ ID NO: 203691 - DNA, 80 bp, synthetic construct; identical to SEQ ID NO: 18961
  source 1..80: mol_type = other DNA

SEQ ID NO: 203692 - DNA, 80 bp, synthetic construct; identical to SEQ ID NO: 18962
  source 1..80: mol_type = other DNA

SEQ ID NO: 203693 - DNA, 80 bp, synthetic construct; identical to SEQ ID NO: 18963
  source 1..80: mol_type = other DNA

SEQ ID NO: 203694 - DNA, 80 bp, synthetic construct; identical to SEQ ID NO: 18964
  source 1..80: mol_type = other DNA

SEQ ID NO: 203695 - DNA, 80 bp, synthetic construct; identical to SEQ ID NO: 18965
  source 1..80: mol_type = other DNA

SEQ ID NO: 203696 - DNA, 80 bp, synthetic construct; identical to SEQ ID NO: 18966
  source 1..80: mol_type = other DNA

SEQ ID NO: 203697 - DNA, 80 bp, synthetic construct; identical to SEQ ID NO: 18967
  source 1..80: mol_type = other DNA

SEQ ID NO: 203698 - DNA, 80 bp, synthetic construct; identical to SEQ ID NO: 18968
  source 1..80: mol_type = other DNA

SEQ ID NO: 203699 - DNA, 80 bp, synthetic construct; identical to SEQ ID NO: 18969
  source 1..80: mol_type = other DNA

SEQ ID NO: 203700 - DNA, 80 bp, synthetic construct; identical to SEQ ID NO: 18970
  source 1..80: mol_type = other DNA

SEQ ID NO: 203701 - DNA, 80 bp, synthetic construct; identical to SEQ ID NO: 18971
  source 1..80: mol_type = other DNA

SEQ ID NO: 203702 - DNA, 80 bp, synthetic construct; identical to SEQ ID NO: 18972
  source 1..80: mol_type = other DNA

SEQ ID NO: 203703 - DNA, 80 bp, synthetic construct; identical to SEQ ID NO: 18973
  source 1..80: mol_type = other DNA

SEQ ID NO: 203704 - DNA, 80 bp, synthetic construct; identical to SEQ ID NO: 18974
  source 1..80: mol_type = other DNA

SEQ ID NO: 203705 - DNA, 80 bp, synthetic construct; identical to SEQ ID NO: 18975
  source 1..80: mol_type = other DNA

SEQ ID NO: 203706 - DNA, 80 bp, synthetic construct; identical to SEQ ID NO: 18976
  source 1..80: mol_type = other DNA

SEQ ID NO: 203707 - DNA, 80 bp, synthetic construct; identical to SEQ ID NO: 18977
  source 1..80: mol_type = other DNA

SEQ ID NO: 203708 - DNA, 80 bp, synthetic construct; identical to SEQ ID NO: 18978
  source 1..80: mol_type = other DNA

SEQ ID NO: 203709 - DNA, 80 bp, synthetic construct; identical to SEQ ID NO: 18979
  source 1..80: mol_type = other DNA

SEQ ID NO: 203710 - DNA, 80 bp, synthetic construct; identical to SEQ ID NO: 18980
  source 1..80: mol_type = other DNA

SEQ ID NO: 203711 - DNA, 80 bp, synthetic construct; identical to SEQ ID NO: 18981
  source 1..80: mol_type = other DNA

SEQ ID NO: 203712 - DNA, 80 bp, synthetic construct; identical to SEQ ID NO: 18982
  source 1..80: mol_type = other DNA

SEQ ID NO: 203713 - DNA, 80 bp, synthetic construct; identical to SEQ ID NO: 18983
  source 1..80: mol_type = other DNA

SEQ ID NO: 203714 - DNA, 80 bp, synthetic construct; identical to SEQ ID NO: 18984
  source 1..80: mol_type = other DNA

SEQ ID NO: 203715 - DNA, 80 bp, synthetic construct; identical to SEQ ID NO: 18985
  source 1..80: mol_type = other DNA

SEQ ID NO: 203716 - DNA, 80 bp, synthetic construct; identical to SEQ ID NO: 18986
  source 1..80: mol_type = other DNA

SEQ ID NO: 203717 - DNA, 80 bp, synthetic construct; identical to SEQ ID NO: 18987
  source 1..80: mol_type = other DNA

SEQ ID NO: 203718 - DNA, 80 bp, synthetic construct; identical to SEQ ID NO: 18988
  source 1..80: mol_type = other DNA

SEQ ID NO: 203719 - DNA, 80 bp, synthetic construct; identical to SEQ ID NO: 18989
  source 1..80: mol_type = other DNA

SEQ ID NO: 203720 - DNA, 80 bp, synthetic construct; identical to SEQ ID NO: 18990
  source 1..80: mol_type = other DNA

SEQ ID NO: 203721 - DNA, 80 bp, synthetic construct; identical to SEQ ID NO: 18991
  source 1..80: mol_type = other DNA

SEQ ID NO: 203722 - DNA, 80 bp, synthetic construct; identical to SEQ ID NO: 18992
  source 1..80: mol_type = other DNA

SEQ ID NO: 203723 - DNA, 80 bp, synthetic construct; identical to SEQ ID NO: 18993
  source 1..80: mol_type = other DNA

SEQ ID NO: 203724 - DNA, 80 bp, synthetic construct; identical to SEQ ID NO: 18994
  source 1..80: mol_type = other DNA

SEQ ID NO: 203725 - DNA, 80 bp, synthetic construct; identical to SEQ ID NO: 18995
  source 1..80: mol_type = other DNA

SEQ ID NO: 203726 - DNA, 80 bp, synthetic construct; identical to SEQ ID NO: 18996
  source 1..80: mol_type = other DNA

SEQ ID NO: 203727 - DNA, 80 bp, synthetic construct; identical to SEQ ID NO: 18997
  source 1..80: mol_type = other DNA

SEQ ID NO: 203728 - DNA, 80 bp, synthetic construct; identical to SEQ ID NO: 18998
  source 1..80: mol_type = other DNA

SEQ ID NO: 203729 - DNA, 80 bp, synthetic construct; identical to SEQ ID NO: 18999
  source 1..80: mol_type = other DNA

SEQ ID NO: 203730 - DNA, 80 bp, synthetic construct; identical to SEQ ID NO: 19000
  source 1..80: mol_type = other DNA

SEQ ID NO: 203731 - DNA, 80 bp, synthetic construct; identical to SEQ ID NO: 19001
  source 1..80: mol_type = other DNA

SEQ ID NO: 203732 - DNA, 80 bp, synthetic construct; identical to SEQ ID NO: 19002
  source 1..80: mol_type = other DNA

SEQ ID NO: 203733 - DNA, 80 bp, synthetic construct; identical to SEQ ID NO: 19003
  source 1..80: mol_type = other DNA

SEQ ID NO: 203734 - DNA, 80 bp, synthetic construct; identical to SEQ ID NO: 19004
  source 1..80: mol_type = other DNA

SEQ ID NO: 203735 - DNA, 80 bp, synthetic construct; identical to SEQ ID NO: 19005
  source 1..80: mol_type = other DNA

SEQ ID NO: 203736 - DNA, 80 bp, synthetic construct; identical to SEQ ID NO: 19006
  source 1..80: mol_type = other DNA

SEQ ID NO: 203737 - DNA, 80 bp, synthetic construct; identical to SEQ ID NO: 19007
  source 1..80: mol_type = other DNA

SEQ ID NO: 203738 - DNA, 80 bp, synthetic construct; identical to SEQ ID NO: 19008
  source 1..80: mol_type = other DNA

SEQ ID NO: 203739 - DNA, 80 bp, synthetic construct; identical to SEQ ID NO: 19009
  source 1..80: mol_type = other DNA

SEQ ID NO: 203740 - DNA, 80 bp, synthetic construct; identical to SEQ ID NO: 19010
  source 1..80: mol_type = other DNA

SEQ ID NO: 203741 - DNA, 80 bp, synthetic construct; identical to SEQ ID NO: 19011
  source 1..80: mol_type = other DNA

SEQ ID NO: 203742 - DNA, 80 bp, synthetic construct; identical to SEQ ID NO: 19012
  source 1..80: mol_type = other DNA

SEQ ID NO: 203743 - DNA, 80 bp, synthetic construct; identical to SEQ ID NO: 19013
  source 1..80: mol_type = other DNA

SEQ ID NO: 203744 - DNA, 80 bp, synthetic construct; identical to SEQ ID NO: 19014
  source 1..80: mol_type = other DNA

SEQ ID NO: 203745 - DNA, 80 bp, synthetic construct; identical to SEQ ID NO: 19015
  source 1..80: mol_type = other DNA

SEQ ID NO: 203746 - DNA, 80 bp, synthetic construct; identical to SEQ ID NO: 19016
  source 1..80: mol_type = other DNA

SEQ ID NO: 203747 - DNA, 80 bp, synthetic construct; identical to SEQ ID NO: 19017
  source 1..80: mol_type = other DNA

SEQ ID NO: 203748 - DNA, 80 bp, synthetic construct; identical to SEQ ID NO: 19018
  source 1..80: mol_type = other DNA

SEQ ID NO: 203749 - DNA, 80 bp, synthetic construct; identical to SEQ ID NO: 19019
  source 1..80: mol_type = other DNA

SEQ ID NO: 203750 - DNA, 80 bp, synthetic construct; identical to SEQ ID NO: 19020
  source 1..80: mol_type = other DNA

SEQ ID NO: 203751 - DNA, 80 bp, synthetic construct; identical to SEQ ID NO: 19021
  source 1..80: mol_type = other DNA

SEQ ID NO: 203752 - DNA, 80 bp, synthetic construct; identical to SEQ ID NO: 19022
  source 1..80: mol_type = other DNA

SEQ ID NO: 203753 - DNA, 80 bp, synthetic construct; identical to SEQ ID NO: 19023
  source 1..80: mol_type = other DNA

SEQ ID NO: 203754 - DNA, 80 bp, synthetic construct; identical to SEQ ID NO: 19024
  source 1..80: mol_type = other DNA

SEQ ID NO: 203755 - DNA, 80 bp, synthetic construct; identical to SEQ ID NO: 19025
  source 1..80: mol_type = other DNA

SEQ ID NO: 203756 - DNA, 80 bp, synthetic construct; identical to SEQ ID NO: 19026
  source 1..80: mol_type = other DNA

SEQ ID NO: 203757 - DNA, 80 bp, synthetic construct; identical to SEQ ID NO: 19027
  source 1..80: mol_type = other DNA

SEQ ID NO: 203758 - DNA, 80 bp, synthetic construct; identical to SEQ ID NO: 19028
  source 1..80: mol_type = other DNA

SEQ ID NO: 203759 - DNA, 80 bp, synthetic construct; identical to SEQ ID NO: 19029
  source 1..80: mol_type = other DNA

SEQ ID NO: 203760 - DNA, 80 bp, synthetic construct; identical to SEQ ID NO: 19030
  source 1..80: mol_type = other DNA

SEQ ID NO: 203761 - DNA, 80 bp, synthetic construct; identical to SEQ ID NO: 19031
  source 1..80: mol_type = other DNA

SEQ ID NO: 203762 - DNA, 80 bp, synthetic construct; identical to SEQ ID NO: 19032
  source 1..80: mol_type = other DNA

SEQ ID NO: 203763 - DNA, 80 bp, synthetic construct; identical to SEQ ID NO: 19033
  source 1..80: mol_type = other DNA

SEQ ID NO: 203764 - DNA, 80 bp, synthetic construct; identical to SEQ ID NO: 19034
  source 1..80: mol_type = other DNA

SEQ ID NO: 203765 - DNA, 80 bp, synthetic construct; identical to SEQ ID NO: 19035
  source 1..80: mol_type = other DNA

SEQ ID NO: 203766 - DNA, 80 bp, synthetic construct; identical to SEQ ID NO: 19036
  source 1..80: mol_type = other DNA

SEQ ID NO: 203767 - DNA, 80 bp, synthetic construct; identical to SEQ ID NO: 19037
  source 1..80: mol_type = other DNA

SEQ ID NO: 203768 - DNA, 80 bp, synthetic construct; identical to SEQ ID NO: 19038
  source 1..80: mol_type = other DNA

SEQ ID NO: 203769 - DNA, 80 bp, synthetic construct; identical to SEQ ID NO: 19039
  source 1..80: mol_type = other DNA

SEQ ID NO: 203770 - DNA, 80 bp, synthetic construct; identical to SEQ ID NO: 19040
  source 1..80: mol_type = other DNA

SEQ ID NO: 203771 - DNA, 80 bp, synthetic construct; identical to SEQ ID NO: 19041
  source 1..80: mol_type = other DNA

SEQ ID NO: 203772 - DNA, 80 bp, synthetic construct; identical to SEQ ID NO: 19042
  source 1..80: mol_type = other DNA

SEQ ID NO: 203773 - DNA, 80 bp, synthetic construct; identical to SEQ ID NO: 19043
  source 1..80: mol_type = other DNA

SEQ ID NO: 203774 - DNA, 80 bp, synthetic construct; identical to SEQ ID NO: 19044
  source 1..80: mol_type = other DNA

SEQ ID NO: 203775 - DNA, 80 bp, synthetic construct; identical to SEQ ID NO: 19045
  source 1..80: mol_type = other DNA

SEQ ID NO: 203776 - DNA, 80 bp, synthetic construct; identical to SEQ ID NO: 19046
  source 1..80: mol_type = other DNA

SEQ ID NO: 203777 - DNA, 80 bp, synthetic construct; identical to SEQ ID NO: 19047
  source 1..80: mol_type = other DNA

SEQ ID NO: 203778 - DNA, 80 bp, synthetic construct; identical to SEQ ID NO: 19048
  source 1..80: mol_type = other DNA

SEQ ID NO: 203779 - DNA, 80 bp, synthetic construct; identical to SEQ ID NO: 19049
  source 1..80: mol_type = other DNA

SEQ ID NO: 203780 - DNA, 80 bp, synthetic construct; identical to SEQ ID NO: 19050
  source 1..80: mol_type = other DNA

SEQ ID NO: 203781 - DNA, 80 bp, synthetic construct; identical to SEQ ID NO: 19051
  source 1..80: mol_type = other DNA

SEQ ID NO: 203782 - DNA, 80 bp, synthetic construct; identical to SEQ ID NO: 19052
  source 1..80: mol_type = other DNA

SEQ ID NO: 203783 - DNA, 80 bp, synthetic construct; identical to SEQ ID NO: 19053
  source 1..80: mol_type = other DNA

SEQ ID NO: 203784 - DNA, 80 bp, synthetic construct; identical to SEQ ID NO: 19054
  source 1..80: mol_type = other DNA

SEQ ID NO: 203785 - DNA, 80 bp, synthetic construct; identical to SEQ ID NO: 19055
  source 1..80: mol_type = other DNA

SEQ ID NO: 203786 - DNA, 80 bp, synthetic construct; identical to SEQ ID NO: 19056
  source 1..80: mol_type = other DNA

SEQ ID NO: 203787 - DNA, 80 bp, synthetic construct; identical to SEQ ID NO: 19057
  source 1..80: mol_type = other DNA

SEQ ID NO: 203788 - DNA, 80 bp, synthetic construct; identical to SEQ ID NO: 19058
  source 1..80: mol_type = other DNA

SEQ ID NO: 203789 - DNA, 80 bp, synthetic construct; identical to SEQ ID NO: 19059
  source 1..80: mol_type = other DNA

SEQ ID NO: 203790 - DNA, 80 bp, synthetic construct; identical to SEQ ID NO: 19060
  source 1..80: mol_type = other DNA

SEQ ID NO: 203791 - DNA, 80 bp, synthetic construct; identical to SEQ ID NO: 19061
  source 1..80: mol_type = other DNA

SEQ ID NO: 203792 - DNA, 80 bp, synthetic construct; identical to SEQ ID NO: 19062
  source 1..80: mol_type = other DNA

SEQ ID NO: 203793 - DNA, 80 bp, synthetic construct; identical to SEQ ID NO: 19063
  source 1..80: mol_type = other DNA

SEQ ID NO: 203794 - DNA, 80 bp, synthetic construct; identical to SEQ ID NO: 19064
  source 1..80: mol_type = other DNA

SEQ ID NO: 203795 - DNA, 80 bp, synthetic construct; identical to SEQ ID NO: 19065
  source 1..80: mol_type = other DNA

SEQ ID NO: 203796 - DNA, 80 bp, synthetic construct; identical to SEQ ID NO: 19066
  source 1..80: mol_type = other DNA

SEQ ID NO: 203797 - DNA, 80 bp, synthetic construct; identical to SEQ ID NO: 19067
  source 1..80: mol_type = other DNA

SEQ ID NO: 203798 - DNA, 80 bp, synthetic construct; identical to SEQ ID NO: 19068
  source 1..80: mol_type = other DNA

SEQ ID NO: 203799 - DNA, 80 bp, synthetic construct; identical to SEQ ID NO: 19069
  source 1..80: mol_type = other DNA

SEQ ID NO: 203800 - DNA, 80 bp, synthetic construct; identical to SEQ ID NO: 19070
  source 1..80: mol_type = other DNA

SEQ ID NO: 203801 - DNA, 80 bp, synthetic construct; identical to SEQ ID NO: 19071
  source 1..80: mol_type = other DNA

SEQ ID NO: 203802 - DNA, 80 bp, synthetic construct; identical to SEQ ID NO: 19072
  source 1..80: mol_type = other DNA

SEQ ID NO: 203803 - DNA, 80 bp, synthetic construct; identical to SEQ ID NO: 19073
  source 1..80: mol_type = other DNA

SEQ ID NO: 203804 - DNA, 80 bp, synthetic construct; identical to SEQ ID NO: 19074
  source 1..80: mol_type = other DNA

SEQ ID NO: 203805 - DNA, 80 bp, synthetic construct; identical to SEQ ID NO: 19075
  source 1..80: mol_type = other DNA

SEQ ID NO: 203806 - DNA, 80 bp, synthetic construct; identical to SEQ ID NO: 19076
  source 1..80: mol_type = other DNA

SEQ ID NO: 203807 - DNA, 80 bp, synthetic construct; identical to SEQ ID NO: 19077
  source 1..80: mol_type = other DNA

SEQ ID NO: 203808 - DNA, 80 bp, synthetic construct; identical to SEQ ID NO: 19078
  source 1..80: mol_type = other DNA

SEQ ID NO: 203809 - DNA, 80 bp, synthetic construct; identical to SEQ ID NO: 19079
  source 1..80: mol_type = other DNA

SEQ ID NO: 203810 - DNA, 80 bp, synthetic construct; identical to SEQ ID NO: 19080
  source 1..80: mol_type = other DNA

SEQ ID NO: 203811 - DNA, 80 bp, synthetic construct; identical to SEQ ID NO: 19081
  source 1..80: mol_type = other DNA

SEQ ID NO: 203812 - DNA, 80 bp, synthetic construct; identical to SEQ ID NO: 19082
  source 1..80: mol_type = other DNA

SEQ ID NO: 203813 - DNA, 80 bp, synthetic construct; identical to SEQ ID NO: 19083
  source 1..80: mol_type = other DNA

SEQ ID NO: 203814 - DNA, 80 bp, synthetic construct; identical to SEQ ID NO: 19084
  source 1..80: mol_type = other DNA

SEQ ID NO: 203815 - DNA, 80 bp, synthetic construct; identical to SEQ ID NO: 19085
  source 1..80: mol_type = other DNA

SEQ ID NO: 203816 - DNA, 80 bp, synthetic construct; identical to SEQ ID NO: 19086
  source 1..80: mol_type = other DNA

SEQ ID NO: 203817 - DNA, 80 bp, synthetic construct; identical to SEQ ID NO: 19087
  source 1..80: mol_type = other DNA

SEQ ID NO: 203818 - DNA, 80 bp, synthetic construct; identical to SEQ ID NO: 19088
  source 1..80: mol_type = other DNA

SEQ ID NO: 203819 - DNA, 80 bp, synthetic construct; identical to SEQ ID NO: 19089
  source 1..80: mol_type = other DNA

SEQ ID NO: 203820 - DNA, 80 bp, synthetic construct; identical to SEQ ID NO: 19090
  source 1..80: mol_type = other DNA

SEQ ID NO: 203821 - DNA, 80 bp, synthetic construct; identical to SEQ ID NO: 19091
  source 1..80: mol_type = other DNA

SEQ ID NO: 203822 - DNA, 80 bp, synthetic construct; identical to SEQ ID NO: 19092
  source 1..80: mol_type = other DNA

SEQ ID NO: 203823 - DNA, 80 bp, synthetic construct; identical to SEQ ID NO: 19093
  source 1..80: mol_type = other DNA

SEQ ID NO: 203824 - DNA, 80 bp, synthetic construct; identical to SEQ ID NO: 19094
  source 1..80: mol_type = other DNA

SEQ ID NO: 203825 - DNA, 80 bp, synthetic construct; identical to SEQ ID NO: 19095
  source 1..80: mol_type = other DNA

SEQ ID NO: 203826 - DNA, 80 bp, synthetic construct; identical to SEQ ID NO: 19096
  source 1..80: mol_type = other DNA

SEQ ID NO: 203827 - DNA, 80 bp, synthetic construct; identical to SEQ ID NO: 19097
  source 1..80: mol_type = other DNA

SEQ ID NO: 203828 - DNA, 80 bp, synthetic construct; identical to SEQ ID NO: 19098
  source 1..80: mol_type = other DNA

SEQ ID NO: 203829 - DNA, 80 bp, synthetic construct; identical to SEQ ID NO: 19099
  source 1..80: mol_type = other DNA

SEQ ID NO: 203830 - DNA, 80 bp, synthetic construct; identical to SEQ ID NO: 19100
  source 1..80: mol_type = other DNA

SEQ ID NO: 203831 - DNA, 80 bp, synthetic construct; identical to SEQ ID NO: 19101
  source 1..80: mol_type = other DNA

SEQ ID NO: 203832 - DNA, 80 bp, synthetic construct; identical to SEQ ID NO: 19102
  source 1..80: mol_type = other DNA

SEQ ID NO: 203833 - DNA, 80 bp, synthetic construct; identical to SEQ ID NO: 19103
  source 1..80: mol_type = other DNA

SEQ ID NO: 203834 - DNA, 80 bp, synthetic construct; identical to SEQ ID NO: 19104
  source 1..80: mol_type = other DNA

SEQ ID NO: 203835 - DNA, 80 bp, synthetic construct; identical to SEQ ID NO: 19105
  source 1..80: mol_type = other DNA

SEQ ID NO: 203836 - DNA, 80 bp, synthetic construct; identical to SEQ ID NO: 19106
  source 1..80: mol_type = other DNA

SEQ ID NO: 203837 - DNA, 80 bp, synthetic construct; identical to SEQ ID NO: 19107
  source 1..80: mol_type = other DNA

SEQ ID NO: 203838 - DNA, 80 bp, synthetic construct; identical to SEQ ID NO: 19108
  source 1..80: mol_type = other DNA

SEQ ID NO: 203839 - DNA, 80 bp, synthetic construct; identical to SEQ ID NO: 19109
  source 1..80: mol_type = other DNA

SEQ ID NO: 203840 - DNA, 80 bp, synthetic construct; identical to SEQ ID NO: 19110
  source 1..80: mol_type = other DNA

SEQ ID NO: 203841 - DNA, 80 bp, synthetic construct; identical to SEQ ID NO: 19111
  source 1..80: mol_type = other DNA

SEQ ID NO: 203842 - DNA, 80 bp, synthetic construct; identical to SEQ ID NO: 19112
  source 1..80: mol_type = other DNA

SEQ ID NO: 203843 - DNA, 80 bp, synthetic construct; identical to SEQ ID NO: 19113
  source 1..80: mol_type = other DNA

SEQ ID NO: 203844 - DNA, 80 bp, synthetic construct; identical to SEQ ID NO: 19114
  source 1..80: mol_type = other DNA

SEQ ID NO: 203845 - DNA, 80 bp, synthetic construct; identical to SEQ ID NO: 19115
  source 1..80: mol_type = other DNA

SEQ ID NO: 203846 - DNA, 80 bp, synthetic construct; identical to SEQ ID NO: 19116
  source 1..80: mol_type = other DNA

SEQ ID NO: 203847 - DNA, 80 bp, synthetic construct; identical to SEQ ID NO: 19117
  source 1..80: mol_type = other DNA

SEQ ID NO: 203848 - DNA, 80 bp, synthetic construct; identical to SEQ ID NO: 19118
  source 1..80: mol_type = other DNA

SEQ ID NO: 203849 - DNA, 80 bp, synthetic construct; identical to SEQ ID NO: 19119
  source 1..80: mol_type = other DNA

SEQ ID NO: 203850 - DNA, 80 bp, synthetic construct; identical to SEQ ID NO: 19120
  source 1..80: mol_type = other DNA

SEQ ID NO: 203851 - DNA, 80 bp, synthetic construct; identical to SEQ ID NO: 19121
  source 1..80: mol_type = other DNA

SEQ ID NO: 203852 - DNA, 80 bp, synthetic construct; identical to SEQ ID NO: 19122
  source 1..80: mol_type = other DNA

SEQ ID NO: 203853 - DNA, 80 bp, synthetic construct; identical to SEQ ID NO: 19123
  source 1..80: mol_type = other DNA

SEQ ID NO: 203854 - DNA, 80 bp, synthetic construct; identical to SEQ ID NO: 19124
  source 1..80: mol_type = other DNA

SEQ ID NO: 203855 - DNA, 80 bp, synthetic construct; identical to SEQ ID NO: 19125
  source 1..80: mol_type = other DNA

SEQ ID NO: 203856 - DNA, 80 bp, synthetic construct; identical to SEQ ID NO: 19126
  source 1..80: mol_type = other DNA

SEQ ID NO: 203857 - DNA, 80 bp, synthetic construct; identical to SEQ ID NO: 19127
  source 1..80: mol_type = other DNA

SEQ ID NO: 203858 - DNA, 80 bp, synthetic construct; identical to SEQ ID NO: 19128
  source 1..80: mol_type = other DNA

SEQ ID NO: 203859 - DNA, 80 bp, synthetic construct; identical to SEQ ID NO: 19129
  source 1..80: mol_type = other DNA

SEQ ID NO: 203860 - DNA, 80 bp, synthetic construct; identical to SEQ ID NO: 19130
  source 1..80: mol_type = other DNA

SEQ ID NO: 203861 - DNA, 80 bp, synthetic construct; identical to SEQ ID NO: 19131
  source 1..80: mol_type = other DNA

SEQ ID NO: 203862 - DNA, 80 bp, synthetic construct; identical to SEQ ID NO: 19132
  source 1..80: mol_type = other DNA

SEQ ID NO: 203863 - DNA, 80 bp, synthetic construct; identical to SEQ ID NO: 19133
  source 1..80: mol_type = other DNA

SEQ ID NO: 203864 - DNA, 80 bp, synthetic construct; identical to SEQ ID NO: 19134
  source 1..80: mol_type = other DNA

SEQ ID NO: 203865 - DNA, 80 bp, synthetic construct; identical to SEQ ID NO: 19135
  source 1..80: mol_type = other DNA

SEQ ID NO: 203866 - DNA, 80 bp, synthetic construct; identical to SEQ ID NO: 19136
  source 1..80: mol_type = other DNA

SEQ ID NO: 203867 - DNA, 80 bp, synthetic construct; identical to SEQ ID NO: 19137
  source 1..80: mol_type = other DNA

SEQ ID NO: 203868 - DNA, 80 bp, synthetic construct; identical to SEQ ID NO: 19138
  source 1..80: mol_type = other DNA

SEQ ID NO: 203869 - DNA, 80 bp, synthetic construct; identical to SEQ ID NO: 19139
  source 1..80: mol_type = other DNA

SEQ ID NO: 203870 - DNA, 80 bp, synthetic construct; identical to SEQ ID NO: 19140
  source 1..80: mol_type = other DNA

SEQ ID NO: 203871 - DNA, 80 bp, synthetic construct; identical to SEQ ID NO: 19141
  source 1..80: mol_type = other DNA

SEQ ID NO: 203872 - DNA, 80 bp, synthetic construct; identical to SEQ ID NO: 19142
  source 1..80: mol_type = other DNA

SEQ ID NO: 203873 - DNA, 80 bp, synthetic construct; identical to SEQ ID NO: 19143
  source 1..80: mol_type = other DNA

SEQ ID NO: 203874 - DNA, 80 bp, synthetic construct; identical to SEQ ID NO: 19144
  source 1..80: mol_type = other DNA

SEQ ID NO: 203875 - DNA, 80 bp, synthetic construct; identical to SEQ ID NO: 19145
  source 1..80: mol_type = other DNA

SEQ ID NO: 203876 - DNA, 80 bp, synthetic construct; identical to SEQ ID NO: 19146
  source 1..80: mol_type = other DNA

SEQ ID NO: 203877 - DNA, 80 bp, synthetic construct; identical to SEQ ID NO: 19147
  source 1..80: mol_type = other DNA

SEQ ID NO: 203878 - DNA, 80 bp, synthetic construct; identical to SEQ ID NO: 19148
  source 1..80: mol_type = other DNA

SEQ ID NO: 203879 - DNA, 80 bp, synthetic construct; identical to SEQ ID NO: 19149
  source 1..80: mol_type = other DNA

SEQ ID NO: 203880 - DNA, 80 bp, synthetic construct; identical to SEQ ID NO: 19150
  source 1..80: mol_type = other DNA

SEQ ID NO: 203881 - DNA, 80 bp, synthetic construct; identical to SEQ ID NO: 19151
  source 1..80: mol_type = other DNA

SEQ ID NO: 203882 - DNA, 80 bp, synthetic construct; identical to SEQ ID NO: 19152
  source 1..80: mol_type = other DNA

SEQ ID NO: 203883 - DNA, 80 bp, synthetic construct; identical to SEQ ID NO: 19153
  source 1..80: mol_type = other DNA

SEQ ID NO: 203884 - DNA, 80 bp, synthetic construct; identical to SEQ ID NO: 19154
  source 1..80: mol_type = other DNA

SEQ ID NO: 203885 - DNA, 80 bp, synthetic construct; identical to SEQ ID NO: 19155
  source 1..80: mol_type = other DNA

SEQ ID NO: 203886 - DNA, 80 bp, synthetic construct; identical to SEQ ID NO: 19156
  source 1..80: mol_type = other DNA

SEQ ID NO: 203887 - DNA, 80 bp, synthetic construct; identical to SEQ ID NO: 19157
  source 1..80: mol_type = other DNA

SEQ ID NO: 203888 - DNA, 80 bp, synthetic construct; identical to SEQ ID NO: 19158
  source 1..80: mol_type = other DNA

SEQ ID NO: 203889 - DNA, 80 bp, synthetic construct; identical to SEQ ID NO: 19159
  source 1..80: mol_type = other DNA

SEQ ID NO: 203890 - DNA, 80 bp, synthetic construct; identical to SEQ ID NO: 19160
  source 1..80: mol_type = other DNA

SEQ ID NO: 203891 - DNA, 80 bp, synthetic construct; identical to SEQ ID NO: 19161
  source 1..80: mol_type = other DNA

SEQ ID NO: 203892 - DNA, 80 bp, synthetic construct; identical to SEQ ID NO: 19162
  source 1..80: mol_type = other DNA

SEQ ID NO: 203893 - DNA, 80 bp, synthetic construct; identical to SEQ ID NO: 19163
  source 1..80: mol_type = other DNA

SEQ ID NO: 203894 - DNA, 80 bp, synthetic construct; identical to SEQ ID NO: 19164
  source 1..80: mol_type = other DNA

SEQ ID NO: 203895 - DNA, 80 bp, synthetic construct; identical to SEQ ID NO: 19165
  source 1..80: mol_type = other DNA

SEQ ID NO: 203896 - DNA, 80 bp, synthetic construct; identical to SEQ ID NO: 19166
  source 1..80: mol_type = other DNA

SEQ ID NO: 203897 - DNA, 80 bp, synthetic construct; identical to SEQ ID NO: 19167
  source 1..80: mol_type = other DNA

SEQ ID NO: 203898 - DNA, 80 bp, synthetic construct; identical to SEQ ID NO: 19168
  source 1..80: mol_type = other DNA

SEQ ID NO: 203899 - DNA, 80 bp, synthetic construct; identical to SEQ ID NO: 19169
  source 1..80: mol_type = other DNA

SEQ ID NO: 203900 - DNA, 80 bp, synthetic construct; identical to SEQ ID NO: 19170
  source 1..80: mol_type = other DNA

SEQ ID NO: 203901 - DNA, 80 bp, synthetic construct; identical to SEQ ID NO: 19171
  source 1..80: mol_type = other DNA

SEQ ID NO: 203902 - DNA, 80 bp, synthetic construct; identical to SEQ ID NO: 19172
  source 1..80: mol_type = other DNA

SEQ ID NO: 203903 - DNA, 80 bp, synthetic construct; identical to SEQ ID NO: 19173
  source 1..80: mol_type = other DNA

SEQ ID NO: 203904 - DNA, 80 bp, synthetic construct; identical to SEQ ID NO: 19174
  source 1..80: mol_type = other DNA

SEQ ID NO: 203905 - DNA, 80 bp, synthetic construct; identical to SEQ ID NO: 19175
  source 1..80: mol_type = other DNA

SEQ ID NO: 203906 - DNA, 80 bp, synthetic construct; identical to SEQ ID NO: 19176
  source 1..80: mol_type = other DNA

SEQ ID NO: 203907 - DNA, 80 bp, synthetic construct; identical to SEQ ID NO: 19177
  source 1..80: mol_type = other DNA

SEQ ID NO: 203908 - DNA, 80 bp, synthetic construct; identical to SEQ ID NO: 19178
  source 1..80: mol_type = other DNA

SEQ ID NO: 203909 - DNA, 80 bp, synthetic construct; identical to SEQ ID NO: 19179
  source 1..80: mol_type = other DNA

SEQ ID NO: 203910 - DNA, 80 bp, synthetic construct; identical to SEQ ID NO: 19180
  source 1..80: mol_type = other DNA

SEQ ID NO: 203911 - DNA, 80 bp, synthetic construct; identical to SEQ ID NO: 19181
  source 1..80: mol_type = other DNA

SEQ ID NO: 203912 - DNA, 80 bp, synthetic construct; identical to SEQ ID NO: 19182
  source 1..80: mol_type = other DNA

SEQ ID NO: 203913 - DNA, 80 bp, synthetic construct; identical to SEQ ID NO: 19183
  source 1..80: mol_type = other DNA

SEQ ID NO: 203914 - DNA, 80 bp, synthetic construct; identical to SEQ ID NO: 19184
  source 1..80: mol_type = other DNA

SEQ ID NO: 203915 - DNA, 80 bp, synthetic construct; identical to SEQ ID NO: 19185
  source 1..80: mol_type = other DNA

SEQ ID NO: 203916 - DNA, 80 bp, synthetic construct; identical to SEQ ID NO: 19186
  source 1..80: mol_type = other DNA

SEQ ID NO: 203917 - DNA, 80 bp, synthetic construct; identical to SEQ ID NO: 19187
  source 1..80: mol_type = other DNA

SEQ ID NO: 203918 - DNA, 80 bp, synthetic construct; identical to SEQ ID NO: 19188
  source 1..80: mol_type = other DNA

SEQ ID NO: 203919 - DNA, 80 bp, synthetic construct; identical to SEQ ID NO: 19189
  source 1..80: mol_type = other DNA

SEQ ID NO: 203920 - DNA, 80 bp, synthetic construct; identical to SEQ ID NO: 19190
  source 1..80: mol_type = other DNA

SEQ ID NO: 203921 - DNA, 80 bp, synthetic construct; identical to SEQ ID NO: 19191
  source 1..80: mol_type = other DNA

SEQ ID NO: 203922 - DNA, 80 bp, synthetic construct; identical to SEQ ID NO: 19192
  source 1..80: mol_type = other DNA

SEQ ID NO: 203923 - DNA, 80 bp, synthetic construct; identical to SEQ ID NO: 19193
  source 1..80: mol_type = other DNA

SEQ ID NO: 203924 - DNA, 80 bp, synthetic construct; identical to SEQ ID NO: 19194
  source 1..80: mol_type = other DNA

SEQ ID NO: 203925 - DNA, 80 bp, synthetic construct; identical to SEQ ID NO: 19195
  source 1..80: mol_type = other DNA

SEQ ID NO: 203926 - DNA, 80 bp, synthetic construct; identical to SEQ ID NO: 19196
  source 1..80: mol_type = other DNA

SEQ ID NO: 203927 - DNA, 80 bp, synthetic construct; identical to SEQ ID NO: 19197
  source 1..80: mol_type = other DNA

SEQ ID NO: 203928 - DNA, 80 bp, synthetic construct; identical to SEQ ID NO: 19198
  source 1..80: mol_type = other DNA

SEQ ID NO: 203929 - DNA, 80 bp, synthetic construct; identical to SEQ ID NO: 19199
  source 1..80: mol_type = other DNA

SEQ ID NO: 203930 - DNA, 80 bp, synthetic construct; identical to SEQ ID NO: 19200
  source 1..80: mol_type = other DNA

SEQ ID NO: 203931 - DNA, 80 bp, synthetic construct; identical to SEQ ID NO: 19201
  source 1..80: mol_type = other DNA

SEQ ID NO: 203932 - DNA, 80 bp, synthetic construct; identical to SEQ ID NO: 19202
  source 1..80: mol_type = other DNA

SEQ ID NO: 203933 - DNA, 80 bp, synthetic construct; identical to SEQ ID NO: 19203
  source 1..80: mol_type = other DNA

SEQ ID NO: 203934 - DNA, 80 bp, synthetic construct; identical to SEQ ID NO: 19204
  source 1..80: mol_type = other DNA

SEQ ID NO: 203935 - DNA, 80 bp, synthetic construct; identical to SEQ ID NO: 19205
  source 1..80: mol_type = other DNA

SEQ ID NO: 203936 - DNA, 80 bp, synthetic construct; identical to SEQ ID NO: 19206
  source 1..80: mol_type = other DNA

SEQ ID NO: 203937 - DNA, 80 bp, synthetic construct; identical to SEQ ID NO: 19207
  source 1..80: mol_type = other DNA

SEQ ID NO: 203938 - DNA, 80 bp, synthetic construct; identical to SEQ ID NO: 19208
  source 1..80: mol_type = other DNA

SEQ ID NO: 203939 - DNA, 80 bp, synthetic construct; identical to SEQ ID NO: 19209
  source 1..80: mol_type = other DNA

SEQ ID NO: 203940 - DNA, 80 bp, synthetic construct; identical to SEQ ID NO: 19210
  source 1..80: mol_type = other DNA

SEQ ID NO: 203941 - DNA, 80 bp, synthetic construct; identical to SEQ ID NO: 19211
  source 1..80: mol_type = other DNA

SEQ ID NO: 203942 - DNA, 80 bp, synthetic construct; identical to SEQ ID NO: 19212
  source 1..80: mol_type = other DNA

SEQ ID NO: 203943 - DNA, 80 bp, synthetic construct; identical to SEQ ID NO: 19213
  source 1..80: mol_type = other DNA

SEQ ID NO: 203944 - DNA, 80 bp, synthetic construct; identical to SEQ ID NO: 19214
  source 1..80: mol_type = other DNA

SEQ ID NO: 203945 - DNA, 80 bp, synthetic construct; identical to SEQ ID NO: 19215
  source 1..80: mol_type = other DNA

SEQ ID NO: 203946 - DNA, 80 bp, synthetic construct; identical to SEQ ID NO: 19216
  source 1..80: mol_type = other DNA

SEQ ID NO: 203947 - DNA, 80 bp, synthetic construct; identical to SEQ ID NO: 19217
  source 1..80: mol_type = other DNA

SEQ ID NO: 203948 - DNA, 80 bp, synthetic construct; identical to SEQ ID NO: 19218
  source 1..80: mol_type = other DNA

SEQ ID NO: 203949 - DNA, 80 bp, synthetic construct; identical to SEQ ID NO: 19219
  source 1..80: mol_type = other DNA

SEQ ID NO: 203950 - DNA, 80 bp, synthetic construct; identical to SEQ ID NO: 19220
  source 1..80: mol_type = other DNA

SEQ ID NO: 203951 - DNA, 80 bp, synthetic construct; identical to SEQ ID NO: 19221
  source 1..80: mol_type = other DNA

SEQ ID NO: 203952 - DNA, 80 bp, synthetic construct; identical to SEQ ID NO: 19222
  source 1..80: mol_type = other DNA

SEQ ID NO: 203953 - DNA, 80 bp, synthetic construct; identical to SEQ ID NO: 19223
  source 1..80: mol_type = other DNA

SEQ ID NO: 203954 - DNA, 80 bp, synthetic construct; identical to SEQ ID NO: 19224
  source 1..80: mol_type = other DNA

SEQ ID NO: 203955 - DNA, 80 bp, synthetic construct; identical to SEQ ID NO: 19225
  source 1..80: mol_type = other DNA

SEQ ID NO: 203956 - DNA, 80 bp, synthetic construct; identical to SEQ ID NO: 19226
  source 1..80: mol_type = other DNA

SEQ ID NO: 203957 - DNA, 80 bp, synthetic construct; identical to SEQ ID NO: 19227
  source 1..80: mol_type = other DNA

SEQ ID NO: 203958 - DNA, 80 bp, synthetic construct; identical to SEQ ID NO: 19228
  source 1..80: mol_type = other DNA

SEQ ID NO: 203959 - DNA, 80 bp, synthetic construct; identical to SEQ ID NO: 19229
  source 1..80: mol_type = other DNA

SEQ ID NO: 203960 - DNA, 80 bp, synthetic construct; identical to SEQ ID NO: 19230
  source 1..80: mol_type = other DNA

SEQ ID NO: 203961 - DNA, 80 bp, synthetic construct; identical to SEQ ID NO: 19231
  source 1..80: mol_type = other DNA

SEQ ID NO: 203962 - DNA, 80 bp, synthetic construct; identical to SEQ ID NO: 19232
  source 1..80: mol_type = other DNA

SEQ ID NO: 203963 - DNA, 80 bp, synthetic construct; identical to SEQ ID NO: 19233
  source 1..80: mol_type = other DNA

SEQ ID NO: 203964 - DNA, 80 bp, synthetic construct; identical to SEQ ID NO: 19234
  source 1..80: mol_type = other DNA

SEQ ID NO: 203965 - DNA, 80 bp, synthetic construct; identical to SEQ ID NO: 19235
  source 1..80: mol_type = other DNA

SEQ ID NO: 203966 - DNA, 80 bp, synthetic construct; identical to SEQ ID NO: 19236
  source 1..80: mol_type = other DNA

SEQ ID NO: 203967 - DNA, 80 bp, synthetic construct; identical to SEQ ID NO: 19237
  source 1..80: mol_type = other DNA

SEQ ID NO: 203968 - DNA, 80 bp, synthetic construct; identical to SEQ ID NO: 19238
  source 1..80: mol_type = other DNA

SEQ ID NO: 203969 - DNA, 80 bp, synthetic construct; identical to SEQ ID NO: 19239
  source 1..80: mol_type = other DNA

SEQ ID NO: 203970 - DNA, 80 bp, synthetic construct; identical to SEQ ID NO: 19240
  source 1..80: mol_type = other DNA

SEQ ID NO: 203971 - DNA, 80 bp, synthetic construct; identical to SEQ ID NO: 19241
  source 1..80: mol_type = other DNA

SEQ ID NO: 203972 - DNA, 80 bp, synthetic construct; identical to SEQ ID NO: 19242
  source 1..80: mol_type = other DNA

SEQ ID NO: 203973 - DNA, 80 bp, synthetic construct; identical to SEQ ID NO: 19243
  source 1..80: mol_type = other DNA

SEQ ID NO: 203974 - DNA, 80 bp, synthetic construct; identical to SEQ ID NO: 19244
  source 1..80: mol_type = other DNA

SEQ ID NO: 203975 - DNA, 80 bp, synthetic construct; identical to SEQ ID NO: 19245
  source 1..80: mol_type = other DNA

SEQ ID NO: 203976 - DNA, 80 bp, synthetic construct; identical to SEQ ID NO: 19246
  source 1..80: mol_type = other DNA

SEQ ID NO: 203977 - DNA, 80 bp, synthetic construct; identical to SEQ ID NO: 19247
  source 1..80: mol_type = other DNA

SEQ ID NO: 203978 - DNA, 80 bp, synthetic construct; identical to SEQ ID NO: 19248
  source 1..80: mol_type = other DNA

SEQ ID NO: 203979 - DNA, 80 bp, synthetic construct; identical to SEQ ID NO: 19249
  source 1..80: mol_type = other DNA

SEQ ID NO: 203980 - DNA, 80 bp, synthetic construct; identical to SEQ ID NO: 19250
  source 1..80: mol_type = other DNA

SEQ ID NO: 203981 - DNA, 80 bp, synthetic construct; identical to SEQ ID NO: 19251
  source 1..80: mol_type = other DNA

SEQ ID NO: 203982 - DNA, 80 bp, synthetic construct; identical to SEQ ID NO: 19252
  source 1..80: mol_type = other DNA

SEQ ID NO: 203983 - DNA, 80 bp, synthetic construct; identical to SEQ ID NO: 19253
  source 1..80: mol_type = other DNA

SEQ ID NO: 203984 - DNA, 80 bp, synthetic construct; identical to SEQ ID NO: 19254
  source 1..80: mol_type = other DNA

SEQ ID NO: 203985 - DNA, 80 bp, synthetic construct; identical to SEQ ID NO: 19255
  source 1..80: mol_type = other DNA

SEQ ID NO: 203986 - DNA, 80 bp, synthetic construct; identical to SEQ ID NO: 19256
  source 1..80: mol_type = other DNA

SEQ ID NO: 203987 - DNA, 80 bp, synthetic construct; identical to SEQ ID NO: 19257
  source 1..80: mol_type = other DNA

SEQ ID NO: 203988 - DNA, 80 bp, synthetic construct; identical to SEQ ID NO: 19258
  source 1..80: mol_type = other DNA

SEQ ID NO: 203989 - DNA, 80 bp, synthetic construct; identical to SEQ ID NO: 19259
  source 1..80: mol_type = other DNA

SEQ ID NO: 203990 - DNA, 80 bp, synthetic construct; identical to SEQ ID NO: 19260
  source 1..80: mol_type = other DNA

SEQ ID NO: 203991 - DNA, 80 bp, synthetic construct; identical to SEQ ID NO: 19261
  source 1..80: mol_type = other DNA

SEQ ID NO: 203992 - DNA, 80 bp, synthetic construct; identical to SEQ ID NO: 19262
  source 1..80: mol_type = other DNA

SEQ ID NO: 203993 - DNA, 80 bp, synthetic construct; identical to SEQ ID NO: 19263
  source 1..80: mol_type = other DNA

SEQ ID NO: 203994 - DNA, 80 bp, synthetic construct; identical to SEQ ID NO: 19264
  source 1..80: mol_type = other DNA

SEQ ID NO: 203995 - DNA, 80 bp, synthetic construct; identical to SEQ ID NO: 19265
  source 1..80: mol_type = other DNA

SEQ ID NO: 203996 - DNA, 80 bp, synthetic construct; identical to SEQ ID NO: 19266
  source 1..80: mol_type = other DNA

SEQ ID NO: 203997 - DNA, 80 bp, synthetic construct; identical to SEQ ID NO: 19267
  source 1..80: mol_type = other DNA

SEQ ID NO: 203998 - DNA, 80 bp, synthetic construct; identical to SEQ ID NO: 19268
  source 1..80: mol_type = other DNA

SEQ ID NO: 203999 - DNA, 80 bp, synthetic construct; identical to SEQ ID NO: 19269
  source 1..80: mol_type = other DNA

SEQ ID NO: 204000 - DNA, 80 bp, synthetic construct; identical to SEQ ID NO: 19270
  source 1..80: mol_type = other DNA

SEQ ID NO: 204001 - DNA, 80 bp, synthetic construct; identical to SEQ ID NO: 19271
  source 1..80: mol_type = other DNA

SEQ ID NO: 204002 - DNA, 80 bp, synthetic construct; identical to SEQ ID NO: 19272
  source 1..80: mol_type = other DNA

SEQ ID NO: 204003 - DNA, 80 bp, synthetic construct; identical to SEQ ID NO: 19273
  source 1..80: mol_type = other DNA

SEQ ID NO: 204004 - DNA, 80 bp, synthetic construct; identical to SEQ ID NO: 19274
  source 1..80: mol_type = other DNA

SEQ ID NO: 204005 - DNA, 80 bp, synthetic construct; identical to SEQ ID NO: 19275
  source 1..80: mol_type = other DNA

SEQ ID NO: 204006 - DNA, 80 bp, synthetic construct; identical to SEQ ID NO: 19276
  source 1..80: mol_type = other DNA

SEQ ID NO: 204007 - DNA, 80 bp, synthetic construct; identical to SEQ ID NO: 19277
  source 1..80: mol_type = other DNA

SEQ ID NO: 204008 - DNA, 80 bp, synthetic construct; identical to SEQ ID NO: 19278
  source 1..80: mol_type = other DNA

SEQ ID NO: 204009 - DNA, 80 bp, synthetic construct; identical to SEQ ID NO: 19279
  source 1..80: mol_type = other DNA

SEQ ID NO: 204010 - DNA, 80 bp, synthetic construct; identical to SEQ ID NO: 19280
  source 1..80: mol_type = other DNA

SEQ ID NO: 204011 - DNA, 80 bp, synthetic construct; identical to SEQ ID NO: 19281
  source 1..80: mol_type = other DNA

SEQ ID NO: 204012 - DNA, 80 bp, synthetic construct; identical to SEQ ID NO: 19282
  source 1..80: mol_type = other DNA

SEQ ID NO: 204013 - DNA, 80 bp, synthetic construct; identical to SEQ ID NO: 19283
  source 1..80: mol_type = other DNA

SEQ ID NO: 204014 - DNA, 80 bp, synthetic construct; identical to SEQ ID NO: 19284
  source 1..80: mol_type = other DNA

SEQ ID NO: 204015 - DNA, 80 bp, synthetic construct; identical to SEQ ID NO: 19285
  source 1..80: mol_type = other DNA

SEQ ID NO: 204016 - DNA, 80 bp, synthetic construct; identical to SEQ ID NO: 19286
  source 1..80: mol_type = other DNA

SEQ ID NO: 204017 - DNA, 80 bp, synthetic construct; identical to SEQ ID NO: 19287
  source 1..80: mol_type = other DNA

SEQ ID NO: 204018 - DNA, 80 bp, synthetic construct; identical to SEQ ID NO: 19288
  source 1..80: mol_type = other DNA

SEQ ID NO: 204019 - DNA, 80 bp, synthetic construct; identical to SEQ ID NO: 19289
  source 1..80: mol_type = other DNA

SEQ ID NO: 204020 - DNA, 80 bp, synthetic construct; identical to SEQ ID NO: 19290
  source 1..80: mol_type = other DNA

SEQ ID NO: 204021 - DNA, 80 bp, synthetic construct; identical to SEQ ID NO: 19291
  source 1..80: mol_type = other DNA

SEQ ID NO: 204022 - DNA, 80 bp, synthetic construct; identical to SEQ ID NO: 19292
  source 1..80: mol_type = other DNA

SEQ ID NO: 204023 - DNA, 80 bp, synthetic construct; identical to SEQ ID NO: 19293
  source 1..80: mol_type = other DNA

SEQ ID NO: 204024 - DNA, 80 bp, synthetic construct; identical to SEQ ID NO: 19294
  source 1..80: mol_type = other DNA

SEQ ID NO: 204025 - DNA, 80 bp, synthetic construct; identical to SEQ ID NO: 19295
  source 1..80: mol_type = other DNA

SEQ ID NO: 204026 - DNA, 80 bp, synthetic construct; identical to SEQ ID NO: 19296
  source 1..80: mol_type = other DNA

SEQ ID NO: 204027 - DNA, 80 bp, synthetic construct; identical to SEQ ID NO: 19297
  source 1..80: mol_type = other DNA

SEQ ID NO: 204028 - DNA, 80 bp, synthetic construct; identical to SEQ ID NO: 19298
  source 1..80: mol_type = other DNA

SEQ ID NO: 204029 - DNA, 80 bp, synthetic construct; identical to SEQ ID NO: 19299
  source 1..80: mol_type = other DNA

SEQ ID NO: 204030 - DNA, 80 bp, synthetic construct; identical to SEQ ID NO: 19300
  source 1..80: mol_type = other DNA

SEQ ID NO: 204031 - DNA, 80 bp, synthetic construct; identical to SEQ ID NO: 19301
  source 1..80: mol_type = other DNA

SEQ ID NO: 204032 - DNA, 80 bp, synthetic construct; identical to SEQ ID NO: 19302
  source 1..80: mol_type = other DNA

SEQ ID NO: 204033 - DNA, 80 bp, synthetic construct; identical to SEQ ID NO: 19303
  source 1..80: mol_type = other DNA

SEQ ID NO: 204034 - DNA, 80 bp, synthetic construct; identical to SEQ ID NO: 19304
  source 1..80: mol_type = other DNA

SEQ ID NO: 204035 - DNA, 80 bp, synthetic construct; identical to SEQ ID NO: 19305
  source 1..80: mol_type = other DNA

SEQ ID NO: 204036 - DNA, 80 bp, synthetic construct; identical to SEQ ID NO: 19306
  source 1..80: mol_type = other DNA

SEQ ID NO: 204037 - DNA, 80 bp, synthetic construct; identical to SEQ ID NO: 19307
  source 1..80: mol_type = other DNA

SEQ ID NO: 204038 - DNA, 80 bp, synthetic construct; identical to SEQ ID NO: 19308
  source 1..80: mol_type = other DNA

SEQ ID NO: 204039 - DNA, 80 bp, synthetic construct; identical to SEQ ID NO: 19309
  source 1..80: mol_type = other DNA

SEQ ID NO: 204040 - DNA, 80 bp, synthetic construct; identical to SEQ ID NO: 19310
  source 1..80: mol_type = other DNA

SEQ ID NO: 204041 - DNA, 80 bp, synthetic construct; identical to SEQ ID NO: 19311
  source 1..80: mol_type = other DNA

SEQ ID NO: 204042 - DNA, 80 bp, synthetic construct; identical to SEQ ID NO: 19312
  source 1..80: mol_type = other DNA

SEQ ID NO: 204043 - DNA, 80 bp, synthetic construct; identical to SEQ ID NO: 19313
  source 1..80: mol_type = other DNA

SEQ ID NO: 204044 - DNA, 80 bp, synthetic construct; identical to SEQ ID NO: 19314
  source 1..80: mol_type = other DNA

SEQ ID NO: 204045 - DNA, 80 bp, synthetic construct; identical to SEQ ID NO: 19315
  source 1..80: mol_type = other DNA

SEQ ID NO: 204046 - DNA, 80 bp, synthetic construct; identical to SEQ ID NO: 19316
  source 1..80: mol_type = other DNA

SEQ ID NO: 204047 - DNA, 80 bp, synthetic construct; identical to SEQ ID NO: 19317
  source 1..80: mol_type = other DNA

SEQ ID NO: 204048 - DNA, 80 bp, synthetic construct; identical to SEQ ID NO: 19318
  source 1..80: mol_type = other DNA

SEQ ID NO: 204049 - DNA, 80 bp, synthetic construct; identical to SEQ ID NO: 19319
  source 1..80: mol_type = other DNA

SEQ ID NO: 204050 - DNA, 80 bp, synthetic construct; identical to SEQ ID NO: 19320
  source 1..80: mol_type = other DNA

SEQ ID NO: 204051 - DNA, 80 bp, synthetic construct; identical to SEQ ID NO: 19321
  source 1..80: mol_type = other DNA

SEQ ID NO: 204052 - DNA, 80 bp, synthetic construct; identical to SEQ ID NO: 19322
  source 1..80: mol_type = other DNA

SEQ ID NO: 204053 - DNA, 80 bp, synthetic construct; identical to SEQ ID NO: 19323
  source 1..80: mol_type = other DNA

SEQ ID NO: 204054 - DNA, 80 bp, synthetic construct; identical to SEQ ID NO: 19324
  source 1..80: mol_type = other DNA

SEQ ID NO: 204055 - DNA, 80 bp, synthetic construct; identical to SEQ ID NO: 19325
  source 1..80: mol_type = other DNA

SEQ ID NO: 204056 - DNA, 80 bp, synthetic construct; identical to SEQ ID NO: 19326
  source 1..80: mol_type = other DNA

SEQ ID NO: 204057 - DNA, 80 bp, synthetic construct; identical to SEQ ID NO: 19327
  source 1..80: mol_type = other DNA

SEQ ID NO: 204058 - DNA, 80 bp, synthetic construct; identical to SEQ ID NO: 19328
  source 1..80: mol_type = other DNA

SEQ ID NO: 204059 - DNA, 80 bp, synthetic construct; identical to SEQ ID NO: 19329
  source 1..80: mol_type = other DNA

SEQ ID NO: 204060 - DNA, 80 bp, synthetic construct; identical to SEQ ID NO: 19330
  source 1..80: mol_type = other DNA

SEQ ID NO: 204061 - DNA, 80 bp, synthetic construct; identical to SEQ ID NO: 19331
  source 1..80: mol_type = other DNA

SEQ ID NO: 204062 - DNA, 80 bp, synthetic construct; identical to SEQ ID NO: 19332
  source 1..80: mol_type = other DNA

SEQ ID NO: 204063 - DNA, 80 bp, synthetic construct; identical to SEQ ID NO: 19333
  source 1..80: mol_type = other DNA

SEQ ID NO: 204064 - DNA, 80 bp, synthetic construct; identical to SEQ ID NO: 19334
  source 1..80: mol_type = other DNA

SEQ ID NO: 204065 - DNA, 80 bp, synthetic construct; identical to SEQ ID NO: 19335
  source 1..80: mol_type = other DNA

SEQ ID NO: 204066 - DNA, 80 bp, synthetic construct; identical to SEQ ID NO: 19336
  source 1..80: mol_type = other DNA

SEQ ID NO: 204067 - DNA, 80 bp, synthetic construct; identical to SEQ ID NO: 19337
  source 1..80: mol_type = other DNA

SEQ ID NO: 204068 - DNA, 80 bp, synthetic construct; identical to SEQ ID NO: 19338
  source 1..80: mol_type = other DNA

SEQ ID NO: 204069 - DNA, 80 bp, synthetic construct; identical to SEQ ID NO: 19339
  source 1..80: mol_type = other DNA

SEQ ID NO: 204070 - DNA, 80 bp, synthetic construct; identical to SEQ ID NO: 19340
  source 1..80: mol_type = other DNA

SEQ ID NO: 204071 - DNA, 80 bp, synthetic construct; identical to SEQ ID NO: 19341
  source 1..80: mol_type = other DNA

SEQ ID NO: 204072 - DNA, 80 bp, synthetic construct; identical to SEQ ID NO: 19342
  source 1..80: mol_type = other DNA

SEQ ID NO: 204073 - DNA, 80 bp, synthetic construct; identical to SEQ ID NO: 19343
  source 1..80: mol_type = other DNA

SEQ ID NO: 204074 - DNA, 80 bp, synthetic construct; identical to SEQ ID NO: 19344
  source 1..80: mol_type = other DNA

SEQ ID NO: 204075 - DNA, 80 bp, synthetic construct; identical to SEQ ID NO: 19345
  source 1..80: mol_type = other DNA

SEQ ID NO: 204076 - DNA, 80 bp, synthetic construct; identical to SEQ ID NO: 19346
  source 1..80: mol_type = other DNA

SEQ ID NO: 204077 - DNA, 80 bp, synthetic construct; identical to SEQ ID NO: 19347
  source 1..80: mol_type = other DNA

SEQ ID NO: 204078 - DNA, 80 bp, synthetic construct; identical to SEQ ID NO: 19348
  source 1..80: mol_type = other DNA

SEQ ID NO: 204079 - DNA, 80 bp, synthetic construct; identical to SEQ ID NO: 19349
  source 1..80: mol_type = other DNA

SEQ ID NO: 204080 - DNA, 80 bp, synthetic construct; identical to SEQ ID NO: 19350
  source 1..80: mol_type = other DNA

SEQ ID NO: 204081 - DNA, 80 bp, synthetic construct; identical to SEQ ID NO: 19351
  source 1..80: mol_type = other DNA

SEQ ID NO: 204082 - DNA, 80 bp, synthetic construct; identical to SEQ ID NO: 19352
  source 1..80: mol_type = other DNA

SEQ ID NO: 204083 - DNA, 80 bp, synthetic construct; identical to SEQ ID NO: 19353
  source 1..80: mol_type = other DNA

SEQ ID NO: 204084 - DNA, 80 bp, synthetic construct; identical to SEQ ID NO: 19354
  source 1..80: mol_type = other DNA

SEQ ID NO: 204085 - DNA, 80 bp, synthetic construct; identical to SEQ ID NO: 19355
  source 1..80: mol_type = other DNA

SEQ ID NO: 204086 - DNA, 80 bp, synthetic construct; identical to SEQ ID NO: 19356
  source 1..80: mol_type = other DNA

SEQ ID NO: 204087 - DNA, 80 bp, synthetic construct; identical to SEQ ID NO: 19357
  source 1..80: mol_type = other DNA

SEQ ID NO: 204088 - DNA, 80 bp, synthetic construct; identical to SEQ ID NO: 19358
  source 1..80: mol_type = other DNA

SEQ ID NO: 204089 - DNA, 80 bp, synthetic construct; identical to SEQ ID NO: 19359
  source 1..80: mol_type = other DNA

SEQ ID NO: 204090 - DNA, 80 bp, synthetic construct; identical to SEQ ID NO: 19360
  source 1..80: mol_type = other DNA

SEQ ID NO: 204091 - DNA, 80 bp, synthetic construct; identical to SEQ ID NO: 19361
  source 1..80: mol_type = other DNA

SEQ ID NO: 204092 - DNA, 80 bp, synthetic construct; identical to SEQ ID NO: 19362
  source 1..80: mol_type = other DNA

SEQ ID NO: 204093 - DNA, 80 bp, synthetic construct; identical to SEQ ID NO: 19363
  source 1..80: mol_type = other DNA

SEQ ID NO: 204094 - DNA, 80 bp, synthetic construct; identical to SEQ ID NO: 19364
  source 1..80: mol_type = other DNA

SEQ ID NO: 204095 - DNA, 80 bp, synthetic construct; identical to SEQ ID NO: 19365
  source 1..80: mol_type = other DNA

SEQ ID NO: 204096 - DNA, 80 bp, synthetic construct; identical to SEQ ID NO: 19366
  source 1..80: mol_type = other DNA

SEQ ID NO: 204097 - DNA, 80 bp, synthetic construct; identical to SEQ ID NO: 19367
  source 1..80: mol_type = other DNA

SEQ ID NO: 204098 - DNA, 80 bp, synthetic construct; identical to SEQ ID NO: 19368
  source 1..80: mol_type = other DNA

SEQ ID NO: 204099 - DNA, 80 bp, synthetic construct; identical to SEQ ID NO: 19369
  source 1..80: mol_type = other DNA

SEQ ID NO: 204100 - DNA, 80 bp, synthetic construct; identical to SEQ ID NO: 19370
  source 1..80: mol_type = other DNA

SEQ ID NO: 204101 - DNA, 80 bp, synthetic construct; identical to SEQ ID NO: 19371
  source 1..80: mol_type = other DNA

SEQ ID NO: 204102 - DNA, 80 bp, synthetic construct; identical to SEQ ID NO: 19372
  source 1..80: mol_type = other DNA

SEQ ID NO: 204103 - DNA, 80 bp, synthetic construct; identical to SEQ ID NO: 19373
  source 1..80: mol_type = other DNA

SEQ ID NO: 204104 - DNA, 80 bp, synthetic construct; identical to SEQ ID NO: 19374
  source 1..80: mol_type = other DNA

SEQ ID NO: 204105 - DNA, 80 bp, synthetic construct; identical to SEQ ID NO: 19375
  source 1..80: mol_type = other DNA

SEQ ID NO: 204106 - DNA, 80 bp, synthetic construct; identical to SEQ ID NO: 19376
  source 1..80: mol_type = other DNA

SEQ ID NO: 204107 - DNA, 80 bp, synthetic construct; identical to SEQ ID NO: 19377
  source 1..80: mol_type = other DNA

SEQ ID NO: 204108 - DNA, 80 bp, synthetic construct; identical to SEQ ID NO: 19378
  source 1..80: mol_type = other DNA

SEQ ID NO: 204109 - DNA, 80 bp, synthetic construct; identical to SEQ ID NO: 19379
  source 1..80: mol_type = other DNA

SEQ ID NO: 204110 - DNA, 80 bp, synthetic construct; identical to SEQ ID NO: 19380
  source 1..80: mol_type = other DNA

SEQ ID NO: 204111 - DNA, 80 bp, synthetic construct; identical to SEQ ID NO: 19381
  source 1..80: mol_type = other DNA

SEQ ID NO: 204112 - DNA, 80 bp, synthetic construct; identical to SEQ ID NO: 19382
  source 1..80: mol_type = other DNA

SEQ ID NO: 204113 - DNA, 80 bp, synthetic construct; identical to SEQ ID NO: 19383
  source 1..80: mol_type = other DNA

SEQ ID NO: 204114 - DNA, 80 bp, synthetic construct; identical to SEQ ID NO: 19384
  source 1..80: mol_type = other DNA

SEQ ID NO: 204115 - DNA, 80 bp, synthetic construct; identical to SEQ ID NO: 19385
  source 1..80: mol_type = other DNA

SEQ ID NO: 204116 - DNA, 80 bp, synthetic construct; identical to SEQ ID NO: 19386
  source 1..80: mol_type = other DNA

SEQ ID NO: 204117 - DNA, 80 bp, synthetic construct; identical to SEQ ID NO: 19387
  source 1..80: mol_type = other DNA

SEQ ID NO: 204118 - DNA, 80 bp, synthetic construct; identical to SEQ ID NO: 19388
  source 1..80: mol_type = other DNA

SEQ ID NO: 204119 - DNA, 80 bp, synthetic construct; identical to SEQ ID NO: 19389
  source 1..80: mol_type = other DNA

SEQ ID NO: 204120 - DNA, 80 bp, synthetic construct; identical to SEQ ID NO: 19390
  source 1..80: mol_type = other DNA

SEQ ID NO: 204121 - DNA, 80 bp, synthetic construct; identical to SEQ ID NO: 19391
  source 1..80: mol_type = other DNA

SEQ ID NO: 204122 - DNA, 80 bp, synthetic construct; identical to SEQ ID NO: 19392
  source 1..80: mol_type = other DNA

SEQ ID NO: 204123 - DNA, 80 bp, synthetic construct; identical to SEQ ID NO: 19393
  source 1..80: mol_type = other DNA

SEQ ID NO: 204124 - DNA, 80 bp, synthetic construct; identical to SEQ ID NO: 19394
  source 1..80: mol_type = other DNA

SEQ ID NO: 204125 - DNA, 80 bp, synthetic construct; identical to SEQ ID NO: 19395
  source 1..80: mol_type = other DNA

SEQ ID NO: 204126 - DNA, 80 bp, synthetic construct; identical to SEQ ID NO: 19396
  source 1..80: mol_type = other DNA

SEQ ID NO: 204127 - DNA, 80 bp, synthetic construct; identical to SEQ ID NO: 19397
  source 1..80: mol_type = other DNA

SEQ ID NO: 204128 - DNA, 80 bp, synthetic construct; identical to SEQ ID NO: 19398
  source 1..80: mol_type = other DNA

SEQ ID NO: 204129 - DNA, 80 bp, synthetic construct; identical to SEQ ID NO: 19399
  source 1..80: mol_type = other DNA

SEQ ID NO: 204130 - DNA, 80 bp, synthetic construct; identical to SEQ ID NO: 19400
  source 1..80: mol_type = other DNA

SEQ ID NO: 204131 - DNA, 80 bp, synthetic construct; identical to SEQ ID NO: 19401
  source 1..80: mol_type = other DNA

SEQ ID NO: 204132 - DNA, 80 bp, synthetic construct; identical to SEQ ID NO: 19402
  source 1..80: mol_type = other DNA

SEQ ID NO: 204133 - DNA, 80 bp, synthetic construct; identical to SEQ ID NO: 19403
  source 1..80: mol_type = other DNA

SEQ ID NO: 204134 - DNA, 80 bp, synthetic construct; identical to SEQ ID NO: 19404
  source 1..80: mol_type = other DNA

SEQ ID NO: 204135 - DNA, 80 bp, synthetic construct; identical to SEQ ID NO: 19405
  source 1..80: mol_type = other DNA

SEQ ID NO: 204136 - DNA, 80 bp, synthetic construct; identical to SEQ ID NO: 19406
  source 1..80: mol_type = other DNA

SEQ ID NO: 204137 - DNA, 80 bp, synthetic construct; identical to SEQ ID NO: 19407
  source 1..80: mol_type = other DNA

SEQ ID NO: 204138 - DNA, 80 bp, synthetic construct; identical to SEQ ID NO: 19408
  source 1..80: mol_type = other DNA

SEQ ID NO: 204139 - DNA, 80 bp, synthetic construct; identical to SEQ ID NO: 19409
  source 1..80: mol_type = other DNA

SEQ ID NO: 204140 - DNA, 80 bp, synthetic construct; identical to SEQ ID NO: 19410
  source 1..80: mol_type = other DNA

SEQ ID NO: 204141 - DNA, 80 bp, synthetic construct; identical to SEQ ID NO: 19411
  source 1..80: mol_type = other DNA

SEQ ID NO: 204142 - DNA, 80 bp, synthetic construct; identical to SEQ ID NO: 19412
  source 1..80: mol_type = other DNA

SEQ ID NO: 204143 - DNA, 80 bp, synthetic construct; identical to SEQ ID NO: 19413
  source 1..80: mol_type = other DNA

SEQ ID NO: 204144 - DNA, 80 bp, synthetic construct; identical to SEQ ID NO: 19414
  source 1..80: mol_type = other DNA

SEQ ID NO: 204145 - DNA, 80 bp, synthetic construct; identical to SEQ ID NO: 19415
  source 1..80: mol_type = other DNA

SEQ ID NO: 204146 - DNA, 80 bp, synthetic construct; identical to SEQ ID NO: 19416
  source 1..80: mol_type = other DNA

SEQ ID NO: 204147 - DNA, 80 bp, synthetic construct; identical to SEQ ID NO: 19417
  source 1..80: mol_type = other DNA

SEQ ID NO: 204148 - DNA, 80 bp, synthetic construct; identical to SEQ ID NO: 19418
  source 1..80: mol_type = other DNA

SEQ ID NO: 204149 - DNA, 80 bp, synthetic construct; identical to SEQ ID NO: 19419
  source 1..80: mol_type = other DNA

SEQ ID NO: 204150 - DNA, 80 bp, synthetic construct; identical to SEQ ID NO: 19420
  source 1..80: mol_type = other DNA

SEQ ID NO: 204151 - DNA, 80 bp, synthetic construct; identical to SEQ ID NO: 19421
  source 1..80: mol_type = other DNA

SEQ ID NO: 204152 - DNA, 80 bp, synthetic construct; identical to SEQ ID NO: 19422
  source 1..80: mol_type = other DNA

SEQ ID NO: 204153 - DNA, 80 bp, synthetic construct; identical to SEQ ID NO: 19423
  source 1..80: mol_type = other DNA

SEQ ID NO: 204154 - DNA, 80 bp, synthetic construct; identical to SEQ ID NO: 19424
  source 1..80: mol_type = other DNA

SEQ ID NO: 204155 - DNA, 80 bp, synthetic construct; identical to SEQ ID NO: 19425
  source 1..80: mol_type = other DNA

SEQ ID NO: 204156 - DNA, 80 bp, synthetic construct; identical to SEQ ID NO: 19426
  source 1..80: mol_type = other DNA

SEQ ID NO: 204157 - DNA, 80 bp, synthetic construct; identical to SEQ ID NO: 19427
  source 1..80: mol_type = other DNA

SEQ ID NO: 204158 - DNA, 80 bp, synthetic construct; identical to SEQ ID NO: 19428
  source 1..80: mol_type = other DNA

SEQ ID NO: 204159 - DNA, 80 bp, synthetic construct; identical to SEQ ID NO: 19429
  source 1..80: mol_type = other DNA

SEQ ID NO: 204160 - DNA, 80 bp, synthetic construct; identical to SEQ ID NO: 19430
  source 1..80: mol_type = other DNA

SEQ ID NO: 204161 - DNA, 80 bp, synthetic construct; identical to SEQ ID NO: 19431
  source 1..80: mol_type = other DNA

SEQ ID NO: 204162 - DNA, 80 bp, synthetic construct; identical to SEQ ID NO: 19432
  source 1..80: mol_type = other DNA

SEQ ID NO: 204163 - DNA, 80 bp, synthetic construct; identical to SEQ ID NO: 19433
  source 1..80: mol_type = other DNA

SEQ ID NO: 204164 - DNA, 80 bp, synthetic construct; identical to SEQ ID NO: 19434
  source 1..80: mol_type = other DNA

SEQ ID NO: 204165 - DNA, 80 bp, synthetic construct; identical to SEQ ID NO: 19435
  source 1..80: mol_type = other DNA

SEQ ID NO: 204166 - DNA, 80 bp, synthetic construct; identical to SEQ ID NO: 19436
  source 1..80: mol_type = other DNA

SEQ ID NO: 204167 - DNA, 80 bp, synthetic construct; identical to SEQ ID NO: 19437
  source 1..80: mol_type = other DNA

SEQ ID NO: 204168 - DNA, 80 bp, synthetic construct; identical to SEQ ID NO: 19438
  source 1..80: mol_type = other DNA

SEQ ID NO: 204169 - DNA, 80 bp, synthetic construct; identical to SEQ ID NO: 19439
  source 1..80: mol_type = other DNA

SEQ ID NO: 204170 - DNA, 80 bp, synthetic construct; identical to SEQ ID NO: 19440
  source 1..80: mol_type = other DNA

SEQ ID NO: 204171 - DNA, 80 bp, synthetic construct; identical to SEQ ID NO: 19441
  source 1..80: mol_type = other DNA

SEQ ID NO: 204172 - DNA, 80 bp, synthetic construct; identical to SEQ ID NO: 19442
  source 1..80: mol_type = other DNA

SEQ ID NO: 204173 - DNA, 80 bp, synthetic construct; identical to SEQ ID NO: 19443
  source 1..80: mol_type = other DNA

SEQ ID NO: 204174 - DNA, 80 bp, synthetic construct; identical to SEQ ID NO: 19444
  source 1..80: mol_type = other DNA

SEQ ID NO: 204175 - DNA, 80 bp, synthetic construct; identical to SEQ ID NO: 19445
  source 1..80: mol_type = other DNA

SEQ ID NO: 204176 - DNA, 80 bp, synthetic construct; identical to SEQ ID NO: 19446
  source 1..80: mol_type = other DNA

SEQ ID NO: 204177 - DNA, 80 bp, synthetic construct; identical to SEQ ID NO: 19447
  source 1..80: mol_type = other DNA

SEQ ID NO: 204178 - DNA, 80 bp, synthetic construct; identical to SEQ ID NO: 19448
  source 1..80: mol_type = other DNA

SEQ ID NO: 204179 - DNA, 80 bp, synthetic construct; identical to SEQ ID NO: 19449
  source 1..80: mol_type = other DNA

SEQ ID NO: 204180 - DNA, 80 bp, synthetic construct; identical to SEQ ID NO: 19450
  source 1..80: mol_type = other DNA

SEQ ID NO: 204181 - DNA, 80 bp, synthetic construct; identical to SEQ ID NO: 19451
  source 1..80: mol_type = other DNA

SEQ ID NO: 204182 - DNA, 80 bp, synthetic construct; identical to SEQ ID NO: 19452
  source 1..80: mol_type = other DNA

SEQ ID NO: 204183 - DNA, 80 bp, synthetic construct; identical to SEQ ID NO: 19453
  source 1..80: mol_type = other DNA

SEQ ID NO: 204184 - DNA, 80 bp, synthetic construct; identical to SEQ ID NO: 19454
  source 1..80: mol_type = other DNA

SEQ ID NO: 204185 - DNA, 80 bp, synthetic construct; identical to SEQ ID NO: 19455
  source 1..80: mol_type = other DNA

SEQ ID NO: 204186 - DNA, 80 bp, synthetic construct; identical to SEQ ID NO: 19456
  source 1..80: mol_type = other DNA

SEQ ID NO: 204187 - DNA, 80 bp, synthetic construct; identical to SEQ ID NO: 19457
  source 1..80: mol_type = other DNA

SEQ ID NO: 204188 - DNA, 80 bp, synthetic construct; identical to SEQ ID NO: 19458
  source 1..80: mol_type = other DNA

SEQ ID NO: 204189 - DNA, 80 bp, synthetic construct; identical to SEQ ID NO: 19459
  source 1..80: mol_type = other DNA

SEQ ID NO: 204190 - DNA, 80 bp, synthetic construct; identical to SEQ ID NO: 19460
  source 1..80: mol_type = other DNA

SEQ ID NO: 204191 - DNA, 80 bp, synthetic construct; identical to SEQ ID NO: 19461
  source 1..80: mol_type = other DNA

SEQ ID NO: 204192 - DNA, 80 bp, synthetic construct; identical to SEQ ID NO: 19462
  source 1..80: mol_type = other DNA

SEQ ID NO: 204193 - DNA, 80 bp, synthetic construct; identical to SEQ ID NO: 19463
  source 1..80: mol_type = other DNA

SEQ ID NO: 204194 - DNA, 80 bp, synthetic construct; identical to SEQ ID NO: 19464
  source 1..80: mol_type = other DNA

SEQ ID NO: 204195 - DNA, 80 bp, synthetic construct; identical to SEQ ID NO: 19465
  source 1..80: mol_type = other DNA

SEQ ID NO: 204196 - DNA, 80 bp, synthetic construct; identical to SEQ ID NO: 19466
  source 1..80: mol_type = other DNA

SEQ ID NO: 204197 - DNA, 80 bp, synthetic construct; identical to SEQ ID NO: 19467
  source 1..80: mol_type = other DNA

SEQ ID NO: 204198 - DNA, 80 bp, synthetic construct; identical to SEQ ID NO: 19468
  source 1..80: mol_type = other DNA

SEQ ID NO: 204199 - DNA, 80 bp, synthetic construct; identical to SEQ ID NO: 19469
  source 1..80: mol_type = other DNA

SEQ ID NO: 204200 - DNA, 80 bp, synthetic construct; identical to SEQ ID NO: 19470
  source 1..80: mol_type = other DNA

SEQ ID NO: 204201 - DNA, 80 bp, synthetic construct; identical to SEQ ID NO: 19471
  source 1..80: mol_type = other DNA

SEQ ID NO: 204202 - DNA, 80 bp, synthetic construct; identical to SEQ ID NO: 19472
  source 1..80: mol_type = other DNA

SEQ ID NO: 204203 - DNA, 80 bp, synthetic construct; identical to SEQ ID NO: 19473
  source 1..80: mol_type = other DNA

SEQ ID NO: 204204 - DNA, 80 bp, synthetic construct; identical to SEQ ID NO: 19474
  source 1..80: mol_type = other DNA

SEQ ID NO: 204205 - DNA, 80 bp, synthetic construct; identical to SEQ ID NO: 19475
  source 1..80: mol_type = other DNA

SEQ ID NO: 204206 - DNA, 80 bp, synthetic construct; identical to SEQ ID NO: 19476
  source 1..80: mol_type = other DNA

SEQ ID NO: 204207 - DNA, 80 bp, synthetic construct; identical to SEQ ID NO: 19477
  source 1..80: mol_type = other DNA

SEQ ID NO: 204208 - DNA, 80 bp, synthetic construct; identical to SEQ ID NO: 19478
  source 1..80: mol_type = other DNA

SEQ ID NO: 204209 - DNA, 80 bp, synthetic construct; identical to SEQ ID NO: 19479
  source 1..80: mol_type = other DNA

SEQ ID NO: 204210 - DNA, 80 bp, synthetic construct; identical to SEQ ID NO: 19480
  source 1..80: mol_type = other DNA

SEQ ID NO: 204211 - DNA, 80 bp, synthetic construct; identical to SEQ ID NO: 19481
  source 1..80: mol_type = other DNA

SEQ ID NO: 204212 - DNA, 80 bp, synthetic construct; identical to SEQ ID NO: 19482
  source 1..80: mol_type = other DNA

SEQ ID NO: 204213 - DNA, 80 bp, synthetic construct; identical to SEQ ID NO: 19483
  source 1..80: mol_type = other DNA

SEQ ID NO: 204214 - DNA, 80 bp, synthetic construct; identical to SEQ ID NO: 19484
  source 1..80: mol_type = other DNA

SEQ ID NO: 204215 - DNA, 80 bp, synthetic construct; identical to SEQ ID NO: 19485
  source 1..80: mol_type = other DNA

SEQ ID NO: 204216 - DNA, 80 bp, synthetic construct; identical to SEQ ID NO: 19486
  source 1..80: mol_type = other DNA

SEQ ID NO: 204217 - DNA, 80 bp, synthetic construct; identical to SEQ ID NO: 19487
  source 1..80: mol_type = other DNA

SEQ ID NO: 204218 - DNA, 80 bp, synthetic construct; identical to SEQ ID NO: 19488
  source 1..80: mol_type = other DNA

SEQ ID NO: 204219 - DNA, 80 bp, synthetic construct; identical to SEQ ID NO: 19489
  source 1..80: mol_type = other DNA

SEQ ID NO: 204220 - DNA, 80 bp, synthetic construct; identical to SEQ ID NO: 19490
  source 1..80: mol_type = other DNA

SEQ ID NO: 204221 - DNA, 80 bp, synthetic construct; identical to SEQ ID NO: 19491
  source 1..80: mol_type = other DNA

SEQ ID NO: 204222 - DNA, 80 bp, synthetic construct; identical to SEQ ID NO: 19492
  source 1..80: mol_type = other DNA

SEQ ID NO: 204223 - DNA, 80 bp, synthetic construct; identical to SEQ ID NO: 19493
  source 1..80: mol_type = other DNA

SEQ ID NO: 204224 - DNA, 80 bp, synthetic construct; identical to SEQ ID NO: 19494
  source 1..80: mol_type = other DNA

SEQ ID NO: 204225 - DNA, 80 bp, synthetic construct; identical to SEQ ID NO: 19495
  source 1..80: mol_type = other DNA

SEQ ID NO: 204226 - DNA, 80 bp, synthetic construct; identical to SEQ ID NO: 19496
  source 1..80: mol_type = other DNA

SEQ ID NO: 204227 - DNA, 80 bp, synthetic construct; identical to SEQ ID NO: 19497
  source 1..80: mol_type = other DNA

SEQ ID NO: 204228 - DNA, 80 bp, synthetic construct; identical to SEQ ID NO: 19498
  source 1..80: mol_type = other DNA

SEQ ID NO: 204229 - DNA, 80 bp, synthetic construct; identical to SEQ ID NO: 19499
  source 1..80: mol_type = other DNA

SEQ ID NO: 204230 - DNA, 80 bp, synthetic construct; identical to SEQ ID NO: 19500
  source 1..80: mol_type = other DNA

SEQ ID NO: 204231 - DNA, 80 bp, synthetic construct; identical to SEQ ID NO: 19501
  source 1..80: mol_type = other DNA

SEQ ID NO: 204232 - DNA, 80 bp, synthetic construct; identical to SEQ ID NO: 19502
  source 1..80: mol_type = other DNA

SEQ ID NO: 204233 - DNA, 80 bp, synthetic construct; identical to SEQ ID NO: 19503
  source 1..80: mol_type = other DNA

SEQ ID NO: 204234 - DNA, 80 bp, synthetic construct; identical to SEQ ID NO: 19504
  source 1..80: mol_type = other DNA

SEQ ID NO: 204235 - DNA, 80 bp, synthetic construct; identical to SEQ ID NO: 19505
  source 1..80: mol_type = other DNA

SEQ ID NO: 204236 - DNA, 80 bp, synthetic construct; identical to SEQ ID NO: 19506
  source 1..80: mol_type = other DNA

SEQ ID NO: 204237 - DNA, 80 bp, synthetic construct; identical to SEQ ID NO: 19507
  source 1..80: mol_type = other DNA

SEQ ID NO: 204238 - DNA, 80 bp, synthetic construct; identical to SEQ ID NO: 19508
  source 1..80: mol_type = other DNA

SEQ ID NO: 204239 - DNA, 80 bp, synthetic construct; identical to SEQ ID NO: 19509
  source 1..80: mol_type = other DNA

SEQ ID NO: 204240 - DNA, 80 bp, synthetic construct; identical to SEQ ID NO: 19510
  source 1..80: mol_type = other DNA

SEQ ID NO: 204241 - DNA, 80 bp, synthetic construct; identical to SEQ ID NO: 19511
  source 1..80: mol_type = other DNA

SEQ ID NO: 204242 - DNA, 80 bp, synthetic construct; identical to SEQ ID NO: 19512
  source 1..80: mol_type = other DNA

SEQ ID NO: 204243 - DNA, 80 bp, synthetic construct; identical to SEQ ID NO: 19513
  source 1..80: mol_type = other DNA

SEQ ID NO: 204244 - DNA, 80 bp, synthetic construct; identical to SEQ ID NO: 19514
  source 1..80: mol_type = other DNA

SEQ ID NO: 204245 - DNA, 80 bp, synthetic construct; identical to SEQ ID NO: 19515
  source 1..80: mol_type = other DNA

SEQ ID NO: 204246 - DNA, 80 bp, synthetic construct; identical to SEQ ID NO: 19516
  source 1..80: mol_type = other DNA

SEQ ID NO: 204247 - DNA, 80 bp, synthetic construct; identical to SEQ ID NO: 19517
  source 1..80: mol_type = other DNA

SEQ ID NO: 204248 - DNA, 80 bp, synthetic construct; identical to SEQ ID NO: 19518
  source 1..80: mol_type = other DNA

SEQ ID NO: 204249 - DNA, 80 bp, synthetic construct; identical to SEQ ID NO: 19519
  source 1..80: mol_type = other DNA

SEQ ID NO: 204250 - DNA, 80 bp, synthetic construct; identical to SEQ ID NO: 19520
  source 1..80: mol_type = other DNA

SEQ ID NO: 204251 - DNA, 80 bp, synthetic construct; identical to SEQ ID NO: 19521
  source 1..80: mol_type = other DNA

SEQ ID NO: 204252 - DNA, 80 bp, synthetic construct; identical to SEQ ID NO: 19522
  source 1..80: mol_type = other DNA

SEQ ID NO: 204253 - DNA, 80 bp, synthetic construct; identical to SEQ ID NO: 19523
  source 1..80: mol_type = other DNA

SEQ ID NO: 204254 - DNA, 80 bp, synthetic construct; identical to SEQ ID NO: 19524
  source 1..80: mol_type = other DNA

SEQ ID NO: 204255 - DNA, 80 bp, synthetic construct; identical to SEQ ID NO: 19525
  source 1..80: mol_type = other DNA

SEQ ID NO: 204256 - DNA, 80 bp, synthetic construct; identical to SEQ ID NO: 19526
  source 1..80: mol_type = other DNA

SEQ ID NO: 204257 - DNA, 80 bp, synthetic construct; identical to SEQ ID NO: 19527
  source 1..80: mol_type = other DNA

SEQ ID NO: 204258 - DNA, 80 bp, synthetic construct; identical to SEQ ID NO: 19528
  source 1..80: mol_type = other DNA

SEQ ID NO: 204259 - DNA, 80 bp, synthetic construct; identical to SEQ ID NO: 19529
  source 1..80: mol_type = other DNA

SEQ ID NO: 204260 - DNA, 80 bp, synthetic construct; identical to SEQ ID NO: 19530
  source 1..80: mol_type = other DNA

SEQ ID NO: 204261 - DNA, 80 bp, synthetic construct; identical to SEQ ID NO: 19531
  source 1..80: mol_type = other DNA

SEQ ID NO: 204262 - DNA, 80 bp, synthetic construct; identical to SEQ ID NO: 19532
  source 1..80: mol_type = other DNA

SEQ ID NO: 204263 - DNA, 80 bp, synthetic construct; identical to SEQ ID NO: 19533
  source 1..80: mol_type = other DNA

SEQ ID NO: 204264 - DNA, 80 bp, synthetic construct; identical to SEQ ID NO: 19534
  source 1..80: mol_type = other DNA

SEQ ID NO: 204265 - DNA, 80 bp, synthetic construct; identical to SEQ ID NO: 19535
  source 1..80: mol_type = other DNA

SEQ ID NO: 204266 - DNA, 80 bp, synthetic construct; identical to SEQ ID NO: 19536
  source 1..80: mol_type = other DNA

SEQ ID NO: 204267 - DNA, 80 bp, synthetic construct; identical to SEQ ID NO: 19537
  source 1..80: mol_type = other DNA

SEQ ID NO: 204268 - DNA, 80 bp, synthetic construct; identical to SEQ ID NO: 19538
  source 1..80: mol_type = other DNA

SEQ ID NO: 204269 - DNA, 80 bp, synthetic construct; identical to SEQ ID NO: 19539
  source 1..80: mol_type = other DNA

SEQ ID NO: 204270 - DNA, 80 bp, synthetic construct; identical to SEQ ID NO: 19540
  source 1..80: mol_type = other DNA

SEQ ID NO: 204271 - DNA, 80 bp, synthetic construct; identical to SEQ ID NO: 19541
  source 1..80: mol_type = other DNA

SEQ ID NO: 204272 - DNA, 80 bp, synthetic construct; identical to SEQ ID NO: 19542
  source 1..80: mol_type = other DNA

SEQ ID NO: 204273 - DNA, 80 bp, synthetic construct; identical to SEQ ID NO: 19543
  source 1..80: mol_type = other DNA

SEQ ID NO: 204274 - DNA, 80 bp, synthetic construct; identical to SEQ ID NO: 19544
  source 1..80: mol_type = other DNA

SEQ ID NO: 204275 - DNA, 80 bp, synthetic construct; identical to SEQ ID NO: 19545
  source 1..80: mol_type = other DNA

SEQ ID NO: 204276 - DNA, 80 bp, synthetic construct; identical to SEQ ID NO: 19546
  source 1..80: mol_type = other DNA

SEQ ID NO: 204277 - DNA, 80 bp, synthetic construct; identical to SEQ ID NO: 19547
  source 1..80: mol_type = other DNA

SEQ ID NO: 204278 - DNA, 80 bp, synthetic construct; identical to SEQ ID NO: 19548
  source 1..80: mol_type = other DNA

SEQ ID NO: 204279 - DNA, 80 bp, synthetic construct; identical to SEQ ID NO: 19549
  source 1..80: mol_type = other DNA

SEQ ID NO: 204280 - DNA, 80 bp, synthetic construct; identical to SEQ ID NO: 19550
  source 1..80: mol_type = other DNA

SEQ ID NO: 204281 - DNA, 80 bp, synthetic construct; identical to SEQ ID NO: 19551
  source 1..80: mol_type = other DNA

SEQ ID NO: 204282 - DNA, 80 bp, synthetic construct; identical to SEQ ID NO: 19552
  source 1..80: mol_type = other DNA

SEQ ID NO: 204283 - DNA, 80 bp, synthetic construct; identical to SEQ ID NO: 19553
  source 1..80: mol_type = other DNA

SEQ ID NO: 204284 - DNA, 80 bp, synthetic construct; identical to SEQ ID NO: 19554
  source 1..80: mol_type = other DNA

SEQ ID NO: 204285 - DNA, 80 bp, synthetic construct; identical to SEQ ID NO: 19555
  source 1..80: mol_type = other DNA

SEQ ID NO: 204286 - DNA, 80 bp, synthetic construct; identical to SEQ ID NO: 19556
  source 1..80: mol_type = other DNA

SEQ ID NO: 204287 - DNA, 80 bp, synthetic construct; identical to SEQ ID NO: 19557
  source 1..80: mol_type = other DNA

SEQ ID NO: 204288 - DNA, 80 bp, synthetic construct; identical to SEQ ID NO: 19558
  source 1..80: mol_type = other DNA

SEQ ID NO: 204289 - DNA, 80 bp, synthetic construct; identical to SEQ ID NO: 19559
  source 1..80: mol_type = other DNA

SEQ ID NO: 204290 - DNA, 80 bp, synthetic construct; identical to SEQ ID NO: 19560
  source 1..80: mol_type = other DNA

SEQ ID NO: 204291 - DNA, 80 bp, synthetic construct; identical to SEQ ID NO: 19561
  source 1..80: mol_type = other DNA

SEQ ID NO: 204292 - DNA, 80 bp, synthetic construct; identical to SEQ ID NO: 19562
  source 1..80: mol_type = other DNA

SEQ ID NO: 204293 - DNA, 80 bp, synthetic construct; identical to SEQ ID NO: 19563
  source 1..80: mol_type = other DNA

SEQ ID NO: 204294 - DNA, 80 bp, synthetic construct; identical to SEQ ID NO: 19564
  source 1..80: mol_type = other DNA

SEQ ID NO: 204295 - DNA, 80 bp, synthetic construct; identical to SEQ ID NO: 19565
  source 1..80: mol_type = other DNA

SEQ ID NO: 204296 - DNA, 80 bp, synthetic construct; identical to SEQ ID NO: 19566
  source 1..80: mol_type = other DNA

SEQ ID NO: 204297 - DNA, 80 bp, synthetic construct; identical to SEQ ID NO: 19567
  source 1..80: mol_type = other DNA

SEQ ID NO: 204298 - DNA, 80 bp, synthetic construct; identical to SEQ ID NO: 19568
  source 1..80: mol_type = other DNA

SEQ ID NO: 204299 - DNA, 80 bp, synthetic construct; identical to SEQ ID NO: 19569
  source 1..80: mol_type = other DNA

SEQ ID NO: 204300 - DNA, 80 bp, synthetic construct; identical to SEQ ID NO: 19570
  source 1..80: mol_type = other DNA

SEQ ID NO: 204301 - DNA, 80 bp, synthetic construct; identical to SEQ ID NO: 19571
  source 1..80: mol_type = other DNA

SEQ ID NO: 204302 - DNA, 80 bp, synthetic construct; identical to SEQ ID NO: 19572
  source 1..80: mol_type = other DNA

SEQ ID NO: 204303 - DNA, 80 bp, synthetic construct; identical to SEQ ID NO: 19573
  source 1..80: mol_type = other DNA

SEQ ID NO: 204304 - DNA, 80 bp, synthetic construct; identical to SEQ ID NO: 19574
  source 1..80: mol_type = other DNA

SEQ ID NO: 204305 - DNA, 80 bp, synthetic construct; identical to SEQ ID NO: 19575
  source 1..80: mol_type = other DNA

SEQ ID NO: 204306 - DNA, 80 bp, synthetic construct; identical to SEQ ID NO: 19576
  source 1..80: mol_type = other DNA

SEQ ID NO: 204307 - DNA, 80 bp, synthetic construct; identical to SEQ ID NO: 19577
  source 1..80: mol_type = other DNA

SEQ ID NO: 204308 - DNA, 80 bp, synthetic construct; identical to SEQ ID NO: 19578
  source 1..80: mol_type = other DNA

SEQ ID NO: 204309 - DNA, 80 bp, synthetic construct; identical to SEQ ID NO: 19579
  source 1..80: mol_type = other DNA

SEQ ID NO: 204310 - DNA, 80 bp, synthetic construct; identical to SEQ ID NO: 19580
  source 1..80: mol_type = other DNA

SEQ ID NO: 204311 - DNA, 80 bp, synthetic construct; identical to SEQ ID NO: 19581
  source 1..80: mol_type = other DNA

SEQ ID NO: 204312 - DNA, 80 bp, synthetic construct; identical to SEQ ID NO: 19582
  source 1..80: mol_type = other DNA

SEQ ID NO: 204313 - DNA, 80 bp, synthetic construct; identical to SEQ ID NO: 19583
  source 1..80: mol_type = other DNA

SEQ ID NO: 204314 - DNA, 80 bp, synthetic construct; identical to SEQ ID NO: 19584
  source 1..80: mol_type = other DNA

SEQ ID NO: 204315 - DNA, 80 bp, synthetic construct; identical to SEQ ID NO: 19585
  source 1..80: mol_type = other DNA

SEQ ID NO: 204316 - DNA, 80 bp, synthetic construct; identical to SEQ ID NO: 19586
  source 1..80: mol_type = other DNA

SEQ ID NO: 204317 - DNA, 80 bp, synthetic construct; identical to SEQ ID NO: 19587
  source 1..80: mol_type = other DNA

SEQ ID NO: 204318 - DNA, 80 bp, synthetic construct; identical to SEQ ID NO: 19588
  source 1..80: mol_type = other DNA

SEQ ID NO: 204319 - DNA, 80 bp, synthetic construct; identical to SEQ ID NO: 19589
  source 1..80: mol_type = other DNA

SEQ ID NO: 204320 - DNA, 80 bp, synthetic construct; identical to SEQ ID NO: 19590
  source 1..80: mol_type = other DNA

SEQ ID NO: 204321 - DNA, 80 bp, synthetic construct; identical to SEQ ID NO: 19591
  source 1..80: mol_type = other DNA

SEQ ID NO: 204322 - DNA, 80 bp, synthetic construct; identical to SEQ ID NO: 19592
  source 1..80: mol_type = other DNA

SEQ ID NO: 204323 - DNA, 80 bp, synthetic construct; identical to SEQ ID NO: 19593
  source 1..80: mol_type = other DNA

SEQ ID NO: 204324 - DNA, 80 bp, synthetic construct; identical to SEQ ID NO: 19594
  source 1..80: mol_type = other DNA

SEQ ID NO: 204325 - DNA, 80 bp, synthetic construct; identical to SEQ ID NO: 19595
  source 1..80: mol_type = other DNA

SEQ ID NO: 204326 - DNA, 80 bp, synthetic construct; identical to SEQ ID NO: 19596
  source 1..80: mol_type = other DNA

SEQ ID NO: 204327 - DNA, 80 bp, synthetic construct; identical to SEQ ID NO: 19597
  source 1..80: mol_type = other DNA

SEQ ID NO: 204328 - DNA, 80 bp, synthetic construct; identical to SEQ ID NO: 19598
  source 1..80: mol_type = other DNA

SEQ ID NO: 204329 - DNA, 80 bp, synthetic construct; identical to SEQ ID NO: 19599
  source 1..80: mol_type = other DNA

SEQ ID NO: 204330 - DNA, 80 bp, synthetic construct; identical to SEQ ID NO: 19600
  source 1..80: mol_type = other DNA

SEQ ID NO: 204331 - DNA, 80 bp, synthetic construct; identical to SEQ ID NO: 19601
  source 1..80: mol_type = other DNA

SEQ ID NO: 204332 - DNA, 80 bp, synthetic construct; identical to SEQ ID NO: 19602
  source 1..80: mol_type = other DNA

SEQ ID NO: 204333 - DNA, 80 bp, synthetic construct; identical to SEQ ID NO: 19603
  source 1..80: mol_type = other DNA

SEQ ID NO: 204334 - DNA, 80 bp, synthetic construct; identical to SEQ ID NO: 19604
  source 1..80: mol_type = other DNA

SEQ ID NO: 204335 - DNA, 80 bp, synthetic construct; identical to SEQ ID NO: 19605
  source 1..80: mol_type = other DNA

SEQ ID NO: 204336 - DNA, 80 bp, synthetic construct; identical to SEQ ID NO: 19606
  source 1..80: mol_type = other DNA

SEQ ID NO: 204337 - DNA, 80 bp, synthetic construct; identical to SEQ ID NO: 19607
  source 1..80: mol_type = other DNA

SEQ ID NO: 204338 - DNA, 80 bp, synthetic construct; identical to SEQ ID NO: 19608
  source 1..80: mol_type = other DNA

SEQ ID NO: 204339 - DNA, 80 bp, synthetic construct; identical to SEQ ID NO: 19609
  source 1..80: mol_type = other DNA

SEQ ID NO: 204340 - DNA, 80 bp, synthetic construct; identical to SEQ ID NO: 19610
  source 1..80: mol_type = other DNA

SEQ ID NO: 204341 - DNA, 80 bp, synthetic construct; identical to SEQ ID NO: 19611
  source 1..80: mol_type = other DNA

SEQ ID NO: 204342 - DNA, 80 bp, synthetic construct; identical to SEQ ID NO: 19612
  source 1..80: mol_type = other DNA

SEQ ID NO: 204343 - DNA, 80 bp, synthetic construct; identical to SEQ ID NO: 19613
  source 1..80: mol_type = other DNA

SEQ ID NO: 204344 - DNA, 80 bp, synthetic construct; identical to SEQ ID NO: 19614
  source 1..80: mol_type = other DNA

SEQ ID NO: 204345 - DNA, 80 bp, synthetic construct; identical to SEQ ID NO: 19615
  source 1..80: mol_type = other DNA

SEQ ID NO: 204346 - DNA, 80 bp, synthetic construct; identical to SEQ ID NO: 19616
  source 1..80: mol_type = other DNA

SEQ ID NO: 204347 - DNA, 80 bp, synthetic construct; identical to SEQ ID NO: 19617
  source 1..80: mol_type = other DNA

SEQ ID NO: 204348 - DNA, 80 bp, synthetic construct; identical to SEQ ID NO: 19618
  source 1..80: mol_type = other DNA

SEQ ID NO: 204349 - DNA, 80 bp, synthetic construct; identical to SEQ ID NO: 19619
  source 1..80: mol_type = other DNA

SEQ ID NO: 204350 - DNA, 80 bp, synthetic construct; identical to SEQ ID NO: 19620
  source 1..80: mol_type = other DNA

SEQ ID NO: 204351 - DNA, 80 bp, synthetic construct; identical to SEQ ID NO: 19621
  source 1..80: mol_type = other DNA

SEQ ID NO: 204352 - DNA, 80 bp, synthetic construct; identical to SEQ ID NO: 19622
  source 1..80: mol_type = other DNA

SEQ ID NO: 204353 - DNA, 80 bp, synthetic construct; identical to SEQ ID NO: 19623
  source 1..80: mol_type = other DNA

SEQ ID NO: 204354 - DNA, 80 bp, synthetic construct; identical to SEQ ID NO: 19624
  source 1..80: mol_type = other DNA

SEQ ID NO: 204355 - DNA, 80 bp, synthetic construct; identical to SEQ ID NO: 19625
  source 1..80: mol_type = other DNA

SEQ ID NO: 204356 - DNA, 80 bp, synthetic construct; identical to SEQ ID NO: 19626
  source 1..80: mol_type = other DNA

SEQ ID NO: 204357 - DNA, 80 bp, synthetic construct; identical to SEQ ID NO: 19627
  source 1..80: mol_type = other DNA

SEQ ID NO: 204358 - DNA, 80 bp, synthetic construct; identical to SEQ ID NO: 19628
  source 1..80: mol_type = other DNA

SEQ ID NO: 204359 - DNA, 80 bp, synthetic construct; identical to SEQ ID NO: 19629
  source 1..80: mol_type = other DNA

SEQ ID NO: 204360 - DNA, 80 bp, synthetic construct; identical to SEQ ID NO: 19630
  source 1..80: mol_type = other DNA

SEQ ID NO: 204361 - DNA, 80 bp, synthetic construct; identical to SEQ ID NO: 19631
  source 1..80: mol_type = other DNA

SEQ ID NO: 204362 - DNA, 80 bp, synthetic construct; identical to SEQ ID NO: 19632
  source 1..80: mol_type = other DNA

SEQ ID NO: 204363 - DNA, 80 bp, synthetic construct; identical to SEQ ID NO: 19633
  source 1..80: mol_type = other DNA

SEQ ID NO: 204364 - DNA, 80 bp, synthetic construct; identical to SEQ ID NO: 19634
  source 1..80: mol_type = other DNA

SEQ ID NO: 204365 - DNA, 80 bp, synthetic construct; identical to SEQ ID NO: 19635
  source 1..80: mol_type = other DNA

SEQ ID NO: 204366 - DNA, 80 bp, synthetic construct; identical to SEQ ID NO: 19636
  source 1..80: mol_type = other DNA

SEQ ID NO: 204367 - DNA, 80 bp, synthetic construct; identical to SEQ ID NO: 19637
  source 1..80: mol_type = other DNA

SEQ ID NO: 204368 - DNA, 80 bp, synthetic construct; identical to SEQ ID NO: 19638
  source 1..80: mol_type = other DNA

SEQ ID NO: 204369 - DNA, 80 bp, synthetic construct; identical to SEQ ID NO: 19639
  source 1..80: mol_type = other DNA

SEQ ID NO: 204370 - DNA, 80 bp, synthetic construct; identical to SEQ ID NO: 19640
  source 1..80: mol_type = other DNA

SEQ ID NO: 204371 - DNA, 80 bp, synthetic construct; identical to SEQ ID NO: 19641
  source 1..80: mol_type = other DNA

SEQ ID NO: 204372 - DNA, 80 bp, synthetic construct; identical to SEQ ID NO: 19642
  source 1..80: mol_type = other DNA

SEQ ID NO: 204373 - DNA, 80 bp, synthetic construct; identical to SEQ ID NO: 19643
  source 1..80: mol_type = other DNA

SEQ ID NO: 204374 - DNA, 80 bp, synthetic construct; identical to SEQ ID NO: 19644
  source 1..80: mol_type = other DNA

SEQ ID NO: 204375 - DNA, 80 bp, synthetic construct; identical to SEQ ID NO: 19645
  source 1..80: mol_type = other DNA

SEQ ID NO: 204376 - DNA, 80 bp, synthetic construct; identical to SEQ ID NO: 19646
  source 1..80: mol_type = other DNA

SEQ ID NO: 204377 - DNA, 80 bp, synthetic construct; identical to SEQ ID NO: 19647
  source 1..80: mol_type = other DNA

SEQ ID NO: 204378 - DNA, 80 bp, synthetic construct; identical to SEQ ID NO: 19648
  source 1..80: mol_type = other DNA

SEQ ID NO: 204379 - DNA, 80 bp, synthetic construct; identical to SEQ ID NO: 19649
  source 1..80: mol_type = other DNA

SEQ ID NO: 204380 - DNA, 80 bp, synthetic construct; identical to SEQ ID NO: 19650
  source 1..80: mol_type = other DNA

SEQ ID NO: 204381 - DNA, 80 bp, synthetic construct; identical to SEQ ID NO: 19651
  source 1..80: mol_type = other DNA

SEQ ID NO: 204382 - DNA, 80 bp, synthetic construct; identical to SEQ ID NO: 19652
  source 1..80: mol_type = other DNA

SEQ ID NO: 204383 - DNA, 80 bp, synthetic construct; identical to SEQ ID NO: 19653
  source 1..80: mol_type = other DNA

SEQ ID NO: 204384 - DNA, 80 bp, synthetic construct; identical to SEQ ID NO: 19654
  source 1..80: mol_type = other DNA

SEQ ID NO: 204385 - DNA, 80 bp, synthetic construct; identical to SEQ ID NO: 19655
  source 1..80: mol_type = other DNA

SEQ ID NO: 204386 - DNA, 80 bp, synthetic construct; identical to SEQ ID NO: 19656
  source 1..80: mol_type = other DNA

SEQ ID NO: 204387 - DNA, 80 bp, synthetic construct; identical to SEQ ID NO: 19657
  source 1..80: mol_type = other DNA

SEQ ID NO: 204388 - DNA, 80 bp, synthetic construct; identical to SEQ ID NO: 19658
  source 1..80: mol_type = other DNA

SEQ ID NO: 204389 - DNA, 80 bp, synthetic construct; identical to SEQ ID NO: 19659
  source 1..80: mol_type = other DNA

SEQ ID NO: 204390 - DNA, 80 bp, synthetic construct; identical to SEQ ID NO: 19660
  source 1..80: mol_type = other DNA

SEQ ID NO: 204391 - DNA, 80 bp, synthetic construct; identical to SEQ ID NO: 19661
  source 1..80: mol_type = other DNA

SEQ ID NO: 204392 - DNA, 80 bp, synthetic construct; identical to SEQ ID NO: 19662
  source 1..80: mol_type = other DNA

SEQ ID NO: 204393 - DNA, 80 bp, synthetic construct; identical to SEQ ID NO: 19663
  source 1..80: mol_type = other DNA

SEQ ID NO: 204394 - DNA, 80 bp, synthetic construct; identical to SEQ ID NO: 19664
  source 1..80: mol_type = other DNA

SEQ ID NO: 204395 - DNA, 80 bp, synthetic construct; identical to SEQ ID NO: 19665
  source 1..80: mol_type = other DNA

SEQ ID NO: 204396 - DNA, 80 bp, synthetic construct; identical to SEQ ID NO: 19666
  source 1..80: mol_type = other DNA

SEQ ID NO: 204397 - DNA, 80 bp, synthetic construct; identical to SEQ ID NO: 19667
  source 1..80: mol_type = other DNA

SEQ ID NO: 204398 - DNA, 80 bp, synthetic construct; identical to SEQ ID NO: 19668
  source 1..80: mol_type = other DNA

SEQ ID NO: 204399 - DNA, 80 bp, synthetic construct; identical to SEQ ID NO: 19669
  source 1..80: mol_type = other DNA

SEQ ID NO: 204400 - DNA, 80 bp, synthetic construct; identical to SEQ ID NO: 19670
  source 1..80: mol_type = other DNA

SEQ ID NO: 204401 - DNA, 80 bp, synthetic construct; identical to SEQ ID NO: 19671
  source 1..80: mol_type = other DNA

SEQ ID NO: 204402 - DNA, 80 bp, synthetic construct; identical to SEQ ID NO: 19672
  source 1..80: mol_type = other DNA

SEQ ID NO: 204403 - DNA, 80 bp, synthetic construct; identical to SEQ ID NO: 19673
  source 1..80: mol_type = other DNA

SEQ ID NO: 204404 - DNA, 80 bp, synthetic construct; identical to SEQ ID NO: 19674
  source 1..80: mol_type = other DNA

SEQ ID NO: 204405 - DNA, 80 bp, synthetic construct; identical to SEQ ID NO: 19675
  source 1..80: mol_type = other DNA

SEQ ID NO: 204406 - DNA, 80 bp, synthetic construct; identical to SEQ ID NO: 19676
  source 1..80: mol_type = other DNA

SEQ ID NO: 204407 - DNA, 80 bp, synthetic construct; identical to SEQ ID NO: 19677
  source 1..80: mol_type = other DNA

SEQ ID NO: 204408 - DNA, 80 bp, synthetic construct; identical to SEQ ID NO: 19678
  source 1..80: mol_type = other DNA

SEQ ID NO: 204409 - DNA, 80 bp, synthetic construct; identical to SEQ ID NO: 19679
  source 1..80: mol_type = other DNA

SEQ ID NO: 204410 - DNA, 80 bp, synthetic construct; identical to SEQ ID NO: 19680
  source 1..80: mol_type = other DNA

SEQ ID NO: 204411 - DNA, 80 bp, synthetic construct; identical to SEQ ID NO: 19681
  source 1..80: mol_type = other DNA

SEQ ID NO: 204412 - DNA, 80 bp, synthetic construct; identical to SEQ ID NO: 19682
  source 1..80: mol_type = other DNA

SEQ ID NO: 204413 - DNA, 80 bp, synthetic construct; identical to SEQ ID NO: 19683
  source 1..80: mol_type = other DNA

SEQ ID NO: 204414 - DNA, 80 bp, synthetic construct; identical to SEQ ID NO: 19684
  source 1..80: mol_type = other DNA

SEQ ID NO: 204415 - DNA, 80 bp, synthetic construct; identical to SEQ ID NO: 19685
  source 1..80: mol_type = other DNA

SEQ ID NO: 204416 - DNA, 80 bp, synthetic construct; identical to SEQ ID NO: 19686
  source 1..80: mol_type = other DNA

SEQ ID NO: 204417 - DNA, 80 bp, synthetic construct; identical to SEQ ID NO: 19687
  source 1..80: mol_type = other DNA

SEQ ID NO: 204418 - DNA, 80 bp, synthetic construct; identical to SEQ ID NO: 19688
  source 1..80: mol_type = other DNA

SEQ ID NO: 204419 - DNA, 80 bp, synthetic construct; identical to SEQ ID NO: 19689
  source 1..80: mol_type = other DNA

SEQ ID NO: 204420 - DNA, 80 bp, synthetic construct; identical to SEQ ID NO: 19690
  source 1..80: mol_type = other DNA

SEQ ID NO: 204421 - DNA, 80 bp, synthetic construct; identical to SEQ ID NO: 19691
  source 1..80: mol_type = other DNA

SEQ ID NO: 204422 - DNA, 80 bp, synthetic construct; identical to SEQ ID NO: 19692
  source 1..80: mol_type = other DNA

SEQ ID NO: 204423 - DNA, 80 bp, synthetic construct; identical to SEQ ID NO: 19693
  source 1..80: mol_type = other DNA

SEQ ID NO: 204424 - DNA, 80 bp, synthetic construct; identical to SEQ ID NO: 19694
  source 1..80: mol_type = other DNA

SEQ ID NO: 204425 - DNA, 80 bp, synthetic construct; identical to SEQ ID NO: 19695
  source 1..80: mol_type = other DNA

SEQ ID NO: 204426 - DNA, 80 bp, synthetic construct; identical to SEQ ID NO: 19696
  source 1..80: mol_type = other DNA

SEQ ID NO: 204427 - DNA, 80 bp, synthetic construct; identical to SEQ ID NO: 19697
  source 1..80: mol_type = other DNA

SEQ ID NO: 204428 - DNA, 80 bp, synthetic construct; identical to SEQ ID NO: 19698
  source 1..80: mol_type = other DNA

SEQ ID NO: 204429 - DNA, 80 bp, synthetic construct; identical to SEQ ID NO: 19699
  source 1..80: mol_type = other DNA

SEQ ID NO: 204430 - DNA, 80 bp, synthetic construct; identical to SEQ ID NO: 19700
  source 1..80: mol_type = other DNA

SEQ ID NO: 204431 - DNA, 80 bp, synthetic construct; identical to SEQ ID NO: 19701
  source 1..80: mol_type = other DNA

SEQ ID NO: 204432 - DNA, 80 bp, synthetic construct; identical to SEQ ID NO: 19702
  source 1..80: mol_type = other DNA

SEQ ID NO: 204433 - DNA, 80 bp, synthetic construct; identical to SEQ ID NO: 19703
  source 1..80: mol_type = other DNA

SEQ ID NO: 204434 - DNA, 80 bp, synthetic construct; identical to SEQ ID NO: 19704
  source 1..80: mol_type = other DNA

SEQ ID NO: 204435 - DNA, 80 bp, synthetic construct; identical to SEQ ID NO: 19705
  source 1..80: mol_type = other DNA

SEQ ID NO: 204436 - DNA, 80 bp, synthetic construct; identical to SEQ ID NO: 19706
  source 1..80: mol_type = other DNA

SEQ ID NO: 204437 - DNA, 80 bp, synthetic construct; identical to SEQ ID NO: 19707
  source 1..80: mol_type = other DNA

SEQ ID NO: 204438 - DNA, 80 bp, synthetic construct; identical to SEQ ID NO: 19708
  source 1..80: mol_type = other DNA

SEQ ID NO: 204439 - DNA, 80 bp, synthetic construct; identical to SEQ ID NO: 19709
  source 1..80: mol_type = other DNA

SEQ ID NO: 204440 - DNA, 80 bp, synthetic construct; identical to SEQ ID NO: 19710
  source 1..80: mol_type = other DNA

SEQ ID NO: 204441 - DNA, 80 bp, synthetic construct; identical to SEQ ID NO: 19711
  source 1..80: mol_type = other DNA

SEQ ID NO: 204442 - DNA, 80 bp, synthetic construct; identical to SEQ ID NO: 19712
  source 1..80: mol_type = other DNA

SEQ ID NO: 204443 - DNA, 80 bp, synthetic construct; identical to SEQ ID NO: 19713
  source 1..80: mol_type = other DNA

SEQ ID NO: 204444 - DNA, 80 bp, synthetic construct; identical to SEQ ID NO: 19714
  source 1..80: mol_type = other DNA

SEQ ID NO: 204445 - DNA, 80 bp, synthetic construct; identical to SEQ ID NO: 19715
  source 1..80: mol_type = other DNA

SEQ ID NO: 204446 - DNA, 80 bp, synthetic construct; identical to SEQ ID NO: 19716
  source 1..80: mol_type = other DNA

SEQ ID NO: 204447 - DNA, 80 bp, synthetic construct; identical to SEQ ID NO: 19717
  source 1..80: mol_type = other DNA

SEQ ID NO: 204448 - DNA, 80 bp, synthetic construct; identical to SEQ ID NO: 19718
  source 1..80: mol_type = other DNA

SEQ ID NO: 204449 - DNA, 80 bp, synthetic construct; identical to SEQ ID NO: 19719
  source 1..80: mol_type = other DNA

SEQ ID NO: 204450 - DNA, 80 bp, synthetic construct; identical to SEQ ID NO: 19720
  source 1..80: mol_type = other DNA

SEQ ID NO: 204451 - DNA, 80 bp, synthetic construct; identical to SEQ ID NO: 19721
  source 1..80: mol_type = other DNA

SEQ ID NO: 204452 - DNA, 80 bp, synthetic construct; identical to SEQ ID NO: 19722
  source 1..80: mol_type = other DNA

SEQ ID NO: 204453 - DNA, 80 bp, synthetic construct; identical to SEQ ID NO: 19723
  source 1..80: mol_type = other DNA

SEQ ID NO: 204454 - DNA, 80 bp, synthetic construct; identical to SEQ ID NO: 19724
  source 1..80: mol_type = other DNA

SEQ ID NO: 204455 - DNA, 80 bp, synthetic construct; identical to SEQ ID NO: 19725
  source 1..80: mol_type = other DNA

SEQ ID NO: 204456 - DNA, 80 bp, synthetic construct; identical to SEQ ID NO: 19726
  source 1..80: mol_type = other DNA

SEQ ID NO: 204457 - DNA, 80 bp, synthetic construct; identical to SEQ ID NO: 19727
  source 1..80: mol_type = other DNA

SEQ ID NO: 204458 - DNA, 80 bp, synthetic construct; identical to SEQ ID NO: 19728
  source 1..80: mol_type = other DNA

SEQ ID NO: 204459 - DNA, 80 bp, synthetic construct; identical to SEQ ID NO: 19729
  source 1..80: mol_type = other DNA

SEQ ID NO: 204460 - DNA, 80 bp, synthetic construct; identical to SEQ ID NO: 19730
  source 1..80: mol_type = other DNA

SEQ ID NO: 204461 - DNA, 80 bp, synthetic construct; identical to SEQ ID NO: 19731
  source 1..80: mol_type = other DNA

SEQ ID NO: 204462 - DNA, 80 bp, synthetic construct; identical to SEQ ID NO: 19732
  source 1..80: mol_type = other DNA

SEQ ID NO: 204463 - DNA, 80 bp, synthetic construct; identical to SEQ ID NO: 19733
  source 1..80: mol_type = other DNA

SEQ ID NO: 204464 - DNA, 80 bp, synthetic construct; identical to SEQ ID NO: 19734
  source 1..80: mol_type = other DNA

SEQ ID NO: 204465 - DNA, 80 bp, synthetic construct; identical to SEQ ID NO: 19735
  source 1..80: mol_type = other DNA

SEQ ID NO: 204466 - DNA, 80 bp, synthetic construct; identical to SEQ ID NO: 19736
  source 1..80: mol_type = other DNA

SEQ ID NO: 204467 - DNA, 80 bp, synthetic construct; identical to SEQ ID NO: 19737
  source 1..80: mol_type = other DNA

SEQ ID NO: 204468 - DNA, 80 bp, synthetic construct; identical to SEQ ID NO: 19738
  source 1..80: mol_type = other DNA

SEQ ID NO: 204469 - DNA, 80 bp, synthetic construct; identical to SEQ ID NO: 19739
  source 1..80: mol_type = other DNA

SEQ ID NO: 204470 - DNA, 80 bp, synthetic construct; identical to SEQ ID NO: 19740
  source 1..80: mol_type = other DNA

SEQ ID NO: 204471 - DNA, 80 bp, synthetic construct; identical to SEQ ID NO: 19741
  source 1..80: mol_type = other DNA

SEQ ID NO: 204472 - DNA, 80 bp, synthetic construct; identical to SEQ ID NO: 19742
  source 1..80: mol_type = other DNA

SEQ ID NO: 204473 - DNA, 80 bp, synthetic construct; identical to SEQ ID NO: 19743
  source 1..80: mol_type = other DNA

SEQ ID NO: 204474 - DNA, 80 bp, synthetic construct; identical to SEQ ID NO: 19744
  source 1..80: mol_type = other DNA

SEQ ID NO: 204475 - DNA, 80 bp, synthetic construct; identical to SEQ ID NO: 19745
  source 1..80: mol_type = other DNA

SEQ ID NO: 204476 - DNA, 80 bp, synthetic construct; identical to SEQ ID NO: 19746
  source 1..80: mol_type = other DNA

SEQ ID NO: 204477 - DNA, 80 bp, synthetic construct; identical to SEQ ID NO: 19747
  source 1..80: mol_type = other DNA

SEQ ID NO: 204478 - DNA, 80 bp, synthetic construct; identical to SEQ ID NO: 19748
  source 1..80: mol_type = other DNA

SEQ ID NO: 204479 - DNA, 80 bp, synthetic construct; identical to SEQ ID NO: 19749
  source 1..80: mol_type = other DNA

SEQ ID NO: 204480 - DNA, 80 bp, synthetic construct; identical to SEQ ID NO: 19750
  source 1..80: mol_type = other DNA

SEQ ID NO: 204481 - DNA, 80 bp, synthetic construct; identical to SEQ ID NO: 19751
  source 1..80: mol_type = other DNA

SEQ ID NO: 204482 - DNA, 80 bp, synthetic construct; identical to SEQ ID NO: 19752
  source 1..80: mol_type = other DNA

SEQ ID NO: 204483 - DNA, 80 bp, synthetic construct; identical to SEQ ID NO: 19753
  source 1..80: mol_type = other DNA

SEQ ID NO: 204484 - DNA, 80 bp, synthetic construct; identical to SEQ ID NO: 19754
  source 1..80: mol_type = other DNA

SEQ ID NO: 204485 - DNA, 80 bp, synthetic construct; identical to SEQ ID NO: 19755
  source 1..80: mol_type = other DNA

SEQ ID NO: 204486 - DNA, 80 bp, synthetic construct; identical to SEQ ID NO: 19756
  source 1..80: mol_type = other DNA

SEQ ID NO: 204487 - DNA, 80 bp, synthetic construct; identical to SEQ ID NO: 19757
  source 1..80: mol_type = other DNA

SEQ ID NO: 204488 - DNA, 80 bp, synthetic construct; identical to SEQ ID NO: 19758
  source 1..80: mol_type = other DNA

SEQ ID NO: 204489 - DNA, 80 bp, synthetic construct; identical to SEQ ID NO: 19759
  source 1..80: mol_type = other DNA

SEQ ID NO: 204490 - DNA, 80 bp, synthetic construct; identical to SEQ ID NO: 19760
  source 1..80: mol_type = other DNA

SEQ ID NO: 204491 - DNA, 80 bp, synthetic construct; identical to SEQ ID NO: 19761
  source 1..80: mol_type = other DNA

SEQ ID NO: 204492 - DNA, 80 bp, synthetic construct; identical to SEQ ID NO: 19762
  source 1..80: mol_type = other DNA

SEQ ID NO: 204493 - DNA, 80 bp, synthetic construct; identical to SEQ ID NO: 19763
  source 1..80: mol_type = other DNA

SEQ ID NO: 204494 - DNA, 80 bp, synthetic construct; identical to SEQ ID NO: 19764
  source 1..80: mol_type = other DNA

SEQ ID NO: 204495 - DNA, 80 bp, synthetic construct; identical to SEQ ID NO: 19765
  source 1..80: mol_type = other DNA

SEQ ID NO: 204496 - DNA, 80 bp, synthetic construct; identical to SEQ ID NO: 19766
  source 1..80: mol_type = other DNA

SEQ ID NO: 204497 - DNA, 80 bp, synthetic construct; identical to SEQ ID NO: 19767
  source 1..80: mol_type = other DNA

SEQ ID NO: 204498 - DNA, 80 bp, synthetic construct; identical to SEQ ID NO: 19768
  source 1..80: mol_type = other DNA

SEQ ID NO: 204499 - DNA, 80 bp, synthetic construct; identical to SEQ ID NO: 19769
  source 1..80: mol_type = other DNA

SEQ ID NO: 204500 - DNA, 80 bp, synthetic construct; identical to SEQ ID NO: 19770
  source 1..80: mol_type = other DNA

SEQ ID NO: 204501 - DNA, 80 bp, synthetic construct; identical to SEQ ID NO: 19771
  source 1..80: mol_type = other DNA

SEQ ID NO: 204502 - DNA, 80 bp, synthetic construct; identical to SEQ ID NO: 19772
  source 1..80: mol_type = other DNA

SEQ ID NO: 204503 - DNA, 80 bp, synthetic construct; identical to SEQ ID NO: 19773
  source 1..80: mol_type = other DNA

SEQ ID NO: 204504 - DNA, 80 bp, synthetic construct; identical to SEQ ID NO: 19774
  source 1..80: mol_type = other DNA

SEQ ID NO: 204505 - DNA, 80 bp, synthetic construct; identical to SEQ ID NO: 19775
  source 1..80: mol_type = other DNA

SEQ ID NO: 204506 - DNA, 80 bp, synthetic construct; identical to SEQ ID NO: 19776
  source 1..80: mol_type = other DNA

SEQ ID NO: 204507 - DNA, 80 bp, synthetic construct; identical to SEQ ID NO: 19777
  source 1..80: mol_type = other DNA

SEQ ID NO: 204508 - DNA, 80 bp, synthetic construct; identical to SEQ ID NO: 19778
  source 1..80: mol_type = other DNA

SEQ ID NO: 204509 - DNA, 80 bp, synthetic construct; identical to SEQ ID NO: 19779
  source 1..80: mol_type = other DNA

SEQ ID NO: 204510 - DNA, 80 bp, synthetic construct; identical to SEQ ID NO: 19780
  source 1..80: mol_type = other DNA

SEQ ID NO: 204511 - DNA, 80 bp, synthetic construct; identical to SEQ ID NO: 19781
  source 1..80: mol_type = other DNA

SEQ ID NO: 204512 - DNA, 80 bp, synthetic construct; identical to SEQ ID NO: 19782
  source 1..80: mol_type = other DNA

SEQ ID NO: 204513 - DNA, 80 bp, synthetic construct; identical to SEQ ID NO: 19783
  source 1..80: mol_type = other DNA

SEQ ID NO: 204514 - DNA, 80 bp, synthetic construct; identical to SEQ ID NO: 19784
  source 1..80: mol_type = other DNA

SEQ ID NO: 204515 - DNA, 80 bp, synthetic construct; identical to SEQ ID NO: 19785
  source 1..80: mol_type = other DNA

SEQ ID NO: 204516 - DNA, 80 bp, synthetic construct; identical to SEQ ID NO: 19786
  source 1..80: mol_type = other DNA

SEQ ID NO: 204517 - DNA, 80 bp, synthetic construct; identical to SEQ ID NO: 19787
  source 1..80: mol_type = other DNA

SEQ ID NO: 204518 - DNA, 80 bp, synthetic construct; identical to SEQ ID NO: 19788
  source 1..80: mol_type = other DNA

SEQ ID NO: 204519 - DNA, 80 bp, synthetic construct; identical to SEQ ID NO: 19789
  source 1..80: mol_type = other DNA

SEQ ID NO: 204520 - DNA, 80 bp, synthetic construct; identical to SEQ ID NO: 19790
  source 1..80: mol_type = other DNA

SEQ ID NO: 204521 - DNA, 80 bp, synthetic construct; identical to SEQ ID NO: 19791
  source 1..80: mol_type = other DNA

SEQ ID NO: 204522 - DNA, 80 bp, synthetic construct; identical to SEQ ID NO: 19792
  source 1..80: mol_type = other DNA

SEQ ID NO: 204523 - DNA, 80 bp, synthetic construct; identical to SEQ ID NO: 19793
  source 1..80: mol_type = other DNA

SEQ ID NO: 204524 - DNA, 80 bp, synthetic construct; identical to SEQ ID NO: 19794
  source 1..80: mol_type = other DNA

SEQ ID NO: 204525 - DNA, 80 bp, synthetic construct; identical to SEQ ID NO: 19795
  source 1..80: mol_type = other DNA

SEQ ID NO: 204526 - DNA, 80 bp, synthetic construct; identical to SEQ ID NO: 19796
  source 1..80: mol_type = other DNA

SEQ ID NO: 204527 - DNA, 80 bp, synthetic construct; identical to SEQ ID NO: 19797
  source 1..80: mol_type = other DNA

SEQ ID NO: 204528 - DNA, 80 bp, synthetic construct; identical to SEQ ID NO: 19798
  source 1..80: mol_type = other DNA

SEQ ID NO: 204529 - DNA, 80 bp, synthetic construct; identical to SEQ ID NO: 19799
  source 1..80: mol_type = other DNA

SEQ ID NO: 204530 - DNA, 80 bp, synthetic construct; identical to SEQ ID NO: 19800
  source 1..80: mol_type = other DNA

SEQ ID NO: 204531 - DNA, 80 bp, synthetic construct; identical to SEQ ID NO: 19801
  source 1..80: mol_type = other DNA

SEQ ID NO: 204532 - DNA, 80 bp, synthetic construct; identical to SEQ ID NO: 19802
  source 1..80: mol_type = other DNA

SEQ ID NO: 204533 - DNA, 80 bp, synthetic construct; identical to SEQ ID NO: 19803
  source 1..80: mol_type = other DNA

SEQ ID NO: 204534 - DNA, 80 bp, synthetic construct; identical to SEQ ID NO: 19804
  source 1..80: mol_type = other DNA

SEQ ID NO: 204535 - DNA, 80 bp, synthetic construct; identical to SEQ ID NO: 19805
  source 1..80: mol_type = other DNA

SEQ ID NO: 204536 - DNA, 80 bp, synthetic construct; identical to SEQ ID NO: 19806
  source 1..80: mol_type = other DNA

SEQ ID NO: 204537 - DNA, 80 bp, synthetic construct; identical to SEQ ID NO: 19807
  source 1..80: mol_type = other DNA

SEQ ID NO: 204538 - DNA, 80 bp, synthetic construct; identical to SEQ ID NO: 19808
  source 1..80: mol_type = other DNA

SEQ ID NO: 204539 - DNA, 80 bp, synthetic construct; identical to SEQ ID NO: 19809
  source 1..80: mol_type = other DNA

SEQ ID NO: 204540 - DNA, 80 bp, synthetic construct; identical to SEQ ID NO: 19810
  source 1..80: mol_type = other DNA

SEQ ID NO: 204541 - DNA, 80 bp, synthetic construct; identical to SEQ ID NO: 19811
  source 1..80: mol_type = other DNA

SEQ ID NO: 204542 - DNA, 80 bp, synthetic construct; identical to SEQ ID NO: 19812
  source 1..80: mol_type = other DNA

SEQ ID NO: 204543 - DNA, 80 bp, synthetic construct; identical to SEQ ID NO: 19813
  source 1..80: mol_type = other DNA

SEQ ID NO: 204544 - DNA, 80 bp, synthetic construct; identical to SEQ ID NO: 19814
  source 1..80: mol_type = other DNA

SEQ ID NO: 204545 - DNA, 80 bp, synthetic construct; identical to SEQ ID NO: 19815
  source 1..80: mol_type = other DNA

SEQ ID NO: 204546 - DNA, 80 bp, synthetic construct; identical to SEQ ID NO: 19816
  source 1..80: mol_type = other DNA

SEQ ID NO: 204547 - DNA, 80 bp, synthetic construct; identical to SEQ ID NO: 19817
  source 1..80: mol_type = other DNA

SEQ ID NO: 204548 - DNA, 80 bp, synthetic construct; identical to SEQ ID NO: 19818
  source 1..80: mol_type = other DNA

SEQ ID NO: 204549 - DNA, 80 bp, synthetic construct; identical to SEQ ID NO: 19819
  source 1..80: mol_type = other DNA

SEQ ID NO: 204550 - DNA, 80 bp, synthetic construct; identical to SEQ ID NO: 19820
  source 1..80: mol_type = other DNA

SEQ ID NO: 204551 - DNA, 80 bp, synthetic construct; identical to SEQ ID NO: 19821
  source 1..80: mol_type = other DNA

SEQ ID NO: 204552 - DNA, 80 bp, synthetic construct; identical to SEQ ID NO: 19822
  source 1..80: mol_type = other DNA

SEQ ID NO: 204553 - DNA, 80 bp, synthetic construct; identical to SEQ ID NO: 19823
  source 1..80: mol_type = other DNA

SEQ ID NO: 204554 - DNA, 80 bp, synthetic construct; identical to SEQ ID NO: 19824
  source 1..80: mol_type = other DNA

SEQ ID NO: 204555 - DNA, 80 bp, synthetic construct; identical to SEQ ID NO: 19825
  source 1..80: mol_type = other DNA

SEQ ID NO: 204556 - DNA, 80 bp, synthetic construct; identical to SEQ ID NO: 19826
  source 1..80: mol_type = other DNA

SEQ ID NO: 204557 - DNA, 80 bp, synthetic construct; identical to SEQ ID NO: 19827
  source 1..80: mol_type = other DNA

SEQ ID NO: 204558 - DNA, 80 bp, synthetic construct; identical to SEQ ID NO: 19828
  source 1..80: mol_type = other DNA

SEQ ID NO: 204559 - DNA, 80 bp, synthetic construct; identical to SEQ ID NO: 19829
  source 1..80: mol_type = other DNA

SEQ ID NO: 204560 - DNA, 80 bp, synthetic construct; identical to SEQ ID NO: 19830
  source 1..80: mol_type = other DNA

SEQ ID NO: 204561 - DNA, 80 bp, synthetic construct; identical to SEQ ID NO: 19831
  source 1..80: mol_type = other DNA

SEQ ID NO: 204562 - DNA, 80 bp, synthetic construct; identical to SEQ ID NO: 19832
  source 1..80: mol_type = other DNA

SEQ ID NO: 204563 - DNA, 80 bp, synthetic construct; identical to SEQ ID NO: 19833
  source 1..80: mol_type = other DNA

SEQ ID NO: 204564 - DNA, 80 bp, synthetic construct; identical to SEQ ID NO: 19834
  source 1..80: mol_type = other DNA

SEQ ID NO: 204565 - DNA, 80 bp, synthetic construct; identical to SEQ ID NO: 19835
  source 1..80: mol_type = other DNA

SEQ ID NO: 204566 - DNA, 80 bp, synthetic construct; identical to SEQ ID NO: 19836
  source 1..80: mol_type = other DNA

SEQ ID NO: 204567 - DNA, 80 bp, synthetic construct; identical to SEQ ID NO: 19837
  source 1..80: mol_type = other DNA

SEQ ID NO: 204568 - DNA, 80 bp, synthetic construct; identical to SEQ ID NO: 19838
  source 1..80: mol_type = other DNA

SEQ ID NO: 204569 - DNA, 80 bp, synthetic construct; identical to SEQ ID NO: 19839
  source 1..80: mol_type = other DNA

SEQ ID NO: 204570 - DNA, 80 bp, synthetic construct; identical to SEQ ID NO: 19840
  source 1..80: mol_type = other DNA

SEQ ID NO: 204571 - DNA, 80 bp, synthetic construct; identical to SEQ ID NO: 19841
  source 1..80: mol_type = other DNA

SEQ ID NO: 204572 - DNA, 80 bp, synthetic construct; identical to SEQ ID NO: 19842
  source 1..80: mol_type = other DNA

SEQ ID NO: 204573 - DNA, 80 bp, synthetic construct; identical to SEQ ID NO: 19843
  source 1..80: mol_type = other DNA

SEQ ID NO: 204574 - DNA, 80 bp, synthetic construct; identical to SEQ ID NO: 19844
  source 1..80: mol_type = other DNA

SEQ ID NO: 204575 - DNA, 80 bp, synthetic construct; identical to SEQ ID NO: 19845
  source 1..80: mol_type = other DNA

SEQ ID NO: 204576 - DNA, 80 bp, synthetic construct; identical to SEQ ID NO: 19846
  source 1..80: mol_type = other DNA

SEQ ID NO: 204577 - DNA, 80 bp, synthetic construct; identical to SEQ ID NO: 19847
  source 1..80: mol_type = other DNA

SEQ ID NO: 204578 - DNA, 80 bp, synthetic construct; identical to SEQ ID NO: 19848
  source 1..80: mol_type = other DNA

SEQ ID NO: 204579 - DNA, 80 bp, synthetic construct; identical to SEQ ID NO: 19849
  source 1..80: mol_type = other DNA

SEQ ID NO: 204580 - DNA, 80 bp, synthetic construct; identical to SEQ ID NO: 19850
  source 1..80: mol_type = other DNA

SEQ ID NO: 204581 - DNA, 80 bp, synthetic construct; identical to SEQ ID NO: 19851
  source 1..80: mol_type = other DNA

SEQ ID NO: 204582 - DNA, 80 bp, synthetic construct; identical to SEQ ID NO: 19852
  source 1..80: mol_type = other DNA

SEQ ID NO: 204583 - DNA, 80 bp, synthetic construct; identical to SEQ ID NO: 19853
  source 1..80: mol_type = other DNA

SEQ ID NO: 204584 - DNA, 80 bp, synthetic construct; identical to SEQ ID NO: 19854
  source 1..80: mol_type = other DNA

SEQ ID NO: 204585 - DNA, 80 bp, synthetic construct; identical to SEQ ID NO: 19855
  source 1..80: mol_type = other DNA

SEQ ID NO: 204586 - DNA, 80 bp, synthetic construct; identical to SEQ ID NO: 19856
  source 1..80: mol_type = other DNA

SEQ ID NO: 204587 - DNA, 80 bp, synthetic construct; identical to SEQ ID NO: 19857
  source 1..80: mol_type = other DNA

SEQ ID NO: 204588 - DNA, 80 bp, synthetic construct; identical to SEQ ID NO: 19858
  source 1..80: mol_type = other DNA

SEQ ID NO: 204589 - DNA, 80 bp, synthetic construct; identical to SEQ ID NO: 19859
  source 1..80: mol_type = other DNA

SEQ ID NO: 204590 - DNA, 80 bp, synthetic construct; identical to SEQ ID NO: 19860
  source 1..80: mol_type = other DNA

SEQ ID NO: 204591 - DNA, 80 bp, synthetic construct; identical to SEQ ID NO: 19861
  source 1..80: mol_type = other DNA

SEQ ID NO: 204592 - DNA, 80 bp, synthetic construct; identical to SEQ ID NO: 19862
  source 1..80: mol_type = other DNA

SEQ ID NO: 204593 - DNA, 80 bp, synthetic construct; identical to SEQ ID NO: 19863
  source 1..80: mol_type = other DNA

SEQ ID NO: 204594 - DNA, 80 bp, synthetic construct; identical to SEQ ID NO: 19864
  source 1..80: mol_type = other DNA

SEQ ID NO: 204595 - DNA, 80 bp, synthetic construct; identical to SEQ ID NO: 19865
  source 1..80: mol_type = other DNA

SEQ ID NO: 204596 - DNA, 80 bp, synthetic construct; identical to SEQ ID NO: 19866
  source 1..80: mol_type = other DNA

SEQ ID NO: 204597 - DNA, 80 bp, synthetic construct; identical to SEQ ID NO: 19867
  source 1..80: mol_type = other DNA

SEQ ID NO: 204598 - DNA, 80 bp, synthetic construct; identical to SEQ ID NO: 19868
  source 1..80: mol_type = other DNA

SEQ ID NO: 204599 - DNA, 80 bp, synthetic construct; identical to SEQ ID NO: 19869
  source 1..80: mol_type = other DNA

SEQ ID NO: 204600 - DNA, 80 bp, synthetic construct; identical to SEQ ID NO: 19870
  source 1..80: mol_type = other DNA

SEQ ID NO: 204601 - DNA, 80 bp, synthetic construct; identical to SEQ ID NO: 19871
  source 1..80: mol_type = other DNA

SEQ ID NO: 204602 - DNA, 80 bp, synthetic construct; identical to SEQ ID NO: 19872
  source 1..80: mol_type = other DNA

SEQ ID NO: 204603 - DNA, 80 bp, synthetic construct; identical to SEQ ID NO: 19873
  source 1..80: mol_type = other DNA

SEQ ID NO: 204604 - DNA, 80 bp, synthetic construct; identical to SEQ ID NO: 19874
  source 1..80: mol_type = other DNA

SEQ ID NO: 204605 - DNA, 80 bp, synthetic construct; identical to SEQ ID NO: 19875
  source 1..80: mol_type = other DNA

SEQ ID NO: 204606 - DNA, 80 bp, synthetic construct; identical to SEQ ID NO: 19876
  source 1..80: mol_type = other DNA

SEQ ID NO: 204607 - DNA, 80 bp, synthetic construct; identical to SEQ ID NO: 19877
  source 1..80: mol_type = other DNA

SEQ ID NO: 204608 - DNA, 80 bp, synthetic construct; identical to SEQ ID NO: 19878
  source 1..80: mol_type = other DNA

SEQ ID NO: 204609 - DNA, 80 bp, synthetic construct; identical to SEQ ID NO: 19879
  source 1..80: mol_type = other DNA

SEQ ID NO: 204610 - DNA, 80 bp, synthetic construct; identical to SEQ ID NO: 19880
  source 1..80: mol_type = other DNA

SEQ ID NO: 204611 - DNA, 80 bp, synthetic construct; identical to SEQ ID NO: 19881
  source 1..80: mol_type = other DNA

SEQ ID NO: 204612 - DNA, 80 bp, synthetic construct; identical to SEQ ID NO: 19882
  source 1..80: mol_type = other DNA

SEQ ID NO: 204613 - DNA, 80 bp, synthetic construct; identical to SEQ ID NO: 19883
  source 1..80: mol_type = other DNA

SEQ ID NO: 204614 - DNA, 80 bp, synthetic construct; identical to SEQ ID NO: 19884
  source 1..80: mol_type = other DNA

SEQ ID NO: 204615 - DNA, 80 bp, synthetic construct; identical to SEQ ID NO: 19885
  source 1..80: mol_type = other DNA

SEQ ID NO: 204616 - DNA, 80 bp, synthetic construct; identical to SEQ ID NO: 19886
  source 1..80: mol_type = other DNA

SEQ ID NO: 204617 - DNA, 80 bp, synthetic construct; identical to SEQ ID NO: 19887
  source 1..80: mol_type = other DNA

SEQ ID NO: 204618 - DNA, 80 bp, synthetic construct; identical to SEQ ID NO: 19888
  source 1..80: mol_type = other DNA

SEQ ID NO: 204619 - DNA, 80 bp, synthetic construct; identical to SEQ ID NO: 19889
  source 1..80: mol_type = other DNA

SEQ ID NO: 204620 - DNA, 80 bp, synthetic construct; identical to SEQ ID NO: 19890
  source 1..80: mol_type = other DNA

SEQ ID NO: 204621 - DNA, 80 bp, synthetic construct; identical to SEQ ID NO: 19891
  source 1..80: mol_type = other DNA

SEQ ID NO: 204622 - DNA, 80 bp, synthetic construct; identical to SEQ ID NO: 19892
  source 1..80: mol_type = other DNA

SEQ ID NO: 204623 - DNA, 80 bp, synthetic construct; identical to SEQ ID NO: 19893
  source 1..80: mol_type = other DNA

SEQ ID NO: 204624 - DNA, 80 bp, synthetic construct; identical to SEQ ID NO: 19894
  source 1..80: mol_type = other DNA

SEQ ID NO: 204625 - DNA, 80 bp, synthetic construct; identical to SEQ ID NO: 19895
  source 1..80: mol_type = other DNA

SEQ ID NO: 204626 - DNA, 80 bp, synthetic construct; identical to SEQ ID NO: 19896
  source 1..80: mol_type = other DNA

SEQ ID NO: 204627 - DNA, 80 bp, synthetic construct; identical to SEQ ID NO: 19897
  source 1..80: mol_type = other DNA

SEQ ID NO: 204628 - DNA, 80 bp, synthetic construct; identical to SEQ ID NO: 19898
  source 1..80: mol_type = other DNA

SEQ ID NO: 204629 - DNA, 80 bp, synthetic construct; identical to SEQ ID NO: 19899
  source 1..80: mol_type = other DNA

SEQ ID NO: 204630 - DNA, 80 bp, synthetic construct; identical to SEQ ID NO: 19900
  source 1..80: mol_type = other DNA

SEQ ID NO: 204631 - DNA, 80 bp, synthetic construct; identical to SEQ ID NO: 19901
  source 1..80: mol_type = other DNA

SEQ ID NO: 204632 - DNA, 80 bp, synthetic construct; identical to SEQ ID NO: 19902
  source 1..80: mol_type = other DNA

SEQ ID NO: 204633 - DNA, 80 bp, synthetic construct; identical to SEQ ID NO: 19903
  source 1..80: mol_type = other DNA

SEQ ID NO: 204634 - DNA, 80 bp, synthetic construct; identical to SEQ ID NO: 19904
  source 1..80: mol_type = other DNA

SEQ ID NO: 204635 - DNA, 80 bp, synthetic construct; identical to SEQ ID NO: 19905
  source 1..80: mol_type = other DNA

SEQ ID NO: 204636 - DNA, 80 bp, synthetic construct; identical to SEQ ID NO: 19906
  source 1..80: mol_type = other DNA

SEQ ID NO: 204637 - DNA, 80 bp, synthetic construct; identical to SEQ ID NO: 19907
  source 1..80: mol_type = other DNA

SEQ ID NO: 204638 - DNA, 80 bp, synthetic construct; identical to SEQ ID NO: 19908
  source 1..80: mol_type = other DNA

SEQ ID NO: 204639 - DNA, 80 bp, synthetic construct; identical to SEQ ID NO: 19909
  source 1..80: mol_type = other DNA

SEQ ID NO: 204640 - DNA, 80 bp, synthetic construct; identical to SEQ ID NO: 19910
  source 1..80: mol_type = other DNA

SEQ ID NO: 204641 - DNA, 80 bp, synthetic construct; identical to SEQ ID NO: 19911
  source 1..80: mol_type = other DNA

SEQ ID NO: 204642 - DNA, 80 bp, synthetic construct; identical to SEQ ID NO: 19912
  source 1..80: mol_type = other DNA

SEQ ID NO: 204643 - DNA, 80 bp, synthetic construct; identical to SEQ ID NO: 19913
  source 1..80: mol_type = other DNA

SEQ ID NO: 204644 - DNA, 80 bp, synthetic construct; identical to SEQ ID NO: 19914
  source 1..80: mol_type = other DNA

SEQ ID NO: 204645 - DNA, 80 bp, synthetic construct; identical to SEQ ID NO: 19915
  source 1..80: mol_type = other DNA

SEQ ID NO: 204646 - DNA, 80 bp, synthetic construct; identical to SEQ ID NO: 19916
  source 1..80: mol_type = other DNA

SEQ ID NO: 204647 - DNA, 80 bp, synthetic construct; identical to SEQ ID NO: 19917
  source 1..80: mol_type = other DNA

SEQ ID NO: 204648 - DNA, 80 bp, synthetic construct; identical to SEQ ID NO: 19918
  source 1..80: mol_type = other DNA

SEQ ID NO: 204649 - DNA, 80 bp, synthetic construct; identical to SEQ ID NO: 19919
  source 1..80: mol_type = other DNA

SEQ ID NO: 204650 - DNA, 80 bp, synthetic construct; identical to SEQ ID NO: 19920
  source 1..80: mol_type = other DNA

SEQ ID NO: 204651 - DNA, 80 bp, synthetic construct; identical to SEQ ID NO: 19921
  source 1..80: mol_type = other DNA

SEQ ID NO: 204652 - DNA, 80 bp, synthetic construct; identical to SEQ ID NO: 19922
  source 1..80: mol_type = other DNA

SEQ ID NO: 204653 - DNA, 80 bp, synthetic construct; identical to SEQ ID NO: 19923
  source 1..80: mol_type = other DNA

SEQ ID NO: 204654 - DNA, 80 bp, synthetic construct; identical to SEQ ID NO: 19924
  source 1..80: mol_type = other DNA

SEQ ID NO: 204655 - DNA, 80 bp, synthetic construct; identical to SEQ ID NO: 19925
  source 1..80: mol_type = other DNA

SEQ ID NO: 204656 - DNA, 80 bp, synthetic construct; identical to SEQ ID NO: 19926
  source 1..80: mol_type = other DNA

SEQ ID NO: 204657 - DNA, 80 bp, synthetic construct; identical to SEQ ID NO: 19927
  source 1..80: mol_type = other DNA

SEQ ID NO: 204658 - DNA, 80 bp, synthetic construct; identical to SEQ ID NO: 19928
  source 1..80: mol_type = other DNA

SEQ ID NO: 204659 - DNA, 80 bp, synthetic construct; identical to SEQ ID NO: 19929
  source 1..80: mol_type = other DNA

SEQ ID NO: 204660 - DNA, 80 bp, synthetic construct; identical to SEQ ID NO: 19930
  source 1..80: mol_type = other DNA

SEQ ID NO: 204661 - DNA, 80 bp, synthetic construct; identical to SEQ ID NO: 19931
  source 1..80: mol_type = other DNA

SEQ ID NO: 204662 - DNA, 80 bp, synthetic construct; identical to SEQ ID NO: 19932
  source 1..80: mol_type = other DNA

SEQ ID NO: 204663 - DNA, 80 bp, synthetic construct; identical to SEQ ID NO: 19933
  source 1..80: mol_type = other DNA

SEQ ID NO: 204664 - DNA, 80 bp, synthetic construct; identical to SEQ ID NO: 19934
  source 1..80: mol_type = other DNA

SEQ ID NO: 204665 - DNA, 80 bp, synthetic construct; identical to SEQ ID NO: 19935
  source 1..80: mol_type = other DNA

SEQ ID NO: 204666 - DNA, 80 bp, synthetic construct; identical to SEQ ID NO: 19936
  source 1..80: mol_type = other DNA

SEQ ID NO: 204667 - DNA, 80 bp, synthetic construct; identical to SEQ ID NO: 19937
  source 1..80: mol_type = other DNA

SEQ ID NO: 204668 - DNA, 80 bp, synthetic construct; identical to SEQ ID NO: 19938
  source 1..80: mol_type = other DNA

SEQ ID NO: 204669 - DNA, 80 bp, synthetic construct; identical to SEQ ID NO: 19939
  source 1..80: mol_type = other DNA

SEQ ID NO: 204670 - DNA, 80 bp, synthetic construct; identical to SEQ ID NO: 19940
  source 1..80: mol_type = other DNA

SEQ ID NO: 204671 - DNA, 80 bp, synthetic construct; identical to SEQ ID NO: 19941
  source 1..80: mol_type = other DNA

SEQ ID NO: 204672 - DNA, 80 bp, synthetic construct; identical to SEQ ID NO: 19942
  source 1..80: mol_type = other DNA

SEQ ID NO: 204673 - DNA, 80 bp, synthetic construct; identical to SEQ ID NO: 19943
  source 1..80: mol_type = other DNA

SEQ ID NO: 204674 - DNA, 80 bp, synthetic construct; identical to SEQ ID NO: 19944
  source 1..80: mol_type = other DNA

SEQ ID NO: 204675 - DNA, 80 bp, synthetic construct; identical to SEQ ID NO: 19945
  source 1..80: mol_type = other DNA

SEQ ID NO: 204676 - DNA, 80 bp, synthetic construct; identical to SEQ ID NO: 19946
  source 1..80: mol_type = other DNA

SEQ ID NO: 204677 - DNA, 80 bp, synthetic construct; identical to SEQ ID NO: 19947
  source 1..80: mol_type = other DNA

SEQ ID NO: 204678 - DNA, 80 bp, synthetic construct; identical to SEQ ID NO: 19948
  source 1..80: mol_type = other DNA

SEQ ID NO: 204679 - DNA, 80 bp, synthetic construct; identical to SEQ ID NO: 19949
  source 1..80: mol_type = other DNA

SEQ ID NO: 204680 - DNA, 80 bp, synthetic construct; identical to SEQ ID NO: 19950
  source 1..80: mol_type = other DNA

SEQ ID NO: 204681 - DNA, 80 bp, synthetic construct; identical to SEQ ID NO: 19951
  source 1..80: mol_type = other DNA

SEQ ID NO: 204682 - DNA, 80 bp, synthetic construct; identical to SEQ ID NO: 19952
  source 1..80: mol_type = other DNA

SEQ ID NO: 204683 - DNA, 80 bp, synthetic construct; identical to SEQ ID NO: 19953
  source 1..80: mol_type = other DNA

SEQ ID NO: 204684 - DNA, 80 bp, synthetic construct; identical to SEQ ID NO: 19954
  source 1..80: mol_type = other DNA

SEQ ID NO: 204685 - DNA, 80 bp, synthetic construct; identical to SEQ ID NO: 19955
  source 1..80: mol_type = other DNA

SEQ ID NO: 204686 - DNA, 80 bp, synthetic construct; identical to SEQ ID NO: 19956
  source 1..80: mol_type = other DNA

SEQ ID NO: 204687 - DNA, 80 bp, synthetic construct; identical to SEQ ID NO: 19957
  source 1..80: mol_type = other DNA

SEQ ID NO: 204688 - DNA, 80 bp, synthetic construct; identical to SEQ ID NO: 19958
  source 1..80: mol_type = other DNA

SEQ ID NO: 204689 - DNA, 80 bp, synthetic construct; identical to SEQ ID NO: 19959
  source 1..80: mol_type = other DNA

SEQ ID NO: 204690 - DNA, 80 bp, synthetic construct; identical to SEQ ID NO: 19960
  source 1..80: mol_type = other DNA

SEQ ID NO: 204691 - DNA, 80 bp, synthetic construct; identical to SEQ ID NO: 19961
  source 1..80: mol_type = other DNA

SEQ ID NO: 204692 - DNA, 80 bp, synthetic construct; identical to SEQ ID NO: 19962
  source 1..80: mol_type = other DNA

SEQ ID NO: 204693 - DNA, 80 bp, synthetic construct; identical to SEQ ID NO: 19963
  source 1..80: mol_type = other DNA

SEQ ID NO: 204694 - DNA, 80 bp, synthetic construct; identical to SEQ ID NO: 19964
  source 1..80: mol_type = other DNA

SEQ ID NO: 204695 - DNA, 80 bp, synthetic construct; identical to SEQ ID NO: 19965
  source 1..80: mol_type = other DNA

SEQ ID NO: 204696 - DNA, 80 bp, synthetic construct; identical to SEQ ID NO: 19966
  source 1..80: mol_type = other DNA

SEQ ID NO: 204697 - DNA, 80 bp, synthetic construct; identical to SEQ ID NO: 19967
  source 1..80: mol_type = other DNA

SEQ ID NO: 204698 - DNA, 80 bp, synthetic construct; identical to SEQ ID NO: 19968
  source 1..80: mol_type = other DNA

SEQ ID NO: 204699 - DNA, 80 bp, synthetic construct; identical to SEQ ID NO: 19969
  source 1..80: mol_type = other DNA

SEQ ID NO: 204700 - DNA, 80 bp, synthetic construct; identical to SEQ ID NO: 19970
  source 1..80: mol_type = other DNA

SEQ ID NO: 204701 - DNA, 80 bp, synthetic construct; identical to SEQ ID NO: 19971
  source 1..80: mol_type = other DNA

SEQ ID NO: 204702 - DNA, 80 bp, synthetic construct; identical to SEQ ID NO: 19972
  source 1..80: mol_type = other DNA

SEQ ID NO: 204703 - DNA, 80 bp, synthetic construct; identical to SEQ ID NO: 19973
  source 1..80: mol_type = other DNA

SEQ ID NO: 204704 - DNA, 80 bp, synthetic construct; identical to SEQ ID NO: 19974
  source 1..80: mol_type = other DNA

SEQ ID NO: 204705 - DNA, 80 bp, synthetic construct; identical to SEQ ID NO: 19975
  source 1..80: mol_type = other DNA

SEQ ID NO: 204706 - DNA, 80 bp, synthetic construct; identical to SEQ ID NO: 19976
  source 1..80: mol_type = other DNA

SEQ ID NO: 204707 - DNA, 80 bp, synthetic construct; identical to SEQ ID NO: 19977
  source 1..80: mol_type = other DNA

SEQ ID NO: 204708 - DNA, 80 bp, synthetic construct; identical to SEQ ID NO: 19978
  source 1..80: mol_type = other DNA

SEQ ID NO: 204709 - DNA, 80 bp, synthetic construct; identical to SEQ ID NO: 19979
  source 1..80: mol_type = other DNA

SEQ ID NO: 204710 - DNA, 80 bp, synthetic construct; identical to SEQ ID NO: 19980
  source 1..80: mol_type = other DNA

SEQ ID NO: 204711 - DNA, 80 bp, synthetic construct; identical to SEQ ID NO: 19981
  source 1..80: mol_type = other DNA

SEQ ID NO: 204712 - DNA, 80 bp, synthetic construct; identical to SEQ ID NO: 19982
  source 1..80: mol_type = other DNA

SEQ ID NO: 204713 - DNA, 80 bp, synthetic construct; identical to SEQ ID NO: 19983
  source 1..80: mol_type = other DNA

SEQ ID NO: 204714 - DNA, 80 bp, synthetic construct; identical to SEQ ID NO: 19984
  source 1..80: mol_type = other DNA

SEQ ID NO: 204715 - DNA, 80 bp, synthetic construct; identical to SEQ ID NO: 19985
  source 1..80: mol_type = other DNA

SEQ ID NO: 204716 - DNA, 80 bp, synthetic construct; identical to SEQ ID NO: 19986
  source 1..80: mol_type = other DNA

SEQ ID NO: 204717 - DNA, 80 bp, synthetic construct; identical to SEQ ID NO: 19987
  source 1..80: mol_type = other DNA

SEQ ID NO: 204718 - DNA, 80 bp, synthetic construct; identical to SEQ ID NO: 19988
  source 1..80: mol_type = other DNA

SEQ ID NO: 204719 - DNA, 80 bp, synthetic construct; identical to SEQ ID NO: 19989
  source 1..80: mol_type = other DNA

SEQ ID NO: 204720 - DNA, 80 bp, synthetic construct; identical to SEQ ID NO: 19990
  source 1..80: mol_type = other DNA

SEQ ID NO: 204721 - DNA, 80 bp, synthetic construct; identical to SEQ ID NO: 19991
  source 1..80: mol_type = other DNA

SEQ ID NO: 204722 - DNA, 80 bp, synthetic construct; identical to SEQ ID NO: 19992
  source 1..80: mol_type = other DNA

SEQ ID NO: 204723 - DNA, 80 bp, synthetic construct; identical to SEQ ID NO: 19993
  source 1..80: mol_type = other DNA

SEQ ID NO: 204724 - DNA, 80 bp, synthetic construct; identical to SEQ ID NO: 19994
  source 1..80: mol_type = other DNA

SEQ ID NO: 204725 - DNA, 80 bp, synthetic construct; identical to SEQ ID NO: 19995
  source 1..80: mol_type = other DNA

SEQ ID NO: 204726 - DNA, 80 bp, synthetic construct; identical to SEQ ID NO: 19996
  source 1..80: mol_type = other DNA

SEQ ID NO: 204727 - DNA, 80 bp, synthetic construct; identical to SEQ ID NO: 19997
  source 1..80: mol_type = other DNA

SEQ ID NO: 204728 - DNA, 80 bp, synthetic construct; identical to SEQ ID NO: 19998
  source 1..80: mol_type = other DNA

SEQ ID NO: 204729 - DNA, 80 bp, synthetic construct; identical to SEQ ID NO: 19999
  source 1..80: mol_type = other DNA

SEQ ID NO: 204730 - DNA, 80 bp, synthetic construct; identical to SEQ ID NO: 20000
  source 1..80: mol_type = other DNA

SEQ ID NO: 204731 - DNA, 80 bp, synthetic construct; identical to SEQ ID NO: 20001
  source 1..80: mol_type = other DNA

SEQ ID NO: 204732 - DNA, 80 bp, synthetic construct; identical to SEQ ID NO: 20002
  source 1..80: mol_type = other DNA

SEQ ID NO: 204733 - DNA, 80 bp, synthetic construct; identical to SEQ ID NO: 20003
  source 1..80: mol_type = other DNA

SEQ ID NO: 204734 - DNA, 80 bp, synthetic construct; identical to SEQ ID NO: 20004
  source 1..80: mol_type = other DNA

SEQ ID NO: 204735 - DNA, 80 bp, synthetic construct; identical to SEQ ID NO: 20005
  source 1..80: mol_type = other DNA

SEQ ID NO: 204736 - DNA, 80 bp, synthetic construct; identical to SEQ ID NO: 20006
  source 1..80: mol_type = other DNA

SEQ ID NO: 204737 - DNA, 80 bp, synthetic construct; identical to SEQ ID NO: 20007
  source 1..80: mol_type = other DNA

SEQ ID NO: 204738 - DNA, 80 bp, synthetic construct; identical to SEQ ID NO: 20008
  source 1..80: mol_type = other DNA

SEQ ID NO: 204739 - DNA, 80 bp, synthetic construct; identical to SEQ ID NO: 20009
  source 1..80: mol_type = other DNA

SEQ ID NO: 204740 - DNA, 80 bp, synthetic construct; identical to SEQ ID NO: 20010
  source 1..80: mol_type = other DNA

SEQ ID NO: 204741 - DNA, 80 bp, synthetic construct; identical to SEQ ID NO: 20011
  source 1..80: mol_type = other DNA

SEQ ID NO: 204742 - DNA, 80 bp, synthetic construct; identical to SEQ ID NO: 20012
  source 1..80: mol_type = other DNA

SEQ ID NO: 204743 - DNA, 80 bp, synthetic construct; identical to SEQ ID NO: 20013
  source 1..80: mol_type = other DNA

SEQ ID NO: 204744 - DNA, 80 bp, synthetic construct; identical to SEQ ID NO: 20014
  source 1..80: mol_type = other DNA

SEQ ID NO: 204745 - DNA, 80 bp, synthetic construct; identical to SEQ ID NO: 20015
  source 1..80: mol_type = other DNA

SEQ ID NO: 204746 - DNA, 80 bp, synthetic construct; identical to SEQ ID NO: 20016
  source 1..80: mol_type = other DNA

SEQ ID NO: 204747 - DNA, 80 bp, synthetic construct; identical to SEQ ID NO: 20017
  source 1..80: mol_type = other DNA

SEQ ID NO: 204748 - DNA, 80 bp, synthetic construct; identical to SEQ ID NO: 20018
  source 1..80: mol_type = other DNA

SEQ ID NO: 204749 - DNA, 80 bp, synthetic construct; identical to SEQ ID NO: 20019
  source 1..80: mol_type = other DNA

SEQ ID NO: 204750 - DNA, 80 bp, synthetic construct; identical to SEQ ID NO: 20020
  source 1..80: mol_type = other DNA

SEQ ID NO: 204751 - DNA, 80 bp, synthetic construct; identical to SEQ ID NO: 20021
  source 1..80: mol_type = other DNA

SEQ ID NO: 204752 - DNA, 80 bp, synthetic construct; identical to SEQ ID NO: 20022
  source 1..80: mol_type = other DNA

SEQ ID NO: 204753 - DNA, 80 bp, synthetic construct; identical to SEQ ID NO: 20023
  source 1..80: mol_type = other DNA

SEQ ID NO: 204754 - DNA, 80 bp, synthetic construct; identical to SEQ ID NO: 20024
  source 1..80: mol_type = other DNA

SEQ ID NO: 204755 - DNA, 80 bp, synthetic construct; identical to SEQ ID NO: 20025
  source 1..80: mol_type = other DNA

SEQ ID NO: 204756 - DNA, 80 bp, synthetic construct; identical to SEQ ID NO: 20026
  source 1..80: mol_type = other DNA

SEQ ID NO: 204757 - DNA, 80 bp, synthetic construct; identical to SEQ ID NO: 20027
  source 1..80: mol_type = other DNA

SEQ ID NO: 204758 - DNA, 80 bp, synthetic construct; identical to SEQ ID NO: 20028
  source 1..80: mol_type = other DNA

SEQ ID NO: 204759 - DNA, 80 bp, synthetic construct; identical to SEQ ID NO: 20029
  source 1..80: mol_type = other DNA

SEQ ID NO: 204760 - DNA, 80 bp, synthetic construct; identical to SEQ ID NO: 20030
  source 1..80: mol_type = other DNA

SEQ ID NO: 204761 - DNA, 80 bp, synthetic construct; identical to SEQ ID NO: 20031
  source 1..80: mol_type = other DNA

SEQ ID NO: 204762 - DNA, 80 bp, synthetic construct; identical to SEQ ID NO: 20032
  source 1..80: mol_type = other DNA

SEQ ID NO: 204763 - DNA, 80 bp, synthetic construct; identical to SEQ ID NO: 20033
  source 1..80: mol_type = other DNA

SEQ ID NO: 204764 - DNA, 80 bp, synthetic construct; identical to SEQ ID NO: 20034
  source 1..80: mol_type = other DNA

SEQ ID NO: 204765 - DNA, 80 bp, synthetic construct; identical to SEQ ID NO: 20035
  source 1..80: mol_type = other DNA

SEQ ID NO: 204766 - DNA, 80 bp, synthetic construct; identical to SEQ ID NO: 20036
  source 1..80: mol_type = other DNA

SEQ ID NO: 204767 - DNA, 80 bp, synthetic construct; identical to SEQ ID NO: 20037
  source 1..80: mol_type = other DNA

SEQ ID NO: 204768 - DNA, 80 bp, synthetic construct; identical to SEQ ID NO: 20038
  source 1..80: mol_type = other DNA

SEQ ID NO: 204769 - DNA, 80 bp, synthetic construct; identical to SEQ ID NO: 20039
  source 1..80: mol_type = other DNA

SEQ ID NO: 204770 - DNA, 80 bp, synthetic construct; identical to SEQ ID NO: 20040
  source 1..80: mol_type = other DNA

SEQ ID NO: 204771 - DNA, 80 bp, synthetic construct; identical to SEQ ID NO: 20041
  source 1..80: mol_type = other DNA

SEQ ID NO: 204772 - DNA, 80 bp, synthetic construct; identical to SEQ ID NO: 20042
  source 1..80: mol_type = other DNA

SEQ ID NO: 204773 - DNA, 80 bp, synthetic construct; identical to SEQ ID NO: 20043
  source 1..80: mol_type = other DNA

SEQ ID NO: 204774 - DNA, 80 bp, synthetic construct; identical to SEQ ID NO: 20044
  source 1..80: mol_type = other DNA

SEQ ID NO: 204775 - DNA, 80 bp, synthetic construct; identical to SEQ ID NO: 20045
  source 1..80: mol_type = other DNA

SEQ ID NO: 204776 - DNA, 80 bp, synthetic construct; identical to SEQ ID NO: 20046
  source 1..80: mol_type = other DNA

SEQ ID NO: 204777 - DNA, 80 bp, synthetic construct; identical to SEQ ID NO: 20047
  source 1..80: mol_type = other DNA

SEQ ID NO: 204778 - DNA, 80 bp, synthetic construct; identical to SEQ ID NO: 20048
  source 1..80: mol_type = other DNA

SEQ ID NO: 204779 - DNA, 80 bp, synthetic construct; identical to SEQ ID NO: 20049
  source 1..80: mol_type = other DNA

SEQ ID NO: 204780 - DNA, 80 bp, synthetic construct; identical to SEQ ID NO: 20050
  source 1..80: mol_type = other DNA

SEQ ID NO: 204781 - DNA, 80 bp, synthetic construct; identical to SEQ ID NO: 20051
  source 1..80: mol_type = other DNA

SEQ ID NO: 204782 - DNA, 80 bp, synthetic construct; identical to SEQ ID NO: 20052
  source 1..80: mol_type = other DNA

SEQ ID NO: 204783 - DNA, 80 bp, synthetic construct; identical to SEQ ID NO: 20053
  source 1..80: mol_type = other DNA

SEQ ID NO: 204784 - DNA, 80 bp, synthetic construct; identical to SEQ ID NO: 20054
  source 1..80: mol_type = other DNA

SEQ ID NO: 204785 - DNA, 80 bp, synthetic construct; identical to SEQ ID NO: 20055
  source 1..80: mol_type = other DNA

SEQ ID NO: 204786 - DNA, 80 bp, synthetic construct; identical to SEQ ID NO: 20056
  source 1..80: mol_type = other DNA

SEQ ID NO: 204787 - DNA, 80 bp, synthetic construct; identical to SEQ ID NO: 20057
  source 1..80: mol_type = other DNA

SEQ ID NO: 204788 - DNA, 80 bp, synthetic construct; identical to SEQ ID NO: 20058
  source 1..80: mol_type = other DNA

SEQ ID NO: 204789 - DNA, 80 bp, synthetic construct; identical to SEQ ID NO: 20059
  source 1..80: mol_type = other DNA

SEQ ID NO: 204790 - DNA, 80 bp, synthetic construct; identical to SEQ ID NO: 20060
  source 1..80: mol_type = other DNA

SEQ ID NO: 204791 - DNA, 80 bp, synthetic construct; identical to SEQ ID NO: 20061
  source 1..80: mol_type = other DNA

SEQ ID NO: 204792 - DNA, 80 bp, synthetic construct; identical to SEQ ID NO: 20062
  source 1..80: mol_type = other DNA

SEQ ID NO: 204793 - DNA, 80 bp, synthetic construct; identical to SEQ ID NO: 20063
  source 1..80: mol_type = other DNA

SEQ ID NO: 204794 - DNA, 80 bp, synthetic construct; identical to SEQ ID NO: 20064
  source 1..80: mol_type = other DNA

SEQ ID NO: 204795 - DNA, 80 bp, synthetic construct; identical to SEQ ID NO: 20065
  source 1..80: mol_type = other DNA

SEQ ID NO: 204796 - DNA, 80 bp, synthetic construct; identical to SEQ ID NO: 20066
  source 1..80: mol_type = other DNA

SEQ ID NO: 204797 - DNA, 80 bp, synthetic construct; identical to SEQ ID NO: 20067
  source 1..80: mol_type = other DNA

SEQ ID NO: 204798 - DNA, 80 bp, synthetic construct; identical to SEQ ID NO: 20068
  source 1..80: mol_type = other DNA

SEQ ID NO: 204799 - DNA, 80 bp, synthetic construct; identical to SEQ ID NO: 20069
  source 1..80: mol_type = other DNA

SEQ ID NO: 204800 - DNA, 80 bp, synthetic construct; identical to SEQ ID NO: 20070
  source 1..80: mol_type = other DNA

SEQ ID NO: 204801 - DNA, 80 bp, synthetic construct; identical to SEQ ID NO: 20071
  source 1..80: mol_type = other DNA

SEQ ID NO: 204802 - DNA, 80 bp, synthetic construct; identical to SEQ ID NO: 20072
  source 1..80: mol_type = other DNA

SEQ ID NO: 204803 - DNA, 80 bp, synthetic construct; identical to SEQ ID NO: 20073
  source 1..80: mol_type = other DNA

SEQ ID NO: 204804 - DNA, 80 bp, synthetic construct; identical to SEQ ID NO: 20074
  source 1..80: mol_type = other DNA

SEQ ID NO: 204805 - DNA, 80 bp, synthetic construct; identical to SEQ ID NO: 20075
  source 1..80: mol_type = other DNA

SEQ ID NO: 204806 - DNA, 80 bp, synthetic construct; identical to SEQ ID NO: 20076
  source 1..80: mol_type = other DNA

SEQ ID NO: 204807 - DNA, 80 bp, synthetic construct; identical to SEQ ID NO: 20077
  source 1..80: mol_type = other DNA

SEQ ID NO: 204808 - DNA, 80 bp, synthetic construct; identical to SEQ ID NO: 20078
  source 1..80: mol_type = other DNA

SEQ ID NO: 204809 - DNA, 80 bp, synthetic construct; identical to SEQ ID NO: 20079
  source 1..80: mol_type = other DNA

SEQ ID NO: 204810 - DNA, 80 bp, synthetic construct; identical to SEQ ID NO: 20080
  source 1..80: mol_type = other DNA

SEQ ID NO: 204811 - DNA, 80 bp, synthetic construct; identical to SEQ ID NO: 20081
  source 1..80: mol_type = other DNA

SEQ ID NO: 204812 - DNA, 80 bp, synthetic construct; identical to SEQ ID NO: 20082
  source 1..80: mol_type = other DNA

SEQ ID NO: 204813 - DNA, 80 bp, synthetic construct; identical to SEQ ID NO: 20083
  source 1..80: mol_type = other DNA

SEQ ID NO: 204814 - DNA, 80 bp, synthetic construct; identical to SEQ ID NO: 20084
  source 1..80: mol_type = other DNA

SEQ ID NO: 204815 - DNA, 80 bp, synthetic construct; identical to SEQ ID NO: 20085
  source 1..80: mol_type = other DNA

SEQ ID NO: 204816 - DNA, 80 bp, synthetic construct; identical to SEQ ID NO: 20086
  source 1..80: mol_type = other DNA

SEQ ID NO: 204817 - DNA, 80 bp, synthetic construct; identical to SEQ ID NO: 20087
  source 1..80: mol_type = other DNA

SEQ ID NO: 204818 - DNA, 80 bp, synthetic construct; identical to SEQ ID NO: 20088
  source 1..80: mol_type = other DNA

SEQ ID NO: 204819 - DNA, 80 bp, synthetic construct; identical to SEQ ID NO: 20089
  source 1..80: mol_type = other DNA

SEQ ID NO: 204820 - DNA, 80 bp, synthetic construct; identical to SEQ ID NO: 20090
  source 1..80: mol_type = other DNA

SEQ ID NO: 204821 - DNA, 80 bp, synthetic construct; identical to SEQ ID NO: 20091
  source 1..80: mol_type = other DNA

SEQ ID NO: 204822 - DNA, 80 bp, synthetic construct; identical to SEQ ID NO: 20092
  source 1..80: mol_type = other DNA

SEQ ID NO: 204823 - DNA, 80 bp, synthetic construct; identical to SEQ ID NO: 20093
  source 1..80: mol_type = other DNA

SEQ ID NO: 204824 - DNA, 80 bp, synthetic construct; identical to SEQ ID NO: 20094
  source 1..80: mol_type = other DNA

SEQ ID NO: 204825 - DNA, 80 bp, synthetic construct; identical to SEQ ID NO: 20095
  source 1..80: mol_type = other DNA

SEQ ID NO: 204826 - DNA, 80 bp, synthetic construct; identical to SEQ ID NO: 20096
  source 1..80: mol_type = other DNA

SEQ ID NO: 204827 - DNA, 80 bp, synthetic construct; identical to SEQ ID NO: 20097
  source 1..80: mol_type = other DNA

SEQ ID NO: 204828 - DNA, 80 bp, synthetic construct; identical to SEQ ID NO: 20098
  source 1..80: mol_type = other DNA

SEQ ID NO: 204829 - DNA, 80 bp, synthetic construct; identical to SEQ ID NO: 20099
  source 1..80: mol_type = other DNA

SEQ ID NO: 204830 - DNA, 80 bp, synthetic construct; identical to SEQ ID NO: 20100
  source 1..80: mol_type = other DNA

SEQ ID NO: 204831 - DNA, 80 bp, synthetic construct; identical to SEQ ID NO: 20101
  source 1..80: mol_type = other DNA

SEQ ID NO: 204832 - DNA, 80 bp, synthetic construct; identical to SEQ ID NO: 20102
  source 1..80: mol_type = other DNA

SEQ ID NO: 204833 - DNA, 80 bp, synthetic construct; identical to SEQ ID NO: 20103
  source 1..80: mol_type = other DNA

SEQ ID NO: 204834 - DNA, 80 bp, synthetic construct; identical to SEQ ID NO: 20104
  source 1..80: mol_type = other DNA

SEQ ID NO: 204835 - DNA, 80 bp, synthetic construct; identical to SEQ ID NO: 20105
  source 1..80: mol_type = other DNA

SEQ ID NO: 204836 - DNA, 80 bp, synthetic construct; identical to SEQ ID NO: 20106
  source 1..80: mol_type = other DNA

SEQ ID NO: 204837 - DNA, 80 bp, synthetic construct; identical to SEQ ID NO: 20107
  source 1..80: mol_type = other DNA

SEQ ID NO: 204838 - DNA, 80 bp, synthetic construct; identical to SEQ ID NO: 20108
  source 1..80: mol_type = other DNA

SEQ ID NO: 204839 - DNA, 80 bp, synthetic construct; identical to SEQ ID NO: 20109
  source 1..80: mol_type = other DNA

SEQ ID NO: 204840 - DNA, 80 bp, synthetic construct; identical to SEQ ID NO: 20110
  source 1..80: mol_type = other DNA

SEQ ID NO: 204841 - DNA, 80 bp, synthetic construct; identical to SEQ ID NO: 20111
  source 1..80: mol_type = other DNA

SEQ ID NO: 204842 - DNA, 80 bp, synthetic construct; identical to SEQ ID NO: 20112
  source 1..80: mol_type = other DNA

SEQ ID NO: 204843 - DNA, 80 bp, synthetic construct; identical to SEQ ID NO: 20113
  source 1..80: mol_type = other DNA

SEQ ID NO: 204844 - DNA, 80 bp, synthetic construct; identical to SEQ ID NO: 20114
  source 1..80: mol_type = other DNA

SEQ ID NO: 204845 - DNA, 80 bp, synthetic construct; identical to SEQ ID NO: 20115
  source 1..80: mol_type = other DNA

SEQ ID NO: 204846 - DNA, 80 bp, synthetic construct; identical to SEQ ID NO: 20116
  source 1..80: mol_type = other DNA

SEQ ID NO: 204847 - DNA, 80 bp, synthetic construct; identical to SEQ ID NO: 20117
  source 1..80: mol_type = other DNA

SEQ ID NO: 204848 - DNA, 80 bp, synthetic construct; identical to SEQ ID NO: 20118
  source 1..80: mol_type = other DNA

SEQ ID NO: 204849 - DNA, 80 bp, synthetic construct; identical to SEQ ID NO: 20119
  source 1..80: mol_type = other DNA

SEQ ID NO: 204850 - DNA, 80 bp, synthetic construct; identical to SEQ ID NO: 20120
  source 1..80: mol_type = other DNA

SEQ ID NO: 204851 - DNA, 80 bp, synthetic construct; identical to SEQ ID NO: 20121
  source 1..80: mol_type = other DNA

SEQ ID NO: 204852 - DNA, 80 bp, synthetic construct; identical to SEQ ID NO: 20122
  source 1..80: mol_type = other DNA

SEQ ID NO: 204853 - DNA, 80 bp, synthetic construct; identical to SEQ ID NO: 20123
  source 1..80: mol_type = other DNA

SEQ ID NO: 204854 - DNA, 80 bp, synthetic construct; identical to SEQ ID NO: 20124
  source 1..80: mol_type = other DNA

SEQ ID NO: 204855 - DNA, 80 bp, synthetic construct; identical to SEQ ID NO: 20125
  source 1..80: mol_type = other DNA

SEQ ID NO: 204856 - DNA, 80 bp, synthetic construct; identical to SEQ ID NO: 20126
  source 1..80: mol_type = other DNA

SEQ ID NO: 204857 - DNA, 80 bp, synthetic construct; identical to SEQ ID NO: 20127
  source 1..80: mol_type = other DNA

SEQ ID NO: 204858 - DNA, 80 bp, synthetic construct; identical to SEQ ID NO: 20128
  source 1..80: mol_type = other DNA

SEQ ID NO: 204859 - DNA, 80 bp, synthetic construct; identical to SEQ ID NO: 20129
  source 1..80: mol_type = other DNA

SEQ ID NO: 204860 - DNA, 80 bp, synthetic construct; identical to SEQ ID NO: 20130
  source 1..80: mol_type = other DNA

SEQ ID NO: 204861 - DNA, 80 bp, synthetic construct; identical to SEQ ID NO: 20131
  source 1..80: mol_type = other DNA

SEQ ID NO: 204862 - DNA, 80 bp, synthetic construct; identical to SEQ ID NO: 20132
  source 1..80: mol_type = other DNA

SEQ ID NO: 204863 - DNA, 80 bp, synthetic construct; identical to SEQ ID NO: 20133
  source 1..80: mol_type = other DNA

SEQ ID NO: 204864 - DNA, 80 bp, synthetic construct; identical to SEQ ID NO: 20134
  source 1..80: mol_type = other DNA

SEQ ID NO: 204865 - DNA, 80 bp, synthetic construct; identical to SEQ ID NO: 20135
  source 1..80: mol_type = other DNA

SEQ ID NO: 204866 - DNA, 80 bp, synthetic construct; identical to SEQ ID NO: 20136
  source 1..80: mol_type = other DNA

SEQ ID NO: 204867 - DNA, 80 bp, synthetic construct; identical to SEQ ID NO: 20137
  source 1..80: mol_type = other DNA

SEQ ID NO: 204868 - DNA, 80 bp, synthetic construct; identical to SEQ ID NO: 20138
  source 1..80: mol_type = other DNA

SEQ ID NO: 204869 - DNA, 80 bp, synthetic construct; identical to SEQ ID NO: 20139
  source 1..80: mol_type = other DNA

SEQ ID NO: 204870 - DNA, 80 bp, synthetic construct; identical to SEQ ID NO: 20140
  source 1..80: mol_type = other DNA

SEQ ID NO: 204871 - DNA, 80 bp, synthetic construct; identical to SEQ ID NO: 20141
  source 1..80: mol_type = other DNA

SEQ ID NO: 204872 - DNA, 80 bp, synthetic construct; identical to SEQ ID NO: 20142
  source 1..80: mol_type = other DNA

SEQ ID NO: 204873 - DNA, 80 bp, synthetic construct; identical to SEQ ID NO: 20143
  source 1..80: mol_type = other DNA

SEQ ID NO: 204874 - DNA, 80 bp, synthetic construct; identical to SEQ ID NO: 20144
  source 1..80: mol_type = other DNA

SEQ ID NO: 204875 - DNA, 80 bp, synthetic construct; identical to SEQ ID NO: 20145
  source 1..80: mol_type = other DNA

SEQ ID NO: 204876 - DNA, 80 bp, synthetic construct; identical to SEQ ID NO: 20146
  source 1..80: mol_type = other DNA

SEQ ID NO: 204877 - DNA, 80 bp, synthetic construct; identical to SEQ ID NO: 20147
  source 1..80: mol_type = other DNA

SEQ ID NO: 204878 - DNA, 80 bp, synthetic construct; identical to SEQ ID NO: 20148
  source 1..80: mol_type = other DNA

SEQ ID NO: 204879 - DNA, 80 bp, synthetic construct; identical to SEQ ID NO: 20149
  source 1..80: mol_type = other DNA

SEQ ID NO: 204880 - DNA, 80 bp, synthetic construct; identical to SEQ ID NO: 20150
  source 1..80: mol_type = other DNA

SEQ ID NO: 204881 - DNA, 80 bp, synthetic construct; identical to SEQ ID NO: 20151
  source 1..80: mol_type = other DNA

SEQ ID NO: 204882 - DNA, 80 bp, synthetic construct; identical to SEQ ID NO: 20152
  source 1..80: mol_type = other DNA

SEQ ID NO: 204883 - DNA, 80 bp, synthetic construct; identical to SEQ ID NO: 20153
  source 1..80: mol_type = other DNA

SEQ ID NO: 204884 - DNA, 80 bp, synthetic construct; identical to SEQ ID NO: 20154
  source 1..80: mol_type = other DNA

SEQ ID NO: 204885 - DNA, 80 bp, synthetic construct; identical to SEQ ID NO: 20155
  source 1..80: mol_type = other DNA

SEQ ID NO: 204886 - DNA, 80 bp, synthetic construct; identical to SEQ ID NO: 20156
  source 1..80: mol_type = other DNA

SEQ ID NO: 204887 - DNA, 80 bp, synthetic construct; identical to SEQ ID NO: 20157
  source 1..80: mol_type = other DNA

SEQ ID NO: 204888 - DNA, 80 bp, synthetic construct; identical to SEQ ID NO: 20158
  source 1..80: mol_type = other DNA

SEQ ID NO: 204889 - DNA, 80 bp, synthetic construct; identical to SEQ ID NO: 20159
  source 1..80: mol_type = other DNA

SEQ ID NO: 204890 - DNA, 80 bp, synthetic construct; identical to SEQ ID NO: 20160
  source 1..80: mol_type = other DNA

SEQ ID NO: 204891 - DNA, 80 bp, synthetic construct; identical to SEQ ID NO: 20161
  source 1..80: mol_type = other DNA

SEQ ID NO: 204892 - DNA, 80 bp, synthetic construct; identical to SEQ ID NO: 20162
  source 1..80: mol_type = other DNA

SEQ ID NO: 204893 - DNA, 80 bp, synthetic construct; identical to SEQ ID NO: 20163
  source 1..80: mol_type = other DNA

SEQ ID NO: 204894 - DNA, 80 bp, synthetic construct; identical to SEQ ID NO: 20164
  source 1..80: mol_type = other DNA

SEQ ID NO: 204895 - DNA, 80 bp, synthetic construct; identical to SEQ ID NO: 20165
  source 1..80: mol_type = other DNA

SEQ ID NO: 204896 - DNA, 80 bp, synthetic construct; identical to SEQ ID NO: 20166
  source 1..80: mol_type = other DNA

SEQ ID NO: 204897 - DNA, 80 bp, synthetic construct; identical to SEQ ID NO: 20167
  source 1..80: mol_type = other DNA

SEQ ID NO: 204898 - DNA, 80 bp, synthetic construct; identical to SEQ ID NO: 20168
  source 1..80: mol_type = other DNA

SEQ ID NO: 204899 - DNA, 80 bp, synthetic construct; identical to SEQ ID NO: 20169
  source 1..80: mol_type = other DNA

SEQ ID NO: 204900 - DNA, 80 bp, synthetic construct; identical to SEQ ID NO: 20170
  source 1..80: mol_type = other DNA

SEQ ID NO: 204901 - DNA, 80 bp, synthetic construct; identical to SEQ ID NO: 20171
  source 1..80: mol_type = other DNA

SEQ ID NO: 204902 - DNA, 80 bp, synthetic construct; identical to SEQ ID NO: 20172
  source 1..80: mol_type = other DNA

SEQ ID NO: 204903 - DNA, 80 bp, synthetic construct; identical to SEQ ID NO: 20173
  source 1..80: mol_type = other DNA

SEQ ID NO: 204904 - DNA, 80 bp, synthetic construct; identical to SEQ ID NO: 20174
  source 1..80: mol_type = other DNA

SEQ ID NO: 204905 - DNA, 80 bp, synthetic construct; identical to SEQ ID NO: 20175
  source 1..80: mol_type = other DNA

SEQ ID NO: 204906 - DNA, 80 bp, synthetic construct; identical to SEQ ID NO: 20176
  source 1..80: mol_type = other DNA

SEQ ID NO: 204907 - DNA, 80 bp, synthetic construct; identical to SEQ ID NO: 20177
  source 1..80: mol_type = other DNA

SEQ ID NO: 204908 - DNA, 80 bp, synthetic construct; identical to SEQ ID NO: 20178
  source 1..80: mol_type = other DNA

SEQ ID NO: 204909 - DNA, 80 bp, synthetic construct; identical to SEQ ID NO: 20179
  source 1..80: mol_type = other DNA

SEQ ID NO: 204910 - DNA, 80 bp, synthetic construct; identical to SEQ ID NO: 20180
  source 1..80: mol_type = other DNA

SEQ ID NO: 204911 - DNA, 80 bp, synthetic construct; identical to SEQ ID NO: 20181
  source 1..80: mol_type = other DNA

SEQ ID NO: 204912 - DNA, 80 bp, synthetic construct; identical to SEQ ID NO: 20182
  source 1..80: mol_type = other DNA

SEQ ID NO: 204913 - DNA, 80 bp, synthetic construct; identical to SEQ ID NO: 20183
  source 1..80: mol_type = other DNA

SEQ ID NO: 204914 - DNA, 80 bp, synthetic construct; identical to SEQ ID NO: 20184
  source 1..80: mol_type = other DNA

SEQ ID NO: 204915 - DNA, 80 bp, synthetic construct; identical to SEQ ID NO: 20185
  source 1..80: mol_type = other DNA

SEQ ID NO: 204916 - DNA, 80 bp, synthetic construct; identical to SEQ ID NO: 20186
  source 1..80: mol_type = other DNA

SEQ ID NO: 204917 - DNA, 80 bp, synthetic construct; identical to SEQ ID NO: 20187
  source 1..80: mol_type = other DNA

SEQ ID NO: 204918 - DNA, 80 bp, synthetic construct; identical to SEQ ID NO: 20188
  source 1..80: mol_type = other DNA

SEQ ID NO: 204919 - DNA, 80 bp, synthetic construct; identical to SEQ ID NO: 20189
  source 1..80: mol_type = other DNA

SEQ ID NO: 204920 - DNA, 80 bp, synthetic construct; identical to SEQ ID NO: 20190
  source 1..80: mol_type = other DNA

SEQ ID NO: 204921 - DNA, 80 bp, synthetic construct; identical to SEQ ID NO: 20191
  source 1..80: mol_type = other DNA

SEQ ID NO: 204922 - DNA, 80 bp, synthetic construct; identical to SEQ ID NO: 20192
  source 1..80: mol_type = other DNA

SEQ ID NO: 204923 - DNA, 80 bp, synthetic construct; identical to SEQ ID NO: 20193
  source 1..80: mol_type = other DNA

SEQ ID NO: 204924 - DNA, 80 bp, synthetic construct; identical to SEQ ID NO: 20194
  source 1..80: mol_type = other DNA

SEQ ID NO: 204925 - DNA, 80 bp, synthetic construct; identical to SEQ ID NO: 20195
  source 1..80: mol_type = other DNA

SEQ ID NO: 204926 - DNA, 80 bp, synthetic construct; identical to SEQ ID NO: 20196
  source 1..80: mol_type = other DNA

SEQ ID NO: 204927 - DNA, 80 bp, synthetic construct; identical to SEQ ID NO: 20197
  source 1..80: mol_type = other DNA

SEQ ID NO: 204928 - DNA, 80 bp, synthetic construct; identical to SEQ ID NO: 20198
  source 1..80: mol_type = other DNA

SEQ ID NO: 204929 - DNA, 80 bp, synthetic construct; identical to SEQ ID NO: 20199
  source 1..80: mol_type = other DNA

SEQ ID NO: 204930 - DNA, 80 bp, synthetic construct; identical to SEQ ID NO: 20200
  source 1..80: mol_type = other DNA

SEQ ID NO: 204931 - DNA, 80 bp, synthetic construct; identical to SEQ ID NO: 20201
  source 1..80: mol_type = other DNA

SEQ ID NO: 204932 - DNA, 80 bp, synthetic construct; identical to SEQ ID NO: 20202
  source 1..80: mol_type = other DNA

SEQ ID NO: 204933 - DNA, 80 bp, synthetic construct; identical to SEQ ID NO: 20203
  source 1..80: mol_type = other DNA

SEQ ID NO: 204934 - DNA, 80 bp, synthetic construct; identical to SEQ ID NO: 20204
  source 1..80: mol_type = other DNA

SEQ ID NO: 204935 - DNA, 80 bp, synthetic construct; identical to SEQ ID NO: 20205
  source 1..80: mol_type = other DNA

SEQ ID NO: 204936 - DNA, 80 bp, synthetic construct; identical to SEQ ID NO: 20206
  source 1..80: mol_type = other DNA

SEQ ID NO: 204937 - DNA, 80 bp, synthetic construct; identical to SEQ ID NO: 20207
  source 1..80: mol_type = other DNA

SEQ ID NO: 204938 - DNA, 80 bp, synthetic construct; identical to SEQ ID NO: 20208
  source 1..80: mol_type = other DNA

SEQ ID NO: 204939 - DNA, 80 bp, synthetic construct; identical to SEQ ID NO: 20209
  source 1..80: mol_type = other DNA

SEQ ID NO: 204940 - DNA, 80 bp, synthetic construct; identical to SEQ ID NO: 20210
  source 1..80: mol_type = other DNA

SEQ ID NO: 204941 - DNA, 80 bp, synthetic construct; identical to SEQ ID NO: 20211
  source 1..80: mol_type = other DNA

SEQ ID NO: 204942 - DNA, 80 bp, synthetic construct; identical to SEQ ID NO: 20212
  source 1..80: mol_type = other DNA

SEQ ID NO: 204943 - DNA, 80 bp, synthetic construct; identical to SEQ ID NO: 20213
  source 1..80: mol_type = other DNA

SEQ ID NO: 204944 - DNA, 80 bp, synthetic construct; identical to SEQ ID NO: 20214
  source 1..80: mol_type = other DNA

SEQ ID NO: 204945 - DNA, 80 bp, synthetic construct; identical to SEQ ID NO: 20215
  source 1..80: mol_type = other DNA

SEQ ID NO: 204946 - DNA, 80 bp, synthetic construct; identical to SEQ ID NO: 20216
  source 1..80: mol_type = other DNA

SEQ ID NO: 204947 - DNA, 80 bp, synthetic construct; identical to SEQ ID NO: 20217
  source 1..80: mol_type = other DNA

SEQ ID NO: 204948 - DNA, 80 bp, synthetic construct; identical to SEQ ID NO: 20218
  source 1..80: mol_type = other DNA

SEQ ID NO: 204949 - DNA, 80 bp, synthetic construct; identical to SEQ ID NO: 20219
  source 1..80: mol_type = other DNA

SEQ ID NO: 204950 - DNA, 80 bp, synthetic construct; identical to SEQ ID NO: 20220
  source 1..80: mol_type = other DNA

SEQ ID NO: 204951 - DNA, 80 bp, synthetic construct; identical to SEQ ID NO: 20221
  source 1..80: mol_type = other DNA

SEQ ID NO: 204952 - DNA, 80 bp, synthetic construct; identical to SEQ ID NO: 20222
  source 1..80: mol_type = other DNA

SEQ ID NO: 204953 - DNA, 80 bp, synthetic construct; identical to SEQ ID NO: 20223
  source 1..80: mol_type = other DNA

SEQ ID NO: 204954 - DNA, 80 bp, synthetic construct; identical to SEQ ID NO: 20224
  source 1..80: mol_type = other DNA

SEQ ID NO: 204955 - DNA, 80 bp, synthetic construct; identical to SEQ ID NO: 20225
  source 1..80: mol_type = other DNA

SEQ ID NO: 204956 - DNA, 80 bp, synthetic construct; identical to SEQ ID NO: 20226
  source 1..80: mol_type = other DNA

SEQ ID NO: 204957 - DNA, 80 bp, synthetic construct; identical to SEQ ID NO: 20227
  source 1..80: mol_type = other DNA

SEQ ID NO: 204958 - DNA, 80 bp, synthetic construct; identical to SEQ ID NO: 20228
  source 1..80: mol_type = other DNA

SEQ ID NO: 204959 - DNA, 80 bp, synthetic construct; identical to SEQ ID NO: 20229
  source 1..80: mol_type = other DNA

SEQ ID NO: 204960 - DNA, 80 bp, synthetic construct; identical to SEQ ID NO: 20230
  source 1..80: mol_type = other DNA

SEQ ID NO: 204961 - DNA, 80 bp, synthetic construct; identical to SEQ ID NO: 20231
  source 1..80: mol_type = other DNA

SEQ ID NO: 204962 - DNA, 80 bp, synthetic construct; identical to SEQ ID NO: 20232
  source 1..80: mol_type = other DNA

SEQ ID NO: 204963 - DNA, 80 bp, synthetic construct; identical to SEQ ID NO: 20233
  source 1..80: mol_type = other DNA

SEQ ID NO: 204964 - DNA, 80 bp, synthetic construct; identical to SEQ ID NO: 20234
  source 1..80: mol_type = other DNA

SEQ ID NO: 204965 - DNA, 80 bp, synthetic construct; identical to SEQ ID NO: 20235
  source 1..80: mol_type = other DNA

SEQ ID NO: 204966 - DNA, 80 bp, synthetic construct; identical to SEQ ID NO: 20236
  source 1..80: mol_type = other DNA

SEQ ID NO: 204967 - DNA, 80 bp, synthetic construct; identical to SEQ ID NO: 20237
  source 1..80: mol_type = other DNA

SEQ ID NO: 204968 - DNA, 80 bp, synthetic construct; identical to SEQ ID NO: 20238
  source 1..80: mol_type = other DNA

SEQ ID NO: 204969 - DNA, 80 bp, synthetic construct; identical to SEQ ID NO: 20239
  source 1..80: mol_type = other DNA

SEQ ID NO: 204970 - DNA, 80 bp, synthetic construct; identical to SEQ ID NO: 20240
  source 1..80: mol_type = other DNA

SEQ ID NO: 204971 - DNA, 80 bp, synthetic construct; identical to SEQ ID NO: 20241
  source 1..80: mol_type = other DNA

SEQ ID NO: 204972 - DNA, 80 bp, synthetic construct; identical to SEQ ID NO: 20242
  source 1..80: mol_type = other DNA

SEQ ID NO: 204973 - DNA, 80 bp, synthetic construct; identical to SEQ ID NO: 20243
  source 1..80: mol_type = other DNA

SEQ ID NO: 204974 - DNA, 80 bp, synthetic construct; identical to SEQ ID NO: 20244
  source 1..80: mol_type = other DNA

SEQ ID NO: 204975 - DNA, 80 bp, synthetic construct; identical to SEQ ID NO: 20245
  source 1..80: mol_type = other DNA

SEQ ID NO: 204976 - DNA, 80 bp, synthetic construct; identical to SEQ ID NO: 20246
  source 1..80: mol_type = other DNA

SEQ ID NO: 204977 - DNA, 80 bp, synthetic construct; identical to SEQ ID NO: 20247
  source 1..80: mol_type = other DNA

SEQ ID NO: 204978 - DNA, 80 bp, synthetic construct; identical to SEQ ID NO: 20248
  source 1..80: mol_type = other DNA

SEQ ID NO: 204979 - DNA, 80 bp, synthetic construct; identical to SEQ ID NO: 20249
  source 1..80: mol_type = other DNA

SEQ ID NO: 204980 - DNA, 80 bp, synthetic construct; identical to SEQ ID NO: 20250
  source 1..80: mol_type = other DNA

SEQ ID NO: 204981 - DNA, 80 bp, synthetic construct; identical to SEQ ID NO: 20251
  source 1..80: mol_type = other DNA

SEQ ID NO: 204982 - DNA, 80 bp, synthetic construct; identical to SEQ ID NO: 20252
  source 1..80: mol_type = other DNA

SEQ ID NO: 204983 - DNA, 80 bp, synthetic construct; identical to SEQ ID NO: 20253
  source 1..80: mol_type = other DNA

SEQ ID NO: 204984 - DNA, 80 bp, synthetic construct; identical to SEQ ID NO: 20254
  source 1..80: mol_type = other DNA

SEQ ID NO: 204985 - DNA, 80 bp, synthetic construct; identical to SEQ ID NO: 20255
  source 1..80: mol_type = other DNA

SEQ ID NO: 204986 - DNA, 80 bp, synthetic construct; identical to SEQ ID NO: 20256
  source 1..80: mol_type = other DNA

SEQ ID NO: 204987 - DNA, 80 bp, synthetic construct; identical to SEQ ID NO: 20257
  source 1..80: mol_type = other DNA

SEQ ID NO: 204988 - DNA, 80 bp, synthetic construct; identical to SEQ ID NO: 20258
  source 1..80: mol_type = other DNA

SEQ ID NO: 204989 - DNA, 80 bp, synthetic construct; identical to SEQ ID NO: 20259
  source 1..80: mol_type = other DNA

SEQ ID NO: 204990 - DNA, 80 bp, synthetic construct; identical to SEQ ID NO: 20260
  source 1..80: mol_type = other DNA

SEQ ID NO: 204991 - DNA, 80 bp, synthetic construct; identical to SEQ ID NO: 20261
  source 1..80: mol_type = other DNA

SEQ ID NO: 204992 - DNA, 80 bp, synthetic construct; identical to SEQ ID NO: 20262
  source 1..80: mol_type = other DNA

SEQ ID NO: 204993 - DNA, 80 bp, synthetic construct; identical to SEQ ID NO: 20263
  source 1..80: mol_type = other DNA

SEQ ID NO: 204994 - DNA, 80 bp, synthetic construct; identical to SEQ ID NO: 20264
  source 1..80: mol_type = other DNA

SEQ ID NO: 204995 - DNA, 80 bp, synthetic construct; identical to SEQ ID NO: 20265
  source 1..80: mol_type = other DNA

SEQ ID NO: 204996 - DNA, 80 bp, synthetic construct; identical to SEQ ID NO: 20266
  source 1..80: mol_type = other DNA

SEQ ID NO: 204997 - DNA, 80 bp, synthetic construct; identical to SEQ ID NO: 20267
  source 1..80: mol_type = other DNA

SEQ ID NO: 204998 - DNA, 80 bp, synthetic construct; identical to SEQ ID NO: 20268
  source 1..80: mol_type = other DNA

SEQ ID NO: 204999 - DNA, 80 bp, synthetic construct; identical to SEQ ID NO: 20269
  source 1..80: mol_type = other DNA

SEQ ID NO: 205000 - DNA, 80 bp, synthetic construct; identical to SEQ ID NO: 20270
  source 1..80: mol_type = other DNA

SEQ ID NO: 205001 - DNA, 80 bp, synthetic construct; identical to SEQ ID NO: 20271
  source 1..80: mol_type = other DNA

SEQ ID NO: 205002 - DNA, 80 bp, synthetic construct; identical to SEQ ID NO: 20272
  source 1..80: mol_type = other DNA

SEQ ID NO: 205003 - DNA, 80 bp, synthetic construct; identical to SEQ ID NO: 20273
  source 1..80: mol_type = other DNA

SEQ ID NO: 205004 - DNA, 80 bp, synthetic construct; identical to SEQ ID NO: 20274
  source 1..80: mol_type = other DNA

SEQ ID NO: 205005 - DNA, 80 bp, synthetic construct; identical to SEQ ID NO: 20275
  source 1..80: mol_type = other DNA

SEQ ID NO: 205006 - DNA, 80 bp, synthetic construct; identical to SEQ ID NO: 20276
  source 1..80: mol_type = other DNA

SEQ ID NO: 205007 - DNA, 80 bp, synthetic construct; identical to SEQ ID NO: 20277
  source 1..80: mol_type = other DNA

SEQ ID NO: 205008 - DNA, 80 bp, synthetic construct; identical to SEQ ID NO: 20278
  source 1..80: mol_type = other DNA

SEQ ID NO: 205009 - DNA, 80 bp, synthetic construct; identical to SEQ ID NO: 20279
  source 1..80: mol_type = other DNA

SEQ ID NO: 205010 - DNA, 80 bp, synthetic construct; identical to SEQ ID NO: 20280
  source 1..80: mol_type = other DNA

SEQ ID NO: 205011 - DNA, 80 bp, synthetic construct; identical to SEQ ID NO: 20281
  source 1..80: mol_type = other DNA

SEQ ID NO: 205012 - DNA, 80 bp, synthetic construct; identical to SEQ ID NO: 20282
  source 1..80: mol_type = other DNA

SEQ ID NO: 205013 - DNA, 80 bp, synthetic construct; identical to SEQ ID NO: 20283
  source 1..80: mol_type = other DNA

SEQ ID NO: 205014 - DNA, 80 bp, synthetic construct; identical to SEQ ID NO: 20284
  source 1..80: mol_type = other DNA

SEQ ID NO: 205015 - DNA, 80 bp, synthetic construct; identical to SEQ ID NO: 20285
  source 1..80: mol_type = other DNA

SEQ ID NO: 205016 - DNA, 80 bp, synthetic construct; identical to SEQ ID NO: 20286
  source 1..80: mol_type = other DNA

SEQ ID NO: 205017 - DNA, 80 bp, synthetic construct; identical to SEQ ID NO: 20287
  source 1..80: mol_type = other DNA

SEQ ID NO: 205018 - DNA, 80 bp, synthetic construct; identical to SEQ ID NO: 20288
  source 1..80: mol_type = other DNA

SEQ ID NO: 205019 - DNA, 80 bp, synthetic construct; identical to SEQ ID NO: 20289
  source 1..80: mol_type = other DNA

SEQ ID NO: 205020 - DNA, 80 bp, synthetic construct; identical to SEQ ID NO: 20290
  source 1..80: mol_type = other DNA

SEQ ID NO: 205021 - DNA, 80 bp, synthetic construct; identical to SEQ ID NO: 20291
  source 1..80: mol_type = other DNA

SEQ ID NO: 205022 - DNA, 80 bp, synthetic construct; identical to SEQ ID NO: 20292
  source 1..80: mol_type = other DNA

SEQ ID NO: 205023 - DNA, 80 bp, synthetic construct; identical to SEQ ID NO: 20293
  source 1..80: mol_type = other DNA

SEQ ID NO: 205024 - DNA, 80 bp, synthetic construct; identical to SEQ ID NO: 20294
  source 1..80: mol_type = other DNA

SEQ ID NO: 205025 - DNA, 80 bp, synthetic construct; identical to SEQ ID NO: 20295
  source 1..80: mol_type = other DNA

SEQ ID NO: 205026 - DNA, 80 bp, synthetic construct; identical to SEQ ID NO: 20296
  source 1..80: mol_type = other DNA

SEQ ID NO: 205027 - DNA, 80 bp, synthetic construct; identical to SEQ ID NO: 20297
  source 1..80: mol_type = other DNA

SEQ ID NO: 205028 - DNA, 80 bp, synthetic construct; identical to SEQ ID NO: 20298
  source 1..80: mol_type = other DNA

SEQ ID NO: 205029 - DNA, 80 bp, synthetic construct; identical to SEQ ID NO: 20299
  source 1..80: mol_type = other DNA

SEQ ID NO: 205030 - DNA, 80 bp, synthetic construct; identical to SEQ ID NO: 20300
  source 1..80: mol_type = other DNA

SEQ ID NO: 205031 - DNA, 80 bp, synthetic construct; identical to SEQ ID NO: 20301
  source 1..80: mol_type = other DNA

SEQ ID NO: 205032 - DNA, 80 bp, synthetic construct; identical to SEQ ID NO: 20302
  source 1..80: mol_type = other DNA

SEQ ID NO: 205033 - DNA, 80 bp, synthetic construct; identical to SEQ ID NO: 20303
  source 1..80: mol_type = other DNA

SEQ ID NO: 205034 - DNA, 80 bp, synthetic construct; identical to SEQ ID NO: 20304
  source 1..80: mol_type = other DNA

SEQ ID NO: 205035 - DNA, 80 bp, synthetic construct; identical to SEQ ID NO: 20305
  source 1..80: mol_type = other DNA

SEQ ID NO: 205036 - DNA, 80 bp, synthetic construct; identical to SEQ ID NO: 20306
  source 1..80: mol_type = other DNA

SEQ ID NO: 205037 - DNA, 80 bp, synthetic construct; identical to SEQ ID NO: 20307
  source 1..80: mol_type = other DNA

SEQ ID NO: 205038 - DNA, 80 bp, synthetic construct; identical to SEQ ID NO: 20308
  source 1..80: mol_type = other DNA

SEQ ID NO: 205039 - DNA, 80 bp, synthetic construct; identical to SEQ ID NO: 20309
  source 1..80: mol_type = other DNA

SEQ ID NO: 205040 - DNA, 80 bp, synthetic construct; identical to SEQ ID NO: 20310
  source 1..80: mol_type = other DNA

SEQ ID NO: 205041 - DNA, 80 bp, synthetic construct; identical to SEQ ID NO: 20311
  source 1..80: mol_type = other DNA

SEQ ID NO: 205042 - DNA, 80 bp, synthetic construct; identical to SEQ ID NO: 20312
  source 1..80: mol_type = other DNA

SEQ ID NO: 205043 - DNA, 80 bp, synthetic construct; identical to SEQ ID NO: 20313
  source 1..80: mol_type = other DNA

SEQ ID NO: 205044 - DNA, 80 bp, synthetic construct; identical to SEQ ID NO: 20314
  source 1..80: mol_type = other DNA

SEQ ID NO: 205045 - DNA, 80 bp, synthetic construct; identical to SEQ ID NO: 20315
  source 1..80: mol_type = other DNA

SEQ ID NO: 205046 - DNA, 80 bp, synthetic construct; identical to SEQ ID NO: 20316
  source 1..80: mol_type = other DNA

SEQ ID NO: 205047 - DNA, 80 bp, synthetic construct; identical to SEQ ID NO: 20317
  source 1..80: mol_type = other DNA

SEQ ID NO: 205048 - DNA, 80 bp, synthetic construct; identical to SEQ ID NO: 20318
  source 1..80: mol_type = other DNA

SEQ ID NO: 205049 - DNA, 80 bp, synthetic construct; identical to SEQ ID NO: 20319
  source 1..80: mol_type = other DNA

SEQ ID NO: 205050 - DNA, 80 bp, synthetic construct; identical to SEQ ID NO: 20320
  source 1..80: mol_type = other DNA

SEQ ID NO: 205051 - DNA, 80 bp, synthetic construct; identical to SEQ ID NO: 20321
  source 1..80: mol_type = other DNA

SEQ ID NO: 205052 - DNA, 80 bp, synthetic construct; identical to SEQ ID NO: 20322
  source 1..80: mol_type = other DNA

SEQ ID NO: 205053 - DNA, 80 bp, synthetic construct; identical to SEQ ID NO: 20323
  source 1..80: mol_type = other DNA

SEQ ID NO: 205054 - DNA, 80 bp, synthetic construct; identical to SEQ ID NO: 20324
  source 1..80: mol_type = other DNA

SEQ ID NO: 205055 - DNA, 80 bp, synthetic construct; identical to SEQ ID NO: 20325
  source 1..80: mol_type = other DNA

SEQ ID NO: 205056 - DNA, 80 bp, synthetic construct; identical to SEQ ID NO: 20326
  source 1..80: mol_type = other DNA

SEQ ID NO: 205057 - DNA, 80 bp, synthetic construct; identical to SEQ ID NO: 20327
  source 1..80: mol_type = other DNA

SEQ ID NO: 205058 - DNA, 80 bp, synthetic construct; identical to SEQ ID NO: 20328
  source 1..80: mol_type = other DNA

SEQ ID NO: 205059 - DNA, 80 bp, synthetic construct; identical to SEQ ID NO: 20329
  source 1..80: mol_type = other DNA

SEQ ID NO: 205060 - DNA, 80 bp, synthetic construct; identical to SEQ ID NO: 20330
  source 1..80: mol_type = other DNA

SEQ ID NO: 205061 - DNA, 80 bp, synthetic construct; identical to SEQ ID NO: 20331
  source 1..80: mol_type = other DNA

SEQ ID NO: 205062 - DNA, 80 bp, synthetic construct; identical to SEQ ID NO: 20332
  source 1..80: mol_type = other DNA

SEQ ID NO: 205063 - DNA, 80 bp, synthetic construct; identical to SEQ ID NO: 20333
  source 1..80: mol_type = other DNA

SEQ ID NO: 205064 - DNA, 80 bp, synthetic construct; identical to SEQ ID NO: 20334
  source 1..80: mol_type = other DNA

SEQ ID NO: 205065 - DNA, 80 bp, synthetic construct; identical to SEQ ID NO: 20335
  source 1..80: mol_type = other DNA

SEQ ID NO: 205066 - DNA, 80 bp, synthetic construct; identical to SEQ ID NO: 20336
  source 1..80: mol_type = other DNA

SEQ ID NO: 205067 - DNA, 80 bp, synthetic construct; identical to SEQ ID NO: 20337
  source 1..80: mol_type = other DNA

SEQ ID NO: 205068 - DNA, 80 bp, synthetic construct; identical to SEQ ID NO: 20338
  source 1..80: mol_type = other DNA

SEQ ID NO: 205069 - DNA, 80 bp, synthetic construct; identical to SEQ ID NO: 20339
  source 1..80: mol_type = other DNA

SEQ ID NO: 205070 - DNA, 80 bp, synthetic construct; identical to SEQ ID NO: 20340
  source 1..80: mol_type = other DNA

SEQ ID NO: 205071 - DNA, 80 bp, synthetic construct; identical to SEQ ID NO: 20341
  source 1..80: mol_type = other DNA

SEQ ID NO: 205072 - DNA, 80 bp, synthetic construct; identical to SEQ ID NO: 20342
  source 1..80: mol_type = other DNA

SEQ ID NO: 205073 - DNA, 80 bp, synthetic construct; identical to SEQ ID NO: 20343
  source 1..80: mol_type = other DNA

SEQ ID NO: 205074 - DNA, 80 bp, synthetic construct; identical to SEQ ID NO: 20344
  source 1..80: mol_type = other DNA

SEQ ID NO: 205075 - DNA, 80 bp, synthetic construct; identical to SEQ ID NO: 20345
  source 1..80: mol_type = other DNA

SEQ ID NO: 205076 - DNA, 80 bp, synthetic construct; identical to SEQ ID NO: 20346
  source 1..80: mol_type = other DNA

SEQ ID NO: 205077 - DNA, 80 bp, synthetic construct; identical to SEQ ID NO: 20347
  source 1..80: mol_type = other DNA

SEQ ID NO: 205078 - DNA, 80 bp, synthetic construct; identical to SEQ ID NO: 20348
  source 1..80: mol_type = other DNA

SEQ ID NO: 205079 - DNA, 80 bp, synthetic construct; identical to SEQ ID NO: 20349
  source 1..80: mol_type = other DNA

SEQ ID NO: 205080 - DNA, 80 bp, synthetic construct; identical to SEQ ID NO: 20350
  source 1..80: mol_type = other DNA

SEQ ID NO: 205081 - DNA, 80 bp, synthetic construct; identical to SEQ ID NO: 20351
  source 1..80: mol_type = other DNA

SEQ ID NO: 205082 - DNA, 80 bp, synthetic construct; identical to SEQ ID NO: 20352
  source 1..80: mol_type = other DNA

SEQ ID NO: 205083 - DNA, 80 bp, synthetic construct; identical to SEQ ID NO: 20353
  source 1..80: mol_type = other DNA

SEQ ID NO: 205084 - DNA, 80 bp, synthetic construct; identical to SEQ ID NO: 20354
  source 1..80: mol_type = other DNA

SEQ ID NO: 205085 - DNA, 80 bp, synthetic construct; identical to SEQ ID NO: 20355
  source 1..80: mol_type = other DNA

SEQ ID NO: 205086 - DNA, 80 bp, synthetic construct; identical to SEQ ID NO: 20356
  source 1..80: mol_type = other DNA

SEQ ID NO: 205087 - DNA, 80 bp, synthetic construct; identical to SEQ ID NO: 20357
  source 1..80: mol_type = other DNA

SEQ ID NO: 205088 - DNA, 80 bp, synthetic construct; identical to SEQ ID NO: 20358
  source 1..80: mol_type = other DNA

SEQ ID NO: 205089 - DNA, 80 bp, synthetic construct; identical to SEQ ID NO: 20359
  source 1..80: mol_type = other DNA

SEQ ID NO: 205090 - DNA, 80 bp, synthetic construct; identical to SEQ ID NO: 20360
  source 1..80: mol_type = other DNA

SEQ ID NO: 205091 - DNA, 80 bp, synthetic construct; identical to SEQ ID NO: 20361
  source 1..80: mol_type = other DNA

SEQ ID NO: 205092 - DNA, 80 bp, synthetic construct; identical to SEQ ID NO: 20362
  source 1..80: mol_type = other DNA

SEQ ID NO: 205093 - DNA, 80 bp, synthetic construct; identical to SEQ ID NO: 20363
  source 1..80: mol_type = other DNA

SEQ ID NO: 205094 - DNA, 80 bp, synthetic construct; identical to SEQ ID NO: 20364
  source 1..80: mol_type = other DNA

SEQ ID NO: 205095 - DNA, 80 bp, synthetic construct; identical to SEQ ID NO: 20365
  source 1..80: mol_type = other DNA

SEQ ID NO: 205096 - DNA, 80 bp, synthetic construct; identical to SEQ ID NO: 20366
  source 1..80: mol_type = other DNA

SEQ ID NO: 205097 - DNA, 80 bp, synthetic construct; identical to SEQ ID NO: 20367
  source 1..80: mol_type = other DNA

SEQ ID NO: 205098 - DNA, 80 bp, synthetic construct; identical to SEQ ID NO: 20368
  source 1..80: mol_type = other DNA

SEQ ID NO: 205099 - DNA, 80 bp, synthetic construct; identical to SEQ ID NO: 20369
  source 1..80: mol_type = other DNA

SEQ ID NO: 205100 - DNA, 80 bp, synthetic construct; identical to SEQ ID NO: 20370
  source 1..80: mol_type = other DNA

SEQ ID NO: 205101 - DNA, 80 bp, synthetic construct; identical to SEQ ID NO: 20371
  source 1..80: mol_type = other DNA

SEQ ID NO: 205102 - DNA, 80 bp, synthetic construct; identical to SEQ ID NO: 20372
  source 1..80: mol_type = other DNA

SEQ ID NO: 205103 - DNA, 80 bp, synthetic construct; identical to SEQ ID NO: 20373
  source 1..80: mol_type = other DNA

SEQ ID NO: 205104 - DNA, 80 bp, synthetic construct; identical to SEQ ID NO: 20374
  source 1..80: mol_type = other DNA

SEQ ID NO: 205105 - DNA, 80 bp, synthetic construct; identical to SEQ ID NO: 20375
  source 1..80: mol_type = other DNA

SEQ ID NO: 205106 - DNA, 80 bp, synthetic construct; identical to SEQ ID NO: 20376
  source 1..80: mol_type = other DNA

SEQ ID NO: 205107 - DNA, 80 bp, synthetic construct; identical to SEQ ID NO: 20377
  source 1..80: mol_type = other DNA

SEQ ID NO: 205108 - DNA, 80 bp, synthetic construct; identical to SEQ ID NO: 20378
  source 1..80: mol_type = other DNA

SEQ ID NO: 205109 - DNA, 80 bp, synthetic construct; identical to SEQ ID NO: 20379
  source 1..80: mol_type = other DNA

SEQ ID NO: 205110 - DNA, 80 bp, synthetic construct; identical to SEQ ID NO: 20380
  source 1..80: mol_type = other DNA

SEQ ID NO: 205111 - DNA, 80 bp, synthetic construct; identical to SEQ ID NO: 20381
  source 1..80: mol_type = other DNA

SEQ ID NO: 205112 - DNA, 80 bp, synthetic construct; identical to SEQ ID NO: 20382
  source 1..80: mol_type = other DNA

SEQ ID NO: 205113 - DNA, 80 bp, synthetic construct; identical to SEQ ID NO: 20383
  source 1..80: mol_type = other DNA

SEQ ID NO: 205114 - DNA, 80 bp, synthetic construct; identical to SEQ ID NO: 20384
  source 1..80: mol_type = other DNA

SEQ ID NO: 205115 - DNA, 80 bp, synthetic construct; identical to SEQ ID NO: 20385
  source 1..80: mol_type = other DNA

SEQ ID NO: 205116 - DNA, 80 bp, synthetic construct; identical to SEQ ID NO: 20386
  source 1..80: mol_type = other DNA

SEQ ID NO: 205117 - DNA, 80 bp, synthetic construct; identical to SEQ ID NO: 20387
  source 1..80: mol_type = other DNA

SEQ ID NO: 205118 - DNA, 80 bp, synthetic construct; identical to SEQ ID NO: 20388
  source 1..80: mol_type = other DNA

SEQ ID NO: 205119 - DNA, 80 bp, synthetic construct; identical to SEQ ID NO: 20389
  source 1..80: mol_type = other DNA

SEQ ID NO: 205120 - DNA, 80 bp, synthetic construct; identical to SEQ ID NO: 20390
  source 1..80: mol_type = other DNA

SEQ ID NO: 205121 - DNA, 80 bp, synthetic construct; identical to SEQ ID NO: 20391
  source 1..80: mol_type = other DNA

SEQ ID NO: 205122 - DNA, 80 bp, synthetic construct; identical to SEQ ID NO: 20392
  source 1..80: mol_type = other DNA

SEQ ID NO: 205123 - DNA, 80 bp, synthetic construct; identical to SEQ ID NO: 20393
  source 1..80: mol_type = other DNA

SEQ ID NO: 205124 - DNA, 80 bp, synthetic construct; identical to SEQ ID NO: 20394
  source 1..80: mol_type = other DNA

SEQ ID NO: 205125 - DNA, 80 bp, synthetic construct; identical to SEQ ID NO: 20395
  source 1..80: mol_type = other DNA

SEQ ID NO: 205126 - DNA, 80 bp, synthetic construct; identical to SEQ ID NO: 20396
  source 1..80: mol_type = other DNA

SEQ ID NO: 205127 - DNA, 80 bp, synthetic construct; identical to SEQ ID NO: 20397
  source 1..80: mol_type = other DNA

SEQ ID NO: 205128 - DNA, 80 bp, synthetic construct; identical to SEQ ID NO: 20398
  source 1..80: mol_type = other DNA

SEQ ID NO: 205129 - DNA, 80 bp, synthetic construct; identical to SEQ ID NO: 20399
  source 1..80: mol_type = other DNA

SEQ ID NO: 205130 - DNA, 80 bp, synthetic construct; identical to SEQ ID NO: 20400
  source 1..80: mol_type = other DNA

SEQ ID NO: 205131 - DNA, 80 bp, synthetic construct; identical to SEQ ID NO: 20401
  source 1..80: mol_type = other DNA

SEQ ID NO: 205132 - DNA, 80 bp, synthetic construct; identical to SEQ ID NO: 20402
  source 1..80: mol_type = other DNA

SEQ ID NO: 205133 - DNA, 80 bp, synthetic construct; identical to SEQ ID NO: 20403
  source 1..80: mol_type = other DNA

SEQ ID NO: 205134 - DNA, 80 bp, synthetic construct; identical to SEQ ID NO: 20404
  source 1..80: mol_type = other DNA

SEQ ID NO: 205135 - DNA, 80 bp, synthetic construct; identical to SEQ ID NO: 20405
  source 1..80: mol_type = other DNA

SEQ ID NO: 205136 - DNA, 80 bp, synthetic construct; identical to SEQ ID NO: 20406
  source 1..80: mol_type = other DNA

SEQ ID NO: 205137 - DNA, 80 bp, synthetic construct; identical to SEQ ID NO: 20407
  source 1..80: mol_type = other DNA

SEQ ID NO: 205138 - DNA, 80 bp, synthetic construct; identical to SEQ ID NO: 20408
  source 1..80: mol_type = other DNA

SEQ ID NO: 205139 - DNA, 80 bp, synthetic construct; identical to SEQ ID NO: 20409
  source 1..80: mol_type = other DNA

SEQ ID NO: 205140 - DNA, 80 bp, synthetic construct; identical to SEQ ID NO: 20410
  source 1..80: mol_type = other DNA

SEQ ID NO: 205141 - DNA, 80 bp, synthetic construct; identical to SEQ ID NO: 20411
  source 1..80: mol_type = other DNA

SEQ ID NO: 205142 - DNA, 80 bp, synthetic construct; identical to SEQ ID NO: 20412
  source 1..80: mol_type = other DNA

SEQ ID NO: 205143 - DNA, 80 bp, synthetic construct; identical to SEQ ID NO: 20413
  source 1..80: mol_type = other DNA

SEQ ID NO: 205144 - DNA, 80 bp, synthetic construct; identical to SEQ ID NO: 20414
  source 1..80: mol_type = other DNA

SEQ ID NO: 205145 - DNA, 80 bp, synthetic construct; identical to SEQ ID NO: 20415
  source 1..80: mol_type = other DNA

SEQ ID NO: 205146 - DNA, 80 bp, synthetic construct; identical to SEQ ID NO: 20416
  source 1..80: mol_type = other DNA

SEQ ID NO: 205147 - DNA, 80 bp, synthetic construct; identical to SEQ ID NO: 20417
  source 1..80: mol_type = other DNA

SEQ ID NO: 205148 - DNA, 80 bp, synthetic construct; identical to SEQ ID NO: 20418
  source 1..80: mol_type = other DNA

SEQ ID NO: 205149 - DNA, 80 bp, synthetic construct; identical to SEQ ID NO: 20419
  source 1..80: mol_type = other DNA

SEQ ID NO: 205150 - DNA, 80 bp, synthetic construct; identical to SEQ ID NO: 20420
  source 1..80: mol_type = other DNA

SEQ ID NO: 205151 - DNA, 80 bp, synthetic construct; identical to SEQ ID NO: 20421
  source 1..80: mol_type = other DNA

SEQ ID NO: 205152 - DNA, 80 bp, synthetic construct; identical to SEQ ID NO: 20422
  source 1..80: mol_type = other DNA

SEQ ID NO: 205153 - DNA, 80 bp, synthetic construct; identical to SEQ ID NO: 20423
  source 1..80: mol_type = other DNA

SEQ ID NO: 205154 - DNA, 80 bp, synthetic construct; identical to SEQ ID NO: 20424
  source 1..80: mol_type = other DNA

SEQ ID NO: 205155 - DNA, 80 bp, synthetic construct; identical to SEQ ID NO: 20425
  source 1..80: mol_type = other DNA

SEQ ID NO: 205156 - DNA, 80 bp, synthetic construct; identical to SEQ ID NO: 20426
  source 1..80: mol_type = other DNA

SEQ ID NO: 205157 - DNA, 80 bp, synthetic construct; identical to SEQ ID NO: 20427
  source 1..80: mol_type = other DNA

SEQ ID NO: 205158 - DNA, 80 bp, synthetic construct; identical to SEQ ID NO: 20428
  source 1..80: mol_type = other DNA

SEQ ID NO: 205159 - DNA, 80 bp, synthetic construct; identical to SEQ ID NO: 20429
  source 1..80: mol_type = other DNA

SEQ ID NO: 205160 - DNA, 80 bp, synthetic construct; identical to SEQ ID NO: 20430
  source 1..80: mol_type = other DNA

SEQ ID NO: 205161 - DNA, 80 bp, synthetic construct; identical to SEQ ID NO: 20431
  source 1..80: mol_type = other DNA

SEQ ID NO: 205162 - DNA, 80 bp, synthetic construct; identical to SEQ ID NO: 20432
  source 1..80: mol_type = other DNA

SEQ ID NO: 205163 - DNA, 80 bp, synthetic construct; identical to SEQ ID NO: 20433
  source 1..80: mol_type = other DNA

SEQ ID NO: 205164 - DNA, 80 bp, synthetic construct; identical to SEQ ID NO: 20434
  source 1..80: mol_type = other DNA

SEQ ID NO: 205165 - DNA, 80 bp, synthetic construct; identical to SEQ ID NO: 20435
  source 1..80: mol_type = other DNA

SEQ ID NO: 205166 - DNA, 80 bp, synthetic construct; identical to SEQ ID NO: 20436
  source 1..80: mol_type = other DNA

SEQ ID NO: 205167 - DNA, 80 bp, synthetic construct; identical to SEQ ID NO: 20437
  source 1..80: mol_type = other DNA

SEQ ID NO: 205168 - DNA, 80 bp, synthetic construct; identical to SEQ ID NO: 20438
  source 1..80: mol_type = other DNA

SEQ ID NO: 205169 - DNA, 80 bp, synthetic construct; identical to SEQ ID NO: 20439
  source 1..80: mol_type = other DNA

SEQ ID NO: 205170 - DNA, 80 bp, synthetic construct; identical to SEQ ID NO: 20440
  source 1..80: mol_type = other DNA

SEQ ID NO: 205171 - DNA, 80 bp, synthetic construct; identical to SEQ ID NO: 20441
  source 1..80: mol_type = other DNA

SEQ ID NO: 205172 - DNA, 80 bp, synthetic construct; identical to SEQ ID NO: 20442
  source 1..80: mol_type = other DNA

SEQ ID NO: 205173 - DNA, 80 bp, synthetic construct; identical to SEQ ID NO: 20443
  source 1..80: mol_type = other DNA

SEQ ID NO: 205174 - DNA, 80 bp, synthetic construct; identical to SEQ ID NO: 20444
  source 1..80: mol_type = other DNA

SEQ ID NO: 205175 - DNA, 80 bp, synthetic construct; identical to SEQ ID NO: 20445
  source 1..80: mol_type = other DNA

SEQ ID NO: 205176 - DNA, 80 bp, synthetic construct; identical to SEQ ID NO: 20446
  source 1..80: mol_type = other DNA

SEQ ID NO: 205177 - DNA, 80 bp, synthetic construct; identical to SEQ ID NO: 20447
  source 1..80: mol_type = other DNA

SEQ ID NO: 205178 - DNA, 80 bp, synthetic construct; identical to SEQ ID NO: 20448
  source 1..80: mol_type = other DNA

SEQ ID NO: 205179 - DNA, 80 bp, synthetic construct; identical to SEQ ID NO: 20449
  source 1..80: mol_type = other DNA

SEQ ID NO: 205180 - DNA, 80 bp, synthetic construct; identical to SEQ ID NO: 20450
  source 1..80: mol_type = other DNA

SEQ ID NO: 205181 - DNA, 80 bp, synthetic construct; identical to SEQ ID NO: 20451
  source 1..80: mol_type = other DNA

SEQ ID NO: 205182 - DNA, 80 bp, synthetic construct; identical to SEQ ID NO: 20452
  source 1..80: mol_type = other DNA

SEQ ID NO: 205183 - DNA, 80 bp, synthetic construct; identical to SEQ ID NO: 20453
  source 1..80: mol_type = other DNA

SEQ ID NO: 205184 - DNA, 80 bp, synthetic construct; identical to SEQ ID NO: 20454
  source 1..80: mol_type = other DNA

SEQ ID NO: 205185 - DNA, 80 bp, synthetic construct; identical to SEQ ID NO: 20455
  source 1..80: mol_type = other DNA

SEQ ID NO: 205186 - DNA, 80 bp, synthetic construct; identical to SEQ ID NO: 20456
  source 1..80: mol_type = other DNA

SEQ ID NO: 205187 - DNA, 80 bp, synthetic construct; identical to SEQ ID NO: 20457
  source 1..80: mol_type = other DNA

SEQ ID NO: 205188 - DNA, 80 bp, synthetic construct; identical to SEQ ID NO: 20458
  source 1..80: mol_type = other DNA

SEQ ID NO: 205189 - DNA, 80 bp, synthetic construct; identical to SEQ ID NO: 20459
  source 1..80: mol_type = other DNA

SEQ ID NO: 205190 - DNA, 80 bp, synthetic construct; identical to SEQ ID NO: 20460
  source 1..80: mol_type = other DNA

SEQ ID NO: 205191 - DNA, 80 bp, synthetic construct; identical to SEQ ID NO: 20461
  source 1..80: mol_type = other DNA

SEQ ID NO: 205192 - DNA, 80 bp, synthetic construct; identical to SEQ ID NO: 20462
  source 1..80: mol_type = other DNA

SEQ ID NO: 205193 - DNA, 80 bp, synthetic construct; identical to SEQ ID NO: 20463
  source 1..80: mol_type = other DNA

SEQ ID NO: 205194 - DNA, 80 bp, synthetic construct; identical to SEQ ID NO: 20464
  source 1..80: mol_type = other DNA

SEQ ID NO: 205195 - DNA, 80 bp, synthetic construct; identical to SEQ ID NO: 20465
  source 1..80: mol_type = other DNA

SEQ ID NO: 205196 - DNA, 80 bp, synthetic construct; identical to SEQ ID NO: 20466
  source 1..80: mol_type = other DNA

SEQ ID NO: 205197 - DNA, 80 bp, synthetic construct; identical to SEQ ID NO: 20467
  source 1..80: mol_type = other DNA

SEQ ID NO: 205198 - DNA, 80 bp, synthetic construct; identical to SEQ ID NO: 20468
  source 1..80: mol_type = other DNA

SEQ ID NO: 205199 - DNA, 80 bp, synthetic construct; identical to SEQ ID NO: 20469
  source 1..80: mol_type = other DNA

SEQ ID NO: 205200 - DNA, 80 bp, synthetic construct; identical to SEQ ID NO: 20470
  source 1..80: mol_type = other DNA

SEQ ID NO: 205201 - DNA, 80 bp, synthetic construct; identical to SEQ ID NO: 20471
  source 1..80: mol_type = other DNA

SEQ ID NO: 205202 - DNA, 80 bp, synthetic construct; identical to SEQ ID NO: 20472
  source 1..80: mol_type = other DNA

SEQ ID NO: 205203 - DNA, 80 bp, synthetic construct; identical to SEQ ID NO: 20473
  source 1..80: mol_type = other DNA

SEQ ID NO: 205204 - DNA, 80 bp, synthetic construct; identical to SEQ ID NO: 20474
  source 1..80: mol_type = other DNA

SEQ ID NO: 205205 - DNA, 80 bp, synthetic construct; identical to SEQ ID NO: 20475
  source 1..80: mol_type = other DNA

SEQ ID NO: 205206 - DNA, 80 bp, synthetic construct; identical to SEQ ID NO: 20476
  source 1..80: mol_type = other DNA

SEQ ID NO: 205207 - DNA, 80 bp, synthetic construct; identical to SEQ ID NO: 20477
  source 1..80: mol_type = other DNA

SEQ ID NO: 205208 - DNA, 80 bp, synthetic construct; identical to SEQ ID NO: 20478
  source 1..80: mol_type = other DNA

SEQ ID NO: 205209 - DNA, 80 bp, synthetic construct; identical to SEQ ID NO: 20479
  source 1..80: mol_type = other DNA

SEQ ID NO: 205210 - DNA, 80 bp, synthetic construct; identical to SEQ ID NO: 20480
  source 1..80: mol_type = other DNA

SEQ ID NO: 205211 - DNA, 80 bp, synthetic construct; identical to SEQ ID NO: 20481
  source 1..80: mol_type = other DNA

SEQ ID NO: 205212 - DNA, 80 bp, synthetic construct; identical to SEQ ID NO: 20482
  source 1..80: mol_type = other DNA

SEQ ID NO: 205213 - DNA, 80 bp, synthetic construct; identical to SEQ ID NO: 20483
  source 1..80: mol_type = other DNA

SEQ ID NO: 205214 - DNA, 80 bp, synthetic construct; identical to SEQ ID NO: 20484
  source 1..80: mol_type = other DNA

SEQ ID NO: 205215 - DNA, 80 bp, synthetic construct; identical to SEQ ID NO: 20485
  source 1..80: mol_type = other DNA

SEQ ID NO: 205216 - DNA, 80 bp, synthetic construct; identical to SEQ ID NO: 20486
  source 1..80: mol_type = other DNA

SEQ ID NO: 205217 - DNA, 80 bp, synthetic construct; identical to SEQ ID NO: 20487
  source 1..80: mol_type = other DNA

SEQ ID NO: 205218 - DNA, 80 bp, synthetic construct; identical to SEQ ID NO: 20488
  source 1..80: mol_type = other DNA

SEQ ID NO: 205219 - DNA, 80 bp, synthetic construct; identical to SEQ ID NO: 20489
  source 1..80: mol_type = other DNA

SEQ ID NO: 205220 - DNA, 80 bp, synthetic construct; identical to SEQ ID NO: 20490
  source 1..80: mol_type = other DNA

SEQ ID NO: 205221 - DNA, 80 bp, synthetic construct; identical to SEQ ID NO: 20491
  source 1..80: mol_type = other DNA

SEQ ID NO: 205222 - DNA, 80 bp, synthetic construct; identical to SEQ ID NO: 20492
  source 1..80: mol_type = other DNA

SEQ ID NO: 205223 - DNA, 80 bp, synthetic construct; identical to SEQ ID NO: 20493
  source 1..80: mol_type = other DNA

SEQ ID NO: 205224 - DNA, 80 bp, synthetic construct; identical to SEQ ID NO: 20494
  source 1..80: mol_type = other DNA

SEQ ID NO: 205225 - DNA, 80 bp, synthetic construct; identical to SEQ ID NO: 20495
  source 1..80: mol_type = other DNA

SEQ ID NO: 205226 - DNA, 80 bp, synthetic construct; identical to SEQ ID NO: 20496
  source 1..80: mol_type = other DNA

SEQ ID NO: 205227 - DNA, 80 bp, synthetic construct; identical to SEQ ID NO: 20497
  source 1..80: mol_type = other DNA

SEQ ID NO: 205228 - DNA, 80 bp, synthetic construct; identical to SEQ ID NO: 20498
  source 1..80: mol_type = other DNA

SEQ ID NO: 205229 - DNA, 80 bp, synthetic construct; identical to SEQ ID NO: 20499
  source 1..80: mol_type = other DNA

SEQ ID NO: 205230 - DNA, 80 bp, synthetic construct; identical to SEQ ID NO: 20500
  source 1..80: mol_type = other DNA

SEQ ID NO: 205231 - DNA, 80 bp, synthetic construct; identical to SEQ ID NO: 20501
  source 1..80: mol_type = other DNA

SEQ ID NO: 205232 - DNA, 80 bp, synthetic construct; identical to SEQ ID NO: 20502
  source 1..80: mol_type = other DNA

SEQ ID NO: 205233 - DNA, 80 bp, synthetic construct; identical to SEQ ID NO: 20503
  source 1..80: mol_type = other DNA

SEQ ID NO: 205234 - DNA, 80 bp, synthetic construct; identical to SEQ ID NO: 20504
  source 1..80: mol_type = other DNA

SEQ ID NO: 205235 - DNA, 80 bp, synthetic construct; identical to SEQ ID NO: 20505
  source 1..80: mol_type = other DNA

SEQ ID NO: 205236 - DNA, 80 bp, synthetic construct; identical to SEQ ID NO: 20506
  source 1..80: mol_type = other DNA

SEQ ID NO: 205237 - DNA, 80 bp, synthetic construct; identical to SEQ ID NO: 20507
  source 1..80: mol_type = other DNA

SEQ ID NO: 205238 - DNA, 80 bp, synthetic construct; identical to SEQ ID NO: 20508
  source 1..80: mol_type = other DNA

SEQ ID NO: 205239 - DNA, 80 bp, synthetic construct; identical to SEQ ID NO: 20509
  source 1..80: mol_type = other DNA

SEQ ID NO: 205240 - DNA, 80 bp, synthetic construct; identical to SEQ ID NO: 20510
  source 1..80: mol_type = other DNA

SEQ ID NO: 205241 - DNA, 80 bp, synthetic construct; identical to SEQ ID NO: 20511
  source 1..80: mol_type = other DNA

SEQ ID NO: 205242 - DNA, 80 bp, synthetic construct; identical to SEQ ID NO: 20512
  source 1..80: mol_type = other DNA

SEQ ID NO: 205243 - DNA, 80 bp, synthetic construct; identical to SEQ ID NO: 20513
  source 1..80: mol_type = other DNA

SEQ ID NO: 205244 - DNA, 80 bp, synthetic construct; identical to SEQ ID NO: 20514
  source 1..80: mol_type = other DNA

SEQ ID NO: 205245 - DNA, 80 bp, synthetic construct; identical to SEQ ID NO: 20515
  source 1..80: mol_type = other DNA

SEQ ID NO: 205246 - DNA, 80 bp, synthetic construct; identical to SEQ ID NO: 20516
  source 1..80: mol_type = other DNA

SEQ ID NO: 205247 - DNA, 80 bp, synthetic construct; identical to SEQ ID NO: 20517
  source 1..80: mol_type = other DNA

SEQ ID NO: 205248 - DNA, 80 bp, synthetic construct; identical to SEQ ID NO: 20518
  source 1..80: mol_type = other DNA

SEQ ID NO: 205249 - DNA, 80 bp, synthetic construct; identical to SEQ ID NO: 20519
  source 1..80: mol_type = other DNA

SEQ ID NO: 205250 - DNA, 80 bp, synthetic construct; identical to SEQ ID NO: 20520
  source 1..80: mol_type = other DNA

SEQ ID NO: 205251 - DNA, 80 bp, synthetic construct; identical to SEQ ID NO: 20521
  source 1..80: mol_type = other DNA

SEQ ID NO: 205252 - DNA, 80 bp, synthetic construct; identical to SEQ ID NO: 20522
  source 1..80: mol_type = other DNA

SEQ ID NO: 205253 - DNA, 80 bp, synthetic construct; identical to SEQ ID NO: 20523
  source 1..80: mol_type = other DNA

SEQ ID NO: 205254 - DNA, 80 bp, synthetic construct; identical to SEQ ID NO: 20524
  source 1..80: mol_type = other DNA

SEQ ID NO: 205255 - DNA, 80 bp, synthetic construct; identical to SEQ ID NO: 20525
  source 1..80: mol_type = other DNA

SEQ ID NO: 205256 - DNA, 80 bp, synthetic construct; identical to SEQ ID NO: 20526
  source 1..80: mol_type = other DNA

SEQ ID NO: 205257 - DNA, 80 bp, synthetic construct; identical to SEQ ID NO: 20527
  source 1..80: mol_type = other DNA

SEQ ID NO: 205258 - DNA, 80 bp, synthetic construct; identical to SEQ ID NO: 20528
  source 1..80: mol_type = other DNA

SEQ ID NO: 205259 - DNA, 80 bp, synthetic construct; identical to SEQ ID NO: 20529
  source 1..80: mol_type = other DNA

SEQ ID NO: 205260 - DNA, 80 bp, synthetic construct; identical to SEQ ID NO: 20530
  source 1..80: mol_type = other DNA

SEQ ID NO: 205261 - DNA, 80 bp, synthetic construct; identical to SEQ ID NO: 20531
  source 1..80: mol_type = other DNA

SEQ ID NO: 205262 - DNA, 80 bp, synthetic construct; identical to SEQ ID NO: 20532
  source 1..80: mol_type = other DNA

SEQ ID NO: 205263 - DNA, 80 bp, synthetic construct; identical to SEQ ID NO: 20533
  source 1..80: mol_type = other DNA

SEQ ID NO: 205264 - DNA, 80 bp, synthetic construct; identical to SEQ ID NO: 20534
  source 1..80: mol_type = other DNA

SEQ ID NO: 205265 - DNA, 80 bp, synthetic construct; identical to SEQ ID NO: 20535
  source 1..80: mol_type = other DNA

SEQ ID NO: 205266 - DNA, 80 bp, synthetic construct; identical to SEQ ID NO: 20536
  source 1..80: mol_type = other DNA

SEQ ID NO: 205267 - DNA, 80 bp, synthetic construct; identical to SEQ ID NO: 20537
  source 1..80: mol_type = other DNA

SEQ ID NO: 205268 - DNA, 80 bp, synthetic construct; identical to SEQ ID NO: 20538
  source 1..80: mol_type = other DNA

SEQ ID NO: 205269 - DNA, 80 bp, synthetic construct; identical to SEQ ID NO: 20539
  source 1..80: mol_type = other DNA

SEQ ID NO: 205270 - DNA, 80 bp, synthetic construct; identical to SEQ ID NO: 20540
  source 1..80: mol_type = other DNA

SEQ ID NO: 205271 - DNA, 80 bp, synthetic construct; identical to SEQ ID NO: 20541
  source 1..80: mol_type = other DNA

SEQ ID NO: 205272 - DNA, 80 bp, synthetic construct; identical to SEQ ID NO: 20542
  source 1..80: mol_type = other DNA

SEQ ID NO: 205273 - DNA, 80 bp, synthetic construct; identical to SEQ ID NO: 20543
  source 1..80: mol_type = other DNA

SEQ ID NO: 205274 - DNA, 80 bp, synthetic construct; identical to SEQ ID NO: 20544
  source 1..80: mol_type = other DNA

SEQ ID NO: 205275 - DNA, 80 bp, synthetic construct; identical to SEQ ID NO: 20545
  source 1..80: mol_type = other DNA

SEQ ID NO: 205276 - DNA, 80 bp, synthetic construct; identical to SEQ ID NO: 20546
  source 1..80: mol_type = other DNA

SEQ ID NO: 205277 - DNA, 80 bp, synthetic construct; identical to SEQ ID NO: 20547
  source 1..80: mol_type = other DNA

SEQ ID NO: 205278 - DNA, 80 bp, synthetic construct; identical to SEQ ID NO: 20548
  source 1..80: mol_type = other DNA

SEQ ID NO: 205279 - DNA, 80 bp, synthetic construct; identical to SEQ ID NO: 20549
  source 1..80: mol_type = other DNA

SEQ ID NO: 205280 - DNA, 80 bp, synthetic construct; identical to SEQ ID NO: 20550
  source 1..80: mol_type = other DNA

SEQ ID NO: 205281 - DNA, 80 bp, synthetic construct; identical to SEQ ID NO: 20551
  source 1..80: mol_type = other DNA

SEQ ID NO: 205282 - DNA, 80 bp, synthetic construct; identical to SEQ ID NO: 20552
  source 1..80: mol_type = other DNA

SEQ ID NO: 205283 - DNA, 80 bp, synthetic construct; identical to SEQ ID NO: 20553
  source 1..80: mol_type = other DNA

SEQ ID NO: 205284 - DNA, 80 bp, synthetic construct; identical to SEQ ID NO: 20554
  source 1..80: mol_type = other DNA

SEQ ID NO: 205285 - DNA, 80 bp, synthetic construct; identical to SEQ ID NO: 20555
  source 1..80: mol_type = other DNA

SEQ ID NO: 205286 - DNA, 80 bp, synthetic construct; identical to SEQ ID NO: 20556
  source 1..80: mol_type = other DNA

SEQ ID NO: 205287 - DNA, 80 bp, synthetic construct; identical to SEQ ID NO: 20557
  source 1..80: mol_type = other DNA

SEQ ID NO: 205288 - DNA, 80 bp, synthetic construct; identical to SEQ ID NO: 20558
  source 1..80: mol_type = other DNA

SEQ ID NO: 205289 - DNA, 80 bp, synthetic construct; identical to SEQ ID NO: 20559
  source 1..80: mol_type = other DNA

SEQ ID NO: 205290 - DNA, 80 bp, synthetic construct; identical to SEQ ID NO: 20560
  source 1..80: mol_type = other DNA

SEQ ID NO: 205291 - DNA, 80 bp, synthetic construct; identical to SEQ ID NO: 20561
  source 1..80: mol_type = other DNA

SEQ ID NO: 205292 - DNA, 80 bp, synthetic construct; identical to SEQ ID NO: 20562
  source 1..80: mol_type = other DNA

SEQ ID NO: 205293 - DNA, 80 bp, synthetic construct; identical to SEQ ID NO: 20563
  source 1..80: mol_type = other DNA

SEQ ID NO: 205294 - DNA, 80 bp, synthetic construct; identical to SEQ ID NO: 20564
  source 1..80: mol_type = other DNA

SEQ ID NO: 205295 - DNA, 80 bp, synthetic construct; identical to SEQ ID NO: 20565
  source 1..80: mol_type = other DNA

SEQ ID NO: 205296 - DNA, 80 bp, synthetic construct; identical to SEQ ID NO: 20566
  source 1..80: mol_type = other DNA

SEQ ID NO: 205297 - DNA, 80 bp, synthetic construct; identical to SEQ ID NO: 20567
  source 1..80: mol_type = other DNA

SEQ ID NO: 205298 - DNA, 80 bp, synthetic construct; identical to SEQ ID NO: 20568
  source 1..80: mol_type = other DNA

SEQ ID NO: 205299 - DNA, 80 bp, synthetic construct; identical to SEQ ID NO: 20569
  source 1..80: mol_type = other DNA

SEQ ID NO: 205300 - DNA, 80 bp, synthetic construct; identical to SEQ ID NO: 20570
  source 1..80: mol_type = other DNA

SEQ ID NO: 205301 - DNA, 80 bp, synthetic construct; identical to SEQ ID NO: 20571
  source 1..80: mol_type = other DNA

SEQ ID NO: 205302 - DNA, 80 bp, synthetic construct; identical to SEQ ID NO: 20572
  source 1..80: mol_type = other DNA

SEQ ID NO: 205303 - DNA, 80 bp, synthetic construct; identical to SEQ ID NO: 20573
  source 1..80: mol_type = other DNA

SEQ ID NO: 205304 - DNA, 80 bp, synthetic construct; identical to SEQ ID NO: 20574
  source 1..80: mol_type = other DNA

SEQ ID NO: 205305 - DNA, 80 bp, synthetic construct; identical to SEQ ID NO: 20575
  source 1..80: mol_type = other DNA

SEQ ID NO: 205306 - DNA, 80 bp, synthetic construct; identical to SEQ ID NO: 20576
  source 1..80: mol_type = other DNA

SEQ ID NO: 205307 - DNA, 80 bp, synthetic construct; identical to SEQ ID NO: 20577
  source 1..80: mol_type = other DNA

SEQ ID NO: 205308 - DNA, 80 bp, synthetic construct; identical to SEQ ID NO: 20578
  source 1..80: mol_type = other DNA

SEQ ID NO: 205309 - DNA, 80 bp, synthetic construct; identical to SEQ ID NO: 20579
  source 1..80: mol_type = other DNA

SEQ ID NO: 205310 - DNA, 80 bp, synthetic construct; identical to SEQ ID NO: 20580
  source 1..80: mol_type = other DNA

SEQ ID NO: 205311 - DNA, 80 bp, synthetic construct; identical to SEQ ID NO: 20581
  source 1..80: mol_type = other DNA

SEQ ID NO: 205312 - DNA, 80 bp, synthetic construct; identical to SEQ ID NO: 20582
  source 1..80: mol_type = other DNA

SEQ ID NO: 205313 - DNA, 80 bp, synthetic construct; identical to SEQ ID NO: 20583
  source 1..80: mol_type = other DNA

SEQ ID NO: 205314 - DNA, 80 bp, synthetic construct; identical to SEQ ID NO: 20584
  source 1..80: mol_type = other DNA

SEQ ID NO: 205315 - DNA, 80 bp, synthetic construct; identical to SEQ ID NO: 20585
  source 1..80: mol_type = other DNA

SEQ ID NO: 205316 - DNA, 80 bp, synthetic construct; identical to SEQ ID NO: 20586
  source 1..80: mol_type = other DNA

SEQ ID NO: 205317 - DNA, 80 bp, synthetic construct; identical to SEQ ID NO: 20587
  source 1..80: mol_type = other DNA

SEQ ID NO: 205318 - DNA, 80 bp, synthetic construct; identical to SEQ ID NO: 20588
  source 1..80: mol_type = other DNA

SEQ ID NO: 205319 - DNA, 80 bp, synthetic construct; identical to SEQ ID NO: 20589
  source 1..80: mol_type = other DNA

SEQ ID NO: 205320 - DNA, 80 bp, synthetic construct; identical to SEQ ID NO: 20590
  source 1..80: mol_type = other DNA

SEQ ID NO: 205321 - DNA, 80 bp, synthetic construct; identical to SEQ ID NO: 20591
  source 1..80: mol_type = other DNA

SEQ ID NO: 205322 - DNA, 80 bp, synthetic construct; identical to SEQ ID NO: 20592
  source 1..80: mol_type = other DNA

SEQ ID NO: 205323 - DNA, 80 bp, synthetic construct; identical to SEQ ID NO: 20593
  source 1..80: mol_type = other DNA

SEQ ID NO: 205324 - DNA, 80 bp, synthetic construct; identical to SEQ ID NO: 20594
  source 1..80: mol_type = other DNA

SEQ ID NO: 205325 - DNA, 80 bp, synthetic construct; identical to SEQ ID NO: 20595
  source 1..80: mol_type = other DNA

SEQ ID NO: 205326 - DNA, 80 bp, synthetic construct; identical to SEQ ID NO: 20596
  source 1..80: mol_type = other DNA

SEQ ID NO: 205327 - DNA, 80 bp, synthetic construct; identical to SEQ ID NO: 20597
  source 1..80: mol_type = other DNA

SEQ ID NO: 205328 - DNA, 80 bp, synthetic construct; identical to SEQ ID NO: 20598
  source 1..80: mol_type = other DNA

SEQ ID NO: 205329 - DNA, 80 bp, synthetic construct; identical to SEQ ID NO: 20599
  source 1..80: mol_type = other DNA

SEQ ID NO: 205330 - DNA, 80 bp, synthetic construct; identical to SEQ ID NO: 20600
  source 1..80: mol_type = other DNA

SEQ ID NO: 205331 - DNA, 80 bp, synthetic construct; identical to SEQ ID NO: 20601
  source 1..80: mol_type = other DNA

SEQ ID NO: 205332 - DNA, 80 bp, synthetic construct; identical to SEQ ID NO: 20602
  source 1..80: mol_type = other DNA

SEQ ID NO: 205333 - DNA, 80 bp, synthetic construct; identical to SEQ ID NO: 20603
  source 1..80: mol_type = other DNA

SEQ ID NO: 205334 - DNA, 80 bp, synthetic construct; identical to SEQ ID NO: 20604
  source 1..80: mol_type = other DNA

SEQ ID NO: 205335 - DNA, 80 bp, synthetic construct; identical to SEQ ID NO: 20605
  source 1..80: mol_type = other DNA

SEQ ID NO: 205336 - DNA, 80 bp, synthetic construct; identical to SEQ ID NO: 20606
  source 1..80: mol_type = other DNA

SEQ ID NO: 205337 - DNA, 80 bp, synthetic construct; identical to SEQ ID NO: 20607
  source 1..80: mol_type = other DNA

SEQ ID NO: 205338 - DNA, 80 bp, synthetic construct; identical to SEQ ID NO: 20608
  source 1..80: mol_type = other DNA

SEQ ID NO: 205339 - DNA, 80 bp, synthetic construct; identical to SEQ ID NO: 20609
  source 1..80: mol_type = other DNA

SEQ ID NO: 205340 - DNA, 80 bp, synthetic construct; identical to SEQ ID NO: 20610
  source 1..80: mol_type = other DNA

SEQ ID NO: 205341 - DNA, 80 bp, synthetic construct; identical to SEQ ID NO: 20611
  source 1..80: mol_type = other DNA

SEQ ID NO: 205342 - DNA, 80 bp, synthetic construct; identical to SEQ ID NO: 20612
  source 1..80: mol_type = other DNA

SEQ ID NO: 205343 - DNA, 80 bp, synthetic construct; identical to SEQ ID NO: 20613
  source 1..80: mol_type = other DNA

SEQ ID NO: 205344 - DNA, 80 bp, synthetic construct; identical to SEQ ID NO: 20614
  source 1..80: mol_type = other DNA

SEQ ID NO: 205345 - DNA, 80 bp, synthetic construct; identical to SEQ ID NO: 20615
  source 1..80: mol_type = other DNA

SEQ ID NO: 205346 - DNA, 80 bp, synthetic construct; identical to SEQ ID NO: 20616
  source 1..80: mol_type = other DNA

SEQ ID NO: 205347 - DNA, 80 bp, synthetic construct; identical to SEQ ID NO: 20617
  source 1..80: mol_type = other DNA

SEQ ID NO: 205348 - DNA, 80 bp, synthetic construct; identical to SEQ ID NO: 20618
  source 1..80: mol_type = other DNA

SEQ ID NO: 205349 - DNA, 80 bp, synthetic construct; identical to SEQ ID NO: 20619
  source 1..80: mol_type = other DNA

SEQ ID NO: 205350 - DNA, 80 bp, synthetic construct; identical to SEQ ID NO: 20620
  source 1..80: mol_type = other DNA

SEQ ID NO: 205351 - DNA, 80 bp, synthetic construct; identical to SEQ ID NO: 20621
  source 1..80: mol_type = other DNA

SEQ ID NO: 205352 - DNA, 80 bp, synthetic construct; identical to SEQ ID NO: 20622
  source 1..80: mol_type = other DNA

SEQ ID NO: 205353 - DNA, 80 bp, synthetic construct; identical to SEQ ID NO: 20623
  source 1..80: mol_type = other DNA

SEQ ID NO: 205354 - DNA, 80 bp, synthetic construct; identical to SEQ ID NO: 20624
  source 1..80: mol_type = other DNA

SEQ ID NO: 205355 - DNA, 80 bp, synthetic construct; identical to SEQ ID NO: 20625
  source 1..80: mol_type = other DNA

SEQ ID NO: 205356 - DNA, 80 bp, synthetic construct; identical to SEQ ID NO: 20626
  source 1..80: mol_type = other DNA

SEQ ID NO: 205357 - DNA, 80 bp, synthetic construct; identical to SEQ ID NO: 20627
  source 1..80: mol_type = other DNA

SEQ ID NO: 205358 - DNA, 80 bp, synthetic construct; identical to SEQ ID NO: 20628
  source 1..80: mol_type = other DNA

SEQ ID NO: 205359 - DNA, 80 bp, synthetic construct; identical to SEQ ID NO: 20629
  source 1..80: mol_type = other DNA

SEQ ID NO: 205360 - DNA, 80 bp, synthetic construct; identical to SEQ ID NO: 20630
  source 1..80: mol_type = other DNA

SEQ ID NO: 205361 - DNA, 80 bp, synthetic construct; identical to SEQ ID NO: 20631
  source 1..80: mol_type = other DNA

SEQ ID NO: 205362 - DNA, 80 bp, synthetic construct; identical to SEQ ID NO: 20632
  source 1..80: mol_type = other DNA

SEQ ID NO: 205363 - DNA, 80 bp, synthetic construct; identical to SEQ ID NO: 20633
  source 1..80: mol_type = other DNA

SEQ ID NO: 205364 - DNA, 80 bp, synthetic construct; identical to SEQ ID NO: 20634
  source 1..80: mol_type = other DNA

SEQ ID NO: 205365 - DNA, 80 bp, synthetic construct; identical to SEQ ID NO: 20635
  source 1..80: mol_type = other DNA

SEQ ID NO: 205366 - DNA, 80 bp, synthetic construct; identical to SEQ ID NO: 20636
  source 1..80: mol_type = other DNA

SEQ ID NO: 205367 - DNA, 80 bp, synthetic construct; identical to SEQ ID NO: 20637
  source 1..80: mol_type = other DNA

SEQ ID NO: 205368 - DNA, 80 bp, synthetic construct; identical to SEQ ID NO: 20638
  source 1..80: mol_type = other DNA

SEQ ID NO: 205369 - DNA, 80 bp, synthetic construct; identical to SEQ ID NO: 20639
  source 1..80: mol_type = other DNA

SEQ ID NO: 205370 - DNA, 80 bp, synthetic construct; identical to SEQ ID NO: 20640
  source 1..80: mol_type = other DNA

SEQ ID NO: 205371 - DNA, 80 bp, synthetic construct; identical to SEQ ID NO: 20641
  source 1..80: mol_type = other DNA

SEQ ID NO: 205372 - DNA, 80 bp, synthetic construct; identical to SEQ ID NO: 20642
  source 1..80: mol_type = other DNA

SEQ ID NO: 205373 - DNA, 80 bp, synthetic construct; identical to SEQ ID NO: 20643
  source 1..80: mol_type = other DNA

SEQ ID NO: 205374 - DNA, 80 bp, synthetic construct; identical to SEQ ID NO: 20644
  source 1..80: mol_type = other DNA

SEQ ID NO: 205375 - DNA, 80 bp, synthetic construct; identical to SEQ ID NO: 20645
  source 1..80: mol_type = other DNA

SEQ ID NO: 205376 - DNA, 80 bp, synthetic construct; identical to SEQ ID NO: 20646
  source 1..80: mol_type = other DNA

SEQ ID NO: 205377 - DNA, 80 bp, synthetic construct; identical to SEQ ID NO: 20647
  source 1..80: mol_type = other DNA

SEQ ID NO: 205378 - DNA, 80 bp, synthetic construct; identical to SEQ ID NO: 20648
  source 1..80: mol_type = other DNA

SEQ ID NO: 205379 - DNA, 80 bp, synthetic construct; identical to SEQ ID NO: 20649
  source 1..80: mol_type = other DNA

SEQ ID NO: 205380 - DNA, 80 bp, synthetic construct; identical to SEQ ID NO: 20650
  source 1..80: mol_type = other DNA

SEQ ID NO: 205381 - DNA, 80 bp, synthetic construct; identical to SEQ ID NO: 20651
  source 1..80: mol_type = other DNA

SEQ ID NO: 205382 - DNA, 80 bp, synthetic construct; identical to SEQ ID NO: 20652
  source 1..80: mol_type = other DNA

SEQ ID NO: 205383 - DNA, 80 bp, synthetic construct; identical to SEQ ID NO: 20653
  source 1..80: mol_type = other DNA

SEQ ID NO: 205384 - DNA, 80 bp, synthetic construct; identical to SEQ ID NO: 20654
  source 1..80: mol_type = other DNA

SEQ ID NO: 205385 - DNA, 80 bp, synthetic construct; identical to SEQ ID NO: 20655
  source 1..80: mol_type = other DNA

SEQ ID NO: 205386 - DNA, 80 bp, synthetic construct; identical to SEQ ID NO: 20656
  source 1..80: mol_type = other DNA

SEQ ID NO: 205387 - DNA, 80 bp, synthetic construct; identical to SEQ ID NO: 20657
  source 1..80: mol_type = other DNA

SEQ ID NO: 205388 - DNA, 80 bp, synthetic construct; identical to SEQ ID NO: 20658
  source 1..80: mol_type = other DNA

SEQ ID NO: 205389 - DNA, 80 bp, synthetic construct; identical to SEQ ID NO: 20659
  source 1..80: mol_type = other DNA

SEQ ID NO: 205390 - DNA, 80 bp, synthetic construct; identical to SEQ ID NO: 20660
  source 1..80: mol_type = other DNA

SEQ ID NO: 205391 - DNA, 80 bp, synthetic construct; identical to SEQ ID NO: 20661
  source 1..80: mol_type = other DNA

SEQ ID NO: 205392 - DNA, 80 bp, synthetic construct; identical to SEQ ID NO: 20662
  source 1..80: mol_type = other DNA

SEQ ID NO: 205393 - DNA, 80 bp, synthetic construct; identical to SEQ ID NO: 20663
  source 1..80: mol_type = other DNA

SEQ ID NO: 205394 - DNA, 80 bp, synthetic construct; identical to SEQ ID NO: 20664
  source 1..80: mol_type = other DNA

SEQ ID NO: 205395 - DNA, 80 bp, synthetic construct; identical to SEQ ID NO: 20665
  source 1..80: mol_type = other DNA

SEQ ID NO: 205396 - DNA, 80 bp, synthetic construct; identical to SEQ ID NO: 20666
  source 1..80: mol_type = other DNA

SEQ ID NO: 205397 - DNA, 80 bp, synthetic construct; identical to SEQ ID NO: 20667
  source 1..80: mol_type = other DNA

SEQ ID NO: 205398 - DNA, 80 bp, synthetic construct; identical to SEQ ID NO: 20668
  source 1..80: mol_type = other DNA

SEQ ID NO: 205399 - DNA, 80 bp, synthetic construct; identical to SEQ ID NO: 20669
  source 1..80: mol_type = other DNA

SEQ ID NO: 205400 - DNA, 80 bp, synthetic construct; identical to SEQ ID NO: 20670
  source 1..80: mol_type = other DNA

SEQ ID NO: 205401 - DNA, 80 bp, synthetic construct; identical to SEQ ID NO: 20671
  source 1..80: mol_type = other DNA

SEQ ID NO: 205402 - DNA, 80 bp, synthetic construct; identical to SEQ ID NO: 20672
  source 1..80: mol_type = other DNA

SEQ ID NO: 205403 - DNA, 80 bp, synthetic construct; identical to SEQ ID NO: 20673
  source 1..80: mol_type = other DNA

SEQ ID NO: 205404 - DNA, 80 bp, synthetic construct; identical to SEQ ID NO: 20674
  source 1..80: mol_type = other DNA

SEQ ID NO: 205405 - DNA, 80 bp, synthetic construct; identical to SEQ ID NO: 20675
  source 1..80: mol_type = other DNA

SEQ ID NO: 205406 - DNA, 80 bp, synthetic construct; identical to SEQ ID NO: 20676
  source 1..80: mol_type = other DNA

SEQ ID NO: 205407 - DNA, 80 bp, synthetic construct; identical to SEQ ID NO: 20677
  source 1..80: mol_type = other DNA

SEQ ID NO: 205408 - DNA, 80 bp, synthetic construct; identical to SEQ ID NO: 20678
  source 1..80: mol_type = other DNA

SEQ ID NO: 205409 - DNA, 80 bp, synthetic construct; identical to SEQ ID NO: 20679
  source 1..80: mol_type = other DNA

SEQ ID NO: 205410 - DNA, 80 bp, synthetic construct; identical to SEQ ID NO: 20680
  source 1..80: mol_type = other DNA

SEQ ID NO: 205411 - DNA, 80 bp, synthetic construct; identical to SEQ ID NO: 20681
  source 1..80: mol_type = other DNA

SEQ ID NO: 205412 - DNA, 80 bp, synthetic construct; identical to SEQ ID NO: 20682
  source 1..80: mol_type = other DNA

SEQ ID NO: 205413 - DNA, 80 bp, synthetic construct; identical to SEQ ID NO: 20683
  source 1..80: mol_type = other DNA

SEQ ID NO: 205414 - DNA, 80 bp, synthetic construct; identical to SEQ ID NO: 20684
  source 1..80: mol_type = other DNA

SEQ ID NO: 205415 - DNA, 80 bp, synthetic construct; identical to SEQ ID NO: 20685
  source 1..80: mol_type = other DNA

SEQ ID NO: 205416 - DNA, 80 bp, synthetic construct; identical to SEQ ID NO: 20686
  source 1..80: mol_type = other DNA

SEQ ID NO: 205417 - DNA, 80 bp, synthetic construct; identical to SEQ ID NO: 20687
  source 1..80: mol_type = other DNA

SEQ ID NO: 205418 - DNA, 80 bp, synthetic construct; identical to SEQ ID NO: 20688
  source 1..80: mol_type = other DNA

SEQ ID NO: 205419 - DNA, 80 bp, synthetic construct; identical to SEQ ID NO: 20689
  source 1..80: mol_type = other DNA

SEQ ID NO: 205420 - DNA, 80 bp, synthetic construct; identical to SEQ ID NO: 20690
  source 1..80: mol_type = other DNA

SEQ ID NO: 205421 - DNA, 80 bp, synthetic construct; identical to SEQ ID NO: 20691
  source 1..80: mol_type = other DNA

SEQ ID NO: 205422 - DNA, 80 bp, synthetic construct; identical to SEQ ID NO: 20692
  source 1..80: mol_type = other DNA

SEQ ID NO: 205423 - DNA, 80 bp, synthetic construct; identical to SEQ ID NO: 20693
  source 1..80: mol_type = other DNA

SEQ ID NO: 205424 - DNA, 80 bp, synthetic construct; identical to SEQ ID NO: 20694
  source 1..80: mol_type = other DNA

SEQ ID NO: 205425 - DNA, 80 bp, synthetic construct; identical to SEQ ID NO: 20695
  source 1..80: mol_type = other DNA

SEQ ID NO: 205426 - DNA, 80 bp, synthetic construct; identical to SEQ ID NO: 20696
  source 1..80: mol_type = other DNA

SEQ ID NO: 205427 - DNA, 80 bp, synthetic construct; identical to SEQ ID NO: 20697
  source 1..80: mol_type = other DNA

SEQ ID NO: 205428 - DNA, 80 bp, synthetic construct; identical to SEQ ID NO: 20698
  source 1..80: mol_type = other DNA

SEQ ID NO: 205429 - DNA, 80 bp, synthetic construct; identical to SEQ ID NO: 20699
  source 1..80: mol_type = other DNA

SEQ ID NO: 205430 - DNA, 80 bp, synthetic construct; identical to SEQ ID NO: 20700
  source 1..80: mol_type = other DNA

SEQ ID NO: 205431 - DNA, 80 bp, synthetic construct; identical to SEQ ID NO: 20701
  source 1..80: mol_type = other DNA

SEQ ID NO: 205432 - DNA, 80 bp, synthetic construct; identical to SEQ ID NO: 20702
  source 1..80: mol_type = other DNA

SEQ ID NO: 205433 - DNA, 80 bp, synthetic construct; identical to SEQ ID NO: 20703
  source 1..80: mol_type = other DNA

SEQ ID NO: 205434 - DNA, 80 bp, synthetic construct; identical to SEQ ID NO: 20704
  source 1..80: mol_type = other DNA

SEQ ID NO: 205435 - DNA, 80 bp, synthetic construct; identical to SEQ ID NO: 20705
  source 1..80: mol_type = other DNA

SEQ ID NO: 205436 - DNA, 80 bp, synthetic construct; identical to SEQ ID NO: 20706
  source 1..80: mol_type = other DNA

SEQ ID NO: 205437 - DNA, 80 bp, synthetic construct; identical to SEQ ID NO: 20707
  source 1..80: mol_type = other DNA

SEQ ID NO: 205438 - DNA, 80 bp, synthetic construct; identical to SEQ ID NO: 20708
  source 1..80: mol_type = other DNA

SEQ ID NO: 205439 - DNA, 80 bp, synthetic construct; identical to SEQ ID NO: 20709
  source 1..80: mol_type = other DNA

SEQ ID NO: 205440 - DNA, 80 bp, synthetic construct; identical to SEQ ID NO: 20710
  source 1..80: mol_type = other DNA

SEQ ID NO: 205441 - DNA, 80 bp, synthetic construct; identical to SEQ ID NO: 20711
  source 1..80: mol_type = other DNA

SEQ ID NO: 205442 - DNA, 80 bp, synthetic construct; identical to SEQ ID NO: 20712
  source 1..80: mol_type = other DNA

SEQ ID NO: 205443 - DNA, 80 bp, synthetic construct; identical to SEQ ID NO: 20713
  source 1..80: mol_type = other DNA

SEQ ID NO: 205444 - DNA, 80 bp, synthetic construct; identical to SEQ ID NO: 20714
  source 1..80: mol_type = other DNA

SEQ ID NO: 205445 - DNA, 80 bp, synthetic construct; identical to SEQ ID NO: 20715
  source 1..80: mol_type = other DNA

SEQ ID NO: 205446 - DNA, 80 bp, synthetic construct; identical to SEQ ID NO: 20716
  source 1..80: mol_type = other DNA

SEQ ID NO: 205447 - DNA, 80 bp, synthetic construct; identical to SEQ ID NO: 20717
  source 1..80: mol_type = other DNA

SEQ ID NO: 205448 - DNA, 80 bp, synthetic construct; identical to SEQ ID NO: 20718
  source 1..80: mol_type = other DNA

SEQ ID NO: 205449 - DNA, 80 bp, synthetic construct; identical to SEQ ID NO: 20719
  source 1..80: mol_type = other DNA

SEQ ID NO: 205450 - DNA, 80 bp, synthetic construct; identical to SEQ ID NO: 20720
  source 1..80: mol_type = other DNA

SEQ ID NO: 205451 - DNA, 80 bp, synthetic construct; identical to SEQ ID NO: 20721
  source 1..80: mol_type = other DNA

SEQ ID NO: 205452 - DNA, 80 bp, synthetic construct; identical to SEQ ID NO: 20722
  source 1..80: mol_type = other DNA

SEQ ID NO: 205453 - DNA, 80 bp, synthetic construct; identical to SEQ ID NO: 20723
  source 1..80: mol_type = other DNA

SEQ ID NO: 205454 - DNA, 80 bp, synthetic construct; identical to SEQ ID NO: 20724
  source 1..80: mol_type = other DNA

SEQ ID NO: 205455 - DNA, 80 bp, synthetic construct; identical to SEQ ID NO: 20725
  source 1..80: mol_type = other DNA

SEQ ID NO: 205456 - DNA, 80 bp, synthetic construct; identical to SEQ ID NO: 20726
  source 1..80: mol_type = other DNA

SEQ ID NO: 205457 - DNA, 80 bp, synthetic construct; identical to SEQ ID NO: 20727
  source 1..80: mol_type = other DNA

SEQ ID NO: 205458 - DNA, 80 bp, synthetic construct; identical to SEQ ID NO: 20728
  source 1..80: mol_type = other DNA

SEQ ID NO: 205459 - DNA, 80 bp, synthetic construct; identical to SEQ ID NO: 20729
  source 1..80: mol_type = other DNA

SEQ ID NO: 205460 - DNA, 80 bp, synthetic construct; identical to SEQ ID NO: 20730
  source 1..80: mol_type = other DNA

SEQ ID NO: 205461 - DNA, 80 bp, synthetic construct; identical to SEQ ID NO: 20731
  source 1..80: mol_type = other DNA

SEQ ID NO: 205462 - DNA, 80 bp, synthetic construct; identical to SEQ ID NO: 20732
  source 1..80: mol_type = other DNA

SEQ ID NO: 205463 - DNA, 80 bp, synthetic construct; identical to SEQ ID NO: 20733
  source 1..80: mol_type = other DNA

SEQ ID NO: 205464 - DNA, 80 bp, synthetic construct; identical to SEQ ID NO: 20734
  source 1..80: mol_type = other DNA

SEQ ID NO: 205465 - DNA, 80 bp, synthetic construct; identical to SEQ ID NO: 20735
  source 1..80: mol_type = other DNA

SEQ ID NO: 205466 - DNA, 80 bp, synthetic construct; identical to SEQ ID NO: 20736
  source 1..80: mol_type = other DNA

SEQ ID NO: 205467 - DNA, 80 bp, synthetic construct; identical to SEQ ID NO: 20737
  source 1..80: mol_type = other DNA

SEQ ID NO: 205468 - DNA, 80 bp, synthetic construct; identical to SEQ ID NO: 20738
  source 1..80: mol_type = other DNA

SEQ ID NO: 205469 - DNA, 80 bp, synthetic construct; identical to SEQ ID NO: 20739
  source 1..80: mol_type = other DNA

SEQ ID NO: 205470 - DNA, 80 bp, synthetic construct; identical to SEQ ID NO: 20740
  source 1..80: mol_type = other DNA

SEQ ID NO: 205471 - DNA, 80 bp, synthetic construct; identical to SEQ ID NO: 20741
  source 1..80: mol_type = other DNA

SEQ ID NO: 205472 - DNA, 80 bp, synthetic construct; identical to SEQ ID NO: 20742
  source 1..80: mol_type = other DNA

SEQ ID NO: 205473 - DNA, 80 bp, synthetic construct; identical to SEQ ID NO: 20743
  source 1..80: mol_type = other DNA

SEQ ID NO: 205474 - DNA, 80 bp, synthetic construct; identical to SEQ ID NO: 20744
  source 1..80: mol_type = other DNA

SEQ ID NO: 205475 - DNA, 80 bp, synthetic construct; identical to SEQ ID NO: 20745
  source 1..80: mol_type = other DNA

SEQ ID NO: 205476 - DNA, 80 bp, synthetic construct; identical to SEQ ID NO: 20746
  source 1..80: mol_type = other DNA

SEQ ID NO: 205477 - DNA, 80 bp, synthetic construct; identical to SEQ ID NO: 20747
  source 1..80: mol_type = other DNA

SEQ ID NO: 205478 - DNA, 80 bp, synthetic construct; identical to SEQ ID NO: 20748
  source 1..80: mol_type = other DNA

SEQ ID NO: 205479 - DNA, 80 bp, synthetic construct; identical to SEQ ID NO: 20749
  source 1..80: mol_type = other DNA

SEQ ID NO: 205480 - DNA, 80 bp, synthetic construct; identical to SEQ ID NO: 20750
  source 1..80: mol_type = other DNA

SEQ ID NO: 205481 - DNA, 80 bp, synthetic construct; identical to SEQ ID NO: 20751
  source 1..80: mol_type = other DNA

SEQ ID NO: 205482 - DNA, 80 bp, synthetic construct; identical to SEQ ID NO: 20752
  source 1..80: mol_type = other DNA

SEQ ID NO: 205483 - DNA, 80 bp, synthetic construct; identical to SEQ ID NO: 20753
  source 1..80: mol_type = other DNA

SEQ ID NO: 205484 - DNA, 80 bp, synthetic construct; identical to SEQ ID NO: 20754
  source 1..80: mol_type = other DNA

SEQ ID NO: 205485 - DNA, 80 bp, synthetic construct; identical to SEQ ID NO: 20755
  source 1..80: mol_type = other DNA

SEQ ID NO: 205486 - DNA, 80 bp, synthetic construct; identical to SEQ ID NO: 20756
  source 1..80: mol_type = other DNA

SEQ ID NO: 205487 - DNA, 80 bp, synthetic construct; identical to SEQ ID NO: 20757
  source 1..80: mol_type = other DNA

SEQ ID NO: 205488 - DNA, 80 bp, synthetic construct; identical to SEQ ID NO: 20758
  source 1..80: mol_type = other DNA

SEQ ID NO: 205489 - DNA, 80 bp, synthetic construct; identical to SEQ ID NO: 20759
  source 1..80: mol_type = other DNA

SEQ ID NO: 205490 - DNA, 80 bp, synthetic construct; identical to SEQ ID NO: 20760
  source 1..80: mol_type = other DNA

SEQ ID NO: 205491 - DNA, 80 bp, synthetic construct; identical to SEQ ID NO: 20761
  source 1..80: mol_type = other DNA

SEQ ID NO: 205492 - DNA, 80 bp, synthetic construct; identical to SEQ ID NO: 20762
  source 1..80: mol_type = other DNA

SEQ ID NO: 205493 - DNA, 80 bp, synthetic construct; identical to SEQ ID NO: 20763
  source 1..80: mol_type = other DNA

SEQ ID NO: 205494 - DNA, 80 bp, synthetic construct; identical to SEQ ID NO: 20764
  source 1..80: mol_type = other DNA

SEQ ID NO: 205495 - DNA, 80 bp, synthetic construct; identical to SEQ ID NO: 20765
  source 1..80: mol_type = other DNA

SEQ ID NO: 205496 - DNA, 80 bp, synthetic construct; identical to SEQ ID NO: 20766
  source 1..80: mol_type = other DNA

SEQ ID NO: 205497 - DNA, 80 bp, synthetic construct; identical to SEQ ID NO: 20767
  source 1..80: mol_type = other DNA

SEQ ID NO: 205498 - DNA, 80 bp, synthetic construct; identical to SEQ ID NO: 20768
  source 1..80: mol_type = other DNA

SEQ ID NO: 205499 - DNA, 80 bp, synthetic construct; identical to SEQ ID NO: 20769
  source 1..80: mol_type = other DNA

SEQ ID NO: 205500 - DNA, 80 bp, synthetic construct; identical to SEQ ID NO: 20770
  source 1..80: mol_type = other DNA

SEQ ID NO: 205501 - DNA, 80 bp, synthetic construct; identical to SEQ ID NO: 20771
  source 1..80: mol_type = other DNA

SEQ ID NO: 205502 - DNA, 80 bp, synthetic construct; identical to SEQ ID NO: 20772
  source 1..80: mol_type = other DNA

SEQ ID NO: 205503 - DNA, 80 bp, synthetic construct; identical to SEQ ID NO: 20773
  source 1..80: mol_type = other DNA

SEQ ID NO: 205504 - DNA, 80 bp, synthetic construct; identical to SEQ ID NO: 20774
  source 1..80: mol_type = other DNA

SEQ ID NO: 205505 - DNA, 80 bp, synthetic construct; identical to SEQ ID NO: 20775
  source 1..80: mol_type = other DNA

SEQ ID NO: 205506 - DNA, 80 bp, synthetic construct; identical to SEQ ID NO: 20776
  source 1..80: mol_type = other DNA

SEQ ID NO: 205507 - DNA, 80 bp, synthetic construct; identical to SEQ ID NO: 20777
  source 1..80: mol_type = other DNA

SEQ ID NO: 205508 - DNA, 80 bp, synthetic construct; identical to SEQ ID NO: 20778
  source 1..80: mol_type = other DNA

SEQ ID NO: 205509 - DNA, 80 bp, synthetic construct; identical to SEQ ID NO: 20779
  source 1..80: mol_type = other DNA

SEQ ID NO: 205510 - DNA, 80 bp, synthetic construct; identical to SEQ ID NO: 20780
  source 1..80: mol_type = other DNA

SEQ ID NO: 205511 - DNA, 80 bp, synthetic construct; identical to SEQ ID NO: 20781
  source 1..80: mol_type = other DNA

SEQ ID NO: 205512 - DNA, 80 bp, synthetic construct; identical to SEQ ID NO: 20782
  source 1..80: mol_type = other DNA

SEQ ID NO: 205513 - DNA, 80 bp, synthetic construct; identical to SEQ ID NO: 20783
  source 1..80: mol_type = other DNA

SEQ ID NO: 205514 - DNA, 80 bp, synthetic construct; identical to SEQ ID NO: 20784
  source 1..80: mol_type = other DNA

SEQ ID NO: 205515 - DNA, 80 bp, synthetic construct; identical to SEQ ID NO: 20785
  source 1..80: mol_type = other DNA

SEQ ID NO: 205516 - DNA, 80 bp, synthetic construct; identical to SEQ ID NO: 20786
  source 1..80: mol_type = other DNA

SEQ ID NO: 205517 - DNA, 80 bp, synthetic construct; identical to SEQ ID NO: 20787
  source 1..80: mol_type = other DNA

SEQ ID NO: 205518 - DNA, 80 bp, synthetic construct; identical to SEQ ID NO: 20788
  source 1..80: mol_type = other DNA

SEQ ID NO: 205519 - DNA, 80 bp, synthetic construct; identical to SEQ ID NO: 20789
  source 1..80: mol_type = other DNA

SEQ ID NO: 205520 - DNA, 80 bp, synthetic construct; identical to SEQ ID NO: 20790
  source 1..80: mol_type = other DNA

SEQ ID NO: 205521 - DNA, 80 bp, synthetic construct; identical to SEQ ID NO: 20791
  source 1..80: mol_type = other DNA

SEQ ID NO: 205522 - DNA, 80 bp, synthetic construct; identical to SEQ ID NO: 20792
  source 1..80: mol_type = other DNA

SEQ ID NO: 205523 - DNA, 80 bp, synthetic construct; identical to SEQ ID NO: 20793
  source 1..80: mol_type = other DNA

SEQ ID NO: 205524 - DNA, 80 bp, synthetic construct; identical to SEQ ID NO: 20794
  source 1..80: mol_type = other DNA

SEQ ID NO: 205525 - DNA, 80 bp, synthetic construct; identical to SEQ ID NO: 20795
  source 1..80: mol_type = other DNA

SEQ ID NO: 205526 - DNA, 80 bp, synthetic construct; identical to SEQ ID NO: 20796
  source 1..80: mol_type = other DNA

SEQ ID NO: 205527 - DNA, 80 bp, synthetic construct; identical to SEQ ID NO: 20797
  source 1..80: mol_type = other DNA

SEQ ID NO: 205528 - DNA, 80 bp, synthetic construct; identical to SEQ ID NO: 20798
  source 1..80: mol_type = other DNA

SEQ ID NO: 205529 - DNA, 80 bp, synthetic construct; identical to SEQ ID NO: 20799
  source 1..80: mol_type = other DNA

SEQ ID NO: 205530 - DNA, 80 bp, synthetic construct; identical to SEQ ID NO: 20800
  source 1..80: mol_type = other DNA

SEQ ID NO: 205531 - DNA, 80 bp, synthetic construct; identical to SEQ ID NO: 20801
  source 1..80: mol_type = other DNA

SEQ ID NO: 205532 - DNA, 80 bp, synthetic construct; identical to SEQ ID NO: 20802
  source 1..80: mol_type = other DNA

SEQ ID NO: 205533 - DNA, 80 bp, synthetic construct; identical to SEQ ID NO: 20803
  source 1..80: mol_type = other DNA

SEQ ID NO: 205534 - DNA, 80 bp, synthetic construct; identical to SEQ ID NO: 20804
  source 1..80: mol_type = other DNA

SEQ ID NO: 205535 - DNA, 80 bp, synthetic construct; identical to SEQ ID NO: 20805
  source 1..80: mol_type = other DNA

SEQ ID NO: 205536 - DNA, 80 bp, synthetic construct; identical to SEQ ID NO: 20806
  source 1..80: mol_type = other DNA

SEQ ID NO: 205537 - DNA, 80 bp, synthetic construct; identical to SEQ ID NO: 20807
  source 1..80: mol_type = other DNA

SEQ ID NO: 205538 - DNA, 80 bp, synthetic construct; identical to SEQ ID NO: 20808
  source 1..80: mol_type = other DNA

SEQ ID NO: 205539 - DNA, 80 bp, synthetic construct; identical to SEQ ID NO: 20809
  source 1..80: mol_type = other DNA

SEQ ID NO: 205540 - DNA, 80 bp, synthetic construct; identical to SEQ ID NO: 20810
  source 1..80: mol_type = other DNA

SEQ ID NO: 205541 - DNA, 80 bp, synthetic construct; identical to SEQ ID NO: 20811
  source 1..80: mol_type = other DNA

SEQ ID NO: 205542 - DNA, 80 bp, synthetic construct; identical to SEQ ID NO: 20812
  source 1..80: mol_type = other DNA

SEQ ID NO: 205543 - DNA, 80 bp, synthetic construct; identical to SEQ ID NO: 20813
  source 1..80: mol_type = other DNA

SEQ ID NO: 205544 - DNA, 80 bp, synthetic construct; identical to SEQ ID NO: 20814
  source 1..80: mol_type = other DNA

SEQ ID NO: 205545 - DNA, 80 bp, synthetic construct; identical to SEQ ID NO: 20815
  source 1..80: mol_type = other DNA

SEQ ID NO: 205546 - DNA, 80 bp, synthetic construct; identical to SEQ ID NO: 20816
  source 1..80: mol_type = other DNA

SEQ ID NO: 205547 - DNA, 80 bp, synthetic construct; identical to SEQ ID NO: 20817
  source 1..80: mol_type = other DNA

SEQ ID NO: 205548 - DNA, 80 bp, synthetic construct; identical to SEQ ID NO: 20818
  source 1..80: mol_type = other DNA

SEQ ID NO: 205549 - DNA, 80 bp, synthetic construct; identical to SEQ ID NO: 20819
  source 1..80: mol_type = other DNA

SEQ ID NO: 205550 - DNA, 80 bp, synthetic construct; identical to SEQ ID NO: 20820
  source 1..80: mol_type = other DNA

SEQ ID NO: 205551 - DNA, 80 bp, synthetic construct; identical to SEQ ID NO: 20821
  source 1..80: mol_type = other DNA

SEQ ID NO: 205552 - DNA, 80 bp, synthetic construct; identical to SEQ ID NO: 20822
  source 1..80: mol_type = other DNA

SEQ ID NO: 205553 - DNA, 80 bp, synthetic construct; identical to SEQ ID NO: 20823
  source 1..80: mol_type = other DNA

SEQ ID NO: 205554 - DNA, 80 bp, synthetic construct; identical to SEQ ID NO: 20824
  source 1..80: mol_type = other DNA

SEQ ID NO: 205555 - DNA, 80 bp, synthetic construct; identical to SEQ ID NO: 20825
  source 1..80: mol_type = other DNA

SEQ ID NO: 205556 - DNA, 80 bp, synthetic construct; identical to SEQ ID NO: 20826
  source 1..80: mol_type = other DNA

SEQ ID NO: 205557 - DNA, 80 bp, synthetic construct; identical to SEQ ID NO: 20827
  source 1..80: mol_type = other DNA

SEQ ID NO: 205558 - DNA, 80 bp, synthetic construct; identical to SEQ ID NO: 20828
  source 1..80: mol_type = other DNA

SEQ ID NO: 205559 - DNA, 80 bp, synthetic construct; identical to SEQ ID NO: 20829
  source 1..80: mol_type = other DNA

SEQ ID NO: 205560 - DNA, 80 bp, synthetic construct; identical to SEQ ID NO: 20830
  source 1..80: mol_type = other DNA

SEQ ID NO: 205561 - DNA, 80 bp, synthetic construct; identical to SEQ ID NO: 20831
  source 1..80: mol_type = other DNA

SEQ ID NO: 205562 - DNA, 80 bp, synthetic construct; identical to SEQ ID NO: 20832
  source 1..80: mol_type = other DNA

SEQ ID NO: 205563 - DNA, 80 bp, synthetic construct; identical to SEQ ID NO: 20833
  source 1..80: mol_type = other DNA

SEQ ID NO: 205564 - DNA, 80 bp, synthetic construct; identical to SEQ ID NO: 20834
  source 1..80: mol_type = other DNA

SEQ ID NO: 205565 - DNA, 80 bp, synthetic construct; identical to SEQ ID NO: 20835
  source 1..80: mol_type = other DNA

SEQ ID NO: 205566 - DNA, 80 bp, synthetic construct; identical to SEQ ID NO: 20836
  source 1..80: mol_type = other DNA

SEQ ID NO: 205567 - DNA, 80 bp, synthetic construct; identical to SEQ ID NO: 20837
  source 1..80: mol_type = other DNA

SEQ ID NO: 205568 - DNA, 80 bp, synthetic construct; identical to SEQ ID NO: 20838
  source 1..80: mol_type = other DNA

SEQ ID NO: 205569 - DNA, 80 bp, synthetic construct; identical to SEQ ID NO: 20839
  source 1..80: mol_type = other DNA

SEQ ID NO: 205570 - DNA, 80 bp, synthetic construct; identical to SEQ ID NO: 20840
  source 1..80: mol_type = other DNA

SEQ ID NO: 205571 - DNA, 80 bp, synthetic construct; identical to SEQ ID NO: 20841
  source 1..80: mol_type = other DNA

SEQ ID NO: 205572 - DNA, 80 bp, synthetic construct; identical to SEQ ID NO: 20842
  source 1..80: mol_type = other DNA

SEQ ID NO: 205573 - DNA, 80 bp, synthetic construct; identical to SEQ ID NO: 20843
  source 1..80: mol_type = other DNA

SEQ ID NO: 205574 - DNA, 80 bp, synthetic construct; identical to SEQ ID NO: 20844
  source 1..80: mol_type = other DNA

SEQ ID NO: 205575 - DNA, 80 bp, synthetic construct; identical to SEQ ID NO: 20845
  source 1..80: mol_type = other DNA

SEQ ID NO: 205576 - DNA, 80 bp, synthetic construct; identical to SEQ ID NO: 20846
  source 1..80: mol_type = other DNA

SEQ ID NO: 205577 - DNA, 80 bp, synthetic construct; identical to SEQ ID NO: 20847
  source 1..80: mol_type = other DNA

SEQ ID NO: 205578 - DNA, 80 bp, synthetic construct; identical to SEQ ID NO: 20848
  source 1..80: mol_type = other DNA

SEQ ID NO: 205579 - DNA, 80 bp, synthetic construct; identical to SEQ ID NO: 20849
  source 1..80: mol_type = other DNA

SEQ ID NO: 205580 - DNA, 80 bp, synthetic construct; identical to SEQ ID NO: 20850
  source 1..80: mol_type = other DNA

SEQ ID NO: 205581 - DNA, 80 bp, synthetic construct; identical to SEQ ID NO: 20851
  source 1..80: mol_type = other DNA

SEQ ID NO: 205582 - DNA, 80 bp, synthetic construct; identical to SEQ ID NO: 20852
  source 1..80: mol_type = other DNA

SEQ ID NO: 205583 - DNA, 80 bp, synthetic construct; identical to SEQ ID NO: 20853
  source 1..80: mol_type = other DNA

SEQ ID NO: 205584 - DNA, 80 bp, synthetic construct; identical to SEQ ID NO: 20854
  source 1..80: mol_type = other DNA

SEQ ID NO: 205585 - DNA, 80 bp, synthetic construct; identical to SEQ ID NO: 20855
  source 1..80: mol_type = other DNA

SEQ ID NO: 205586 - DNA, 80 bp, synthetic construct; identical to SEQ ID NO: 20856
  source 1..80: mol_type = other DNA

SEQ ID NO: 205587 - DNA, 80 bp, synthetic construct; identical to SEQ ID NO: 20857
  source 1..80: mol_type = other DNA

SEQ ID NO: 205588 - DNA, 80 bp, synthetic construct; identical to SEQ ID NO: 20858
  source 1..80: mol_type = other DNA

SEQ ID NO: 205589 - DNA, 80 bp, synthetic construct; identical to SEQ ID NO: 20859
  source 1..80: mol_type = other DNA

SEQ ID NO: 205590 - DNA, 80 bp, synthetic construct; identical to SEQ ID NO: 20860
  source 1..80: mol_type = other DNA

SEQ ID NO: 205591 - DNA, 80 bp, synthetic construct; identical to SEQ ID NO: 20861
  source 1..80: mol_type = other DNA

SEQ ID NO: 205592 - DNA, 80 bp, synthetic construct; identical to SEQ ID NO: 20862
  source 1..80: mol_type = other DNA

SEQ ID NO: 205593 - DNA, 80 bp, synthetic construct; identical to SEQ ID NO: 20863
  source 1..80: mol_type = other DNA

SEQ ID NO: 205594 - DNA, 80 bp, synthetic construct; identical to SEQ ID NO: 20864
  source 1..80: mol_type = other DNA

SEQ ID NO: 205595 - DNA, 80 bp, synthetic construct; identical to SEQ ID NO: 20865
  source 1..80: mol_type = other DNA

SEQ ID NO: 205596 - DNA, 80 bp, synthetic construct; identical to SEQ ID NO: 20866
  source 1..80: mol_type = other DNA

SEQ ID NO: 205597 - DNA, 80 bp, synthetic construct; identical to SEQ ID NO: 20867
  source 1..80: mol_type = other DNA

SEQ ID NO: 205598 - DNA, 80 bp, synthetic construct; identical to SEQ ID NO: 20868
  source 1..80: mol_type = other DNA

SEQ ID NO: 205599 - DNA, 80 bp, synthetic construct; identical to SEQ ID NO: 20869
  source 1..80: mol_type = other DNA

SEQ ID NO: 205600 - DNA, 80 bp, synthetic construct; identical to SEQ ID NO: 20870
  source 1..80: mol_type = other DNA

SEQ ID NO: 205601 - DNA, 80 bp, synthetic construct; identical to SEQ ID NO: 20871
  source 1..80: mol_type = other DNA

SEQ ID NO: 205602 - DNA, 80 bp, synthetic construct; identical to SEQ ID NO: 20872
  source 1..80: mol_type = other DNA

SEQ ID NO: 205603 - DNA, 80 bp, synthetic construct; identical to SEQ ID NO: 20873
  source 1..80: mol_type = other DNA

SEQ ID NO: 205604 - DNA, 80 bp, synthetic construct; identical to SEQ ID NO: 20874
  source 1..80: mol_type = other DNA

SEQ ID NO: 205605 - DNA, 80 bp, synthetic construct; identical to SEQ ID NO: 20875
  source 1..80: mol_type = other DNA

SEQ ID NO: 205606 - DNA, 80 bp, synthetic construct; identical to SEQ ID NO: 20876
  source 1..80: mol_type = other DNA

SEQ ID NO: 205607 - DNA, 80 bp, synthetic construct; identical to SEQ ID NO: 20877
  source 1..80: mol_type = other DNA

SEQ ID NO: 205608 - DNA, 80 bp, synthetic construct; identical to SEQ ID NO: 20878
  source 1..80: mol_type = other DNA

SEQ ID NO: 205609 - DNA, 80 bp, synthetic construct; identical to SEQ ID NO: 20879
  source 1..80: mol_type = other DNA

SEQ ID NO: 205610 - DNA, 80 bp, synthetic construct; identical to SEQ ID NO: 20880
  source 1..80: mol_type = other DNA

SEQ ID NO: 205611 - DNA, 80 bp, synthetic construct; identical to SEQ ID NO: 20881
  source 1..80: mol_type = other DNA

SEQ ID NO: 205612 - DNA, 80 bp, synthetic construct; identical to SEQ ID NO: 20882
  source 1..80: mol_type = other DNA

SEQ ID NO: 205613 - DNA, 80 bp, synthetic construct; identical to SEQ ID NO: 20883
  source 1..80: mol_type = other DNA

SEQ ID NO: 205614 - DNA, 80 bp, synthetic construct; identical to SEQ ID NO: 20884
  source 1..80: mol_type = other DNA

SEQ ID NO: 205615 - DNA, 80 bp, synthetic construct; identical to SEQ ID NO: 20885
  source 1..80: mol_type = other DNA

SEQ ID NO: 205616 - DNA, 80 bp, synthetic construct; identical to SEQ ID NO: 20886
  source 1..80: mol_type = other DNA

SEQ ID NO: 205617 - DNA, 80 bp, synthetic construct; identical to SEQ ID NO: 20887
  source 1..80: mol_type = other DNA

SEQ ID NO: 205618 - DNA, 80 bp, synthetic construct; identical to SEQ ID NO: 20888
  source 1..80: mol_type = other DNA

SEQ ID NO: 205619 - DNA, 80 bp, synthetic construct; identical to SEQ ID NO: 20889
  source 1..80: mol_type = other DNA

SEQ ID NO: 205620 - DNA, 80 bp, synthetic construct; identical to SEQ ID NO: 20890
  source 1..80: mol_type = other DNA

SEQ ID NO: 205621 - DNA, 80 bp, synthetic construct; identical to SEQ ID NO: 20891
  source 1..80: mol_type = other DNA

SEQ ID NO: 205622 - DNA, 80 bp, synthetic construct; identical to SEQ ID NO: 20892
  source 1..80: mol_type = other DNA

SEQ ID NO: 205623 - DNA, 80 bp, synthetic construct; identical to SEQ ID NO: 20893
  source 1..80: mol_type = other DNA

SEQ ID NO: 205624 - DNA, 80 bp, synthetic construct; identical to SEQ ID NO: 20894
  source 1..80: mol_type = other DNA

SEQ ID NO: 205625 - DNA, 80 bp, synthetic construct; identical to SEQ ID NO: 20895
  source 1..80: mol_type = other DNA

SEQ ID NO: 205626 - DNA, 80 bp, synthetic construct; identical to SEQ ID NO: 20896
  source 1..80: mol_type = other DNA

SEQ ID NO: 205627 - DNA, 80 bp, synthetic construct; identical to SEQ ID NO: 20897
  source 1..80: mol_type = other DNA

SEQ ID NO: 205628 - DNA, 80 bp, synthetic construct; identical to SEQ ID NO: 20898
  source 1..80: mol_type = other DNA

SEQ ID NO: 205629 - DNA, 80 bp, synthetic construct; identical to SEQ ID NO: 20899
  source 1..80: mol_type = other DNA

SEQ ID NO: 205630 - DNA, 80 bp, synthetic construct; identical to SEQ ID NO: 20900
  source 1..80: mol_type = other DNA

SEQ ID NO: 205631 - DNA, 80 bp, synthetic construct; identical to SEQ ID NO: 20901
  source 1..80: mol_type = other DNA

SEQ ID NO: 205632 - DNA, 80 bp, synthetic construct; identical to SEQ ID NO: 20902
  source 1..80: mol_type = other DNA

SEQ ID NO: 205633 - DNA, 80 bp, synthetic construct; identical to SEQ ID NO: 20903
  source 1..80: mol_type = other DNA

SEQ ID NO: 205634 - DNA, 80 bp, synthetic construct; identical to SEQ ID NO: 20904
  source 1..80: mol_type = other DNA

SEQ ID NO: 205635 - DNA, 80 bp, synthetic construct; identical to SEQ ID NO: 20905
  source 1..80: mol_type = other DNA

SEQ ID NO: 205636 - DNA, 80 bp, synthetic construct; identical to SEQ ID NO: 20906
  source 1..80: mol_type = other DNA

SEQ ID NO: 205637 - DNA, 80 bp, synthetic construct; identical to SEQ ID NO: 20907
  source 1..80: mol_type = other DNA

SEQ ID NO: 205638 - DNA, 80 bp, synthetic construct; identical to SEQ ID NO: 20908
  source 1..80: mol_type = other DNA

SEQ ID NO: 205639 - DNA, 80 bp, synthetic construct; identical to SEQ ID NO: 20909
  source 1..80: mol_type = other DNA

SEQ ID NO: 205640 - DNA, 80 bp, synthetic construct; identical to SEQ ID NO: 20910
  source 1..80: mol_type = other DNA

SEQ ID NO: 205641 - DNA, 80 bp, synthetic construct; identical to SEQ ID NO: 20911
  source 1..80: mol_type = other DNA

SEQ ID NO: 205642 - DNA, 80 bp, synthetic construct; identical to SEQ ID NO: 20912
  source 1..80: mol_type = other DNA

SEQ ID NO: 205643 - DNA, 80 bp, synthetic construct; identical to SEQ ID NO: 20913
  source 1..80: mol_type = other DNA

SEQ ID NO: 205644 - DNA, 80 bp, synthetic construct; identical to SEQ ID NO: 20914
  source 1..80: mol_type = other DNA

SEQ ID NO: 205645 - DNA, 80 bp, synthetic construct; identical to SEQ ID NO: 20915
  source 1..80: mol_type = other DNA

SEQ ID NO: 205646 - DNA, 80 bp, synthetic construct; identical to SEQ ID NO: 20916
  source 1..80: mol_type = other DNA

SEQ ID NO: 205647 - DNA, 80 bp, synthetic construct; identical to SEQ ID NO: 20917
  source 1..80: mol_type = other DNA

SEQ ID NO: 205648 - DNA, 80 bp, synthetic construct; identical to SEQ ID NO: 20918
  source 1..80: mol_type = other DNA

SEQ ID NO: 205649 - DNA, 80 bp, synthetic construct; identical to SEQ ID NO: 20919
  source 1..80: mol_type = other DNA

SEQ ID NO: 205650 - DNA, 80 bp, synthetic construct; identical to SEQ ID NO: 20920
  source 1..80: mol_type = other DNA

SEQ ID NO: 205651 - DNA, 80 bp, synthetic construct; identical to SEQ ID NO: 20921
  source 1..80: mol_type = other DNA

SEQ ID NO: 205652 - DNA, 80 bp, synthetic construct; identical to SEQ ID NO: 20922
  source 1..80: mol_type = other DNA

SEQ ID NO: 205653 - DNA, 80 bp, synthetic construct; identical to SEQ ID NO: 20923
  source 1..80: mol_type = other DNA

SEQ ID NO: 205654 - DNA, 80 bp, synthetic construct; identical to SEQ ID NO: 20924
  source 1..80: mol_type = other DNA

SEQ ID NO: 205655 - DNA, 80 bp, synthetic construct; identical to SEQ ID NO: 20925
  source 1..80: mol_type = other DNA

SEQ ID NO: 205656 - DNA, 80 bp, synthetic construct; identical to SEQ ID NO: 20926
  source 1..80: mol_type = other DNA

SEQ ID NO: 205657 - DNA, 80 bp, synthetic construct; identical to SEQ ID NO: 20927
  source 1..80: mol_type = other DNA

SEQ ID NO: 205658 - DNA, 80 bp, synthetic construct; identical to SEQ ID NO: 20928
  source 1..80: mol_type = other DNA

SEQ ID NO: 205659 - DNA, 80 bp, synthetic construct; identical to SEQ ID NO: 20929
  source 1..80: mol_type = other DNA

SEQ ID NO: 205660 - DNA, 80 bp, synthetic construct; identical to SEQ ID NO: 20930
  source 1..80: mol_type = other DNA

SEQ ID NO: 205661 - DNA, 80 bp, synthetic construct; identical to SEQ ID NO: 20931
  source 1..80: mol_type = other DNA

SEQ ID NO: 205662 - DNA, 80 bp, synthetic construct; identical to SEQ ID NO: 20932
  source 1..80: mol_type = other DNA

SEQ ID NO: 205663 - DNA, 80 bp, synthetic construct; identical to SEQ ID NO: 20933
  source 1..80: mol_type = other DNA

SEQ ID NO: 205664 - DNA, 80 bp, synthetic construct; identical to SEQ ID NO: 20934
  source 1..80: mol_type = other DNA

SEQ ID NO: 205665 - DNA, 80 bp, synthetic construct; identical to SEQ ID NO: 20935
  source 1..80: mol_type = other DNA

SEQ ID NO: 205666 - DNA, 80 bp, synthetic construct; identical to SEQ ID NO: 20936
  source 1..80: mol_type = other DNA

SEQ ID NO: 205667 - DNA, 80 bp, synthetic construct; identical to SEQ ID NO: 20937
  source 1..80: mol_type = other DNA

SEQ ID NO: 205668 - DNA, 80 bp, synthetic construct; identical to SEQ ID NO: 20938
  source 1..80: mol_type = other DNA

SEQ ID NO: 205669 - DNA, 80 bp, synthetic construct; identical to SEQ ID NO: 20939
  source 1..80: mol_type = other DNA

SEQ ID NO: 205670 - DNA, 80 bp, synthetic construct; identical to SEQ ID NO: 20940
  source 1..80: mol_type = other DNA

SEQ ID NO: 205671 - DNA, 80 bp, synthetic construct; identical to SEQ ID NO: 20941
  source 1..80: mol_type = other DNA

SEQ ID NO: 205672 - DNA, 80 bp, synthetic construct; identical to SEQ ID NO: 20942
  source 1..80: mol_type = other DNA

SEQ ID NO: 205673 - DNA, 80 bp, synthetic construct; identical to SEQ ID NO: 20943
  source 1..80: mol_type = other DNA

SEQ ID NO: 205674 - DNA, 80 bp, synthetic construct; identical to SEQ ID NO: 20944
  source 1..80: mol_type = other DNA

SEQ ID NO: 205675 - DNA, 80 bp, synthetic construct; identical to SEQ ID NO: 20945
  source 1..80: mol_type = other DNA

SEQ ID NO: 205676 - DNA, 80 bp, synthetic construct; identical to SEQ ID NO: 20946
  source 1..80: mol_type = other DNA

SEQ ID NO: 205677 - DNA, 80 bp, synthetic construct; identical to SEQ ID NO: 20947
  source 1..80: mol_type = other DNA

SEQ ID NO: 205678 - DNA, 80 bp, synthetic construct; identical to SEQ ID NO: 20948
  source 1..80: mol_type = other DNA

SEQ ID NO: 205679 - DNA, 80 bp, synthetic construct; identical to SEQ ID NO: 20949
  source 1..80: mol_type = other DNA

SEQ ID NO: 205680 - DNA, 80 bp, synthetic construct; identical to SEQ ID NO: 20950
  source 1..80: mol_type = other DNA

SEQ ID NO: 205681 - DNA, 80 bp, synthetic construct; identical to SEQ ID NO: 20951
  source 1..80: mol_type = other DNA

SEQ ID NO: 205682 - DNA, 80 bp, synthetic construct; identical to SEQ ID NO: 20952
  source 1..80: mol_type = other DNA

SEQ ID NO: 205683 - DNA, 80 bp, synthetic construct; identical to SEQ ID NO: 20953
  source 1..80: mol_type = other DNA

SEQ ID NO: 205684 - DNA, 80 bp, synthetic construct; identical to SEQ ID NO: 20954
  source 1..80: mol_type = other DNA

SEQ ID NO: 205685 - DNA, 80 bp, synthetic construct; identical to SEQ ID NO: 20955
  source 1..80: mol_type = other DNA

SEQ ID NO: 205686 - DNA, 80 bp, synthetic construct; identical to SEQ ID NO: 20956
  source 1..80: mol_type = other DNA

SEQ ID NO: 205687 - DNA, 80 bp, synthetic construct; identical to SEQ ID NO: 20957
  source 1..80: mol_type = other DNA

SEQ ID NO: 205688 - DNA, 80 bp, synthetic construct; identical to SEQ ID NO: 20958
  source 1..80: mol_type = other DNA

SEQ ID NO: 205689 - DNA, 80 bp, synthetic construct; identical to SEQ ID NO: 20959
  source 1..80: mol_type = other DNA

SEQ ID NO: 205690 - DNA, 80 bp, synthetic construct; identical to SEQ ID NO: 20960
  source 1..80: mol_type = other DNA

SEQ ID NO: 205691 - DNA, 80 bp, synthetic construct; identical to SEQ ID NO: 20961
  source 1..80: mol_type = other DNA

SEQ ID NO: 205692 - DNA, 80 bp, synthetic construct; identical to SEQ ID NO: 20962
  source 1..80: mol_type = other DNA

SEQ ID NO: 205693 - DNA, 80 bp, synthetic construct; identical to SEQ ID NO: 20963
  source 1..80: mol_type = other DNA

SEQ ID NO: 205694 - DNA, 80 bp, synthetic construct; identical to SEQ ID NO: 20964
  source 1..80: mol_type = other DNA

SEQ ID NO: 205695 - DNA, 80 bp, synthetic construct; identical to SEQ ID NO: 20965
  source 1..80: mol_type = other DNA

SEQ ID NO: 205696 - DNA, 80 bp, synthetic construct; identical to SEQ ID NO: 20966
  source 1..80: mol_type = other DNA

SEQ ID NO: 205697 - DNA, 80 bp, synthetic construct; identical to SEQ ID NO: 20967
  source 1..80: mol_type = other DNA

SEQ ID NO: 205698 - DNA, 80 bp, synthetic construct; identical to SEQ ID NO: 20968
  source 1..80: mol_type = other DNA

SEQ ID NO: 205699 - DNA, 80 bp, synthetic construct; identical to SEQ ID NO: 20969
  source 1..80: mol_type = other DNA

SEQ ID NO: 205700 - DNA, 80 bp, synthetic construct; identical to SEQ ID NO: 20970
  source 1..80: mol_type = other DNA

SEQ ID NO: 205701 - DNA, 80 bp, synthetic construct; identical to SEQ ID NO: 20971
  source 1..80: mol_type = other DNA

SEQ ID NO: 205702 - DNA, 80 bp, synthetic construct; identical to SEQ ID NO: 20972
  source 1..80: mol_type = other DNA

SEQ ID NO: 205703 - DNA, 80 bp, synthetic construct; identical to SEQ ID NO: 20973
  source 1..80: mol_type = other DNA

SEQ ID NO: 205704 - DNA, 80 bp, synthetic construct; identical to SEQ ID NO: 20974
  source 1..80: mol_type = other DNA

SEQ ID NO: 205705 - DNA, 80 bp, synthetic construct; identical to SEQ ID NO: 20975
  source 1..80: mol_type = other DNA

SEQ ID NO: 205706 - DNA, 80 bp, synthetic construct; identical to SEQ ID NO: 20976
  source 1..80: mol_type = other DNA

SEQ ID NO: 205707 - DNA, 80 bp, synthetic construct; identical to SEQ ID NO: 20977
  source 1..80: mol_type = other DNA

SEQ ID NO: 205708 - DNA, 80 bp, synthetic construct; identical to SEQ ID NO: 20978
  source 1..80: mol_type = other DNA

SEQ ID NO: 205709 - DNA, 80 bp, synthetic construct; identical to SEQ ID NO: 20979
  source 1..80: mol_type = other DNA

SEQ ID NO: 205710 - DNA, 80 bp, synthetic construct; identical to SEQ ID NO: 20980
  source 1..80: mol_type = other DNA

SEQ ID NO: 205711 - DNA, 80 bp, synthetic construct; identical to SEQ ID NO: 20981
  source 1..80: mol_type = other DNA

SEQ ID NO: 205712 - DNA, 80 bp, synthetic construct; identical to SEQ ID NO: 20982
  source 1..80: mol_type = other DNA

SEQ ID NO: 205713 - DNA, 80 bp, synthetic construct; identical to SEQ ID NO: 20983
  source 1..80: mol_type = other DNA

SEQ ID NO: 205714 - DNA, 80 bp, synthetic construct; identical to SEQ ID NO: 20984
  source 1..80: mol_type = other DNA

SEQ ID NO: 205715 - DNA, 80 bp, synthetic construct; identical to SEQ ID NO: 20985
  source 1..80: mol_type = other DNA

SEQ ID NO: 205716 - DNA, 80 bp, synthetic construct; identical to SEQ ID NO: 20986
  source 1..80: mol_type = other DNA

SEQ ID NO: 205717 - DNA, 80 bp, synthetic construct; identical to SEQ ID NO: 20987
  source 1..80: mol_type = other DNA

SEQ ID NO: 205718 - DNA, 80 bp, synthetic construct; identical to SEQ ID NO: 20988
  source 1..80: mol_type = other DNA

SEQ ID NO: 205719 - DNA, 80 bp, synthetic construct; identical to SEQ ID NO: 20989
  source 1..80: mol_type = other DNA

SEQ ID NO: 205720 - DNA, 80 bp, synthetic construct; identical to SEQ ID NO: 20990
  source 1..80: mol_type = other DNA

SEQ ID NO: 205721 - DNA, 80 bp, synthetic construct; identical to SEQ ID NO: 20991
  source 1..80: mol_type = other DNA

SEQ ID NO: 205722 - DNA, 80 bp, synthetic construct; identical to SEQ ID NO: 20992
  source 1..80: mol_type = other DNA

SEQ ID NO: 205723 - DNA, 80 bp, synthetic construct; identical to SEQ ID NO: 20993
  source 1..80: mol_type = other DNA

SEQ ID NO: 205724 - DNA, 80 bp, synthetic construct; identical to SEQ ID NO: 20994
  source 1..80: mol_type = other DNA

SEQ ID NO: 205725 - DNA, 80 bp, synthetic construct; identical to SEQ ID NO: 20995
  source 1..80: mol_type = other DNA

SEQ ID NO: 205726 - DNA, 80 bp, synthetic construct; identical to SEQ ID NO: 20996
  source 1..80: mol_type = other DNA

SEQ ID NO: 205727 - DNA, 80 bp, synthetic construct; identical to SEQ ID NO: 20997
  source 1..80: mol_type = other DNA

SEQ ID NO: 205728 - DNA, 80 bp, synthetic construct; identical to SEQ ID NO: 20998
  source 1..80: mol_type = other DNA

SEQ ID NO: 205729 - DNA, 80 bp, synthetic construct; identical to SEQ ID NO: 20999
  source 1..80: mol_type = other DNA

SEQ ID NO: 205730 - DNA, 80 bp, synthetic construct; identical to SEQ ID NO: 21000
  source 1..80: mol_type = other DNA

SEQ ID NO: 205731 - DNA, 80 bp, synthetic construct; identical to SEQ ID NO: 21001
  source 1..80: mol_type = other DNA

SEQ ID NO: 205732 - DNA, 80 bp, synthetic construct; identical to SEQ ID NO: 21002
  source 1..80: mol_type = other DNA

SEQ ID NO: 205733 - DNA, 80 bp, synthetic construct; identical to SEQ ID NO: 21003
  source 1..80: mol_type = other DNA

SEQ ID NO: 205734 - DNA, 80 bp, synthetic construct; identical to SEQ ID NO: 21004
  source 1..80: mol_type = other DNA

SEQ ID NO: 205735 - DNA, 80 bp, synthetic construct; identical to SEQ ID NO: 21005
  source 1..80: mol_type = other DNA

SEQ ID NO: 205736 - DNA, 80 bp, synthetic construct; identical to SEQ ID NO: 21006
  source 1..80: mol_type = other DNA

SEQ ID NO: 205737 - DNA, 80 bp, synthetic construct; identical to SEQ ID NO: 21007
  source 1..80: mol_type = other DNA

SEQ ID NO: 205738 - DNA, 80 bp, synthetic construct; identical to SEQ ID NO: 21008
  source 1..80: mol_type = other DNA

SEQ ID NO: 205739 - DNA, 80 bp, synthetic construct; identical to SEQ ID NO: 21009
  source 1..80: mol_type = other DNA

SEQ ID NO: 205740 - DNA, 80 bp, synthetic construct; identical to SEQ ID NO: 21010
  source 1..80: mol_type = other DNA

SEQ ID NO: 205741 - DNA, 80 bp, synthetic construct; identical to SEQ ID NO: 21011
  source 1..80: mol_type = other DNA

SEQ ID NO: 205742 - DNA, 80 bp, synthetic construct; identical to SEQ ID NO: 21012
  source 1..80: mol_type = other DNA

SEQ ID NO: 205743 - DNA, 80 bp, synthetic construct; identical to SEQ ID NO: 21013
  source 1..80: mol_type = other DNA

SEQ ID NO: 205744 - DNA, 80 bp, synthetic construct; identical to SEQ ID NO: 21014
  source 1..80: mol_type = other DNA

SEQ ID NO: 205745 - DNA, 80 bp, synthetic construct; identical to SEQ ID NO: 21015
  source 1..80: mol_type = other DNA

SEQ ID NO: 205746 - DNA, 80 bp, synthetic construct; identical to SEQ ID NO: 21016
  source 1..80: mol_type = other DNA

SEQ ID NO: 205747 - DNA, 80 bp, synthetic construct; identical to SEQ ID NO: 21017
  source 1..80: mol_type = other DNA

SEQ ID NO: 205748 - DNA, 80 bp, synthetic construct; identical to SEQ ID NO: 21018
  source 1..80: mol_type = other DNA

SEQ ID NO: 205749 - DNA, 80 bp, synthetic construct; identical to SEQ ID NO: 21019
  source 1..80: mol_type = other DNA

SEQ ID NO: 205750 - DNA, 80 bp, synthetic construct; identical to SEQ ID NO: 21020
  source 1..80: mol_type = other DNA

SEQ ID NO: 205751 - DNA, 80 bp, synthetic construct; identical to SEQ ID NO: 21021
  source 1..80: mol_type = other DNA

SEQ ID NO: 205752 - DNA, 80 bp, synthetic construct; identical to SEQ ID NO: 21022
  source 1..80: mol_type = other DNA

SEQ ID NO: 205753 - DNA, 80 bp, synthetic construct; identical to SEQ ID NO: 21023
  source 1..80: mol_type = other DNA

SEQ ID NO: 205754 - DNA, 80 bp, synthetic construct; identical to SEQ ID NO: 21024
  source 1..80: mol_type = other DNA

SEQ ID NO: 205755 - DNA, 80 bp, synthetic construct; identical to SEQ ID NO: 21025
  source 1..80: mol_type = other DNA

SEQ ID NO: 205756 - DNA, 80 bp, synthetic construct; identical to SEQ ID NO: 21026
  source 1..80: mol_type = other DNA

SEQ ID NO: 205757 - DNA, 80 bp, synthetic construct; identical to SEQ ID NO: 21027
  source 1..80: mol_type = other DNA

SEQ ID NO: 205758 - DNA, 80 bp, synthetic construct; identical to SEQ ID NO: 21028
  source 1..80: mol_type = other DNA

SEQ ID NO: 205759 - DNA, 80 bp, synthetic construct; identical to SEQ ID NO: 21029
  source 1..80: mol_type = other DNA

SEQ ID NO: 205760 - DNA, 80 bp, synthetic construct; identical to SEQ ID NO: 21030
  source 1..80: mol_type = other DNA

SEQ ID NO: 205761 - DNA, 80 bp, synthetic construct; identical to SEQ ID NO: 21031
  source 1..80: mol_type = other DNA

SEQ ID NO: 205762 - DNA, 80 bp, synthetic construct; identical to SEQ ID NO: 21032
  source 1..80: mol_type = other DNA

SEQ ID NO: 205763 - DNA, 80 bp, synthetic construct; identical to SEQ ID NO: 21033
  source 1..80: mol_type = other DNA

SEQ ID NO: 205764 - DNA, 80 bp, synthetic construct; identical to SEQ ID NO: 21034
  source 1..80: mol_type = other DNA

SEQ ID NO: 205765 - DNA, 80 bp, synthetic construct; identical to SEQ ID NO: 21035
  source 1..80: mol_type = other DNA

SEQ ID NO: 205766 - DNA, 80 bp, synthetic construct; identical to SEQ ID NO: 21036
  source 1..80: mol_type = other DNA

SEQ ID NO: 205767 - DNA, 80 bp, synthetic construct; identical to SEQ ID NO: 21037
  source 1..80: mol_type = other DNA

SEQ ID NO: 205768 - DNA, 80 bp, synthetic construct; identical to SEQ ID NO: 21038
  source 1..80: mol_type = other DNA

SEQ ID NO: 205769 - DNA, 80 bp, synthetic construct; identical to SEQ ID NO: 21039
  source 1..80: mol_type = other DNA

SEQ ID NO: 205770 - DNA, 80 bp, synthetic construct; identical to SEQ ID NO: 21040
  source 1..80: mol_type = other DNA

SEQ ID NO: 205771 - DNA, 80 bp, synthetic construct; identical to SEQ ID NO: 21041
  source 1..80: mol_type = other DNA

SEQ ID NO: 205772 - DNA, 80 bp, synthetic construct; identical to SEQ ID NO: 21042
  source 1..80: mol_type = other DNA

SEQ ID NO: 205773 - DNA, 80 bp, synthetic construct; identical to SEQ ID NO: 21043
  source 1..80: mol_type = other DNA

SEQ ID NO: 205774 - DNA, 80 bp, synthetic construct; identical to SEQ ID NO: 21044
  source 1..80: mol_type = other DNA

SEQ ID NO: 205775 - DNA, 80 bp, synthetic construct; identical to SEQ ID NO: 21045
  source 1..80: mol_type = other DNA

SEQ ID NO: 205776 - DNA, 80 bp, synthetic construct; identical to SEQ ID NO: 21046
  source 1..80: mol_type = other DNA

SEQ ID NO: 205777 - DNA, 80 bp, synthetic construct; identical to SEQ ID NO: 21047
  source 1..80: mol_type = other DNA

SEQ ID NO: 205778 - DNA, 80 bp, synthetic construct; identical to SEQ ID NO: 21048
  source 1..80: mol_type = other DNA

SEQ ID NO: 205779 - DNA, 80 bp, synthetic construct; identical to SEQ ID NO: 21049
  source 1..80: mol_type = other DNA

SEQ ID NO: 205780 - DNA, 80 bp, synthetic construct; identical to SEQ ID NO: 21050
  source 1..80: mol_type = other DNA

SEQ ID NO: 205781 - DNA, 80 bp, synthetic construct; identical to SEQ ID NO: 21051
  source 1..80: mol_type = other DNA

SEQ ID NO: 205782 - DNA, 80 bp, synthetic construct; identical to SEQ ID NO: 21052
  source 1..80: mol_type = other DNA

SEQ ID NO: 205783 - DNA, 80 bp, synthetic construct; identical to SEQ ID NO: 21053
  source 1..80: mol_type = other DNA

SEQ ID NO: 205784 - DNA, 80 bp, synthetic construct; identical to SEQ ID NO: 21054
  source 1..80: mol_type = other DNA

SEQ ID NO: 205785 - DNA, 80 bp, synthetic construct; identical to SEQ ID NO: 21055
  source 1..80: mol_type = other DNA

SEQ ID NO: 205786 - DNA, 80 bp, synthetic construct; identical to SEQ ID NO: 21056
  source 1..80: mol_type = other DNA

SEQ ID NO: 205787 - DNA, 80 bp, synthetic construct; identical to SEQ ID NO: 21057
  source 1..80: mol_type = other DNA

SEQ ID NO: 205788 - DNA, 80 bp, synthetic construct; identical to SEQ ID NO: 21058
  source 1..80: mol_type = other DNA

SEQ ID NO: 205789 - DNA, 80 bp, synthetic construct; identical to SEQ ID NO: 21059
  source 1..80: mol_type = other DNA

SEQ ID NO: 205790 - DNA, 80 bp, synthetic construct; identical to SEQ ID NO: 21060
  source 1..80: mol_type = other DNA

SEQ ID NO: 205791 - DNA, 80 bp, synthetic construct; identical to SEQ ID NO: 21061
  source 1..80: mol_type = other DNA

SEQ ID NO: 205792 - DNA, 80 bp, synthetic construct; identical to SEQ ID NO: 21062
  source 1..80: mol_type = other DNA

SEQ ID NO: 205793 - DNA, 80 bp, synthetic construct; identical to SEQ ID NO: 21063
  source 1..80: mol_type = other DNA

SEQ ID NO: 205794 - DNA, 80 bp, synthetic construct; identical to SEQ ID NO: 21064
  source 1..80: mol_type = other DNA

SEQ ID NO: 205795 - DNA, 80 bp, synthetic construct; identical to SEQ ID NO: 21065
  source 1..80: mol_type = other DNA

SEQ ID NO: 205796 - DNA, 80 bp, synthetic construct; identical to SEQ ID NO: 21066
  source 1..80: mol_type = other DNA

SEQ ID NO: 205797 - DNA, 80 bp, synthetic construct; identical to SEQ ID NO: 21067
  source 1..80: mol_type = other DNA

SEQ ID NO: 205798 - DNA, 80 bp, synthetic construct; identical to SEQ ID NO: 21068
  source 1..80: mol_type = other DNA

SEQ ID NO: 205799 - DNA, 80 bp, synthetic construct; identical to SEQ ID NO: 21069
  source 1..80: mol_type = other DNA

SEQ ID NO: 205800 - DNA, 80 bp, synthetic construct; identical to SEQ ID NO: 21070
  source 1..80: mol_type = other DNA

SEQ ID NO: 205801 - DNA, 80 bp, synthetic construct; identical to SEQ ID NO: 21071
  source 1..80: mol_type = other DNA

SEQ ID NO: 205802 - DNA, 80 bp, synthetic construct; identical to SEQ ID NO: 21072
  source 1..80: mol_type = other DNA

SEQ ID NO: 205803 - DNA, 80 bp, synthetic construct; identical to SEQ ID NO: 21073
  source 1..80: mol_type = other DNA

SEQ ID NO: 205804 - DNA, 80 bp, synthetic construct; identical to SEQ ID NO: 21074
  source 1..80: mol_type = other DNA

SEQ ID NO: 205805 - DNA, 80 bp, synthetic construct; identical to SEQ ID NO: 21075
  source 1..80: mol_type = other DNA

SEQ ID NO: 205806 - DNA, 80 bp, synthetic construct; identical to SEQ ID NO: 21076
  source 1..80: mol_type = other DNA

SEQ ID NO: 205807 - DNA, 80 bp, synthetic construct; identical to SEQ ID NO: 21077
  source 1..80: mol_type = other DNA

SEQ ID NO: 205808 - DNA, 80 bp, synthetic construct; identical to SEQ ID NO: 21078
  source 1..80: mol_type = other DNA

SEQ ID NO: 205809 - DNA, 80 bp, synthetic construct; identical to SEQ ID NO: 21079
  source 1..80: mol_type = other DNA

SEQ ID NO: 205810 - DNA, 80 bp, synthetic construct; identical to SEQ ID NO: 21080
  source 1..80: mol_type = other DNA

SEQ ID NO: 205811 - DNA, 80 bp, synthetic construct; identical to SEQ ID NO: 21081
  source 1..80: mol_type = other DNA

SEQ ID NO: 205812 - DNA, 80 bp, synthetic construct; identical to SEQ ID NO: 21082
  source 1..80: mol_type = other DNA

SEQ ID NO: 205813 - DNA, 80 bp, synthetic construct; identical to SEQ ID NO: 21083
  source 1..80: mol_type = other DNA

SEQ ID NO: 205814 - DNA, 80 bp, synthetic construct; identical to SEQ ID NO: 21084
  source 1..80: mol_type = other DNA

SEQ ID NO: 205815 - DNA, 80 bp, synthetic construct; identical to SEQ ID NO: 21085
  source 1..80: mol_type = other DNA

SEQ ID NO: 205816 - DNA, 80 bp, synthetic construct; identical to SEQ ID NO: 21086
  source 1..80: mol_type = other DNA

SEQ ID NO: 205817 - DNA, 80 bp, synthetic construct; identical to SEQ ID NO: 21087
  source 1..80: mol_type = other DNA

SEQ ID NO: 205818 - DNA, 80 bp, synthetic construct; identical to SEQ ID NO: 21088
  source 1..80: mol_type = other DNA

SEQ ID NO: 205819 - DNA, 80 bp, synthetic construct; identical to SEQ ID NO: 21089
  source 1..80: mol_type = other DNA

SEQ ID NO: 205820 - DNA, 80 bp, synthetic construct; identical to SEQ ID NO: 21090
  source 1..80: mol_type = other DNA

SEQ ID NO: 205821 - DNA, 80 bp, synthetic construct; identical to SEQ ID NO: 21091
  source 1..80: mol_type = other DNA

SEQ ID NO: 205822 - DNA, 80 bp, synthetic construct; identical to SEQ ID NO: 21092
  source 1..80: mol_type = other DNA

SEQ ID NO: 205823 - DNA, 80 bp, synthetic construct; identical to SEQ ID NO: 21093
  source 1..80: mol_type = other DNA

SEQ ID NO: 205824 - DNA, 80 bp, synthetic construct; identical to SEQ ID NO: 21094
  source 1..80: mol_type = other DNA

SEQ ID NO: 205825 - DNA, 80 bp, synthetic construct; identical to SEQ ID NO: 21095
  source 1..80: mol_type = other DNA

SEQ ID NO: 205826 - DNA, 80 bp, synthetic construct; identical to SEQ ID NO: 21096
  source 1..80: mol_type = other DNA

SEQ ID NO: 205827 - DNA, 80 bp, synthetic construct; identical to SEQ ID NO: 21097
  source 1..80: mol_type = other DNA

SEQ ID NO: 205828 - DNA, 80 bp, synthetic construct; identical to SEQ ID NO: 21098
  source 1..80: mol_type = other DNA

SEQ ID NO: 205829 - DNA, 80 bp, synthetic construct; identical to SEQ ID NO: 21099
  source 1..80: mol_type = other DNA

SEQ ID NO: 205830 - DNA, 80 bp, synthetic construct; identical to SEQ ID NO: 21100
  source 1..80: mol_type = other DNA

SEQ ID NO: 205831 - DNA, 80 bp, synthetic construct; identical to SEQ ID NO: 21101
  source 1..80: mol_type = other DNA

SEQ ID NO: 205832 - DNA, 80 bp, synthetic construct; identical to SEQ ID NO: 21102
  source 1..80: mol_type = other DNA

SEQ ID NO: 205833 - DNA, 80 bp, synthetic construct; identical to SEQ ID NO: 21103
  source 1..80: mol_type = other DNA

SEQ ID NO: 205834 - DNA, 80 bp, synthetic construct; identical to SEQ ID NO: 21104
  source 1..80: mol_type = other DNA

SEQ ID NO: 205835 - DNA, 80 bp, synthetic construct; identical to SEQ ID NO: 21105
  source 1..80: mol_type = other DNA

SEQ ID NO: 205836 - DNA, 80 bp, synthetic construct; identical to SEQ ID NO: 21106
  source 1..80: mol_type = other DNA

SEQ ID NO: 205837 - DNA, 80 bp, synthetic construct; identical to SEQ ID NO: 21107
  source 1..80: mol_type = other DNA

SEQ ID NO: 205838 - DNA, 80 bp, synthetic construct; identical to SEQ ID NO: 21108
  source 1..80: mol_type = other DNA

SEQ ID NO: 205839 - DNA, 80 bp, synthetic construct; identical to SEQ ID NO: 21109
  source 1..80: mol_type = other DNA

SEQ ID NO: 205840 - DNA, 80 bp, synthetic construct; identical to SEQ ID NO: 21110
  source 1..80: mol_type = other DNA

SEQ ID NO: 205841 - DNA, 80 bp, synthetic construct; identical to SEQ ID NO: 21111
  source 1..80: mol_type = other DNA

SEQ ID NO: 205842 - DNA, 80 bp, synthetic construct; identical to SEQ ID NO: 21112
  source 1..80: mol_type = other DNA

SEQ ID NO: 205843 - DNA, 80 bp, synthetic construct; identical to SEQ ID NO: 21113
  source 1..80: mol_type = other DNA

SEQ ID NO: 205844 - DNA, 80 bp, synthetic construct; identical to SEQ ID NO: 21114
  source 1..80: mol_type = other DNA

SEQ ID NO: 205845 - DNA, 80 bp, synthetic construct; identical to SEQ ID NO: 21115
  source 1..80: mol_type = other DNA

SEQ ID NO: 205846 - DNA, 80 bp, synthetic construct; identical to SEQ ID NO: 21116
  source 1..80: mol_type = other DNA

SEQ ID NO: 205847 - DNA, 80 bp, synthetic construct; identical to SEQ ID NO: 21117
  source 1..80: mol_type = other DNA

SEQ ID NO: 205848 - DNA, 80 bp, synthetic construct; identical to SEQ ID NO: 21118
  source 1..80: mol_type = other DNA

SEQ ID NO: 205849 - DNA, 80 bp, synthetic construct; identical to SEQ ID NO: 21119
  source 1..80: mol_type = other DNA

SEQ ID NO: 205850 - DNA, 80 bp, synthetic construct; identical to SEQ ID NO: 21120
  source 1..80: mol_type = other DNA

SEQ ID NO: 205851 - DNA, 80 bp, synthetic construct; identical to SEQ ID NO: 21121
  source 1..80: mol_type = other DNA

SEQ ID NO: 205852 - DNA, 80 bp, synthetic construct; identical to SEQ ID NO: 21122
  source 1..80: mol_type = other DNA

SEQ ID NO: 205853 - DNA, 80 bp, synthetic construct; identical to SEQ ID NO: 21123
  source 1..80: mol_type = other DNA

SEQ ID NO: 205854 - DNA, 80 bp, synthetic construct; identical to SEQ ID NO: 21124
  source 1..80: mol_type = other DNA

SEQ ID NO: 205855 - DNA, 80 bp, synthetic construct; identical to SEQ ID NO: 21125
  source 1..80: mol_type = other DNA

SEQ ID NO: 205856 - DNA, 80 bp, synthetic construct; identical to SEQ ID NO: 21126
  source 1..80: mol_type = other DNA

SEQ ID NO: 205857 - DNA, 80 bp, synthetic construct; identical to SEQ ID NO: 21127
  source 1..80: mol_type = other DNA

SEQ ID NO: 205858 - DNA, 80 bp, synthetic construct; identical to SEQ ID NO: 21128
  source 1..80: mol_type = other DNA

SEQ ID NO: 205859 - DNA, 80 bp, synthetic construct; identical to SEQ ID NO: 21129
  source 1..80: mol_type = other DNA

SEQ ID NO: 205860 - DNA, 80 bp, synthetic construct; identical to SEQ ID NO: 21130
  source 1..80: mol_type = other DNA

SEQ ID NO: 205861 - DNA, 80 bp, synthetic construct; identical to SEQ ID NO: 21131
  source 1..80: mol_type = other DNA

SEQ ID NO: 205862 - DNA, 80 bp, synthetic construct; identical to SEQ ID NO: 21132
  source 1..80: mol_type = other DNA

SEQ ID NO: 205863 - DNA, 80 bp, synthetic construct; identical to SEQ ID NO: 21133
  source 1..80: mol_type = other DNA

SEQ ID NO: 205864 - DNA, 80 bp, synthetic construct; identical to SEQ ID NO: 21134
  source 1..80: mol_type = other DNA

SEQ ID NO: 205865 - DNA, 80 bp, synthetic construct; identical to SEQ ID NO: 21135
  source 1..80: mol_type = other DNA

SEQ ID NO: 205866 - DNA, 80 bp, synthetic construct; identical to SEQ ID NO: 21136
  source 1..80: mol_type = other DNA

SEQ ID NO: 205867 - DNA, 80 bp, synthetic construct; identical to SEQ ID NO: 21137
  source 1..80: mol_type = other DNA

SEQ ID NO: 205868 - DNA, 80 bp, synthetic construct; identical to SEQ ID NO: 21138
  source 1..80: mol_type = other DNA

SEQ ID NO: 205869 - DNA, 80 bp, synthetic construct; identical to SEQ ID NO: 21139
  source 1..80: mol_type = other DNA

SEQ ID NO: 205870 - DNA, 80 bp, synthetic construct; identical to SEQ ID NO: 21140
  source 1..80: mol_type = other DNA

SEQ ID NO: 205871 - DNA, 80 bp, synthetic construct; identical to SEQ ID NO: 21141
  source 1..80: mol_type = other DNA

SEQ ID NO: 205872 - DNA, 80 bp, synthetic construct; identical to SEQ ID NO: 21142
  source 1..80: mol_type = other DNA

SEQ ID NO: 205873 - DNA, 80 bp, synthetic construct; identical to SEQ ID NO: 21143
  source 1..80: mol_type = other DNA

SEQ ID NO: 205874 - DNA, 80 bp, synthetic construct; identical to SEQ ID NO: 21144
  source 1..80: mol_type = other DNA

SEQ ID NO: 205875 - DNA, 80 bp, synthetic construct; identical to SEQ ID NO: 21145
  source 1..80: mol_type = other DNA

SEQ ID NO: 205876 - DNA, 80 bp, synthetic construct; identical to SEQ ID NO: 21146
  source 1..80: mol_type = other DNA

SEQ ID NO: 205877 - DNA, 80 bp, synthetic construct; identical to SEQ ID NO: 21147
  source 1..80: mol_type = other DNA

SEQ ID NO: 205878 - DNA, 80 bp, synthetic construct; identical to SEQ ID NO: 21148
  source 1..80: mol_type = other DNA

SEQ ID NO: 205879 - DNA, 80 bp, synthetic construct; identical to SEQ ID NO: 21149
  source 1..80: mol_type = other DNA

SEQ ID NO: 205880 - DNA, 80 bp, synthetic construct; identical to SEQ ID NO: 21150
  source 1..80: mol_type = other DNA

SEQ ID NO: 205881 - DNA, 80 bp, synthetic construct; identical to SEQ ID NO: 21151
  source 1..80: mol_type = other DNA

SEQ ID NO: 205882 - DNA, 80 bp, synthetic construct; identical to SEQ ID NO: 21152
  source 1..80: mol_type = other DNA

SEQ ID NO: 205883 - DNA, 80 bp, synthetic construct; identical to SEQ ID NO: 21153
  source 1..80: mol_type = other DNA

SEQ ID NO: 205884 - DNA, 80 bp, synthetic construct; identical to SEQ ID NO: 21154
  source 1..80: mol_type = other DNA

SEQ ID NO: 205885 - DNA, 80 bp, synthetic construct; identical to SEQ ID NO: 21155
  source 1..80: mol_type = other DNA

SEQ ID NO: 205886 - DNA, 80 bp, synthetic construct; identical to SEQ ID NO: 21156
  source 1..80: mol_type = other DNA

SEQ ID NO: 205887 - DNA, 80 bp, synthetic construct; identical to SEQ ID NO: 21157
  source 1..80: mol_type = other DNA

SEQ ID NO: 205888 - DNA, 80 bp, synthetic construct; identical to SEQ ID NO: 21158
  source 1..80: mol_type = other DNA

SEQ ID NO: 205889 - DNA, 80 bp, synthetic construct; identical to SEQ ID NO: 21159
  source 1..80: mol_type = other DNA

SEQ ID NO: 205890 - DNA, 80 bp, synthetic construct; identical to SEQ ID NO: 21160
  source 1..80: mol_type = other DNA

SEQ ID NO: 205891 - DNA, 80 bp, synthetic construct; identical to SEQ ID NO: 21161
  source 1..80: mol_type = other DNA

SEQ ID NO: 205892 - DNA, 80 bp, synthetic construct; identical to SEQ ID NO: 21162
  source 1..80: mol_type = other DNA

SEQ ID NO: 205893 - DNA, 80 bp, synthetic construct; identical to SEQ ID NO: 21163
  source 1..80: mol_type = other DNA

SEQ ID NO: 205894 - DNA, 80 bp, synthetic construct; identical to SEQ ID NO: 21164
  source 1..80: mol_type = other DNA

SEQ ID NO: 205895 - DNA, 80 bp, synthetic construct; identical to SEQ ID NO: 21165
  source 1..80: mol_type = other DNA

SEQ ID NO: 205896 - DNA, 80 bp, synthetic construct; identical to SEQ ID NO: 21166
  source 1..80: mol_type = other DNA

SEQ ID NO: 205897 - DNA, 80 bp, synthetic construct; identical to SEQ ID NO: 21167
  source 1..80: mol_type = other DNA

SEQ ID NO: 205898 - DNA, 80 bp, synthetic construct; identical to SEQ ID NO: 21168
  source 1..80: mol_type = other DNA

SEQ ID NO: 205899 - DNA, 80 bp, synthetic construct; identical to SEQ ID NO: 21169
  source 1..80: mol_type = other DNA

SEQ ID NO: 205900 - DNA, 80 bp, synthetic construct; identical to SEQ ID NO: 21170
  source 1..80: mol_type = other DNA

SEQ ID NO: 205901 - DNA, 80 bp, synthetic construct; identical to SEQ ID NO: 21171
  source 1..80: mol_type = other DNA

SEQ ID NO: 205902 - DNA, 80 bp, synthetic construct; identical to SEQ ID NO: 21172
  source 1..80: mol_type = other DNA

SEQ ID NO: 205903 - DNA, 80 bp, synthetic construct; identical to SEQ ID NO: 21173
  source 1..80: mol_type = other DNA

SEQ ID NO: 205904 - DNA, 80 bp, synthetic construct; identical to SEQ ID NO: 21174
  source 1..80: mol_type = other DNA

SEQ ID NO: 205905 - DNA, 80 bp, synthetic construct; identical to SEQ ID NO: 21175
  source 1..80: mol_type = other DNA

SEQ ID NO: 205906 - DNA, 80 bp, synthetic construct; identical to SEQ ID NO: 21176
  source 1..80: mol_type = other DNA

SEQ ID NO: 205907 - DNA, 80 bp, synthetic construct; identical to SEQ ID NO: 21177
  source 1..80: mol_type = other DNA

SEQ ID NO: 205908 - DNA, 80 bp, synthetic construct; identical to SEQ ID NO: 21178
  source 1..80: mol_type = other DNA

SEQ ID NO: 205909 - DNA, 80 bp, synthetic construct; identical to SEQ ID NO: 21179
  source 1..80: mol_type = other DNA

SEQ ID NO: 205910 - DNA, 80 bp, synthetic construct; identical to SEQ ID NO: 21180
  source 1..80: mol_type = other DNA

SEQ ID NO: 205911 - DNA, 80 bp, synthetic construct; identical to SEQ ID NO: 21181
  source 1..80: mol_type = other DNA

SEQ ID NO: 205912 - DNA, 80 bp, synthetic construct; identical to SEQ ID NO: 21182
  source 1..80: mol_type = other DNA

SEQ ID NO: 205913 - DNA, 80 bp, synthetic construct; identical to SEQ ID NO: 21183
  source 1..80: mol_type = other DNA

SEQ ID NO: 205914 - DNA, 80 bp, synthetic construct; identical to SEQ ID NO: 21184
  source 1..80: mol_type = other DNA

SEQ ID NO: 205915 - DNA, 80 bp, synthetic construct; identical to SEQ ID NO: 21185
  source 1..80: mol_type = other DNA

SEQ ID NO: 205916 - DNA, 80 bp, synthetic construct; identical to SEQ ID NO: 21186
  source 1..80: mol_type = other DNA

SEQ ID NO: 205917 - DNA, 80 bp, synthetic construct; identical to SEQ ID NO: 21187
  source 1..80: mol_type = other DNA

SEQ ID NO: 205918 - DNA, 80 bp, synthetic construct; identical to SEQ ID NO: 21188
  source 1..80: mol_type = other DNA

SEQ ID NO: 205919 - DNA, 80 bp, synthetic construct; identical to SEQ ID NO: 21189
  source 1..80: mol_type = other DNA

SEQ ID NO: 205920 - DNA, 80 bp, synthetic construct; identical to SEQ ID NO: 21190
  source 1..80: mol_type = other DNA

SEQ ID NO: 205921 - DNA, 80 bp, synthetic construct; identical to SEQ ID NO: 21191
  source 1..80: mol_type = other DNA

SEQ ID NO: 205922 - DNA, 80 bp, synthetic construct; identical to SEQ ID NO: 21192
  source 1..80: mol_type = other DNA

SEQ ID NO: 205923 - DNA, 80 bp, synthetic construct; identical to SEQ ID NO: 21193
  source 1..80: mol_type = other DNA

SEQ ID NO: 205924 - DNA, 80 bp, synthetic construct; identical to SEQ ID NO: 21194
  source 1..80: mol_type = other DNA

SEQ ID NO: 205925 - DNA, 80 bp, synthetic construct; identical to SEQ ID NO: 21195
  source 1..80: mol_type = other DNA

SEQ ID NO: 205926 - DNA, 80 bp, synthetic construct; identical to SEQ ID NO: 21196
  source 1..80: mol_type = other DNA

SEQ ID NO: 205927 - DNA, 80 bp, synthetic construct; identical to SEQ ID NO: 21197
  source 1..80: mol_type = other DNA

SEQ ID NO: 205928 - DNA, 80 bp, synthetic construct; identical to SEQ ID NO: 21198
  source 1..80: mol_type = other DNA

SEQ ID NO: 205929 - DNA, 80 bp, synthetic construct; identical to SEQ ID NO: 21199
  source 1..80: mol_type = other DNA

SEQ ID NO: 205930 - DNA, 80 bp, synthetic construct; identical to SEQ ID NO: 21200
  source 1..80: mol_type = other DNA

SEQ ID NO: 205931 - DNA, 80 bp, synthetic construct; identical to SEQ ID NO: 21201
  source 1..80: mol_type = other DNA

SEQ ID NO: 205932 - DNA, 80 bp, synthetic construct; identical to SEQ ID NO: 21202
  source 1..80: mol_type = other DNA

SEQ ID NO: 205933 - DNA, 80 bp, synthetic construct; identical to SEQ ID NO: 21203
  source 1..80: mol_type = other DNA

SEQ ID NO: 205934 - DNA, 80 bp, synthetic construct; identical to SEQ ID NO: 21204
  source 1..80: mol_type = other DNA

SEQ ID NO: 205935 - DNA, 80 bp, synthetic construct; identical to SEQ ID NO: 21205
  source 1..80: mol_type = other DNA

SEQ ID NO: 205936 - DNA, 80 bp, synthetic construct; identical to SEQ ID NO: 21206
  source 1..80: mol_type = other DNA

SEQ ID NO: 205937 - DNA, 80 bp, synthetic construct; identical to SEQ ID NO: 21207
  source 1..80: mol_type = other DNA

SEQ ID NO: 205938 - DNA, 80 bp, synthetic construct; identical to SEQ ID NO: 21208
  source 1..80: mol_type = other DNA

SEQ ID NO: 205939 - DNA, 80 bp, synthetic construct; identical to SEQ ID NO: 21209
  source 1..80: mol_type = other DNA

SEQ ID NO: 205940 - DNA, 80 bp, synthetic construct; identical to SEQ ID NO: 21210
  source 1..80: mol_type = other DNA

SEQ ID NO: 205941 - DNA, 80 bp, synthetic construct; identical to SEQ ID NO: 21211
  source 1..80: mol_type = other DNA

SEQ ID NO: 205942 - DNA, 80 bp, synthetic construct; identical to SEQ ID NO: 21212
  source 1..80: mol_type = other DNA

SEQ ID NO: 205943 - DNA, 80 bp, synthetic construct; identical to SEQ ID NO: 21213
  source 1..80: mol_type = other DNA

SEQ ID NO: 205944 - DNA, 80 bp, synthetic construct; identical to SEQ ID NO: 21214
  source 1..80: mol_type = other DNA

SEQ ID NO: 205945 - DNA, 80 bp, synthetic construct; identical to SEQ ID NO: 21215
  source 1..80: mol_type = other DNA

SEQ ID NO: 205946 - DNA, 80 bp, synthetic construct; identical to SEQ ID NO: 21216
  source 1..80: mol_type = other DNA

SEQ ID NO: 205947 - DNA, 80 bp, synthetic construct; identical to SEQ ID NO: 21217
  source 1..80: mol_type = other DNA

SEQ ID NO: 205948 - DNA, 80 bp, synthetic construct; identical to SEQ ID NO: 21218
  source 1..80: mol_type = other DNA

SEQ ID NO: 205949 - DNA, 80 bp, synthetic construct; identical to SEQ ID NO: 21219
  source 1..80: mol_type = other DNA

SEQ ID NO: 205950 - DNA, 80 bp, synthetic construct; identical to SEQ ID NO: 21220
  source 1..80: mol_type = other DNA

SEQ ID NO: 205951 - DNA, 80 bp, synthetic construct; identical to SEQ ID NO: 21221
  source 1..80: mol_type = other DNA

SEQ ID NO: 205952 - DNA, 80 bp, synthetic construct; identical to SEQ ID NO: 21222
  source 1..80: mol_type = other DNA

SEQ ID NO: 205953 - DNA, 80 bp, synthetic construct; identical to SEQ ID NO: 21223
  source 1..80: mol_type = other DNA

SEQ ID NO: 205954 - DNA, 80 bp, synthetic construct; identical to SEQ ID NO: 21224
  source 1..80: mol_type = other DNA

SEQ ID NO: 205955 - DNA, 80 bp, synthetic construct; identical to SEQ ID NO: 21225
  source 1..80: mol_type = other DNA

SEQ ID NO: 205956 - DNA, 80 bp, synthetic construct; identical to SEQ ID NO: 21226
  source 1..80: mol_type = other DNA

SEQ ID NO: 205957 - DNA, 80 bp, synthetic construct; identical to SEQ ID NO: 21227
  source 1..80: mol_type = other DNA

SEQ ID NO: 205958 - DNA, 80 bp, synthetic construct; identical to SEQ ID NO: 21228
  source 1..80: mol_type = other DNA

SEQ ID NO: 205959 - DNA, 80 bp, synthetic construct; identical to SEQ ID NO: 21229
  source 1..80: mol_type = other DNA

SEQ ID NO: 205960 - DNA, 80 bp, synthetic construct; identical to SEQ ID NO: 21230
  source 1..80: mol_type = other DNA

SEQ ID NO: 205961 - DNA, 80 bp, synthetic construct; identical to SEQ ID NO: 21231
  source 1..80: mol_type = other DNA

SEQ ID NO: 205962 - DNA, 80 bp, synthetic construct; identical to SEQ ID NO: 21232
  source 1..80: mol_type = other DNA

SEQ ID NO: 205963 - DNA, 80 bp, synthetic construct; identical to SEQ ID NO: 21233
  source 1..80: mol_type = other DNA

SEQ ID NO: 205964 - DNA, 80 bp, synthetic construct; identical to SEQ ID NO: 21234
  source 1..80: mol_type = other DNA

SEQ ID NO: 205965 - DNA, 80 bp, synthetic construct; identical to SEQ ID NO: 21235
  source 1..80: mol_type = other DNA

SEQ ID NO: 205966 - DNA, 80 bp, synthetic construct; identical to SEQ ID NO: 21236
  source 1..80: mol_type = other DNA

SEQ ID NO: 205967 - DNA, 80 bp, synthetic construct; identical to SEQ ID NO: 21237
  source 1..80: mol_type = other DNA

SEQ ID NO: 205968 - DNA, 80 bp, synthetic construct; identical to SEQ ID NO: 21238
  source 1..80: mol_type = other DNA

SEQ ID NO: 205969 - DNA, 80 bp, synthetic construct; identical to SEQ ID NO: 21239
  source 1..80: mol_type = other DNA

SEQ ID NO: 205970 - DNA, 80 bp, synthetic construct; identical to SEQ ID NO: 21240
  source 1..80: mol_type = other DNA

SEQ ID NO: 205971 - DNA, 80 bp, synthetic construct; identical to SEQ ID NO: 21241
  source 1..80: mol_type = other DNA

SEQ ID NO: 205972 - DNA, 80 bp, synthetic construct; identical to SEQ ID NO: 21242
  source 1..80: mol_type = other DNA

SEQ ID NO: 205973 - DNA, 80 bp, synthetic construct; identical to SEQ ID NO: 21243
  source 1..80: mol_type = other DNA

SEQ ID NO: 205974 - DNA, 80 bp, synthetic construct; identical to SEQ ID NO: 21244
  source 1..80: mol_type = other DNA

SEQ ID NO: 205975 - DNA, 80 bp, synthetic construct; identical to SEQ ID NO: 21245
  source 1..80: mol_type = other DNA

SEQ ID NO: 205976 - DNA, 80 bp, synthetic construct; identical to SEQ ID NO: 21246
  source 1..80: mol_type = other DNA

SEQ ID NO: 205977 - DNA, 80 bp, synthetic construct; identical to SEQ ID NO: 21247
  source 1..80: mol_type = other DNA

SEQ ID NO: 205978 - DNA, 80 bp, synthetic construct; identical to SEQ ID NO: 21248
  source 1..80: mol_type = other DNA

SEQ ID NO: 205979 - DNA, 80 bp, synthetic construct; identical to SEQ ID NO: 21249
  source 1..80: mol_type = other DNA

SEQ ID NO: 205980 - DNA, 80 bp, synthetic construct; identical to SEQ ID NO: 21250
  source 1..80: mol_type = other DNA

SEQ ID NO: 205981 - DNA, 80 bp, synthetic construct; identical to SEQ ID NO: 21251
  source 1..80: mol_type = other DNA

SEQ ID NO: 205982 - DNA, 80 bp, synthetic construct; identical to SEQ ID NO: 21252
  source 1..80: mol_type = other DNA

SEQ ID NO: 205983 - DNA, 80 bp, synthetic construct; identical to SEQ ID NO: 21253
  source 1..80: mol_type = other DNA

SEQ ID NO: 205984 - DNA, 80 bp, synthetic construct; identical to SEQ ID NO: 21254
  source 1..80: mol_type = other DNA

SEQ ID NO: 205985 - DNA, 80 bp, synthetic construct; identical to SEQ ID NO: 21255
  source 1..80: mol_type = other DNA

SEQ ID NO: 205986 - DNA, 80 bp, synthetic construct; identical to SEQ ID NO: 21256
  source 1..80: mol_type = other DNA

SEQ ID NO: 205987 - DNA, 80 bp, synthetic construct; identical to SEQ ID NO: 21257
  source 1..80: mol_type = other DNA

SEQ ID NO: 205988 - DNA, 80 bp, synthetic construct; identical to SEQ ID NO: 21258
  source 1..80: mol_type = other DNA

SEQ ID NO: 205989 - DNA, 80 bp, synthetic construct; identical to SEQ ID NO: 21259
  source 1..80: mol_type = other DNA

SEQ ID NO: 205990 - DNA, 80 bp, synthetic construct; identical to SEQ ID NO: 21260
  source 1..80: mol_type = other DNA

SEQ ID NO: 205991 - DNA, 80 bp, synthetic construct; identical to SEQ ID NO: 21261
  source 1..80: mol_type = other DNA

SEQ ID NO: 205992 - DNA, 80 bp, synthetic construct; identical to SEQ ID NO: 21262
  source 1..80: mol_type = other DNA

SEQ ID NO: 205993 - DNA, 80 bp, synthetic construct; identical to SEQ ID NO: 21263
  source 1..80: mol_type = other DNA

SEQ ID NO: 205994 - DNA, 80 bp, synthetic construct; identical to SEQ ID NO: 21264
  source 1..80: mol_type = other DNA

SEQ ID NO: 205995 - DNA, 80 bp, synthetic construct; identical to SEQ ID NO: 21265
  source 1..80: mol_type = other DNA

SEQ ID NO: 205996 - DNA, 80 bp, synthetic construct; identical to SEQ ID NO: 21266
  source 1..80: mol_type = other DNA

SEQ ID NO: 205997 - DNA, 80 bp, synthetic construct; identical to SEQ ID NO: 21267
  source 1..80: mol_type = other DNA

SEQ ID NO: 205998 - DNA, 80 bp, synthetic construct; identical to SEQ ID NO: 21268
  source 1..80: mol_type = other DNA

SEQ ID NO: 205999 - DNA, 80 bp, synthetic construct; identical to SEQ ID NO: 21269
  source 1..80: mol_type = other DNA

SEQ ID NO: 206000 - DNA, 80 bp, synthetic construct; identical to SEQ ID NO: 21270
  source 1..80: mol_type = other DNA

SEQ ID NO: 206001 - DNA, 80 bp, synthetic construct; identical to SEQ ID NO: 21271
  source 1..80: mol_type = other DNA

SEQ ID NO: 206002 - DNA, 80 bp, synthetic construct; identical to SEQ ID NO: 21272
  source 1..80: mol_type = other DNA

SEQ ID NO: 206003 - DNA, 80 bp, synthetic construct; identical to SEQ ID NO: 21273
  source 1..80: mol_type = other DNA

SEQ ID NO: 206004 - DNA, 80 bp, synthetic construct; identical to SEQ ID NO: 21274
  source 1..80: mol_type = other DNA

SEQ ID NO: 206005 - DNA, 80 bp, synthetic construct; identical to SEQ ID NO: 21275
  source 1..80: mol_type = other DNA

SEQ ID NO: 206006 - DNA, 80 bp, synthetic construct; identical to SEQ ID NO: 21276
  source 1..80: mol_type = other DNA

SEQ ID NO: 206007 - DNA, 80 bp, synthetic construct; identical to SEQ ID NO: 21277
  source 1..80: mol_type = other DNA

SEQ ID NO: 206008 - DNA, 80 bp, synthetic construct; identical to SEQ ID NO: 21278
  source 1..80: mol_type = other DNA

SEQ ID NO: 206009 - DNA, 80 bp, synthetic construct; identical to SEQ ID NO: 21279
  source 1..80: mol_type = other DNA

SEQ ID NO: 206010 - DNA, 80 bp, synthetic construct; identical to SEQ ID NO: 21280
  source 1..80: mol_type = other DNA

SEQ ID NO: 206011 - DNA, 80 bp, synthetic construct; identical to SEQ ID NO: 21281
  source 1..80: mol_type = other DNA

SEQ ID NO: 206012 - DNA, 80 bp, synthetic construct; identical to SEQ ID NO: 21282
  source 1..80: mol_type = other DNA

SEQ ID NO: 206013 - DNA, 80 bp, synthetic construct; identical to SEQ ID NO: 21283
  source 1..80: mol_type = other DNA

SEQ ID NO: 206014 - DNA, 80 bp, synthetic construct; identical to SEQ ID NO: 21284
  source 1..80: mol_type = other DNA

SEQ ID NO: 206015 - DNA, 80 bp, synthetic construct; identical to SEQ ID NO: 21285
  source 1..80: mol_type = other DNA

SEQ ID NO: 206016 - DNA, 80 bp, synthetic construct; identical to SEQ ID NO: 21286
  source 1..80: mol_type = other DNA

SEQ ID NO: 206017 - DNA, 80 bp, synthetic construct; identical to SEQ ID NO: 21287
  source 1..80: mol_type = other DNA

SEQ ID NO: 206018 - DNA, 80 bp, synthetic construct; identical to SEQ ID NO: 21288
  source 1..80: mol_type = other DNA

SEQ ID NO: 206019 - DNA, 80 bp, synthetic construct; identical to SEQ ID NO: 21289
  source 1..80: mol_type = other DNA

SEQ ID NO: 206020 - DNA, 80 bp, synthetic construct; identical to SEQ ID NO: 21290
  source 1..80: mol_type = other DNA

SEQ ID NO: 206021 - DNA, 80 bp, synthetic construct; identical to SEQ ID NO: 21291
  source 1..80: mol_type = other DNA

SEQ ID NO: 206022 - DNA, 80 bp, synthetic construct; identical to SEQ ID NO: 21292
  source 1..80: mol_type = other DNA

SEQ ID NO: 206023 - DNA, 80 bp, synthetic construct; identical to SEQ ID NO: 21293
  source 1..80: mol_type = other DNA

SEQ ID NO: 206024 - DNA, 80 bp, synthetic construct; identical to SEQ ID NO: 21294
  source 1..80: mol_type = other DNA

SEQ ID NO: 206025 - DNA, 80 bp, synthetic construct; identical to SEQ ID NO: 21295
  source 1..80: mol_type = other DNA

SEQ ID NO: 206026 - DNA, 80 bp, synthetic construct; identical to SEQ ID NO: 21296
  source 1..80: mol_type = other DNA

SEQ ID NO: 206027 - DNA, 80 bp, synthetic construct; identical to SEQ ID NO: 21297
  source 1..80: mol_type = other DNA

SEQ ID NO: 206028 - DNA, 80 bp, synthetic construct; identical to SEQ ID NO: 21298
  source 1..80: mol_type = other DNA

SEQ ID NO: 206029 - DNA, 80 bp, synthetic construct; identical to SEQ ID NO: 21299
  source 1..80: mol_type = other DNA

SEQ ID NO: 206030 - DNA, 80 bp, synthetic construct; identical to SEQ ID NO: 21300
  source 1..80: mol_type = other DNA

SEQ ID NO: 206031 - DNA, 80 bp, synthetic construct; identical to SEQ ID NO: 21301
  source 1..80: mol_type = other DNA

SEQ ID NO: 206032 - DNA, 80 bp, synthetic construct; identical to SEQ ID NO: 21302
  source 1..80: mol_type = other DNA

SEQ ID NO: 206033 - DNA, 80 bp, synthetic construct; identical to SEQ ID NO: 21303
  source 1..80: mol_type = other DNA

SEQ ID NO: 206034 - DNA, 80 bp, synthetic construct; identical to SEQ ID NO: 21304
  source 1..80: mol_type = other DNA

SEQ ID NO: 206035 - DNA, 80 bp, synthetic construct; identical to SEQ ID NO: 21305
  source 1..80: mol_type = other DNA

SEQ ID NO: 206036 - DNA, 80 bp, synthetic construct; identical to SEQ ID NO: 21306
  source 1..80: mol_type = other DNA

SEQ ID NO: 206037 - DNA, 80 bp, synthetic construct; identical to SEQ ID NO: 21307
  source 1..80: mol_type = other DNA

SEQ ID NO: 206038 - DNA, 80 bp, synthetic construct; identical to SEQ ID NO: 21308
  source 1..80: mol_type = other DNA

SEQ ID NO: 206039 - DNA, 80 bp, synthetic construct; identical to SEQ ID NO: 21309
  source 1..80: mol_type = other DNA

SEQ ID NO: 206040 - DNA, 80 bp, synthetic construct; identical to SEQ ID NO: 21310
  source 1..80: mol_type = other DNA

SEQ ID NO: 206041 - DNA, 80 bp, synthetic construct; identical to SEQ ID NO: 21311
  source 1..80: mol_type = other DNA

SEQ ID NO: 206042 - DNA, 80 bp, synthetic construct; identical to SEQ ID NO: 21312
  source 1..80: mol_type = other DNA

SEQ ID NO: 206043 - DNA, 80 bp, synthetic construct; identical to SEQ ID NO: 21313
  source 1..80: mol_type = other DNA

SEQ ID NO: 206044 - DNA, 80 bp, synthetic construct; identical to SEQ ID NO: 21314
  source 1..80: mol_type = other DNA

SEQ ID NO: 206045 - DNA, 80 bp, synthetic construct; identical to SEQ ID NO: 21315
  source 1..80: mol_type = other DNA

SEQ ID NO: 206046 - DNA, 80 bp, synthetic construct; identical to SEQ ID NO: 21316
  source 1..80: mol_type = other DNA

SEQ ID NO: 206047 - DNA, 80 bp, synthetic construct; identical to SEQ ID NO: 21317
  source 1..80: mol_type = other DNA

SEQ ID NO: 206048 - DNA, 80 bp, synthetic construct; identical to SEQ ID NO: 21318
  source 1..80: mol_type = other DNA

SEQ ID NO: 206049 - DNA, 80 bp, synthetic construct; identical to SEQ ID NO: 21319
  source 1..80: mol_type = other DNA

SEQ ID NO: 206050 - DNA, 80 bp, synthetic construct; identical to SEQ ID NO: 21320
  source 1..80: mol_type = other DNA

SEQ ID NO: 206051 - DNA, 80 bp, synthetic construct; identical to SEQ ID NO: 21321
  source 1..80: mol_type = other DNA

SEQ ID NO: 206052 - DNA, 80 bp, synthetic construct; identical to SEQ ID NO: 21322
  source 1..80: mol_type = other DNA

SEQ ID NO: 206053 - DNA, 80 bp, synthetic construct; identical to SEQ ID NO: 21323
  source 1..80: mol_type = other DNA

SEQ ID NO: 206054 - DNA, 80 bp, synthetic construct; identical to SEQ ID NO: 21324
  source 1..80: mol_type = other DNA

SEQ ID NO: 206055 - DNA, 80 bp, synthetic construct; identical to SEQ ID NO: 21325
  source 1..80: mol_type = other DNA

SEQ ID NO: 206056 - DNA, 80 bp, synthetic construct; identical to SEQ ID NO: 21326
  source 1..80: mol_type = other DNA

SEQ ID NO: 206057 - DNA, 80 bp, synthetic construct; identical to SEQ ID NO: 21327
  source 1..80: mol_type = other DNA

SEQ ID NO: 206058 - DNA, 80 bp, synthetic construct; identical to SEQ ID NO: 21328
  source 1..80: mol_type = other DNA

SEQ ID NO: 206059 - DNA, 80 bp, synthetic construct; identical to SEQ ID NO: 21329
  source 1..80: mol_type = other DNA

SEQ ID NO: 206060 - DNA, 80 bp, synthetic construct; identical to SEQ ID NO: 21330
  source 1..80: mol_type = other DNA

SEQ ID NO: 206061 - DNA, 80 bp, synthetic construct; identical to SEQ ID NO: 21331
  source 1..80: mol_type = other DNA

SEQ ID NO: 206062 - DNA, 80 bp, synthetic construct; identical to SEQ ID NO: 21332
  source 1..80: mol_type = other DNA

SEQ ID NO: 206063 - DNA, 80 bp, synthetic construct; identical to SEQ ID NO: 21333
  source 1..80: mol_type = other DNA

SEQ ID NO: 206064 - DNA, 80 bp, synthetic construct; identical to SEQ ID NO: 21334
  source 1..80: mol_type = other DNA

SEQ ID NO: 206065 - DNA, 80 bp, synthetic construct; identical to SEQ ID NO: 21335
  source 1..80: mol_type = other DNA

SEQ ID NO: 206066 - DNA, 80 bp, synthetic construct; identical to SEQ ID NO: 21336
  source 1..80: mol_type = other DNA

SEQ ID NO: 206067 - DNA, 80 bp, synthetic construct; identical to SEQ ID NO: 21337
  source 1..80: mol_type = other DNA

SEQ ID NO: 206068 - DNA, 80 bp, synthetic construct; identical to SEQ ID NO: 21338
  source 1..80: mol_type = other DNA

SEQ ID NO: 206069 - DNA, 80 bp, synthetic construct; identical to SEQ ID NO: 21339
  source 1..80: mol_type = other DNA

SEQ ID NO: 206070 - DNA, 80 bp, synthetic construct; identical to SEQ ID NO: 21340
  source 1..80: mol_type = other DNA

SEQ ID NO: 206071 - DNA, 80 bp, synthetic construct; identical to SEQ ID NO: 21341
  source 1..80: mol_type = other DNA

SEQ ID NO: 206072 - DNA, 80 bp, synthetic construct; identical to SEQ ID NO: 21342
  source 1..80: mol_type = other DNA

SEQ ID NO: 206073 - DNA, 80 bp, synthetic construct; identical to SEQ ID NO: 21343
  source 1..80: mol_type = other DNA

SEQ ID NO: 206074 - DNA, 80 bp, synthetic construct; identical to SEQ ID NO: 21344
  source 1..80: mol_type = other DNA

SEQ ID NO: 206075 - DNA, 80 bp, synthetic construct; identical to SEQ ID NO: 21345
  source 1..80: mol_type = other DNA

SEQ ID NO: 206076 - DNA, 80 bp, synthetic construct; identical to SEQ ID NO: 21346
  source 1..80: mol_type = other DNA

SEQ ID NO: 206077 - DNA, 80 bp, synthetic construct; identical to SEQ ID NO: 21347
  source 1..80: mol_type = other DNA

SEQ ID NO: 206078 - DNA, 80 bp, synthetic construct; identical to SEQ ID NO: 21348
  source 1..80: mol_type = other DNA

SEQ ID NO: 206079 - DNA, 80 bp, synthetic construct; identical to SEQ ID NO: 21349
  source 1..80: mol_type = other DNA

SEQ ID NO: 206080 - DNA, 80 bp, synthetic construct; identical to SEQ ID NO: 21350
  source 1..80: mol_type = other DNA

SEQ ID NO: 206081 - DNA, 80 bp, synthetic construct; identical to SEQ ID NO: 21351
  source 1..80: mol_type = other DNA

SEQ ID NO: 206082 - DNA, 80 bp, synthetic construct; identical to SEQ ID NO: 21352
  source 1..80: mol_type = other DNA

SEQ ID NO: 206083 - DNA, 80 bp, synthetic construct; identical to SEQ ID NO: 21353
  source 1..80: mol_type = other DNA

SEQ ID NO: 206084 - DNA, 80 bp, synthetic construct; identical to SEQ ID NO: 21354
  source 1..80: mol_type = other DNA

SEQ ID NO: 206085 - DNA, 80 bp, synthetic construct; identical to SEQ ID NO: 21355
  source 1..80: mol_type = other DNA

SEQ ID NO: 206086 - DNA, 80 bp, synthetic construct; identical to SEQ ID NO: 21356
  source 1..80: mol_type = other DNA

SEQ ID NO: 206087 - DNA, 80 bp, synthetic construct; identical to SEQ ID NO: 21357
  source 1..80: mol_type = other DNA

SEQ ID NO: 206088 - DNA, 80 bp, synthetic construct; identical to SEQ ID NO: 21358
  source 1..80: mol_type = other DNA

SEQ ID NO: 206089 - DNA, 80 bp, synthetic construct; identical to SEQ ID NO: 21359
  source 1..80: mol_type = other DNA

SEQ ID NO: 206090 - DNA, 80 bp, synthetic construct; identical to SEQ ID NO: 21360
  source 1..80: mol_type = other DNA

SEQ ID NO: 206091 - DNA, 80 bp, synthetic construct; identical to SEQ ID NO: 21361
  source 1..80: mol_type = other DNA

SEQ ID NO: 206092 - DNA, 80 bp, synthetic construct; identical to SEQ ID NO: 21362
  source 1..80: mol_type = other DNA

SEQ ID NO: 206093 - DNA, 80 bp, synthetic construct; identical to SEQ ID NO: 21363
  source 1..80: mol_type = other DNA

SEQ ID NO: 206094 - DNA, 80 bp, synthetic construct; identical to SEQ ID NO: 21364
  source 1..80: mol_type = other DNA

SEQ ID NO: 206095 - DNA, 80 bp, synthetic construct; identical to SEQ ID NO: 21365
  source 1..80: mol_type = other DNA

SEQ ID NO: 206096 - DNA, 80 bp, synthetic construct; identical to SEQ ID NO: 21366
  source 1..80: mol_type = other DNA

SEQ ID NO: 206097 - DNA, 80 bp, synthetic construct; identical to SEQ ID NO: 21367
  source 1..80: mol_type = other DNA

SEQ ID NO: 206098 - DNA, 80 bp, synthetic construct; identical to SEQ ID NO: 21368
  source 1..80: mol_type = other DNA

SEQ ID NO: 206099 - DNA, 80 bp, synthetic construct; identical to SEQ ID NO: 21369
  source 1..80: mol_type = other DNA

SEQ ID NO: 206100 - DNA, 80 bp, synthetic construct; identical to SEQ ID NO: 21370
  source 1..80: mol_type = other DNA

SEQ ID NO: 206101 - DNA, 80 bp, synthetic construct; identical to SEQ ID NO: 21371
  source 1..80: mol_type = other DNA

SEQ ID NO: 206102 - DNA, 80 bp, synthetic construct; identical to SEQ ID NO: 21372
  source 1..80: mol_type = other DNA

SEQ ID NO: 206103 - DNA, 80 bp, synthetic construct; identical to SEQ ID NO: 21373
  source 1..80: mol_type = other DNA

SEQ ID NO: 206104 - DNA, 80 bp, synthetic construct; identical to SEQ ID NO: 21374
  source 1..80: mol_type = other DNA

SEQ ID NO: 206105 - DNA, 80 bp, synthetic construct; identical to SEQ ID NO: 21375
  source 1..80: mol_type = other DNA

SEQ ID NO: 206106 - DNA, 80 bp, synthetic construct; identical to SEQ ID NO: 21376
  source 1..80: mol_type = other DNA

SEQ ID NO: 206107 - DNA, 80 bp, synthetic construct; identical to SEQ ID NO: 21377
  source 1..80: mol_type = other DNA

SEQ ID NO: 206108 - DNA, 80 bp, synthetic construct; identical to SEQ ID NO: 21378
  source 1..80: mol_type = other DNA

SEQ ID NO: 206109 - DNA, 80 bp, synthetic construct; identical to SEQ ID NO: 21379
  source 1..80: mol_type = other DNA

SEQ ID NO: 206110 - DNA, 80 bp, synthetic construct; identical to SEQ ID NO: 21380
  source 1..80: mol_type = other DNA

SEQ ID NO: 206111 - DNA, 80 bp, synthetic construct; identical to SEQ ID NO: 21381
  source 1..80: mol_type = other DNA

SEQ ID NO: 206112 - DNA, 80 bp, synthetic construct; identical to SEQ ID NO: 21382
  source 1..80: mol_type = other DNA

SEQ ID NO: 206113 - DNA, 80 bp, synthetic construct; identical to SEQ ID NO: 21383
  source 1..80: mol_type = other DNA

SEQ ID NO: 206114 - DNA, 80 bp, synthetic construct; identical to SEQ ID NO: 21384
  source 1..80: mol_type = other DNA

SEQ ID NO: 206115 - DNA, 80 bp, synthetic construct; identical to SEQ ID NO: 21385
  source 1..80: mol_type = other DNA

SEQ ID NO: 206116 - DNA, 80 bp, synthetic construct; identical to SEQ ID NO: 21386
  source 1..80: mol_type = other DNA

SEQ ID NO: 206117 - DNA, 80 bp, synthetic construct; identical to SEQ ID NO: 21387
  source 1..80: mol_type = other DNA

SEQ ID NO: 206118 - DNA, 80 bp, synthetic construct; identical to SEQ ID NO: 21388
  source 1..80: mol_type = other DNA

SEQ ID NO: 206119 - DNA, 80 bp, synthetic construct; identical to SEQ ID NO: 21389
  source 1..80: mol_type = other DNA

SEQ ID NO: 206120 - DNA, 80 bp, synthetic construct; identical to SEQ ID NO: 21390
  source 1..80: mol_type = other DNA

SEQ ID NO: 206121 - DNA, 80 bp, synthetic construct; identical to SEQ ID NO: 21391
  source 1..80: mol_type = other DNA

SEQ ID NO: 206122 - DNA, 80 bp, synthetic construct; identical to SEQ ID NO: 21392
  source 1..80: mol_type = other DNA

SEQ ID NO: 206123 - DNA, 80 bp, synthetic construct; identical to SEQ ID NO: 21393
  source 1..80: mol_type = other DNA

SEQ ID NO: 206124 - DNA, 80 bp, synthetic construct; identical to SEQ ID NO: 21394
  source 1..80: mol_type = other DNA

SEQ ID NO: 206125 - DNA, 80 bp, synthetic construct; identical to SEQ ID NO: 21395
  source 1..80: mol_type = other DNA

SEQ ID NO: 206126 - DNA, 80 bp, synthetic construct; identical to SEQ ID NO: 21396
  source 1..80: mol_type = other DNA

SEQ ID NO: 206127 - DNA, 80 bp, synthetic construct; identical to SEQ ID NO: 21397
  source 1..80: mol_type = other DNA

SEQ ID NO: 206128 - DNA, 80 bp, synthetic construct; identical to SEQ ID NO: 21398
  source 1..80: mol_type = other DNA

SEQ ID NO: 206129 - DNA, 80 bp, synthetic construct; identical to SEQ ID NO: 21399
  source 1..80: mol_type = other DNA

SEQ ID NO: 206130 - DNA, 80 bp, synthetic construct; identical to SEQ ID NO: 21400
  source 1..80: mol_type = other DNA

SEQ ID NO: 206131 - DNA, 80 bp, synthetic construct; identical to SEQ ID NO: 21401
  source 1..80: mol_type = other DNA

SEQ ID NO: 206132 - DNA, 80 bp, synthetic construct; identical to SEQ ID NO: 21402
  source 1..80: mol_type = other DNA

SEQ ID NO: 206133 - DNA, 80 bp, synthetic construct; identical to SEQ ID NO: 21403
  source 1..80: mol_type = other DNA

SEQ ID NO: 206134 - DNA, 80 bp, synthetic construct; identical to SEQ ID NO: 21404
  source 1..80: mol_type = other DNA

SEQ ID NO: 206135 - DNA, 80 bp, synthetic construct; identical to SEQ ID NO: 21405
  source 1..80: mol_type = other DNA

SEQ ID NO: 206136 - DNA, 80 bp, synthetic construct; identical to SEQ ID NO: 21406
  source 1..80: mol_type = other DNA

SEQ ID NO: 206137 - DNA, 80 bp, synthetic construct; identical to SEQ ID NO: 21407
  source 1..80: mol_type = other DNA

SEQ ID NO: 206138 - DNA, 80 bp, synthetic construct; identical to SEQ ID NO: 21408
  source 1..80: mol_type = other DNA

SEQ ID NO: 206139 - DNA, 80 bp, synthetic construct; identical to SEQ ID NO: 21409
  source 1..80: mol_type = other DNA

SEQ ID NO: 206140 - DNA, 80 bp, synthetic construct; identical to SEQ ID NO: 21410
  source 1..80: mol_type = other DNA

SEQ ID NO: 206141 - DNA, 80 bp, synthetic construct; identical to SEQ ID NO: 21411
  source 1..80: mol_type = other DNA

SEQ ID NO: 206142 - DNA, 80 bp, synthetic construct; identical to SEQ ID NO: 21412
  source 1..80: mol_type = other DNA

SEQ ID NO: 206143 - DNA, 80 bp, synthetic construct; identical to SEQ ID NO: 21413
  source 1..80: mol_type = other DNA

SEQ ID NO: 206144 - DNA, 80 bp, synthetic construct; identical to SEQ ID NO: 21414
  source 1..80: mol_type = other DNA

SEQ ID NO: 206145 - DNA, 80 bp, synthetic construct; identical to SEQ ID NO: 21415
  source 1..80: mol_type = other DNA

SEQ ID NO: 206146 - DNA, 80 bp, synthetic construct; identical to SEQ ID NO: 21416
  source 1..80: mol_type = other DNA

SEQ ID NO: 206147 - DNA, 80 bp, synthetic construct; identical to SEQ ID NO: 21417
  source 1..80: mol_type = other DNA

SEQ ID NO: 206148 - DNA, 80 bp, synthetic construct; identical to SEQ ID NO: 21418
  source 1..80: mol_type = other DNA

SEQ ID NO: 206149 - DNA, 80 bp, synthetic construct; identical to SEQ ID NO: 21419
  source 1..80: mol_type = other DNA

SEQ ID NO: 206150 - DNA, 80 bp, synthetic construct; identical to SEQ ID NO: 21420
  source 1..80: mol_type = other DNA

SEQ ID NO: 206151 - DNA, 80 bp, synthetic construct; identical to SEQ ID NO: 21421
  source 1..80: mol_type = other DNA

SEQ ID NO: 206152 - DNA, 80 bp, synthetic construct; identical to SEQ ID NO: 21422
  source 1..80: mol_type = other DNA

SEQ ID NO: 206153 - DNA, 80 bp, synthetic construct; identical to SEQ ID NO: 21423
  source 1..80: mol_type = other DNA

SEQ ID NO: 206154 - DNA, 80 bp, synthetic construct; identical to SEQ ID NO: 21424
  source 1..80: mol_type = other DNA

SEQ ID NO: 206155 - DNA, 80 bp, synthetic construct; identical to SEQ ID NO: 21425
  source 1..80: mol_type = other DNA

SEQ ID NO: 206156 - DNA, 80 bp, synthetic construct; identical to SEQ ID NO: 21426
  source 1..80: mol_type = other DNA

SEQ ID NO: 206157 - DNA, 80 bp, synthetic construct; identical to SEQ ID NO: 21427
  source 1..80: mol_type = other DNA

SEQ ID NO: 206158 - DNA, 80 bp, synthetic construct; identical to SEQ ID NO: 21428
  source 1..80: mol_type = other DNA

SEQ ID NO: 206159 - DNA, 80 bp, synthetic construct; identical to SEQ ID NO: 21429
  source 1..80: mol_type = other DNA

SEQ ID NO: 206160 - DNA, 80 bp, synthetic construct; identical to SEQ ID NO: 21430
  source 1..80: mol_type = other DNA

SEQ ID NO: 206161 - DNA, 80 bp, synthetic construct; identical to SEQ ID NO: 21431
  source 1..80: mol_type = other DNA

SEQ ID NO: 206162 - DNA, 80 bp, synthetic construct; identical to SEQ ID NO: 21432
  source 1..80: mol_type = other DNA

SEQ ID NO: 206163 - DNA, 80 bp, synthetic construct; identical to SEQ ID NO: 21433
  source 1..80: mol_type = other DNA

SEQ ID NO: 206164 - DNA, 80 bp, synthetic construct; identical to SEQ ID NO: 21434
  source 1..80: mol_type = other DNA

SEQ ID NO: 206165 - DNA, 80 bp, synthetic construct; identical to SEQ ID NO: 21435
  source 1..80: mol_type = other DNA

SEQ ID NO: 206166 - DNA, 80 bp, synthetic construct; identical to SEQ ID NO: 21436
  source 1..80: mol_type = other DNA

SEQ ID NO: 206167 - DNA, 80 bp, synthetic construct; identical to SEQ ID NO: 21437
  source 1..80: mol_type = other DNA

SEQ ID NO: 206168 - DNA, 80 bp, synthetic construct; identical to SEQ ID NO: 21438
  source 1..80: mol_type = other DNA

SEQ ID NO: 206169 - DNA, 80 bp, synthetic construct; identical to SEQ ID NO: 21439
  source 1..80: mol_type = other DNA

SEQ ID NO: 206170 - DNA, 80 bp, synthetic construct; identical to SEQ ID NO: 21440
  source 1..80: mol_type = other DNA

SEQ ID NO: 206171 - DNA, 80 bp, synthetic construct; identical to SEQ ID NO: 21441
  source 1..80: mol_type = other DNA

SEQ ID NO: 206172 - DNA, 80 bp, synthetic construct; identical to SEQ ID NO: 21442
  source 1..80: mol_type = other DNA

SEQ ID NO: 206173 - DNA, 80 bp, synthetic construct; identical to SEQ ID NO: 21443
  source 1..80: mol_type = other DNA

SEQ ID NO: 206174 - DNA, 80 bp, synthetic construct; identical to SEQ ID NO: 21444
  source 1..80: mol_type = other DNA

SEQ ID NO: 206175 - DNA, 80 bp, synthetic construct; identical to SEQ ID NO: 21445
  source 1..80: mol_type = other DNA

SEQ ID NO: 206176 - DNA, 80 bp, synthetic construct; identical to SEQ ID NO: 21446
  source 1..80: mol_type = other DNA

SEQ ID NO: 206177 - DNA, 80 bp, synthetic construct; identical to SEQ ID NO: 21447
  source 1..80: mol_type = other DNA

SEQ ID NO: 206178 - DNA, 80 bp, synthetic construct; identical to SEQ ID NO: 21448
  source 1..80: mol_type = other DNA

SEQ ID NO: 206179 - DNA, 80 bp, synthetic construct; identical to SEQ ID NO: 21449
  source 1..80: mol_type = other DNA

SEQ ID NO: 206180 - DNA, 80 bp, synthetic construct; identical to SEQ ID NO: 21450
  source 1..80: mol_type = other DNA

SEQ ID NO: 206181 - DNA, 80 bp, synthetic construct; identical to SEQ ID NO: 21451
  source 1..80: mol_type = other DNA

SEQ ID NO: 206182 - DNA, 80 bp, synthetic construct; identical to SEQ ID NO: 21452
  source 1..80: mol_type = other DNA

SEQ ID NO: 206183 - DNA, 80 bp, synthetic construct; identical to SEQ ID NO: 21453
  source 1..80: mol_type = other DNA

SEQ ID NO: 206184 - DNA, 80 bp, synthetic construct; identical to SEQ ID NO: 21454
  source 1..80: mol_type = other DNA

SEQ ID NO: 206185 - DNA, 80 bp, synthetic construct; identical to SEQ ID NO: 21455
  source 1..80: mol_type = other DNA

SEQ ID NO: 206186 - DNA, 80 bp, synthetic construct; identical to SEQ ID NO: 21456
  source 1..80: mol_type = other DNA

SEQ ID NO: 206187 - DNA, 80 bp, synthetic construct; identical to SEQ ID NO: 21457
  source 1..80: mol_type = other DNA

SEQ ID NO: 206188 - DNA, 80 bp, synthetic construct; identical to SEQ ID NO: 21458
  source 1..80: mol_type = other DNA

SEQ ID NO: 206189 - DNA, 80 bp, synthetic construct; identical to SEQ ID NO: 21459
  source 1..80: mol_type = other DNA

SEQ ID NO: 206190 - DNA, 80 bp, synthetic construct; identical to SEQ ID NO: 21460
  source 1..80: mol_type = other DNA

SEQ ID NO: 206191 - DNA, 80 bp, synthetic construct; identical to SEQ ID NO: 21461
  source 1..80: mol_type = other DNA

SEQ ID NO: 206192 - DNA, 80 bp, synthetic construct; identical to SEQ ID NO: 21462
  source 1..80: mol_type = other DNA

SEQ ID NO: 206193 - DNA, 80 bp, synthetic construct; identical to SEQ ID NO: 21463
  source 1..80: mol_type = other DNA

SEQ ID NO: 206194 - DNA, 80 bp, synthetic construct; identical to SEQ ID NO: 21464
  source 1..80: mol_type = other DNA

SEQ ID NO: 206195 - DNA, 80 bp, synthetic construct; identical to SEQ ID NO: 21465
  source 1..80: mol_type = other DNA

SEQ ID NO: 206196 - DNA, 80 bp, synthetic construct; identical to SEQ ID NO: 21466
  source 1..80: mol_type = other DNA

SEQ ID NO: 206197 - DNA, 80 bp, synthetic construct; identical to SEQ ID NO: 21467
  source 1..80: mol_type = other DNA

SEQ ID NO: 206198 - DNA, 80 bp, synthetic construct; identical to SEQ ID NO: 21468
  source 1..80: mol_type = other DNA

SEQ ID NO: 206199 - DNA, 80 bp, synthetic construct; identical to SEQ ID NO: 21469
  source 1..80: mol_type = other DNA

SEQ ID NO: 206200 - DNA, 80 bp, synthetic construct; identical to SEQ ID NO: 21470
  source 1..80: mol_type = other DNA

SEQ ID NO: 206201 - DNA, 80 bp, synthetic construct; identical to SEQ ID NO: 21471
  source 1..80: mol_type = other DNA

SEQ ID NO: 206202 - DNA, 80 bp, synthetic construct; identical to SEQ ID NO: 21472
  source 1..80: mol_type = other DNA

SEQ ID NO: 206203 - DNA, 80 bp, synthetic construct; identical to SEQ ID NO: 21473
  source 1..80: mol_type = other DNA

SEQ ID NO: 206204 - DNA, 80 bp, synthetic construct; identical to SEQ ID NO: 21474
  source 1..80: mol_type = other DNA

SEQ ID NO: 206205 - DNA, 80 bp, synthetic construct; identical to SEQ ID NO: 21475
  source 1..80: mol_type = other DNA

SEQ ID NO: 206206 - DNA, 80 bp, synthetic construct; identical to SEQ ID NO: 21476
  source 1..80: mol_type = other DNA

SEQ ID NO: 206207 - DNA, 80 bp, synthetic construct; identical to SEQ ID NO: 21477
  source 1..80: mol_type = other DNA

SEQ ID NO: 206208 - DNA, 80 bp, synthetic construct; identical to SEQ ID NO: 21478
  source 1..80: mol_type = other DNA

SEQ ID NO: 206209 - DNA, 80 bp, synthetic construct; identical to SEQ ID NO: 21479
  source 1..80: mol_type = other DNA

SEQ ID NO: 206210 - DNA, 80 bp, synthetic construct; identical to SEQ ID NO: 21480
  source 1..80: mol_type = other DNA

SEQ ID NO: 206211 - DNA, 80 bp, synthetic construct; identical to SEQ ID NO: 21481
  source 1..80: mol_type = other DNA

SEQ ID NO: 206212 - DNA, 80 bp, synthetic construct; identical to SEQ ID NO: 21482
  source 1..80: mol_type = other DNA

SEQ ID NO: 206213 - DNA, 80 bp, synthetic construct; identical to SEQ ID NO: 21483
  source 1..80: mol_type = other DNA

SEQ ID NO: 206214 - DNA, 80 bp, synthetic construct; identical to SEQ ID NO: 21484
  source 1..80: mol_type = other DNA

SEQ ID NO: 206215 - DNA, 80 bp, synthetic construct; identical to SEQ ID NO: 21485
  source 1..80: mol_type = other DNA

SEQ ID NO: 206216 - DNA, 80 bp, synthetic construct; identical to SEQ ID NO: 21486
  source 1..80: mol_type = other DNA

SEQ ID NO: 206217 - DNA, 80 bp, synthetic construct; identical to SEQ ID NO: 21487
  source 1..80: mol_type = other DNA

SEQ ID NO: 206218 - DNA, 80 bp, synthetic construct; identical to SEQ ID NO: 21488
  source 1..80: mol_type = other DNA

SEQ ID NO: 206219 - DNA, 80 bp, synthetic construct; identical to SEQ ID NO: 21489
  source 1..80: mol_type = other DNA

SEQ ID NO: 206220 - DNA, 80 bp, synthetic construct; identical to SEQ ID NO: 21490
  source 1..80: mol_type = other DNA

SEQ ID NO: 206221 - DNA, 80 bp, synthetic construct; identical to SEQ ID NO: 21491
  source 1..80: mol_type = other DNA

SEQ ID NO: 206222 - DNA, 80 bp, synthetic construct; identical to SEQ ID NO: 21492
  source 1..80: mol_type = other DNA

SEQ ID NO: 206223 - DNA, 80 bp, synthetic construct; identical to SEQ ID NO: 21493
  source 1..80: mol_type = other DNA

SEQ ID NO: 206224 - DNA, 80 bp, synthetic construct; identical to SEQ ID NO: 21494
  source 1..80: mol_type = other DNA

SEQ ID NO: 206225 - DNA, 80 bp, synthetic construct; identical to SEQ ID NO: 21495
  source 1..80: mol_type = other DNA

SEQ ID NO: 206226 - DNA, 80 bp, synthetic construct; identical to SEQ ID NO: 21496
  source 1..80: mol_type = other DNA

SEQ ID NO: 206227 - DNA, 80 bp, synthetic construct; identical to SEQ ID NO: 21497
  source 1..80: mol_type = other DNA

SEQ ID NO: 206228 - DNA, 80 bp, synthetic construct; identical to SEQ ID NO: 21498
  source 1..80: mol_type = other DNA

SEQ ID NO: 206229 - DNA, 80 bp, synthetic construct; identical to SEQ ID NO: 21499
  source 1..80: mol_type = other DNA

SEQ ID NO: 206230 - DNA, 80 bp, synthetic construct; identical to SEQ ID NO: 21500
  source 1..80: mol_type = other DNA

SEQ ID NO: 206231 - DNA, 80 bp, synthetic construct; identical to SEQ ID NO: 21501
  source 1..80: mol_type = other DNA

SEQ ID NO: 206232 - DNA, 80 bp, synthetic construct; identical to SEQ ID NO: 21502
  source 1..80: mol_type = other DNA

SEQ ID NO: 206233 - DNA, 80 bp, synthetic construct; identical to SEQ ID NO: 21503
  source 1..80: mol_type = other DNA

SEQ ID NO: 206234 - DNA, 80 bp, synthetic construct; identical to SEQ ID NO: 21504
  source 1..80: mol_type = other DNA

SEQ ID NO: 206235 - DNA, 80 bp, synthetic construct; identical to SEQ ID NO: 21505
  source 1..80: mol_type = other DNA

SEQ ID NO: 206236 - DNA, 80 bp, synthetic construct; identical to SEQ ID NO: 21506
  source 1..80: mol_type = other DNA

SEQ ID NO: 206237 - DNA, 80 bp, synthetic construct; identical to SEQ ID NO: 21507
  source 1..80: mol_type = other DNA

SEQ ID NO: 206238 - DNA, 80 bp, synthetic construct; identical to SEQ ID NO: 21508
  source 1..80: mol_type = other DNA

SEQ ID NO: 206239 - DNA, 80 bp, synthetic construct; identical to SEQ ID NO: 21509
  source 1..80: mol_type = other DNA

SEQ ID NO: 206240 - DNA, 80 bp, synthetic construct; identical to SEQ ID NO: 21510
  source 1..80: mol_type = other DNA

SEQ ID NO: 206241 - DNA, 80 bp, synthetic construct; identical to SEQ ID NO: 21511
  source 1..80: mol_type = other DNA

SEQ ID NO: 206242 - DNA, 80 bp, synthetic construct; identical to SEQ ID NO: 21512
  source 1..80: mol_type = other DNA

SEQ ID NO: 206243 - DNA, 80 bp, synthetic construct; identical to SEQ ID NO: 21513
  source 1..80: mol_type = other DNA

SEQ ID NO: 206244 - DNA, 80 bp, synthetic construct; identical to SEQ ID NO: 21514
  source 1..80: mol_type = other DNA

SEQ ID NO: 206245 - DNA, 80 bp, synthetic construct; identical to SEQ ID NO: 21515
  source 1..80: mol_type = other DNA

SEQ ID NO: 206246 - DNA, 80 bp, synthetic construct; identical to SEQ ID NO: 21516
  source 1..80: mol_type = other DNA

SEQ ID NO: 206247 - DNA, 80 bp, synthetic construct; identical to SEQ ID NO: 21517
  source 1..80: mol_type = other DNA

SEQ ID NO: 206248 - DNA, 80 bp, synthetic construct; identical to SEQ ID NO: 21518
  source 1..80: mol_type = other DNA

SEQ ID NO: 206249 - DNA, 80 bp, synthetic construct; identical to SEQ ID NO: 21519
  source 1..80: mol_type = other DNA

SEQ ID NO: 206250 - DNA, 80 bp, synthetic construct; identical to SEQ ID NO: 21520
  source 1..80: mol_type = other DNA

SEQ ID NO: 206251 - DNA, 80 bp, synthetic construct; identical to SEQ ID NO: 21521
  source 1..80: mol_type = other DNA

SEQ ID NO: 206252 - DNA, 80 bp, synthetic construct; identical to SEQ ID NO: 21522
  source 1..80: mol_type = other DNA

SEQ ID NO: 206253 - DNA, 80 bp, synthetic construct; identical to SEQ ID NO: 21523
  source 1..80: mol_type = other DNA

SEQ ID NO: 206254 - DNA, 80 bp, synthetic construct; identical to SEQ ID NO: 21524
  source 1..80: mol_type = other DNA

SEQ ID NO: 206255 - DNA, 80 bp, synthetic construct; identical to SEQ ID NO: 21525
  source 1..80: mol_type = other DNA

SEQ ID NO: 206256 - DNA, 80 bp, synthetic construct; identical to SEQ ID NO: 21526
  source 1..80: mol_type = other DNA

SEQ ID NO: 206257 - DNA, 80 bp, synthetic construct; identical to SEQ ID NO: 21527
  source 1..80: mol_type = other DNA

SEQ ID NO: 206258 - DNA, 80 bp, synthetic construct; identical to SEQ ID NO: 21528
  source 1..80: mol_type = other DNA

SEQ ID NO: 206259 - DNA, 80 bp, synthetic construct; identical to SEQ ID NO: 21529
  source 1..80: mol_type = other DNA

SEQ ID NO: 206260 - DNA, 80 bp, synthetic construct; identical to SEQ ID NO: 21530
  source 1..80: mol_type = other DNA

SEQ ID NO: 206261 - DNA, 80 bp, synthetic construct; identical to SEQ ID NO: 21531
  source 1..80: mol_type = other DNA

SEQ ID NO: 206262 - DNA, 80 bp, synthetic construct; identical to SEQ ID NO: 21532
  source 1..80: mol_type = other DNA

SEQ ID NO: 206263 - DNA, 80 bp, synthetic construct; identical to SEQ ID NO: 21533
  source 1..80: mol_type = other DNA

SEQ ID NO: 206264 - DNA, 80 bp, synthetic construct; identical to SEQ ID NO: 21534
  source 1..80: mol_type = other DNA

SEQ ID NO: 206265 - DNA, 80 bp, synthetic construct; identical to SEQ ID NO: 21535
  source 1..80: mol_type = other DNA

SEQ ID NO: 206266 - DNA, 80 bp, synthetic construct; identical to SEQ ID NO: 21536
  source 1..80: mol_type = other DNA

SEQ ID NO: 206267 - DNA, 80 bp, synthetic construct; identical to SEQ ID NO: 21537
  source 1..80: mol_type = other DNA

SEQ ID NO: 206268 - DNA, 80 bp, synthetic construct; identical to SEQ ID NO: 21538
  source 1..80: mol_type = other DNA

SEQ ID NO: 206269 - DNA, 80 bp, synthetic construct; identical to SEQ ID NO: 21539
  source 1..80: mol_type = other DNA

SEQ ID NO: 206270 - DNA, 80 bp, synthetic construct; identical to SEQ ID NO: 21540
  source 1..80: mol_type = other DNA

SEQ ID NO: 206271 - DNA, 80 bp, synthetic construct; identical to SEQ ID NO: 21541
  source 1..80: mol_type = other DNA

SEQ ID NO: 206272 - DNA, 80 bp, synthetic construct; identical to SEQ ID NO: 21542
  source 1..80: mol_type = other DNA

SEQ ID NO: 206273 - DNA, 80 bp, synthetic construct; identical to SEQ ID NO: 21543
  source 1..80: mol_type = other DNA

SEQ ID NO: 206274 - DNA, 80 bp, synthetic construct; identical to SEQ ID NO: 21544
  source 1..80: mol_type = other DNA

SEQ ID NO: 206275 - DNA, 80 bp, synthetic construct; identical to SEQ ID NO: 21545
  source 1..80: mol_type = other DNA

SEQ ID NO: 206276 - DNA, 80 bp, synthetic construct; identical to SEQ ID NO: 21546
  source 1..80: mol_type = other DNA

SEQ ID NO: 206277 - DNA, 80 bp, synthetic construct; identical to SEQ ID NO: 21547
  source 1..80: mol_type = other DNA

SEQ ID NO: 206278 - DNA, 80 bp, synthetic construct; identical to SEQ ID NO: 21548
  source 1..80: mol_type = other DNA

SEQ ID NO: 206279 - DNA, 80 bp, synthetic construct; identical to SEQ ID NO: 21549
  source 1..80: mol_type = other DNA

SEQ ID NO: 206280 - DNA, 80 bp, synthetic construct; identical to SEQ ID NO: 21550
  source 1..80: mol_type = other DNA

SEQ ID NO: 206281 - DNA, 80 bp, synthetic construct; identical to SEQ ID NO: 21551
  source 1..80: mol_type = other DNA

SEQ ID NO: 206282 - DNA, 80 bp, synthetic construct; identical to SEQ ID NO: 21552
  source 1..80: mol_type = other DNA

SEQ ID NO: 206283 - DNA, 80 bp, synthetic construct; identical to SEQ ID NO: 21553
  source 1..80: mol_type = other DNA

SEQ ID NO: 206284 - DNA, 80 bp, synthetic construct; identical to SEQ ID NO: 21554
  source 1..80: mol_type = other DNA

SEQ ID NO: 206285 - DNA, 80 bp, synthetic construct; identical to SEQ ID NO: 21555
  source 1..80: mol_type = other DNA

SEQ ID NO: 206286 - DNA, 80 bp, synthetic construct; identical to SEQ ID NO: 21556
  source 1..80: mol_type = other DNA

SEQ ID NO: 206287 - DNA, 80 bp, synthetic construct; identical to SEQ ID NO: 21557
  source 1..80: mol_type = other DNA

SEQ ID NO: 206288 - DNA, 80 bp, synthetic construct; identical to SEQ ID NO: 21558
  source 1..80: mol_type = other DNA

SEQ ID NO: 206289 - DNA, 80 bp, synthetic construct; identical to SEQ ID NO: 21559
  source 1..80: mol_type = other DNA

SEQ ID NO: 206290 - DNA, 80 bp, synthetic construct; identical to SEQ ID NO: 21560
  source 1..80: mol_type = other DNA

SEQ ID NO: 206291 - DNA, 80 bp, synthetic construct; identical to SEQ ID NO: 21561
  source 1..80: mol_type = other DNA

SEQ ID NO: 206292 - DNA, 80 bp, synthetic construct; identical to SEQ ID NO: 21562
  source 1..80: mol_type = other DNA

SEQ ID NO: 206293 - DNA, 80 bp, synthetic construct; identical to SEQ ID NO: 21563
  source 1..80: mol_type = other DNA

SEQ ID NO: 206294 - DNA, 80 bp, synthetic construct; identical to SEQ ID NO: 21564
  source 1..80: mol_type = other DNA

SEQ ID NO: 206295 - DNA, 80 bp, synthetic construct; identical to SEQ ID NO: 21565
  source 1..80: mol_type = other DNA

SEQ ID NO: 206296 - DNA, 80 bp, synthetic construct; identical to SEQ ID NO: 21566
  source 1..80: mol_type = other DNA

SEQ ID NO: 206297 - DNA, 80 bp, synthetic construct; identical to SEQ ID NO: 21567
  source 1..80: mol_type = other DNA

SEQ ID NO: 206298 - DNA, 80 bp, synthetic construct; identical to SEQ ID NO: 21568
  source 1..80: mol_type = other DNA

SEQ ID NO: 206299 - DNA, 80 bp, synthetic construct; identical to SEQ ID NO: 21569
  source 1..80: mol_type = other DNA

SEQ ID NO: 206300 - DNA, 80 bp, synthetic construct; identical to SEQ ID NO: 21570
  source 1..80: mol_type = other DNA

SEQ ID NO: 206301 - DNA, 80 bp, synthetic construct; identical to SEQ ID NO: 21571
  source 1..80: mol_type = other DNA

SEQ ID NO: 206302 - DNA, 80 bp, synthetic construct; identical to SEQ ID NO: 21572
  source 1..80: mol_type = other DNA

SEQ ID NO: 206303 - DNA, 80 bp, synthetic construct; identical to SEQ ID NO: 21573
  source 1..80: mol_type = other DNA

SEQ ID NO: 206304 - DNA, 80 bp, synthetic construct; identical to SEQ ID NO: 21574
  source 1..80: mol_type = other DNA

SEQ ID NO: 206305 - DNA, 80 bp, synthetic construct; identical to SEQ ID NO: 21575
  source 1..80: mol_type = other DNA

SEQ ID NO: 206306 - DNA, 80 bp, synthetic construct; identical to SEQ ID NO: 21576
  source 1..80: mol_type = other DNA

SEQ ID NO: 206307 - DNA, 80 bp, synthetic construct; identical to SEQ ID NO: 21577
  source 1..80: mol_type = other DNA

SEQ ID NO: 206308 - DNA, 80 bp, synthetic construct; identical to SEQ ID NO: 21578
  source 1..80: mol_type = other DNA

SEQ ID NO: 206309 - DNA, 80 bp, synthetic construct; identical to SEQ ID NO: 21579
  source 1..80: mol_type = other DNA

SEQ ID NO: 206310 - DNA, 80 bp, synthetic construct; identical to SEQ ID NO: 21580
  source 1..80: mol_type = other DNA

SEQ ID NO: 206311 - DNA, 80 bp, synthetic construct; identical to SEQ ID NO: 21581
  source 1..80: mol_type = other DNA

SEQ ID NO: 206312 - DNA, 80 bp, synthetic construct; identical to SEQ ID NO: 21582
  source 1..80: mol_type = other DNA

SEQ ID NO: 206313 - DNA, 80 bp, synthetic construct; identical to SEQ ID NO: 21583
  source 1..80: mol_type = other DNA

SEQ ID NO: 206314 - DNA, 80 bp, synthetic construct; identical to SEQ ID NO: 21584
  source 1..80: mol_type = other DNA

SEQ ID NO: 206315 - DNA, 80 bp, synthetic construct; identical to SEQ ID NO: 21585
  source 1..80: mol_type = other DNA

SEQ ID NO: 206316 - DNA, 80 bp, synthetic construct; identical to SEQ ID NO: 21586
  source 1..80: mol_type = other DNA

SEQ ID NO: 206317 - DNA, 80 bp, synthetic construct; identical to SEQ ID NO: 21587
  source 1..80: mol_type = other DNA

SEQ ID NO: 206318 - DNA, 80 bp, synthetic construct; identical to SEQ ID NO: 21588
  source 1..80: mol_type = other DNA

SEQ ID NO: 206319 - DNA, 80 bp, synthetic construct; identical to SEQ ID NO: 21589
  source 1..80: mol_type = other DNA

SEQ ID NO: 206320 - DNA, 80 bp, synthetic construct; identical to SEQ ID NO: 21590
  source 1..80: mol_type = other DNA

SEQ ID NO: 206321 - DNA, 80 bp, synthetic construct; identical to SEQ ID NO: 21591
  source 1..80: mol_type = other DNA

SEQ ID NO: 206322 - DNA, 80 bp, synthetic construct; identical to SEQ ID NO: 21592
  source 1..80: mol_type = other DNA

SEQ ID NO: 206323 - DNA, 80 bp, synthetic construct; identical to SEQ ID NO: 21593
  source 1..80: mol_type = other DNA

SEQ ID NO: 206324 - DNA, 80 bp, synthetic construct; identical to SEQ ID NO: 21594
  source 1..80: mol_type = other DNA

SEQ ID NO: 206325 - DNA, 80 bp, synthetic construct; identical to SEQ ID NO: 21595
  source 1..80: mol_type = other DNA

SEQ ID NO: 206326 - DNA, 80 bp, synthetic construct; identical to SEQ ID NO: 21596
  source 1..80: mol_type = other DNA

SEQ ID NO: 206327 - DNA, 80 bp, synthetic construct; identical to SEQ ID NO: 21597
  source 1..80: mol_type = other DNA

SEQ ID NO: 206328 - DNA, 80 bp, synthetic construct; identical to SEQ ID NO: 21598
  source 1..80: mol_type = other DNA

SEQ ID NO: 206329 - DNA, 80 bp, synthetic construct; identical to SEQ ID NO: 21599
  source 1..80: mol_type = other DNA

SEQ ID NO: 206330 - DNA, 80 bp, synthetic construct; identical to SEQ ID NO: 21600
  source 1..80: mol_type = other DNA

SEQ ID NO: 206331 - DNA, 80 bp, synthetic construct; identical to SEQ ID NO: 21601
  source 1..80: mol_type = other DNA

SEQ ID NO: 206332 - DNA, 80 bp, synthetic construct; identical to SEQ ID NO: 21602
  source 1..80: mol_type = other DNA

SEQ ID NO: 206333 - DNA, 80 bp, synthetic construct; identical to SEQ ID NO: 21603
  source 1..80: mol_type = other DNA

SEQ ID NO: 206334 - DNA, 80 bp, synthetic construct; identical to SEQ ID NO: 21604
  source 1..80: mol_type = other DNA

SEQ ID NO: 206335 - DNA, 80 bp, synthetic construct; identical to SEQ ID NO: 21605
  source 1..80: mol_type = other DNA

SEQ ID NO: 206336 - DNA, 80 bp, synthetic construct; identical to SEQ ID NO: 21606
  source 1..80: mol_type = other DNA

SEQ ID NO: 206337 - DNA, 80 bp, synthetic construct; identical to SEQ ID NO: 21607
  source 1..80: mol_type = other DNA

SEQ ID NO: 206338 - DNA, 80 bp, synthetic construct; identical to SEQ ID NO: 21608
  source 1..80: mol_type = other DNA

SEQ ID NO: 206339 - DNA, 80 bp, synthetic construct; identical to SEQ ID NO: 21609
  source 1..80: mol_type = other DNA

SEQ ID NO: 206340 - DNA, 80 bp, synthetic construct; identical to SEQ ID NO: 21610
  source 1..80: mol_type = other DNA

SEQ ID NO: 206341 - DNA, 80 bp, synthetic construct; identical to SEQ ID NO: 21611
  source 1..80: mol_type = other DNA

SEQ ID NO: 206342 - DNA, 80 bp, synthetic construct; identical to SEQ ID NO: 21612
  source 1..80: mol_type = other DNA

SEQ ID NO: 206343 - DNA, 80 bp, synthetic construct; identical to SEQ ID NO: 21613
  source 1..80: mol_type = other DNA

SEQ ID NO: 206344 - DNA, 80 bp, synthetic construct; identical to SEQ ID NO: 21614
  source 1..80: mol_type = other DNA

SEQ ID NO: 206345 - DNA, 80 bp, synthetic construct; identical to SEQ ID NO: 21615
  source 1..80: mol_type = other DNA

SEQ ID NO: 206346 - DNA, 80 bp, synthetic construct; identical to SEQ ID NO: 21616
  source 1..80: mol_type = other DNA

SEQ ID NO: 206347 - DNA, 80 bp, synthetic construct; identical to SEQ ID NO: 21617
  source 1..80: mol_type = other DNA

SEQ ID NO: 206348 - DNA, 80 bp, synthetic construct; identical to SEQ ID NO: 21618
  source 1..80: mol_type = other DNA

SEQ ID NO: 206349 - DNA, 80 bp, synthetic construct; identical to SEQ ID NO: 21619
  source 1..80: mol_type = other DNA

SEQ ID NO: 206350 - DNA, 80 bp, synthetic construct; identical to SEQ ID NO: 21620
  source 1..80: mol_type = other DNA

SEQ ID NO: 206351 - DNA, 80 bp, synthetic construct; identical to SEQ ID NO: 21621
  source 1..80: mol_type = other DNA

SEQ ID NO: 206352 - DNA, 80 bp, synthetic construct; identical to SEQ ID NO: 21622
  source 1..80: mol_type = other DNA

SEQ ID NO: 206353 - DNA, 80 bp, synthetic construct; identical to SEQ ID NO: 21623
  source 1..80: mol_type = other DNA

SEQ ID NO: 206354 - DNA, 80 bp, synthetic construct; identical to SEQ ID NO: 21624
  source 1..80: mol_type = other DNA

SEQ ID NO: 206355 - DNA, 80 bp, synthetic construct; identical to SEQ ID NO: 21625
  source 1..80: mol_type = other DNA

SEQ ID NO: 206356 - DNA, 80 bp, synthetic construct; identical to SEQ ID NO: 21626
  source 1..80: mol_type = other DNA

SEQ ID NO: 206357 - DNA, 80 bp, synthetic construct; identical to SEQ ID NO: 21627
  source 1..80: mol_type = other DNA

SEQ ID NO: 206358 - DNA, 80 bp, synthetic construct; identical to SEQ ID NO: 21628
  source 1..80: mol_type = other DNA

SEQ ID NO: 206359 - DNA, 80 bp, synthetic construct; identical to SEQ ID NO: 21629
  source 1..80: mol_type = other DNA

SEQ ID NO: 206360 - DNA, 80 bp, synthetic construct; identical to SEQ ID NO: 21630
  source 1..80: mol_type = other DNA

SEQ ID NO: 206361 - DNA, 80 bp, synthetic construct; identical to SEQ ID NO: 21631
  source 1..80: mol_type = other DNA

SEQ ID NO: 206362 - DNA, 80 bp, synthetic construct; identical to SEQ ID NO: 21632
  source 1..80: mol_type = other DNA

SEQ ID NO: 206363 - DNA, 80 bp, synthetic construct; identical to SEQ ID NO: 21633
  source 1..80: mol_type = other DNA

SEQ ID NO: 206364 - DNA, 80 bp, synthetic construct; identical to SEQ ID NO: 21634
  source 1..80: mol_type = other DNA

SEQ ID NO: 206365 - DNA, 80 bp, synthetic construct; identical to SEQ ID NO: 21635
  source 1..80: mol_type = other DNA

SEQ ID NO: 206366 - DNA, 80 bp, synthetic construct; identical to SEQ ID NO: 21636
  source 1..80: mol_type = other DNA

SEQ ID NO: 206367 - DNA, 80 bp, synthetic construct; identical to SEQ ID NO: 21637
  source 1..80: mol_type = other DNA

SEQ ID NO: 206368 - DNA, 80 bp, synthetic construct; identical to SEQ ID NO: 21638
  source 1..80: mol_type = other DNA

SEQ ID NO: 206369 - DNA, 80 bp, synthetic construct; identical to SEQ ID NO: 21639
  source 1..80: mol_type = other DNA

SEQ ID NO: 206370 - DNA, 80 bp, synthetic construct; identical to SEQ ID NO: 21640
  source 1..80: mol_type = other DNA

SEQ ID NO: 206371 - DNA, 80 bp, synthetic construct; identical to SEQ ID NO: 21641
  source 1..80: mol_type = other DNA

SEQ ID NO: 206372 - DNA, 80 bp, synthetic construct; identical to SEQ ID NO: 21642
  source 1..80: mol_type = other DNA

SEQ ID NO: 206373 - DNA, 80 bp, synthetic construct; identical to SEQ ID NO: 21643
  source 1..80: mol_type = other DNA

SEQ ID NO: 206374 - DNA, 80 bp, synthetic construct; identical to SEQ ID NO: 21644
  source 1..80: mol_type = other DNA

SEQ ID NO: 206375 - DNA, 80 bp, synthetic construct; identical to SEQ ID NO: 21645
  source 1..80: mol_type = other DNA

SEQ ID NO: 206376 - DNA, 80 bp, synthetic construct; identical to SEQ ID NO: 21646
  source 1..80: mol_type = other DNA

SEQ ID NO: 206377 - DNA, 80 bp, synthetic construct; identical to SEQ ID NO: 21647
  source 1..80: mol_type = other DNA

SEQ ID NO: 206378 - DNA, 80 bp, synthetic construct; identical to SEQ ID NO: 21648
  source 1..80: mol_type = other DNA

SEQ ID NO: 206379 - DNA, 80 bp, synthetic construct; identical to SEQ ID NO: 21649
  source 1..80: mol_type = other DNA

SEQ ID NO: 206380 - DNA, 80 bp, synthetic construct; identical to SEQ ID NO: 21650
  source 1..80: mol_type = other DNA

SEQ ID NO: 206381 - DNA, 80 bp, synthetic construct; identical to SEQ ID NO: 21651
  source 1..80: mol_type = other DNA

SEQ ID NO: 206382 - DNA, 80 bp, synthetic construct; identical to SEQ ID NO: 21652
  source 1..80: mol_type = other DNA

SEQ ID NO: 206383 - DNA, 80 bp, synthetic construct; identical to SEQ ID NO: 21653
  source 1..80: mol_type = other DNA

SEQ ID NO: 206384 - DNA, 80 bp, synthetic construct; identical to SEQ ID NO: 21654
  source 1..80: mol_type = other DNA

SEQ ID NO: 206385 - DNA, 80 bp, synthetic construct; identical to SEQ ID NO: 21655
  source 1..80: mol_type = other DNA

SEQ ID NO: 206386 - DNA, 80 bp, synthetic construct; identical to SEQ ID NO: 21656
  source 1..80: mol_type = other DNA

SEQ ID NO: 206387 - DNA, 80 bp, synthetic construct; identical to SEQ ID NO: 21657
  source 1..80: mol_type = other DNA

SEQ ID NO: 206388 - DNA, 80 bp, synthetic construct; identical to SEQ ID NO: 21658
  source 1..80: mol_type = other DNA

SEQ ID NO: 206389 - DNA, 80 bp, synthetic construct; identical to SEQ ID NO: 21659
  source 1..80: mol_type = other DNA

SEQ ID NO: 206390 - DNA, 80 bp, synthetic construct; identical to SEQ ID NO: 21660
  source 1..80: mol_type = other DNA

SEQ ID NO: 206391 - DNA, 80 bp, synthetic construct; identical to SEQ ID NO: 21661
  source 1..80: mol_type = other DNA

SEQ ID NO: 206392 - DNA, 80 bp, synthetic construct; identical to SEQ ID NO: 21662
  source 1..80: mol_type = other DNA

SEQ ID NO: 206393 - DNA, 80 bp, synthetic construct; identical to SEQ ID NO: 21663
  source 1..80: mol_type = other DNA

SEQ ID NO: 206394 - DNA, 80 bp, synthetic construct; identical to SEQ ID NO: 21664
  source 1..80: mol_type = other DNA

SEQ ID NO: 206395 - DNA, 80 bp, synthetic construct; identical to SEQ ID NO: 21665
  source 1..80: mol_type = other DNA

SEQ ID NO: 206396 - DNA, 80 bp, synthetic construct; identical to SEQ ID NO: 21666
  source 1..80: mol_type = other DNA

SEQ ID NO: 206397 - DNA, 80 bp, synthetic construct; identical to SEQ ID NO: 21667
  source 1..80: mol_type = other DNA

SEQ ID NO: 206398 - DNA, 80 bp, synthetic construct; identical to SEQ ID NO: 21668
  source 1..80: mol_type = other DNA

SEQ ID NO: 206399 - DNA, 80 bp, synthetic construct; identical to SEQ ID NO: 21669
  source 1..80: mol_type = other DNA

SEQ ID NO: 206400 - DNA, 80 bp, synthetic construct; identical to SEQ ID NO: 21670
  source 1..80: mol_type = other DNA

SEQ ID NO: 206401 - DNA, 80 bp, synthetic construct; identical to SEQ ID NO: 21671
  source 1..80: mol_type = other DNA

SEQ ID NO: 206402 - DNA, 80 bp, synthetic construct; identical to SEQ ID NO: 21672
  source 1..80: mol_type = other DNA

SEQ ID NO: 206403 - DNA, 80 bp, synthetic construct; identical to SEQ ID NO: 21673
  source 1..80: mol_type = other DNA

SEQ ID NO: 206404 - DNA, 80 bp, synthetic construct; identical to SEQ ID NO: 21674
  source 1..80: mol_type = other DNA

SEQ ID NO: 206405 - DNA, 80 bp, synthetic construct; identical to SEQ ID NO: 21675
  source 1..80: mol_type = other DNA

SEQ ID NO: 206406 - DNA, 80 bp, synthetic construct; identical to SEQ ID NO: 21676
  source 1..80: mol_type = other DNA

SEQ ID NO: 206407 - DNA, 80 bp, synthetic construct; identical to SEQ ID NO: 21677
  source 1..80: mol_type = other DNA

SEQ ID NO: 206408 - DNA, 80 bp, synthetic construct; identical to SEQ ID NO: 21678
  source 1..80: mol_type = other DNA

SEQ ID NO: 206409 - DNA, 80 bp, synthetic construct; identical to SEQ ID NO: 21679
  source 1..80: mol_type = other DNA

SEQ ID NO: 206410 - DNA, 80 bp, synthetic construct; identical to SEQ ID NO: 21680
  source 1..80: mol_type = other DNA

SEQ ID NO: 206411 - DNA, 80 bp, synthetic construct; identical to SEQ ID NO: 21681
  source 1..80: mol_type = other DNA

SEQ ID NO: 206412 - DNA, 80 bp, synthetic construct; identical to SEQ ID NO: 21682
  source 1..80: mol_type = other DNA

SEQ ID NO: 206413 - DNA, 80 bp, synthetic construct; identical to SEQ ID NO: 21683
  source 1..80: mol_type = other DNA

SEQ ID NO: 206414 - DNA, 80 bp, synthetic construct; identical to SEQ ID NO: 21684
  source 1..80: mol_type = other DNA

SEQ ID NO: 206415 - DNA, 80 bp, synthetic construct; identical to SEQ ID NO: 21685
  source 1..80: mol_type = other DNA

SEQ ID NO: 206416 - DNA, 80 bp, synthetic construct; identical to SEQ ID NO: 21686
  source 1..80: mol_type = other DNA

SEQ ID NO: 206417 - DNA, 80 bp, synthetic construct; identical to SEQ ID NO: 21687
  source 1..80: mol_type = other DNA

SEQ ID NO: 206418 - DNA, 80 bp, synthetic construct; identical to SEQ ID NO: 21688
  source 1..80: mol_type = other DNA

SEQ ID NO: 206419 - DNA, 80 bp, synthetic construct; identical to SEQ ID NO: 21689
  source 1..80: mol_type = other DNA

SEQ ID NO: 206420 - DNA, 80 bp, synthetic construct; identical to SEQ ID NO: 21690
  source 1..80: mol_type = other DNA

SEQ ID NO: 206421 - DNA, 80 bp, synthetic construct; identical to SEQ ID NO: 21691
  source 1..80: mol_type = other DNA

SEQ ID NO: 206422 - DNA, 80 bp, synthetic construct; identical to SEQ ID NO: 21692
  source 1..80: mol_type = other DNA

SEQ ID NO: 206423 - DNA, 80 bp, synthetic construct; identical to SEQ ID NO: 21693
  source 1..80: mol_type = other DNA

SEQ ID NO: 206424 - DNA, 80 bp, synthetic construct; identical to SEQ ID NO: 21694
  source 1..80: mol_type = other DNA

SEQ ID NO: 206425 - DNA, 80 bp, synthetic construct; identical to SEQ ID NO: 21695
  source 1..80: mol_type = other DNA

SEQ ID NO: 206426 - DNA, 80 bp, synthetic construct; identical to SEQ ID NO: 21696
  source 1..80: mol_type = other DNA

SEQ ID NO: 206427 - DNA, 80 bp, synthetic construct; identical to SEQ ID NO: 21697
  source 1..80: mol_type = other DNA

SEQ ID NO: 206428 - DNA, 80 bp, synthetic construct; identical to SEQ ID NO: 21698
  source 1..80: mol_type = other DNA

SEQ ID NO: 206429 - DNA, 80 bp, synthetic construct; identical to SEQ ID NO: 21699
  source 1..80: mol_type = other DNA

SEQ ID NO: 206430 - DNA, 80 bp, synthetic construct; identical to SEQ ID NO: 21700
  source 1..80: mol_type = other DNA

SEQ ID NO: 206431 - DNA, 80 bp, synthetic construct; identical to SEQ ID NO: 21701
  source 1..80: mol_type = other DNA

SEQ ID NO: 206432 - DNA, 80 bp, synthetic construct; identical to SEQ ID NO: 21702
  source 1..80: mol_type = other DNA

SEQ ID NO: 206433 - DNA, 80 bp, synthetic construct; identical to SEQ ID NO: 21703
  source 1..80: mol_type = other DNA

SEQ ID NO: 206434 - DNA, 80 bp, synthetic construct; identical to SEQ ID NO: 21704
  source 1..80: mol_type = other DNA

SEQ ID NO: 206435 - DNA, 80 bp, synthetic construct; identical to SEQ ID NO: 21705
  source 1..80: mol_type = other DNA

SEQ ID NO: 206436 - DNA, 80 bp, synthetic construct; identical to SEQ ID NO: 21706
  source 1..80: mol_type = other DNA

SEQ ID NO: 206437 - DNA, 80 bp, synthetic construct; identical to SEQ ID NO: 21707
  source 1..80: mol_type = other DNA

SEQ ID NO: 206438 - DNA, 80 bp, synthetic construct; identical to SEQ ID NO: 21708
  source 1..80: mol_type = other DNA

SEQ ID NO: 206439 - DNA, 80 bp, synthetic construct; identical to SEQ ID NO: 21709
  source 1..80: mol_type = other DNA

SEQ ID NO: 206440 - DNA, 80 bp, synthetic construct; identical to SEQ ID NO: 21710
  source 1..80: mol_type = other DNA

SEQ ID NO: 206441 - DNA, 80 bp, synthetic construct; identical to SEQ ID NO: 21711
  source 1..80: mol_type = other DNA

SEQ ID NO: 206442 - DNA, 80 bp, synthetic construct; identical to SEQ ID NO: 21712
  source 1..80: mol_type = other DNA

SEQ ID NO: 206443 - DNA, 80 bp, synthetic construct; identical to SEQ ID NO: 21713
  source 1..80: mol_type = other DNA

SEQ ID NO: 206444 - DNA, 80 bp, synthetic construct; identical to SEQ ID NO: 21714
  source 1..80: mol_type = other DNA

SEQ ID NO: 206445 - DNA, 80 bp, synthetic construct; identical to SEQ ID NO: 21715
  source 1..80: mol_type = other DNA

SEQ ID NO: 206446 - DNA, 80 bp, synthetic construct; identical to SEQ ID NO: 21716
  source 1..80: mol_type = other DNA

SEQ ID NO: 206447 - DNA, 80 bp, synthetic construct; identical to SEQ ID NO: 21717
  source 1..80: mol_type = other DNA

SEQ ID NO: 206448 - DNA, 80 bp, synthetic construct; identical to SEQ ID NO: 21718
  source 1..80: mol_type = other DNA

SEQ ID NO: 206449 - DNA, 80 bp, synthetic construct; identical to SEQ ID NO: 21719
  source 1..80: mol_type = other DNA

SEQ ID NO: 206450 - DNA, 80 bp, synthetic construct; identical to SEQ ID NO: 21720
  source 1..80: mol_type = other DNA

SEQ ID NO: 206451 - DNA, 80 bp, synthetic construct; identical to SEQ ID NO: 21721
  source 1..80: mol_type = other DNA

SEQ ID NO: 206452 - DNA, 80 bp, synthetic construct; identical to SEQ ID NO: 21722
  source 1..80: mol_type = other DNA

SEQ ID NO: 206453 - DNA, 80 bp, synthetic construct; identical to SEQ ID NO: 21723
  source 1..80: mol_type = other DNA

SEQ ID NO: 206454 - DNA, 80 bp, synthetic construct; identical to SEQ ID NO: 21724
  source 1..80: mol_type = other DNA

SEQ ID NO: 206455 - DNA, 80 bp, synthetic construct; identical to SEQ ID NO: 21725
  source 1..80: mol_type = other DNA

SEQ ID NO: 206456 - DNA, 80 bp, synthetic construct; identical to SEQ ID NO: 21726
  source 1..80: mol_type = other DNA

SEQ ID NO: 206457 - DNA, 80 bp, synthetic construct; identical to SEQ ID NO: 21727
  source 1..80: mol_type = other DNA

SEQ ID NO: 206458 - DNA, 80 bp, synthetic construct; identical to SEQ ID NO: 21728
  source 1..80: mol_type = other DNA

SEQ ID NO: 206459 - DNA, 80 bp, synthetic construct; identical to SEQ ID NO: 21729
  source 1..80: mol_type = other DNA

SEQ ID NO: 206460 - DNA, 80 bp, synthetic construct; identical to SEQ ID NO: 21730
  source 1..80: mol_type = other DNA

SEQ ID NO: 206461 - DNA, 80 bp, synthetic construct; identical to SEQ ID NO: 21731
  source 1..80: mol_type = other DNA

SEQ ID NO: 206462 - DNA, 80 bp, synthetic construct; identical to SEQ ID NO: 21732
  source 1..80: mol_type = other DNA

SEQ ID NO: 206463 - DNA, 80 bp, synthetic construct; identical to SEQ ID NO: 21733
  source 1..80: mol_type = other DNA

SEQ ID NO: 206464 - DNA, 80 bp, synthetic construct; identical to SEQ ID NO: 21734
  source 1..80: mol_type = other DNA

SEQ ID NO: 206465 - DNA, 80 bp, synthetic construct; identical to SEQ ID NO: 21735
  source 1..80: mol_type = other DNA

SEQ ID NO: 206466 - DNA, 80 bp, synthetic construct; identical to SEQ ID NO: 21736
  source 1..80: mol_type = other DNA

SEQ ID NO: 206467 - DNA, 80 bp, synthetic construct; identical to SEQ ID NO: 21737
  source 1..80: mol_type = other DNA

SEQ ID NO: 206468 - DNA, 80 bp, synthetic construct; identical to SEQ ID NO: 21738
  source 1..80: mol_type = other DNA

SEQ ID NO: 206469 - DNA, 80 bp, synthetic construct; identical to SEQ ID NO: 21739
  source 1..80: mol_type = other DNA

SEQ ID NO: 206470 - DNA, 80 bp, synthetic construct; identical to SEQ ID NO: 21740
  source 1..80: mol_type = other DNA

SEQ ID NO: 206471 - DNA, 80 bp, synthetic construct; identical to SEQ ID NO: 21741
  source 1..80: mol_type = other DNA

SEQ ID NO: 206472 - DNA, 80 bp, synthetic construct; identical to SEQ ID NO: 21742
  source 1..80: mol_type = other DNA

SEQ ID NO: 206473 - DNA, 80 bp, synthetic construct; identical to SEQ ID NO: 21743
  source 1..80: mol_type = other DNA

SEQ ID NO: 206474 - DNA, 80 bp, synthetic construct; identical to SEQ ID NO: 21744
  source 1..80: mol_type = other DNA

SEQ ID NO: 206475 - DNA, 80 bp, synthetic construct; identical to SEQ ID NO: 21745
  source 1..80: mol_type = other DNA

SEQ ID NO: 206476 - DNA, 80 bp, synthetic construct; identical to SEQ ID NO: 21746
  source 1..80: mol_type = other DNA

SEQ ID NO: 206477 - DNA, 80 bp, synthetic construct; identical to SEQ ID NO: 21747
  source 1..80: mol_type = other DNA

SEQ ID NO: 206478 - DNA, 80 bp, synthetic construct; identical to SEQ ID NO: 21748
  source 1..80: mol_type = other DNA

SEQ ID NO: 206479 - DNA, 80 bp, synthetic construct; identical to SEQ ID NO: 21749
  source 1..80: mol_type = other DNA

SEQ ID NO: 206480 - DNA, 80 bp, synthetic construct; identical to SEQ ID NO: 21750
  source 1..80: mol_type = other DNA

SEQ ID NO: 206481 - DNA, 80 bp, synthetic construct; identical to SEQ ID NO: 21751
  source 1..80: mol_type = other DNA

SEQ ID NO: 206482 - DNA, 80 bp, synthetic construct; identical to SEQ ID NO: 21752
  source 1..80: mol_type = other DNA

SEQ ID NO: 206483 - DNA, 80 bp, synthetic construct; identical to SEQ ID NO: 21753
  source 1..80: mol_type = other DNA

SEQ ID NO: 206484 - DNA, 80 bp, synthetic construct; identical to SEQ ID NO: 21754
  source 1..80: mol_type = other DNA

SEQ ID NO: 206485 - DNA, 80 bp, synthetic construct; identical to SEQ ID NO: 21755
  source 1..80: mol_type = other DNA

SEQ ID NO: 206486 - DNA, 80 bp, synthetic construct; identical to SEQ ID NO: 21756
  source 1..80: mol_type = other DNA

SEQ ID NO: 206487 - DNA, 80 bp, synthetic construct; identical to SEQ ID NO: 21757
  source 1..80: mol_type = other DNA

SEQ ID NO: 206488 - DNA, 80 bp, synthetic construct; identical to SEQ ID NO: 21758
  source 1..80: mol_type = other DNA

SEQ ID NO: 206489 - DNA, 80 bp, synthetic construct; identical to SEQ ID NO: 21759
  source 1..80: mol_type = other DNA

SEQ ID NO: 206490 - DNA, 80 bp, synthetic construct; identical to SEQ ID NO: 21760
  source 1..80: mol_type = other DNA

SEQ ID NO: 206491 - DNA, 80 bp, synthetic construct; identical to SEQ ID NO: 21761
  source 1..80: mol_type = other DNA

SEQ ID NO: 206492 - DNA, 80 bp, synthetic construct; identical to SEQ ID NO: 21762
  source 1..80: mol_type = other DNA

SEQ ID NO: 206493 - DNA, 80 bp, synthetic construct; identical to SEQ ID NO: 21763
  source 1..80: mol_type = other DNA

SEQ ID NO: 206494 - DNA, 80 bp, synthetic construct; identical to SEQ ID NO: 21764
  source 1..80: mol_type = other DNA

SEQ ID NO: 206495 - DNA, 80 bp, synthetic construct; identical to SEQ ID NO: 21765
  source 1..80: mol_type = other DNA

SEQ ID NO: 206496 - DNA, 80 bp, synthetic construct; identical to SEQ ID NO: 21766
  source 1..80: mol_type = other DNA

SEQ ID NO: 206497 - DNA, 80 bp, synthetic construct; identical to SEQ ID NO: 21767
  source 1..80: mol_type = other DNA

SEQ ID NO: 206498 - DNA, 80 bp, synthetic construct; identical to SEQ ID NO: 21768
  source 1..80: mol_type = other DNA

SEQ ID NO: 206499 - DNA, 80 bp, synthetic construct; identical to SEQ ID NO: 21769
  source 1..80: mol_type = other DNA

SEQ ID NO: 206500 - DNA, 80 bp, synthetic construct; identical to SEQ ID NO: 21770
  source 1..80: mol_type = other DNA

SEQ ID NO: 206501 - DNA, 80 bp, synthetic construct; identical to SEQ ID NO: 21771
  source 1..80: mol_type = other DNA

SEQ ID NO: 206502 - DNA, 80 bp, synthetic construct; identical to SEQ ID NO: 21772
  source 1..80: mol_type = other DNA

SEQ ID NO: 206503 - DNA, 80 bp, synthetic construct; identical to SEQ ID NO: 21773
  source 1..80: mol_type = other DNA

SEQ ID NO: 206504 - DNA, 80 bp, synthetic construct; identical to SEQ ID NO: 21774
  source 1..80: mol_type = other DNA

SEQ ID NO: 206505 - DNA, 80 bp, synthetic construct; identical to SEQ ID NO: 21775
  source 1..80: mol_type = other DNA

SEQ ID NO: 206506 - DNA, 80 bp, synthetic construct; identical to SEQ ID NO: 21776
  source 1..80: mol_type = other DNA

SEQ ID NO: 206507 - DNA, 80 bp, synthetic construct; identical to SEQ ID NO: 21777
  source 1..80: mol_type = other DNA

SEQ ID NO: 206508 - DNA, 80 bp, synthetic construct; identical to SEQ ID NO: 21778
  source 1..80: mol_type = other DNA

SEQ ID NO: 206509 - DNA, 80 bp, synthetic construct; identical to SEQ ID NO: 21779
  source 1..80: mol_type = other DNA

SEQ ID NO: 206510 - DNA, 80 bp, synthetic construct; identical to SEQ ID NO: 21780
  source 1..80: mol_type = other DNA

SEQ ID NO: 206511 - DNA, 80 bp, synthetic construct; identical to SEQ ID NO: 21781
  source 1..80: mol_type = other DNA

SEQ ID NO: 206512 - DNA, 80 bp, synthetic construct; identical to SEQ ID NO: 21782
  source 1..80: mol_type = other DNA

SEQ ID NO: 206513 - DNA, 80 bp, synthetic construct; identical to SEQ ID NO: 21783
  source 1..80: mol_type = other DNA

SEQ ID NO: 206514 - DNA, 80 bp, synthetic construct; identical to SEQ ID NO: 21784
  source 1..80: mol_type = other DNA

SEQ ID NO: 206515 - DNA, 80 bp, synthetic construct; identical to SEQ ID NO: 21785
  source 1..80: mol_type = other DNA

SEQ ID NO: 206516 - DNA, 80 bp, synthetic construct; identical to SEQ ID NO: 21786
  source 1..80: mol_type = other DNA

SEQ ID NO: 206517 - DNA, 80 bp, synthetic construct; identical to SEQ ID NO: 21787
  source 1..80: mol_type = other DNA

SEQ ID NO: 206518 - DNA, 80 bp, synthetic construct; identical to SEQ ID NO: 21788
  source 1..80: mol_type = other DNA

SEQ ID NO: 206519 - DNA, 80 bp, synthetic construct; identical to SEQ ID NO: 21789
  source 1..80: mol_type = other DNA

SEQ ID NO: 206520 - DNA, 80 bp, synthetic construct; identical to SEQ ID NO: 21790
  source 1..80: mol_type = other DNA

SEQ ID NO: 206521 - DNA, 80 bp, synthetic construct; identical to SEQ ID NO: 21791
  source 1..80: mol_type = other DNA

SEQ ID NO: 206522 - DNA, 80 bp, synthetic construct; identical to SEQ ID NO: 21792
  source 1..80: mol_type = other DNA

SEQ ID NO: 206523 - DNA, 80 bp, synthetic construct; identical to SEQ ID NO: 21793
  source 1..80: mol_type = other DNA

SEQ ID NO: 206524 - DNA, 80 bp, synthetic construct; identical to SEQ ID NO: 21794
  source 1..80: mol_type = other DNA

SEQ ID NO: 206525 - DNA, 80 bp, synthetic construct; identical to SEQ ID NO: 21795
  source 1..80: mol_type = other DNA

SEQ ID NO: 206526 - DNA, 80 bp, synthetic construct; identical to SEQ ID NO: 21796
  source 1..80: mol_type = other DNA

SEQ ID NO: 206527 - DNA, 80 bp, synthetic construct; identical to SEQ ID NO: 21797
  source 1..80: mol_type = other DNA

SEQ ID NO: 206528 - DNA, 80 bp, synthetic construct; identical to SEQ ID NO: 21798
  source 1..80: mol_type = other DNA

SEQ ID NO: 206529 - DNA, 80 bp, synthetic construct; identical to SEQ ID NO: 21799
  source 1..80: mol_type = other DNA

SEQ ID NO: 206530 - DNA, 80 bp, synthetic construct; identical to SEQ ID NO: 21800
  source 1..80: mol_type = other DNA

SEQ ID NO: 206531 - DNA, 80 bp, synthetic construct; identical to SEQ ID NO: 21801
  source 1..80: mol_type = other DNA

SEQ ID NO: 206532 - DNA, 80 bp, synthetic construct; identical to SEQ ID NO: 21802
  source 1..80: mol_type = other DNA

SEQ ID NO: 206533 - DNA, 80 bp, synthetic construct; identical to SEQ ID NO: 21803
  source 1..80: mol_type = other DNA

SEQ ID NO: 206534 - DNA, 80 bp, synthetic construct; identical to SEQ ID NO: 21804
  source 1..80: mol_type = other DNA

SEQ ID NO: 206535 - DNA, 80 bp, synthetic construct; identical to SEQ ID NO: 21805
  source 1..80: mol_type = other DNA

SEQ ID NO: 206536 - DNA, 80 bp, synthetic construct; identical to SEQ ID NO: 21806
  source 1..80: mol_type = other DNA

SEQ ID NO: 206537 - DNA, 80 bp, synthetic construct; identical to SEQ ID NO: 21807
  source 1..80: mol_type = other DNA

SEQ ID NO: 206538 - DNA, 80 bp, synthetic construct; identical to SEQ ID NO: 21808
  source 1..80: mol_type = other DNA

SEQ ID NO: 206539 - DNA, 80 bp, synthetic construct; identical to SEQ ID NO: 21809
  source 1..80: mol_type = other DNA

SEQ ID NO: 206540 - DNA, 80 bp, synthetic construct; identical to SEQ ID NO: 21810
  source 1..80: mol_type = other DNA

SEQ ID NO: 206541 - DNA, 80 bp, synthetic construct; identical to SEQ ID NO: 21811
  source 1..80: mol_type = other DNA

SEQ ID NO: 206542 - DNA, 80 bp, synthetic construct; identical to SEQ ID NO: 21812
  source 1..80: mol_type = other DNA

SEQ ID NO: 206543 - DNA, 80 bp, synthetic construct; identical to SEQ ID NO: 21813
  source 1..80: mol_type = other DNA

SEQ ID NO: 206544 - DNA, 80 bp, synthetic construct; identical to SEQ ID NO: 21814
  source 1..80: mol_type = other DNA

SEQ ID NO: 206545 - DNA, 80 bp, synthetic construct; identical to SEQ ID NO: 21815
  source 1..80: mol_type = other DNA

SEQ ID NO: 206546 - DNA, 80 bp, synthetic construct; identical to SEQ ID NO: 21816
  source 1..80: mol_type = other DNA

SEQ ID NO: 206547 - DNA, 80 bp, synthetic construct; identical to SEQ ID NO: 21817
  source 1..80: mol_type = other DNA

SEQ ID NO: 206548 - DNA, 80 bp, synthetic construct; identical to SEQ ID NO: 21818
  source 1..80: mol_type = other DNA

SEQ ID NO: 206549 - DNA, 80 bp, synthetic construct; identical to SEQ ID NO: 21819
  source 1..80: mol_type = other DNA

SEQ ID NO: 206550 - DNA, 80 bp, synthetic construct; identical to SEQ ID NO: 21820
  source 1..80: mol_type = other DNA

SEQ ID NO: 206551 - DNA, 80 bp, synthetic construct; identical to SEQ ID NO: 21821
  source 1..80: mol_type = other DNA

SEQ ID NO: 206552 - DNA, 80 bp, synthetic construct; identical to SEQ ID NO: 21822
  source 1..80: mol_type = other DNA

SEQ ID NO: 206553 - DNA, 80 bp, synthetic construct; identical to SEQ ID NO: 21823
  source 1..80: mol_type = other DNA

SEQ ID NO: 206554 - DNA, 80 bp, synthetic construct; identical to SEQ ID NO: 21824
  source 1..80: mol_type = other DNA

SEQ ID NO: 206555 - DNA, 80 bp, synthetic construct; identical to SEQ ID NO: 21825
  source 1..80: mol_type = other DNA

SEQ ID NO: 206556 - DNA, 80 bp, synthetic construct; identical to SEQ ID NO: 21826
  source 1..80: mol_type = other DNA

SEQ ID NO: 206557 - DNA, 80 bp, synthetic construct; identical to SEQ ID NO: 21827
  source 1..80: mol_type = other DNA

SEQ ID NO: 206558 - DNA, 80 bp, synthetic construct; identical to SEQ ID NO: 21828
  source 1..80: mol_type = other DNA

SEQ ID NO: 206559 - DNA, 80 bp, synthetic construct; identical to SEQ ID NO: 21829
  source 1..80: mol_type = other DNA

SEQ ID NO: 206560 - DNA, 80 bp, synthetic construct; identical to SEQ ID NO: 21830
  source 1..80: mol_type = other DNA

SEQ ID NO: 206561 - DNA, 80 bp, synthetic construct; identical to SEQ ID NO: 21831
  source 1..80: mol_type = other DNA

SEQ ID NO: 206562 - DNA, 80 bp, synthetic construct; identical to SEQ ID NO: 21832
  source 1..80: mol_type = other DNA

SEQ ID NO: 206563 - DNA, 80 bp, synthetic construct; identical to SEQ ID NO: 21833
  source 1..80: mol_type = other DNA

SEQ ID NO: 206564 - DNA, 80 bp, synthetic construct; identical to SEQ ID NO: 21834
  source 1..80: mol_type = other DNA

SEQ ID NO: 206565 - DNA, 80 bp, synthetic construct; identical to SEQ ID NO: 21835
  source 1..80: mol_type = other DNA

SEQ ID NO: 206566 - DNA, 80 bp, synthetic construct; identical to SEQ ID NO: 21836
  source 1..80: mol_type = other DNA

SEQ ID NO: 206567 - DNA, 80 bp, synthetic construct; identical to SEQ ID NO: 21837
  source 1..80: mol_type = other DNA

SEQ ID NO: 206568 - DNA, 80 bp, synthetic construct; identical to SEQ ID NO: 21838
  source 1..80: mol_type = other DNA

SEQ ID NO: 206569 - DNA, 80 bp, synthetic construct; identical to SEQ ID NO: 21839
  source 1..80: mol_type = other DNA

SEQ ID NO: 206570 - DNA, 80 bp, synthetic construct; identical to SEQ ID NO: 21840
  source 1..80: mol_type = other DNA

SEQ ID NO: 206571 - DNA, 80 bp, synthetic construct; identical to SEQ ID NO: 21841
  source 1..80: mol_type = other DNA

SEQ ID NO: 206572 - DNA, 80 bp, synthetic construct; identical to SEQ ID NO: 21842
  source 1..80: mol_type = other DNA

SEQ ID NO: 206573 - DNA, 80 bp, synthetic construct; identical to SEQ ID NO: 21843
  source 1..80: mol_type = other DNA

SEQ ID NO: 206574 - DNA, 80 bp, synthetic construct; identical to SEQ ID NO: 21844
  source 1..80: mol_type = other DNA

SEQ ID NO: 206575 - DNA, 80 bp, synthetic construct; identical to SEQ ID NO: 21845
  source 1..80: mol_type = other DNA

SEQ ID NO: 206576 - DNA, 80 bp, synthetic construct; identical to SEQ ID NO: 21846
  source 1..80: mol_type = other DNA

SEQ ID NO: 206577 - DNA, 80 bp, synthetic construct; identical to SEQ ID NO: 21847
  source 1..80: mol_type = other DNA

SEQ ID NO: 206578 - DNA, 80 bp, synthetic construct; identical to SEQ ID NO: 21848
  source 1..80: mol_type = other DNA

SEQ ID NO: 206579 - DNA, 80 bp, synthetic construct; identical to SEQ ID NO: 21849
  source 1..80: mol_type = other DNA

SEQ ID NO: 206580 - DNA, 80 bp, synthetic construct; identical to SEQ ID NO: 21850
  source 1..80: mol_type = other DNA

SEQ ID NO: 206581 - DNA, 80 bp, synthetic construct; identical to SEQ ID NO: 21851
  source 1..80: mol_type = other DNA

SEQ ID NO: 206582 - DNA, 80 bp, synthetic construct; identical to SEQ ID NO: 21852
  source 1..80: mol_type = other DNA

SEQ ID NO: 206583 - DNA, 80 bp, synthetic construct; identical to SEQ ID NO: 21853
  source 1..80: mol_type = other DNA

SEQ ID NO: 206584 - DNA, 80 bp, synthetic construct; identical to SEQ ID NO: 21854
  source 1..80: mol_type = other DNA

SEQ ID NO: 206585 - DNA, 80 bp, synthetic construct; identical to SEQ ID NO: 21855
  source 1..80: mol_type = other DNA

SEQ ID NO: 206586 - DNA, 80 bp, synthetic construct; identical to SEQ ID NO: 21856
  source 1..80: mol_type = other DNA

SEQ ID NO: 206587 - DNA, 80 bp, synthetic construct; identical to SEQ ID NO: 21857
  source 1..80: mol_type = other DNA

SEQ ID NO: 206588 - DNA, 80 bp, synthetic construct; identical to SEQ ID NO: 21858
  source 1..80: mol_type = other DNA

SEQ ID NO: 206589 - DNA, 80 bp, synthetic construct; identical to SEQ ID NO: 21859
  source 1..80: mol_type = other DNA

SEQ ID NO: 206590 - DNA, 80 bp, synthetic construct; identical to SEQ ID NO: 21860
  source 1..80: mol_type = other DNA

SEQ ID NO: 206591 - DNA, 80 bp, synthetic construct; identical to SEQ ID NO: 21861
  source 1..80: mol_type = other DNA

SEQ ID NO: 206592 - DNA, 80 bp, synthetic construct; identical to SEQ ID NO: 21862
  source 1..80: mol_type = other DNA

SEQ ID NO: 206593 - DNA, 80 bp, synthetic construct; identical to SEQ ID NO: 21863
  source 1..80: mol_type = other DNA

SEQ ID NO: 206594 - DNA, 80 bp, synthetic construct; identical to SEQ ID NO: 21864
  source 1..80: mol_type = other DNA

SEQ ID NO: 206595 - DNA, 80 bp, synthetic construct; identical to SEQ ID NO: 21865
  source 1..80: mol_type = other DNA

SEQ ID NO: 206596 - DNA, 80 bp, synthetic construct; identical to SEQ ID NO: 21866
  source 1..80: mol_type = other DNA

SEQ ID NO: 206597 - DNA, 80 bp, synthetic construct; identical to SEQ ID NO: 21867
  source 1..80: mol_type = other DNA

SEQ ID NO: 206598 - DNA, 80 bp, synthetic construct; identical to SEQ ID NO: 21868
  source 1..80: mol_type = other DNA

SEQ ID NO: 206599 - DNA, 80 bp, synthetic construct; identical to SEQ ID NO: 21869
  source 1..80: mol_type = other DNA

SEQ ID NO: 206600 - DNA, 80 bp, synthetic construct; identical to SEQ ID NO: 21870
  source 1..80: mol_type = other DNA

SEQ ID NO: 206601 - DNA, 80 bp, synthetic construct; identical to SEQ ID NO: 21871
  source 1..80: mol_type = other DNA

SEQ ID NO: 206602 - DNA, 80 bp, synthetic construct; identical to SEQ ID NO: 21872
  source 1..80: mol_type = other DNA

SEQ ID NO: 206603 - DNA, 80 bp, synthetic construct; identical to SEQ ID NO: 21873
  source 1..80: mol_type = other DNA

SEQ ID NO: 206604 - DNA, 80 bp, synthetic construct; identical to SEQ ID NO: 21874
  source 1..80: mol_type = other DNA

SEQ ID NO: 206605 - DNA, 80 bp, synthetic construct; identical to SEQ ID NO: 21875
  source 1..80: mol_type = other DNA

SEQ ID NO: 206606 - DNA, 80 bp, synthetic construct; identical to SEQ ID NO: 21876
  source 1..80: mol_type = other DNA

SEQ ID NO: 206607 - DNA, 80 bp, synthetic construct; identical to SEQ ID NO: 21877
  source 1..80: mol_type = other DNA

SEQ ID NO: 206608 - DNA, 80 bp, synthetic construct; identical to SEQ ID NO: 21878
  source 1..80: mol_type = other DNA

SEQ ID NO: 206609 - DNA, 80 bp, synthetic construct; identical to SEQ ID NO: 21879
  source 1..80: mol_type = other DNA

SEQ ID NO: 206610 - DNA, 80 bp, synthetic construct; identical to SEQ ID NO: 21880
  source 1..80: mol_type = other DNA

SEQ ID NO: 206611 - DNA, 80 bp, synthetic construct; identical to SEQ ID NO: 21881
  source 1..80: mol_type = other DNA

SEQ ID NO: 206612 - DNA, 80 bp, synthetic construct; identical to SEQ ID NO: 21882
  source 1..80: mol_type = other DNA

SEQ ID NO: 206613 - DNA, 80 bp, synthetic construct; identical to SEQ ID NO: 21883
  source 1..80: mol_type = other DNA

SEQ ID NO: 206614 - DNA, 80 bp, synthetic construct; identical to SEQ ID NO: 21884
  source 1..80: mol_type = other DNA

SEQ ID NO: 206615 - DNA, 80 bp, synthetic construct; identical to SEQ ID NO: 21885
  source 1..80: mol_type = other DNA

SEQ ID NO: 206616 - DNA, 80 bp, synthetic construct; identical to SEQ ID NO: 21886
  source 1..80: mol_type = other DNA

SEQ ID NO: 206617 - DNA, 80 bp, synthetic construct; identical to SEQ ID NO: 21887
  source 1..80: mol_type = other DNA

SEQ ID NO: 206618 - DNA, 80 bp, synthetic construct; identical to SEQ ID NO: 21888
  source 1..80: mol_type = other DNA

SEQ ID NO: 206619 - DNA, 80 bp, synthetic construct; identical to SEQ ID NO: 21889
  source 1..80: mol_type = other DNA

SEQ ID NO: 206620 - DNA, 80 bp, synthetic construct; identical to SEQ ID NO: 21890
  source 1..80: mol_type = other DNA

SEQ ID NO: 206621 - DNA, 80 bp, synthetic construct; identical to SEQ ID NO: 21891
  source 1..80: mol_type = other DNA

SEQ ID NO: 206622 - DNA, 80 bp, synthetic construct; identical to SEQ ID NO: 21892
  source 1..80: mol_type = other DNA

SEQ ID NO: 206623 - DNA, 80 bp, synthetic construct; identical to SEQ ID NO: 21893
  source 1..80: mol_type = other DNA

SEQ ID NO: 206624 - DNA, 80 bp, synthetic construct; identical to SEQ ID NO: 21894
  source 1..80: mol_type = other DNA

SEQ ID NO: 206625 - DNA, 80 bp, synthetic construct; identical to SEQ ID NO: 21895
  source 1..80: mol_type = other DNA

SEQ ID NO: 206626 - DNA, 80 bp, synthetic construct; identical to SEQ ID NO: 21896
  source 1..80: mol_type = other DNA

SEQ ID NO: 206627 - DNA, 80 bp, synthetic construct; identical to SEQ ID NO: 21897
  source 1..80: mol_type = other DNA

SEQ ID NO: 206628 - DNA, 80 bp, synthetic construct; identical to SEQ ID NO: 21898
  source 1..80: mol_type = other DNA

SEQ ID NO: 206629 - DNA, 80 bp, synthetic construct; identical to SEQ ID NO: 21899
  source 1..80: mol_type = other DNA

SEQ ID NO: 206630 - DNA, 80 bp, synthetic construct; identical to SEQ ID NO: 21900
  source 1..80: mol_type = other DNA

SEQ ID NO: 206631 - DNA, 80 bp, synthetic construct; identical to SEQ ID NO: 21901
  source 1..80: mol_type = other DNA

SEQ ID NO: 206632 - DNA, 80 bp, synthetic construct; identical to SEQ ID NO: 21902
  source 1..80: mol_type = other DNA

SEQ ID NO: 206633 - DNA, 80 bp, synthetic construct; identical to SEQ ID NO: 21903
  source 1..80: mol_type = other DNA

SEQ ID NO: 206634 - DNA, 80 bp, synthetic construct; identical to SEQ ID NO: 21904
  source 1..80: mol_type = other DNA

SEQ ID NO: 206635 - DNA, 80 bp, synthetic construct; identical to SEQ ID NO: 21905
  source 1..80: mol_type = other DNA

SEQ ID NO: 206636 - DNA, 80 bp, synthetic construct; identical to SEQ ID NO: 21906
  source 1..80: mol_type = other DNA

SEQ ID NO: 206637 - DNA, 80 bp, synthetic construct; identical to SEQ ID NO: 21907
  source 1..80: mol_type = other DNA

SEQ ID NO: 206638 - DNA, 80 bp, synthetic construct; identical to SEQ ID NO: 21908
  source 1..80: mol_type = other DNA

SEQ ID NO: 206639 - DNA, 80 bp, synthetic construct; identical to SEQ ID NO: 21909
  source 1..80: mol_type = other DNA

SEQ ID NO: 206640 - DNA, 80 bp, synthetic construct; identical to SEQ ID NO: 21910
  source 1..80: mol_type = other DNA

SEQ ID NO: 206641 - DNA, 80 bp, synthetic construct; identical to SEQ ID NO: 21911
  source 1..80: mol_type = other DNA

SEQ ID NO: 206642 - DNA, 80 bp, synthetic construct; identical to SEQ ID NO: 21912
  source 1..80: mol_type = other DNA

SEQ ID NO: 206643 - DNA, 80 bp, synthetic construct; identical to SEQ ID NO: 21913
  source 1..80: mol_type = other DNA

SEQ ID NO: 206644 - DNA, 80 bp, synthetic construct; identical to SEQ ID NO: 21914
  source 1..80: mol_type = other DNA

SEQ ID NO: 206645 - DNA, 80 bp, synthetic construct; identical to SEQ ID NO: 21915
  source 1..80: mol_type = other DNA

SEQ ID NO: 206646 - DNA, 80 bp, synthetic construct; identical to SEQ ID NO: 21916
  source 1..80: mol_type = other DNA

SEQ ID NO: 206647 - DNA, 80 bp, synthetic construct; identical to SEQ ID NO: 21917
  source 1..80: mol_type = other DNA

SEQ ID NO: 206648 - DNA, 80 bp, synthetic construct; identical to SEQ ID NO: 21918
  source 1..80: mol_type = other DNA

SEQ ID NO: 206649 - DNA, 80 bp, synthetic construct; identical to SEQ ID NO: 21919
  source 1..80: mol_type = other DNA

SEQ ID NO: 206650 - DNA, 80 bp, synthetic construct; identical to SEQ ID NO: 21920
  source 1..80: mol_type = other DNA

SEQ ID NO: 206651 - DNA, 80 bp, synthetic construct; identical to SEQ ID NO: 21921
  source 1..80: mol_type = other DNA

SEQ ID NO: 206652 - DNA, 80 bp, synthetic construct; identical to SEQ ID NO: 21922
  source 1..80: mol_type = other DNA

SEQ ID NO: 206653 - DNA, 80 bp, synthetic construct; identical to SEQ ID NO: 21923
  source 1..80: mol_type = other DNA

SEQ ID NO: 206654 - DNA, 80 bp, synthetic construct; identical to SEQ ID NO: 21924
  source 1..80: mol_type = other DNA

SEQ ID NO: 206655 - DNA, 80 bp, synthetic construct; identical to SEQ ID NO: 21925
  source 1..80: mol_type = other DNA

SEQ ID NO: 206656 - DNA, 80 bp, synthetic construct; identical to SEQ ID NO: 21926
  source 1..80: mol_type = other DNA

SEQ ID NO: 206657 - DNA, 80 bp, synthetic construct; identical to SEQ ID NO: 21927
  source 1..80: mol_type = other DNA

SEQ ID NO: 206658 - DNA, 80 bp, synthetic construct; identical to SEQ ID NO: 21928
  source 1..80: mol_type = other DNA

SEQ ID NO: 206659 - DNA, 80 bp, synthetic construct; identical to SEQ ID NO: 21929
  source 1..80: mol_type = other DNA

SEQ ID NO: 206660 - DNA, 80 bp, synthetic construct; identical to SEQ ID NO: 21930
  source 1..80: mol_type = other DNA

SEQ ID NO: 206661 - DNA, 80 bp, synthetic construct; identical to SEQ ID NO: 21931
  source 1..80: mol_type = other DNA

SEQ ID NO: 206662 - DNA, 80 bp, synthetic construct; identical to SEQ ID NO: 21932
  source 1..80: mol_type = other DNA

SEQ ID NO: 206663 - DNA, 80 bp, synthetic construct; identical to SEQ ID NO: 21933
  source 1..80: mol_type = other DNA

SEQ ID NO: 206664 - DNA, 80 bp, synthetic construct; identical to SEQ ID NO: 21934
  source 1..80: mol_type = other DNA

SEQ ID NO: 206665 - DNA, 80 bp, synthetic construct; identical to SEQ ID NO: 21935
  source 1..80: mol_type = other DNA

SEQ ID NO: 206666 - DNA, 80 bp, synthetic construct; identical to SEQ ID NO: 21936
  source 1..80: mol_type = other DNA

SEQ ID NO: 206667 - DNA, 80 bp, synthetic construct; identical to SEQ ID NO: 21937
  source 1..80: mol_type = other DNA

SEQ ID NO: 206668 - DNA, 80 bp, synthetic construct; identical to SEQ ID NO: 21938
  source 1..80: mol_type = other DNA

SEQ ID NO: 206669 - DNA, 80 bp, synthetic construct; identical to SEQ ID NO: 21939
  source 1..80: mol_type = other DNA

SEQ ID NO: 206670 - DNA, 80 bp, synthetic construct; identical to SEQ ID NO: 21940
  source 1..80: mol_type = other DNA

SEQ ID NO: 206671 - DNA, 80 bp, synthetic construct; identical to SEQ ID NO: 21941
  source 1..80: mol_type = other DNA

SEQ ID NO: 206672 - DNA, 80 bp, synthetic construct; identical to SEQ ID NO: 21942
  source 1..80: mol_type = other DNA

SEQ ID NO: 206673 - DNA, 80 bp, synthetic construct; identical to SEQ ID NO: 21943
  source 1..80: mol_type = other DNA

SEQ ID NO: 206674 - DNA, 80 bp, synthetic construct; identical to SEQ ID NO: 21944
  source 1..80: mol_type = other DNA

SEQ ID NO: 206675 - DNA, 80 bp, synthetic construct; identical to SEQ ID NO: 21945
  source 1..80: mol_type = other DNA

SEQ ID NO: 206676 - DNA, 80 bp, synthetic construct; identical to SEQ ID NO: 21946
  source 1..80: mol_type = other DNA

SEQ ID NO: 206677 - DNA, 80 bp, synthetic construct; identical to SEQ ID NO: 21947
  source 1..80: mol_type = other DNA

SEQ ID NO: 206678 - DNA, 80 bp, synthetic construct; identical to SEQ ID NO: 21948
  source 1..80: mol_type = other DNA

SEQ ID NO: 206679 - DNA, 80 bp, synthetic construct; identical to SEQ ID NO: 21949
  source 1..80: mol_type = other DNA

SEQ ID NO: 206680 - DNA, 80 bp, synthetic construct; identical to SEQ ID NO: 21950
  source 1..80: mol_type = other DNA

SEQ ID NO: 206681 - DNA, 80 bp, synthetic construct; identical to SEQ ID NO: 21951
  source 1..80: mol_type = other DNA

SEQ ID NO: 206682 - DNA, 80 bp, synthetic construct; identical to SEQ ID NO: 21952
  source 1..80: mol_type = other DNA

SEQ ID NO: 206683 - DNA, 80 bp, synthetic construct; identical to SEQ ID NO: 21953
  source 1..80: mol_type = other DNA

SEQ ID NO: 206684 - DNA, 80 bp, synthetic construct; identical to SEQ ID NO: 21954
  source 1..80: mol_type = other DNA

SEQ ID NO: 206685 - DNA, 80 bp, synthetic construct; identical to SEQ ID NO: 21955
  source 1..80: mol_type = other DNA

SEQ ID NO: 206686 - DNA, 80 bp, synthetic construct; identical to SEQ ID NO: 21956
  source 1..80: mol_type = other DNA

SEQ ID NO: 206687 - DNA, 80 bp, synthetic construct; identical to SEQ ID NO: 21957
  source 1..80: mol_type = other DNA

SEQ ID NO: 206688 - DNA, 80 bp, synthetic construct; identical to SEQ ID NO: 21958
  source 1..80: mol_type = other DNA

SEQ ID NO: 206689 - DNA, 80 bp, synthetic construct; identical to SEQ ID NO: 21959
  source 1..80: mol_type = other DNA

SEQ ID NO: 206690 - DNA, 80 bp, synthetic construct; identical to SEQ ID NO: 21960
  source 1..80: mol_type = other DNA

SEQ ID NO: 206691 - DNA, 80 bp, synthetic construct; identical to SEQ ID NO: 21961
  source 1..80: mol_type = other DNA

SEQ ID NO: 206692 - DNA, 80 bp, synthetic construct; identical to SEQ ID NO: 21962
  source 1..80: mol_type = other DNA

SEQ ID NO: 206693 - DNA, 80 bp, synthetic construct; identical to SEQ ID NO: 21963
  source 1..80: mol_type = other DNA

SEQ ID NO: 206694 - DNA, 80 bp, synthetic construct; identical to SEQ ID NO: 21964
  source 1..80: mol_type = other DNA

SEQ ID NO: 206695 - DNA, 80 bp, synthetic construct; identical to SEQ ID NO: 21965
  source 1..80: mol_type = other DNA

SEQ ID NO: 206696 - DNA, 80 bp, synthetic construct; identical to SEQ ID NO: 21966
  source 1..80: mol_type = other DNA

SEQ ID NO: 206697 - DNA, 80 bp, synthetic construct; identical to SEQ ID NO: 21967
  source 1..80: mol_type = other DNA

SEQ ID NO: 206698 - DNA, 80 bp, synthetic construct; identical to SEQ ID NO: 21968
  source 1..80: mol_type = other DNA

SEQ ID NO: 206699 - DNA, 80 bp, synthetic construct; identical to SEQ ID NO: 21969
  source 1..80: mol_type = other DNA

SEQ ID NO: 206700 - DNA, 80 bp, synthetic construct; identical to SEQ ID NO: 21970
  source 1..80: mol_type = other DNA

SEQ ID NO: 206701 - DNA, 80 bp, synthetic construct; identical to SEQ ID NO: 21971
  source 1..80: mol_type = other DNA

SEQ ID NO: 206702 - DNA, 80 bp, synthetic construct; identical to SEQ ID NO: 21972
  source 1..80: mol_type = other DNA

SEQ ID NO: 206703 - DNA, 80 bp, synthetic construct; identical to SEQ ID NO: 21973
  source 1..80: mol_type = other DNA

SEQ ID NO: 206704 - DNA, 80 bp, synthetic construct; identical to SEQ ID NO: 21974
  source 1..80: mol_type = other DNA

SEQ ID NO: 206705 - DNA, 80 bp, synthetic construct; identical to SEQ ID NO: 21975
  source 1..80: mol_type = other DNA

SEQ ID NO: 206706 - DNA, 80 bp, synthetic construct; identical to SEQ ID NO: 21976
  source 1..80: mol_type = other DNA

SEQ ID NO: 206707 - DNA, 80 bp, synthetic construct; identical to SEQ ID NO: 21977
  source 1..80: mol_type = other DNA

SEQ ID NO: 206708 - DNA, 80 bp, synthetic construct; identical to SEQ ID NO: 21978
  source 1..80: mol_type = other DNA

SEQ ID NO: 206709 - DNA, 80 bp, synthetic construct; identical to SEQ ID NO: 21979
  source 1..80: mol_type = other DNA

SEQ ID NO: 206710 - DNA, 80 bp, synthetic construct; identical to SEQ ID NO: 21980
  source 1..80: mol_type = other DNA

SEQ ID NO: 206711 - DNA, 80 bp, synthetic construct; identical to SEQ ID NO: 21981
  source 1..80: mol_type = other DNA

SEQ ID NO: 206712 - DNA, 80 bp, synthetic construct; identical to SEQ ID NO: 21982
  source 1..80: mol_type = other DNA

SEQ ID NO: 206713 - DNA, 80 bp, synthetic construct; identical to SEQ ID NO: 21983
  source 1..80: mol_type = other DNA

SEQ ID NO: 206714 - DNA, 80 bp, synthetic construct; identical to SEQ ID NO: 21984
  source 1..80: mol_type = other DNA

SEQ ID NO: 206715 - DNA, 80 bp, synthetic construct; identical to SEQ ID NO: 21985
  source 1..80: mol_type = other DNA

SEQ ID NO: 206716 - DNA, 80 bp, synthetic construct; identical to SEQ ID NO: 21986
  source 1..80: mol_type = other DNA

SEQ ID NO: 206717 - DNA, 80 bp, synthetic construct; identical to SEQ ID NO: 21987
  source 1..80: mol_type = other DNA

SEQ ID NO: 206718 - DNA, 80 bp, synthetic construct; identical to SEQ ID NO: 21988
  source 1..80: mol_type = other DNA

SEQ ID NO: 206719 - DNA, 80 bp, synthetic construct; identical to SEQ ID NO: 21989
  source 1..80: mol_type = other DNA

SEQ ID NO: 206720 - DNA, 80 bp, synthetic construct; identical to SEQ ID NO: 21990
  source 1..80: mol_type = other DNA

SEQ ID NO: 206721 - DNA, 80 bp, synthetic construct; identical to SEQ ID NO: 21991
  source 1..80: mol_type = other DNA

SEQ ID NO: 206722 - DNA, 80 bp, synthetic construct; identical to SEQ ID NO: 21992
  source 1..80: mol_type = other DNA

SEQ ID NO: 206723 - DNA, 80 bp, synthetic construct; identical to SEQ ID NO: 21993
  source 1..80: mol_type = other DNA

SEQ ID NO: 206724 - DNA, 80 bp, synthetic construct; identical to SEQ ID NO: 21994
  source 1..80: mol_type = other DNA

SEQ ID NO: 206725 - DNA, 80 bp, synthetic construct; identical to SEQ ID NO: 21995
  source 1..80: mol_type = other DNA

SEQ ID NO: 206726 - DNA, 80 bp, synthetic construct; identical to SEQ ID NO: 21996
  source 1..80: mol_type = other DNA

SEQ ID NO: 206727 - DNA, 80 bp, synthetic construct; identical to SEQ ID NO: 21997
  source 1..80: mol_type = other DNA

SEQ ID NO: 206728 - DNA, 80 bp, synthetic construct; identical to SEQ ID NO: 21998
  source 1..80: mol_type = other DNA

SEQ ID NO: 206729 - DNA, 80 bp, synthetic construct; identical to SEQ ID NO: 21999
  source 1..80: mol_type = other DNA

SEQ ID NO: 206730 - DNA, 80 bp, synthetic construct; identical to SEQ ID NO: 22000
  source 1..80: mol_type = other DNA

SEQ ID NO: 206731 - DNA, 80 bp, synthetic construct; identical to SEQ ID NO: 22001
  source 1..80: mol_type = other DNA

SEQ ID NO: 206732 - DNA, 80 bp, synthetic construct; identical to SEQ ID NO: 22002
  source 1..80: mol_type = other DNA

SEQ ID NO: 206733 - DNA, 80 bp, synthetic construct; identical to SEQ ID NO: 22003
  source 1..80: mol_type = other DNA

SEQ ID NO: 206734 - DNA, 80 bp, synthetic construct; identical to SEQ ID NO: 22004
  source 1..80: mol_type = other DNA

SEQ ID NO: 206735 - DNA, 80 bp, synthetic construct; identical to SEQ ID NO: 22005
  source 1..80: mol_type = other DNA

SEQ ID NO: 206736 - DNA, 80 bp, synthetic construct; identical to SEQ ID NO: 22006
  source 1..80: mol_type = other DNA

SEQ ID NO: 206737 - DNA, 80 bp, synthetic construct; identical to SEQ ID NO: 22007
  source 1..80: mol_type = other DNA

SEQ ID NO: 206738 - DNA, 80 bp, synthetic construct; identical to SEQ ID NO: 22008
  source 1..80: mol_type = other DNA

SEQ ID NO: 206739 - DNA, 80 bp, synthetic construct; identical to SEQ ID NO: 22009
  source 1..80: mol_type = other DNA

SEQ ID NO: 206740 - DNA, 80 bp, synthetic construct; identical to SEQ ID NO: 22010
  source 1..80: mol_type = other DNA

SEQ ID NO: 206741 - DNA, 80 bp, synthetic construct; identical to SEQ ID NO: 22011
  source 1..80: mol_type = other DNA

SEQ ID NO: 206742 - DNA, 80 bp, synthetic construct; identical to SEQ ID NO: 22012
  source 1..80: mol_type = other DNA

SEQ ID NO: 206743 - DNA, 80 bp, synthetic construct; identical to SEQ ID NO: 22013
  source 1..80: mol_type = other DNA

SEQ ID NO: 206744 - DNA, 80 bp, synthetic construct; identical to SEQ ID NO: 22014
  source 1..80: mol_type = other DNA

SEQ ID NO: 206745 - DNA, 80 bp, synthetic construct; identical to SEQ ID NO: 22015
  source 1..80: mol_type = other DNA

SEQ ID NO: 206746 - DNA, 80 bp, synthetic construct; identical to SEQ ID NO: 22016
  source 1..80: mol_type = other DNA

SEQ ID NO: 206747 - DNA, 80 bp, synthetic construct; identical to SEQ ID NO: 22017
  source 1..80: mol_type = other DNA

SEQ ID NO: 206748 - DNA, 80 bp, synthetic construct; identical to SEQ ID NO: 22018
  source 1..80: mol_type = other DNA

SEQ ID NO: 206749 - DNA, 80 bp, synthetic construct; identical to SEQ ID NO: 22019
  source 1..80: mol_type = other DNA

SEQ ID NO: 206750 - DNA, 80 bp, synthetic construct; identical to SEQ ID NO: 22020
  source 1..80: mol_type = other DNA

SEQ ID NO: 206751 - DNA, 80 bp, synthetic construct; identical to SEQ ID NO: 22021
  source 1..80: mol_type = other DNA

SEQ ID NO: 206752 - DNA, 80 bp, synthetic construct; identical to SEQ ID NO: 22022
  source 1..80: mol_type = other DNA

SEQ ID NO: 206753 - DNA, 80 bp, synthetic construct; identical to SEQ ID NO: 22023
  source 1..80: mol_type = other DNA

SEQ ID NO: 206754 - DNA, 80 bp, synthetic construct; identical to SEQ ID NO: 22024
  source 1..80: mol_type = other DNA

SEQ ID NO: 206755 - DNA, 80 bp, synthetic construct; identical to SEQ ID NO: 22025
  source 1..80: mol_type = other DNA

SEQ ID NO: 206756 - DNA, 80 bp, synthetic construct; identical to SEQ ID NO: 22026
  source 1..80: mol_type = other DNA

SEQ ID NO: 206757 - DNA, 80 bp, synthetic construct; identical to SEQ ID NO: 22027
  source 1..80: mol_type = other DNA

SEQ ID NO: 206758 - DNA, 80 bp, synthetic construct; identical to SEQ ID NO: 22028
  source 1..80: mol_type = other DNA

SEQ ID NO: 206759 - DNA, 80 bp, synthetic construct; identical to SEQ ID NO: 22029
  source 1..80: mol_type = other DNA

SEQ ID NO: 206760 - DNA, 80 bp, synthetic construct; identical to SEQ ID NO: 22030
  source 1..80: mol_type = other DNA

SEQ ID NO: 206761 - DNA, 80 bp, synthetic construct; identical to SEQ ID NO: 22031
  source 1..80: mol_type = other DNA

SEQ ID NO: 206762 - DNA, 80 bp, synthetic construct; identical to SEQ ID NO: 22032
  source 1..80: mol_type = other DNA

SEQ ID NO: 206763 - DNA, 80 bp, synthetic construct; identical to SEQ ID NO: 22033
  source 1..80: mol_type = other DNA

SEQ ID NO: 206764 - DNA, 80 bp, synthetic construct; identical to SEQ ID NO: 22034
  source 1..80: mol_type = other DNA

SEQ ID NO: 206765 - DNA, 80 bp, synthetic construct; identical to SEQ ID NO: 22035
  source 1..80: mol_type = other DNA

SEQ ID NO: 206766 - DNA, 80 bp, synthetic construct; identical to SEQ ID NO: 22036
  source 1..80: mol_type = other DNA

SEQ ID NO: 206767 - DNA, 80 bp, synthetic construct; identical to SEQ ID NO: 22037
  source 1..80: mol_type = other DNA

SEQ ID NO: 206768 - DNA, 80 bp, synthetic construct; identical to SEQ ID NO: 22038
  source 1..80: mol_type = other DNA

SEQ ID NO: 206769 - DNA, 80 bp, synthetic construct; identical to SEQ ID NO: 22039
  source 1..80: mol_type = other DNA

SEQ ID NO: 206770 - DNA, 80 bp, synthetic construct; identical to SEQ ID NO: 22040
  source 1..80: mol_type = other DNA

SEQ ID NO: 206771 - DNA, 80 bp, synthetic construct; identical to SEQ ID NO: 22041
  source 1..80: mol_type = other DNA

SEQ ID NO: 206772 - DNA, 80 bp, synthetic construct; identical to SEQ ID NO: 22042
  source 1..80: mol_type = other DNA

SEQ ID NO: 206773 - DNA, 80 bp, synthetic construct; identical to SEQ ID NO: 22043
  source 1..80: mol_type = other DNA

SEQ ID NO: 206774 - DNA, 80 bp, synthetic construct; identical to SEQ ID NO: 22044
  source 1..80: mol_type = other DNA

SEQ ID NO: 206775 - DNA, 80 bp, synthetic construct; identical to SEQ ID NO: 22045
  source 1..80: mol_type = other DNA

SEQ ID NO: 206776 - DNA, 80 bp, synthetic construct; identical to SEQ ID NO: 22046
  source 1..80: mol_type = other DNA

SEQ ID NO: 206777 - DNA, 80 bp, synthetic construct; identical to SEQ ID NO: 22047
  source 1..80: mol_type = other DNA

SEQ ID NO: 206778 - DNA, 80 bp, synthetic construct; identical to SEQ ID NO: 22048
  source 1..80: mol_type = other DNA

SEQ ID NO: 206779 - DNA, 80 bp, synthetic construct; identical to SEQ ID NO: 22049
  source 1..80: mol_type = other DNA

SEQ ID NO: 206780 - DNA, 80 bp, synthetic construct; identical to SEQ ID NO: 22050
  source 1..80: mol_type = other DNA

SEQ ID NO: 206781 - DNA, 80 bp, synthetic construct; identical to SEQ ID NO: 22051
  source 1..80: mol_type = other DNA

SEQ ID NO: 206782 - DNA, 80 bp, synthetic construct; identical to SEQ ID NO: 22052
  source 1..80: mol_type = other DNA

SEQ ID NO: 206783 - DNA, 80 bp, synthetic construct; identical to SEQ ID NO: 22053
  source 1..80: mol_type = other DNA

SEQ ID NO: 206784 - DNA, 80 bp, synthetic construct; identical to SEQ ID NO: 22054
  source 1..80: mol_type = other DNA

SEQ ID NO: 206785 - DNA, 80 bp, synthetic construct; identical to SEQ ID NO: 22055
  source 1..80: mol_type = other DNA

SEQ ID NO: 206786 - DNA, 80 bp, synthetic construct; identical to SEQ ID NO: 22056
  source 1..80: mol_type = other DNA

SEQ ID NO: 206787 - DNA, 80 bp, synthetic construct; identical to SEQ ID NO: 22057
  source 1..80: mol_type = other DNA

SEQ ID NO: 206788 - DNA, 80 bp, synthetic construct; identical to SEQ ID NO: 22058
  source 1..80: mol_type = other DNA

SEQ ID NO: 206789 - DNA, 80 bp, synthetic construct; identical to SEQ ID NO: 22059
  source 1..80: mol_type = other DNA

SEQ ID NO: 206790 - DNA, 80 bp, synthetic construct; identical to SEQ ID NO: 22060
  source 1..80: mol_type = other DNA

SEQ ID NO: 206791 - DNA, 80 bp, synthetic construct; identical to SEQ ID NO: 22061
  source 1..80: mol_type = other DNA

SEQ ID NO: 206792 - DNA, 80 bp, synthetic construct; identical to SEQ ID NO: 22062
  source 1..80: mol_type = other DNA

SEQ ID NO: 206793 - DNA, 80 bp, synthetic construct; identical to SEQ ID NO: 22063
  source 1..80: mol_type = other DNA

SEQ ID NO: 206794 - DNA, 80 bp, synthetic construct; identical to SEQ ID NO: 22064
  source 1..80: mol_type = other DNA

SEQ ID NO: 206795 - DNA, 80 bp, synthetic construct; identical to SEQ ID NO: 22065
  source 1..80: mol_type = other DNA

SEQ ID NO: 206796 - DNA, 80 bp, synthetic construct; identical to SEQ ID NO: 22066
  source 1..80: mol_type = other DNA

SEQ ID NO: 206797 - DNA, 80 bp, synthetic construct; identical to SEQ ID NO: 22067
  source 1..80: mol_type = other DNA

SEQ ID NO: 206798 - DNA, 80 bp, synthetic construct; identical to SEQ ID NO: 22068
  source 1..80: mol_type = other DNA

SEQ ID NO: 206799 - DNA, 80 bp, synthetic construct; identical to SEQ ID NO: 22069
  source 1..80: mol_type = other DNA

SEQ ID NO: 206800 - DNA, 80 bp, synthetic construct; identical to SEQ ID NO: 22070
  source 1..80: mol_type = other DNA

SEQ ID NO: 206801 - DNA, 80 bp, synthetic construct; identical to SEQ ID NO: 22071
  source 1..80: mol_type = other DNA

SEQ ID NO: 206802 - DNA, 80 bp, synthetic construct; identical to SEQ ID NO: 22072
  source 1..80: mol_type = other DNA

SEQ ID NO: 206803 - DNA, 80 bp, synthetic construct; identical to SEQ ID NO: 22073
  source 1..80: mol_type = other DNA

SEQ ID NO: 206804 - DNA, 80 bp, synthetic construct; identical to SEQ ID NO: 22074
  source 1..80: mol_type = other DNA

SEQ ID NO: 206805 - DNA, 80 bp, synthetic construct; identical to SEQ ID NO: 22075
  source 1..80: mol_type = other DNA

SEQ ID NO: 206806 - DNA, 80 bp, synthetic construct; identical to SEQ ID NO: 22076
  source 1..80: mol_type = other DNA

SEQ ID NO: 206807 - DNA, 80 bp, synthetic construct; identical to SEQ ID NO: 22077
  source 1..80: mol_type = other DNA

SEQ ID NO: 206808 - DNA, 80 bp, synthetic construct; identical to SEQ ID NO: 22078
  source 1..80: mol_type = other DNA

SEQ ID NO: 206809 - DNA, 80 bp, synthetic construct; identical to SEQ ID NO: 22079
  source 1..80: mol_type = other DNA

SEQ ID NO: 206810 - DNA, 80 bp, synthetic construct; identical to SEQ ID NO: 22080
  source 1..80: mol_type = other DNA

SEQ ID NO: 206811 - DNA, 80 bp, synthetic construct; identical to SEQ ID NO: 22081
  source 1..80: mol_type = other DNA

SEQ ID NO: 206812 - DNA, 80 bp, synthetic construct; identical to SEQ ID NO: 22082
  source 1..80: mol_type = other DNA

SEQ ID NO: 206813 - DNA, 80 bp, synthetic construct; identical to SEQ ID NO: 22083
  source 1..80: mol_type = other DNA

SEQ ID NO: 206814 - DNA, 80 bp, synthetic construct; identical to SEQ ID NO: 22084
  source 1..80: mol_type = other DNA

SEQ ID NO: 206815 - DNA, 80 bp, synthetic construct; identical to SEQ ID NO: 22085
  source 1..80: mol_type = other DNA

SEQ ID NO: 206816 - DNA, 80 bp, synthetic construct; identical to SEQ ID NO: 22086
  source 1..80: mol_type = other DNA

SEQ ID NO: 206817 - DNA, 80 bp, synthetic construct; identical to SEQ ID NO: 22087
  source 1..80: mol_type = other DNA

SEQ ID NO: 206818 - DNA, 80 bp, synthetic construct; identical to SEQ ID NO: 22088
  source 1..80: mol_type = other DNA

SEQ ID NO: 206819 - DNA, 80 bp, synthetic construct; identical to SEQ ID NO: 22089
  source 1..80: mol_type = other DNA

SEQ ID NO: 206820 - DNA, 80 bp, synthetic construct; identical to SEQ ID NO: 22090
  source 1..80: mol_type = other DNA

SEQ ID NO: 206821 - DNA, 80 bp, synthetic construct; identical to SEQ ID NO: 22091
  source 1..80: mol_type = other DNA

SEQ ID NO: 206822 - DNA, 80 bp, synthetic construct; identical to SEQ ID NO: 22092
  source 1..80: mol_type = other DNA

SEQ ID NO: 206823 - DNA, 80 bp, synthetic construct; identical to SEQ ID NO: 22093
  source 1..80: mol_type = other DNA

SEQ ID NO: 206824 - DNA, 80 bp, synthetic construct; identical to SEQ ID NO: 22094
  source 1..80: mol_type = other DNA

SEQ ID NO: 206825 - DNA, 80 bp, synthetic construct; identical to SEQ ID NO: 22095
  source 1..80: mol_type = other DNA

SEQ ID NO: 206826 - DNA, 80 bp, synthetic construct; identical to SEQ ID NO: 22096
  source 1..80: mol_type = other DNA

SEQ ID NO: 206827 - DNA, 80 bp, synthetic construct; identical to SEQ ID NO: 22097
  source 1..80: mol_type = other DNA

SEQ ID NO: 206828 - DNA, 80 bp, synthetic construct; identical to SEQ ID NO: 22098
  source 1..80: mol_type = other DNA

SEQ ID NO: 206829 - DNA, 80 bp, synthetic construct; identical to SEQ ID NO: 22099
  source 1..80: mol_type = other DNA

SEQ ID NO: 206830 - DNA, 80 bp, synthetic construct; identical to SEQ ID NO: 22100
  source 1..80: mol_type = other DNA

SEQ ID NO: 206831 - DNA, 80 bp, synthetic construct; identical to SEQ ID NO: 22101
  source 1..80: mol_type = other DNA

SEQ ID NO: 206832 - DNA, 80 bp, synthetic construct; identical to SEQ ID NO: 22102
  source 1..80: mol_type = other DNA

SEQ ID NO: 206833 - DNA, 80 bp, synthetic construct; identical to SEQ ID NO: 22103
  source 1..80: mol_type = other DNA

SEQ ID NO: 206834 - DNA, 80 bp, synthetic construct; identical to SEQ ID NO: 22104
  source 1..80: mol_type = other DNA

SEQ ID NO: 206835 - DNA, 80 bp, synthetic construct; identical to SEQ ID NO: 22105
  source 1..80: mol_type = other DNA

SEQ ID NO: 206836 - DNA, 80 bp, synthetic construct; identical to SEQ ID NO: 22106
  source 1..80: mol_type = other DNA

SEQ ID NO: 206837 - DNA, 80 bp, synthetic construct; identical to SEQ ID NO: 22107
  source 1..80: mol_type = other DNA

SEQ ID NO: 206838 - DNA, 80 bp, synthetic construct; identical to SEQ ID NO: 22108
  source 1..80: mol_type = other DNA

SEQ ID NO: 206839 - DNA, 80 bp, synthetic construct; identical to SEQ ID NO: 22109
  source 1..80: mol_type = other DNA

SEQ ID NO: 206840 - DNA, 80 bp, synthetic construct; identical to SEQ ID NO: 22110
  source 1..80: mol_type = other DNA

SEQ ID NO: 206841 - DNA, 80 bp, synthetic construct; identical to SEQ ID NO: 22111
  source 1..80: mol_type = other DNA

SEQ ID NO: 206842 - DNA, 80 bp, synthetic construct; identical to SEQ ID NO: 22112
  source 1..80: mol_type = other DNA

SEQ ID NO: 206843 - DNA, 80 bp, synthetic construct; identical to SEQ ID NO: 22113
  source 1..80: mol_type = other DNA

SEQ ID NO: 206844 - DNA, 80 bp, synthetic construct; identical to SEQ ID NO: 22114
  source 1..80: mol_type = other DNA

SEQ ID NO: 206845 - DNA, 80 bp, synthetic construct; identical to SEQ ID NO: 22115
  source 1..80: mol_type = other DNA

SEQ ID NO: 206846 - DNA, 80 bp, synthetic construct; identical to SEQ ID NO: 22116
  source 1..80: mol_type = other DNA

SEQ ID NO: 206847 - DNA, 80 bp, synthetic construct; identical to SEQ ID NO: 22117
  source 1..80: mol_type = other DNA

SEQ ID NO: 206848 - DNA, 80 bp, synthetic construct; identical to SEQ ID NO: 22118
  source 1..80: mol_type = other DNA

SEQ ID NO: 206849 - DNA, 80 bp, synthetic construct; identical to SEQ ID NO: 22119
  source 1..80: mol_type = other DNA

SEQ ID NO: 206850 - DNA, 80 bp, synthetic construct; identical to SEQ ID NO: 22120
  source 1..80: mol_type = other DNA

SEQ ID NO: 206851 - DNA, 80 bp, synthetic construct; identical to SEQ ID NO: 22121
  source 1..80: mol_type = other DNA

SEQ ID NO: 206852 - DNA, 80 bp, synthetic construct; identical to SEQ ID NO: 22122
  source 1..80: mol_type = other DNA

SEQ ID NO: 206853 - DNA, 80 bp, synthetic construct; identical to SEQ ID NO: 22123
  source 1..80: mol_type = other DNA

SEQ ID NO: 206854 - DNA, 80 bp, synthetic construct; identical to SEQ ID NO: 22124
  source 1..80: mol_type = other DNA

SEQ ID NO: 206855 - DNA, 80 bp, synthetic construct; identical to SEQ ID NO: 22125
  source 1..80: mol_type = other DNA

SEQ ID NO: 206856 - DNA, 80 bp, synthetic construct; identical to SEQ ID NO: 22126
  source 1..80: mol_type = other DNA

SEQ ID NO: 206857 - DNA, 80 bp, synthetic construct; identical to SEQ ID NO: 22127
  source 1..80: mol_type = other DNA

SEQ ID NO: 206858 - DNA, 80 bp, synthetic construct; identical to SEQ ID NO: 22128
  source 1..80: mol_type = other DNA

SEQ ID NO: 206859 - DNA, 80 bp, synthetic construct; identical to SEQ ID NO: 22129
  source 1..80: mol_type = other DNA

SEQ ID NO: 206860 - DNA, 80 bp, synthetic construct; identical to SEQ ID NO: 22130
  source 1..80: mol_type = other DNA

SEQ ID NO: 206861 - DNA, 80 bp, synthetic construct; identical to SEQ ID NO: 22131
  source 1..80: mol_type = other DNA

SEQ ID NO: 206862 - DNA, 80 bp, synthetic construct; identical to SEQ ID NO: 22132
  source 1..80: mol_type = other DNA

SEQ ID NO: 206863 - DNA, 80 bp, synthetic construct; identical to SEQ ID NO: 22133
  source 1..80: mol_type = other DNA

SEQ ID NO: 206864 - DNA, 80 bp, synthetic construct; identical to SEQ ID NO: 22134
  source 1..80: mol_type = other DNA

SEQ ID NO: 206865 - DNA, 80 bp, synthetic construct; identical to SEQ ID NO: 22135
  source 1..80: mol_type = other DNA

SEQ ID NO: 206866 - DNA, 80 bp, synthetic construct; identical to SEQ ID NO: 22136
  source 1..80: mol_type = other DNA

SEQ ID NO: 206867 - DNA, 80 bp, synthetic construct; identical to SEQ ID NO: 22137
  source 1..80: mol_type = other DNA

SEQ ID NO: 206868 - DNA, 80 bp, synthetic construct; identical to SEQ ID NO: 22138
  source 1..80: mol_type = other DNA

SEQ ID NO: 206869 - DNA, 80 bp, synthetic construct; identical to SEQ ID NO: 22139
  source 1..80: mol_type = other DNA

SEQ ID NO: 206870 - DNA, 80 bp, synthetic construct; identical to SEQ ID NO: 22140
  source 1..80: mol_type = other DNA

SEQ ID NO: 206871 - DNA, 80 bp, synthetic construct; identical to SEQ ID NO: 22141
  source 1..80: mol_type = other DNA

SEQ ID NO: 206872 - DNA, 80 bp, synthetic construct; identical to SEQ ID NO: 22142
  source 1..80: mol_type = other DNA

SEQ ID NO: 206873 - DNA, 80 bp, synthetic construct; identical to SEQ ID NO: 22143
  source 1..80: mol_type = other DNA

SEQ ID NO: 206874 - DNA, 80 bp, synthetic construct; identical to SEQ ID NO: 22144
  source 1..80: mol_type = other DNA

SEQ ID NO: 206875 - DNA, 80 bp, synthetic construct; identical to SEQ ID NO: 22145
  source 1..80: mol_type = other DNA

SEQ ID NO: 206876 - DNA, 80 bp, synthetic construct; identical to SEQ ID NO: 22146
  source 1..80: mol_type = other DNA

SEQ ID NO: 206877 - DNA, 80 bp, synthetic construct; identical to SEQ ID NO: 22147
  source 1..80: mol_type = other DNA

SEQ ID NO: 206878 - DNA, 80 bp, synthetic construct; identical to SEQ ID NO: 22148
  source 1..80: mol_type = other DNA

SEQ ID NO: 206879 - DNA, 80 bp, synthetic construct; identical to SEQ ID NO: 22149
  source 1..80: mol_type = other DNA

SEQ ID NO: 206880 - DNA, 80 bp, synthetic construct; identical to SEQ ID NO: 22150
  source 1..80: mol_type = other DNA

SEQ ID NO: 206881 - DNA, 80 bp, synthetic construct; identical to SEQ ID NO: 22151
  source 1..80: mol_type = other DNA

SEQ ID NO: 206882 - DNA, 80 bp, synthetic construct; identical to SEQ ID NO: 22152
  source 1..80: mol_type = other DNA

SEQ ID NO: 206883 - DNA, 80 bp, synthetic construct; identical to SEQ ID NO: 22153
  source 1..80: mol_type = other DNA

SEQ ID NO: 206884 - DNA, 80 bp, synthetic construct; identical to SEQ ID NO: 22154
  source 1..80: mol_type = other DNA

SEQ ID NO: 206885 - DNA, 80 bp, synthetic construct; identical to SEQ ID NO: 22155
  source 1..80: mol_type = other DNA

SEQ ID NO: 206886 - DNA, 80 bp, synthetic construct; identical to SEQ ID NO: 22156
  source 1..80: mol_type = other DNA

SEQ ID NO: 206887 - DNA, 80 bp, synthetic construct; identical to SEQ ID NO: 22157
  source 1..80: mol_type = other DNA

SEQ ID NO: 206888 - DNA, 80 bp, synthetic construct; identical to SEQ ID NO: 22158
  source 1..80: mol_type = other DNA

SEQ ID NO: 206889 - DNA, 80 bp, synthetic construct; identical to SEQ ID NO: 22159
  source 1..80: mol_type = other DNA

SEQ ID NO: 206890 - DNA, 80 bp, synthetic construct; identical to SEQ ID NO: 22160
  source 1..80: mol_type = other DNA

SEQ ID NO: 206891 - DNA, 80 bp, synthetic construct; identical to SEQ ID NO: 22161
  source 1..80: mol_type = other DNA

SEQ ID NO: 206892 - DNA, 80 bp, synthetic construct; identical to SEQ ID NO: 22162
  source 1..80: mol_type = other DNA

SEQ ID NO: 206893 - DNA, 80 bp, synthetic construct; identical to SEQ ID NO: 22163
  source 1..80: mol_type = other DNA

SEQ ID NO: 206894 - DNA, 80 bp, synthetic construct; identical to SEQ ID NO: 22164
  source 1..80: mol_type = other DNA

SEQ ID NO: 206895 - DNA, 80 bp, synthetic construct; identical to SEQ ID NO: 22165
  source 1..80: mol_type = other DNA

SEQ ID NO: 206896 - DNA, 80 bp, synthetic construct; identical to SEQ ID NO: 22166
  source 1..80: mol_type = other DNA

SEQ ID NO: 206897 - DNA, 80 bp, synthetic construct; identical to SEQ ID NO: 22167
  source 1..80: mol_type = other DNA

SEQ ID NO: 206898 - DNA, 80 bp, synthetic construct; identical to SEQ ID NO: 22168
  source 1..80: mol_type = other DNA

SEQ ID NO: 206899 - DNA, 80 bp, synthetic construct; identical to SEQ ID NO: 22169
  source 1..80: mol_type = other DNA

SEQ ID NO: 206900 - DNA, 80 bp, synthetic construct; identical to SEQ ID NO: 22170
  source 1..80: mol_type = other DNA

SEQ ID NO: 206901 - DNA, 80 bp, synthetic construct; identical to SEQ ID NO: 22171
  source 1..80: mol_type = other DNA

SEQ ID NO: 206902 - DNA, 80 bp, synthetic construct; identical to SEQ ID NO: 22172
  source 1..80: mol_type = other DNA

SEQ ID NO: 206903 - DNA, 80 bp, synthetic construct; identical to SEQ ID NO: 22173
  source 1..80: mol_type = other DNA

SEQ ID NO: 206904 - DNA, 80 bp, synthetic construct; identical to SEQ ID NO: 22174
  source 1..80: mol_type = other DNA

SEQ ID NO: 206905 - DNA, 80 bp, synthetic construct; identical to SEQ ID NO: 22175
  source 1..80: mol_type = other DNA

SEQ ID NO: 206906 - DNA, 80 bp, synthetic construct; identical to SEQ ID NO: 22176
  source 1..80: mol_type = other DNA

SEQ ID NO: 206907 - DNA, 80 bp, synthetic construct; identical to SEQ ID NO: 22177
  source 1..80: mol_type = other DNA

SEQ ID NO: 206908 - DNA, 80 bp, synthetic construct; identical to SEQ ID NO: 22178
  source 1..80: mol_type = other DNA

SEQ ID NO: 206909 - DNA, 80 bp, synthetic construct; identical to SEQ ID NO: 22179
  source 1..80: mol_type = other DNA

SEQ ID NO: 206910 - DNA, 80 bp, synthetic construct; identical to SEQ ID NO: 22180
  source 1..80: mol_type = other DNA

SEQ ID NO: 206911 - DNA, 80 bp, synthetic construct; identical to SEQ ID NO: 22181
  source 1..80: mol_type = other DNA

SEQ ID NO: 206912 - DNA, 80 bp, synthetic construct; identical to SEQ ID NO: 22182
  source 1..80: mol_type = other DNA

SEQ ID NO: 206913 - DNA, 80 bp, synthetic construct; identical to SEQ ID NO: 22183
  source 1..80: mol_type = other DNA

SEQ ID NO: 206914 - DNA, 80 bp, synthetic construct; identical to SEQ ID NO: 22184
  source 1..80: mol_type = other DNA

SEQ ID NO: 206915 - DNA, 80 bp, synthetic construct; identical to SEQ ID NO: 22185
  source 1..80: mol_type = other DNA

SEQ ID NO: 206916 - DNA, 80 bp, synthetic construct; identical to SEQ ID NO: 22186
  source 1..80: mol_type = other DNA

SEQ ID NO: 206917 - DNA, 80 bp, synthetic construct; identical to SEQ ID NO: 22187
  source 1..80: mol_type = other DNA

SEQ ID NO: 206918 - DNA, 80 bp, synthetic construct; identical to SEQ ID NO: 22188
  source 1..80: mol_type = other DNA

SEQ ID NO: 206919 - DNA, 80 bp, synthetic construct; identical to SEQ ID NO: 22189
  source 1..80: mol_type = other DNA

SEQ ID NO: 206920 - DNA, 80 bp, synthetic construct; identical to SEQ ID NO: 22190
  source 1..80: mol_type = other DNA

SEQ ID NO: 206921 - DNA, 80 bp, synthetic construct; identical to SEQ ID NO: 22191
  source 1..80: mol_type = other DNA

SEQ ID NO: 206922 - DNA, 80 bp, synthetic construct; identical to SEQ ID NO: 22192
  source 1..80: mol_type = other DNA

SEQ ID NO: 206923 - DNA, 80 bp, synthetic construct; identical to SEQ ID NO: 22193
  source 1..80: mol_type = other DNA

SEQ ID NO: 206924 - DNA, 80 bp, synthetic construct; identical to SEQ ID NO: 22194
  source 1..80: mol_type = other DNA

SEQ ID NO: 206925 - DNA, 80 bp, synthetic construct; identical to SEQ ID NO: 22195
  source 1..80: mol_type = other DNA

SEQ ID NO: 206926 - DNA, 80 bp, synthetic construct; identical to SEQ ID NO: 22196
  source 1..80: mol_type = other DNA

SEQ ID NO: 206927 - DNA, 80 bp, synthetic construct; identical to SEQ ID NO: 22197
  source 1..80: mol_type = other DNA

SEQ ID NO: 206928 - DNA, 80 bp, synthetic construct; identical to SEQ ID NO: 22198
  source 1..80: mol_type = other DNA

SEQ ID NO: 206929 - DNA, 80 bp, synthetic construct; identical to SEQ ID NO: 22199
  source 1..80: mol_type = other DNA

SEQ ID NO: 206930 - DNA, 80 bp, synthetic construct; identical to SEQ ID NO: 22200
  source 1..80: mol_type = other DNA

SEQ ID NO: 206931 - DNA, 80 bp, synthetic construct; identical to SEQ ID NO: 22201
  source 1..80: mol_type = other DNA

SEQ ID NO: 206932 - DNA, 80 bp, synthetic construct; identical to SEQ ID NO: 22202
  source 1..80: mol_type = other DNA

SEQ ID NO: 206933 - DNA, 80 bp, synthetic construct; identical to SEQ ID NO: 22203
  source 1..80: mol_type = other DNA

SEQ ID NO: 206934 - DNA, 80 bp, synthetic construct; identical to SEQ ID NO: 22204
  source 1..80: mol_type = other DNA

SEQ ID NO: 206935 - DNA, 80 bp, synthetic construct; identical to SEQ ID NO: 22205
  source 1..80: mol_type = other DNA

SEQ ID NO: 206936 - DNA, 80 bp, synthetic construct; identical to SEQ ID NO: 22206
  source 1..80: mol_type = other DNA

SEQ ID NO: 206937 - DNA, 80 bp, synthetic construct; identical to SEQ ID NO: 22207
  source 1..80: mol_type = other DNA

SEQ ID NO: 206938 - DNA, 80 bp, synthetic construct; identical to SEQ ID NO: 22208
  source 1..80: mol_type = other DNA

SEQ ID NO: 206939 - DNA, 80 bp, synthetic construct; identical to SEQ ID NO: 22209
  source 1..80: mol_type = other DNA

SEQ ID NO: 206940 - DNA, 80 bp, synthetic construct; identical to SEQ ID NO: 22210
  source 1..80: mol_type = other DNA

SEQ ID NO: 206941 - DNA, 80 bp, synthetic construct; identical to SEQ ID NO: 22211
  source 1..80: mol_type = other DNA

SEQ ID NO: 206942 - DNA, 80 bp, synthetic construct; identical to SEQ ID NO: 22212
  source 1..80: mol_type = other DNA

SEQ ID NO: 206943 - DNA, 80 bp, synthetic construct; identical to SEQ ID NO: 22213
  source 1..80: mol_type = other DNA

SEQ ID NO: 206944 - DNA, 80 bp, synthetic construct; identical to SEQ ID NO: 22214
  source 1..80: mol_type = other DNA

SEQ ID NO: 206945 - DNA, 80 bp, synthetic construct; identical to SEQ ID NO: 22215
  source 1..80: mol_type = other DNA

SEQ ID NO: 206946 - DNA, 80 bp, synthetic construct; identical to SEQ ID NO: 22216
  source 1..80: mol_type = other DNA

SEQ ID NO: 206947 - DNA, 80 bp, synthetic construct; identical to SEQ ID NO: 22217
  source 1..80: mol_type = other DNA

SEQ ID NO: 206948 - DNA, 80 bp, synthetic construct; identical to SEQ ID NO: 22218
  source 1..80: mol_type = other DNA

SEQ ID NO: 206949 - DNA, 80 bp, synthetic construct; identical to SEQ ID NO: 22219
  source 1..80: mol_type = other DNA

SEQ ID NO: 206950 - DNA, 80 bp, synthetic construct; identical to SEQ ID NO: 22220
  source 1..80: mol_type = other DNA

SEQ ID NO: 206951 - DNA, 80 bp, synthetic construct; identical to SEQ ID NO: 22221
  source 1..80: mol_type = other DNA

SEQ ID NO: 206952 - DNA, 80 bp, synthetic construct; identical to SEQ ID NO: 22222
  source 1..80: mol_type = other DNA

SEQ ID NO: 206953 - DNA, 80 bp, synthetic construct; identical to SEQ ID NO: 22223
  source 1..80: mol_type = other DNA

SEQ ID NO: 206954 - DNA, 80 bp, synthetic construct; identical to SEQ ID NO: 22224
  source 1..80: mol_type = other DNA

SEQ ID NO: 206955 - DNA, 80 bp, synthetic construct; identical to SEQ ID NO: 22225
  source 1..80: mol_type = other DNA

SEQ ID NO: 206956 - DNA, 80 bp, synthetic construct; identical to SEQ ID NO: 22226
  source 1..80: mol_type = other DNA

SEQ ID NO: 206957 - DNA, 80 bp, synthetic construct; identical to SEQ ID NO: 22227
  source 1..80: mol_type = other DNA

SEQ ID NO: 206958 - DNA, 80 bp, synthetic construct; identical to SEQ ID NO: 22228
  source 1..80: mol_type = other DNA

SEQ ID NO: 206959 - DNA, 80 bp, synthetic construct; identical to SEQ ID NO: 22229
  source 1..80: mol_type = other DNA

SEQ ID NO: 206960 - DNA, 80 bp, synthetic construct; identical to SEQ ID NO: 22230
  source 1..80: mol_type = other DNA

SEQ ID NO: 206961 - DNA, 80 bp, synthetic construct; identical to SEQ ID NO: 22231
  source 1..80: mol_type = other DNA

SEQ ID NO: 206962 - DNA, 80 bp, synthetic construct; identical to SEQ ID NO: 22232
  source 1..80: mol_type = other DNA

SEQ ID NO: 206963 - DNA, 80 bp, synthetic construct; identical to SEQ ID NO: 22233
  source 1..80: mol_type = other DNA

SEQ ID NO: 206964 - DNA, 80 bp, synthetic construct; identical to SEQ ID NO: 22234
  source 1..80: mol_type = other DNA

SEQ ID NO: 206965 - DNA, 80 bp, synthetic construct; identical to SEQ ID NO: 22235
  source 1..80: mol_type = other DNA

SEQ ID NO: 206966 - DNA, 80 bp, synthetic construct; identical to SEQ ID NO: 22236
  source 1..80: mol_type = other DNA

SEQ ID NO: 206967 - DNA, 80 bp, synthetic construct; identical to SEQ ID NO: 22237
  source 1..80: mol_type = other DNA

SEQ ID NO: 206968 - DNA, 80 bp, synthetic construct; identical to SEQ ID NO: 22238
  source 1..80: mol_type = other DNA

SEQ ID NO: 206969 - DNA, 80 bp, synthetic construct; identical to SEQ ID NO: 22239
  source 1..80: mol_type = other DNA

SEQ ID NO: 206970 - DNA, 80 bp, synthetic construct; identical to SEQ ID NO: 22240
  source 1..80: mol_type = other DNA

SEQ ID NO: 206971 - DNA, 80 bp, synthetic construct; identical to SEQ ID NO: 22241
  source 1..80: mol_type = other DNA

SEQ ID NO: 206972 - DNA, 80 bp, synthetic construct; identical to SEQ ID NO: 22242
  source 1..80: mol_type = other DNA

SEQ ID NO: 206973 - DNA, 80 bp, synthetic construct; identical to SEQ ID NO: 22243
  source 1..80: mol_type = other DNA

SEQ ID NO: 206974 - DNA, 80 bp, synthetic construct; identical to SEQ ID NO: 22244
  source 1..80: mol_type = other DNA

SEQ ID NO: 206975 - DNA, 80 bp, synthetic construct; identical to SEQ ID NO: 22245
  source 1..80: mol_type = other DNA

SEQ ID NO: 206976 - DNA, 80 bp, synthetic construct; identical to SEQ ID NO: 22246
  source 1..80: mol_type = other DNA

SEQ ID NO: 206977 - DNA, 80 bp, synthetic construct; identical to SEQ ID NO: 22247
  source 1..80: mol_type = other DNA

SEQ ID NO: 206978 - DNA, 80 bp, synthetic construct; identical to SEQ ID NO: 22248
  source 1..80: mol_type = other DNA

SEQ ID NO: 206979 - DNA, 80 bp, synthetic construct; identical to SEQ ID NO: 22249
  source 1..80: mol_type = other DNA

SEQ ID NO: 206980 - DNA, 80 bp, synthetic construct; identical to SEQ ID NO: 22250
  source 1..80: mol_type = other DNA

SEQ ID NO: 206981 - DNA, 80 bp, synthetic construct; identical to SEQ ID NO: 22251
  source 1..80: mol_type = other DNA

SEQ ID NO: 206982 - DNA, 80 bp, synthetic construct; identical to SEQ ID NO: 22252
  source 1..80: mol_type = other DNA

SEQ ID NO: 206983 - DNA, 80 bp, synthetic construct; identical to SEQ ID NO: 22253
  source 1..80: mol_type = other DNA

SEQ ID NO: 206984 - DNA, 80 bp, synthetic construct; identical to SEQ ID NO: 22254
  source 1..80: mol_type = other DNA

SEQ ID NO: 206985 - DNA, 80 bp, synthetic construct; identical to SEQ ID NO: 22255
  source 1..80: mol_type = other DNA

SEQ ID NO: 206986 - DNA, 80 bp, synthetic construct; identical to SEQ ID NO: 22256
  source 1..80: mol_type = other DNA

SEQ ID NO: 206987 - DNA, 80 bp, synthetic construct; identical to SEQ ID NO: 22257
  source 1..80: mol_type = other DNA

SEQ ID NO: 206988 - DNA, 80 bp, synthetic construct; identical to SEQ ID NO: 22258
  source 1..80: mol_type = other DNA

SEQ ID NO: 206989 - DNA, 80 bp, synthetic construct; identical to SEQ ID NO: 22259
  source 1..80: mol_type = other DNA

SEQ ID NO: 206990 - DNA, 80 bp, synthetic construct; identical to SEQ ID NO: 22260
  source 1..80: mol_type = other DNA

SEQ ID NO: 206991 - DNA, 80 bp, synthetic construct; identical to SEQ ID NO: 22261
  source 1..80: mol_type = other DNA

SEQ ID NO: 206992 - DNA, 80 bp, synthetic construct; identical to SEQ ID NO: 22262
  source 1..80: mol_type = other DNA

SEQ ID NO: 206993 - DNA, 80 bp, synthetic construct; identical to SEQ ID NO: 22263
  source 1..80: mol_type = other DNA

SEQ ID NO: 206994 - DNA, 80 bp, synthetic construct; identical to SEQ ID NO: 22264
  source 1..80: mol_type = other DNA

SEQ ID NO: 206995 - DNA, 80 bp, synthetic construct; identical to SEQ ID NO: 22265
  source 1..80: mol_type = other DNA

SEQ ID NO: 206996 - DNA, 80 bp, synthetic construct; identical to SEQ ID NO: 22266
  source 1..80: mol_type = other DNA

SEQ ID NO: 206997 - DNA, 80 bp, synthetic construct; identical to SEQ ID NO: 22267
  source 1..80: mol_type = other DNA

SEQ ID NO: 206998 - DNA, 80 bp, synthetic construct; identical to SEQ ID NO: 22268
  source 1..80: mol_type = other DNA

SEQ ID NO: 206999 - DNA, 80 bp, synthetic construct; identical to SEQ ID NO: 22269
  source 1..80: mol_type = other DNA

SEQ ID NO: 207000 - DNA, 80 bp, synthetic construct; identical to SEQ ID NO: 22270
  source 1..80: mol_type = other DNA

SEQ ID NO: 207001 - DNA, 80 bp, synthetic construct; identical to SEQ ID NO: 22271
  source 1..80: mol_type = other DNA

SEQ ID NO: 207002 - DNA, 80 bp, synthetic construct; identical to SEQ ID NO: 22272
  source 1..80: mol_type = other DNA

SEQ ID NO: 207003 - DNA, 80 bp, synthetic construct; identical to SEQ ID NO: 22273
  source 1..80: mol_type = other DNA

SEQ ID NO: 207004 - DNA, 80 bp, synthetic construct; identical to SEQ ID NO: 22274
  source 1..80: mol_type = other DNA

SEQ ID NO: 207005 - DNA, 80 bp, synthetic construct; identical to SEQ ID NO: 22275
  source 1..80: mol_type = other DNA

SEQ ID NO: 207006 - DNA, 80 bp, synthetic construct; identical to SEQ ID NO: 22276
  source 1..80: mol_type = other DNA

SEQ ID NO: 207007 - DNA, 80 bp, synthetic construct; identical to SEQ ID NO: 22277
  source 1..80: mol_type = other DNA

SEQ ID NO: 207008 - DNA, 80 bp, synthetic construct; identical to SEQ ID NO: 22278
  source 1..80: mol_type = other DNA

SEQ ID NO: 207009 - DNA, 80 bp, synthetic construct; identical to SEQ ID NO: 22279
  source 1..80: mol_type = other DNA

SEQ ID NO: 207010 - DNA, 80 bp, synthetic construct; identical to SEQ ID NO: 22280
  source 1..80: mol_type = other DNA

SEQ ID NO: 207011 - DNA, 80 bp, synthetic construct; identical to SEQ ID NO: 22281
  source 1..80: mol_type = other DNA

SEQ ID NO: 207012 - DNA, 80 bp, synthetic construct; identical to SEQ ID NO: 22282
  source 1..80: mol_type = other DNA

SEQ ID NO: 207013 - DNA, 80 bp, synthetic construct; identical to SEQ ID NO: 22283
  source 1..80: mol_type = other DNA

SEQ ID NO: 207014 - DNA, 80 bp, synthetic construct; identical to SEQ ID NO: 22284
  source 1..80: mol_type = other DNA

SEQ ID NO: 207015 - DNA, 80 bp, synthetic construct; identical to SEQ ID NO: 22285
  source 1..80: mol_type = other DNA

SEQ ID NO: 207016 - DNA, 80 bp, synthetic construct; identical to SEQ ID NO: 22286
  source 1..80: mol_type = other DNA

SEQ ID NO: 207017 - DNA, 80 bp, synthetic construct; identical to SEQ ID NO: 22287
  source 1..80: mol_type = other DNA

SEQ ID NO: 207018 - DNA, 80 bp, synthetic construct; identical to SEQ ID NO: 22288
  source 1..80: mol_type = other DNA

SEQ ID NO: 207019 - DNA, 80 bp, synthetic construct; identical to SEQ ID NO: 22289
  source 1..80: mol_type = other DNA

SEQ ID NO: 207020 - DNA, 80 bp, synthetic construct; identical to SEQ ID NO: 22290
  source 1..80: mol_type = other DNA

SEQ ID NO: 207021 - DNA, 80 bp, synthetic construct; identical to SEQ ID NO: 22291
  source 1..80: mol_type = other DNA

SEQ ID NO: 207022 - DNA, 80 bp, synthetic construct; identical to SEQ ID NO: 22292
  source 1..80: mol_type = other DNA

SEQ ID NO: 207023 - DNA, 80 bp, synthetic construct; identical to SEQ ID NO: 22293
  source 1..80: mol_type = other DNA

SEQ ID NO: 207024 - DNA, 80 bp, synthetic construct; identical to SEQ ID NO: 22294
  source 1..80: mol_type = other DNA

SEQ ID NO: 207025 - DNA, 80 bp, synthetic construct; identical to SEQ ID NO: 22295
  source 1..80: mol_type = other DNA

SEQ ID NO: 207026 - DNA, 80 bp, synthetic construct; identical to SEQ ID NO: 22296
  source 1..80: mol_type = other DNA

SEQ ID NO: 207027 - DNA, 80 bp, synthetic construct; identical to SEQ ID NO: 22297
  source 1..80: mol_type = other DNA

SEQ ID NO: 207028 - DNA, 80 bp, synthetic construct; identical to SEQ ID NO: 22298
  source 1..80: mol_type = other DNA

SEQ ID NO: 207029 - DNA, 80 bp, synthetic construct; identical to SEQ ID NO: 22299
  source 1..80: mol_type = other DNA

SEQ ID NO: 207030 - DNA, 80 bp, synthetic construct; identical to SEQ ID NO: 22300
  source 1..80: mol_type = other DNA

SEQ ID NO: 207031 - DNA, 80 bp, synthetic construct; identical to SEQ ID NO: 22301
  source 1..80: mol_type = other DNA

SEQ ID NO: 207032 - DNA, 80 bp, synthetic construct; identical to SEQ ID NO: 22302
  source 1..80: mol_type = other DNA

SEQ ID NO: 207033 - DNA, 80 bp, synthetic construct; identical to SEQ ID NO: 22303
  source 1..80: mol_type = other DNA

SEQ ID NO: 207034 - DNA, 80 bp, synthetic construct; identical to SEQ ID NO: 22304
  source 1..80: mol_type = other DNA

SEQ ID NO: 207035 - DNA, 80 bp, synthetic construct; identical to SEQ ID NO: 22305
  source 1..80: mol_type = other DNA

SEQ ID NO: 207036 - DNA, 80 bp, synthetic construct; identical to SEQ ID NO: 22306
  source 1..80: mol_type = other DNA

SEQ ID NO: 207037 - DNA, 80 bp, synthetic construct; identical to SEQ ID NO: 22307
  source 1..80: mol_type = other DNA

SEQ ID NO: 207038 - DNA, 80 bp, synthetic construct; identical to SEQ ID NO: 22308
  source 1..80: mol_type = other DNA

SEQ ID NO: 207039 - DNA, 80 bp, synthetic construct; identical to SEQ ID NO: 22309
  source 1..80: mol_type = other DNA

SEQ ID NO: 207040 - DNA, 80 bp, synthetic construct; identical to SEQ ID NO: 22310
  source 1..80: mol_type = other DNA

SEQ ID NO: 207041 - DNA, 80 bp, synthetic construct; identical to SEQ ID NO: 22311
  source 1..80: mol_type = other DNA

SEQ ID NO: 207042 - DNA, 80 bp, synthetic construct; identical to SEQ ID NO: 22312
  source 1..80: mol_type = other DNA

SEQ ID NO: 207043 - DNA, 80 bp, synthetic construct; identical to SEQ ID NO: 22313
  source 1..80: mol_type = other DNA

SEQ ID NO: 207044 - DNA, 80 bp, synthetic construct; identical to SEQ ID NO: 22314
  source 1..80: mol_type = other DNA

SEQ ID NO: 207045 - DNA, 80 bp, synthetic construct; identical to SEQ ID NO: 22315
  source 1..80: mol_type = other DNA

SEQ ID NO: 207046 - DNA, 80 bp, synthetic construct; identical to SEQ ID NO: 22316
  source 1..80: mol_type = other DNA

SEQ ID NO: 207047 - DNA, 80 bp, synthetic construct; identical to SEQ ID NO: 22317
  source 1..80: mol_type = other DNA

SEQ ID NO: 207048 - DNA, 80 bp, synthetic construct; identical to SEQ ID NO: 22318
  source 1..80: mol_type = other DNA

SEQ ID NO: 207049 - DNA, 80 bp, synthetic construct; identical to SEQ ID NO: 22319
  source 1..80: mol_type = other DNA

SEQ ID NO: 207050 - DNA, 80 bp, synthetic construct; identical to SEQ ID NO: 22320
  source 1..80: mol_type = other DNA

SEQ ID NO: 207051 - DNA, 80 bp, synthetic construct; identical to SEQ ID NO: 22321
  source 1..80: mol_type = other DNA

SEQ ID NO: 207052 - DNA, 80 bp, synthetic construct; identical to SEQ ID NO: 22322
  source 1..80: mol_type = other DNA

SEQ ID NO: 207053 - DNA, 80 bp, synthetic construct; identical to SEQ ID NO: 22323
  source 1..80: mol_type = other DNA

SEQ ID NO: 207054 - DNA, 80 bp, synthetic construct; identical to SEQ ID NO: 22324
  source 1..80: mol_type = other DNA

SEQ ID NO: 207055 - DNA, 80 bp, synthetic construct; identical to SEQ ID NO: 22325
  source 1..80: mol_type = other DNA

SEQ ID NO: 207056 - DNA, 80 bp, synthetic construct; identical to SEQ ID NO: 22326
  source 1..80: mol_type = other DNA

SEQ ID NO: 207057 - DNA, 80 bp, synthetic construct; identical to SEQ ID NO: 22327
  source 1..80: mol_type = other DNA

SEQ ID NO: 207058 - DNA, 80 bp, synthetic construct; identical to SEQ ID NO: 22328
  source 1..80: mol_type = other DNA

SEQ ID NO: 207059 - DNA, 80 bp, synthetic construct; identical to SEQ ID NO: 22329
  source 1..80: mol_type = other DNA

SEQ ID NO: 207060 - DNA, 80 bp, synthetic construct; identical to SEQ ID NO: 22330
  source 1..80: mol_type = other DNA

SEQ ID NO: 207061 - DNA, 80 bp, synthetic construct; identical to SEQ ID NO: 22331
  source 1..80: mol_type = other DNA

SEQ ID NO: 207062 - DNA, 80 bp, synthetic construct; identical to SEQ ID NO: 22332
  source 1..80: mol_type = other DNA

SEQ ID NO: 207063 - DNA, 80 bp, synthetic construct; identical to SEQ ID NO: 22333
  source 1..80: mol_type = other DNA

SEQ ID NO: 207064 - DNA, 80 bp, synthetic construct; identical to SEQ ID NO: 22334
  source 1..80: mol_type = other DNA

SEQ ID NO: 207065 - DNA, 80 bp, synthetic construct; identical to SEQ ID NO: 22335
  source 1..80: mol_type = other DNA

SEQ ID NO: 207066 - DNA, 80 bp, synthetic construct; identical to SEQ ID NO: 22336
  source 1..80: mol_type = other DNA

SEQ ID NO: 207067 - DNA, 80 bp, synthetic construct; identical to SEQ ID NO: 22337
  source 1..80: mol_type = other DNA

SEQ ID NO: 207068 - DNA, 80 bp, synthetic construct; identical to SEQ ID NO: 22338
  source 1..80: mol_type = other DNA

SEQ ID NO: 207069 - DNA, 80 bp, synthetic construct; identical to SEQ ID NO: 22339
  source 1..80: mol_type = other DNA

SEQ ID NO: 207070 - DNA, 80 bp, synthetic construct; identical to SEQ ID NO: 22340
  source 1..80: mol_type = other DNA

SEQ ID NO: 207071 - DNA, 80 bp, synthetic construct; identical to SEQ ID NO: 22341
  source 1..80: mol_type = other DNA

SEQ ID NO: 207072 - DNA, 80 bp, synthetic construct; identical to SEQ ID NO: 22342
  source 1..80: mol_type = other DNA

SEQ ID NO: 207073 - DNA, 80 bp, synthetic construct; identical to SEQ ID NO: 22343
  source 1..80: mol_type = other DNA

SEQ ID NO: 207074 - DNA, 80 bp, synthetic construct; identical to SEQ ID NO: 22344
  source 1..80: mol_type = other DNA

SEQ ID NO: 207075 - DNA, 80 bp, synthetic construct; identical to SEQ ID NO: 22345
  source 1..80: mol_type = other DNA

SEQ ID NO: 207076 - DNA, 80 bp, synthetic construct; identical to SEQ ID NO: 22346
  source 1..80: mol_type = other DNA

SEQ ID NO: 207077 - DNA, 80 bp, synthetic construct; identical to SEQ ID NO: 22347
  source 1..80: mol_type = other DNA

SEQ ID NO: 207078 - DNA, 80 bp, synthetic construct; identical to SEQ ID NO: 22348
  source 1..80: mol_type = other DNA

SEQ ID NO: 207079 - DNA, 80 bp, synthetic construct; identical to SEQ ID NO: 22349
  source 1..80: mol_type = other DNA

SEQ ID NO: 207080 - DNA, 80 bp, synthetic construct; identical to SEQ ID NO: 22350
  source 1..80: mol_type = other DNA

SEQ ID NO: 207081 - DNA, 80 bp, synthetic construct; identical to SEQ ID NO: 22351
  source 1..80: mol_type = other DNA

SEQ ID NO: 207082 - DNA, 80 bp, synthetic construct; identical to SEQ ID NO: 22352
  source 1..80: mol_type = other DNA

SEQ ID NO: 207083 - DNA, 80 bp, synthetic construct; identical to SEQ ID NO: 22353
  source 1..80: mol_type = other DNA

SEQ ID NO: 207084 - DNA, 80 bp, synthetic construct; identical to SEQ ID NO: 22354
  source 1..80: mol_type = other DNA

SEQ ID NO: 207085 - DNA, 80 bp, synthetic construct; identical to SEQ ID NO: 22355
  source 1..80: mol_type = other DNA

SEQ ID NO: 207086 - DNA, 80 bp, synthetic construct; identical to SEQ ID NO: 22356
  source 1..80: mol_type = other DNA

SEQ ID NO: 207087 - DNA, 80 bp, synthetic construct; identical to SEQ ID NO: 22357
  source 1..80: mol_type = other DNA

SEQ ID NO: 207088 - DNA, 80 bp, synthetic construct; identical to SEQ ID NO: 22358
  source 1..80: mol_type = other DNA

SEQ ID NO: 207089 - DNA, 80 bp, synthetic construct; identical to SEQ ID NO: 22359
  source 1..80: mol_type = other DNA

SEQ ID NO: 207090 - DNA, 80 bp, synthetic construct; identical to SEQ ID NO: 22360
  source 1..80: mol_type = other DNA

SEQ ID NO: 207091 - DNA, 80 bp, synthetic construct; identical to SEQ ID NO: 22361
  source 1..80: mol_type = other DNA

SEQ ID NO: 207092 - DNA, 80 bp, synthetic construct; identical to SEQ ID NO: 22362
  source 1..80: mol_type = other DNA

SEQ ID NO: 207093 - DNA, 80 bp, synthetic construct; identical to SEQ ID NO: 22363
  source 1..80: mol_type = other DNA

SEQ ID NO: 207094 - DNA, 80 bp, synthetic construct; identical to SEQ ID NO: 22364
  source 1..80: mol_type = other DNA

SEQ ID NO: 207095 - DNA, 80 bp, synthetic construct; identical to SEQ ID NO: 22365
  source 1..80: mol_type = other DNA

SEQ ID NO: 207096 - DNA, 80 bp, synthetic construct; identical to SEQ ID NO: 22366
  source 1..80: mol_type = other DNA

SEQ ID NO: 207097 - DNA, 80 bp, synthetic construct; identical to SEQ ID NO: 22367
  source 1..80: mol_type = other DNA

SEQ ID NO: 207098 - DNA, 80 bp, synthetic construct; identical to SEQ ID NO: 22368
  source 1..80: mol_type = other DNA

SEQ ID NO: 207099 - DNA, 80 bp, synthetic construct; identical to SEQ ID NO: 22369
  source 1..80: mol_type = other DNA

SEQ ID NO: 207100 - DNA, 80 bp, synthetic construct; identical to SEQ ID NO: 22370
  source 1..80: mol_type = other DNA

SEQ ID NO: 207101 - DNA, 80 bp, synthetic construct; identical to SEQ ID NO: 22371
  source 1..80: mol_type = other DNA

SEQ ID NO: 207102 - DNA, 80 bp, synthetic construct; identical to SEQ ID NO: 22372
  source 1..80: mol_type = other DNA

SEQ ID NO: 207103 - DNA, 80 bp, synthetic construct; identical to SEQ ID NO: 22373
  source 1..80: mol_type = other DNA

SEQ ID NO: 207104 - DNA, 80 bp, synthetic construct; identical to SEQ ID NO: 22374
  source 1..80: mol_type = other DNA

SEQ ID NO: 207105 - DNA, 80 bp, synthetic construct; identical to SEQ ID NO: 22375
  source 1..80: mol_type = other DNA

SEQ ID NO: 207106 - DNA, 80 bp, synthetic construct; identical to SEQ ID NO: 22376
  source 1..80: mol_type = other DNA

SEQ ID NO: 207107 - DNA, 80 bp, synthetic construct; identical to SEQ ID NO: 22377
  source 1..80: mol_type = other DNA

SEQ ID NO: 207108 - DNA, 80 bp, synthetic construct; identical to SEQ ID NO: 22378
  source 1..80: mol_type = other DNA

SEQ ID NO: 207109 - DNA, 80 bp, synthetic construct; identical to SEQ ID NO: 22379
  source 1..80: mol_type = other DNA

SEQ ID NO: 207110 - DNA, 80 bp, synthetic construct; identical to SEQ ID NO: 22380
  source 1..80: mol_type = other DNA

SEQ ID NO: 207111 - DNA, 80 bp, synthetic construct; identical to SEQ ID NO: 22381
  source 1..80: mol_type = other DNA

SEQ ID NO: 207112 - DNA, 80 bp, synthetic construct; identical to SEQ ID NO: 22382
  source 1..80: mol_type = other DNA

SEQ ID NO: 207113 - DNA, 80 bp, synthetic construct; identical to SEQ ID NO: 22383
  source 1..80: mol_type = other DNA

SEQ ID NO: 207114 - DNA, 80 bp, synthetic construct; identical to SEQ ID NO: 22384
  source 1..80: mol_type = other DNA

SEQ ID NO: 207115 - DNA, 80 bp, synthetic construct; identical to SEQ ID NO: 22385
  source 1..80: mol_type = other DNA

SEQ ID NO: 207116 - DNA, 80 bp, synthetic construct; identical to SEQ ID NO: 22386
  source 1..80: mol_type = other DNA

SEQ ID NO: 207117 - DNA, 80 bp, synthetic construct; identical to SEQ ID NO: 22387
  source 1..80: mol_type = other DNA

SEQ ID NO: 207118 - DNA, 80 bp, synthetic construct; identical to SEQ ID NO: 22388
  source 1..80: mol_type = other DNA

SEQ ID NO: 207119 - DNA, 80 bp, synthetic construct; identical to SEQ ID NO: 22389
  source 1..80: mol_type = other DNA

SEQ ID NO: 207120 - DNA, 80 bp, synthetic construct; identical to SEQ ID NO: 22390
  source 1..80: mol_type = other DNA

SEQ ID NO: 207121 - DNA, 80 bp, synthetic construct; identical to SEQ ID NO: 22391
  source 1..80: mol_type = other DNA

SEQ ID NO: 207122 - DNA, 80 bp, synthetic construct; identical to SEQ ID NO: 22392
  source 1..80: mol_type = other DNA

SEQ ID NO: 207123 - DNA, 80 bp, synthetic construct; identical to SEQ ID NO: 22393
  source 1..80: mol_type = other DNA

SEQ ID NO: 207124 - DNA, 80 bp, synthetic construct; identical to SEQ ID NO: 22394
  source 1..80: mol_type = other DNA

SEQ ID NO: 207125 - DNA, 80 bp, synthetic construct; identical to SEQ ID NO: 22395
  source 1..80: mol_type = other DNA

SEQ ID NO: 207126 - DNA, 80 bp, synthetic construct; identical to SEQ ID NO: 22396
  source 1..80: mol_type = other DNA

SEQ ID NO: 207127 - DNA, 80 bp, synthetic construct; identical to SEQ ID NO: 22397
  source 1..80: mol_type = other DNA

SEQ ID NO: 207128 - DNA, 80 bp, synthetic construct; identical to SEQ ID NO: 22398
  source 1..80: mol_type = other DNA

SEQ ID NO: 207129 - DNA, 80 bp, synthetic construct; identical to SEQ ID NO: 22399
  source 1..80: mol_type = other DNA

SEQ ID NO: 207130 - DNA, 80 bp, synthetic construct; identical to SEQ ID NO: 22400
  source 1..80: mol_type = other DNA

SEQ ID NO: 207131 - DNA, 80 bp, synthetic construct; identical to SEQ ID NO: 22401
  source 1..80: mol_type = other DNA

SEQ ID NO: 207132 - DNA, 80 bp, synthetic construct; identical to SEQ ID NO: 22402
  source 1..80: mol_type = other DNA

SEQ ID NO: 207133 - DNA, 80 bp, synthetic construct; identical to SEQ ID NO: 22403
  source 1..80: mol_type = other DNA

SEQ ID NO: 207134 - DNA, 80 bp, synthetic construct; identical to SEQ ID NO: 22404
  source 1..80: mol_type = other DNA

SEQ ID NO: 207135 - DNA, 80 bp, synthetic construct; identical to SEQ ID NO: 22405
  source 1..80: mol_type = other DNA

SEQ ID NO: 207136 - DNA, 80 bp, synthetic construct; identical to SEQ ID NO: 22406
  source 1..80: mol_type = other DNA

SEQ ID NO: 207137 - DNA, 80 bp, synthetic construct; identical to SEQ ID NO: 22407
  source 1..80: mol_type = other DNA

SEQ ID NO: 207138 - DNA, 80 bp, synthetic construct; identical to SEQ ID NO: 22408
  source 1..80: mol_type = other DNA

SEQ ID NO: 207139 - DNA, 80 bp, synthetic construct; identical to SEQ ID NO: 22409
  source 1..80: mol_type = other DNA

SEQ ID NO: 207140 - DNA, 80 bp, synthetic construct; identical to SEQ ID NO: 22410
  source 1..80: mol_type = other DNA

SEQ ID NO: 207141 - DNA, 80 bp, synthetic construct; identical to SEQ ID NO: 22411
  source 1..80: mol_type = other DNA

SEQ ID NO: 207142 - DNA, 80 bp, synthetic construct; identical to SEQ ID NO: 22412
  source 1..80: mol_type = other DNA

SEQ ID NO: 207143 - DNA, 80 bp, synthetic construct; identical to SEQ ID NO: 22413
  source 1..80: mol_type = other DNA

SEQ ID NO: 207144 - DNA, 80 bp, synthetic construct; identical to SEQ ID NO: 22414
  source 1..80: mol_type = other DNA

SEQ ID NO: 207145 - DNA, 80 bp, synthetic construct; identical to SEQ ID NO: 22415
  source 1..80: mol_type = other DNA

SEQ ID NO: 207146 - DNA, 80 bp, synthetic construct; identical to SEQ ID NO: 22416
  source 1..80: mol_type = other DNA

SEQ ID NO: 207147 - DNA, 80 bp, synthetic construct; identical to SEQ ID NO: 22417
  source 1..80: mol_type = other DNA

SEQ ID NO: 207148 - DNA, 80 bp, synthetic construct; identical to SEQ ID NO: 22418
  source 1..80: mol_type = other DNA

SEQ ID NO: 207149 - DNA, 80 bp, synthetic construct; identical to SEQ ID NO: 22419
  source 1..80: mol_type = other DNA

SEQ ID NO: 207150 - DNA, 80 bp, synthetic construct; identical to SEQ ID NO: 22420
  source 1..80: mol_type = other DNA

SEQ ID NO: 207151 - DNA, 80 bp, synthetic construct; identical to SEQ ID NO: 22421
  source 1..80: mol_type = other DNA

SEQ ID NO: 207152 - DNA, 80 bp, synthetic construct; identical to SEQ ID NO: 22422
  source 1..80: mol_type = other DNA

SEQ ID NO: 207153 - DNA, 80 bp, synthetic construct; identical to SEQ ID NO: 22423
  source 1..80: mol_type = other DNA

SEQ ID NO: 207154 - DNA, 80 bp, synthetic construct; identical to SEQ ID NO: 22424
  source 1..80: mol_type = other DNA

SEQ ID NO: 207155 - DNA, 80 bp, synthetic construct; identical to SEQ ID NO: 22425
  source 1..80: mol_type = other DNA

SEQ ID NO: 207156 - DNA, 80 bp, synthetic construct; identical to SEQ ID NO: 22426
  source 1..80: mol_type = other DNA

SEQ ID NO: 207157 - DNA, 80 bp, synthetic construct; identical to SEQ ID NO: 22427
  source 1..80: mol_type = other DNA

SEQ ID NO: 207158 - DNA, 80 bp, synthetic construct; identical to SEQ ID NO: 22428
  source 1..80: mol_type = other DNA

SEQ ID NO: 207159 - DNA, 80 bp, synthetic construct; identical to SEQ ID NO: 22429
  source 1..80: mol_type = other DNA

SEQ ID NO: 207160 - DNA, 80 bp, synthetic construct; identical to SEQ ID NO: 22430
  source 1..80: mol_type = other DNA

SEQ ID NO: 207161 - DNA, 80 bp, synthetic construct; identical to SEQ ID NO: 22431
  source 1..80: mol_type = other DNA

SEQ ID NO: 207162 - DNA, 80 bp, synthetic construct; identical to SEQ ID NO: 22432
  source 1..80: mol_type = other DNA

SEQ ID NO: 207163 - DNA, 80 bp, synthetic construct; identical to SEQ ID NO: 22433
  source 1..80: mol_type = other DNA

SEQ ID NO: 207164 - DNA, 80 bp, synthetic construct; identical to SEQ ID NO: 22434
  source 1..80: mol_type = other DNA

SEQ ID NO: 207165 - DNA, 80 bp, synthetic construct; identical to SEQ ID NO: 22435
  source 1..80: mol_type = other DNA

SEQ ID NO: 207166 - DNA, 80 bp, synthetic construct; identical to SEQ ID NO: 22436
  source 1..80: mol_type = other DNA

SEQ ID NO: 207167 - DNA, 80 bp, synthetic construct; identical to SEQ ID NO: 22437
  source 1..80: mol_type = other DNA

SEQ ID NO: 207168 - DNA, 80 bp, synthetic construct; identical to SEQ ID NO: 22438
  source 1..80: mol_type = other DNA

SEQ ID NO: 207169 - DNA, 80 bp, synthetic construct; identical to SEQ ID NO: 22439
  source 1..80: mol_type = other DNA

SEQ ID NO: 207170 - DNA, 80 bp, synthetic construct; identical to SEQ ID NO: 22440
  source 1..80: mol_type = other DNA

SEQ ID NO: 207171 - DNA, 80 bp, synthetic construct; identical to SEQ ID NO: 22441
  source 1..80: mol_type = other DNA

SEQ ID NO: 207172 - DNA, 80 bp, synthetic construct; identical to SEQ ID NO: 22442
  source 1..80: mol_type = other DNA

SEQ ID NO: 207173 - DNA, 80 bp, synthetic construct; identical to SEQ ID NO: 22443
  source 1..80: mol_type = other DNA

SEQ ID NO: 207174 - DNA, 80 bp, synthetic construct; identical to SEQ ID NO: 22444
  source 1..80: mol_type = other DNA

SEQ ID NO: 207175 - DNA, 80 bp, synthetic construct; identical to SEQ ID NO: 22445
  source 1..80: mol_type = other DNA

SEQ ID NO: 207176 - DNA, 80 bp, synthetic construct; identical to SEQ ID NO: 22446
  source 1..80: mol_type = other DNA

SEQ ID NO: 207177 - DNA, 80 bp, synthetic construct; identical to SEQ ID NO: 22447
  source 1..80: mol_type = other DNA

SEQ ID NO: 207178 - DNA, 80 bp, synthetic construct; identical to SEQ ID NO: 22448
  source 1..80: mol_type = other DNA

SEQ ID NO: 207179 - DNA, 80 bp, synthetic construct; identical to SEQ ID NO: 22449
  source 1..80: mol_type = other DNA

SEQ ID NO: 207180 - DNA, 80 bp, synthetic construct; identical to SEQ ID NO: 22450
  source 1..80: mol_type = other DNA

SEQ ID NO: 207181 - DNA, 80 bp, synthetic construct; identical to SEQ ID NO: 22451
  source 1..80: mol_type = other DNA

SEQ ID NO: 207182 - DNA, 80 bp, synthetic construct; identical to SEQ ID NO: 22452
  source 1..80: mol_type = other DNA

SEQ ID NO: 207183 - DNA, 80 bp, synthetic construct; identical to SEQ ID NO: 22453
  source 1..80: mol_type = other DNA

SEQ ID NO: 207184 - DNA, 80 bp, synthetic construct; identical to SEQ ID NO: 22454
  source 1..80: mol_type = other DNA

SEQ ID NO: 207185 - DNA, 80 bp, synthetic construct; identical to SEQ ID NO: 22455
  source 1..80: mol_type = other DNA

SEQ ID NO: 207186 - DNA, 80 bp, synthetic construct; identical to SEQ ID NO: 22456
  source 1..80: mol_type = other DNA

SEQ ID NO: 207187 - DNA, 80 bp, synthetic construct; identical to SEQ ID NO: 22457
  source 1..80: mol_type = other DNA

SEQ ID NO: 207188 - DNA, 80 bp, synthetic construct; identical to SEQ ID NO: 22458
  source 1..80: mol_type = other DNA

SEQ ID NO: 207189 - DNA, 80 bp, synthetic construct; identical to SEQ ID NO: 22459
  source 1..80: mol_type = other DNA

SEQ ID NO: 207190 - DNA, 80 bp, synthetic construct; identical to SEQ ID NO: 22460
  source 1..80: mol_type = other DNA

SEQ ID NO: 207191 - DNA, 80 bp, synthetic construct; identical to SEQ ID NO: 22461
  source 1..80: mol_type = other DNA

SEQ ID NO: 207192 - DNA, 80 bp, synthetic construct; identical to SEQ ID NO: 22462
  source 1..80: mol_type = other DNA

SEQ ID NO: 207193 - DNA, 80 bp, synthetic construct; identical to SEQ ID NO: 22463
  source 1..80: mol_type = other DNA

SEQ ID NO: 207194 - DNA, 80 bp, synthetic construct; identical to SEQ ID NO: 22464
  source 1..80: mol_type = other DNA

SEQ ID NO: 207195 - DNA, 80 bp, synthetic construct; identical to SEQ ID NO: 22465
  source 1..80: mol_type = other DNA

SEQ ID NO: 207196 - DNA, 80 bp, synthetic construct; identical to SEQ ID NO: 22466
  source 1..80: mol_type = other DNA

SEQ ID NO: 207197 - DNA, 80 bp, synthetic construct; identical to SEQ ID NO: 22467
  source 1..80: mol_type = other DNA

SEQ ID NO: 207198 - DNA, 80 bp, synthetic construct; identical to SEQ ID NO: 22468
  source 1..80: mol_type = other DNA

SEQ ID NO: 207199 - DNA, 80 bp, synthetic construct; identical to SEQ ID NO: 22469
  source 1..80: mol_type = other DNA

SEQ ID NO: 207200 - DNA, 80 bp, synthetic construct; identical to SEQ ID NO: 22470
  source 1..80: mol_type = other DNA

SEQ ID NO: 207201 - DNA, 80 bp, synthetic construct; identical to SEQ ID NO: 22471
  source 1..80: mol_type = other DNA

SEQ ID NO: 207202 - DNA, 80 bp, synthetic construct; identical to SEQ ID NO: 22472
  source 1..80: mol_type = other DNA

SEQ ID NO: 207203 - DNA, 80 bp, synthetic construct; identical to SEQ ID NO: 22473
  source 1..80: mol_type = other DNA

SEQ ID NO: 207204 - DNA, 80 bp, synthetic construct; identical to SEQ ID NO: 22474
  source 1..80: mol_type = other DNA

SEQ ID NO: 207205 - DNA, 80 bp, synthetic construct; identical to SEQ ID NO: 22475
  source 1..80: mol_type = other DNA

SEQ ID NO: 207206 - DNA, 80 bp, synthetic construct; identical to SEQ ID NO: 22476
  source 1..80: mol_type = other DNA

SEQ ID NO: 207207 - DNA, 80 bp, synthetic construct; identical to SEQ ID NO: 22477
  source 1..80: mol_type = other DNA

SEQ ID NO: 207208 - DNA, 80 bp, synthetic construct; identical to SEQ ID NO: 22478
  source 1..80: mol_type = other DNA

SEQ ID NO: 207209 - DNA, 80 bp, synthetic construct; identical to SEQ ID NO: 22479
  source 1..80: mol_type = other DNA

SEQ ID NO: 207210 - DNA, 80 bp, synthetic construct; identical to SEQ ID NO: 22480
  source 1..80: mol_type = other DNA

SEQ ID NO: 207211 - DNA, 80 bp, synthetic construct; identical to SEQ ID NO: 22481
  source 1..80: mol_type = other DNA

SEQ ID NO: 207212 - DNA, 80 bp, synthetic construct; identical to SEQ ID NO: 22482
  source 1..80: mol_type = other DNA

SEQ ID NO: 207213 - DNA, 80 bp, synthetic construct; identical to SEQ ID NO: 22483
  source 1..80: mol_type = other DNA

SEQ ID NO: 207214 - DNA, 80 bp, synthetic construct; identical to SEQ ID NO: 22484
  source 1..80: mol_type = other DNA

SEQ ID NO: 207215 - DNA, 80 bp, synthetic construct; identical to SEQ ID NO: 22485
  source 1..80: mol_type = other DNA

SEQ ID NO: 207216 - DNA, 80 bp, synthetic construct; identical to SEQ ID NO: 22486
  source 1..80: mol_type = other DNA

SEQ ID NO: 207217 - DNA, 80 bp, synthetic construct; identical to SEQ ID NO: 22487
  source 1..80: mol_type = other DNA

SEQ ID NO: 207218 - DNA, 80 bp, synthetic construct; identical to SEQ ID NO: 22488
  source 1..80: mol_type = other DNA

SEQ ID NO: 207219 - DNA, 80 bp, synthetic construct; identical to SEQ ID NO: 22489
  source 1..80: mol_type = other DNA

SEQ ID NO: 207220 - DNA, 80 bp, synthetic construct; identical to SEQ ID NO: 22490
  source 1..80: mol_type = other DNA

SEQ ID NO: 207221 - DNA, 80 bp, synthetic construct; identical to SEQ ID NO: 22491
  source 1..80: mol_type = other DNA

SEQ ID NO: 207222 - DNA, 80 bp, synthetic construct; identical to SEQ ID NO: 22492
  source 1..80: mol_type = other DNA

SEQ ID NO: 207223 - DNA, 80 bp, synthetic construct; identical to SEQ ID NO: 22493
  source 1..80: mol_type = other DNA

SEQ ID NO: 207224 - DNA, 80 bp, synthetic construct; identical to SEQ ID NO: 22494
  source 1..80: mol_type = other DNA

SEQ ID NO: 207225 - DNA, 80 bp, synthetic construct; identical to SEQ ID NO: 22495
  source 1..80: mol_type = other DNA

SEQ ID NO: 207226 - DNA, 80 bp, synthetic construct; identical to SEQ ID NO: 22496
  source 1..80: mol_type = other DNA

SEQ ID NO: 207227 - DNA, 80 bp, synthetic construct; identical to SEQ ID NO: 22497
  source 1..80: mol_type = other DNA

SEQ ID NO: 207228 - DNA, 80 bp, synthetic construct; identical to SEQ ID NO: 22498
  source 1..80: mol_type = other DNA

SEQ ID NO: 207229 - DNA, 80 bp, synthetic construct; identical to SEQ ID NO: 22499
  source 1..80: mol_type = other DNA

SEQ ID NO: 207230 - DNA, 80 bp, synthetic construct; identical to SEQ ID NO: 22500
  source 1..80: mol_type = other DNA

SEQ ID NO: 207231 - DNA, 80 bp, synthetic construct; identical to SEQ ID NO: 22501
  source 1..80: mol_type = other DNA

SEQ ID NO: 207232 - DNA, 80 bp, synthetic construct; identical to SEQ ID NO: 22502
  source 1..80: mol_type = other DNA

SEQ ID NO: 207233 - DNA, 80 bp, synthetic construct; identical to SEQ ID NO: 22503
  source 1..80: mol_type = other DNA

SEQ ID NO: 207234 - DNA, 80 bp, synthetic construct; identical to SEQ ID NO: 22504
  source 1..80: mol_type = other DNA

SEQ ID NO: 207235 - DNA, 80 bp, synthetic construct; identical to SEQ ID NO: 22505
  source 1..80: mol_type = other DNA

SEQ ID NO: 207236 - DNA, 80 bp, synthetic construct; identical to SEQ ID NO: 22506
  source 1..80: mol_type = other DNA

SEQ ID NO: 207237 - DNA, 80 bp, synthetic construct; identical to SEQ ID NO: 22507
  source 1..80: mol_type = other DNA

SEQ ID NO: 207238 - DNA, 80 bp, synthetic construct; identical to SEQ ID NO: 22508
  source 1..80: mol_type = other DNA

SEQ ID NO: 207239 - DNA, 80 bp, synthetic construct; identical to SEQ ID NO: 22509
  source 1..80: mol_type = other DNA

SEQ ID NO: 207240 - DNA, 80 bp, synthetic construct; identical to SEQ ID NO: 22510
  source 1..80: mol_type = other DNA

SEQ ID NO: 207241 - DNA, 80 bp, synthetic construct; identical to SEQ ID NO: 22511
  source 1..80: mol_type = other DNA

SEQ ID NO: 207242 - DNA, 80 bp, synthetic construct; identical to SEQ ID NO: 22512
  source 1..80: mol_type = other DNA

SEQ ID NO: 207243 - DNA, 80 bp, synthetic construct; identical to SEQ ID NO: 22513
  source 1..80: mol_type = other DNA

SEQ ID NO: 207244 - DNA, 80 bp, synthetic construct; identical to SEQ ID NO: 22514
  source 1..80: mol_type = other DNA

SEQ ID NO: 207245 - DNA, 80 bp, synthetic construct; identical to SEQ ID NO: 22515
  source 1..80: mol_type = other DNA

SEQ ID NO: 207246 - DNA, 80 bp, synthetic construct; identical to SEQ ID NO: 22516
  source 1..80: mol_type = other DNA

SEQ ID NO: 207247 - DNA, 80 bp, synthetic construct; identical to SEQ ID NO: 22517
  source 1..80: mol_type = other DNA

SEQ ID NO: 207248 - DNA, 80 bp, synthetic construct; identical to SEQ ID NO: 22518
  source 1..80: mol_type = other DNA

SEQ ID NO: 207249 - DNA, 80 bp, synthetic construct; identical to SEQ ID NO: 22519
  source 1..80: mol_type = other DNA

SEQ ID NO: 207250 - DNA, 80 bp, synthetic construct; identical to SEQ ID NO: 22520
  source 1..80: mol_type = other DNA

SEQ ID NO: 207251 - DNA, 80 bp, synthetic construct; identical to SEQ ID NO: 22521
  source 1..80: mol_type = other DNA

SEQ ID NO: 207252 - DNA, 80 bp, synthetic construct; identical to SEQ ID NO: 22522
  source 1..80: mol_type = other DNA

SEQ ID NO: 207253 - DNA, 80 bp, synthetic construct; identical to SEQ ID NO: 22523
  source 1..80: mol_type = other DNA

SEQ ID NO: 207254 - DNA, 80 bp, synthetic construct; identical to SEQ ID NO: 22524
  source 1..80: mol_type = other DNA

SEQ ID NO: 207255 - DNA, 80 bp, synthetic construct; identical to SEQ ID NO: 22525
  source 1..80: mol_type = other DNA

SEQ ID NO: 207256 - DNA, 80 bp, synthetic construct; identical to SEQ ID NO: 22526
  source 1..80: mol_type = other DNA

SEQ ID NO: 207257 - DNA, 80 bp, synthetic construct; identical to SEQ ID NO: 22527
  source 1..80: mol_type = other DNA

SEQ ID NO: 207258 - DNA, 80 bp, synthetic construct; identical to SEQ ID NO: 22528
  source 1..80: mol_type = other DNA

SEQ ID NO: 207259 - DNA, 80 bp, synthetic construct; identical to SEQ ID NO: 22529
  source 1..80: mol_type = other DNA

SEQ ID NO: 207260 - DNA, 80 bp, synthetic construct; identical to SEQ ID NO: 22530
  source 1..80: mol_type = other DNA

SEQ ID NO: 207261 - DNA, 80 bp, synthetic construct; identical to SEQ ID NO: 22531
  source 1..80: mol_type = other DNA

SEQ ID NO: 207262 - DNA, 80 bp, synthetic construct; identical to SEQ ID NO: 22532
  source 1..80: mol_type = other DNA

SEQ ID NO: 207263 - DNA, 80 bp, synthetic construct; identical to SEQ ID NO: 22533
  source 1..80: mol_type = other DNA

SEQ ID NO: 207264 - DNA, 80 bp, synthetic construct; identical to SEQ ID NO: 22534
  source 1..80: mol_type = other DNA

SEQ ID NO: 207265 - DNA, 80 bp, synthetic construct; identical to SEQ ID NO: 22535
  source 1..80: mol_type = other DNA

SEQ ID NO: 207266 - DNA, 80 bp, synthetic construct; identical to SEQ ID NO: 22536
  source 1..80: mol_type = other DNA

SEQ ID NO: 207267 - DNA, 80 bp, synthetic construct; identical to SEQ ID NO: 22537
  source 1..80: mol_type = other DNA

SEQ ID NO: 207268 - DNA, 80 bp, synthetic construct; identical to SEQ ID NO: 22538
  source 1..80: mol_type = other DNA

SEQ ID NO: 207269 - DNA, 80 bp, synthetic construct; identical to SEQ ID NO: 22539
  source 1..80: mol_type = other DNA

SEQ ID NO: 207270 - DNA, 80 bp, synthetic construct; identical to SEQ ID NO: 22540
  source 1..80: mol_type = other DNA

SEQ ID NO: 207271 - DNA, 80 bp, synthetic construct; identical to SEQ ID NO: 22541
  source 1..80: mol_type = other DNA

SEQ ID NO: 207272 - DNA, 80 bp, synthetic construct; identical to SEQ ID NO: 22542
  source 1..80: mol_type = other DNA

SEQ ID NO: 207273 - DNA, 80 bp, synthetic construct; identical to SEQ ID NO: 22543
  source 1..80: mol_type = other DNA

SEQ ID NO: 207274 - DNA, 80 bp, synthetic construct; identical to SEQ ID NO: 22544
  source 1..80: mol_type = other DNA

SEQ ID NO: 207275 - DNA, 80 bp, synthetic construct; identical to SEQ ID NO: 22545
  source 1..80: mol_type = other DNA

SEQ ID NO: 207276 - DNA, 80 bp, synthetic construct; identical to SEQ ID NO: 22546
  source 1..80: mol_type = other DNA

SEQ ID NO: 207277 - DNA, 80 bp, synthetic construct; identical to SEQ ID NO: 22547
  source 1..80: mol_type = other DNA

SEQ ID NO: 207278 - DNA, 80 bp, synthetic construct; identical to SEQ ID NO: 22548
  source 1..80: mol_type = other DNA

SEQ ID NO: 207279 - DNA, 80 bp, synthetic construct; identical to SEQ ID NO: 22549
  source 1..80: mol_type = other DNA

SEQ ID NO: 207280 - DNA, 80 bp, synthetic construct; identical to SEQ ID NO: 22550
  source 1..80: mol_type = other DNA

SEQ ID NO: 207281 - DNA, 80 bp, synthetic construct; identical to SEQ ID NO: 22551
  source 1..80: mol_type = other DNA

SEQ ID NO: 207282 - DNA, 80 bp, synthetic construct; identical to SEQ ID NO: 22552
  source 1..80: mol_type = other DNA

SEQ ID NO: 207283 - DNA, 80 bp, synthetic construct; identical to SEQ ID NO: 22553
  source 1..80: mol_type = other DNA

SEQ ID NO: 207284 - DNA, 80 bp, synthetic construct; identical to SEQ ID NO: 22554
  source 1..80: mol_type = other DNA

SEQ ID NO: 207285 - DNA, 80 bp, synthetic construct; identical to SEQ ID NO: 22555
  source 1..80: mol_type = other DNA

SEQ ID NO: 207286 - DNA, 80 bp, synthetic construct; identical to SEQ ID NO: 22556
  source 1..80: mol_type = other DNA

SEQ ID NO: 207287 - DNA, 80 bp, synthetic construct; identical to SEQ ID NO: 22557
  source 1..80: mol_type = other DNA

SEQ ID NO: 207288 - DNA, 80 bp, synthetic construct; identical to SEQ ID NO: 22558
  source 1..80: mol_type = other DNA

SEQ ID NO: 207289 - DNA, 80 bp, synthetic construct; identical to SEQ ID NO: 22559
  source 1..80: mol_type = other DNA

SEQ ID NO: 207290 - DNA, 80 bp, synthetic construct; identical to SEQ ID NO: 22560
  source 1..80: mol_type = other DNA

SEQ ID NO: 207291 - DNA, 80 bp, synthetic construct; identical to SEQ ID NO: 22561
  source 1..80: mol_type = other DNA

SEQ ID NO: 207292 - DNA, 80 bp, synthetic construct; identical to SEQ ID NO: 22562
  source 1..80: mol_type = other DNA

SEQ ID NO: 207293 - DNA, 80 bp, synthetic construct; identical to SEQ ID NO: 22563
  source 1..80: mol_type = other DNA

SEQ ID NO: 207294 - DNA, 80 bp, synthetic construct; identical to SEQ ID NO: 22564
  source 1..80: mol_type = other DNA

SEQ ID NO: 207295 - DNA, 80 bp, synthetic construct; identical to SEQ ID NO: 22565
  source 1..80: mol_type = other DNA

SEQ ID NO: 207296 - DNA, 80 bp, synthetic construct; identical to SEQ ID NO: 22566
  source 1..80: mol_type = other DNA

SEQ ID NO: 207297 - DNA, 80 bp, synthetic construct; identical to SEQ ID NO: 22567
  source 1..80: mol_type = other DNA

SEQ ID NO: 207298 - DNA, 80 bp, synthetic construct; identical to SEQ ID NO: 22568
  source 1..80: mol_type = other DNA

SEQ ID NO: 207299 - DNA, 80 bp, synthetic construct; identical to SEQ ID NO: 22569
  source 1..80: mol_type = other DNA

SEQ ID NO: 207300 - DNA, 80 bp, synthetic construct; identical to SEQ ID NO: 22570
  source 1..80: mol_type = other DNA

SEQ ID NO: 207301 - DNA, 80 bp, synthetic construct; identical to SEQ ID NO: 22571
  source 1..80: mol_type = other DNA

SEQ ID NO: 207302 - DNA, 80 bp, synthetic construct; identical to SEQ ID NO: 22572
  source 1..80: mol_type = other DNA

SEQ ID NO: 207303 - DNA, 80 bp, synthetic construct; identical to SEQ ID NO: 22573
  source 1..80: mol_type = other DNA

SEQ ID NO: 207304 - DNA, 80 bp, synthetic construct; identical to SEQ ID NO: 22574
  source 1..80: mol_type = other DNA

SEQ ID NO: 207305 - DNA, 80 bp, synthetic construct; identical to SEQ ID NO: 22575
  source 1..80: mol_type = other DNA

SEQ ID NO: 207306 - DNA, 80 bp, synthetic construct; identical to SEQ ID NO: 22576
  source 1..80: mol_type = other DNA

SEQ ID NO: 207307 - DNA, 80 bp, synthetic construct; identical to SEQ ID NO: 22577
  source 1..80: mol_type = other DNA

SEQ ID NO: 207308 - DNA, 80 bp, synthetic construct; identical to SEQ ID NO: 22578
  source 1..80: mol_type = other DNA

SEQ ID NO: 207309 - DNA, 80 bp, synthetic construct; identical to SEQ ID NO: 22579
  source 1..80: mol_type = other DNA

SEQ ID NO: 207310 - DNA, 80 bp, synthetic construct; identical to SEQ ID NO: 22580
  source 1..80: mol_type = other DNA

SEQ ID NO: 207311 - DNA, 80 bp, synthetic construct; identical to SEQ ID NO: 22581
  source 1..80: mol_type = other DNA

SEQ ID NO: 207312 - DNA, 80 bp, synthetic construct; identical to SEQ ID NO: 22582
  source 1..80: mol_type = other DNA

SEQ ID NO: 207313 - DNA, 80 bp, synthetic construct; identical to SEQ ID NO: 22583
  source 1..80: mol_type = other DNA

SEQ ID NO: 207314 - DNA, 80 bp, synthetic construct; identical to SEQ ID NO: 22584
  source 1..80: mol_type = other DNA

SEQ ID NO: 207315 - DNA, 80 bp, synthetic construct; identical to SEQ ID NO: 22585
  source 1..80: mol_type = other DNA

SEQ ID NO: 207316 - DNA, 80 bp, synthetic construct; identical to SEQ ID NO: 22586
  source 1..80: mol_type = other DNA

SEQ ID NO: 207317 - DNA, 80 bp, synthetic construct; identical to SEQ ID NO: 22587
  source 1..80: mol_type = other DNA

SEQ ID NO: 207318 - DNA, 80 bp, synthetic construct; identical to SEQ ID NO: 22588
  source 1..80: mol_type = other DNA

SEQ ID NO: 207319 - DNA, 80 bp, synthetic construct; identical to SEQ ID NO: 22589
  source 1..80: mol_type = other DNA

SEQ ID NO: 207320 - DNA, 80 bp, synthetic construct; identical to SEQ ID NO: 22590
  source 1..80: mol_type = other DNA

SEQ ID NO: 207321 - DNA, 80 bp, synthetic construct; identical to SEQ ID NO: 22591
  source 1..80: mol_type = other DNA

SEQ ID NO: 207322 - DNA, 80 bp, synthetic construct; identical to SEQ ID NO: 22592
  source 1..80: mol_type = other DNA

SEQ ID NO: 207323 - DNA, 80 bp, synthetic construct; identical to SEQ ID NO: 22593
  source 1..80: mol_type = other DNA

SEQ ID NO: 207324 - DNA, 80 bp, synthetic construct; identical to SEQ ID NO: 22594
  source 1..80: mol_type = other DNA

SEQ ID NO: 207325 - DNA, 80 bp, synthetic construct; identical to SEQ ID NO: 22595
  source 1..80: mol_type = other DNA

SEQ ID NO: 207326 - DNA, 80 bp, synthetic construct; identical to SEQ ID NO: 22596
  source 1..80: mol_type = other DNA

SEQ ID NO: 207327 - DNA, 80 bp, synthetic construct; identical to SEQ ID NO: 22597
  source 1..80: mol_type = other DNA

SEQ ID NO: 207328 - DNA, 80 bp, synthetic construct; identical to SEQ ID NO: 22598
  source 1..80: mol_type = other DNA

SEQ ID NO: 207329 - DNA, 80 bp, synthetic construct; identical to SEQ ID NO: 22599
  source 1..80: mol_type = other DNA

SEQ ID NO: 207330 - DNA, 80 bp, synthetic construct; identical to SEQ ID NO: 22600
  source 1..80: mol_type = other DNA

SEQ ID NO: 207331 - DNA, 80 bp, synthetic construct; identical to SEQ ID NO: 22601
  source 1..80: mol_type = other DNA

SEQ ID NO: 207332 - DNA, 80 bp, synthetic construct; identical to SEQ ID NO: 22602
  source 1..80: mol_type = other DNA

SEQ ID NO: 207333 - DNA, 80 bp, synthetic construct; identical to SEQ ID NO: 22603
  source 1..80: mol_type = other DNA

SEQ ID NO: 207334 - DNA, 80 bp, synthetic construct; identical to SEQ ID NO: 22604
  source 1..80: mol_type = other DNA

SEQ ID NO: 207335 - DNA, 80 bp, synthetic construct; identical to SEQ ID NO: 22605
  source 1..80: mol_type = other DNA

SEQ ID NO: 207336 - DNA, 80 bp, synthetic construct; identical to SEQ ID NO: 22606
  source 1..80: mol_type = other DNA

SEQ ID NO: 207337 - DNA, 80 bp, synthetic construct; identical to SEQ ID NO: 22607
  source 1..80: mol_type = other DNA

SEQ ID NO: 207338 - DNA, 80 bp, synthetic construct; identical to SEQ ID NO: 22608
  source 1..80: mol_type = other DNA

SEQ ID NO: 207339 - DNA, 80 bp, synthetic construct; identical to SEQ ID NO: 22609
  source 1..80: mol_type = other DNA

SEQ ID NO: 207340 - DNA, 80 bp, synthetic construct; identical to SEQ ID NO: 22610
  source 1..80: mol_type = other DNA

SEQ ID NO: 207341 - DNA, 80 bp, synthetic construct; identical to SEQ ID NO: 22611
  source 1..80: mol_type = other DNA

SEQ ID NO: 207342 - DNA, 80 bp, synthetic construct; identical to SEQ ID NO: 22612
  source 1..80: mol_type = other DNA

SEQ ID NO: 207343 - DNA, 80 bp, synthetic construct; identical to SEQ ID NO: 22613
  source 1..80: mol_type = other DNA

SEQ ID NO: 207344 - DNA, 80 bp, synthetic construct; identical to SEQ ID NO: 22614
  source 1..80: mol_type = other DNA

SEQ ID NO: 207345 - DNA, 80 bp, synthetic construct; identical to SEQ ID NO: 22615
  source 1..80: mol_type = other DNA

SEQ ID NO: 207346 - DNA, 80 bp, synthetic construct; identical to SEQ ID NO: 22616
  source 1..80: mol_type = other DNA

SEQ ID NO: 207347 - DNA, 80 bp, synthetic construct; identical to SEQ ID NO: 22617
  source 1..80: mol_type = other DNA

SEQ ID NO: 207348 - DNA, 80 bp, synthetic construct; identical to SEQ ID NO: 22618
  source 1..80: mol_type = other DNA

SEQ ID NO: 207349 - DNA, 80 bp, synthetic construct; identical to SEQ ID NO: 22619
  source 1..80: mol_type = other DNA

SEQ ID NO: 207350 - DNA, 80 bp, synthetic construct; identical to SEQ ID NO: 22620
  source 1..80: mol_type = other DNA

SEQ ID NO: 207351 - DNA, 80 bp, synthetic construct; identical to SEQ ID NO: 22621
  source 1..80: mol_type = other DNA

SEQ ID NO: 207352 - DNA, 80 bp, synthetic construct; identical to SEQ ID NO: 22622
  source 1..80: mol_type = other DNA

SEQ ID NO: 207353 - DNA, 80 bp, synthetic construct; identical to SEQ ID NO: 22623
  source 1..80: mol_type = other DNA

SEQ ID NO: 207354 - DNA, 80 bp, synthetic construct; identical to SEQ ID NO: 22624
  source 1..80: mol_type = other DNA

SEQ ID NO: 207355 - DNA, 80 bp, synthetic construct; identical to SEQ ID NO: 22625
  source 1..80: mol_type = other DNA

SEQ ID NO: 207356 - DNA, 80 bp, synthetic construct; identical to SEQ ID NO: 22626
  source 1..80: mol_type = other DNA

SEQ ID NO: 207357 - DNA, 80 bp, synthetic construct; identical to SEQ ID NO: 22627
  source 1..80: mol_type = other DNA

SEQ ID NO: 207358 - DNA, 80 bp, synthetic construct; identical to SEQ ID NO: 22628
  source 1..80: mol_type = other DNA

SEQ ID NO: 207359 - DNA, 80 bp, synthetic construct; identical to SEQ ID NO: 22629
  source 1..80: mol_type = other DNA

SEQ ID NO: 207360 - DNA, 80 bp, synthetic construct; identical to SEQ ID NO: 22630
  source 1..80: mol_type = other DNA

SEQ ID NO: 207361 - DNA, 80 bp, synthetic construct; identical to SEQ ID NO: 22631
  source 1..80: mol_type = other DNA

SEQ ID NO: 207362 - DNA, 80 bp, synthetic construct; identical to SEQ ID NO: 22632
  source 1..80: mol_type = other DNA

SEQ ID NO: 207363 - DNA, 80 bp, synthetic construct; identical to SEQ ID NO: 22633
  source 1..80: mol_type = other DNA

SEQ ID NO: 207364 - DNA, 80 bp, synthetic construct; identical to SEQ ID NO: 22634
  source 1..80: mol_type = other DNA

SEQ ID NO: 207365 - DNA, 80 bp, synthetic construct; identical to SEQ ID NO: 22635
  source 1..80: mol_type = other DNA

SEQ ID NO: 207366 - DNA, 80 bp, synthetic construct; identical to SEQ ID NO: 22636
  source 1..80: mol_type = other DNA

SEQ ID NO: 207367 - DNA, 80 bp, synthetic construct; identical to SEQ ID NO: 22637
  source 1..80: mol_type = other DNA

SEQ ID NO: 207368 - DNA, 80 bp, synthetic construct; identical to SEQ ID NO: 22638
  source 1..80: mol_type = other DNA

SEQ ID NO: 207369 - DNA, 80 bp, synthetic construct; identical to SEQ ID NO: 22639
  source 1..80: mol_type = other DNA

SEQ ID NO: 207370 - DNA, 80 bp, synthetic construct; identical to SEQ ID NO: 22640
  source 1..80: mol_type = other DNA

SEQ ID NO: 207371 - DNA, 80 bp, synthetic construct; identical to SEQ ID NO: 22641
  source 1..80: mol_type = other DNA

SEQ ID NO: 207372 - DNA, 80 bp, synthetic construct; identical to SEQ ID NO: 22642
  source 1..80: mol_type = other DNA

SEQ ID NO: 207373 - DNA, 80 bp, synthetic construct; identical to SEQ ID NO: 22643
  source 1..80: mol_type = other DNA

SEQ ID NO: 207374 - DNA, 80 bp, synthetic construct; identical to SEQ ID NO: 22644
  source 1..80: mol_type = other DNA

SEQ ID NO: 207375 - DNA, 80 bp, synthetic construct; identical to SEQ ID NO: 22645
  source 1..80: mol_type = other DNA

SEQ ID NO: 207376 - DNA, 80 bp, synthetic construct; identical to SEQ ID NO: 22646
  source 1..80: mol_type = other DNA

SEQ ID NO: 207377 - DNA, 80 bp, synthetic construct; identical to SEQ ID NO: 22647
  source 1..80: mol_type = other DNA

SEQ ID NO: 207378 - DNA, 80 bp, synthetic construct; identical to SEQ ID NO: 22648
  source 1..80: mol_type = other DNA

SEQ ID NO: 207379 - DNA, 80 bp, synthetic construct; identical to SEQ ID NO: 22649
  source 1..80: mol_type = other DNA

SEQ ID NO: 207380 - DNA, 80 bp, synthetic construct; identical to SEQ ID NO: 22650
  source 1..80: mol_type = other DNA

SEQ ID NO: 207381 - DNA, 80 bp, synthetic construct; identical to SEQ ID NO: 22651
  source 1..80: mol_type = other DNA

SEQ ID NO: 207382 - DNA, 80 bp, synthetic construct; identical to SEQ ID NO: 22652
  source 1..80: mol_type = other DNA

SEQ ID NO: 207383 - DNA, 80 bp, synthetic construct; identical to SEQ ID NO: 22653
  source 1..80: mol_type = other DNA

SEQ ID NO: 207384 - DNA, 80 bp, synthetic construct; identical to SEQ ID NO: 22654
  source 1..80: mol_type = other DNA

SEQ ID NO: 207385 - DNA, 80 bp, synthetic construct; identical to SEQ ID NO: 22655
  source 1..80: mol_type = other DNA

SEQ ID NO: 207386 - DNA, 80 bp, synthetic construct; identical to SEQ ID NO: 22656
  source 1..80: mol_type = other DNA

SEQ ID NO: 207387 - DNA, 80 bp, synthetic construct; identical to SEQ ID NO: 22657
  source 1..80: mol_type = other DNA

SEQ ID NO: 207388 - DNA, 80 bp, synthetic construct; identical to SEQ ID NO: 22658
  source 1..80: mol_type = other DNA

SEQ ID NO: 207389 - DNA, 80 bp, synthetic construct; identical to SEQ ID NO: 22659
  source 1..80: mol_type = other DNA

SEQ ID NO: 207390 - DNA, 80 bp, synthetic construct; identical to SEQ ID NO: 22660
  source 1..80: mol_type = other DNA

SEQ ID NO: 207391 - DNA, 80 bp, synthetic construct; identical to SEQ ID NO: 22661
  source 1..80: mol_type = other DNA

SEQ ID NO: 207392 - DNA, 80 bp, synthetic construct; identical to SEQ ID NO: 22662
  source 1..80: mol_type = other DNA

SEQ ID NO: 207393 - DNA, 80 bp, synthetic construct; identical to SEQ ID NO: 22663
  source 1..80: mol_type = other DNA

SEQ ID NO: 207394 - DNA, 80 bp, synthetic construct; identical to SEQ ID NO: 22664
  source 1..80: mol_type = other DNA

SEQ ID NO: 207395 - DNA, 80 bp, synthetic construct; identical to SEQ ID NO: 22665
  source 1..80: mol_type = other DNA

SEQ ID NO: 207396 - DNA, 80 bp, synthetic construct; identical to SEQ ID NO: 22666
  source 1..80: mol_type = other DNA

SEQ ID NO: 207397 - DNA, 80 bp, synthetic construct; identical to SEQ ID NO: 22667
  source 1..80: mol_type = other DNA

SEQ ID NO: 207398 - DNA, 80 bp, synthetic construct; identical to SEQ ID NO: 22668
  source 1..80: mol_type = other DNA

SEQ ID NO: 207399 - DNA, 80 bp, synthetic construct; identical to SEQ ID NO: 22669
  source 1..80: mol_type = other DNA

SEQ ID NO: 207400 - DNA, 80 bp, synthetic construct; identical to SEQ ID NO: 22670
  source 1..80: mol_type = other DNA

SEQ ID NO: 207401 - DNA, 80 bp, synthetic construct; identical to SEQ ID NO: 22671
  source 1..80: mol_type = other DNA

SEQ ID NO: 207402 - DNA, 80 bp, synthetic construct; identical to SEQ ID NO: 22672
  source 1..80: mol_type = other DNA

SEQ ID NO: 207403 - DNA, 80 bp, synthetic construct; identical to SEQ ID NO: 22673
  source 1..80: mol_type = other DNA

SEQ ID NO: 207404 - DNA, 80 bp, synthetic construct; identical to SEQ ID NO: 22674
  source 1..80: mol_type = other DNA

SEQ ID NO: 207405 - DNA, 80 bp, synthetic construct; identical to SEQ ID NO: 22675
  source 1..80: mol_type = other DNA

SEQ ID NO: 207406 - DNA, 80 bp, synthetic construct; identical to SEQ ID NO: 22676
  source 1..80: mol_type = other DNA

SEQ ID NO: 207407 - DNA, 80 bp, synthetic construct; identical to SEQ ID NO: 22677
  source 1..80: mol_type = other DNA

SEQ ID NO: 207408 - DNA, 80 bp, synthetic construct; identical to SEQ ID NO: 22678
  source 1..80: mol_type = other DNA

SEQ ID NO: 207409 - DNA, 80 bp, synthetic construct; identical to SEQ ID NO: 22679
  source 1..80: mol_type = other DNA

SEQ ID NO: 207410 - DNA, 80 bp, synthetic construct; identical to SEQ ID NO: 22680
  source 1..80: mol_type = other DNA

SEQ ID NO: 207411 - DNA, 80 bp, synthetic construct; identical to SEQ ID NO: 22681
  source 1..80: mol_type = other DNA

SEQ ID NO: 207412 - DNA, 80 bp, synthetic construct; identical to SEQ ID NO: 22682
  source 1..80: mol_type = other DNA

SEQ ID NO: 207413 - DNA, 80 bp, synthetic construct; identical to SEQ ID NO: 22683
  source 1..80: mol_type = other DNA

SEQ ID NO: 207414 - DNA, 80 bp, synthetic construct; identical to SEQ ID NO: 22684
  source 1..80: mol_type = other DNA

SEQ ID NO: 207415 - DNA, 80 bp, synthetic construct; identical to SEQ ID NO: 22685
  source 1..80: mol_type = other DNA

SEQ ID NO: 207416 - DNA, 80 bp, synthetic construct; identical to SEQ ID NO: 22686
  source 1..80: mol_type = other DNA

SEQ ID NO: 207417 - DNA, 80 bp, synthetic construct; identical to SEQ ID NO: 22687
  source 1..80: mol_type = other DNA

SEQ ID NO: 207418 - DNA, 80 bp, synthetic construct; identical to SEQ ID NO: 22688
  source 1..80: mol_type = other DNA

SEQ ID NO: 207419 - DNA, 80 bp, synthetic construct; identical to SEQ ID NO: 22689
  source 1..80: mol_type = other DNA

SEQ ID NO: 207420 - DNA, 80 bp, synthetic construct; identical to SEQ ID NO: 22690
  source 1..80: mol_type = other DNA

SEQ ID NO: 207421 - DNA, 80 bp, synthetic construct; identical to SEQ ID NO: 22691
  source 1..80: mol_type = other DNA

SEQ ID NO: 207422 - DNA, 80 bp, synthetic construct; identical to SEQ ID NO: 22692
  source 1..80: mol_type = other DNA

SEQ ID NO: 207423 - DNA, 80 bp, synthetic construct; identical to SEQ ID NO: 22693
  source 1..80: mol_type = other DNA

SEQ ID NO: 207424 - DNA, 80 bp, synthetic construct; identical to SEQ ID NO: 22694
  source 1..80: mol_type = other DNA

SEQ ID NO: 207425 - DNA, 80 bp, synthetic construct; identical to SEQ ID NO: 22695
  source 1..80: mol_type = other DNA

SEQ ID NO: 207426 - DNA, 80 bp, synthetic construct; identical to SEQ ID NO: 22696
  source 1..80: mol_type = other DNA

SEQ ID NO: 207427 - DNA, 80 bp, synthetic construct; identical to SEQ ID NO: 22697
  source 1..80: mol_type = other DNA

SEQ ID NO: 207428 - DNA, 80 bp, synthetic construct; identical to SEQ ID NO: 22698
  source 1..80: mol_type = other DNA

SEQ ID NO: 207429 - DNA, 80 bp, synthetic construct; identical to SEQ ID NO: 22699
  source 1..80: mol_type = other DNA

SEQ ID NO: 207430 - DNA, 80 bp, synthetic construct; identical to SEQ ID NO: 22700
  source 1..80: mol_type = other DNA

SEQ ID NO: 207431 - DNA, 80 bp, synthetic construct; identical to SEQ ID NO: 22701
  source 1..80: mol_type = other DNA

SEQ ID NO: 207432 - DNA, 80 bp, synthetic construct; identical to SEQ ID NO: 22702
  source 1..80: mol_type = other DNA

SEQ ID NO: 207433 - DNA, 80 bp, synthetic construct; identical to SEQ ID NO: 22703
  source 1..80: mol_type = other DNA

SEQ ID NO: 207434 - DNA, 80 bp, synthetic construct; identical to SEQ ID NO: 22704
  source 1..80: mol_type = other DNA

SEQ ID NO: 207435 - DNA, 80 bp, synthetic construct; identical to SEQ ID NO: 22705
  source 1..80: mol_type = other DNA

SEQ ID NO: 207436 - DNA, 80 bp, synthetic construct; identical to SEQ ID NO: 22706
  source 1..80: mol_type = other DNA

SEQ ID NO: 207437 - DNA, 80 bp, synthetic construct; identical to SEQ ID NO: 22707
  source 1..80: mol_type = other DNA

SEQ ID NO: 207438 - DNA, 80 bp, synthetic construct; identical to SEQ ID NO: 22708
  source 1..80: mol_type = other DNA

SEQ ID NO: 207439 - DNA, 80 bp, synthetic construct; identical to SEQ ID NO: 22709
  source 1..80: mol_type = other DNA

SEQ ID NO: 207440 - DNA, 80 bp, synthetic construct; identical to SEQ ID NO: 22710
  source 1..80: mol_type = other DNA

SEQ ID NO: 207441 - DNA, 80 bp, synthetic construct; identical to SEQ ID NO: 22711
  source 1..80: mol_type = other DNA

SEQ ID NO: 207442 - DNA, 80 bp, synthetic construct; identical to SEQ ID NO: 22712
  source 1..80: mol_type = other DNA

SEQ ID NO: 207443 - DNA, 80 bp, synthetic construct; identical to SEQ ID NO: 22713
  source 1..80: mol_type = other DNA

SEQ ID NO: 207444 - DNA, 80 bp, synthetic construct; identical to SEQ ID NO: 22714
  source 1..80: mol_type = other DNA

SEQ ID NO: 207445 - DNA, 80 bp, synthetic construct; identical to SEQ ID NO: 22715
  source 1..80: mol_type = other DNA

SEQ ID NO: 207446 - DNA, 80 bp, synthetic construct; identical to SEQ ID NO: 22716
  source 1..80: mol_type = other DNA

SEQ ID NO: 207447 - DNA, 80 bp, synthetic construct; identical to SEQ ID NO: 22717
  source 1..80: mol_type = other DNA

SEQ ID NO: 207448 - DNA, 80 bp, synthetic construct; identical to SEQ ID NO: 22718
  source 1..80: mol_type = other DNA

SEQ ID NO: 207449 - DNA, 80 bp, synthetic construct; identical to SEQ ID NO: 22719
  source 1..80: mol_type = other DNA

SEQ ID NO: 207450 - DNA, 80 bp, synthetic construct; identical to SEQ ID NO: 22720
  source 1..80: mol_type = other DNA

SEQ ID NO: 207451 - DNA, 80 bp, synthetic construct; identical to SEQ ID NO: 22721
  source 1..80: mol_type = other DNA

SEQ ID NO: 207452 - DNA, 80 bp, synthetic construct; identical to SEQ ID NO: 22722
  source 1..80: mol_type = other DNA

SEQ ID NO: 207453 - DNA, 80 bp, synthetic construct; identical to SEQ ID NO: 22723
  source 1..80: mol_type = other DNA

SEQ ID NO: 207454 - DNA, 80 bp, synthetic construct; identical to SEQ ID NO: 22724
  source 1..80: mol_type = other DNA

SEQ ID NO: 207455 - DNA, 80 bp, synthetic construct; identical to SEQ ID NO: 22725
  source 1..80: mol_type = other DNA

SEQ ID NO: 207456 - DNA, 80 bp, synthetic construct; identical to SEQ ID NO: 22726
  source 1..80: mol_type = other DNA

SEQ ID NO: 207457 - DNA, 80 bp, synthetic construct; identical to SEQ ID NO: 22727
  source 1..80: mol_type = other DNA

SEQ ID NO: 207458 - DNA, 80 bp, synthetic construct; identical to SEQ ID NO: 22728
  source 1..80: mol_type = other DNA

SEQ ID NO: 207459 - DNA, 80 bp, synthetic construct; identical to SEQ ID NO: 22729
  source 1..80: mol_type = other DNA

SEQ ID NO: 207460 - DNA, 80 bp, synthetic construct; identical to SEQ ID NO: 22730
  source 1..80: mol_type = other DNA

SEQ ID NO: 207461 - DNA, 80 bp, synthetic construct; identical to SEQ ID NO: 22731
  source 1..80: mol_type = other DNA

SEQ ID NO: 207462 - DNA, 80 bp, synthetic construct; identical to SEQ ID NO: 22732
  source 1..80: mol_type = other DNA

SEQ ID NO: 207463 - DNA, 80 bp, synthetic construct; identical to SEQ ID NO: 22733
  source 1..80: mol_type = other DNA

SEQ ID NO: 207464 - DNA, 80 bp, synthetic construct; identical to SEQ ID NO: 22734
  source 1..80: mol_type = other DNA

SEQ ID NO: 207465 - DNA, 80 bp, synthetic construct; identical to SEQ ID NO: 22735
  source 1..80: mol_type = other DNA

SEQ ID NO: 207466 - DNA, 80 bp, synthetic construct; identical to SEQ ID NO: 22736
  source 1..80: mol_type = other DNA

SEQ ID NO: 207467 - DNA, 80 bp, synthetic construct; identical to SEQ ID NO: 22737
  source 1..80: mol_type = other DNA

SEQ ID NO: 207468 - DNA, 80 bp, synthetic construct; identical to SEQ ID NO: 22738
  source 1..80: mol_type = other DNA

SEQ ID NO: 207469 - DNA, 80 bp, synthetic construct; identical to SEQ ID NO: 22739
  source 1..80: mol_type = other DNA

SEQ ID NO: 207470 - DNA, 80 bp, synthetic construct; identical to SEQ ID NO: 22740
  source 1..80: mol_type = other DNA

SEQ ID NO: 207471 - DNA, 80 bp, synthetic construct; identical to SEQ ID NO: 22741
  source 1..80: mol_type = other DNA

SEQ ID NO: 207472 - DNA, 80 bp, synthetic construct; identical to SEQ ID NO: 22742
  source 1..80: mol_type = other DNA

SEQ ID NO: 207473 - DNA, 80 bp, synthetic construct; identical to SEQ ID NO: 22743
  source 1..80: mol_type = other DNA

SEQ ID NO: 207474 - DNA, 80 bp, synthetic construct; identical to SEQ ID NO: 22744
  source 1..80: mol_type = other DNA

SEQ ID NO: 207475 - DNA, 80 bp, synthetic construct; identical to SEQ ID NO: 22745
  source 1..80: mol_type = other DNA

SEQ ID NO: 207476 - DNA, 80 bp, synthetic construct; identical to SEQ ID NO: 22746
  source 1..80: mol_type = other DNA

SEQ ID NO: 207477 - DNA, 80 bp, synthetic construct; identical to SEQ ID NO: 22747
  source 1..80: mol_type = other DNA

SEQ ID NO: 207478 - DNA, 80 bp, synthetic construct; identical to SEQ ID NO: 22748
  source 1..80: mol_type = other DNA

SEQ ID NO: 207479 - DNA, 80 bp, synthetic construct; identical to SEQ ID NO: 22749
  source 1..80: mol_type = other DNA

SEQ ID NO: 207480 - DNA, 80 bp, synthetic construct; identical to SEQ ID NO: 22750
  source 1..80: mol_type = other DNA

SEQ ID NO: 207481 - DNA, 80 bp, synthetic construct; identical to SEQ ID NO: 22751
  source 1..80: mol_type = other DNA

SEQ ID NO: 207482 - DNA, 80 bp, synthetic construct; identical to SEQ ID NO: 22752
  source 1..80: mol_type = other DNA

SEQ ID NO: 207483 - DNA, 80 bp, synthetic construct; identical to SEQ ID NO: 22753
  source 1..80: mol_type = other DNA

SEQ ID NO: 207484 - DNA, 80 bp, synthetic construct; identical to SEQ ID NO: 22754
  source 1..80: mol_type = other DNA

SEQ ID NO: 207485 - DNA, 80 bp, synthetic construct; identical to SEQ ID NO: 22755
  source 1..80: mol_type = other DNA

SEQ ID NO: 207486 - DNA, 80 bp, synthetic construct; identical to SEQ ID NO: 22756
  source 1..80: mol_type = other DNA

SEQ ID NO: 207487 - DNA, 80 bp, synthetic construct; identical to SEQ ID NO: 22757
  source 1..80: mol_type = other DNA

SEQ ID NO: 207488 - DNA, 80 bp, synthetic construct; identical to SEQ ID NO: 22758
  source 1..80: mol_type = other DNA

SEQ ID NO: 207489 - DNA, 80 bp, synthetic construct; identical to SEQ ID NO: 22759
  source 1..80: mol_type = other DNA

SEQ ID NO: 207490 - DNA, 80 bp, synthetic construct; identical to SEQ ID NO: 22760
  source 1..80: mol_type = other DNA

SEQ ID NO: 207491 - DNA, 80 bp, synthetic construct; identical to SEQ ID NO: 22761
  source 1..80: mol_type = other DNA

SEQ ID NO: 207492 - DNA, 80 bp, synthetic construct; identical to SEQ ID NO: 22762
  source 1..80: mol_type = other DNA

SEQ ID NO: 207493 - DNA, 80 bp, synthetic construct; identical to SEQ ID NO: 22763
  source 1..80: mol_type = other DNA

SEQ ID NO: 207494 - DNA, 80 bp, synthetic construct; identical to SEQ ID NO: 22764
  source 1..80: mol_type = other DNA

SEQ ID NO: 207495 - DNA, 80 bp, synthetic construct; identical to SEQ ID NO: 22765
  source 1..80: mol_type = other DNA

SEQ ID NO: 207496 - DNA, 80 bp, synthetic construct; identical to SEQ ID NO: 22766
  source 1..80: mol_type = other DNA

SEQ ID NO: 207497 - DNA, 80 bp, synthetic construct; identical to SEQ ID NO: 22767
  source 1..80: mol_type = other DNA

SEQ ID NO: 207498 - DNA, 80 bp, synthetic construct; identical to SEQ ID NO: 22768
  source 1..80: mol_type = other DNA

SEQ ID NO: 207499 - DNA, 80 bp, synthetic construct; identical to SEQ ID NO: 22769
  source 1..80: mol_type = other DNA

SEQ ID NO: 207500 - DNA, 80 bp, synthetic construct; identical to SEQ ID NO: 22770
  source 1..80: mol_type = other DNA

SEQ ID NO: 207501 - DNA, 80 bp, synthetic construct; identical to SEQ ID NO: 22771
  source 1..80: mol_type = other DNA

SEQ ID NO: 207502 - DNA, 80 bp, synthetic construct; identical to SEQ ID NO: 22772
  source 1..80: mol_type = other DNA

SEQ ID NO: 207503 - DNA, 80 bp, synthetic construct; identical to SEQ ID NO: 22773
  source 1..80: mol_type = other DNA

SEQ ID NO: 207504 - DNA, 80 bp, synthetic construct; identical to SEQ ID NO: 22774
  source 1..80: mol_type = other DNA

SEQ ID NO: 207505 - DNA, 80 bp, synthetic construct; identical to SEQ ID NO: 22775
  source 1..80: mol_type = other DNA

SEQ ID NO: 207506 - DNA, 80 bp, synthetic construct; identical to SEQ ID NO: 22776
  source 1..80: mol_type = other DNA

SEQ ID NO: 207507 - DNA, 80 bp, synthetic construct; identical to SEQ ID NO: 22777
  source 1..80: mol_type = other DNA

SEQ ID NO: 207508 - DNA, 80 bp, synthetic construct; identical to SEQ ID NO: 22778
  source 1..80: mol_type = other DNA

SEQ ID NO: 207509 - DNA, 80 bp, synthetic construct; identical to SEQ ID NO: 22779
  source 1..80: mol_type = other DNA

SEQ ID NO: 207510 - DNA, 80 bp, synthetic construct; identical to SEQ ID NO: 22780
  source 1..80: mol_type = other DNA

SEQ ID NO: 207511 - DNA, 80 bp, synthetic construct; identical to SEQ ID NO: 22781
  source 1..80: mol_type = other DNA

SEQ ID NO: 207512 - DNA, 80 bp, synthetic construct; identical to SEQ ID NO: 22782
  source 1..80: mol_type = other DNA

SEQ ID NO: 207513 - DNA, 80 bp, synthetic construct; identical to SEQ ID NO: 22783
  source 1..80: mol_type = other DNA

SEQ ID NO: 207514 - DNA, 80 bp, synthetic construct; identical to SEQ ID NO: 22784
  source 1..80: mol_type = other DNA

SEQ ID NO: 207515 - DNA, 80 bp, synthetic construct; identical to SEQ ID NO: 22785
  source 1..80: mol_type = other DNA

SEQ ID NO: 207516 - DNA, 80 bp, synthetic construct; identical to SEQ ID NO: 22786
  source 1..80: mol_type = other DNA

SEQ ID NO: 207517 - DNA, 80 bp, synthetic construct; identical to SEQ ID NO: 22787
  source 1..80: mol_type = other DNA

SEQ ID NO: 207518 - DNA, 80 bp, synthetic construct; identical to SEQ ID NO: 22788
  source 1..80: mol_type = other DNA

SEQ ID NO: 207519 - DNA, 80 bp, synthetic construct; identical to SEQ ID NO: 22789
  source 1..80: mol_type = other DNA

SEQ ID NO: 207520 - DNA, 80 bp, synthetic construct; identical to SEQ ID NO: 22790
  source 1..80: mol_type = other DNA

SEQ ID NO: 207521 - DNA, 80 bp, synthetic construct; identical to SEQ ID NO: 22791
  source 1..80: mol_type = other DNA

SEQ ID NO: 207522 - DNA, 80 bp, synthetic construct; identical to SEQ ID NO: 22792
  source 1..80: mol_type = other DNA

SEQ ID NO: 207523 - DNA, 80 bp, synthetic construct; identical to SEQ ID NO: 22793
  source 1..80: mol_type = other DNA

SEQ ID NO: 207524 - DNA, 80 bp, synthetic construct; identical to SEQ ID NO: 22794
  source 1..80: mol_type = other DNA

SEQ ID NO: 207525 - DNA, 80 bp, synthetic construct; identical to SEQ ID NO: 22795
  source 1..80: mol_type = other DNA

SEQ ID NO: 207526 - DNA, 80 bp, synthetic construct; identical to SEQ ID NO: 22796
  source 1..80: mol_type = other DNA

SEQ ID NO: 207527 - DNA, 80 bp, synthetic construct; identical to SEQ ID NO: 22797
  source 1..80: mol_type = other DNA

SEQ ID NO: 207528 - DNA, 80 bp, synthetic construct; identical to SEQ ID NO: 22798
  source 1..80: mol_type = other DNA

SEQ ID NO: 207529 - DNA, 80 bp, synthetic construct; identical to SEQ ID NO: 22799
  source 1..80: mol_type = other DNA

SEQ ID NO: 207530 - DNA, 80 bp, synthetic construct; identical to SEQ ID NO: 22800
  source 1..80: mol_type = other DNA

SEQ ID NO: 207531 - DNA, 80 bp, synthetic construct; identical to SEQ ID NO: 22801
  source 1..80: mol_type = other DNA

SEQ ID NO: 207532 - DNA, 80 bp, synthetic construct; identical to SEQ ID NO: 22802
  source 1..80: mol_type = other DNA

SEQ ID NO: 207533 - DNA, 80 bp, synthetic construct; identical to SEQ ID NO: 22803
  source 1..80: mol_type = other DNA

SEQ ID NO: 207534 - DNA, 80 bp, synthetic construct; identical to SEQ ID NO: 22804
  source 1..80: mol_type = other DNA

SEQ ID NO: 207535 - DNA, 80 bp, synthetic construct; identical to SEQ ID NO: 22805
  source 1..80: mol_type = other DNA

SEQ ID NO: 207536 - DNA, 80 bp, synthetic construct; identical to SEQ ID NO: 22806
  source 1..80: mol_type = other DNA

SEQ ID NO: 207537 - DNA, 80 bp, synthetic construct; identical to SEQ ID NO: 22807
  source 1..80: mol_type = other DNA

SEQ ID NO: 207538 - DNA, 80 bp, synthetic construct; identical to SEQ ID NO: 22808
  source 1..80: mol_type = other DNA

SEQ ID NO: 207539 - DNA, 80 bp, synthetic construct; identical to SEQ ID NO: 22809
  source 1..80: mol_type = other DNA

SEQ ID NO: 207540 - DNA, 80 bp, synthetic construct; identical to SEQ ID NO: 22810
  source 1..80: mol_type = other DNA

SEQ ID NO: 207541 - DNA, 80 bp, synthetic construct; identical to SEQ ID NO: 22811
  source 1..80: mol_type = other DNA

SEQ ID NO: 207542 - DNA, 80 bp, synthetic construct; identical to SEQ ID NO: 22812
  source 1..80: mol_type = other DNA

SEQ ID NO: 207543 - DNA, 80 bp, synthetic construct; identical to SEQ ID NO: 22813
  source 1..80: mol_type = other DNA

SEQ ID NO: 207544 - DNA, 80 bp, synthetic construct; identical to SEQ ID NO: 22814
  source 1..80: mol_type = other DNA

SEQ ID NO: 207545 - DNA, 80 bp, synthetic construct; identical to SEQ ID NO: 22815
  source 1..80: mol_type = other DNA

SEQ ID NO: 207546 - DNA, 80 bp, synthetic construct; identical to SEQ ID NO: 22816
  source 1..80: mol_type = other DNA

SEQ ID NO: 207547 - DNA, 80 bp, synthetic construct; identical to SEQ ID NO: 22817
  source 1..80: mol_type = other DNA

SEQ ID NO: 207548 - DNA, 80 bp, synthetic construct; identical to SEQ ID NO: 22818
  source 1..80: mol_type = other DNA

SEQ ID NO: 207549 - DNA, 80 bp, synthetic construct; identical to SEQ ID NO: 22819
  source 1..80: mol_type = other DNA

SEQ ID NO: 207550 - DNA, 80 bp, synthetic construct; identical to SEQ ID NO: 22820
  source 1..80: mol_type = other DNA

SEQ ID NO: 207551 - DNA, 80 bp, synthetic construct; identical to SEQ ID NO: 22821
  source 1..80: mol_type = other DNA

SEQ ID NO: 207552 - DNA, 80 bp, synthetic construct; identical to SEQ ID NO: 22822
  source 1..80: mol_type = other DNA

SEQ ID NO: 207553 - DNA, 80 bp, synthetic construct; identical to SEQ ID NO: 22823
  source 1..80: mol_type = other DNA

SEQ ID NO: 207554 - DNA, 80 bp, synthetic construct; identical to SEQ ID NO: 22824
  source 1..80: mol_type = other DNA

SEQ ID NO: 207555 - DNA, 80 bp, synthetic construct; identical to SEQ ID NO: 22825
  source 1..80: mol_type = other DNA

SEQ ID NO: 207556 - DNA, 80 bp, synthetic construct; identical to SEQ ID NO: 22826
  source 1..80: mol_type = other DNA

SEQ ID NO: 207557 - DNA, 80 bp, synthetic construct; identical to SEQ ID NO: 22827
  source 1..80: mol_type = other DNA

SEQ ID NO: 207558 - DNA, 80 bp, synthetic construct; identical to SEQ ID NO: 22828
  source 1..80: mol_type = other DNA

SEQ ID NO: 207559 - DNA, 80 bp, synthetic construct; identical to SEQ ID NO: 22829
  source 1..80: mol_type = other DNA

SEQ ID NO: 207560 - DNA, 80 bp, synthetic construct; identical to SEQ ID NO: 22830
  source 1..80: mol_type = other DNA

SEQ ID NO: 207561 - DNA, 80 bp, synthetic construct; identical to SEQ ID NO: 22831
  source 1..80: mol_type = other DNA

SEQ ID NO: 207562 - DNA, 80 bp, synthetic construct; identical to SEQ ID NO: 22832
  source 1..80: mol_type = other DNA

SEQ ID NO: 207563 - DNA, 80 bp, synthetic construct; identical to SEQ ID NO: 22833
  source 1..80: mol_type = other DNA

SEQ ID NO: 207564 - DNA, 80 bp, synthetic construct; identical to SEQ ID NO: 22834
  source 1..80: mol_type = other DNA

SEQ ID NO: 207565 - DNA, 80 bp, synthetic construct; identical to SEQ ID NO: 22835
  source 1..80: mol_type = other DNA

SEQ ID NO: 207566 - DNA, 80 bp, synthetic construct; identical to SEQ ID NO: 22836
  source 1..80: mol_type = other DNA

SEQ ID NO: 207567 - DNA, 80 bp, synthetic construct; identical to SEQ ID NO: 22837
  source 1..80: mol_type = other DNA

SEQ ID NO: 207568 - DNA, 80 bp, synthetic construct; identical to SEQ ID NO: 22838
  source 1..80: mol_type = other DNA

SEQ ID NO: 207569 - DNA, 80 bp, synthetic construct; identical to SEQ ID NO: 22839
  source 1..80: mol_type = other DNA

SEQ ID NO: 207570 - DNA, 80 bp, synthetic construct; identical to SEQ ID NO: 22840
  source 1..80: mol_type = other DNA

SEQ ID NO: 207571 - DNA, 80 bp, synthetic construct; identical to SEQ ID NO: 22841
  source 1..80: mol_type = other DNA

SEQ ID NO: 207572 - DNA, 80 bp, synthetic construct; identical to SEQ ID NO: 22842
  source 1..80: mol_type = other DNA

SEQ ID NO: 207573 - DNA, 80 bp, synthetic construct; identical to SEQ ID NO: 22843
  source 1..80: mol_type = other DNA

SEQ ID NO: 207574 - DNA, 80 bp, synthetic construct; identical to SEQ ID NO: 22844
  source 1..80: mol_type = other DNA

SEQ ID NO: 207575 - DNA, 80 bp, synthetic construct; identical to SEQ ID NO: 22845
  source 1..80: mol_type = other DNA

SEQ ID NO: 207576 - DNA, 80 bp, synthetic construct; identical to SEQ ID NO: 22846
  source 1..80: mol_type = other DNA

SEQ ID NO: 207577 - DNA, 80 bp, synthetic construct; identical to SEQ ID NO: 22847
  source 1..80: mol_type = other DNA

SEQ ID NO: 207578 - DNA, 80 bp, synthetic construct; identical to SEQ ID NO: 22848
  source 1..80: mol_type = other DNA

SEQ ID NO: 207579 - DNA, 80 bp, synthetic construct; identical to SEQ ID NO: 22849
  source 1..80: mol_type = other DNA

SEQ ID NO: 207580 - DNA, 80 bp, synthetic construct; identical to SEQ ID NO: 22850
  source 1..80: mol_type = other DNA

SEQ ID NO: 207581 - DNA, 80 bp, synthetic construct; identical to SEQ ID NO: 22851
  source 1..80: mol_type = other DNA

SEQ ID NO: 207582 - DNA, 80 bp, synthetic construct; identical to SEQ ID NO: 22852
  source 1..80: mol_type = other DNA

SEQ ID NO: 207583 - DNA, 80 bp, synthetic construct; identical to SEQ ID NO: 22853
  source 1..80: mol_type = other DNA

SEQ ID NO: 207584 - DNA, 80 bp, synthetic construct; identical to SEQ ID NO: 22854
  source 1..80: mol_type = other DNA

SEQ ID NO: 207585 - DNA, 80 bp, synthetic construct; identical to SEQ ID NO: 22855
  source 1..80: mol_type = other DNA

SEQ ID NO: 207586 - DNA, 80 bp, synthetic construct; identical to SEQ ID NO: 22856
  source 1..80: mol_type = other DNA

SEQ ID NO: 207587 - DNA, 80 bp, synthetic construct; identical to SEQ ID NO: 22857
  source 1..80: mol_type = other DNA

SEQ ID NO: 207588 - DNA, 80 bp, synthetic construct; identical to SEQ ID NO: 22858
  source 1..80: mol_type = other DNA

SEQ ID NO: 207589 - DNA, 80 bp, synthetic construct; identical to SEQ ID NO: 22859
  source 1..80: mol_type = other DNA

SEQ ID NO: 207590 - DNA, 80 bp, synthetic construct; identical to SEQ ID NO: 22860
  source 1..80: mol_type = other DNA

SEQ ID NO: 207591 - DNA, 80 bp, synthetic construct; identical to SEQ ID NO: 22861
  source 1..80: mol_type = other DNA

SEQ ID NO: 207592 - DNA, 80 bp, synthetic construct; identical to SEQ ID NO: 22862
  source 1..80: mol_type = other DNA

SEQ ID NO: 207593 - DNA, 80 bp, synthetic construct; identical to SEQ ID NO: 22863
  source 1..80: mol_type = other DNA

SEQ ID NO: 207594 - DNA, 80 bp, synthetic construct; identical to SEQ ID NO: 22864
  source 1..80: mol_type = other DNA

SEQ ID NO: 207595 - DNA, 80 bp, synthetic construct; identical to SEQ ID NO: 22865
  source 1..80: mol_type = other DNA

SEQ ID NO: 207596 - DNA, 80 bp, synthetic construct; identical to SEQ ID NO: 22866
  source 1..80: mol_type = other DNA

SEQ ID NO: 207597 - DNA, 80 bp, synthetic construct; identical to SEQ ID NO: 22867
  source 1..80: mol_type = other DNA

SEQ ID NO: 207598 - DNA, 80 bp, synthetic construct; identical to SEQ ID NO: 22868
  source 1..80: mol_type = other DNA

SEQ ID NO: 207599 - DNA, 80 bp, synthetic construct; identical to SEQ ID NO: 22869
  source 1..80: mol_type = other DNA

SEQ ID NO: 207600 - DNA, 80 bp, synthetic construct; identical to SEQ ID NO: 22870
  source 1..80: mol_type = other DNA

SEQ ID NO: 207601 - DNA, 80 bp, synthetic construct; identical to SEQ ID NO: 22871
  source 1..80: mol_type = other DNA

SEQ ID NO: 207602 - DNA, 80 bp, synthetic construct; identical to SEQ ID NO: 22872
  source 1..80: mol_type = other DNA

SEQ ID NO: 207603 - DNA, 80 bp, synthetic construct; identical to SEQ ID NO: 22873
  source 1..80: mol_type = other DNA

SEQ ID NO: 207604 - DNA, 80 bp, synthetic construct; identical to SEQ ID NO: 22874
  source 1..80: mol_type = other DNA

SEQ ID NO: 207605 - DNA, 80 bp, synthetic construct; identical to SEQ ID NO: 22875
  source 1..80: mol_type = other DNA

SEQ ID NO: 207606 - DNA, 80 bp, synthetic construct; identical to SEQ ID NO: 22876
  source 1..80: mol_type = other DNA

SEQ ID NO: 207607 - DNA, 80 bp, synthetic construct; identical to SEQ ID NO: 22877
  source 1..80: mol_type = other DNA

SEQ ID NO: 207608 - DNA, 80 bp, synthetic construct; identical to SEQ ID NO: 22878
  source 1..80: mol_type = other DNA

SEQ ID NO: 207609 - DNA, 80 bp, synthetic construct; identical to SEQ ID NO: 22879
  source 1..80: mol_type = other DNA

SEQ ID NO: 207610 - DNA, 80 bp, synthetic construct; identical to SEQ ID NO: 22880
  source 1..80: mol_type = other DNA

SEQ ID NO: 207611 - DNA, 80 bp, synthetic construct; identical to SEQ ID NO: 22881
  source 1..80: mol_type = other DNA

SEQ ID NO: 207612 - DNA, 80 bp, synthetic construct; identical to SEQ ID NO: 22882
  source 1..80: mol_type = other DNA

SEQ ID NO: 207613 - DNA, 80 bp, synthetic construct; identical to SEQ ID NO: 22883
  source 1..80: mol_type = other DNA

SEQ ID NO: 207614 - DNA, 80 bp, synthetic construct; identical to SEQ ID NO: 22884
  source 1..80: mol_type = other DNA

SEQ ID NO: 207615 - DNA, 80 bp, synthetic construct; identical to SEQ ID NO: 22885
  source 1..80: mol_type = other DNA

SEQ ID NO: 207616 - DNA, 80 bp, synthetic construct; identical to SEQ ID NO: 22886
  source 1..80: mol_type = other DNA

SEQ ID NO: 207617 - DNA, 80 bp, synthetic construct; identical to SEQ ID NO: 22887
  source 1..80: mol_type = other DNA

SEQ ID NO: 207618 - DNA, 80 bp, synthetic construct; identical to SEQ ID NO: 22888
  source 1..80: mol_type = other DNA

SEQ ID NO: 207619 - DNA, 80 bp, synthetic construct; identical to SEQ ID NO: 22889
  source 1..80: mol_type = other DNA

SEQ ID NO: 207620 - DNA, 80 bp, synthetic construct; identical to SEQ ID NO: 22890
  source 1..80: mol_type = other DNA

SEQ ID NO: 207621 - DNA, 80 bp, synthetic construct; identical to SEQ ID NO: 22891
  source 1..80: mol_type = other DNA

SEQ ID NO: 207622 - DNA, 80 bp, synthetic construct; identical to SEQ ID NO: 22892
  source 1..80: mol_type = other DNA

SEQ ID NO: 207623 - DNA, 80 bp, synthetic construct; identical to SEQ ID NO: 22893
  source 1..80: mol_type = other DNA

SEQ ID NO: 207624 - DNA, 80 bp, synthetic construct; identical to SEQ ID NO: 22894
  source 1..80: mol_type = other DNA

SEQ ID NO: 207625 - DNA, 80 bp, synthetic construct; identical to SEQ ID NO: 22895
  source 1..80: mol_type = other DNA

SEQ ID NO: 207626 - DNA, 80 bp, synthetic construct; identical to SEQ ID NO: 22896
  source 1..80: mol_type = other DNA

SEQ ID NO: 207627 - DNA, 80 bp, synthetic construct; identical to SEQ ID NO: 22897
  source 1..80: mol_type = other DNA

SEQ ID NO: 207628 - DNA, 80 bp, synthetic construct; identical to SEQ ID NO: 22898
  source 1..80: mol_type = other DNA

SEQ ID NO: 207629 - DNA, 80 bp, synthetic construct; identical to SEQ ID NO: 22899
  source 1..80: mol_type = other DNA

SEQ ID NO: 207630 - DNA, 80 bp, synthetic construct; identical to SEQ ID NO: 22900
  source 1..80: mol_type = other DNA

SEQ ID NO: 207631 - DNA, 80 bp, synthetic construct; identical to SEQ ID NO: 22901
  source 1..80: mol_type = other DNA

SEQ ID NO: 207632 - DNA, 80 bp, synthetic construct; identical to SEQ ID NO: 22902
  source 1..80: mol_type = other DNA

SEQ ID NO: 207633 - DNA, 80 bp, synthetic construct; identical to SEQ ID NO: 22903
  source 1..80: mol_type = other DNA

SEQ ID NO: 207634 - DNA, 80 bp, synthetic construct; identical to SEQ ID NO: 22904
  source 1..80: mol_type = other DNA

SEQ ID NO: 207635 - DNA, 80 bp, synthetic construct; identical to SEQ ID NO: 22905
  source 1..80: mol_type = other DNA

SEQ ID NO: 207636 - DNA, 80 bp, synthetic construct; identical to SEQ ID NO: 22906
  source 1..80: mol_type = other DNA

SEQ ID NO: 207637 - DNA, 80 bp, synthetic construct; identical to SEQ ID NO: 22907
  source 1..80: mol_type = other DNA

SEQ ID NO: 207638 - DNA, 80 bp, synthetic construct; identical to SEQ ID NO: 22908
  source 1..80: mol_type = other DNA

SEQ ID NO: 207639 - DNA, 80 bp, synthetic construct; identical to SEQ ID NO: 22909
  source 1..80: mol_type = other DNA

SEQ ID NO: 207640 - DNA, 80 bp, synthetic construct; identical to SEQ ID NO: 22910
  source 1..80: mol_type = other DNA

SEQ ID NO: 207641 - DNA, 80 bp, synthetic construct; identical to SEQ ID NO: 22911
  source 1..80: mol_type = other DNA

SEQ ID NO: 207642 - DNA, 80 bp, synthetic construct; identical to SEQ ID NO: 22912
  source 1..80: mol_type = other DNA

SEQ ID NO: 207643 - DNA, 80 bp, synthetic construct; identical to SEQ ID NO: 22913
  source 1..80: mol_type = other DNA

SEQ ID NO: 207644 - DNA, 80 bp, synthetic construct; identical to SEQ ID NO: 22914
  source 1..80: mol_type = other DNA

SEQ ID NO: 207645 - DNA, 80 bp, synthetic construct; identical to SEQ ID NO: 22915
  source 1..80: mol_type = other DNA

SEQ ID NO: 207646 - DNA, 80 bp, synthetic construct; identical to SEQ ID NO: 22916
  source 1..80: mol_type = other DNA

SEQ ID NO: 207647 - DNA, 80 bp, synthetic construct; identical to SEQ ID NO: 22917
  source 1..80: mol_type = other DNA

SEQ ID NO: 207648 - DNA, 80 bp, synthetic construct; identical to SEQ ID NO: 22918
  source 1..80: mol_type = other DNA

SEQ ID NO: 207649 - DNA, 80 bp, synthetic construct; identical to SEQ ID NO: 22919
  source 1..80: mol_type = other DNA

SEQ ID NO: 207650 - DNA, 80 bp, synthetic construct; identical to SEQ ID NO: 22920
  source 1..80: mol_type = other DNA

SEQ ID NO: 207651 - DNA, 80 bp, synthetic construct; identical to SEQ ID NO: 22921
  source 1..80: mol_type = other DNA

SEQ ID NO: 207652 - DNA, 80 bp, synthetic construct; identical to SEQ ID NO: 22922
  source 1..80: mol_type = other DNA

SEQ ID NO: 207653 - DNA, 80 bp, synthetic construct; identical to SEQ ID NO: 22923
  source 1..80: mol_type = other DNA

SEQ ID NO: 207654 - DNA, 80 bp, synthetic construct; identical to SEQ ID NO: 22924
  source 1..80: mol_type = other DNA

SEQ ID NO: 207655 - DNA, 80 bp, synthetic construct; identical to SEQ ID NO: 22925
  source 1..80: mol_type = other DNA

SEQ ID NO: 207656 - DNA, 80 bp, synthetic construct; identical to SEQ ID NO: 22926
  source 1..80: mol_type = other DNA

SEQ ID NO: 207657 - DNA, 80 bp, synthetic construct; identical to SEQ ID NO: 22927
  source 1..80: mol_type = other DNA

SEQ ID NO: 207658 - DNA, 80 bp, synthetic construct; identical to SEQ ID NO: 22928
  source 1..80: mol_type = other DNA

SEQ ID NO: 207659 - DNA, 80 bp, synthetic construct; identical to SEQ ID NO: 22929
  source 1..80: mol_type = other DNA

SEQ ID NO: 207660 - DNA, 80 bp, synthetic construct; identical to SEQ ID NO: 22930
  source 1..80: mol_type = other DNA

SEQ ID NO: 207661 - DNA, 80 bp, synthetic construct; identical to SEQ ID NO: 22931
  source 1..80: mol_type = other DNA

SEQ ID NO: 207662 - DNA, 80 bp, synthetic construct; identical to SEQ ID NO: 22932
  source 1..80: mol_type = other DNA

SEQ ID NO: 207663 - DNA, 80 bp, synthetic construct; identical to SEQ ID NO: 22933
  source 1..80: mol_type = other DNA

SEQ ID NO: 207664 - DNA, 80 bp, synthetic construct; identical to SEQ ID NO: 22934
  source 1..80: mol_type = other DNA

SEQ ID NO: 207665 - DNA, 80 bp, synthetic construct; identical to SEQ ID NO: 22935
  source 1..80: mol_type = other DNA

SEQ ID NO: 207666 - DNA, 80 bp, synthetic construct; identical to SEQ ID NO: 22936
  source 1..80: mol_type = other DNA

SEQ ID NO: 207667 - DNA, 80 bp, synthetic construct; identical to SEQ ID NO: 22937
  source 1..80: mol_type = other DNA

SEQ ID NO: 207668 - DNA, 80 bp, synthetic construct; identical to SEQ ID NO: 22938
  source 1..80: mol_type = other DNA

SEQ ID NO: 207669 - DNA, 80 bp, synthetic construct; identical to SEQ ID NO: 22939
  source 1..80: mol_type = other DNA

SEQ ID NO: 207670 - DNA, 80 bp, synthetic construct; identical to SEQ ID NO: 22940
  source 1..80: mol_type = other DNA

SEQ ID NO: 207671 - DNA, 80 bp, synthetic construct; identical to SEQ ID NO: 22941
  source 1..80: mol_type = other DNA

SEQ ID NO: 207672 - DNA, 80 bp, synthetic construct; identical to SEQ ID NO: 22942
  source 1..80: mol_type = other DNA

SEQ ID NO: 207673 - DNA, 80 bp, synthetic construct; identical to SEQ ID NO: 22943
  source 1..80: mol_type = other DNA

SEQ ID NO: 207674 - DNA, 80 bp, synthetic construct; identical to SEQ ID NO: 22944
  source 1..80: mol_type = other DNA

SEQ ID NO: 207675 - DNA, 80 bp, synthetic construct; identical to SEQ ID NO: 22945
  source 1..80: mol_type = other DNA

SEQ ID NO: 207676 - DNA, 80 bp, synthetic construct; identical to SEQ ID NO: 22946
  source 1..80: mol_type = other DNA

SEQ ID NO: 207677 - DNA, 80 bp, synthetic construct; identical to SEQ ID NO: 22947
  source 1..80: mol_type = other DNA

SEQ ID NO: 207678 - DNA, 80 bp, synthetic construct; identical to SEQ ID NO: 22948
  source 1..80: mol_type = other DNA

SEQ ID NO: 207679 - DNA, 80 bp, synthetic construct; identical to SEQ ID NO: 22949
  source 1..80: mol_type = other DNA

SEQ ID NO: 207680 - DNA, 80 bp, synthetic construct; identical to SEQ ID NO: 22950
  source 1..80: mol_type = other DNA

SEQ ID NO: 207681 - DNA, 80 bp, synthetic construct; identical to SEQ ID NO: 22951
  source 1..80: mol_type = other DNA

SEQ ID NO: 207682 - DNA, 80 bp, synthetic construct; identical to SEQ ID NO: 22952
  source 1..80: mol_type = other DNA

SEQ ID NO: 207683 - DNA, 80 bp, synthetic construct; identical to SEQ ID NO: 22953
  source 1..80: mol_type = other DNA

SEQ ID NO: 207684 - DNA, 80 bp, synthetic construct; identical to SEQ ID NO: 22954
  source 1..80: mol_type = other DNA

SEQ ID NO: 207685 - DNA, 80 bp, synthetic construct; identical to SEQ ID NO: 22955
  source 1..80: mol_type = other DNA

SEQ ID NO: 207686 - DNA, 80 bp, synthetic construct; identical to SEQ ID NO: 22956
  source 1..80: mol_type = other DNA

SEQ ID NO: 207687 - DNA, 80 bp, synthetic construct; identical to SEQ ID NO: 22957
  source 1..80: mol_type = other DNA

SEQ ID NO: 207688 - DNA, 80 bp, synthetic construct; identical to SEQ ID NO: 22958
  source 1..80: mol_type = other DNA

SEQ ID NO: 207689 - DNA, 80 bp, synthetic construct; identical to SEQ ID NO: 22959
  source 1..80: mol_type = other DNA

SEQ ID NO: 207690 - DNA, 80 bp, synthetic construct; identical to SEQ ID NO: 22960
  source 1..80: mol_type = other DNA

SEQ ID NO: 207691 - DNA, 80 bp, synthetic construct; identical to SEQ ID NO: 22961
  source 1..80: mol_type = other DNA

SEQ ID NO: 207692 - DNA, 80 bp, synthetic construct; identical to SEQ ID NO: 22962
  source 1..80: mol_type = other DNA

SEQ ID NO: 207693 - DNA, 80 bp, synthetic construct; identical to SEQ ID NO: 22963
  source 1..80: mol_type = other DNA

SEQ ID NO: 207694 - DNA, 80 bp, synthetic construct; identical to SEQ ID NO: 22964
  source 1..80: mol_type = other DNA

SEQ ID NO: 207695 - DNA, 80 bp, synthetic construct; identical to SEQ ID NO: 22965
  source 1..80: mol_type = other DNA

SEQ ID NO: 207696 - DNA, 80 bp, synthetic construct; identical to SEQ ID NO: 22966
  source 1..80: mol_type = other DNA

SEQ ID NO: 207697 - DNA, 80 bp, synthetic construct; identical to SEQ ID NO: 22967
  source 1..80: mol_type = other DNA

SEQ ID NO: 207698 - DNA, 80 bp, synthetic construct; identical to SEQ ID NO: 22968
  source 1..80: mol_type = other DNA

SEQ ID NO: 207699 - DNA, 80 bp, synthetic construct; identical to SEQ ID NO: 22969
  source 1..80: mol_type = other DNA

SEQ ID NO: 207700 - DNA, 80 bp, synthetic construct; identical to SEQ ID NO: 22970
  source 1..80: mol_type = other DNA

SEQ ID NO: 207701 - DNA, 80 bp, synthetic construct; identical to SEQ ID NO: 22971
  source 1..80: mol_type = other DNA

SEQ ID NO: 207702 - DNA, 80 bp, synthetic construct; identical to SEQ ID NO: 22972
  source 1..80: mol_type = other DNA

SEQ ID NO: 207703 - DNA, 80 bp, synthetic construct; identical to SEQ ID NO: 22973
  source 1..80: mol_type = other DNA

SEQ ID NO: 207704 - DNA, 80 bp, synthetic construct; identical to SEQ ID NO: 22974
  source 1..80: mol_type = other DNA

SEQ ID NO: 207705 - DNA, 80 bp, synthetic construct; identical to SEQ ID NO: 22975
  source 1..80: mol_type = other DNA

SEQ ID NO: 207706 - DNA, 80 bp, synthetic construct; identical to SEQ ID NO: 22976
  source 1..80: mol_type = other DNA

SEQ ID NO: 207707 - DNA, 80 bp, synthetic construct; identical to SEQ ID NO: 22977
  source 1..80: mol_type = other DNA

SEQ ID NO: 207708 - DNA, 80 bp, synthetic construct; identical to SEQ ID NO: 22978
  source 1..80: mol_type = other DNA

SEQ ID NO: 207709 - DNA, 80 bp, synthetic construct; identical to SEQ ID NO: 22979
  source 1..80: mol_type = other DNA

SEQ ID NO: 207710 - DNA, 80 bp, synthetic construct; identical to SEQ ID NO: 22980
  source 1..80: mol_type = other DNA

SEQ ID NO: 207711 - DNA, 80 bp, synthetic construct; identical to SEQ ID NO: 22981
  source 1..80: mol_type = other DNA

SEQ ID NO: 207712 - DNA, 80 bp, synthetic construct; identical to SEQ ID NO: 22982
  source 1..80: mol_type = other DNA

SEQ ID NO: 207713 - DNA, 80 bp, synthetic construct; identical to SEQ ID NO: 22983
  source 1..80: mol_type = other DNA

SEQ ID NO: 207714 - DNA, 80 bp, synthetic construct; identical to SEQ ID NO: 22984
  source 1..80: mol_type = other DNA

SEQ ID NO: 207715 - DNA, 80 bp, synthetic construct; identical to SEQ ID NO: 22985
  source 1..80: mol_type = other DNA

SEQ ID NO: 207716 - DNA, 80 bp, synthetic construct; identical to SEQ ID NO: 22986
  source 1..80: mol_type = other DNA

SEQ ID NO: 207717 - DNA, 80 bp, synthetic construct; identical to SEQ ID NO: 22987
  source 1..80: mol_type = other DNA

SEQ ID NO: 207718 - DNA, 80 bp, synthetic construct; identical to SEQ ID NO: 22988
  source 1..80: mol_type = other DNA

SEQ ID NO: 207719 - DNA, 80 bp, synthetic construct; identical to SEQ ID NO: 22989
  source 1..80: mol_type = other DNA

SEQ ID NO: 207720 - DNA, 80 bp, synthetic construct; identical to SEQ ID NO: 22990
  source 1..80: mol_type = other DNA

SEQ ID NO: 207721 - DNA, 80 bp, synthetic construct; identical to SEQ ID NO: 22991
  source 1..80: mol_type = other DNA

SEQ ID NO: 207722 - DNA, 80 bp, synthetic construct; identical to SEQ ID NO: 22992
  source 1..80: mol_type = other DNA

SEQ ID NO: 207723 - DNA, 80 bp, synthetic construct; identical to SEQ ID NO: 22993
  source 1..80: mol_type = other DNA

SEQ ID NO: 207724 - DNA, 80 bp, synthetic construct; identical to SEQ ID NO: 22994
  source 1..80: mol_type = other DNA

SEQ ID NO: 207725 - DNA, 80 bp, synthetic construct; identical to SEQ ID NO: 22995
  source 1..80: mol_type = other DNA

SEQ ID NO: 207726 - DNA, 80 bp, synthetic construct; identical to SEQ ID NO: 22996
  source 1..80: mol_type = other DNA

SEQ ID NO: 207727 - DNA, 80 bp, synthetic construct; identical to SEQ ID NO: 22997
  source 1..80: mol_type = other DNA

SEQ ID NO: 207728 - DNA, 80 bp, synthetic construct; identical to SEQ ID NO: 22998
  source 1..80: mol_type = other DNA

SEQ ID NO: 207729 - DNA, 80 bp, synthetic construct; identical to SEQ ID NO: 22999
  source 1..80: mol_type = other DNA

SEQ ID NO: 207730 - DNA, 80 bp, synthetic construct; identical to SEQ ID NO: 23000
  source 1..80: mol_type = other DNA

SEQ ID NO: 207731 - DNA, 80 bp, synthetic construct; identical to SEQ ID NO: 23001
  source 1..80: mol_type = other DNA

SEQ ID NO: 207732 - DNA, 80 bp, synthetic construct; identical to SEQ ID NO: 23002
  source 1..80: mol_type = other DNA

SEQ ID NO: 207733 - DNA, 80 bp, synthetic construct; identical to SEQ ID NO: 23003
  source 1..80: mol_type = other DNA

SEQ ID NO: 207734 - DNA, 80 bp, synthetic construct; identical to SEQ ID NO: 23004
  source 1..80: mol_type = other DNA

SEQ ID NO: 207735 - DNA, 80 bp, synthetic construct; identical to SEQ ID NO: 23005
  source 1..80: mol_type = other DNA

SEQ ID NO: 207736 - DNA, 80 bp, synthetic construct; identical to SEQ ID NO: 23006
  source 1..80: mol_type = other DNA

SEQ ID NO: 207737 - DNA, 80 bp, synthetic construct; identical to SEQ ID NO: 23007
  source 1..80: mol_type = other DNA

SEQ ID NO: 207738 - DNA, 80 bp, synthetic construct; identical to SEQ ID NO: 23008
  source 1..80: mol_type = other DNA

SEQ ID NO: 207739 - DNA, 80 bp, synthetic construct; identical to SEQ ID NO: 23009
  source 1..80: mol_type = other DNA

SEQ ID NO: 207740 - DNA, 80 bp, synthetic construct; identical to SEQ ID NO: 23010
  source 1..80: mol_type = other DNA

SEQ ID NO: 207741 - DNA, 80 bp, synthetic construct; identical to SEQ ID NO: 23011
  source 1..80: mol_type = other DNA

SEQ ID NO: 207742 - DNA, 80 bp, synthetic construct; identical to SEQ ID NO: 23012
  source 1..80: mol_type = other DNA

SEQ ID NO: 207743 - DNA, 80 bp, synthetic construct; identical to SEQ ID NO: 23013
  source 1..80: mol_type = other DNA

SEQ ID NO: 207744 - DNA, 80 bp, synthetic construct; identical to SEQ ID NO: 23014
  source 1..80: mol_type = other DNA

SEQ ID NO: 207745 - DNA, 80 bp, synthetic construct; identical to SEQ ID NO: 23015
  source 1..80: mol_type = other DNA

SEQ ID NO: 207746 - DNA, 80 bp, synthetic construct; identical to SEQ ID NO: 23016
  source 1..80: mol_type = other DNA

SEQ ID NO: 207747 - DNA, 80 bp, synthetic construct; identical to SEQ ID NO: 23017
  source 1..80: mol_type = other DNA

SEQ ID NO: 207748 - DNA, 80 bp, synthetic construct; identical to SEQ ID NO: 23018
  source 1..80: mol_type = other DNA

SEQ ID NO: 207749 - DNA, 80 bp, synthetic construct; identical to SEQ ID NO: 23019
  source 1..80: mol_type = other DNA

SEQ ID NO: 207750 - DNA, 80 bp, synthetic construct; identical to SEQ ID NO: 23020
  source 1..80: mol_type = other DNA

SEQ ID NO: 207751 - DNA, 80 bp, synthetic construct; identical to SEQ ID NO: 23021
  source 1..80: mol_type = other DNA

SEQ ID NO: 207752 - DNA, 80 bp, synthetic construct; identical to SEQ ID NO: 23022
  source 1..80: mol_type = other DNA

SEQ ID NO: 207753 - DNA, 80 bp, synthetic construct; identical to SEQ ID NO: 23023
  source 1..80: mol_type = other DNA

SEQ ID NO: 207754 - DNA, 80 bp, synthetic construct; identical to SEQ ID NO: 23024
  source 1..80: mol_type = other DNA

SEQ ID NO: 207755 - DNA, 80 bp, synthetic construct; identical to SEQ ID NO: 23025
  source 1..80: mol_type = other DNA

SEQ ID NO: 207756 - DNA, 80 bp, synthetic construct; identical to SEQ ID NO: 23026
  source 1..80: mol_type = other DNA

SEQ ID NO: 207757 - DNA, 80 bp, synthetic construct; identical to SEQ ID NO: 23027
  source 1..80: mol_type = other DNA

SEQ ID NO: 207758 - DNA, 80 bp, synthetic construct; identical to SEQ ID NO: 23028
  source 1..80: mol_type = other DNA

SEQ ID NO: 207759 - DNA, 80 bp, synthetic construct; identical to SEQ ID NO: 23029
  source 1..80: mol_type = other DNA

SEQ ID NO: 207760 - DNA, 80 bp, synthetic construct; identical to SEQ ID NO: 23030
  source 1..80: mol_type = other DNA

SEQ ID NO: 207761 - DNA, 80 bp, synthetic construct; identical to SEQ ID NO: 23031
  source 1..80: mol_type = other DNA

SEQ ID NO: 207762 - DNA, 80 bp, synthetic construct; identical to SEQ ID NO: 23032
  source 1..80: mol_type = other DNA

SEQ ID NO: 207763 - DNA, 80 bp, synthetic construct; identical to SEQ ID NO: 23033
  source 1..80: mol_type = other DNA

SEQ ID NO: 207764 - DNA, 80 bp, synthetic construct; identical to SEQ ID NO: 23034
  source 1..80: mol_type = other DNA

SEQ ID NO: 207765 - DNA, 80 bp, synthetic construct; identical to SEQ ID NO: 23035
  source 1..80: mol_type = other DNA

SEQ ID NO: 207766 - DNA, 80 bp, synthetic construct; identical to SEQ ID NO: 23036
  source 1..80: mol_type = other DNA

SEQ ID NO: 207767 - DNA, 80 bp, synthetic construct; identical to SEQ ID NO: 23037
  source 1..80: mol_type = other DNA

SEQ ID NO: 207768 - DNA, 80 bp, synthetic construct; identical to SEQ ID NO: 23038
  source 1..80: mol_type = other DNA

SEQ ID NO: 207769 - DNA, 80 bp, synthetic construct; identical to SEQ ID NO: 23039
  source 1..80: mol_type = other DNA

SEQ ID NO: 207770 - DNA, 80 bp, synthetic construct; identical to SEQ ID NO: 23040
  source 1..80: mol_type = other DNA

SEQ ID NO: 207771 - DNA, 80 bp, synthetic construct; identical to SEQ ID NO: 23041
  source 1..80: mol_type = other DNA

SEQ ID NO: 207772 - DNA, 80 bp, synthetic construct; identical to SEQ ID NO: 23042
  source 1..80: mol_type = other DNA

SEQ ID NO: 207773 - DNA, 80 bp, synthetic construct; identical to SEQ ID NO: 23043
  source 1..80: mol_type = other DNA

SEQ ID NO: 207774 - DNA, 80 bp, synthetic construct; identical to SEQ ID NO: 23044
  source 1..80: mol_type = other DNA

SEQ ID NO: 207775 - DNA, 80 bp, synthetic construct; identical to SEQ ID NO: 23045
  source 1..80: mol_type = other DNA

SEQ ID NO: 207776 - DNA, 80 bp, synthetic construct; identical to SEQ ID NO: 23046
  source 1..80: mol_type = other DNA

SEQ ID NO: 207777 - DNA, 80 bp, synthetic construct; identical to SEQ ID NO: 23047
  source 1..80: mol_type = other DNA

SEQ ID NO: 207778 - DNA, 80 bp, synthetic construct; identical to SEQ ID NO: 23048
  source 1..80: mol_type = other DNA

SEQ ID NO: 207779 - DNA, 80 bp, synthetic construct; identical to SEQ ID NO: 23049
  source 1..80: mol_type = other DNA

SEQ ID NO: 207780 - DNA, 80 bp, synthetic construct; identical to SEQ ID NO: 23050
  source 1..80: mol_type = other DNA

SEQ ID NO: 207781 - DNA, 80 bp, synthetic construct; identical to SEQ ID NO: 23051
  source 1..80: mol_type = other DNA

SEQ ID NO: 207782 - DNA, 80 bp, synthetic construct; identical to SEQ ID NO: 23052
  source 1..80: mol_type = other DNA

SEQ ID NO: 207783 - DNA, 80 bp, synthetic construct; identical to SEQ ID NO: 23053
  source 1..80: mol_type = other DNA

SEQ ID NO: 207784 - DNA, 80 bp, synthetic construct; identical to SEQ ID NO: 23054
  source 1..80: mol_type = other DNA

SEQ ID NO: 207785 - DNA, 80 bp, synthetic construct; identical to SEQ ID NO: 23055
  source 1..80: mol_type = other DNA

SEQ ID NO: 207786 - DNA, 80 bp, synthetic construct; identical to SEQ ID NO: 23056
  source 1..80: mol_type = other DNA

SEQ ID NO: 207787 - DNA, 80 bp, synthetic construct; identical to SEQ ID NO: 23057
  source 1..80: mol_type = other DNA

SEQ ID NO: 207788 - DNA, 80 bp, synthetic construct; identical to SEQ ID NO: 23058
  source 1..80: mol_type = other DNA

SEQ ID NO: 207789 - DNA, 80 bp, synthetic construct; identical to SEQ ID NO: 23059
  source 1..80: mol_type = other DNA

SEQ ID NO: 207790 - DNA, 80 bp, synthetic construct; identical to SEQ ID NO: 23060
  source 1..80: mol_type = other DNA

SEQ ID NO: 207791 - DNA, 80 bp, synthetic construct; identical to SEQ ID NO: 23061
  source 1..80: mol_type = other DNA

SEQ ID NO: 207792 - DNA, 80 bp, synthetic construct; identical to SEQ ID NO: 23062
  source 1..80: mol_type = other DNA

SEQ ID NO: 207793 - DNA, 80 bp, synthetic construct; identical to SEQ ID NO: 23063
  source 1..80: mol_type = other DNA

SEQ ID NO: 207794 - DNA, 80 bp, synthetic construct; identical to SEQ ID NO: 23064
  source 1..80: mol_type = other DNA

SEQ ID NO: 207795 - DNA, 80 bp, synthetic construct; identical to SEQ ID NO: 23065
  source 1..80: mol_type = other DNA

SEQ ID NO: 207796 - DNA, 80 bp, synthetic construct; identical to SEQ ID NO: 23066
  source 1..80: mol_type = other DNA

SEQ ID NO: 207797 - DNA, 80 bp, synthetic construct; identical to SEQ ID NO: 23067
  source 1..80: mol_type = other DNA

SEQ ID NO: 207798 - DNA, 80 bp, synthetic construct; identical to SEQ ID NO: 23068
  source 1..80: mol_type = other DNA

SEQ ID NO: 207799 - DNA, 80 bp, synthetic construct; identical to SEQ ID NO: 23069
  source 1..80: mol_type = other DNA

SEQ ID NO: 207800 - DNA, 80 bp, synthetic construct; identical to SEQ ID NO: 23070
  source 1..80: mol_type = other DNA

SEQ ID NO: 207801 - DNA, 80 bp, synthetic construct; identical to SEQ ID NO: 23071
  source 1..80: mol_type = other DNA

SEQ ID NO: 207802 - DNA, 80 bp, synthetic construct; identical to SEQ ID NO: 23072
  source 1..80: mol_type = other DNA

SEQ ID NO: 207803 - DNA, 80 bp, synthetic construct; identical to SEQ ID NO: 23073
  source 1..80: mol_type = other DNA

SEQ ID NO: 207804 - DNA, 80 bp, synthetic construct; identical to SEQ ID NO: 23074
  source 1..80: mol_type = other DNA

SEQ ID NO: 207805 - DNA, 80 bp, synthetic construct; identical to SEQ ID NO: 23075
  source 1..80: mol_type = other DNA

SEQ ID NO: 207806 - DNA, 80 bp, synthetic construct; identical to SEQ ID NO: 23076
  source 1..80: mol_type = other DNA

SEQ ID NO: 207807 - DNA, 80 bp, synthetic construct; identical to SEQ ID NO: 23077
  source 1..80: mol_type = other DNA

SEQ ID NO: 207808 - DNA, 80 bp, synthetic construct; identical to SEQ ID NO: 23078
  source 1..80: mol_type = other DNA

SEQ ID NO: 207809 - DNA, 80 bp, synthetic construct; identical to SEQ ID NO: 23079
  source 1..80: mol_type = other DNA

SEQ ID NO: 207810 - DNA, 80 bp, synthetic construct; identical to SEQ ID NO: 23080
  source 1..80: mol_type = other DNA

SEQ ID NO: 207811 - DNA, 80 bp, synthetic construct; identical to SEQ ID NO: 23081
  source 1..80: mol_type = other DNA

SEQ ID NO: 207812 - DNA, 80 bp, synthetic construct; identical to SEQ ID NO: 23082
  source 1..80: mol_type = other DNA

SEQ ID NO: 207813 - DNA, 80 bp, synthetic construct; identical to SEQ ID NO: 23083
  source 1..80: mol_type = other DNA

SEQ ID NO: 207814 - DNA, 80 bp, synthetic construct; identical to SEQ ID NO: 23084
  source 1..80: mol_type = other DNA

SEQ ID NO: 207815 - DNA, 80 bp, synthetic construct; identical to SEQ ID NO: 23085
  source 1..80: mol_type = other DNA

SEQ ID NO: 207816 - DNA, 80 bp, synthetic construct; identical to SEQ ID NO: 23086
  source 1..80: mol_type = other DNA

SEQ ID NO: 207817 - DNA, 80 bp, synthetic construct; identical to SEQ ID NO: 23087
  source 1..80: mol_type = other DNA

SEQ ID NO: 207818 - DNA, 80 bp, synthetic construct; identical to SEQ ID NO: 23088
  source 1..80: mol_type = other DNA

SEQ ID NO: 207819 - DNA, 80 bp, synthetic construct; identical to SEQ ID NO: 23089
  source 1..80: mol_type = other DNA

SEQ ID NO: 207820 - DNA, 80 bp, synthetic construct; identical to SEQ ID NO: 23090
  source 1..80: mol_type = other DNA

SEQ ID NO: 207821 - DNA, 80 bp, synthetic construct; identical to SEQ ID NO: 23091
  source 1..80: mol_type = other DNA

SEQ ID NO: 207822 - DNA, 80 bp, synthetic construct; identical to SEQ ID NO: 23092
  source 1..80: mol_type = other DNA

SEQ ID NO: 207823 - DNA, 80 bp, synthetic construct; identical to SEQ ID NO: 23093
  source 1..80: mol_type = other DNA

SEQ ID NO: 207824 - DNA, 80 bp, synthetic construct; identical to SEQ ID NO: 23094
  source 1..80: mol_type = other DNA

SEQ ID NO: 207825 - DNA, 80 bp, synthetic construct; identical to SEQ ID NO: 23095
  source 1..80: mol_type = other DNA

SEQ ID NO: 207826 - DNA, 80 bp, synthetic construct; identical to SEQ ID NO: 23096
  source 1..80: mol_type = other DNA

SEQ ID NO: 207827 - DNA, 80 bp, synthetic construct; identical to SEQ ID NO: 23097
  source 1..80: mol_type = other DNA

SEQ ID NO: 207828 - DNA, 80 bp, synthetic construct; identical to SEQ ID NO: 23098
  source 1..80: mol_type = other DNA

SEQ ID NO: 207829 - DNA, 80 bp, synthetic construct; identical to SEQ ID NO: 23099
  source 1..80: mol_type = other DNA

SEQ ID NO: 207830 - DNA, 80 bp, synthetic construct; identical to SEQ ID NO: 23100
  source 1..80: mol_type = other DNA

SEQ ID NO: 207831 - DNA, 80 bp, synthetic construct; identical to SEQ ID NO: 23101
  source 1..80: mol_type = other DNA

SEQ ID NO: 207832 - DNA, 80 bp, synthetic construct; identical to SEQ ID NO: 23102
  source 1..80: mol_type = other DNA

SEQ ID NO: 207833 - DNA, 80 bp, synthetic construct; identical to SEQ ID NO: 23103
  source 1..80: mol_type = other DNA

SEQ ID NO: 207834 - DNA, 80 bp, synthetic construct; identical to SEQ ID NO: 23104
  source 1..80: mol_type = other DNA

SEQ ID NO: 207835 - DNA, 80 bp, synthetic construct; identical to SEQ ID NO: 23105
  source 1..80: mol_type = other DNA

SEQ ID NO: 207836 - DNA, 80 bp, synthetic construct; identical to SEQ ID NO: 23106
  source 1..80: mol_type = other DNA

SEQ ID NO: 207837 - DNA, 80 bp, synthetic construct; identical to SEQ ID NO: 23107
  source 1..80: mol_type = other DNA

SEQ ID NO: 207838 - DNA, 80 bp, synthetic construct; identical to SEQ ID NO: 23108
  source 1..80: mol_type = other DNA

SEQ ID NO: 207839 - DNA, 80 bp, synthetic construct; identical to SEQ ID NO: 23109
  source 1..80: mol_type = other DNA

SEQ ID NO: 207840 - DNA, 80 bp, synthetic construct; identical to SEQ ID NO: 23110
  source 1..80: mol_type = other DNA

SEQ ID NO: 207841 - DNA, 80 bp, synthetic construct; identical to SEQ ID NO: 23111
  source 1..80: mol_type = other DNA

SEQ ID NO: 207842 - DNA, 80 bp, synthetic construct; identical to SEQ ID NO: 23112
  source 1..80: mol_type = other DNA

SEQ ID NO: 207843 - DNA, 80 bp, synthetic construct; identical to SEQ ID NO: 23113
  source 1..80: mol_type = other DNA

SEQ ID NO: 207844 - DNA, 80 bp, synthetic construct; identical to SEQ ID NO: 23114
  source 1..80: mol_type = other DNA

SEQ ID NO: 207845 - DNA, 80 bp, synthetic construct; identical to SEQ ID NO: 23115
  source 1..80: mol_type = other DNA

SEQ ID NO: 207846 - DNA, 80 bp, synthetic construct; identical to SEQ ID NO: 23116
  source 1..80: mol_type = other DNA

SEQ ID NO: 207847 - DNA, 80 bp, synthetic construct; identical to SEQ ID NO: 23117
  source 1..80: mol_type = other DNA

SEQ ID NO: 207848 - DNA, 80 bp, synthetic construct; identical to SEQ ID NO: 23118
  source 1..80: mol_type = other DNA

SEQ ID NO: 207849 - DNA, 80 bp, synthetic construct; identical to SEQ ID NO: 23119
  source 1..80: mol_type = other DNA

SEQ ID NO: 207850 - DNA, 80 bp, synthetic construct; identical to SEQ ID NO: 23120
  source 1..80: mol_type = other DNA

SEQ ID NO: 207851 - DNA, 80 bp, synthetic construct; identical to SEQ ID NO: 23121
  source 1..80: mol_type = other DNA

SEQ ID NO: 207852 - DNA, 80 bp, synthetic construct; identical to SEQ ID NO: 23122
  source 1..80: mol_type = other DNA

SEQ ID NO: 207853 - DNA, 80 bp, synthetic construct; identical to SEQ ID NO: 23123
  source 1..80: mol_type = other DNA

SEQ ID NO: 207854 - DNA, 80 bp, synthetic construct; identical to SEQ ID NO: 23124
  source 1..80: mol_type = other DNA

SEQ ID NO: 207855 - DNA, 80 bp, synthetic construct; identical to SEQ ID NO: 23125
  source 1..80: mol_type = other DNA

SEQ ID NO: 207856 - DNA, 80 bp, synthetic construct; identical to SEQ ID NO: 23126
  source 1..80: mol_type = other DNA

SEQ ID NO: 207857 - DNA, 80 bp, synthetic construct; identical to SEQ ID NO: 23127
  source 1..80: mol_type = other DNA

SEQ ID NO: 207858 - DNA, 80 bp, synthetic construct; identical to SEQ ID NO: 23128
  source 1..80: mol_type = other DNA

SEQ ID NO: 207859 - DNA, 80 bp, synthetic construct; identical to SEQ ID NO: 23129
  source 1..80: mol_type = other DNA

SEQ ID NO: 207860 - DNA, 80 bp, synthetic construct; identical to SEQ ID NO: 23130
  source 1..80: mol_type = other DNA

SEQ ID NO: 207861 - DNA, 80 bp, synthetic construct; identical to SEQ ID NO: 23131
  source 1..80: mol_type = other DNA

SEQ ID NO: 207862 - DNA, 80 bp, synthetic construct; identical to SEQ ID NO: 23132
  source 1..80: mol_type = other DNA

SEQ ID NO: 207863 - DNA, 80 bp, synthetic construct; identical to SEQ ID NO: 23133
  source 1..80: mol_type = other DNA

SEQ ID NO: 207864 - DNA, 80 bp, synthetic construct; identical to SEQ ID NO: 23134
  source 1..80: mol_type = other DNA

SEQ ID NO: 207865 - DNA, 80 bp, synthetic construct; identical to SEQ ID NO: 23135
  source 1..80: mol_type = other DNA

SEQ ID NO: 207866 - DNA, 80 bp, synthetic construct; identical to SEQ ID NO: 23136
  source 1..80: mol_type = other DNA

SEQ ID NO: 207867 - DNA, 80 bp, synthetic construct; identical to SEQ ID NO: 23137
  source 1..80: mol_type = other DNA

SEQ ID NO: 207868 - DNA, 80 bp, synthetic construct; identical to SEQ ID NO: 23138
  source 1..80: mol_type = other DNA

SEQ ID NO: 207869 - DNA, 80 bp, synthetic construct; identical to SEQ ID NO: 23139
  source 1..80: mol_type = other DNA

SEQ ID NO: 207870 - DNA, 80 bp, synthetic construct; identical to SEQ ID NO: 23140
  source 1..80: mol_type = other DNA

SEQ ID NO: 207871 - DNA, 80 bp, synthetic construct; identical to SEQ ID NO: 23141
  source 1..80: mol_type = other DNA

SEQ ID NO: 207872 - DNA, 80 bp, synthetic construct; identical to SEQ ID NO: 23142
  source 1..80: mol_type = other DNA

SEQ ID NO: 207873 - DNA, 80 bp, synthetic construct; identical to SEQ ID NO: 23143
  source 1..80: mol_type = other DNA

SEQ ID NO: 207874 - DNA, 80 bp, synthetic construct; identical to SEQ ID NO: 23144
  source 1..80: mol_type = other DNA

SEQ ID NO: 207875 - DNA, 80 bp, synthetic construct; identical to SEQ ID NO: 23145
  source 1..80: mol_type = other DNA

SEQ ID NO: 207876 - DNA, 80 bp, synthetic construct; identical to SEQ ID NO: 23146
  source 1..80: mol_type = other DNA

SEQ ID NO: 207877 - DNA, 80 bp, synthetic construct; identical to SEQ ID NO: 23147
  source 1..80: mol_type = other DNA

SEQ ID NO: 207878 - DNA, 80 bp, synthetic construct; identical to SEQ ID NO: 23148
  source 1..80: mol_type = other DNA

SEQ ID NO: 207879 - DNA, 80 bp, synthetic construct; identical to SEQ ID NO: 23149
  source 1..80: mol_type = other DNA

SEQ ID NO: 207880 - DNA, 80 bp, synthetic construct; identical to SEQ ID NO: 23150
  source 1..80: mol_type = other DNA

SEQ ID NO: 207881 - DNA, 80 bp, synthetic construct; identical to SEQ ID NO: 23151
  source 1..80: mol_type = other DNA

SEQ ID NO: 207882 - DNA, 80 bp, synthetic construct; identical to SEQ ID NO: 23152
  source 1..80: mol_type = other DNA

SEQ ID NO: 207883 - DNA, 80 bp, synthetic construct; identical to SEQ ID NO: 23153
  source 1..80: mol_type = other DNA

SEQ ID NO: 207884 - DNA, 80 bp, synthetic construct; identical to SEQ ID NO: 23154
  source 1..80: mol_type = other DNA

SEQ ID NO: 207885 - DNA, 80 bp, synthetic construct; identical to SEQ ID NO: 23155
  source 1..80: mol_type = other DNA

SEQ ID NO: 207886 - DNA, 80 bp, synthetic construct; identical to SEQ ID NO: 23156
  source 1..80: mol_type = other DNA

SEQ ID NO: 207887 - DNA, 80 bp, synthetic construct; identical to SEQ ID NO: 23157
  source 1..80: mol_type = other DNA

SEQ ID NO: 207888 - DNA, 80 bp, synthetic construct; identical to SEQ ID NO: 23158
  source 1..80: mol_type = other DNA

SEQ ID NO: 207889 - DNA, 80 bp, synthetic construct; identical to SEQ ID NO: 23159
  source 1..80: mol_type = other DNA

SEQ ID NO: 207890 - DNA, 80 bp, synthetic construct; identical to SEQ ID NO: 23160
  source 1..80: mol_type = other DNA

SEQ ID NO: 207891 - DNA, 80 bp, synthetic construct; identical to SEQ ID NO: 23161
  source 1..80: mol_type = other DNA

SEQ ID NO: 207892 - DNA, 80 bp, synthetic construct; identical to SEQ ID NO: 23162
  source 1..80: mol_type = other DNA

SEQ ID NO: 207893 - DNA, 80 bp, synthetic construct; identical to SEQ ID NO: 23163
  source 1..80: mol_type = other DNA

SEQ ID NO: 207894 - DNA, 80 bp, synthetic construct; identical to SEQ ID NO: 23164
  source 1..80: mol_type = other DNA

SEQ ID NO: 207895 - DNA, 80 bp, synthetic construct; identical to SEQ ID NO: 23165
  source 1..80: mol_type = other DNA

SEQ ID NO: 207896 - DNA, 80 bp, synthetic construct; identical to SEQ ID NO: 23166
  source 1..80: mol_type = other DNA

SEQ ID NO: 207897 - DNA, 80 bp, synthetic construct; identical to SEQ ID NO: 23167
  source 1..80: mol_type = other DNA

SEQ ID NO: 207898 - DNA, 80 bp, synthetic construct; identical to SEQ ID NO: 23168
  source 1..80: mol_type = other DNA

SEQ ID NO: 207899 - DNA, 80 bp, synthetic construct; identical to SEQ ID NO: 23169
  source 1..80: mol_type = other DNA

SEQ ID NO: 207900 - DNA, 80 bp, synthetic construct; identical to SEQ ID NO: 23170
  source 1..80: mol_type = other DNA

SEQ ID NO: 207901 - DNA, 80 bp, synthetic construct; identical to SEQ ID NO: 23171
  source 1..80: mol_type = other DNA

SEQ ID NO: 207902 - DNA, 80 bp, synthetic construct; identical to SEQ ID NO: 23172
  source 1..80: mol_type = other DNA

SEQ ID NO: 207903 - DNA, 80 bp, synthetic construct; identical to SEQ ID NO: 23173
  source 1..80: mol_type = other DNA

SEQ ID NO: 207904 - DNA, 80 bp, synthetic construct; identical to SEQ ID NO: 23174
  source 1..80: mol_type = other DNA

SEQ ID NO: 207905 - DNA, 80 bp, synthetic construct; identical to SEQ ID NO: 23175
  source 1..80: mol_type = other DNA

SEQ ID NO: 207906 - DNA, 80 bp, synthetic construct; identical to SEQ ID NO: 23176
  source 1..80: mol_type = other DNA

SEQ ID NO: 207907 - DNA, 80 bp, synthetic construct; identical to SEQ ID NO: 23177
  source 1..80: mol_type = other DNA

SEQ ID NO: 207908 - DNA, 80 bp, synthetic construct; identical to SEQ ID NO: 23178
  source 1..80: mol_type = other DNA

SEQ ID NO: 207909 - DNA, 80 bp, synthetic construct; identical to SEQ ID NO: 23179
  source 1..80: mol_type = other DNA

SEQ ID NO: 207910 - DNA, 80 bp, synthetic construct; identical to SEQ ID NO: 23180
  source 1..80: mol_type = other DNA

SEQ ID NO: 207911 - DNA, 80 bp, synthetic construct; identical to SEQ ID NO: 23181
  source 1..80: mol_type = other DNA

SEQ ID NO: 207912 - DNA, 80 bp, synthetic construct; identical to SEQ ID NO: 23182
  source 1..80: mol_type = other DNA

SEQ ID NO: 207913 - DNA, 80 bp, synthetic construct; identical to SEQ ID NO: 23183
  source 1..80: mol_type = other DNA

SEQ ID NO: 207914 - DNA, 80 bp, synthetic construct; identical to SEQ ID NO: 23184
  source 1..80: mol_type = other DNA

SEQ ID NO: 207915 - DNA, 80 bp, synthetic construct; identical to SEQ ID NO: 23185
  source 1..80: mol_type = other DNA

SEQ ID NO: 207916 - DNA, 80 bp, synthetic construct; identical to SEQ ID NO: 23186
  source 1..80: mol_type = other DNA

SEQ ID NO: 207917 - DNA, 80 bp, synthetic construct; identical to SEQ ID NO: 23187
  source 1..80: mol_type = other DNA

SEQ ID NO: 207918 - DNA, 80 bp, synthetic construct; identical to SEQ ID NO: 23188
  source 1..80: mol_type = other DNA

SEQ ID NO: 207919 - DNA, 80 bp, synthetic construct; identical to SEQ ID NO: 23189
  source 1..80: mol_type = other DNA

SEQ ID NO: 207920 - DNA, 80 bp, synthetic construct; identical to SEQ ID NO: 23190
  source 1..80: mol_type = other DNA

SEQ ID NO: 207921 - DNA, 80 bp, synthetic construct; identical to SEQ ID NO: 23191
  source 1..80: mol_type = other DNA

SEQ ID NO: 207922 - DNA, 80 bp, synthetic construct; identical to SEQ ID NO: 23192
  source 1..80: mol_type = other DNA

SEQ ID NO: 207923 - DNA, 80 bp, synthetic construct; identical to SEQ ID NO: 23193
  source 1..80: mol_type = other DNA

SEQ ID NO: 207924 - DNA, 80 bp, synthetic construct; identical to SEQ ID NO: 23194
  source 1..80: mol_type = other DNA

SEQ ID NO: 207925 - DNA, 80 bp, synthetic construct; identical to SEQ ID NO: 23195
  source 1..80: mol_type = other DNA

SEQ ID NO: 207926 - DNA, 80 bp, synthetic construct; identical to SEQ ID NO: 23196
  source 1..80: mol_type = other DNA

SEQ ID NO: 207927 - DNA, 80 bp, synthetic construct; identical to SEQ ID NO: 23197
  source 1..80: mol_type = other DNA

SEQ ID NO: 207928 - DNA, 80 bp, synthetic construct; identical to SEQ ID NO: 23198
  source 1..80: mol_type = other DNA

SEQ ID NO: 207929 - DNA, 80 bp, synthetic construct; identical to SEQ ID NO: 23199
  source 1..80: mol_type = other DNA

SEQ ID NO: 207930 - DNA, 80 bp, synthetic construct; identical to SEQ ID NO: 23200
  source 1..80: mol_type = other DNA

SEQ ID NO: 207931 - DNA, 80 bp, synthetic construct; identical to SEQ ID NO: 23201
  source 1..80: mol_type = other DNA

SEQ ID NO: 207932 - DNA, 80 bp, synthetic construct; identical to SEQ ID NO: 23202
  source 1..80: mol_type = other DNA

SEQ ID NO: 207933 - DNA, 80 bp, synthetic construct; identical to SEQ ID NO: 23203
  source 1..80: mol_type = other DNA

SEQ ID NO: 207934 - DNA, 80 bp, synthetic construct; identical to SEQ ID NO: 23204
  source 1..80: mol_type = other DNA

SEQ ID NO: 207935 - DNA, 80 bp, synthetic construct; identical to SEQ ID NO: 23205
  source 1..80: mol_type = other DNA

SEQ ID NO: 207936 - DNA, 80 bp, synthetic construct; identical to SEQ ID NO: 23206
  source 1..80: mol_type = other DNA

SEQ ID NO: 207937 - DNA, 80 bp, synthetic construct; identical to SEQ ID NO: 23207
  source 1..80: mol_type = other DNA

SEQ ID NO: 207938 - DNA, 80 bp, synthetic construct; identical to SEQ ID NO: 23208
  source 1..80: mol_type = other DNA

SEQ ID NO: 207939 - DNA, 80 bp, synthetic construct; identical to SEQ ID NO: 23209
  source 1..80: mol_type = other DNA

SEQ ID NO: 207940 - DNA, 80 bp, synthetic construct; identical to SEQ ID NO: 23210
  source 1..80: mol_type = other DNA

SEQ ID NO: 207941 - DNA, 80 bp, synthetic construct; identical to SEQ ID NO: 23211
  source 1..80: mol_type = other DNA

SEQ ID NO: 207942 - DNA, 80 bp, synthetic construct; identical to SEQ ID NO: 23212
  source 1..80: mol_type = other DNA

SEQ ID NO: 207943 - DNA, 80 bp, synthetic construct; identical to SEQ ID NO: 23213
  source 1..80: mol_type = other DNA

SEQ ID NO: 207944 - DNA, 80 bp, synthetic construct; identical to SEQ ID NO: 23214
  source 1..80: mol_type = other DNA

SEQ ID NO: 207945 - DNA, 80 bp, synthetic construct; identical to SEQ ID NO: 23215
  source 1..80: mol_type = other DNA

SEQ ID NO: 207946 - DNA, 80 bp, synthetic construct; identical to SEQ ID NO: 23216
  source 1..80: mol_type = other DNA

SEQ ID NO: 207947 - DNA, 80 bp, synthetic construct; identical to SEQ ID NO: 23217
  source 1..80: mol_type = other DNA

SEQ ID NO: 207948 - DNA, 80 bp, synthetic construct; identical to SEQ ID NO: 23218
  source 1..80: mol_type = other DNA

SEQ ID NO: 207949 - DNA, 80 bp, synthetic construct; identical to SEQ ID NO: 23219
  source 1..80: mol_type = other DNA

SEQ ID NO: 207950 - DNA, 80 bp, synthetic construct; identical to SEQ ID NO: 23220
  source 1..80: mol_type = other DNA

SEQ ID NO: 207951 - DNA, 80 bp, synthetic construct; identical to SEQ ID NO: 23221
  source 1..80: mol_type = other DNA

SEQ ID NO: 207952 - DNA, 80 bp, synthetic construct; identical to SEQ ID NO: 23222
  source 1..80: mol_type = other DNA

SEQ ID NO: 207953 - DNA, 80 bp, synthetic construct; identical to SEQ ID NO: 23223
  source 1..80: mol_type = other DNA

SEQ ID NO: 207954 - DNA, 80 bp, synthetic construct; identical to SEQ ID NO: 23224
  source 1..80: mol_type = other DNA

SEQ ID NO: 207955 - DNA, 80 bp, synthetic construct; identical to SEQ ID NO: 23225
  source 1..80: mol_type = other DNA

SEQ ID NO: 207956 - DNA, 80 bp, synthetic construct; identical to SEQ ID NO: 23226
  source 1..80: mol_type = other DNA

SEQ ID NO: 207957 - DNA, 80 bp, synthetic construct; identical to SEQ ID NO: 23227
  source 1..80: mol_type = other DNA

SEQ ID NO: 207958 - DNA, 80 bp, synthetic construct; identical to SEQ ID NO: 23228
  source 1..80: mol_type = other DNA

SEQ ID NO: 207959 - DNA, 80 bp, synthetic construct; identical to SEQ ID NO: 23229
  source 1..80: mol_type = other DNA

SEQ ID NO: 207960 - DNA, 80 bp, synthetic construct; identical to SEQ ID NO: 23230
  source 1..80: mol_type = other DNA

SEQ ID NO: 207961 - DNA, 80 bp, synthetic construct; identical to SEQ ID NO: 23231
  source 1..80: mol_type = other DNA

SEQ ID NO: 207962 - DNA, 80 bp, synthetic construct; identical to SEQ ID NO: 23232
  source 1..80: mol_type = other DNA

SEQ ID NO: 207963 - DNA, 80 bp, synthetic construct; identical to SEQ ID NO: 23233
  source 1..80: mol_type = other DNA

SEQ ID NO: 207964 - DNA, 80 bp, synthetic construct; identical to SEQ ID NO: 23234
  source 1..80: mol_type = other DNA

SEQ ID NO: 207965 - DNA, 80 bp, synthetic construct; identical to SEQ ID NO: 23235
  source 1..80: mol_type = other DNA

SEQ ID NO: 207966 - DNA, 80 bp, synthetic construct; identical to SEQ ID NO: 23236
  source 1..80: mol_type = other DNA

SEQ ID NO: 207967 - DNA, 80 bp, synthetic construct; identical to SEQ ID NO: 23237
  source 1..80: mol_type = other DNA

SEQ ID NO: 207968 - DNA, 80 bp, synthetic construct; identical to SEQ ID NO: 23238
  source 1..80: mol_type = other DNA

SEQ ID NO: 207969 - DNA, 80 bp, synthetic construct; identical to SEQ ID NO: 23239
  source 1..80: mol_type = other DNA

SEQ ID NO: 207970 - DNA, 80 bp, synthetic construct; identical to SEQ ID NO: 23240
  source 1..80: mol_type = other DNA

SEQ ID NO: 207971 - DNA, 80 bp, synthetic construct; identical to SEQ ID NO: 23241
  source 1..80: mol_type = other DNA

SEQ ID NO: 207972 - DNA, 80 bp, synthetic construct; identical to SEQ ID NO: 23242
  source 1..80: mol_type = other DNA

SEQ ID NO: 207973 - DNA, 80 bp, synthetic construct; identical to SEQ ID NO: 23243
  source 1..80: mol_type = other DNA

SEQ ID NO: 207974 - DNA, 80 bp, synthetic construct; identical to SEQ ID NO: 23244
  source 1..80: mol_type = other DNA

SEQ ID NO: 207975 - DNA, 80 bp, synthetic construct; identical to SEQ ID NO: 23245
  source 1..80: mol_type = other DNA

SEQ ID NO: 207976 - DNA, 80 bp, synthetic construct; identical to SEQ ID NO: 23246
  source 1..80: mol_type = other DNA

SEQ ID NO: 207977 - DNA, 80 bp, synthetic construct; identical to SEQ ID NO: 23247
  source 1..80: mol_type = other DNA

SEQ ID NO: 207978 - DNA, 80 bp, synthetic construct; identical to SEQ ID NO: 23248
  source 1..80: mol_type = other DNA

SEQ ID NO: 207979 - DNA, 80 bp, synthetic construct; identical to SEQ ID NO: 23249
  source 1..80: mol_type = other DNA

SEQ ID NO: 207980 - DNA, 80 bp, synthetic construct; identical to SEQ ID NO: 23250
  source 1..80: mol_type = other DNA

SEQ ID NO: 207981 - DNA, 80 bp, synthetic construct; identical to SEQ ID NO: 23251
  source 1..80: mol_type = other DNA

SEQ ID NO: 207982 - DNA, 80 bp, synthetic construct; identical to SEQ ID NO: 23252
  source 1..80: mol_type = other DNA

SEQ ID NO: 207983 - DNA, 80 bp, synthetic construct; identical to SEQ ID NO: 23253
  source 1..80: mol_type = other DNA

SEQ ID NO: 207984 - DNA, 80 bp, synthetic construct; identical to SEQ ID NO: 23254
  source 1..80: mol_type = other DNA

SEQ ID NO: 207985 - DNA, 80 bp, synthetic construct; identical to SEQ ID NO: 23255
  source 1..80: mol_type = other DNA

SEQ ID NO: 207986 - DNA, 80 bp, synthetic construct; identical to SEQ ID NO: 23256
  source 1..80: mol_type = other DNA

SEQ ID NO: 207987 - DNA, 80 bp, synthetic construct; identical to SEQ ID NO: 23257
  source 1..80: mol_type = other DNA

SEQ ID NO: 207988 - DNA, 80 bp, synthetic construct; identical to SEQ ID NO: 23258
  source 1..80: mol_type = other DNA

SEQ ID NO: 207989 - DNA, 80 bp, synthetic construct; identical to SEQ ID NO: 23259
  source 1..80: mol_type = other DNA

SEQ ID NO: 207990 - DNA, 80 bp, synthetic construct; identical to SEQ ID NO: 23260
  source 1..80: mol_type = other DNA

SEQ ID NO: 207991 - DNA, 80 bp, synthetic construct; identical to SEQ ID NO: 23261
  source 1..80: mol_type = other DNA

SEQ ID NO: 207992 - DNA, 80 bp, synthetic construct; identical to SEQ ID NO: 23262
  source 1..80: mol_type = other DNA

SEQ ID NO: 207993 - DNA, 80 bp, synthetic construct; identical to SEQ ID NO: 23263
  source 1..80: mol_type = other DNA

SEQ ID NO: 207994 - DNA, 80 bp, synthetic construct; identical to SEQ ID NO: 23264
  source 1..80: mol_type = other DNA

SEQ ID NO: 207995 - DNA, 80 bp, synthetic construct; identical to SEQ ID NO: 23265
  source 1..80: mol_type = other DNA

SEQ ID NO: 207996 - DNA, 80 bp, synthetic construct; identical to SEQ ID NO: 23266
  source 1..80: mol_type = other DNA

SEQ ID NO: 207997 - DNA, 80 bp, synthetic construct; identical to SEQ ID NO: 23267
  source 1..80: mol_type = other DNA

SEQ ID NO: 207998 - DNA, 80 bp, synthetic construct; identical to SEQ ID NO: 23268
  source 1..80: mol_type = other DNA

SEQ ID NO: 207999 - DNA, 80 bp, synthetic construct; identical to SEQ ID NO: 23269
  source 1..80: mol_type = other DNA

SEQ ID NO: 208000 - DNA, 80 bp, synthetic construct; identical to SEQ ID NO: 23270
  source 1..80: mol_type = other DNA

SEQ ID NO: 208001 - DNA, 80 bp, synthetic construct; identical to SEQ ID NO: 23271
  source 1..80: mol_type = other DNA

SEQ ID NO: 208002 - DNA, 80 bp, synthetic construct; identical to SEQ ID NO: 23272
  source 1..80: mol_type = other DNA

SEQ ID NO: 208003 - DNA, 80 bp, synthetic construct; identical to SEQ ID NO: 23273
  source 1..80: mol_type = other DNA

SEQ ID NO: 208004 - DNA, 80 bp, synthetic construct; identical to SEQ ID NO: 23274
  source 1..80: mol_type = other DNA

SEQ ID NO: 208005 - DNA, 80 bp, synthetic construct; identical to SEQ ID NO: 23275
  source 1..80: mol_type = other DNA

SEQ ID NO: 208006 - DNA, 80 bp, synthetic construct; identical to SEQ ID NO: 23276
  source 1..80: mol_type = other DNA

SEQ ID NO: 208007 - DNA, 80 bp, synthetic construct; identical to SEQ ID NO: 23277
  source 1..80: mol_type = other DNA

SEQ ID NO: 208008 - DNA, 80 bp, synthetic construct; identical to SEQ ID NO: 23278
  source 1..80: mol_type = other DNA

SEQ ID NO: 208009 - DNA, 80 bp, synthetic construct; identical to SEQ ID NO: 23279
  source 1..80: mol_type = other DNA

SEQ ID NO: 208010 - DNA, 80 bp, synthetic construct; identical to SEQ ID NO: 23280
  source 1..80: mol_type = other DNA

SEQ ID NO: 208011 - DNA, 80 bp, synthetic construct; identical to SEQ ID NO: 23281
  source 1..80: mol_type = other DNA

SEQ ID NO: 208012 - DNA, 80 bp, synthetic construct; identical to SEQ ID NO: 23282
  source 1..80: mol_type = other DNA

SEQ ID NO: 208013 - DNA, 80 bp, synthetic construct; identical to SEQ ID NO: 23283
  source 1..80: mol_type = other DNA

SEQ ID NO: 208014 - DNA, 80 bp, synthetic construct; identical to SEQ ID NO: 23284
  source 1..80: mol_type = other DNA

SEQ ID NO: 208015 - DNA, 80 bp, synthetic construct; identical to SEQ ID NO: 23285
  source 1..80: mol_type = other DNA

SEQ ID NO: 208016 - DNA, 80 bp, synthetic construct; identical to SEQ ID NO: 23286
  source 1..80: mol_type = other DNA

SEQ ID NO: 208017 - DNA, 80 bp, synthetic construct; identical to SEQ ID NO: 23287
  source 1..80: mol_type = other DNA

SEQ ID NO: 208018 - DNA, 80 bp, synthetic construct; identical to SEQ ID NO: 23288
  source 1..80: mol_type = other DNA

SEQ ID NO: 208019 - DNA, 80 bp, synthetic construct; identical to SEQ ID NO: 23289
  source 1..80: mol_type = other DNA

SEQ ID NO: 208020 - DNA, 80 bp, synthetic construct; identical to SEQ ID NO: 23290
  source 1..80: mol_type = other DNA

SEQ ID NO: 208021 - DNA, 80 bp, synthetic construct; identical to SEQ ID NO: 23291
  source 1..80: mol_type = other DNA

SEQ ID NO: 208022 - DNA, 80 bp, synthetic construct; identical to SEQ ID NO: 23292
  source 1..80: mol_type = other DNA

SEQ ID NO: 208023 - DNA, 80 bp, synthetic construct; identical to SEQ ID NO: 23293
  source 1..80: mol_type = other DNA

SEQ ID NO: 208024 - DNA, 80 bp, synthetic construct; identical to SEQ ID NO: 23294
  source 1..80: mol_type = other DNA

SEQ ID NO: 208025 - DNA, 80 bp, synthetic construct; identical to SEQ ID NO: 23295
  source 1..80: mol_type = other DNA

SEQ ID NO: 208026 - DNA, 80 bp, synthetic construct; identical to SEQ ID NO: 23296
  source 1..80: mol_type = other DNA

SEQ ID NO: 208027 - DNA, 80 bp, synthetic construct; identical to SEQ ID NO: 23297
  source 1..80: mol_type = other DNA

SEQ ID NO: 208028 - DNA, 80 bp, synthetic construct; identical to SEQ ID NO: 23298
  source 1..80: mol_type = other DNA

SEQ ID NO: 208029 - DNA, 80 bp, synthetic construct; identical to SEQ ID NO: 23299
  source 1..80: mol_type = other DNA

SEQ ID NO: 208030 - DNA, 80 bp, synthetic construct; identical to SEQ ID NO: 23300
  source 1..80: mol_type = other DNA

SEQ ID NO: 208031 - DNA, 80 bp, synthetic construct; identical to SEQ ID NO: 23301
  source 1..80: mol_type = other DNA

SEQ ID NO: 208032 - DNA, 80 bp, synthetic construct; identical to SEQ ID NO: 23302
  source 1..80: mol_type = other DNA

SEQ ID NO: 208033 - DNA, 80 bp, synthetic construct; identical to SEQ ID NO: 23303
  source 1..80: mol_type = other DNA

SEQ ID NO: 208034 - DNA, 80 bp, synthetic construct; identical to SEQ ID NO: 23304
  source 1..80: mol_type = other DNA

SEQ ID NO: 208035 - DNA, 80 bp, synthetic construct; identical to SEQ ID NO: 23305
  source 1..80: mol_type = other DNA

SEQ ID NO: 208036 - DNA, 80 bp, synthetic construct; identical to SEQ ID NO: 23306
  source 1..80: mol_type = other DNA

SEQ ID NO: 208037 - DNA, 80 bp, synthetic construct; identical to SEQ ID NO: 23307
  source 1..80: mol_type = other DNA

SEQ ID NO: 208038 - DNA, 80 bp, synthetic construct; identical to SEQ ID NO: 23308
  source 1..80: mol_type = other DNA

SEQ ID NO: 208039 - DNA, 80 bp, synthetic construct; identical to SEQ ID NO: 23309
  source 1..80: mol_type = other DNA

SEQ ID NO: 208040 - DNA, 80 bp, synthetic construct; identical to SEQ ID NO: 23310
  source 1..80: mol_type = other DNA

SEQ ID NO: 208041 - DNA, 80 bp, synthetic construct; identical to SEQ ID NO: 23311
  source 1..80: mol_type = other DNA

SEQ ID NO: 208042 - DNA, 80 bp, synthetic construct; identical to SEQ ID NO: 23312
  source 1..80: mol_type = other DNA

SEQ ID NO: 208043 - DNA, 80 bp, synthetic construct; identical to SEQ ID NO: 23313
  source 1..80: mol_type = other DNA

SEQ ID NO: 208044 - DNA, 80 bp, synthetic construct; identical to SEQ ID NO: 23314
  source 1..80: mol_type = other DNA

SEQ ID NO: 208045 - DNA, 80 bp, synthetic construct; identical to SEQ ID NO: 23315
  source 1..80: mol_type = other DNA

SEQ ID NO: 208046 - DNA, 80 bp, synthetic construct; identical to SEQ ID NO: 23316
  source 1..80: mol_type = other DNA

SEQ ID NO: 208047 - DNA, 80 bp, synthetic construct; identical to SEQ ID NO: 23317
  source 1..80: mol_type = other DNA

SEQ ID NO: 208048 - DNA, 80 bp, synthetic construct; identical to SEQ ID NO: 23318
  source 1..80: mol_type = other DNA

SEQ ID NO: 208049 - DNA, 80 bp, synthetic construct; identical to SEQ ID NO: 23319
  source 1..80: mol_type = other DNA

SEQ ID NO: 208050 - DNA, 80 bp, synthetic construct; identical to SEQ ID NO: 23320
  source 1..80: mol_type = other DNA

SEQ ID NO: 208051 - DNA, 80 bp, synthetic construct; identical to SEQ ID NO: 23321
  source 1..80: mol_type = other DNA

SEQ ID NO: 208052 - DNA, 80 bp, synthetic construct; identical to SEQ ID NO: 23322
  source 1..80: mol_type = other DNA

SEQ ID NO: 208053 - DNA, 80 bp, synthetic construct; identical to SEQ ID NO: 23323
  source 1..80: mol_type = other DNA

SEQ ID NO: 208054 - DNA, 80 bp, synthetic construct; identical to SEQ ID NO: 23324
  source 1..80: mol_type = other DNA

SEQ ID NO: 208055 - DNA, 80 bp, synthetic construct; identical to SEQ ID NO: 23325
  source 1..80: mol_type = other DNA

SEQ ID NO: 208056 - DNA, 80 bp, synthetic construct; identical to SEQ ID NO: 23326
  source 1..80: mol_type = other DNA

SEQ ID NO: 208057 - DNA, 80 bp, synthetic construct; identical to SEQ ID NO: 23327
  source 1..80: mol_type = other DNA

SEQ ID NO: 208058 - DNA, 80 bp, synthetic construct; identical to SEQ ID NO: 23328
  source 1..80: mol_type = other DNA

SEQ ID NO: 208059 - DNA, 80 bp, synthetic construct; identical to SEQ ID NO: 23329
  source 1..80: mol_type = other DNA

SEQ ID NO: 208060 - DNA, 80 bp, synthetic construct; identical to SEQ ID NO: 23330
  source 1..80: mol_type = other DNA

SEQ ID NO: 208061 - DNA, 80 bp, synthetic construct; identical to SEQ ID NO: 23331
  source 1..80: mol_type = other DNA

SEQ ID NO: 208062 - DNA, 80 bp, synthetic construct; identical to SEQ ID NO: 23332
  source 1..80: mol_type = other DNA

SEQ ID NO: 208063 - DNA, 80 bp, synthetic construct; identical to SEQ ID NO: 23333
  source 1..80: mol_type = other DNA

SEQ ID NO: 208064 - DNA, 80 bp, synthetic construct; identical to SEQ ID NO: 23334
  source 1..80: mol_type = other DNA

SEQ ID NO: 208065 - DNA, 80 bp, synthetic construct; identical to SEQ ID NO: 23335
  source 1..80: mol_type = other DNA

SEQ ID NO: 208066 - DNA, 80 bp, synthetic construct; identical to SEQ ID NO: 23336
  source 1..80: mol_type = other DNA

SEQ ID NO: 208067 - DNA, 80 bp, synthetic construct; identical to SEQ ID NO: 23337
  source 1..80: mol_type = other DNA

SEQ ID NO: 208068 - DNA, 80 bp, synthetic construct; identical to SEQ ID NO: 23338
  source 1..80: mol_type = other DNA

SEQ ID NO: 208069 - DNA, 80 bp, synthetic construct; identical to SEQ ID NO: 23339
  source 1..80: mol_type = other DNA

SEQ ID NO: 208070 - DNA, 80 bp, synthetic construct; identical to SEQ ID NO: 23340
  source 1..80: mol_type = other DNA

SEQ ID NO: 208071 - DNA, 80 bp, synthetic construct; identical to SEQ ID NO: 23341
  source 1..80: mol_type = other DNA

SEQ ID NO: 208072 - DNA, 80 bp, synthetic construct; identical to SEQ ID NO: 23342
  source 1..80: mol_type = other DNA

SEQ ID NO: 208073 - DNA, 80 bp, synthetic construct; identical to SEQ ID NO: 23343
  source 1..80: mol_type = other DNA

SEQ ID NO: 208074 - DNA, 80 bp, synthetic construct; identical to SEQ ID NO: 23344
  source 1..80: mol_type = other DNA

SEQ ID NO: 208075 - DNA, 80 bp, synthetic construct; identical to SEQ ID NO: 23345
  source 1..80: mol_type = other DNA

SEQ ID NO: 208076 - DNA, 80 bp, synthetic construct; identical to SEQ ID NO: 23346
  source 1..80: mol_type = other DNA

SEQ ID NO: 208077 - DNA, 80 bp, synthetic construct; identical to SEQ ID NO: 23347
  source 1..80: mol_type = other DNA

SEQ ID NO: 208078 - DNA, 80 bp, synthetic construct; identical to SEQ ID NO: 23348
  source 1..80: mol_type = other DNA

SEQ ID NO: 208079 - DNA, 80 bp, synthetic construct; identical to SEQ ID NO: 23349
  source 1..80: mol_type = other DNA

SEQ ID NO: 208080 - DNA, 80 bp, synthetic construct; identical to SEQ ID NO: 23350
  source 1..80: mol_type = other DNA

SEQ ID NO: 208081 - DNA, 80 bp, synthetic construct; identical to SEQ ID NO: 23351
  source 1..80: mol_type = other DNA

SEQ ID NO: 208082 - DNA, 80 bp, synthetic construct; identical to SEQ ID NO: 23352
  source 1..80: mol_type = other DNA

SEQ ID NO: 208083 - DNA, 80 bp, synthetic construct; identical to SEQ ID NO: 23353
  source 1..80: mol_type = other DNA

SEQ ID NO: 208084 - DNA, 80 bp, synthetic construct; identical to SEQ ID NO: 23354
  source 1..80: mol_type = other DNA

SEQ ID NO: 208085 - DNA, 80 bp, synthetic construct; identical to SEQ ID NO: 23355
  source 1..80: mol_type = other DNA

SEQ ID NO: 208086 - DNA, 80 bp, synthetic construct; identical to SEQ ID NO: 23356
  source 1..80: mol_type = other DNA

SEQ ID NO: 208087 - DNA, 80 bp, synthetic construct; identical to SEQ ID NO: 23357
  source 1..80: mol_type = other DNA

SEQ ID NO: 208088 - DNA, 80 bp, synthetic construct; identical to SEQ ID NO: 23358
  source 1..80: mol_type = other DNA

SEQ ID NO: 208089 - DNA, 80 bp, synthetic construct; identical to SEQ ID NO: 23359
  source 1..80: mol_type = other DNA

SEQ ID NO: 208090 - DNA, 80 bp, synthetic construct; identical to SEQ ID NO: 23360
  source 1..80: mol_type = other DNA

SEQ ID NO: 208091 - DNA, 80 bp, synthetic construct; identical to SEQ ID NO: 23361
  source 1..80: mol_type = other DNA

SEQ ID NO: 208092 - DNA, 80 bp, synthetic construct; identical to SEQ ID NO: 23362
  source 1..80: mol_type = other DNA

SEQ ID NO: 208093 - DNA, 80 bp, synthetic construct; identical to SEQ ID NO: 23363
  source 1..80: mol_type = other DNA

SEQ ID NO: 208094 - DNA, 80 bp, synthetic construct; identical to SEQ ID NO: 23364
  source 1..80: mol_type = other DNA

SEQ ID NO: 208095 - DNA, 80 bp, synthetic construct; identical to SEQ ID NO: 23365
  source 1..80: mol_type = other DNA

SEQ ID NO: 208096 - DNA, 80 bp, synthetic construct; identical to SEQ ID NO: 23366
  source 1..80: mol_type = other DNA

SEQ ID NO: 208097 - DNA, 80 bp, synthetic construct; identical to SEQ ID NO: 23367
  source 1..80: mol_type = other DNA

SEQ ID NO: 208098 - DNA, 80 bp, synthetic construct; identical to SEQ ID NO: 23368
  source 1..80: mol_type = other DNA

SEQ ID NO: 208099 - DNA, 80 bp, synthetic construct; identical to SEQ ID NO: 23369
  source 1..80: mol_type = other DNA

SEQ ID NO: 208100 - DNA, 80 bp, synthetic construct; identical to SEQ ID NO: 23370
  source 1..80: mol_type = other DNA

SEQ ID NO: 208101 - DNA, 80 bp, synthetic construct; identical to SEQ ID NO: 23371
  source 1..80: mol_type = other DNA

SEQ ID NO: 208102 - DNA, 80 bp, synthetic construct; identical to SEQ ID NO: 23372
  source 1..80: mol_type = other DNA

SEQ ID NO: 208103 - DNA, 80 bp, synthetic construct; identical to SEQ ID NO: 23373
  source 1..80: mol_type = other DNA

SEQ ID NO: 208104 - DNA, 80 bp, synthetic construct; identical to SEQ ID NO: 23374
  source 1..80: mol_type = other DNA

SEQ ID NO: 208105 - DNA, 80 bp, synthetic construct; identical to SEQ ID NO: 23375
  source 1..80: mol_type = other DNA

SEQ ID NO: 208106 - DNA, 80 bp, synthetic construct; identical to SEQ ID NO: 23376
  source 1..80: mol_type = other DNA

SEQ ID NO: 208107 - DNA, 80 bp, synthetic construct; identical to SEQ ID NO: 23377
  source 1..80: mol_type = other DNA

SEQ ID NO: 208108 - DNA, 80 bp, synthetic construct; identical to SEQ ID NO: 23378
  source 1..80: mol_type = other DNA

SEQ ID NO: 208109 - DNA, 80 bp, synthetic construct; identical to SEQ ID NO: 23379
  source 1..80: mol_type = other DNA

SEQ ID NO: 208110 - DNA, 80 bp, synthetic construct; identical to SEQ ID NO: 23380
  source 1..80: mol_type = other DNA

SEQ ID NO: 208111 - DNA, 80 bp, synthetic construct; identical to SEQ ID NO: 23381
  source 1..80: mol_type = other DNA

SEQ ID NO: 208112 - DNA, 80 bp, synthetic construct; identical to SEQ ID NO: 23382
  source 1..80: mol_type = other DNA

SEQ ID NO: 208113 - DNA, 80 bp, synthetic construct; identical to SEQ ID NO: 23383
  source 1..80: mol_type = other DNA

SEQ ID NO: 208114 - DNA, 80 bp, synthetic construct; identical to SEQ ID NO: 23384
  source 1..80: mol_type = other DNA

SEQ ID NO: 208115 - DNA, 80 bp, synthetic construct; identical to SEQ ID NO: 23385
  source 1..80: mol_type = other DNA

SEQ ID NO: 208116 - DNA, 80 bp, synthetic construct; identical to SEQ ID NO: 23386
  source 1..80: mol_type = other DNA

SEQ ID NO: 208117 - DNA, 80 bp, synthetic construct; identical to SEQ ID NO: 23387
  source 1..80: mol_type = other DNA

SEQ ID NO: 208118 - DNA, 80 bp, synthetic construct; identical to SEQ ID NO: 23388
  source 1..80: mol_type = other DNA

SEQ ID NO: 208119 - DNA, 80 bp, synthetic construct; identical to SEQ ID NO: 23389
  source 1..80: mol_type = other DNA

SEQ ID NO: 208120 - DNA, 80 bp, synthetic construct; identical to SEQ ID NO: 23390
  source 1..80: mol_type = other DNA

SEQ ID NO: 208121 - DNA, 80 bp, synthetic construct; identical to SEQ ID NO: 23391
  source 1..80: mol_type = other DNA

SEQ ID NO: 208122 - DNA, 80 bp, synthetic construct; identical to SEQ ID NO: 23392
  source 1..80: mol_type = other DNA

SEQ ID NO: 208123 - DNA, 80 bp, synthetic construct; identical to SEQ ID NO: 23393
  source 1..80: mol_type = other DNA

SEQ ID NO: 208124 - DNA, 80 bp, synthetic construct; identical to SEQ ID NO: 23394
  source 1..80: mol_type = other DNA

SEQ ID NO: 208125 - DNA, 80 bp, synthetic construct; identical to SEQ ID NO: 23395
  source 1..80: mol_type = other DNA

SEQ ID NO: 208126 - DNA, 80 bp, synthetic construct; identical to SEQ ID NO: 23396
  source 1..80: mol_type = other DNA

SEQ ID NO: 208127 - DNA, 80 bp, synthetic construct; identical to SEQ ID NO: 23397
  source 1..80: mol_type = other DNA

SEQ ID NO: 208128 - DNA, 80 bp, synthetic construct; identical to SEQ ID NO: 23398
  source 1..80: mol_type = other DNA

SEQ ID NO: 208129 - DNA, 80 bp, synthetic construct; identical to SEQ ID NO: 23399
  source 1..80: mol_type = other DNA

SEQ ID NO: 208130 - DNA, 80 bp, synthetic construct; identical to SEQ ID NO: 23400
  source 1..80: mol_type = other DNA

SEQ ID NO: 208131 - DNA, 80 bp, synthetic construct; identical to SEQ ID NO: 23401
  source 1..80: mol_type = other DNA

SEQ ID NO: 208132 - DNA, 80 bp, synthetic construct; identical to SEQ ID NO: 23402
  source 1..80: mol_type = other DNA

SEQ ID NO: 208133 - DNA, 80 bp, synthetic construct; identical to SEQ ID NO: 23403
  source 1..80: mol_type = other DNA

SEQ ID NO: 208134 - DNA, 80 bp, synthetic construct; identical to SEQ ID NO: 23404
  source 1..80: mol_type = other DNA

SEQ ID NO: 208135 - DNA, 80 bp, synthetic construct; identical to SEQ ID NO: 23405
  source 1..80: mol_type = other DNA

SEQ ID NO: 208136 - DNA, 80 bp, synthetic construct; identical to SEQ ID NO: 23406
  source 1..80: mol_type = other DNA

SEQ ID NO: 208137 - DNA, 80 bp, synthetic construct; identical to SEQ ID NO: 23407
  source 1..80: mol_type = other DNA

SEQ ID NO: 208138 - DNA, 80 bp, synthetic construct; identical to SEQ ID NO: 23408
  source 1..80: mol_type = other DNA

SEQ ID NO: 208139 - DNA, 80 bp, synthetic construct; identical to SEQ ID NO: 23409
  source 1..80: mol_type = other DNA

SEQ ID NO: 208140 - DNA, 80 bp, synthetic construct; identical to SEQ ID NO: 23410
  source 1..80: mol_type = other DNA

SEQ ID NO: 208141 - DNA, 80 bp, synthetic construct; identical to SEQ ID NO: 23411
  source 1..80: mol_type = other DNA

SEQ ID NO: 208142 - DNA, 80 bp, synthetic construct; identical to SEQ ID NO: 23412
  source 1..80: mol_type = other DNA

SEQ ID NO: 208143 - DNA, 80 bp, synthetic construct; identical to SEQ ID NO: 23413
  source 1..80: mol_type = other DNA

SEQ ID NO: 208144 - DNA, 80 bp, synthetic construct; identical to SEQ ID NO: 23414
  source 1..80: mol_type = other DNA

SEQ ID NO: 208145 - DNA, 80 bp, synthetic construct; identical to SEQ ID NO: 23415
  source 1..80: mol_type = other DNA

SEQ ID NO: 208146 - DNA, 80 bp, synthetic construct; identical to SEQ ID NO: 23416
  source 1..80: mol_type = other DNA

SEQ ID NO: 208147 - DNA, 80 bp, synthetic construct; identical to SEQ ID NO: 23417
  source 1..80: mol_type = other DNA

SEQ ID NO: 208148 - DNA, 80 bp, synthetic construct; identical to SEQ ID NO: 23418
  source 1..80: mol_type = other DNA

SEQ ID NO: 208149 - DNA, 80 bp, synthetic construct; identical to SEQ ID NO: 23419
  source 1..80: mol_type = other DNA

SEQ ID NO: 208150 - DNA, 80 bp, synthetic construct; identical to SEQ ID NO: 23420
  source 1..80: mol_type = other DNA

SEQ ID NO: 208151 - DNA, 80 bp, synthetic construct; identical to SEQ ID NO: 23421
  source 1..80: mol_type = other DNA

SEQ ID NO: 208152 - DNA, 80 bp, synthetic construct; identical to SEQ ID NO: 23422
  source 1..80: mol_type = other DNA

SEQ ID NO: 208153 - DNA, 80 bp, synthetic construct; identical to SEQ ID NO: 23423
  source 1..80: mol_type = other DNA

SEQ ID NO: 208154 - DNA, 80 bp, synthetic construct; identical to SEQ ID NO: 23424
  source 1..80: mol_type = other DNA

SEQ ID NO: 208155 - DNA, 80 bp, synthetic construct; identical to SEQ ID NO: 23425
  source 1..80: mol_type = other DNA

SEQ ID NO: 208156 - DNA, 80 bp, synthetic construct; identical to SEQ ID NO: 23426
  source 1..80: mol_type = other DNA

SEQ ID NO: 208157 - DNA, 80 bp, synthetic construct; identical to SEQ ID NO: 23427
  source 1..80: mol_type = other DNA

SEQ ID NO: 208158 - DNA, 80 bp, synthetic construct; identical to SEQ ID NO: 23428
  source 1..80: mol_type = other DNA

SEQ ID NO: 208159 - DNA, 80 bp, synthetic construct; identical to SEQ ID NO: 23429
  source 1..80: mol_type = other DNA

SEQ ID NO: 208160 - DNA, 80 bp, synthetic construct; identical to SEQ ID NO: 23430
  source 1..80: mol_type = other DNA

SEQ ID NO: 208161 - DNA, 80 bp, synthetic construct; identical to SEQ ID NO: 23431
  source 1..80: mol_type = other DNA

SEQ ID NO: 208162 - DNA, 80 bp, synthetic construct; identical to SEQ ID NO: 23432
  source 1..80: mol_type = other DNA

SEQ ID NO: 208163 - DNA, 80 bp, synthetic construct; identical to SEQ ID NO: 23433
  source 1..80: mol_type = other DNA

SEQ ID NO: 208164 - DNA, 80 bp, synthetic construct; identical to SEQ ID NO: 23434
  source 1..80: mol_type = other DNA

SEQ ID NO: 208165 - DNA, 80 bp, synthetic construct; identical to SEQ ID NO: 23435
  source 1..80: mol_type = other DNA

SEQ ID NO: 208166 - DNA, 80 bp, synthetic construct; identical to SEQ ID NO: 23436
  source 1..80: mol_type = other DNA

SEQ ID NO: 208167 - DNA, 80 bp, synthetic construct; identical to SEQ ID NO: 23437
  source 1..80: mol_type = other DNA

SEQ ID NO: 208168 - DNA, 80 bp, synthetic construct; identical to SEQ ID NO: 23438
  source 1..80: mol_type = other DNA

SEQ ID NO: 208169 - DNA, 80 bp, synthetic construct; identical to SEQ ID NO: 23439
  source 1..80: mol_type = other DNA

SEQ ID NO: 208170 - DNA, 80 bp, synthetic construct; identical to SEQ ID NO: 23440
  source 1..80: mol_type = other DNA

SEQ ID NO: 208171 - DNA, 80 bp, synthetic construct; identical to SEQ ID NO: 23441
  source 1..80: mol_type = other DNA

SEQ ID NO: 208172 - DNA, 80 bp, synthetic construct; identical to SEQ ID NO: 23442
  source 1..80: mol_type = other DNA

SEQ ID NO: 208173 - DNA, 80 bp, synthetic construct; identical to SEQ ID NO: 23443
  source 1..80: mol_type = other DNA

SEQ ID NO: 208174 - DNA, 80 bp, synthetic construct; identical to SEQ ID NO: 23444
  source 1..80: mol_type = other DNA

SEQ ID NO: 208175 - DNA, 80 bp, synthetic construct; identical to SEQ ID NO: 23445
  source 1..80: mol_type = other DNA

SEQ ID NO: 208176 - DNA, 80 bp, synthetic construct; identical to SEQ ID NO: 23446
  source 1..80: mol_type = other DNA

SEQ ID NO: 208177 - DNA, 80 bp, synthetic construct; identical to SEQ ID NO: 23447
  source 1..80: mol_type = other DNA

SEQ ID NO: 208178 - DNA, 80 bp, synthetic construct; identical to SEQ ID NO: 23448
  source 1..80: mol_type = other DNA

SEQ ID NO: 208179 - DNA, 80 bp, synthetic construct; identical to SEQ ID NO: 23449
  source 1..80: mol_type = other DNA

SEQ ID NO: 208180 - DNA, 80 bp, synthetic construct; identical to SEQ ID NO: 23450
  source 1..80: mol_type = other DNA

SEQ ID NO: 208181 - DNA, 80 bp, synthetic construct; identical to SEQ ID NO: 23451
  source 1..80: mol_type = other DNA

SEQ ID NO: 208182 - DNA, 80 bp, synthetic construct; identical to SEQ ID NO: 23452
  source 1..80: mol_type = other DNA

SEQ ID NO: 208183 - DNA, 80 bp, synthetic construct; identical to SEQ ID NO: 23453
  source 1..80: mol_type = other DNA

SEQ ID NO: 208184 - DNA, 80 bp, synthetic construct; identical to SEQ ID NO: 23454
  source 1..80: mol_type = other DNA

SEQ ID NO: 208185 - DNA, 80 bp, synthetic construct; identical to SEQ ID NO: 23455
  source 1..80: mol_type = other DNA

SEQ ID NO: 208186 - DNA, 80 bp, synthetic construct; identical to SEQ ID NO: 23456
  source 1..80: mol_type = other DNA

SEQ ID NO: 208187 - DNA, 80 bp, synthetic construct; identical to SEQ ID NO: 23457
  source 1..80: mol_type = other DNA

SEQ ID NO: 208188 - DNA, 80 bp, synthetic construct; identical to SEQ ID NO: 23458
  source 1..80: mol_type = other DNA

SEQ ID NO: 208189 - DNA, 80 bp, synthetic construct; identical to SEQ ID NO: 23459
  source 1..80: mol_type = other DNA

SEQ ID NO: 208190 - DNA, 80 bp, synthetic construct; identical to SEQ ID NO: 23460
  source 1..80: mol_type = other DNA

SEQ ID NO: 208191 - DNA, 80 bp, synthetic construct; identical to SEQ ID NO: 23461
  source 1..80: mol_type = other DNA

SEQ ID NO: 208192 - DNA, 80 bp, synthetic construct; identical to SEQ ID NO: 23462
  source 1..80: mol_type = other DNA

SEQ ID NO: 208193 - DNA, 80 bp, synthetic construct; identical to SEQ ID NO: 23463
  source 1..80: mol_type = other DNA

SEQ ID NO: 208194 - DNA, 80 bp, synthetic construct; identical to SEQ ID NO: 23464
  source 1..80: mol_type = other DNA

SEQ ID NO: 208195 - DNA, 80 bp, synthetic construct; identical to SEQ ID NO: 23465
  source 1..80: mol_type = other DNA

SEQ ID NO: 208196 - DNA, 80 bp, synthetic construct; identical to SEQ ID NO: 23466
  source 1..80: mol_type = other DNA

SEQ ID NO: 208197 - DNA, 80 bp, synthetic construct; identical to SEQ ID NO: 23467
  source 1..80: mol_type = other DNA

SEQ ID NO: 208198 - DNA, 80 bp, synthetic construct; identical to SEQ ID NO: 23468
  source 1..80: mol_type = other DNA

SEQ ID NO: 208199 - DNA, 80 bp, synthetic construct; identical to SEQ ID NO: 23469
  source 1..80: mol_type = other DNA

SEQ ID NO: 208200 - DNA, 80 bp, synthetic construct; identical to SEQ ID NO: 23470
  source 1..80: mol_type = other DNA

SEQ ID NO: 208201 - DNA, 80 bp, synthetic construct; identical to SEQ ID NO: 23471
  source 1..80: mol_type = other DNA

SEQ ID NO: 208202 - DNA, 80 bp, synthetic construct; identical to SEQ ID NO: 23472
  source 1..80: mol_type = other DNA

SEQ ID NO: 208203 - DNA, 80 bp, synthetic construct; identical to SEQ ID NO: 23473
  source 1..80: mol_type = other DNA

SEQ ID NO: 208204 - DNA, 80 bp, synthetic construct; identical to SEQ ID NO: 23474
  source 1..80: mol_type = other DNA

SEQ ID NO: 208205 - DNA, 80 bp, synthetic construct; identical to SEQ ID NO: 23475
  source 1..80: mol_type = other DNA

SEQ ID NO: 208206 - DNA, 80 bp, synthetic construct; identical to SEQ ID NO: 23476
  source 1..80: mol_type = other DNA

SEQ ID NO: 208207 - DNA, 80 bp, synthetic construct; identical to SEQ ID NO: 23477
  source 1..80: mol_type = other DNA

SEQ ID NO: 208208 - DNA, 80 bp, synthetic construct; identical to SEQ ID NO: 23478
  source 1..80: mol_type = other DNA

SEQ ID NO: 208209 - DNA, 80 bp, synthetic construct; identical to SEQ ID NO: 23479
  source 1..80: mol_type = other DNA

SEQ ID NO: 208210 - DNA, 80 bp, synthetic construct; identical to SEQ ID NO: 23480
  source 1..80: mol_type = other DNA

SEQ ID NO: 208211 - DNA, 80 bp, synthetic construct; identical to SEQ ID NO: 23481
  source 1..80: mol_type = other DNA

SEQ ID NO: 208212 - DNA, 80 bp, synthetic construct; identical to SEQ ID NO: 23482
  source 1..80: mol_type = other DNA

SEQ ID NO: 208213 - DNA, 80 bp, synthetic construct; identical to SEQ ID NO: 23483
  source 1..80: mol_type = other DNA

SEQ ID NO: 208214 - DNA, 80 bp, synthetic construct; identical to SEQ ID NO: 23484
  source 1..80: mol_type = other DNA

SEQ ID NO: 208215 - DNA, 80 bp, synthetic construct; identical to SEQ ID NO: 23485
  source 1..80: mol_type = other DNA

SEQ ID NO: 208216 - DNA, 80 bp, synthetic construct; identical to SEQ ID NO: 23486
  source 1..80: mol_type = other DNA

SEQ ID NO: 208217 - DNA, 80 bp, synthetic construct; identical to SEQ ID NO: 23487
  source 1..80: mol_type = other DNA

SEQ ID NO: 208218 - DNA, 80 bp, synthetic construct; identical to SEQ ID NO: 23488
  source 1..80: mol_type = other DNA

SEQ ID NO: 208219 - DNA, 80 bp, synthetic construct; identical to SEQ ID NO: 23489
  source 1..80: mol_type = other DNA

SEQ ID NO: 208220 - DNA, 80 bp, synthetic construct; identical to SEQ ID NO: 23490
  source 1..80: mol_type = other DNA

SEQ ID NO: 208221 - DNA, 80 bp, synthetic construct; identical to SEQ ID NO: 23491
  source 1..80: mol_type = other DNA

SEQ ID NO: 208222 - DNA, 80 bp, synthetic construct; identical to SEQ ID NO: 23492
  source 1..80: mol_type = other DNA

SEQ ID NO: 208223 - DNA, 80 bp, synthetic construct; identical to SEQ ID NO: 23493
  source 1..80: mol_type = other DNA

SEQ ID NO: 208224 - DNA, 80 bp, synthetic construct; identical to SEQ ID NO: 23494
  source 1..80: mol_type = other DNA

SEQ ID NO: 208225 - DNA, 80 bp, synthetic construct; identical to SEQ ID NO: 23495
  source 1..80: mol_type = other DNA

SEQ ID NO: 208226 - DNA, 80 bp, synthetic construct; identical to SEQ ID NO: 23496
  source 1..80: mol_type = other DNA

SEQ ID NO: 208227 - DNA, 80 bp, synthetic construct; identical to SEQ ID NO: 23497
  source 1..80: mol_type = other DNA

SEQ ID NO: 208228 - DNA, 80 bp, synthetic construct; identical to SEQ ID NO: 23498
  source 1..80: mol_type = other DNA

SEQ ID NO: 208229 - DNA, 80 bp, synthetic construct; identical to SEQ ID NO: 23499
  source 1..80: mol_type = other DNA

SEQ ID NO: 208230 - DNA, 80 bp, synthetic construct; identical to SEQ ID NO: 23500
  source 1..80: mol_type = other DNA

SEQ ID NO: 208231 - DNA, 80 bp, synthetic construct; identical to SEQ ID NO: 23501
  source 1..80: mol_type = other DNA

SEQ ID NO: 208232 - DNA, 80 bp, synthetic construct; identical to SEQ ID NO: 23502
  source 1..80: mol_type = other DNA

SEQ ID NO: 208233 - DNA, 80 bp, synthetic construct; identical to SEQ ID NO: 23503
  source 1..80: mol_type = other DNA

SEQ ID NO: 208234 - DNA, 80 bp, synthetic construct; identical to SEQ ID NO: 23504
  source 1..80: mol_type = other DNA

SEQ ID NO: 208235 - DNA, 80 bp, synthetic construct; identical to SEQ ID NO: 23505
  source 1..80: mol_type = other DNA

SEQ ID NO: 208236 - DNA, 80 bp, synthetic construct; identical to SEQ ID NO: 23506
  source 1..80: mol_type = other DNA

SEQ ID NO: 208237 - DNA, 80 bp, synthetic construct; identical to SEQ ID NO: 23507
  source 1..80: mol_type = other DNA

SEQ ID NO: 208238 - DNA, 80 bp, synthetic construct; identical to SEQ ID NO: 23508
  source 1..80: mol_type = other DNA

SEQ ID NO: 208239 - DNA, 80 bp, synthetic construct; identical to SEQ ID NO: 23509
  source 1..80: mol_type = other DNA

SEQ ID NO: 208240 - DNA, 80 bp, synthetic construct; identical to SEQ ID NO: 23510
  source 1..80: mol_type = other DNA

SEQ ID NO: 208241 - DNA, 80 bp, synthetic construct; identical to SEQ ID NO: 23511
  source 1..80: mol_type = other DNA

SEQ ID NO: 208242 - DNA, 80 bp, synthetic construct; identical to SEQ ID NO: 23512
  source 1..80: mol_type = other DNA

SEQ ID NO: 208243 - DNA, 80 bp, synthetic construct; identical to SEQ ID NO: 23513
  source 1..80: mol_type = other DNA

SEQ ID NO: 208244 - DNA, 80 bp, synthetic construct; identical to SEQ ID NO: 23514
  source 1..80: mol_type = other DNA

SEQ ID NO: 208245 - DNA, 80 bp, synthetic construct; identical to SEQ ID NO: 23515
  source 1..80: mol_type = other DNA

SEQ ID NO: 208246 - DNA, 80 bp, synthetic construct; identical to SEQ ID NO: 23516
  source 1..80: mol_type = other DNA

SEQ ID NO: 208247 - DNA, 80 bp, synthetic construct; identical to SEQ ID NO: 23517
  source 1..80: mol_type = other DNA

SEQ ID NO: 208248 - DNA, 80 bp, synthetic construct; identical to SEQ ID NO: 23518
  source 1..80: mol_type = other DNA

SEQ ID NO: 208249 - DNA, 80 bp, synthetic construct; identical to SEQ ID NO: 23519
  source 1..80: mol_type = other DNA

SEQ ID NO: 208250 - DNA, 80 bp, synthetic construct; identical to SEQ ID NO: 23520
  source 1..80: mol_type = other DNA

SEQ ID NO: 208251 - DNA, 80 bp, synthetic construct; identical to SEQ ID NO: 23521
  source 1..80: mol_type = other DNA

SEQ ID NO: 208252 - DNA, 80 bp, synthetic construct; identical to SEQ ID NO: 23522
  source 1..80: mol_type = other DNA

SEQ ID NO: 208253 - DNA, 80 bp, synthetic construct; identical to SEQ ID NO: 23523
  source 1..80: mol_type = other DNA

SEQ ID NO: 208254 - DNA, 80 bp, synthetic construct; identical to SEQ ID NO: 23524
  source 1..80: mol_type = other DNA

SEQ ID NO: 208255 - DNA, 80 bp, synthetic construct; identical to SEQ ID NO: 23525
  source 1..80: mol_type = other DNA

SEQ ID NO: 208256 - DNA, 80 bp, synthetic construct; identical to SEQ ID NO: 23526
  source 1..80: mol_type = other DNA

SEQ ID NO: 208257 - DNA, 80 bp, synthetic construct; identical to SEQ ID NO: 23527
  source 1..80: mol_type = other DNA

SEQ ID NO: 208258 - DNA, 80 bp, synthetic construct; identical to SEQ ID NO: 23528
  source 1..80: mol_type = other DNA

SEQ ID NO: 208259 - DNA, 80 bp, synthetic construct; identical to SEQ ID NO: 23529
  source 1..80: mol_type = other DNA

SEQ ID NO: 208260 - DNA, 80 bp, synthetic construct; identical to SEQ ID NO: 23530
  source 1..80: mol_type = other DNA

SEQ ID NO: 208261 - DNA, 80 bp, synthetic construct; identical to SEQ ID NO: 23531
  source 1..80: mol_type = other DNA

SEQ ID NO: 208262 - DNA, 80 bp, synthetic construct; identical to SEQ ID NO: 23532
  source 1..80: mol_type = other DNA

SEQ ID NO: 208263 - DNA, 80 bp, synthetic construct; identical to SEQ ID NO: 23533
  source 1..80: mol_type = other DNA

SEQ ID NO: 208264 - DNA, 80 bp, synthetic construct; identical to SEQ ID NO: 23534
  source 1..80: mol_type = other DNA

SEQ ID NO: 208265 - DNA, 80 bp, synthetic construct; identical to SEQ ID NO: 23535
  source 1..80: mol_type = other DNA

SEQ ID NO: 208266 - DNA, 80 bp, synthetic construct; identical to SEQ ID NO: 23536
  source 1..80: mol_type = other DNA

SEQ ID NO: 208267 - DNA, 80 bp, synthetic construct; identical to SEQ ID NO: 23537
  source 1..80: mol_type = other DNA

SEQ ID NO: 208268 - DNA, 80 bp, synthetic construct; identical to SEQ ID NO: 23538
  source 1..80: mol_type = other DNA

SEQ ID NO: 208269 - DNA, 80 bp, synthetic construct; identical to SEQ ID NO: 23539
  source 1..80: mol_type = other DNA

SEQ ID NO: 208270 - DNA, 80 bp, synthetic construct; identical to SEQ ID NO: 23540
  source 1..80: mol_type = other DNA

SEQ ID NO: 208271 - DNA, 80 bp, synthetic construct; identical to SEQ ID NO: 23541
  source 1..80: mol_type = other DNA

SEQ ID NO: 208272 - DNA, 80 bp, synthetic construct; identical to SEQ ID NO: 23542
  source 1..80: mol_type = other DNA

SEQ ID NO: 208273 - DNA, 80 bp, synthetic construct; identical to SEQ ID NO: 23543
  source 1..80: mol_type = other DNA

SEQ ID NO: 208274 - DNA, 80 bp, synthetic construct; identical to SEQ ID NO: 23544
  source 1..80: mol_type = other DNA

SEQ ID NO: 208275 - DNA, 80 bp, synthetic construct; identical to SEQ ID NO: 23545
  source 1..80: mol_type = other DNA

SEQ ID NO: 208276 - DNA, 80 bp, synthetic construct; identical to SEQ ID NO: 23546
  source 1..80: mol_type = other DNA

SEQ ID NO: 208277 - DNA, 80 bp, synthetic construct; identical to SEQ ID NO: 23547
  source 1..80: mol_type = other DNA

SEQ ID NO: 208278 - DNA, 80 bp, synthetic construct; identical to SEQ ID NO: 23548
  source 1..80: mol_type = other DNA

SEQ ID NO: 208279 - DNA, 80 bp, synthetic construct; identical to SEQ ID NO: 23549
  source 1..80: mol_type = other DNA

SEQ ID NO: 208280 - DNA, 80 bp, synthetic construct; identical to SEQ ID NO: 23550
  source 1..80: mol_type = other DNA

SEQ ID NO: 208281 - DNA, 80 bp, synthetic construct; identical to SEQ ID NO: 23551
  source 1..80: mol_type = other DNA

SEQ ID NO: 208282 - DNA, 80 bp, synthetic construct; identical to SEQ ID NO: 23552
  source 1..80: mol_type = other DNA

SEQ ID NO: 208283 - DNA, 80 bp, synthetic construct; identical to SEQ ID NO: 23553
  source 1..80: mol_type = other DNA

SEQ ID NO: 208284 - DNA, 80 bp, synthetic construct; identical to SEQ ID NO: 23554
  source 1..80: mol_type = other DNA

SEQ ID NO: 208285 - DNA, 80 bp, synthetic construct; identical to SEQ ID NO: 23555
  source 1..80: mol_type = other DNA

SEQ ID NO: 208286 - DNA, 80 bp, synthetic construct; identical to SEQ ID NO: 23556
  source 1..80: mol_type = other DNA

SEQ ID NO: 208287 - DNA, 80 bp, synthetic construct; identical to SEQ ID NO: 23557
  source 1..80: mol_type = other DNA

SEQ ID NO: 208288 - DNA, 80 bp, synthetic construct; identical to SEQ ID NO: 23558
  source 1..80: mol_type = other DNA

SEQ ID NO: 208289 - DNA, 80 bp, synthetic construct; identical to SEQ ID NO: 23559
  source 1..80: mol_type = other DNA

SEQ ID NO: 208290 - DNA, 80 bp, synthetic construct; identical to SEQ ID NO: 23560
  source 1..80: mol_type = other DNA

SEQ ID NO: 208291 - DNA, 80 bp, synthetic construct; identical to SEQ ID NO: 23561
  source 1..80: mol_type = other DNA

SEQ ID NO: 208292 - DNA, 80 bp, synthetic construct; identical to SEQ ID NO: 23562
  source 1..80: mol_type = other DNA

SEQ ID NO: 208293 - DNA, 80 bp, synthetic construct; identical to SEQ ID NO: 23563
  source 1..80: mol_type = other DNA

SEQ ID NO: 208294 - DNA, 80 bp, synthetic construct; identical to SEQ ID NO: 23564
  source 1..80: mol_type = other DNA

SEQ ID NO: 208295 - DNA, 80 bp, synthetic construct; identical to SEQ ID NO: 23565
  source 1..80: mol_type = other DNA

SEQ ID NO: 208296 - DNA, 80 bp, synthetic construct; identical to SEQ ID NO: 23566
  source 1..80: mol_type = other DNA

SEQ ID NO: 208297 - DNA, 80 bp, synthetic construct; identical to SEQ ID NO: 23567
  source 1..80: mol_type = other DNA

SEQ ID NO: 208298 - DNA, 80 bp, synthetic construct; identical to SEQ ID NO: 23568
  source 1..80: mol_type = other DNA

SEQ ID NO: 208299 - DNA, 80 bp, synthetic construct; identical to SEQ ID NO: 23569
  source 1..80: mol_type = other DNA

SEQ ID NO: 208300 - DNA, 80 bp, synthetic construct; identical to SEQ ID NO: 23570
  source 1..80: mol_type = other DNA

SEQ ID NO: 208301 - DNA, 80 bp, synthetic construct; identical to SEQ ID NO: 23571
  source 1..80: mol_type = other DNA

SEQ ID NO: 208302 - DNA, 80 bp, synthetic construct; identical to SEQ ID NO: 23572
  source 1..80: mol_type = other DNA

SEQ ID NO: 208303 - DNA, 80 bp, synthetic construct; identical to SEQ ID NO: 23573
  source 1..80: mol_type = other DNA

SEQ ID NO: 208304 - DNA, 80 bp, synthetic construct; identical to SEQ ID NO: 23574
  source 1..80: mol_type = other DNA

SEQ ID NO: 208305 - DNA, 80 bp, synthetic construct; identical to SEQ ID NO: 23575
  source 1..80: mol_type = other DNA

SEQ ID NO: 208306 - DNA, 80 bp, synthetic construct; identical to SEQ ID NO: 23576
  source 1..80: mol_type = other DNA

SEQ ID NO: 208307 - DNA, 80 bp, synthetic construct; identical to SEQ ID NO: 23577
  source 1..80: mol_type = other DNA

SEQ ID NO: 208308 - DNA, 80 bp, synthetic construct; identical to SEQ ID NO: 23578
  source 1..80: mol_type = other DNA

SEQ ID NO: 208309 - DNA, 80 bp, synthetic construct; identical to SEQ ID NO: 23579
  source 1..80: mol_type = other DNA

SEQ ID NO: 208310 - DNA, 80 bp, synthetic construct; identical to SEQ ID NO: 23580
  source 1..80: mol_type = other DNA

SEQ ID NO: 208311 - DNA, 80 bp, synthetic construct; identical to SEQ ID NO: 23581
  source 1..80: mol_type = other DNA

SEQ ID NO: 208312 - DNA, 80 bp, synthetic construct; identical to SEQ ID NO: 23582
  source 1..80: mol_type = other DNA

SEQ ID NO: 208313 - DNA, 80 bp, synthetic construct; identical to SEQ ID NO: 23583
  source 1..80: mol_type = other DNA

SEQ ID NO: 208314 - DNA, 80 bp, synthetic construct; identical to SEQ ID NO: 23584
  source 1..80: mol_type = other DNA

SEQ ID NO: 208315 - DNA, 80 bp, synthetic construct; identical to SEQ ID NO: 23585
  source 1..80: mol_type = other DNA

SEQ ID NO: 208316 - DNA, 80 bp, synthetic construct; identical to SEQ ID NO: 23586
  source 1..80: mol_type = other DNA

SEQ ID NO: 208317 - DNA, 80 bp, synthetic construct; identical to SEQ ID NO: 23587
  source 1..80: mol_type = other DNA

SEQ ID NO: 208318 - DNA, 80 bp, synthetic construct; identical to SEQ ID NO: 23588
  source 1..80: mol_type = other DNA

SEQ ID NO: 208319 - DNA, 80 bp, synthetic construct; identical to SEQ ID NO: 23589
  source 1..80: mol_type = other DNA

SEQ ID NO: 208320 - DNA, 80 bp, synthetic construct; identical to SEQ ID NO: 23590
  source 1..80: mol_type = other DNA

SEQ ID NO: 208321 - DNA, 80 bp, synthetic construct; identical to SEQ ID NO: 23591
  source 1..80: mol_type = other DNA

SEQ ID NO: 208322 - DNA, 80 bp, synthetic construct; identical to SEQ ID NO: 23592
  source 1..80: mol_type = other DNA

SEQ ID NO: 208323 - DNA, 80 bp, synthetic construct; identical to SEQ ID NO: 23593
  source 1..80: mol_type = other DNA

SEQ ID NO: 208324 - DNA, 80 bp, synthetic construct; identical to SEQ ID NO: 23594
  source 1..80: mol_type = other DNA

SEQ ID NO: 208325 - DNA, 80 bp, synthetic construct; identical to SEQ ID NO: 23595
  source 1..80: mol_type = other DNA

SEQ ID NO: 208326 - DNA, 80 bp, synthetic construct; identical to SEQ ID NO: 23596
  source 1..80: mol_type = other DNA

SEQ ID NO: 208327 - DNA, 80 bp, synthetic construct; identical to SEQ ID NO: 23597
  source 1..80: mol_type = other DNA

SEQ ID NO: 208328 - DNA, 80 bp, synthetic construct; identical to SEQ ID NO: 23598
  source 1..80: mol_type = other DNA

SEQ ID NO: 208329 - DNA, 80 bp, synthetic construct; identical to SEQ ID NO: 23599
  source 1..80: mol_type = other DNA

SEQ ID NO: 208330 - DNA, 80 bp, synthetic construct; identical to SEQ ID NO: 23600
  source 1..80: mol_type = other DNA

SEQ ID NO: 208331 - DNA, 80 bp, synthetic construct; identical to SEQ ID NO: 23601
  source 1..80: mol_type = other DNA

SEQ ID NO: 208332 - DNA, 80 bp, synthetic construct; identical to SEQ ID NO: 23602
  source 1..80: mol_type = other DNA

SEQ ID NO: 208333 - DNA, 80 bp, synthetic construct; identical to SEQ ID NO: 23603
  source 1..80: mol_type = other DNA

SEQ ID NO: 208334 - DNA, 80 bp, synthetic construct; identical to SEQ ID NO: 23604
  source 1..80: mol_type = other DNA

SEQ ID NO: 208335 - DNA, 80 bp, synthetic construct; identical to SEQ ID NO: 23605
  source 1..80: mol_type = other DNA

SEQ ID NO: 208336 - DNA, 80 bp, synthetic construct; identical to SEQ ID NO: 23606
  source 1..80: mol_type = other DNA

SEQ ID NO: 208337 - DNA, 80 bp, synthetic construct; identical to SEQ ID NO: 23607
  source 1..80: mol_type = other DNA

SEQ ID NO: 208338 - DNA, 80 bp, synthetic construct; identical to SEQ ID NO: 23608
  source 1..80: mol_type = other DNA

SEQ ID NO: 208339 - DNA, 80 bp, synthetic construct; identical to SEQ ID NO: 23609
  source 1..80: mol_type = other DNA

SEQ ID NO: 208340 - DNA, 80 bp, synthetic construct; identical to SEQ ID NO: 23610
  source 1..80: mol_type = other DNA

SEQ ID NO: 208341 - DNA, 80 bp, synthetic construct; identical to SEQ ID NO: 23611
  source 1..80: mol_type = other DNA

SEQ ID NO: 208342 - DNA, 80 bp, synthetic construct; identical to SEQ ID NO: 23612
  source 1..80: mol_type = other DNA

SEQ ID NO: 208343 - DNA, 80 bp, synthetic construct; identical to SEQ ID NO: 23613
  source 1..80: mol_type = other DNA

SEQ ID NO: 208344 - DNA, 80 bp, synthetic construct; identical to SEQ ID NO: 23614
  source 1..80: mol_type = other DNA

SEQ ID NO: 208345 - DNA, 80 bp, synthetic construct; identical to SEQ ID NO: 23615
  source 1..80: mol_type = other DNA

SEQ ID NO: 208346 - DNA, 80 bp, synthetic construct; identical to SEQ ID NO: 23616
  source 1..80: mol_type = other DNA

SEQ ID NO: 208347 - DNA, 80 bp, synthetic construct; identical to SEQ ID NO: 23617
  source 1..80: mol_type = other DNA

SEQ ID NO: 208348 - DNA, 80 bp, synthetic construct; identical to SEQ ID NO: 23618
  source 1..80: mol_type = other DNA

SEQ ID NO: 208349 - DNA, 80 bp, synthetic construct; identical to SEQ ID NO: 23619
  source 1..80: mol_type = other DNA

SEQ ID NO: 208350 - DNA, 80 bp, synthetic construct; identical to SEQ ID NO: 23620
  source 1..80: mol_type = other DNA

SEQ ID NO: 208351 - DNA, 80 bp, synthetic construct; identical to SEQ ID NO: 23621
  source 1..80: mol_type = other DNA

SEQ ID NO: 208352 - DNA, 80 bp, synthetic construct; identical to SEQ ID NO: 23622
  source 1..80: mol_type = other DNA

SEQ ID NO: 208353 - DNA, 80 bp, synthetic construct; identical to SEQ ID NO: 23623
  source 1..80: mol_type = other DNA

SEQ ID NO: 208354 - DNA, 80 bp, synthetic construct; identical to SEQ ID NO: 23624
  source 1..80: mol_type = other DNA

SEQ ID NO: 208355 - DNA, 80 bp, synthetic construct; identical to SEQ ID NO: 23625
  source 1..80: mol_type = other DNA

SEQ ID NO: 208356 - DNA, 80 bp, synthetic construct; identical to SEQ ID NO: 23626
  source 1..80: mol_type = other DNA

SEQ ID NO: 208357 - DNA, 80 bp, synthetic construct; identical to SEQ ID NO: 23627
  source 1..80: mol_type = other DNA

SEQ ID NO: 208358 - DNA, 80 bp, synthetic construct; identical to SEQ ID NO: 23628
  source 1..80: mol_type = other DNA

SEQ ID NO: 208359 - DNA, 80 bp, synthetic construct; identical to SEQ ID NO: 23629
  source 1..80: mol_type = other DNA

SEQ ID NO: 208360 - DNA, 80 bp, synthetic construct; identical to SEQ ID NO: 23630
  source 1..80: mol_type = other DNA

SEQ ID NO: 208361 - DNA, 80 bp, synthetic construct; identical to SEQ ID NO: 23631
  source 1..80: mol_type = other DNA

SEQ ID NO: 208362 - DNA, 80 bp, synthetic construct; identical to SEQ ID NO: 23632
  source 1..80: mol_type = other DNA

SEQ ID NO: 208363 - DNA, 80 bp, synthetic construct; identical to SEQ ID NO: 23633
  source 1..80: mol_type = other DNA

SEQ ID NO: 208364 - DNA, 80 bp, synthetic construct; identical to SEQ ID NO: 23634
  source 1..80: mol_type = other DNA

SEQ ID NO: 208365 - DNA, 80 bp, synthetic construct; identical to SEQ ID NO: 23635
  source 1..80: mol_type = other DNA

SEQ ID NO: 208366 - DNA, 80 bp, synthetic construct; identical to SEQ ID NO: 23636
  source 1..80: mol_type = other DNA

SEQ ID NO: 208367 - DNA, 80 bp, synthetic construct; identical to SEQ ID NO: 23637
  source 1..80: mol_type = other DNA

SEQ ID NO: 208368 - DNA, 80 bp, synthetic construct; identical to SEQ ID NO: 23638
  source 1..80: mol_type = other DNA

SEQ ID NO: 208369 - DNA, 80 bp, synthetic construct; identical to SEQ ID NO: 23639
  source 1..80: mol_type = other DNA

SEQ ID NO: 208370 - DNA, 80 bp, synthetic construct; identical to SEQ ID NO: 23640
  source 1..80: mol_type = other DNA

SEQ ID NO: 208371 - DNA, 80 bp, synthetic construct; identical to SEQ ID NO: 23641
  source 1..80: mol_type = other DNA

SEQ ID NO: 208372 - DNA, 80 bp, synthetic construct; identical to SEQ ID NO: 23642
  source 1..80: mol_type = other DNA

SEQ ID NO: 208373 - DNA, 80 bp, synthetic construct; identical to SEQ ID NO: 23643
  source 1..80: mol_type = other DNA

SEQ ID NO: 208374 - DNA, 80 bp, synthetic construct; identical to SEQ ID NO: 23644
  source 1..80: mol_type = other DNA

SEQ ID NO: 208375 - DNA, 80 bp, synthetic construct; identical to SEQ ID NO: 23645
  source 1..80: mol_type = other DNA

SEQ ID NO: 208376 - DNA, 80 bp, synthetic construct; identical to SEQ ID NO: 23646
  source 1..80: mol_type = other DNA

SEQ ID NO: 208377 - DNA, 80 bp, synthetic construct; identical to SEQ ID NO: 23647
  source 1..80: mol_type = other DNA

SEQ ID NO: 208378 - DNA, 80 bp, synthetic construct; identical to SEQ ID NO: 23648
  source 1..80: mol_type = other DNA

SEQ ID NO: 208379 - DNA, 80 bp, synthetic construct; identical to SEQ ID NO: 23649
  source 1..80: mol_type = other DNA

SEQ ID NO: 208380 - DNA, 80 bp, synthetic construct; identical to SEQ ID NO: 23650
  source 1..80: mol_type = other DNA

SEQ ID NO: 208381 - DNA, 80 bp, synthetic construct; identical to SEQ ID NO: 23651
  source 1..80: mol_type = other DNA

SEQ ID NO: 208382 - DNA, 80 bp, synthetic construct; identical to SEQ ID NO: 23652
  source 1..80: mol_type = other DNA

SEQ ID NO: 208383 - DNA, 80 bp, synthetic construct; identical to SEQ ID NO: 23653
  source 1..80: mol_type = other DNA

SEQ ID NO: 208384 - DNA, 80 bp, synthetic construct; identical to SEQ ID NO: 23654
  source 1..80: mol_type = other DNA

SEQ ID NO: 208385 - DNA, 80 bp, synthetic construct; identical to SEQ ID NO: 23655
  source 1..80: mol_type = other DNA

SEQ ID NO: 208386 - DNA, 80 bp, synthetic construct; identical to SEQ ID NO: 23656
  source 1..80: mol_type = other DNA

SEQ ID NO: 208387 - DNA, 80 bp, synthetic construct; identical to SEQ ID NO: 23657
  source 1..80: mol_type = other DNA

SEQ ID NO: 208388 - DNA, 80 bp, synthetic construct; identical to SEQ ID NO: 23658
  source 1..80: mol_type = other DNA

SEQ ID NO: 208389 - DNA, 80 bp, synthetic construct; identical to SEQ ID NO: 23659
  source 1..80: mol_type = other DNA

SEQ ID NO: 208390 - DNA, 80 bp, synthetic construct; identical to SEQ ID NO: 23660
  source 1..80: mol_type = other DNA

SEQ ID NO: 208391 - DNA, 80 bp, synthetic construct; identical to SEQ ID NO: 23661
  source 1..80: mol_type = other DNA

SEQ ID NO: 208392 - DNA, 80 bp, synthetic construct; identical to SEQ ID NO: 23662
  source 1..80: mol_type = other DNA

SEQ ID NO: 208393 - DNA, 80 bp, synthetic construct; identical to SEQ ID NO: 23663
  source 1..80: mol_type = other DNA

SEQ ID NO: 208394 - DNA, 80 bp, synthetic construct; identical to SEQ ID NO: 23664
  source 1..80: mol_type = other DNA

SEQ ID NO: 208395 - DNA, 80 bp, synthetic construct; identical to SEQ ID NO: 23665
  source 1..80: mol_type = other DNA

SEQ ID NO: 208396 - DNA, 80 bp, synthetic construct; identical to SEQ ID NO: 23666
  source 1..80: mol_type = other DNA

SEQ ID NO: 208397 - DNA, 80 bp, synthetic construct; identical to SEQ ID NO: 23667
  source 1..80: mol_type = other DNA

SEQ ID NO: 208398 - DNA, 80 bp, synthetic construct; identical to SEQ ID NO: 23668
  source 1..80: mol_type = other DNA

SEQ ID NO: 208399 - DNA, 80 bp, synthetic construct; identical to SEQ ID NO: 23669
  source 1..80: mol_type = other DNA

SEQ ID NO: 208400 - DNA, 80 bp, synthetic construct; identical to SEQ ID NO: 23670
  source 1..80: mol_type = other DNA

SEQ ID NO: 208401 - DNA, 80 bp, synthetic construct; identical to SEQ ID NO: 23671
  source 1..80: mol_type = other DNA

SEQ ID NO: 208402 - DNA, 80 bp, synthetic construct; identical to SEQ ID NO: 23672
  source 1..80: mol_type = other DNA

SEQ ID NO: 208403 - DNA, 80 bp, synthetic construct; identical to SEQ ID NO: 23673
  source 1..80: mol_type = other DNA

SEQ ID NO: 208404 - DNA, 80 bp, synthetic construct; identical to SEQ ID NO: 23674
  source 1..80: mol_type = other DNA

SEQ ID NO: 208405 - DNA, 80 bp, synthetic construct; identical to SEQ ID NO: 23675
  source 1..80: mol_type = other DNA

SEQ ID NO: 208406 - DNA, 80 bp, synthetic construct; identical to SEQ ID NO: 23676
  source 1..80: mol_type = other DNA

SEQ ID NO: 208407 - DNA, 80 bp, synthetic construct; identical to SEQ ID NO: 23677
  source 1..80: mol_type = other DNA

SEQ ID NO: 208408 - DNA, 80 bp, synthetic construct; identical to SEQ ID NO: 23678
  source 1..80: mol_type = other DNA

SEQ ID NO: 208409 - DNA, 80 bp, synthetic construct; identical to SEQ ID NO: 23679
  source 1..80: mol_type = other DNA

SEQ ID NO: 208410 - DNA, 80 bp, synthetic construct; identical to SEQ ID NO: 23680
  source 1..80: mol_type = other DNA

SEQ ID NO: 208411 - DNA, 80 bp, synthetic construct; identical to SEQ ID NO: 23681
  source 1..80: mol_type = other DNA

SEQ ID NO: 208412 - DNA, 80 bp, synthetic construct; identical to SEQ ID NO: 23682
  source 1..80: mol_type = other DNA

SEQ ID NO: 208413 - DNA, 80 bp, synthetic construct; identical to SEQ ID NO: 23683
  source 1..80: mol_type = other DNA

SEQ ID NO: 208414 - DNA, 80 bp, synthetic construct; identical to SEQ ID NO: 23684
  source 1..80: mol_type = other DNA

SEQ ID NO: 208415 - DNA, 80 bp, synthetic construct; identical to SEQ ID NO: 23685
  source 1..80: mol_type = other DNA

SEQ ID NO: 208416 - DNA, 80 bp, synthetic construct; identical to SEQ ID NO: 23686
  source 1..80: mol_type = other DNA

SEQ ID NO: 208417 - DNA, 80 bp, synthetic construct; identical to SEQ ID NO: 23687
  source 1..80: mol_type = other DNA

SEQ ID NO: 208418 - DNA, 80 bp, synthetic construct; identical to SEQ ID NO: 23688
  source 1..80: mol_type = other DNA

SEQ ID NO: 208419 - DNA, 80 bp, synthetic construct; identical to SEQ ID NO: 23689
  source 1..80: mol_type = other DNA

SEQ ID NO: 208420 - DNA, 80 bp, synthetic construct; identical to SEQ ID NO: 23690
  source 1..80: mol_type = other DNA

SEQ ID NO: 208421 - DNA, 80 bp, synthetic construct; identical to SEQ ID NO: 23691
  source 1..80: mol_type = other DNA

SEQ ID NO: 208422 - DNA, 80 bp, synthetic construct; identical to SEQ ID NO: 23692
  source 1..80: mol_type = other DNA

SEQ ID NO: 208423 - DNA, 80 bp, synthetic construct; identical to SEQ ID NO: 23693
  source 1..80: mol_type = other DNA

SEQ ID NO: 208424 - DNA, 80 bp, synthetic construct; identical to SEQ ID NO: 23694
  source 1..80: mol_type = other DNA

SEQ ID NO: 208425 - DNA, 80 bp, synthetic construct; identical to SEQ ID NO: 23695
  source 1..80: mol_type = other DNA

SEQ ID NO: 208426 - DNA, 80 bp, synthetic construct; identical to SEQ ID NO: 23696
  source 1..80: mol_type = other DNA

SEQ ID NO: 208427 - DNA, 80 bp, synthetic construct; identical to SEQ ID NO: 23697
  source 1..80: mol_type = other DNA

SEQ ID NO: 208428 - DNA, 80 bp, synthetic construct; identical to SEQ ID NO: 23698
  source 1..80: mol_type = other DNA

SEQ ID NO: 208429 - DNA, 80 bp, synthetic construct; identical to SEQ ID NO: 23699
  source 1..80: mol_type = other DNA

SEQ ID NO: 208430 - DNA, 80 bp, synthetic construct; identical to SEQ ID NO: 23700
  source 1..80: mol_type = other DNA

SEQ ID NO: 208431 - DNA, 80 bp, synthetic construct; identical to SEQ ID NO: 23701
  source 1..80: mol_type = other DNA

SEQ ID NO: 208432 - DNA, 80 bp, synthetic construct; identical to SEQ ID NO: 23702
  source 1..80: mol_type = other DNA

SEQ ID NO: 208433 - DNA, 80 bp, synthetic construct; identical to SEQ ID NO: 23703
  source 1..80: mol_type = other DNA

SEQ ID NO: 208434 - DNA, 80 bp, synthetic construct; identical to SEQ ID NO: 23704
  source 1..80: mol_type = other DNA

SEQ ID NO: 208435 - DNA, 80 bp, synthetic construct; identical to SEQ ID NO: 23705
  source 1..80: mol_type = other DNA

SEQ ID NO: 208436 - DNA, 80 bp, synthetic construct; identical to SEQ ID NO: 23706
  source 1..80: mol_type = other DNA

SEQ ID NO: 208437 - DNA, 80 bp, synthetic construct; identical to SEQ ID NO: 23707
  source 1..80: mol_type = other DNA

SEQ ID NO: 208438 - DNA, 80 bp, synthetic construct; identical to SEQ ID NO: 23708
  source 1..80: mol_type = other DNA

SEQ ID NO: 208439 - DNA, 80 bp, synthetic construct; identical to SEQ ID NO: 23709
  source 1..80: mol_type = other DNA

SEQ ID NO: 208440 - DNA, 80 bp, synthetic construct; identical to SEQ ID NO: 23710
  source 1..80: mol_type = other DNA

SEQ ID NO: 208441 - DNA, 80 bp, synthetic construct; identical to SEQ ID NO: 23711
  source 1..80: mol_type = other DNA

SEQ ID NO: 208442 - DNA, 80 bp, synthetic construct; identical to SEQ ID NO: 23712
  source 1..80: mol_type = other DNA

SEQ ID NO: 208443 - DNA, 80 bp, synthetic construct; identical to SEQ ID NO: 23713
  source 1..80: mol_type = other DNA

SEQ ID NO: 208444 - DNA, 80 bp, synthetic construct; identical to SEQ ID NO: 23714
  source 1..80: mol_type = other DNA

SEQ ID NO: 208445 - DNA, 80 bp, synthetic construct; identical to SEQ ID NO: 23715
  source 1..80: mol_type = other DNA

SEQ ID NO: 208446 - DNA, 80 bp, synthetic construct; identical to SEQ ID NO: 23716
  source 1..80: mol_type = other DNA

SEQ ID NO: 208447 - DNA, 80 bp, synthetic construct; identical to SEQ ID NO: 23717
  source 1..80: mol_type = other DNA

SEQ ID NO: 208448 - DNA, 80 bp, synthetic construct; identical to SEQ ID NO: 23718
  source 1..80: mol_type = other DNA

SEQ ID NO: 208449 - DNA, 80 bp, synthetic construct; identical to SEQ ID NO: 23719
  source 1..80: mol_type = other DNA

SEQ ID NO: 208450 - DNA, 80 bp, synthetic construct; identical to SEQ ID NO: 23720
  source 1..80: mol_type = other DNA

SEQ ID NO: 208451 - DNA, 80 bp, synthetic construct; identical to SEQ ID NO: 23721
  source 1..80: mol_type = other DNA

SEQ ID NO: 208452 - DNA, 80 bp, synthetic construct; identical to SEQ ID NO: 23722
  source 1..80: mol_type = other DNA

SEQ ID NO: 208453 - DNA, 80 bp, synthetic construct; identical to SEQ ID NO: 23723
  source 1..80: mol_type = other DNA

SEQ ID NO: 208454 - DNA, 80 bp, synthetic construct; identical to SEQ ID NO: 23724
  source 1..80: mol_type = other DNA

SEQ ID NO: 208455 - DNA, 80 bp, synthetic construct; identical to SEQ ID NO: 23725
  source 1..80: mol_type = other DNA

SEQ ID NO: 208456 - DNA, 80 bp, synthetic construct; identical to SEQ ID NO: 23726
  source 1..80: mol_type = other DNA

SEQ ID NO: 208457 - DNA, 80 bp, synthetic construct; identical to SEQ ID NO: 23727
  source 1..80: mol_type = other DNA

SEQ ID NO: 208458 - DNA, 80 bp, synthetic construct; identical to SEQ ID NO: 23728
  source 1..80: mol_type = other DNA

SEQ ID NO: 208459 - DNA, 80 bp, synthetic construct; identical to SEQ ID NO: 23729
  source 1..80: mol_type = other DNA

SEQ ID NO: 208460 - DNA, 80 bp, synthetic construct; identical to SEQ ID NO: 23730
  source 1..80: mol_type = other DNA

SEQ ID NO: 208461 - DNA, 80 bp, synthetic construct; identical to SEQ ID NO: 23731
  source 1..80: mol_type = other DNA

SEQ ID NO: 208462 - DNA, 80 bp, synthetic construct; identical to SEQ ID NO: 23732
  source 1..80: mol_type = other DNA

SEQ ID NO: 208463 - DNA, 80 bp, synthetic construct; identical to SEQ ID NO: 23733
  source 1..80: mol_type = other DNA

SEQ ID NO: 208464 - DNA, 80 bp, synthetic construct; identical to SEQ ID NO: 23734
  source 1..80: mol_type = other DNA

SEQ ID NO: 208465 - DNA, 80 bp, synthetic construct; identical to SEQ ID NO: 23735
  source 1..80: mol_type = other DNA

SEQ ID NO: 208466 - DNA, 80 bp, synthetic construct; identical to SEQ ID NO: 23736
  source 1..80: mol_type = other DNA

SEQ ID NO: 208467 - DNA, 80 bp, synthetic construct; identical to SEQ ID NO: 23737
  source 1..80: mol_type = other DNA

SEQ ID NO: 208468 - DNA, 80 bp, synthetic construct; identical to SEQ ID NO: 23738
  source 1..80: mol_type = other DNA

SEQ ID NO: 208469 - DNA, 80 bp, synthetic construct; identical to SEQ ID NO: 23739
  source 1..80: mol_type = other DNA

SEQ ID NO: 208470 - DNA, 80 bp, synthetic construct; identical to SEQ ID NO: 23740
  source 1..80: mol_type = other DNA

SEQ ID NO: 208471 - DNA, 80 bp, synthetic construct; identical to SEQ ID NO: 23741
  source 1..80: mol_type = other DNA

SEQ ID NO: 208472 - DNA, 80 bp, synthetic construct; identical to SEQ ID NO: 23742
  source 1..80: mol_type = other DNA

SEQ ID NO: 208473 - DNA, 80 bp, synthetic construct; identical to SEQ ID NO: 23743
  source 1..80: mol_type = other DNA

SEQ ID NO: 208474 - DNA, 80 bp, synthetic construct; identical to SEQ ID NO: 23744
  source 1..80: mol_type = other DNA

SEQ ID NO: 208475 - DNA, 80 bp, synthetic construct; identical to SEQ ID NO: 23745
  source 1..80: mol_type = other DNA

SEQ ID NO: 208476 - DNA, 80 bp, synthetic construct; identical to SEQ ID NO: 23746
  source 1..80: mol_type = other DNA

SEQ ID NO: 208477 - DNA, 80 bp, synthetic construct; identical to SEQ ID NO: 23747
  source 1..80: mol_type = other DNA

SEQ ID NO: 208478 - DNA, 80 bp, synthetic construct; identical to SEQ ID NO: 23748
  source 1..80: mol_type = other DNA

SEQ ID NO: 208479 - DNA, 80 bp, synthetic construct; identical to SEQ ID NO: 23749
  source 1..80: mol_type = other DNA

SEQ ID NO: 208480 - DNA, 80 bp, synthetic construct; identical to SEQ ID NO: 23750
  source 1..80: mol_type = other DNA

SEQ ID NO: 208481 - DNA, 80 bp, synthetic construct; identical to SEQ ID NO: 23751
  source 1..80: mol_type = other DNA

SEQ ID NO: 208482 - DNA, 80 bp, synthetic construct; identical to SEQ ID NO: 23752
  source 1..80: mol_type = other DNA

SEQ ID NO: 208483 - DNA, 80 bp, synthetic construct; identical to SEQ ID NO: 23753
  source 1..80: mol_type = other DNA

SEQ ID NO: 208484 - DNA, 80 bp, synthetic construct; identical to SEQ ID NO: 23754
  source 1..80: mol_type = other DNA

SEQ ID NO: 208485 - DNA, 80 bp, synthetic construct; identical to SEQ ID NO: 23755
  source 1..80: mol_type = other DNA

SEQ ID NO: 208486 - DNA, 80 bp, synthetic construct; identical to SEQ ID NO: 23756
  source 1..80: mol_type = other DNA

SEQ ID NO: 208487 - DNA, 80 bp, synthetic construct; identical to SEQ ID NO: 23757
  source 1..80: mol_type = other DNA

SEQ ID NO: 208488 - DNA, 80 bp, synthetic construct; identical to SEQ ID NO: 23758
  source 1..80: mol_type = other DNA

SEQ ID NO: 208489 - DNA, 80 bp, synthetic construct; identical to SEQ ID NO: 23759
  source 1..80: mol_type = other DNA

SEQ ID NO: 208490 - DNA, 80 bp, synthetic construct; identical to SEQ ID NO: 23760
  source 1..80: mol_type = other DNA

SEQ ID NO: 208491 - DNA, 80 bp, synthetic construct; identical to SEQ ID NO: 23761
  source 1..80: mol_type = other DNA

SEQ ID NO: 208492 - DNA, 80 bp, synthetic construct; identical to SEQ ID NO: 23762
  source 1..80: mol_type = other DNA

SEQ ID NO: 208493 - DNA, 80 bp, synthetic construct; identical to SEQ ID NO: 23763
  source 1..80: mol_type = other DNA

SEQ ID NO: 208494 - DNA, 80 bp, synthetic construct; identical to SEQ ID NO: 23764
  source 1..80: mol_type = other DNA

SEQ ID NO: 208495 - DNA, 80 bp, synthetic construct; identical to SEQ ID NO: 23765
  source 1..80: mol_type = other DNA

SEQ ID NO: 208496 - DNA, 80 bp, synthetic construct; identical to SEQ ID NO: 23766
  source 1..80: mol_type = other DNA

SEQ ID NO: 208497 - DNA, 80 bp, synthetic construct; identical to SEQ ID NO: 23767
  source 1..80: mol_type = other DNA

SEQ ID NO: 208498 - DNA, 80 bp, synthetic construct; identical to SEQ ID NO: 23768
  source 1..80: mol_type = other DNA

SEQ ID NO: 208499 - DNA, 80 bp, synthetic construct; identical to SEQ ID NO: 23769
  source 1..80: mol_type = other DNA

SEQ ID NO: 208500 - DNA, 80 bp, synthetic construct; identical to SEQ ID NO: 23770
  source 1..80: mol_type = other DNA

SEQ ID NO: 208501 - DNA, 80 bp, synthetic construct; identical to SEQ ID NO: 23771
  source 1..80: mol_type = other DNA

SEQ ID NO: 208502 - DNA, 80 bp, synthetic construct; identical to SEQ ID NO: 23772
  source 1..80: mol_type = other DNA

SEQ ID NO: 208503 - DNA, 80 bp, synthetic construct; identical to SEQ ID NO: 23773
  source 1..80: mol_type = other DNA

SEQ ID NO: 208504 - DNA, 80 bp, synthetic construct; identical to SEQ ID NO: 23774
  source 1..80: mol_type = other DNA

SEQ ID NO: 208505 - DNA, 80 bp, synthetic construct; identical to SEQ ID NO: 23775
  source 1..80: mol_type = other DNA

SEQ ID NO: 208506 - DNA, 80 bp, synthetic construct; identical to SEQ ID NO: 23776
  source 1..80: mol_type = other DNA

SEQ ID NO: 208507 - DNA, 80 bp, synthetic construct; identical to SEQ ID NO: 23777
  source 1..80: mol_type = other DNA

SEQ ID NO: 208508 - DNA, 80 bp, synthetic construct; identical to SEQ ID NO: 23778
  source 1..80: mol_type = other DNA

SEQ ID NO: 208509 - DNA, 80 bp, synthetic construct; identical to SEQ ID NO: 23779
  source 1..80: mol_type = other DNA

SEQ ID NO: 208510 - DNA, 80 bp, synthetic construct; identical to SEQ ID NO: 23780
  source 1..80: mol_type = other DNA

SEQ ID NO: 208511 - DNA, 80 bp, synthetic construct; identical to SEQ ID NO: 23781
  source 1..80: mol_type = other DNA

SEQ ID NO: 208512 - DNA, 80 bp, synthetic construct; identical to SEQ ID NO: 23782
  source 1..80: mol_type = other DNA

SEQ ID NO: 208513 - DNA, 80 bp, synthetic construct; identical to SEQ ID NO: 23783
  source 1..80: mol_type = other DNA

SEQ ID NO: 208514 - DNA, 80 bp, synthetic construct; identical to SEQ ID NO: 23784
  source 1..80: mol_type = other DNA

SEQ ID NO: 208515 - DNA, 80 bp, synthetic construct; identical to SEQ ID NO: 23785
  source 1..80: mol_type = other DNA

SEQ ID NO: 208516 - DNA, 80 bp, synthetic construct; identical to SEQ ID NO: 23786
  source 1..80: mol_type = other DNA

SEQ ID NO: 208517 - DNA, 80 bp, synthetic construct; identical to SEQ ID NO: 23787
  source 1..80: mol_type = other DNA

SEQ ID NO: 208518 - DNA, 80 bp, synthetic construct; identical to SEQ ID NO: 23788
  source 1..80: mol_type = other DNA

SEQ ID NO: 208519 - DNA, 80 bp, synthetic construct; identical to SEQ ID NO: 23789
  source 1..80: mol_type = other DNA

SEQ ID NO: 208520 - DNA, 80 bp, synthetic construct; identical to SEQ ID NO: 23790
  source 1..80: mol_type = other DNA

SEQ ID NO: 208521 - DNA, 80 bp, synthetic construct; identical to SEQ ID NO: 23791
  source 1..80: mol_type = other DNA

SEQ ID NO: 208522 - DNA, 80 bp, synthetic construct; identical to SEQ ID NO: 23792
  source 1..80: mol_type = other DNA

SEQ ID NO: 208523 - DNA, 80 bp, synthetic construct; identical to SEQ ID NO: 23793
  source 1..80: mol_type = other DNA

SEQ ID NO: 208524 - DNA, 80 bp, synthetic construct; identical to SEQ ID NO: 23794
  source 1..80: mol_type = other DNA

SEQ ID NO: 208525 - DNA, 80 bp, synthetic construct; identical to SEQ ID NO: 23795
  source 1..80: mol_type = other DNA

SEQ ID NO: 208526 - DNA, 80 bp, synthetic construct; identical to SEQ ID NO: 23796
  source 1..80: mol_type = other DNA

SEQ ID NO: 208527 - DNA, 80 bp, synthetic construct; identical to SEQ ID NO: 23797
  source 1..80: mol_type = other DNA

SEQ ID NO: 208528 - DNA, 80 bp, synthetic construct; identical to SEQ ID NO: 23798
  source 1..80: mol_type = other DNA

SEQ ID NO: 208529 - DNA, 80 bp, synthetic construct; identical to SEQ ID NO: 23799
  source 1..80: mol_type = other DNA

SEQ ID NO: 208530 - DNA, 80 bp, synthetic construct; identical to SEQ ID NO: 23800
  source 1..80: mol_type = other DNA

SEQ ID NO: 208531 - DNA, 80 bp, synthetic construct; identical to SEQ ID NO: 23801
  source 1..80: mol_type = other DNA

SEQ ID NO: 208532 - DNA, 80 bp, synthetic construct; identical to SEQ ID NO: 23802
  source 1..80: mol_type = other DNA

SEQ ID NO: 208533 - DNA, 80 bp, synthetic construct; identical to SEQ ID NO: 23803
  source 1..80: mol_type = other DNA

SEQ ID NO: 208534 - DNA, 80 bp, synthetic construct; identical to SEQ ID NO: 23804
  source 1..80: mol_type = other DNA

SEQ ID NO: 208535 - DNA, 80 bp, synthetic construct; identical to SEQ ID NO: 23805
  source 1..80: mol_type = other DNA

SEQ ID NO: 208536 - DNA, 80 bp, synthetic construct; identical to SEQ ID NO: 23806
  source 1..80: mol_type = other DNA

SEQ ID NO: 208537 - DNA, 80 bp, synthetic construct; identical to SEQ ID NO: 23807
  source 1..80: mol_type = other DNA

SEQ ID NO: 208538 - DNA, 80 bp, synthetic construct; identical to SEQ ID NO: 23808
  source 1..80: mol_type = other DNA

SEQ ID NO: 208539 - DNA, 80 bp, synthetic construct; identical to SEQ ID NO: 23809
  source 1..80: mol_type = other DNA

SEQ ID NO: 208540 - DNA, 80 bp, synthetic construct; identical to SEQ ID NO: 23810
  source 1..80: mol_type = other DNA

SEQ ID NO: 208541 - DNA, 80 bp, synthetic construct; identical to SEQ ID NO: 23811
  source 1..80: mol_type = other DNA

SEQ ID NO: 208542 - DNA, 80 bp, synthetic construct; identical to SEQ ID NO: 23812
  source 1..80: mol_type = other DNA

SEQ ID NO: 208543 - DNA, 80 bp, synthetic construct; identical to SEQ ID NO: 23813
  source 1..80: mol_type = other DNA

SEQ ID NO: 208544 - DNA, 80 bp, synthetic construct; identical to SEQ ID NO: 23814
  source 1..80: mol_type = other DNA

SEQ ID NO: 208545 - DNA, 80 bp, synthetic construct; identical to SEQ ID NO: 23815
  source 1..80: mol_type = other DNA

SEQ ID NO: 208546 - DNA, 80 bp, synthetic construct; identical to SEQ ID NO: 23816
  source 1..80: mol_type = other DNA

SEQ ID NO: 208547 - DNA, 80 bp, synthetic construct; identical to SEQ ID NO: 23817
  source 1..80: mol_type = other DNA

SEQ ID NO: 208548 - DNA, 80 bp, synthetic construct; identical to SEQ ID NO: 23818
  source 1..80: mol_type = other DNA

SEQ ID NO: 208549 - DNA, 80 bp, synthetic construct; identical to SEQ ID NO: 23819
  source 1..80: mol_type = other DNA

SEQ ID NO: 208550 - DNA, 80 bp, synthetic construct; identical to SEQ ID NO: 23820
  source 1..80: mol_type = other DNA

SEQ ID NO: 208551 - DNA, 80 bp, synthetic construct; identical to SEQ ID NO: 23821
  source 1..80: mol_type = other DNA

SEQ ID NO: 208552 - DNA, 80 bp, synthetic construct; identical to SEQ ID NO: 23822
  source 1..80: mol_type = other DNA

SEQ ID NO: 208553 - DNA, 80 bp, synthetic construct; identical to SEQ ID NO: 23823
  source 1..80: mol_type = other DNA

SEQ ID NO: 208554 - DNA, 80 bp, synthetic construct; identical to SEQ ID NO: 23824
  source 1..80: mol_type = other DNA

SEQ ID NO: 208555 - DNA, 80 bp, synthetic construct; identical to SEQ ID NO: 23825
  source 1..80: mol_type = other DNA

SEQ ID NO: 208556 - DNA, 80 bp, synthetic construct; identical to SEQ ID NO: 23826
  source 1..80: mol_type = other DNA

SEQ ID NO: 208557 - DNA, 80 bp, synthetic construct; identical to SEQ ID NO: 23827
  source 1..80: mol_type = other DNA

SEQ ID NO: 208558 - DNA, 80 bp, synthetic construct; identical to SEQ ID NO: 23828
  source 1..80: mol_type = other DNA

SEQ ID NO: 208559 - DNA, 80 bp, synthetic construct; identical to SEQ ID NO: 23829
  source 1..80: mol_type = other DNA

SEQ ID NO: 208560 - DNA, 80 bp, synthetic construct; identical to SEQ ID NO: 23830
  source 1..80: mol_type = other DNA

SEQ ID NO: 208561 - DNA, 80 bp, synthetic construct; identical to SEQ ID NO: 23831
  source 1..80: mol_type = other DNA

SEQ ID NO: 208562 - DNA, 80 bp, synthetic construct; identical to SEQ ID NO: 23832
  source 1..80: mol_type = other DNA

SEQ ID NO: 208563 - DNA, 80 bp, synthetic construct; identical to SEQ ID NO: 23833
  source 1..80: mol_type = other DNA

SEQ ID NO: 208564 - DNA, 80 bp, synthetic construct; identical to SEQ ID NO: 23834
  source 1..80: mol_type = other DNA

SEQ ID NO: 208565 - DNA, 80 bp, synthetic construct; identical to SEQ ID NO: 23835
  source 1..80: mol_type = other DNA

SEQ ID NO: 208566 - DNA, 80 bp, synthetic construct; identical to SEQ ID NO: 23836
  source 1..80: mol_type = other DNA

SEQ ID NO: 208567 - DNA, 80 bp, synthetic construct; identical to SEQ ID NO: 23837
  source 1..80: mol_type = other DNA

SEQ ID NO: 208568 - DNA, 80 bp, synthetic construct; identical to SEQ ID NO: 23838
  source 1..80: mol_type = other DNA

SEQ ID NO: 208569 - DNA, 80 bp, synthetic construct; identical to SEQ ID NO: 23839
  source 1..80: mol_type = other DNA

SEQ ID NO: 208570 - DNA, 80 bp, synthetic construct; identical to SEQ ID NO: 23840
  source 1..80: mol_type = other DNA

SEQ ID NO: 208571 - DNA, 80 bp, synthetic construct; identical to SEQ ID NO: 23841
  source 1..80: mol_type = other DNA

SEQ ID NO: 208572 - DNA, 80 bp, synthetic construct; identical to SEQ ID NO: 23842
  source 1..80: mol_type = other DNA

SEQ ID NO: 208573 - DNA, 80 bp, synthetic construct; identical to SEQ ID NO: 23843
  source 1..80: mol_type = other DNA

SEQ ID NO: 208574 - DNA, 80 bp, synthetic construct; identical to SEQ ID NO: 23844
  source 1..80: mol_type = other DNA

SEQ ID NO: 208575 - DNA, 80 bp, synthetic construct; identical to SEQ ID NO: 23845
  source 1..80: mol_type = other DNA

SEQ ID NO: 208576 - DNA, 80 bp, synthetic construct; identical to SEQ ID NO: 23846
  source 1..80: mol_type = other DNA

SEQ ID NO: 208577 - DNA, 80 bp, synthetic construct; identical to SEQ ID NO: 23847
  source 1..80: mol_type = other DNA

SEQ ID NO: 208578 - DNA, 80 bp, synthetic construct; identical to SEQ ID NO: 23848
  source 1..80: mol_type = other DNA

SEQ ID NO: 208579 - DNA, 80 bp, synthetic construct; identical to SEQ ID NO: 23849
  source 1..80: mol_type = other DNA

SEQ ID NO: 208580 - DNA, 80 bp, synthetic construct; identical to SEQ ID NO: 23850
  source 1..80: mol_type = other DNA

SEQ ID NO: 208581 - DNA, 80 bp, synthetic construct; identical to SEQ ID NO: 23851
  source 1..80: mol_type = other DNA

SEQ ID NO: 208582 - DNA, 80 bp, synthetic construct; identical to SEQ ID NO: 23852
  source 1..80: mol_type = other DNA

SEQ ID NO: 208583 - DNA, 80 bp, synthetic construct; identical to SEQ ID NO: 23853
  source 1..80: mol_type = other DNA

SEQ ID NO: 208584 - DNA, 80 bp, synthetic construct; identical to SEQ ID NO: 23854
  source 1..80: mol_type = other DNA

SEQ ID NO: 208585 - DNA, 80 bp, synthetic construct; identical to SEQ ID NO: 23855
  source 1..80: mol_type = other DNA

SEQ ID NO: 208586 - DNA, 80 bp, synthetic construct; identical to SEQ ID NO: 23856
  source 1..80: mol_type = other DNA

SEQ ID NO: 208587 - DNA, 80 bp, synthetic construct; identical to SEQ ID NO: 23857
  source 1..80: mol_type = other DNA

SEQ ID NO: 208588 - DNA, 80 bp, synthetic construct; identical to SEQ ID NO: 23858
  source 1..80: mol_type = other DNA

SEQ ID NO: 208589 - DNA, 80 bp, synthetic construct; identical to SEQ ID NO: 23859
  source 1..80: mol_type = other DNA

SEQ ID NO: 208590 - DNA, 80 bp, synthetic construct; identical to SEQ ID NO: 23860
  source 1..80: mol_type = other DNA

SEQ ID NO: 208591 - DNA, 80 bp, synthetic construct; identical to SEQ ID NO: 23861
  source 1..80: mol_type = other DNA

SEQ ID NO: 208592 - DNA, 80 bp, synthetic construct; identical to SEQ ID NO: 23862
  source 1..80: mol_type = other DNA

SEQ ID NO: 208593 - DNA, 80 bp, synthetic construct; identical to SEQ ID NO: 23863
  source 1..80: mol_type = other DNA

SEQ ID NO: 208594 - DNA, 80 bp, synthetic construct; identical to SEQ ID NO: 23864
  source 1..80: mol_type = other DNA

SEQ ID NO: 208595 - DNA, 80 bp, synthetic construct; identical to SEQ ID NO: 23865
  source 1..80: mol_type = other DNA

SEQ ID NO: 208596 - DNA, 80 bp, synthetic construct; identical to SEQ ID NO: 23866
  source 1..80: mol_type = other DNA

SEQ ID NO: 208597 - DNA, 80 bp, synthetic construct; identical to SEQ ID NO: 23867
  source 1..80: mol_type = other DNA

SEQ ID NO: 208598 - DNA, 80 bp, synthetic construct; identical to SEQ ID NO: 23868
  source 1..80: mol_type = other DNA

SEQ ID NO: 208599 - DNA, 80 bp, synthetic construct; identical to SEQ ID NO: 23869
  source 1..80: mol_type = other DNA

SEQ ID NO: 208600 - DNA, 80 bp, synthetic construct; identical to SEQ ID NO: 23870
  source 1..80: mol_type = other DNA

SEQ ID NO: 208601 - DNA, 80 bp, synthetic construct; identical to SEQ ID NO: 23871
  source 1..80: mol_type = other DNA

SEQ ID NO: 208602 - DNA, 80 bp, synthetic construct; identical to SEQ ID NO: 23872
  source 1..80: mol_type = other DNA

SEQ ID NO: 208603 - DNA, 80 bp, synthetic construct; identical to SEQ ID NO: 23873
  source 1..80: mol_type = other DNA

SEQ ID NO: 208604 - DNA, 80 bp, synthetic construct; identical to SEQ ID NO: 23874
  source 1..80: mol_type = other DNA

SEQ ID NO: 208605 - DNA, 80 bp, synthetic construct; identical to SEQ ID NO: 23875
  source 1..80: mol_type = other DNA

SEQ ID NO: 208606 - DNA, 80 bp, synthetic construct; identical to SEQ ID NO: 23876
  source 1..80: mol_type = other DNA

SEQ ID NO: 208607 - DNA, 80 bp, synthetic construct; identical to SEQ ID NO: 23877
  source 1..80: mol_type = other DNA

SEQ ID NO: 208608 - DNA, 80 bp, synthetic construct; identical to SEQ ID NO: 23878
  source 1..80: mol_type = other DNA

SEQ ID NO: 208609 - DNA, 80 bp, synthetic construct; identical to SEQ ID NO: 23879
  source 1..80: mol_type = other DNA

SEQ ID NO: 208610 - DNA, 80 bp, synthetic construct; identical to SEQ ID NO: 23880
  source 1..80: mol_type = other DNA

SEQ ID NO: 208611 - DNA, 80 bp, synthetic construct; identical to SEQ ID NO: 23881
  source 1..80: mol_type = other DNA

SEQ ID NO: 208612 - DNA, 80 bp, synthetic construct; identical to SEQ ID NO: 23882
  source 1..80: mol_type = other DNA

SEQ ID NO: 208613 - DNA, 80 bp, synthetic construct; identical to SEQ ID NO: 23883
  source 1..80: mol_type = other DNA

SEQ ID NO: 208614 - DNA, 80 bp, synthetic construct; identical to SEQ ID NO: 23884
  source 1..80: mol_type = other DNA

SEQ ID NO: 208615 - DNA, 80 bp, synthetic construct; identical to SEQ ID NO: 23885
  source 1..80: mol_type = other DNA

SEQ ID NO: 208616 - DNA, 80 bp, synthetic construct; identical to SEQ ID NO: 23886
  source 1..80: mol_type = other DNA

SEQ ID NO: 208617 - DNA, 80 bp, synthetic construct; identical to SEQ ID NO: 23887
  source 1..80: mol_type = other DNA

SEQ ID NO: 208618 - DNA, 80 bp, synthetic construct; identical to SEQ ID NO: 23888
  source 1..80: mol_type = other DNA

SEQ ID NO: 208619 - DNA, 80 bp, synthetic construct; identical to SEQ ID NO: 23889
  source 1..80: mol_type = other DNA

SEQ ID NO: 208620 - DNA, 80 bp, synthetic construct; identical to SEQ ID NO: 23890
  source 1..80: mol_type = other DNA

SEQ ID NO: 208621 - DNA, 80 bp, synthetic construct; identical to SEQ ID NO: 23891
  source 1..80: mol_type = other DNA

SEQ ID NO: 208622 - DNA, 80 bp, synthetic construct; identical to SEQ ID NO: 23892
  source 1..80: mol_type = other DNA

SEQ ID NO: 208623 - DNA, 80 bp, synthetic construct; identical to SEQ ID NO: 23893
  source 1..80: mol_type = other DNA

SEQ ID NO: 208624 - DNA, 80 bp, synthetic construct; identical to SEQ ID NO: 23894
  source 1..80: mol_type = other DNA

SEQ ID NO: 208625 - DNA, 80 bp, synthetic construct; identical to SEQ ID NO: 23895
  source 1..80: mol_type = other DNA

SEQ ID NO: 208626 - DNA, 80 bp, synthetic construct; identical to SEQ ID NO: 23896
  source 1..80: mol_type = other DNA

SEQ ID NO: 208627 - DNA, 80 bp, synthetic construct; identical to SEQ ID NO: 23897
  source 1..80: mol_type = other DNA

SEQ ID NO: 208628 - DNA, 80 bp, synthetic construct; identical to SEQ ID NO: 23898
  source 1..80: mol_type = other DNA

SEQ ID NO: 208629 - DNA, 80 bp, synthetic construct; identical to SEQ ID NO: 23899
  source 1..80: mol_type = other DNA

SEQ ID NO: 208630 - DNA, 80 bp, synthetic construct; identical to SEQ ID NO: 23900
  source 1..80: mol_type = other DNA

SEQ ID NO: 208631 - DNA, 80 bp, synthetic construct; identical to SEQ ID NO: 23901
  source 1..80: mol_type = other DNA

SEQ ID NO: 208632 - DNA, 80 bp, synthetic construct; identical to SEQ ID NO: 23902
  source 1..80: mol_type = other DNA

SEQ ID NO: 208633 - DNA, 80 bp, synthetic construct; identical to SEQ ID NO: 23903
  source 1..80: mol_type = other DNA

SEQ ID NO: 208634 - DNA, 80 bp, synthetic construct; identical to SEQ ID NO: 23904
  source 1..80: mol_type = other DNA

SEQ ID NO: 208635 - DNA, 80 bp, synthetic construct; identical to SEQ ID NO: 23905
  source 1..80: mol_type = other DNA

SEQ ID NO: 208636 - DNA, 80 bp, synthetic construct; identical to SEQ ID NO: 23906
  source 1..80: mol_type = other DNA

SEQ ID NO: 208637 - DNA, 80 bp, synthetic construct; identical to SEQ ID NO: 23907
  source 1..80: mol_type = other DNA

SEQ ID NO: 208638 - DNA, 80 bp, synthetic construct; identical to SEQ ID NO: 23908
  source 1..80: mol_type = other DNA

SEQ ID NO: 208639 - DNA, 80 bp, synthetic construct; identical to SEQ ID NO: 23909
  source 1..80: mol_type = other DNA

SEQ ID NO: 208640 - DNA, 80 bp, synthetic construct; identical to SEQ ID NO: 23910
  source 1..80: mol_type = other DNA

SEQ ID NO: 208641 - DNA, 80 bp, synthetic construct; identical to SEQ ID NO: 23911
  source 1..80: mol_type = other DNA

SEQ ID NO: 208642 - DNA, 80 bp, synthetic construct; identical to SEQ ID NO: 23912
  source 1..80: mol_type = other DNA

SEQ ID NO: 208643 - DNA, 80 bp, synthetic construct; identical to SEQ ID NO: 23913
  source 1..80: mol_type = other DNA

SEQ ID NO: 208644 - DNA, 80 bp, synthetic construct; identical to SEQ ID NO: 23914
  source 1..80: mol_type = other DNA

SEQ ID NO: 208645 - DNA, 80 bp, synthetic construct; identical to SEQ ID NO: 23915
  source 1..80: mol_type = other DNA

SEQ ID NO: 208646 - DNA, 80 bp, synthetic construct; identical to SEQ ID NO: 23916
  source 1..80: mol_type = other DNA

SEQ ID NO: 208647 - DNA, 80 bp, synthetic construct; identical to SEQ ID NO: 23917
  source 1..80: mol_type = other DNA

SEQ ID NO: 208648 - DNA, 80 bp, synthetic construct; identical to SEQ ID NO: 23918
  source 1..80: mol_type = other DNA

SEQ ID NO: 208649 - DNA, 80 bp, synthetic construct; identical to SEQ ID NO: 23919
  source 1..80: mol_type = other DNA

SEQ ID NO: 208650 - DNA, 80 bp, synthetic construct; identical to SEQ ID NO: 23920
  source 1..80: mol_type = other DNA

SEQ ID NO: 208651 - DNA, 80 bp, synthetic construct; identical to SEQ ID NO: 23921
  source 1..80: mol_type = other DNA

SEQ ID NO: 208652 - DNA, 80 bp, synthetic construct; identical to SEQ ID NO: 23922
  source 1..80: mol_type = other DNA

SEQ ID NO: 208653 - DNA, 80 bp, synthetic construct; identical to SEQ ID NO: 23923
  source 1..80: mol_type = other DNA

SEQ ID NO: 208654 - DNA, 80 bp, synthetic construct; identical to SEQ ID NO: 23924
  source 1..80: mol_type = other DNA

SEQ ID NO: 208655 - DNA, 80 bp, synthetic construct; identical to SEQ ID NO: 23925
  source 1..80: mol_type = other DNA

SEQ ID NO: 208656 - DNA, 80 bp, synthetic construct; identical to SEQ ID NO: 23926
  source 1..80: mol_type = other DNA

SEQ ID NO: 208657 - DNA, 80 bp, synthetic construct; identical to SEQ ID NO: 23927
  source 1..80: mol_type = other DNA

SEQ ID NO: 208658 - DNA, 80 bp, synthetic construct; identical to SEQ ID NO: 23928
  source 1..80: mol_type = other DNA

SEQ ID NO: 208659 - DNA, 80 bp, synthetic construct; identical to SEQ ID NO: 23929
  source 1..80: mol_type = other DNA

SEQ ID NO: 208660 - DNA, 80 bp, synthetic construct; identical to SEQ ID NO: 23930
  source 1..80: mol_type = other DNA

SEQ ID NO: 208661 - DNA, 80 bp, synthetic construct; identical to SEQ ID NO: 23931
  source 1..80: mol_type = other DNA

SEQ ID NO: 208662 - DNA, 80 bp, synthetic construct; identical to SEQ ID NO: 23932
  source 1..80: mol_type = other DNA

SEQ ID NO: 208663 - DNA, 80 bp, synthetic construct; identical to SEQ ID NO: 23933
  source 1..80: mol_type = other DNA

SEQ ID NO: 208664 - DNA, 80 bp, synthetic construct; identical to SEQ ID NO: 23934
  source 1..80: mol_type = other DNA

SEQ ID NO: 208665 - DNA, 80 bp, synthetic construct; identical to SEQ ID NO: 23935
  source 1..80: mol_type = other DNA

SEQ ID NO: 208666 - DNA, 80 bp, synthetic construct; identical to SEQ ID NO: 23936
  source 1..80: mol_type = other DNA

SEQ ID NO: 208667 - DNA, 80 bp, synthetic construct; identical to SEQ ID NO: 23937
  source 1..80: mol_type = other DNA

SEQ ID NO: 208668 - DNA, 80 bp, synthetic construct; identical to SEQ ID NO: 23938
  source 1..80: mol_type = other DNA

SEQ ID NO: 208669 - DNA, 80 bp, synthetic construct; identical to SEQ ID NO: 23939
  source 1..80: mol_type = other DNA

SEQ ID NO: 208670 - DNA, 80 bp, synthetic construct; identical to SEQ ID NO: 23940
  source 1..80: mol_type = other DNA

SEQ ID NO: 208671 - DNA, 80 bp, synthetic construct; identical to SEQ ID NO: 23941
  source 1..80: mol_type = other DNA

SEQ ID NO: 208672 - DNA, 80 bp, synthetic construct; identical to SEQ ID NO: 23942
  source 1..80: mol_type = other DNA

SEQ ID NO: 208673 - DNA, 80 bp, synthetic construct; identical to SEQ ID NO: 23943
  source 1..80: mol_type = other DNA

SEQ ID NO: 208674 - DNA, 80 bp, synthetic construct; identical to SEQ ID NO: 23944
  source 1..80: mol_type = other DNA

SEQ ID NO: 208675 - DNA, 80 bp, synthetic construct; identical to SEQ ID NO: 23945
  source 1..80: mol_type = other DNA

SEQ ID NO: 208676 - DNA, 80 bp, synthetic construct; identical to SEQ ID NO: 23946
  source 1..80: mol_type = other DNA

SEQ ID NO: 208677 - DNA, 80 bp, synthetic construct; identical to SEQ ID NO: 23947
  source 1..80: mol_type = other DNA

SEQ ID NO: 208678 - DNA, 80 bp, synthetic construct; identical to SEQ ID NO: 23948
  source 1..80: mol_type = other DNA

SEQ ID NO: 208679 - DNA, 80 bp, synthetic construct; identical to SEQ ID NO: 23949
  source 1..80: mol_type = other DNA

SEQ ID NO: 208680 - DNA, 80 bp, synthetic construct; identical to SEQ ID NO: 23950
  source 1..80: mol_type = other DNA

SEQ ID NO: 208681 - DNA, 80 bp, synthetic construct; identical to SEQ ID NO: 23951
  source 1..80: mol_type = other DNA

SEQ ID NO: 208682 - DNA, 80 bp, synthetic construct; identical to SEQ ID NO: 23952
  source 1..80: mol_type = other DNA

SEQ ID NO: 208683 - DNA, 80 bp, synthetic construct; identical to SEQ ID NO: 23953
  source 1..80: mol_type = other DNA

SEQ ID NO: 208684 - DNA, 80 bp, synthetic construct; identical to SEQ ID NO: 23954
  source 1..80: mol_type = other DNA

SEQ ID NO: 208685 - DNA, 80 bp, synthetic construct; identical to SEQ ID NO: 23955
  source 1..80: mol_type = other DNA

SEQ ID NO: 208686 - DNA, 80 bp, synthetic construct; identical to SEQ ID NO: 23956
  source 1..80: mol_type = other DNA

SEQ ID NO: 208687 - DNA, 80 bp, synthetic construct; identical to SEQ ID NO: 23957
  source 1..80: mol_type = other DNA

SEQ ID NO: 208688 - DNA, 80 bp, synthetic construct; identical to SEQ ID NO: 23958
  source 1..80: mol_type = other DNA

SEQ ID NO: 208689 - DNA, 80 bp, synthetic construct; identical to SEQ ID NO: 23959
  source 1..80: mol_type = other DNA

SEQ ID NO: 208690 - DNA, 80 bp, synthetic construct; identical to SEQ ID NO: 23960
  source 1..80: mol_type = other DNA

SEQ ID NO: 208691 - DNA, 80 bp, synthetic construct; identical to SEQ ID NO: 23961
  source 1..80: mol_type = other DNA

SEQ ID NO: 208692 - DNA, 80 bp, synthetic construct; identical to SEQ ID NO: 23962
  source 1..80: mol_type = other DNA

SEQ ID NO: 208693 - DNA, 80 bp, synthetic construct; identical to SEQ ID NO: 23963
  source 1..80: mol_type = other DNA

SEQ ID NO: 208694 - DNA, 80 bp, synthetic construct; identical to SEQ ID NO: 23964
  source 1..80: mol_type = other DNA

SEQ ID NO: 208695 - DNA, 80 bp, synthetic construct; identical to SEQ ID NO: 23965
  source 1..80: mol_type = other DNA

SEQ ID NO: 208696 - DNA, 80 bp, synthetic construct; identical to SEQ ID NO: 23966
  source 1..80: mol_type = other DNA

SEQ ID NO: 208697 - DNA, 80 bp, synthetic construct; identical to SEQ ID NO: 23967
  source 1..80: mol_type = other DNA

SEQ ID NO: 208698 - DNA, 80 bp, synthetic construct; identical to SEQ ID NO: 23968
  source 1..80: mol_type = other DNA

SEQ ID NO: 208699 - DNA, 80 bp, synthetic construct; identical to SEQ ID NO: 23969
  source 1..80: mol_type = other DNA

SEQ ID NO: 208700 - DNA, 80 bp, synthetic construct; identical to SEQ ID NO: 23970
  source 1..80: mol_type = other DNA

SEQ ID NO: 208701 - DNA, 80 bp, synthetic construct; identical to SEQ ID NO: 23971
  source 1..80: mol_type = other DNA

SEQ ID NO: 208702 - DNA, 80 bp, synthetic construct; identical to SEQ ID NO: 23972
  source 1..80: mol_type = other DNA

SEQ ID NO: 208703 - DNA, 80 bp, synthetic construct; identical to SEQ ID NO: 23973
  source 1..80: mol_type = other DNA

SEQ ID NO: 208704 - DNA, 80 bp, synthetic construct; identical to SEQ ID NO: 23974
  source 1..80: mol_type = other DNA

SEQ ID NO: 208705 - DNA, 80 bp, synthetic construct; identical to SEQ ID NO: 23975
  source 1..80: mol_type = other DNA

SEQ ID NO: 208706 - DNA, 80 bp, synthetic construct; identical to SEQ ID NO: 23976
  source 1..80: mol_type = other DNA

SEQ ID NO: 208707 - DNA, 80 bp, synthetic construct; identical to SEQ ID NO: 23977
  source 1..80: mol_type = other DNA

SEQ ID NO: 208708 - DNA, 80 bp, synthetic construct; identical to SEQ ID NO: 23978
  source 1..80: mol_type = other DNA

SEQ ID NO: 208709 - DNA, 80 bp, synthetic construct; identical to SEQ ID NO: 23979
  source 1..80: mol_type = other DNA

SEQ ID NO: 208710 - DNA, 80 bp, synthetic construct; identical to SEQ ID NO: 23980
  source 1..80: mol_type = other DNA

SEQ ID NO: 208711 - DNA, 80 bp, synthetic construct; identical to SEQ ID NO: 23981
  source 1..80: mol_type = other DNA

SEQ ID NO: 208712 - DNA, 80 bp, synthetic construct; identical to SEQ ID NO: 23982
  source 1..80: mol_type = other DNA

SEQ ID NO: 208713 - DNA, 80 bp, synthetic construct; identical to SEQ ID NO: 23983
  source 1..80: mol_type = other DNA

SEQ ID NO: 208714 - DNA, 80 bp, synthetic construct; identical to SEQ ID NO: 23984
  source 1..80: mol_type = other DNA

SEQ ID NO: 208715 - DNA, 80 bp, synthetic construct; identical to SEQ ID NO: 23985
  source 1..80: mol_type = other DNA

SEQ ID NO: 208716 - DNA, 80 bp, synthetic construct; identical to SEQ ID NO: 23986
  source 1..80: mol_type = other DNA

SEQ ID NO: 208717 - DNA, 80 bp, synthetic construct; identical to SEQ ID NO: 23987
  source 1..80: mol_type = other DNA

SEQ ID NO: 208718 - DNA, 80 bp, synthetic construct; identical to SEQ ID NO: 23988
  source 1..80: mol_type = other DNA

SEQ ID NO: 208719 - DNA, 80 bp, synthetic construct; identical to SEQ ID NO: 23989
  source 1..80: mol_type = other DNA

SEQ ID NO: 208720 - DNA, 80 bp, synthetic construct; identical to SEQ ID NO: 23990
  source 1..80: mol_type = other DNA

SEQ ID NO: 208721 - DNA, 80 bp, synthetic construct; identical to SEQ ID NO: 23991
  source 1..80: mol_type = other DNA

SEQ ID NO: 208722 - DNA, 80 bp, synthetic construct; identical to SEQ ID NO: 23992
  source 1..80: mol_type = other DNA

SEQ ID NO: 208723 - DNA, 80 bp, synthetic construct; identical to SEQ ID NO: 23993
  source 1..80: mol_type = other DNA

SEQ ID NO: 208724 - DNA, 80 bp, synthetic construct; identical to SEQ ID NO: 23994
  source 1..80: mol_type = other DNA

SEQ ID NO: 208725 - DNA, 80 bp, synthetic construct; identical to SEQ ID NO: 23995
  source 1..80: mol_type = other DNA

SEQ ID NO: 208726 - DNA, 80 bp, synthetic construct; identical to SEQ ID NO: 23996
  source 1..80: mol_type = other DNA

SEQ ID NO: 208727 - DNA, 80 bp, synthetic construct; identical to SEQ ID NO: 23997
  source 1..80: mol_type = other DNA

SEQ ID NO: 208728 - DNA, 80 bp, synthetic construct; identical to SEQ ID NO: 23998
  source 1..80: mol_type = other DNA

SEQ ID NO: 208729 - DNA, 80 bp, synthetic construct; identical to SEQ ID NO: 23999
  source 1..80: mol_type = other DNA

SEQ ID NO: 208730 - DNA, 80 bp, synthetic construct; identical to SEQ ID NO: 24000
  source 1..80: mol_type = other DNA

SEQ ID NO: 208731 - DNA, 80 bp, synthetic construct; identical to SEQ ID NO: 24001
  source 1..80: mol_type = other DNA

SEQ ID NO: 208732 - DNA, 80 bp, synthetic construct; identical to SEQ ID NO: 24002
  source 1..80: mol_type = other DNA

SEQ ID NO: 208733 - DNA, 80 bp, synthetic construct; identical to SEQ ID NO: 24003
  source 1..80: mol_type = other DNA

SEQ ID NO: 208734 - DNA, 80 bp, synthetic construct; identical to SEQ ID NO: 24004
  source 1..80: mol_type = other DNA

SEQ ID NO: 208735 - DNA, 80 bp, synthetic construct; identical to SEQ ID NO: 24005
  source 1..80: mol_type = other DNA

SEQ ID NO: 208736 - DNA, 80 bp, synthetic construct; identical to SEQ ID NO: 24006
  source 1..80: mol_type = other DNA

SEQ ID NO: 208737 - DNA, 80 bp, synthetic construct; identical to SEQ ID NO: 24007
  source 1..80: mol_type = other DNA

SEQ ID NO: 208738 - DNA, 80 bp, synthetic construct; identical to SEQ ID NO: 24008
  source 1..80: mol_type = other DNA

SEQ ID NO: 208739 - DNA, 80 bp, synthetic construct; identical to SEQ ID NO: 24009
  source 1..80: mol_type = other DNA

SEQ ID NO: 208740 - DNA, 80 bp, synthetic construct; identical to SEQ ID NO: 24010
  source 1..80: mol_type = other DNA

SEQ ID NO: 208741 - DNA, 80 bp, synthetic construct; identical to SEQ ID NO: 24011
  source 1..80: mol_type = other DNA

SEQ ID NO: 208742 - DNA, 80 bp, synthetic construct; identical to SEQ ID NO: 24012
  source 1..80: mol_type = other DNA

SEQ ID NO: 208743 - DNA, 80 bp, synthetic construct; identical to SEQ ID NO: 24013
  source 1..80: mol_type = other DNA

SEQ ID NO: 208744 - DNA, 80 bp, synthetic construct; identical to SEQ ID NO: 24014
  source 1..80: mol_type = other DNA

SEQ ID NO: 208745 - DNA, 80 bp, synthetic construct; identical to SEQ ID NO: 24015
  source 1..80: mol_type = other DNA

SEQ ID NO: 208746 - DNA, 80 bp, synthetic construct; identical to SEQ ID NO: 24016
  source 1..80: mol_type = other DNA

SEQ ID NO: 208747 - DNA, 80 bp, synthetic construct; identical to SEQ ID NO: 24017
  source 1..80: mol_type = other DNA

SEQ ID NO: 208748 - DNA, 80 bp, synthetic construct; identical to SEQ ID NO: 24018
  source 1..80: mol_type = other DNA

SEQ ID NO: 208749 - DNA, 80 bp, synthetic construct; identical to SEQ ID NO: 24019
  source 1..80: mol_type = other DNA

SEQ ID NO: 208750 - DNA, 80 bp, synthetic construct; identical to SEQ ID NO: 24020
  source 1..80: mol_type = other DNA

SEQ ID NO: 208751 - DNA, 80 bp, synthetic construct; identical to SEQ ID NO: 24021
  source 1..80: mol_type = other DNA

SEQ ID NO: 208752 - DNA, 80 bp, synthetic construct; identical to SEQ ID NO: 24022
  source 1..80: mol_type = other DNA

SEQ ID NO: 208753 - DNA, 80 bp, synthetic construct; identical to SEQ ID NO: 24023
  source 1..80: mol_type = other DNA

SEQ ID NO: 208754 - DNA, 80 bp, synthetic construct; identical to SEQ ID NO: 24024
  source 1..80: mol_type = other DNA

SEQ ID NO: 208755 - DNA, 80 bp, synthetic construct; identical to SEQ ID NO: 24025
  source 1..80: mol_type = other DNA

SEQ ID NO: 208756 - DNA, 80 bp, synthetic construct; identical to SEQ ID NO: 24026
  source 1..80: mol_type = other DNA

SEQ ID NO: 208757 - DNA, 80 bp, synthetic construct; identical to SEQ ID NO: 24027
  source 1..80: mol_type = other DNA

SEQ ID NO: 208758 - DNA, 80 bp, synthetic construct; identical to SEQ ID NO: 24028
  source 1..80: mol_type = other DNA

SEQ ID NO: 208759 - DNA, 80 bp, synthetic construct; identical to SEQ ID NO: 24029
  source 1..80: mol_type = other DNA

SEQ ID NO: 208760 - DNA, 80 bp, synthetic construct; identical to SEQ ID NO: 24030
  source 1..80: mol_type = other DNA

SEQ ID NO: 208761 - DNA, 80 bp, synthetic construct; identical to SEQ ID NO: 24031
  source 1..80: mol_type = other DNA

SEQ ID NO: 208762 - DNA, 80 bp, synthetic construct; identical to SEQ ID NO: 24032
  source 1..80: mol_type = other DNA

SEQ ID NO: 208763 - DNA, 80 bp, synthetic construct; identical to SEQ ID NO: 24033
  source 1..80: mol_type = other DNA

SEQ ID NO: 208764 - DNA, 80 bp, synthetic construct; identical to SEQ ID NO: 24034
  source 1..80: mol_type = other DNA

SEQ ID NO: 208765 - DNA, 80 bp, synthetic construct; identical to SEQ ID NO: 24035
  source 1..80: mol_type = other DNA

SEQ ID NO: 208766 - DNA, 80 bp, synthetic construct; identical to SEQ ID NO: 24036
  source 1..80: mol_type = other DNA

SEQ ID NO: 208767 - DNA, 80 bp, synthetic construct; identical to SEQ ID NO: 24037
  source 1..80: mol_type = other DNA

SEQ ID NO: 208768 - DNA, 80 bp, synthetic construct; identical to SEQ ID NO: 24038
  source 1..80: mol_type = other DNA

SEQ ID NO: 208769 - DNA, 80 bp, synthetic construct; identical to SEQ ID NO: 24039
  source 1..80: mol_type = other DNA

SEQ ID NO: 208770 - DNA, 80 bp, synthetic construct; identical to SEQ ID NO: 24040
  source 1..80: mol_type = other DNA

SEQ ID NO: 208771 - DNA, 80 bp, synthetic construct; identical to SEQ ID NO: 24041
  source 1..80: mol_type = other DNA

SEQ ID NO: 208772 - DNA, 80 bp, synthetic construct; identical to SEQ ID NO: 24042
  source 1..80: mol_type = other DNA

SEQ ID NO: 208773 - DNA, 80 bp, synthetic construct; identical to SEQ ID NO: 24043
  source 1..80: mol_type = other DNA

SEQ ID NO: 208774 - DNA, 80 bp, synthetic construct; identical to SEQ ID NO: 24044
  source 1..80: mol_type = other DNA

SEQ ID NO: 208775 - DNA, 80 bp, synthetic construct; identical to SEQ ID NO: 24045
  source 1..80: mol_type = other DNA

SEQ ID NO: 208776 - DNA, 80 bp, synthetic construct; identical to SEQ ID NO: 24046
  source 1..80: mol_type = other DNA

SEQ ID NO: 208777 - DNA, 80 bp, synthetic construct; identical to SEQ ID NO: 24047
  source 1..80: mol_type = other DNA

SEQ ID NO: 208778 - DNA, 80 bp, synthetic construct; identical to SEQ ID NO: 24048
  source 1..80: mol_type = other DNA

SEQ ID NO: 208779 - DNA, 80 bp, synthetic construct; identical to SEQ ID NO: 24049
  source 1..80: mol_type = other DNA

SEQ ID NO: 208780 - DNA, 80 bp, synthetic construct; identical to SEQ ID NO: 24050
  source 1..80: mol_type = other DNA

SEQ ID NO: 208781 - DNA, 80 bp, synthetic construct; identical to SEQ ID NO: 24051
  source 1..80: mol_type = other DNA

SEQ ID NO: 208782 - DNA, 80 bp, synthetic construct; identical to SEQ ID NO: 24052
  source 1..80: mol_type = other DNA

SEQ ID NO: 208783 - DNA, 80 bp, synthetic construct; identical to SEQ ID NO: 24053
  source 1..80: mol_type = other DNA

SEQ ID NO: 208784 - DNA, 80 bp, synthetic construct; identical to SEQ ID NO: 24054
  source 1..80: mol_type = other DNA

SEQ ID NO: 208785 - DNA, 80 bp, synthetic construct; identical to SEQ ID NO: 24055
  source 1..80: mol_type = other DNA

SEQ ID NO: 208786 - DNA, 80 bp, synthetic construct; identical to SEQ ID NO: 24056
  source 1..80: mol_type = other DNA

SEQ ID NO: 208787 - DNA, 80 bp, synthetic construct; identical to SEQ ID NO: 24057
  source 1..80: mol_type = other DNA

SEQ ID NO: 208788 - DNA, 80 bp, synthetic construct; identical to SEQ ID NO: 24058
  source 1..80: mol_type = other DNA

SEQ ID NO: 208789 - DNA, 80 bp, synthetic construct; identical to SEQ ID NO: 24059
  source 1..80: mol_type = other DNA

SEQ ID NO: 208790 - DNA, 80 bp, synthetic construct; identical to SEQ ID NO: 24060
  source 1..80: mol_type = other DNA

SEQ ID NO: 208791 - DNA, 80 bp, synthetic construct; identical to SEQ ID NO: 24061
  source 1..80: mol_type = other DNA

SEQ ID NO: 208792 - DNA, 80 bp, synthetic construct; identical to SEQ ID NO: 24062
  source 1..80: mol_type = other DNA

SEQ ID NO: 208793 - DNA, 80 bp, synthetic construct; identical to SEQ ID NO: 24063
  source 1..80: mol_type = other DNA

SEQ ID NO: 208794 - DNA, 80 bp, synthetic construct; identical to SEQ ID NO: 24064
  source 1..80: mol_type = other DNA

SEQ ID NO: 208795 - DNA, 80 bp, synthetic construct; identical to SEQ ID NO: 24065
  source 1..80: mol_type = other DNA

SEQ ID NO: 208796 - DNA, 80 bp, synthetic construct; identical to SEQ ID NO: 24066
  source 1..80: mol_type = other DNA

SEQ ID NO: 208797 - DNA, 80 bp, synthetic construct; identical to SEQ ID NO: 24067
  source 1..80: mol_type = other DNA

SEQ ID NO: 208798 - DNA, 80 bp, synthetic construct; identical to SEQ ID NO: 24068
  source 1..80: mol_type = other DNA

SEQ ID NO: 208799 - DNA, 80 bp, synthetic construct; identical to SEQ ID NO: 24069
  source 1..80: mol_type = other DNA

SEQ ID NO: 208800 - DNA, 80 bp, synthetic construct; identical to SEQ ID NO: 24070
  source 1..80: mol_type = other DNA

SEQ ID NO: 208801 - DNA, 80 bp, synthetic construct; identical to SEQ ID NO: 24071
  source 1..80: mol_type = other DNA

SEQ ID NO: 208802 - DNA, 80 bp, synthetic construct; identical to SEQ ID NO: 24072
  source 1..80: mol_type = other DNA

SEQ ID NO: 208803 - DNA, 80 bp, synthetic construct; identical to SEQ ID NO: 24073
  source 1..80: mol_type = other DNA

SEQ ID NO: 208804 - DNA, 80 bp, synthetic construct; identical to SEQ ID NO: 24074
  source 1..80: mol_type = other DNA

SEQ ID NO: 208805 - DNA, 80 bp, synthetic construct; identical to SEQ ID NO: 24075
  source 1..80: mol_type = other DNA

SEQ ID NO: 208806 - DNA, 80 bp, synthetic construct; identical to SEQ ID NO: 24076
  source 1..80: mol_type = other DNA

SEQ ID NO: 208807 - DNA, 80 bp, synthetic construct; identical to SEQ ID NO: 24077
  source 1..80: mol_type = other DNA

SEQ ID NO: 208808 - DNA, 80 bp, synthetic construct; identical to SEQ ID NO: 24078
  source 1..80: mol_type = other DNA

SEQ ID NO: 208809 - DNA, 80 bp, synthetic construct; identical to SEQ ID NO: 24079
  source 1..80: mol_type = other DNA

SEQ ID NO: 208810 - DNA, 80 bp, synthetic construct; identical to SEQ ID NO: 24080
  source 1..80: mol_type = other DNA

SEQ ID NO: 208811 - DNA, 80 bp, synthetic construct; identical to SEQ ID NO: 24081
  source 1..80: mol_type = other DNA

SEQ ID NO: 208812 - DNA, 80 bp, synthetic construct; identical to SEQ ID NO: 24082
  source 1..80: mol_type = other DNA

SEQ ID NO: 208813 - DNA, 80 bp, synthetic construct; identical to SEQ ID NO: 24083
  source 1..80: mol_type = other DNA

SEQ ID NO: 208814 - DNA, 80 bp, synthetic construct; identical to SEQ ID NO: 24084
  source 1..80: mol_type = other DNA

SEQ ID NO: 208815 - DNA, 80 bp, synthetic construct; identical to SEQ ID NO: 24085
  source 1..80: mol_type = other DNA

SEQ ID NO: 208816 - DNA, 80 bp, synthetic construct; identical to SEQ ID NO: 24086
  source 1..80: mol_type = other DNA

SEQ ID NO: 208817 - DNA, 80 bp, synthetic construct; identical to SEQ ID NO: 24087
  source 1..80: mol_type = other DNA

SEQ ID NO: 208818 - DNA, 80 bp, synthetic construct; identical to SEQ ID NO: 24088
  source 1..80: mol_type = other DNA

SEQ ID NO: 208819 - DNA, 80 bp, synthetic construct; identical to SEQ ID NO: 24089
  source 1..80: mol_type = other DNA

SEQ ID NO: 208820 - DNA, 80 bp, synthetic construct; identical to SEQ ID NO: 24090
  source 1..80: mol_type = other DNA

SEQ ID NO: 208821 - DNA, 80 bp, synthetic construct; identical to SEQ ID NO: 24091
  source 1..80: mol_type = other DNA

SEQ ID NO: 208822 - DNA, 80 bp, synthetic construct; identical to SEQ ID NO: 24092
  source 1..80: mol_type = other DNA

SEQ ID NO: 208823 - DNA, 80 bp, synthetic construct; identical to SEQ ID NO: 24093
  source 1..80: mol_type = other DNA

SEQ ID NO: 208824 - DNA, 80 bp, synthetic construct; identical to SEQ ID NO: 24094
  source 1..80: mol_type = other DNA

SEQ ID NO: 208825 - DNA, 80 bp, synthetic construct; identical to SEQ ID NO: 24095
  source 1..80: mol_type = other DNA

SEQ ID NO: 208826 - DNA, 80 bp, synthetic construct; identical to SEQ ID NO: 24096
  source 1..80: mol_type = other DNA

SEQ ID NO: 208827 - DNA, 80 bp, synthetic construct; identical to SEQ ID NO: 24097
  source 1..80: mol_type = other DNA

SEQ ID NO: 208828 - DNA, 80 bp, synthetic construct; identical to SEQ ID NO: 24098
  source 1..80: mol_type = other DNA

SEQ ID NO: 208829 - DNA, 80 bp, synthetic construct; identical to SEQ ID NO: 24099
  source 1..80: mol_type = other DNA

SEQ ID NO: 208830 - DNA, 80 bp, synthetic construct; identical to SEQ ID NO: 24100
  source 1..80: mol_type = other DNA

SEQ ID NO: 208831 - DNA, 80 bp, synthetic construct; identical to SEQ ID NO: 24101
  source 1..80: mol_type = other DNA

SEQ ID NO: 208832 - DNA, 80 bp, synthetic construct; identical to SEQ ID NO: 24102
  source 1..80: mol_type = other DNA

SEQ ID NO: 208833 - DNA, 80 bp, synthetic construct; identical to SEQ ID NO: 24103
  source 1..80: mol_type = other DNA

SEQ ID NO: 208834 - DNA, 80 bp, synthetic construct; identical to SEQ ID NO: 24104
  source 1..80: mol_type = other DNA

SEQ ID NO: 208835 - DNA, 80 bp, synthetic construct; identical to SEQ ID NO: 24105
  source 1..80: mol_type = other DNA

SEQ ID NO: 208836 - DNA, 80 bp, synthetic construct; identical to SEQ ID NO: 24106
  source 1..80: mol_type = other DNA

SEQ ID NO: 208837 - DNA, 80 bp, synthetic construct; identical to SEQ ID NO: 24107
  source 1..80: mol_type = other DNA

SEQ ID NO: 208838 - DNA, 80 bp, synthetic construct; identical to SEQ ID NO: 24108
  source 1..80: mol_type = other DNA

SEQ ID NO: 208839 - DNA, 80 bp, synthetic construct; identical to SEQ ID NO: 24109
  source 1..80: mol_type = other DNA

SEQ ID NO: 208840 - DNA, 80 bp, synthetic construct; identical to SEQ ID NO: 24110
  source 1..80: mol_type = other DNA

SEQ ID NO: 208841 - DNA, 80 bp, synthetic construct; identical to SEQ ID NO: 24111
  source 1..80: mol_type = other DNA

SEQ ID NO: 208842 - DNA, 80 bp, synthetic construct; identical to SEQ ID NO: 24112
  source 1..80: mol_type = other DNA

SEQ ID NO: 208843 - DNA, 80 bp, synthetic construct; identical to SEQ ID NO: 24113
  source 1..80: mol_type = other DNA

SEQ ID NO: 208844 - DNA, 80 bp, synthetic construct; identical to SEQ ID NO: 24114
  source 1..80: mol_type = other DNA

SEQ ID NO: 208845 - DNA, 80 bp, synthetic construct; identical to SEQ ID NO: 24115
  source 1..80: mol_type = other DNA

SEQ ID NO: 208846 - DNA, 80 bp, synthetic construct; identical to SEQ ID NO: 24116
  source 1..80: mol_type = other DNA

SEQ ID NO: 208847 - DNA, 80 bp, synthetic construct; identical to SEQ ID NO: 24117
  source 1..80: mol_type = other DNA

SEQ ID NO: 208848 - DNA, 80 bp, synthetic construct; identical to SEQ ID NO: 24118
  source 1..80: mol_type = other DNA

SEQ ID NO: 208849 - DNA, 80 bp, synthetic construct; identical to SEQ ID NO: 24119
  source 1..80: mol_type = other DNA

SEQ ID NO: 208850 - DNA, 80 bp, synthetic construct; identical to SEQ ID NO: 24120
  source 1..80: mol_type = other DNA

SEQ ID NO: 208851 - DNA, 80 bp, synthetic construct; identical to SEQ ID NO: 24121
  source 1..80: mol_type = other DNA

SEQ ID NO: 208852 - DNA, 80 bp, synthetic construct; identical to SEQ ID NO: 24122
  source 1..80: mol_type = other DNA

SEQ ID NO: 208853 - DNA, 80 bp, synthetic construct; identical to SEQ ID NO: 24123
  source 1..80: mol_type = other DNA

SEQ ID NO: 208854 - DNA, 80 bp, synthetic construct; identical to SEQ ID NO: 24124
  source 1..80: mol_type = other DNA

SEQ ID NO: 208855 - DNA, 80 bp, synthetic construct; identical to SEQ ID NO: 24125
  source 1..80: mol_type = other DNA

SEQ ID NO: 208856 - DNA, 80 bp, synthetic construct; identical to SEQ ID NO: 24126
  source 1..80: mol_type = other DNA

SEQ ID NO: 208857 - DNA, 80 bp, synthetic construct; identical to SEQ ID NO: 24127
  source 1..80: mol_type = other DNA

SEQ ID NO: 208858 - DNA, 80 bp, synthetic construct; identical to SEQ ID NO: 24128
  source 1..80: mol_type = other DNA

SEQ ID NO: 208859 - DNA, 80 bp, synthetic construct; identical to SEQ ID NO: 24129
  source 1..80: mol_type = other DNA

SEQ ID NO: 208860 - DNA, 80 bp, synthetic construct; identical to SEQ ID NO: 24130
  source 1..80: mol_type = other DNA

SEQ ID NO: 208861 - DNA, 80 bp, synthetic construct; identical to SEQ ID NO: 24131
  source 1..80: mol_type = other DNA

SEQ ID NO: 208862 - DNA, 80 bp, synthetic construct; identical to SEQ ID NO: 24132
  source 1..80: mol_type = other DNA

SEQ ID NO: 208863 - DNA, 80 bp, synthetic construct; identical to SEQ ID NO: 24133
  source 1..80: mol_type = other DNA

SEQ ID NO: 208864 - DNA, 80 bp, synthetic construct; identical to SEQ ID NO: 24134
  source 1..80: mol_type = other DNA

SEQ ID NO: 208865 - DNA, 80 bp, synthetic construct; identical to SEQ ID NO: 24135
  source 1..80: mol_type = other DNA

SEQ ID NO: 208866 - DNA, 80 bp, synthetic construct; identical to SEQ ID NO: 24136
  source 1..80: mol_type = other DNA

SEQ ID NO: 208867 - DNA, 80 bp, synthetic construct; identical to SEQ ID NO: 24137
  source 1..80: mol_type = other DNA

SEQ ID NO: 208868 - DNA, 80 bp, synthetic construct; identical to SEQ ID NO: 24138
  source 1..80: mol_type = other DNA

SEQ ID NO: 208869 - DNA, 80 bp, synthetic construct; identical to SEQ ID NO: 24139
  source 1..80: mol_type = other DNA

SEQ ID NO: 208870 - DNA, 80 bp, synthetic construct; identical to SEQ ID NO: 24140
  source 1..80: mol_type = other DNA

SEQ ID NO: 208871 - DNA, 80 bp, synthetic construct; identical to SEQ ID NO: 24141
  source 1..80: mol_type = other DNA

SEQ ID NO: 208872 - DNA, 80 bp, synthetic construct; identical to SEQ ID NO: 24142
  source 1..80: mol_type = other DNA

SEQ ID NO: 208873 - DNA, 80 bp, synthetic construct; identical to SEQ ID NO: 24143
  source 1..80: mol_type = other DNA

SEQ ID NO: 208874 - DNA, 80 bp, synthetic construct; identical to SEQ ID NO: 24144
  source 1..80: mol_type = other DNA

SEQ ID NO: 208875 - DNA, 80 bp, synthetic construct; identical to SEQ ID NO: 24145
  source 1..80: mol_type = other DNA

SEQ ID NO: 208876 - DNA, 80 bp, synthetic construct; identical to SEQ ID NO: 24146
  source 1..80: mol_type = other DNA

SEQ ID NO: 208877 - DNA, 80 bp, synthetic construct; identical to SEQ ID NO: 24147
  source 1..80: mol_type = other DNA

SEQ ID NO: 208878 - DNA, 80 bp, synthetic construct; identical to SEQ ID NO: 24148
  source 1..80: mol_type = other DNA

SEQ ID NO: 208879 - DNA, 80 bp, synthetic construct; identical to SEQ ID NO: 24149
  source 1..80: mol_type = other DNA

SEQ ID NO: 208880 - DNA, 80 bp, synthetic construct; identical to SEQ ID NO: 24150
  source 1..80: mol_type = other DNA

SEQ ID NO: 208881 - DNA, 80 bp, synthetic construct; identical to SEQ ID NO: 24151
  source 1..80: mol_type = other DNA

SEQ ID NO: 208882 - DNA, 80 bp, synthetic construct; identical to SEQ ID NO: 24152
  source 1..80: mol_type = other DNA

SEQ ID NO: 208883 - DNA, 80 bp, synthetic construct; identical to SEQ ID NO: 24153
  source 1..80: mol_type = other DNA

SEQ ID NO: 208884 - DNA, 80 bp, synthetic construct; identical to SEQ ID NO: 24154
  source 1..80: mol_type = other DNA

SEQ ID NO: 208885 - DNA, 80 bp, synthetic construct; identical to SEQ ID NO: 24155
  source 1..80: mol_type = other DNA

SEQ ID NO: 208886 - DNA, 80 bp, synthetic construct; identical to SEQ ID NO: 24156
  source 1..80: mol_type = other DNA

SEQ ID NO: 208887 - DNA, 80 bp, synthetic construct; identical to SEQ ID NO: 24157
  source 1..80: mol_type = other DNA

SEQ ID NO: 208888 - DNA, 80 bp, synthetic construct; identical to SEQ ID NO: 24158
  source 1..80: mol_type = other DNA

SEQ ID NO: 208889 - DNA, 80 bp, synthetic construct; identical to SEQ ID NO: 24159
  source 1..80: mol_type = other DNA

SEQ ID NO: 208890 - DNA, 80 bp, synthetic construct; identical to SEQ ID NO: 24160
  source 1..80: mol_type = other DNA

SEQ ID NO: 208891 - DNA, 80 bp, synthetic construct; identical to SEQ ID NO: 24161
  source 1..80: mol_type = other DNA

SEQ ID NO: 208892 - DNA, 80 bp, synthetic construct; identical to SEQ ID NO: 24162
  source 1..80: mol_type = other DNA

SEQ ID NO: 208893 - DNA, 80 bp, synthetic construct; identical to SEQ ID NO: 24163
  source 1..80: mol_type = other DNA

SEQ ID NO: 208894 - DNA, 80 bp, synthetic construct; identical to SEQ ID NO: 24164
  source 1..80: mol_type = other DNA

SEQ ID NO: 208895 - DNA, 80 bp, synthetic construct; identical to SEQ ID NO: 24165
  source 1..80: mol_type = other DNA

SEQ ID NO: 208896 - DNA, 80 bp, synthetic construct; identical to SEQ ID NO: 24166
  source 1..80: mol_type = other DNA

SEQ ID NO: 208897 - DNA, 80 bp, synthetic construct; identical to SEQ ID NO: 24167
  source 1..80: mol_type = other DNA

SEQ ID NO: 208898 - DNA, 80 bp, synthetic construct; identical to SEQ ID NO: 24168
  source 1..80: mol_type = other DNA

SEQ ID NO: 208899 - DNA, 80 bp, synthetic construct; identical to SEQ ID NO: 24169
  source 1..80: mol_type = other DNA

SEQ ID NO: 208900 - DNA, 80 bp, synthetic construct; identical to SEQ ID NO: 24170
  source 1..80: mol_type = other DNA

SEQ ID NO: 208901 - DNA, 80 bp, synthetic construct; identical to SEQ ID NO: 24171
  source 1..80: mol_type = other DNA

SEQ ID NO: 208902 - DNA, 80 bp, synthetic construct; identical to SEQ ID NO: 24172
  source 1..80: mol_type = other DNA

SEQ ID NO: 208903 - DNA, 80 bp, synthetic construct; identical to SEQ ID NO: 24173
  source 1..80: mol_type = other DNA

SEQ ID NO: 208904 - DNA, 80 bp, synthetic construct; identical to SEQ ID NO: 24174
  source 1..80: mol_type = other DNA

SEQ ID NO: 208905 - DNA, 80 bp, synthetic construct; identical to SEQ ID NO: 24175
  source 1..80: mol_type = other DNA

SEQ ID NO: 208906 - DNA, 80 bp, synthetic construct; identical to SEQ ID NO: 24176
  source 1..80: mol_type = other DNA

SEQ ID NO: 208907 - DNA, 80 bp, synthetic construct; identical to SEQ ID NO: 24177
  source 1..80: mol_type = other DNA

SEQ ID NO: 208908 - DNA, 80 bp, synthetic construct; identical to SEQ ID NO: 24178
  source 1..80: mol_type = other DNA

SEQ ID NO: 208909 - DNA, 80 bp, synthetic construct; identical to SEQ ID NO: 24179
  source 1..80: mol_type = other DNA

SEQ ID NO: 208910 - DNA, 80 bp, synthetic construct; identical to SEQ ID NO: 24180
  source 1..80: mol_type = other DNA

SEQ ID NO: 208911 - DNA, 80 bp, synthetic construct; identical to SEQ ID NO: 24181
  source 1..80: mol_type = other DNA

SEQ ID NO: 208912 - DNA, 80 bp, synthetic construct; identical to SEQ ID NO: 24182
  source 1..80: mol_type = other DNA

SEQ ID NO: 208913 - DNA, 80 bp, synthetic construct; identical to SEQ ID NO: 24183
  source 1..80: mol_type = other DNA

SEQ ID NO: 208914 - DNA, 80 bp, synthetic construct; identical to SEQ ID NO: 24184
  source 1..80: mol_type = other DNA

SEQ ID NO: 208915 - DNA, 80 bp, synthetic construct; identical to SEQ ID NO: 24185
  source 1..80: mol_type = other DNA

SEQ ID NO: 208916 - DNA, 80 bp, synthetic construct; identical to SEQ ID NO: 24186
  source 1..80: mol_type = other DNA

SEQ ID NO: 208917 - DNA, 80 bp, synthetic construct; identical to SEQ ID NO: 24187
  source 1..80: mol_type = other DNA

SEQ ID NO: 208918 - DNA, 80 bp, synthetic construct; identical to SEQ ID NO: 24188
  source 1..80: mol_type = other DNA

SEQ ID NO: 208919 - DNA, 80 bp, synthetic construct; identical to SEQ ID NO: 24189
  source 1..80: mol_type = other DNA

SEQ ID NO: 208920 - DNA, 80 bp, synthetic construct; identical to SEQ ID NO: 24190
  source 1..80: mol_type = other DNA

SEQ ID NO: 208921 - DNA, 80 bp, synthetic construct; identical to SEQ ID NO: 24191
  source 1..80: mol_type = other DNA

SEQ ID NO: 208922 - DNA, 80 bp, synthetic construct; identical to SEQ ID NO: 24192
  source 1..80: mol_type = other DNA

SEQ ID NO: 208923 - DNA, 80 bp, synthetic construct; identical to SEQ ID NO: 24193
  source 1..80: mol_type = other DNA

SEQ ID NO: 208924 - DNA, 80 bp, synthetic construct; identical to SEQ ID NO: 24194
  source 1..80: mol_type = other DNA

SEQ ID NO: 208925 - DNA, 80 bp, synthetic construct; identical to SEQ ID NO: 24195
  source 1..80: mol_type = other DNA

SEQ ID NO: 208926 - DNA, 80 bp, synthetic construct; identical to SEQ ID NO: 24196
  source 1..80: mol_type = other DNA

SEQ ID NO: 208927 - DNA, 80 bp, synthetic construct; identical to SEQ ID NO: 24197
  source 1..80: mol_type = other DNA

SEQ ID NO: 208928 - DNA, 80 bp, synthetic construct; identical to SEQ ID NO: 24198
  source 1..80: mol_type = other DNA

SEQ ID NO: 208929 - DNA, 80 bp, synthetic construct; identical to SEQ ID NO: 24199
  source 1..80: mol_type = other DNA

SEQ ID NO: 208930 - DNA, 80 bp, synthetic construct; identical to SEQ ID NO: 24200
  source 1..80: mol_type = other DNA

SEQ ID NO: 208931 - DNA, 80 bp, synthetic construct; identical to SEQ ID NO: 24201
  source 1..80: mol_type = other DNA

SEQ ID NO: 208932 - DNA, 80 bp, synthetic construct; identical to SEQ ID NO: 24202
  source 1..80: mol_type = other DNA

SEQ ID NO: 208933 - DNA, 80 bp, synthetic construct; identical to SEQ ID NO: 24203
  source 1..80: mol_type = other DNA

SEQ ID NO: 208934 - DNA, 80 bp, synthetic construct; identical to SEQ ID NO: 24204
  source 1..80: mol_type = other DNA

SEQ ID NO: 208935 - DNA, 80 bp, synthetic construct; identical to SEQ ID NO: 24205
  source 1..80: mol_type = other DNA

SEQ ID NO: 208936 - DNA, 80 bp, synthetic construct; identical to SEQ ID NO: 24206
  source 1..80: mol_type = other DNA

SEQ ID NO: 208937 - DNA, 80 bp, synthetic construct; identical to SEQ ID NO: 24207
  source 1..80: mol_type = other DNA

SEQ ID NO: 208938 - DNA, 80 bp, synthetic construct; identical to SEQ ID NO: 24208
  source 1..80: mol_type = other DNA

SEQ ID NO: 208939 - DNA, 80 bp, synthetic construct; identical to SEQ ID NO: 24209
  source 1..80: mol_type = other DNA

SEQ ID NO: 208940 - DNA, 80 bp, synthetic construct; identical to SEQ ID NO: 24210
  source 1..80: mol_type = other DNA

SEQ ID NO: 208941 - DNA, 80 bp, synthetic construct; identical to SEQ ID NO: 24211
  source 1..80: mol_type = other DNA

SEQ ID NO: 208942 - DNA, 80 bp, synthetic construct; identical to SEQ ID NO: 24212
  source 1..80: mol_type = other DNA

SEQ ID NO: 208943 - DNA, 80 bp, synthetic construct; identical to SEQ ID NO: 24213
  source 1..80: mol_type = other DNA

SEQ ID NO: 208944 - DNA, 80 bp, synthetic construct; identical to SEQ ID NO: 24214
  source 1..80: mol_type = other DNA

SEQ ID NO: 208945 - DNA, 80 bp, synthetic construct; identical to SEQ ID NO: 24215
  source 1..80: mol_type = other DNA

SEQ ID NO: 208946 - DNA, 80 bp, synthetic construct; identical to SEQ ID NO: 24216
  source 1..80: mol_type = other DNA

SEQ ID NO: 208947 - DNA, 80 bp, synthetic construct; identical to SEQ ID NO: 24217
  source 1..80: mol_type = other DNA

SEQ ID NO: 208948 - DNA, 80 bp, synthetic construct; identical to SEQ ID NO: 24218
  source 1..80: mol_type = other DNA

SEQ ID NO: 208949 - DNA, 80 bp, synthetic construct; identical to SEQ ID NO: 24219
  source 1..80: mol_type = other DNA

SEQ ID NO: 208950 - DNA, 80 bp, synthetic construct; identical to SEQ ID NO: 24220
  source 1..80: mol_type = other DNA

SEQ ID NO: 208951 - DNA, 80 bp, synthetic construct; identical to SEQ ID NO: 24221
  source 1..80: mol_type = other DNA

SEQ ID NO: 208952 - DNA, 80 bp, synthetic construct; identical to SEQ ID NO: 24222
  source 1..80: mol_type = other DNA

SEQ ID NO: 208953 - DNA, 80 bp, synthetic construct; identical to SEQ ID NO: 24223
  source 1..80: mol_type = other DNA

SEQ ID NO: 208954 - DNA, 80 bp, synthetic construct; identical to SEQ ID NO: 24224
  source 1..80: mol_type = other DNA

SEQ ID NO: 208955 - DNA, 80 bp, synthetic construct; identical to SEQ ID NO: 24225
  source 1..80: mol_type = other DNA

SEQ ID NO: 208956 - DNA, 80 bp, synthetic construct; identical to SEQ ID NO: 24226
  source 1..80: mol_type = other DNA

SEQ ID NO: 208957 - DNA, 80 bp, synthetic construct; identical to SEQ ID NO: 24227
  source 1..80: mol_type = other DNA

SEQ ID NO: 208958 - DNA, 80 bp, synthetic construct; identical to SEQ ID NO: 24228
  source 1..80: mol_type = other DNA

SEQ ID NO: 208959 - DNA, 80 bp, synthetic construct; identical to SEQ ID NO: 24229
  source 1..80: mol_type = other DNA

SEQ ID NO: 208960 - DNA, 80 bp, synthetic construct; identical to SEQ ID NO: 24230
  source 1..80: mol_type = other DNA

SEQ ID NO: 208961 - DNA, 80 bp, synthetic construct; identical to SEQ ID NO: 24231
  source 1..80: mol_type = other DNA

SEQ ID NO: 208962 - DNA, 80 bp, synthetic construct; identical to SEQ ID NO: 24232
  source 1..80: mol_type = other DNA

SEQ ID NO: 208963 - DNA, 80 bp, synthetic construct; identical to SEQ ID NO: 24233
  source 1..80: mol_type = other DNA

SEQ ID NO: 208964 - DNA, 80 bp, synthetic construct; identical to SEQ ID NO: 24234
  source 1..80: mol_type = other DNA

SEQ ID NO: 208965 - DNA, 80 bp, synthetic construct; identical to SEQ ID NO: 24235
  source 1..80: mol_type = other DNA

SEQ ID NO: 208966 - DNA, 80 bp, synthetic construct; identical to SEQ ID NO: 24236
  source 1..80: mol_type = other DNA

SEQ ID NO: 208967 - DNA, 80 bp, synthetic construct; identical to SEQ ID NO: 24237
  source 1..80: mol_type = other DNA

SEQ ID NO: 208968 - DNA, 80 bp, synthetic construct; identical to SEQ ID NO: 24238
  source 1..80: mol_type = other DNA

SEQ ID NO: 208969 - DNA, 80 bp, synthetic construct; identical to SEQ ID NO: 24239
  source 1..80: mol_type = other DNA

SEQ ID NO: 208970 - DNA, 80 bp, synthetic construct; identical to SEQ ID NO: 24240
  source 1..80: mol_type = other DNA

SEQ ID NO: 208971 - DNA, 80 bp, synthetic construct; identical to SEQ ID NO: 24241
  source 1..80: mol_type = other DNA

SEQ ID NO: 208972 - DNA, 80 bp, synthetic construct; identical to SEQ ID NO: 24242
  source 1..80: mol_type = other DNA

SEQ ID NO: 208973 - DNA, 80 bp, synthetic construct; identical to SEQ ID NO: 24243
  source 1..80: mol_type = other DNA

SEQ ID NO: 208974 - DNA, 80 bp, synthetic construct; identical to SEQ ID NO: 24244
  source 1..80: mol_type = other DNA

SEQ ID NO: 208975 - DNA, 80 bp, synthetic construct; identical to SEQ ID NO: 24245
  source 1..80: mol_type = other DNA

SEQ ID NO: 208976 - DNA, 80 bp, synthetic construct; identical to SEQ ID NO: 24246
  source 1..80: mol_type = other DNA

SEQ ID NO: 208977 - DNA, 80 bp, synthetic construct; identical to SEQ ID NO: 24247
  source 1..80: mol_type = other DNA

SEQ ID NO: 208978 - DNA, 80 bp, synthetic construct; identical to SEQ ID NO: 24248
  source 1..80: mol_type = other DNA

SEQ ID NO: 208979 - DNA, 80 bp, synthetic construct; identical to SEQ ID NO: 24249
  source 1..80: mol_type = other DNA

SEQ ID NO: 208980 - DNA, 80 bp, synthetic construct; identical to SEQ ID NO: 24250
  source 1..80: mol_type = other DNA

SEQ ID NO: 208981 - DNA, 80 bp, synthetic construct; identical to SEQ ID NO: 24251
  source 1..80: mol_type = other DNA

SEQ ID NO: 208982 - DNA, 80 bp, synthetic construct; identical to SEQ ID NO: 24252
  source 1..80: mol_type = other DNA

SEQ ID NO: 208983 - DNA, 80 bp, synthetic construct; identical to SEQ ID NO: 24253
  source 1..80: mol_type = other DNA

SEQ ID NO: 208984 - DNA, 80 bp, synthetic construct; identical to SEQ ID NO: 24254
  source 1..80: mol_type = other DNA

SEQ ID NO: 208985 - DNA, 80 bp, synthetic construct; identical to SEQ ID NO: 24255
  source 1..80: mol_type = other DNA

SEQ ID NO: 208986 - DNA, 80 bp, synthetic construct; identical to SEQ ID NO: 24256
  source 1..80: mol_type = other DNA

SEQ ID NO: 208987 - DNA, 80 bp, synthetic construct; identical to SEQ ID NO: 24257
  source 1..80: mol_type = other DNA

SEQ ID NO: 208988 - DNA, 80 bp, synthetic construct; identical to SEQ ID NO: 24258
  source 1..80: mol_type = other DNA

SEQ ID NO: 208989 - DNA, 80 bp, synthetic construct; identical to SEQ ID NO: 24259
  source 1..80: mol_type = other DNA

SEQ ID NO: 208990 - DNA, 80 bp, synthetic construct; identical to SEQ ID NO: 24260
  source 1..80: mol_type = other DNA

SEQ ID NO: 208991 - DNA, 80 bp, synthetic construct; identical to SEQ ID NO: 24261
  source 1..80: mol_type = other DNA

SEQ ID NO: 208992 - DNA, 80 bp, synthetic construct; identical to SEQ ID NO: 24262
  source 1..80: mol_type = other DNA

SEQ ID NO: 208993 - DNA, 80 bp, synthetic construct; identical to SEQ ID NO: 24263
  source 1..80: mol_type = other DNA

SEQ ID NO: 208994 - DNA, 80 bp, synthetic construct; identical to SEQ ID NO: 24264
  source 1..80: mol_type = other DNA

SEQ ID NO: 208995 - DNA, 80 bp, synthetic construct; identical to SEQ ID NO: 24265
  source 1..80: mol_type = other DNA

SEQ ID NO: 208996 - DNA, 80 bp, synthetic construct; identical to SEQ ID NO: 24266
  source 1..80: mol_type = other DNA

SEQ ID NO: 208997 - DNA, 80 bp, synthetic construct; identical to SEQ ID NO: 24267
  source 1..80: mol_type = other DNA

SEQ ID NO: 208998 - DNA, 80 bp, synthetic construct; identical to SEQ ID NO: 24268
  source 1..80: mol_type = other DNA

SEQ ID NO: 208999 - DNA, 80 bp, synthetic construct; identical to SEQ ID NO: 24269
  source 1..80: mol_type = other DNA

SEQ ID NO: 209000 - DNA, 80 bp, synthetic construct; identical to SEQ ID NO: 24270
  source 1..80: mol_type = other DNA

SEQ ID NO: 209001 - DNA, 80 bp, synthetic construct; identical to SEQ ID NO: 24271
  source 1..80: mol_type = other DNA

SEQ ID NO: 209002 - DNA, 80 bp, synthetic construct; identical to SEQ ID NO: 24272
  source 1..80: mol_type = other DNA

SEQ ID NO: 209003 - DNA, 80 bp, synthetic construct; identical to SEQ ID NO: 24273
  source 1..80: mol_type = other DNA

SEQ ID NO: 209004 - DNA, 80 bp, synthetic construct; identical to SEQ ID NO: 24274
  source 1..80: mol_type = other DNA

SEQ ID NO: 209005 - DNA, 80 bp, synthetic construct; identical to SEQ ID NO: 24275
  source 1..80: mol_type = other DNA

SEQ ID NO: 209006 - DNA, 80 bp, synthetic construct; identical to SEQ ID NO: 24276
  source 1..80: mol_type = other DNA

SEQ ID NO: 209007 - DNA, 80 bp, synthetic construct; identical to SEQ ID NO: 24277
  source 1..80: mol_type = other DNA

SEQ ID NO: 209008 - DNA, 80 bp, synthetic construct; identical to SEQ ID NO: 24278
  source 1..80: mol_type = other DNA

SEQ ID NO: 209009 - DNA, 80 bp, synthetic construct; identical to SEQ ID NO: 24279
  source 1..80: mol_type = other DNA

SEQ ID NO: 209010 - DNA, 80 bp, synthetic construct; identical to SEQ ID NO: 24280
  source 1..80: mol_type = other DNA

SEQ ID NO: 209011 - DNA, 80 bp, synthetic construct; identical to SEQ ID NO: 24281
  source 1..80: mol_type = other DNA

SEQ ID NO: 209012 - DNA, 80 bp, synthetic construct; identical to SEQ ID NO: 24282
  source 1..80: mol_type = other DNA

SEQ ID NO: 209013 - DNA, 80 bp, synthetic construct; identical to SEQ ID NO: 24283
  source 1..80: mol_type = other DNA

SEQ ID NO: 209014 - DNA, 80 bp, synthetic construct; identical to SEQ ID NO: 24284
  source 1..80: mol_type = other DNA

SEQ ID NO: 209015 - DNA, 80 bp, synthetic construct; identical to SEQ ID NO: 24285
  source 1..80: mol_type = other DNA

SEQ ID NO: 209016 - DNA, 80 bp, synthetic construct; identical to SEQ ID NO: 24286
  source 1..80: mol_type = other DNA

SEQ ID NO: 209017 - DNA, 80 bp, synthetic construct; identical to SEQ ID NO: 24287
  source 1..80: mol_type = other DNA

SEQ ID NO: 209018 - DNA, 80 bp, synthetic construct; identical to SEQ ID NO: 24288
  source 1..80: mol_type = other DNA

SEQ ID NO: 209019 - DNA, 80 bp, synthetic construct; identical to SEQ ID NO: 24289
  source 1..80: mol_type = other DNA

SEQ ID NO: 209020 - DNA, 80 bp, synthetic construct; identical to SEQ ID NO: 24290
  source 1..80: mol_type = other DNA

SEQ ID NO: 209021 - DNA, 80 bp, synthetic construct; identical to SEQ ID NO: 24291
  source 1..80: mol_type = other DNA

SEQ ID NO: 209022 - DNA, 80 bp, synthetic construct; identical to SEQ ID NO: 24292
  source 1..80: mol_type = other DNA

SEQ ID NO: 209023 - DNA, 80 bp, synthetic construct; identical to SEQ ID NO: 24293
  source 1..80: mol_type = other DNA

SEQ ID NO: 209024 - DNA, 80 bp, synthetic construct; identical to SEQ ID NO: 24294
  source 1..80: mol_type = other DNA

SEQ ID NO: 209025 - DNA, 80 bp, synthetic construct; identical to SEQ ID NO: 24295
  source 1..80: mol_type = other DNA

SEQ ID NO: 209026 - DNA, 80 bp, synthetic construct; identical to SEQ ID NO: 24296
  source 1..80: mol_type = other DNA

SEQ ID NO: 209027 - DNA, 80 bp, synthetic construct; identical to SEQ ID NO: 24297
  source 1..80: mol_type = other DNA

SEQ ID NO: 209028 - DNA, 80 bp, synthetic construct; identical to SEQ ID NO: 24298
  source 1..80: mol_type = other DNA

SEQ ID NO: 209029 - DNA, 80 bp, synthetic construct; identical to SEQ ID NO: 24299
  source 1..80: mol_type = other DNA

SEQ ID NO: 209030 - DNA, 80 bp, synthetic construct; identical to SEQ ID NO: 24300
  source 1..80: mol_type = other DNA

SEQ ID NO: 209031 - DNA, 80 bp, synthetic construct; identical to SEQ ID NO: 24301
  source 1..80: mol_type = other DNA

SEQ ID NO: 209032 - DNA, 80 bp, synthetic construct; identical to SEQ ID NO: 24302
  source 1..80: mol_type = other DNA

SEQ ID NO: 209033 - DNA, 80 bp, synthetic construct; identical to SEQ ID NO: 24303
  source 1..80: mol_type = other DNA

SEQ ID NO: 209034 - DNA, 80 bp, synthetic construct; identical to SEQ ID NO: 24304
  source 1..80: mol_type = other DNA

SEQ ID NO: 209035 - DNA, 80 bp, synthetic construct; identical to SEQ ID NO: 24305
  source 1..80: mol_type = other DNA

SEQ ID NO: 209036 - DNA, 80 bp, synthetic construct; identical to SEQ ID NO: 24306
  source 1..80: mol_type = other DNA

SEQ ID NO: 209037 - DNA, 80 bp, synthetic construct; identical to SEQ ID NO: 24307
  source 1..80: mol_type = other DNA

SEQ ID NO: 209038 - DNA, 80 bp, synthetic construct; identical to SEQ ID NO: 24308
  source 1..80: mol_type = other DNA

SEQ ID NO: 209039 - DNA, 80 bp, synthetic construct; identical to SEQ ID NO: 24309
  source 1..80: mol_type = other DNA

SEQ ID NO: 209040 - DNA, 80 bp, synthetic construct; identical to SEQ ID NO: 24310
  source 1..80: mol_type = other DNA

SEQ ID NO: 209041 - DNA, 80 bp, synthetic construct; identical to SEQ ID NO: 24311
  source 1..80: mol_type = other DNA

SEQ ID NO: 209042 - DNA, 80 bp, synthetic construct; identical to SEQ ID NO: 24312
  source 1..80: mol_type = other DNA

SEQ ID NO: 209043 - DNA, 80 bp, synthetic construct; identical to SEQ ID NO: 24313
  source 1..80: mol_type = other DNA

SEQ ID NO: 209044 - DNA, 80 bp, synthetic construct; identical to SEQ ID NO: 24314
  source 1..80: mol_type = other DNA

SEQ ID NO: 209045 - DNA, 80 bp, synthetic construct; identical to SEQ ID NO: 24315
  source 1..80: mol_type = other DNA

SEQ ID NO: 209046 - DNA, 80 bp, synthetic construct; identical to SEQ ID NO: 24316
  source 1..80: mol_type = other DNA

SEQ ID NO: 209047 - DNA, 80 bp, synthetic construct; identical to SEQ ID NO: 24317
  source 1..80: mol_type = other DNA

SEQ ID NO: 209048 - DNA, 80 bp, synthetic construct; identical to SEQ ID NO: 24318
  source 1..80: mol_type = other DNA

SEQ ID NO: 209049 - DNA, 80 bp, synthetic construct; identical to SEQ ID NO: 24319
  source 1..80: mol_type = other DNA

SEQ ID NO: 209050 - DNA, 80 bp, synthetic construct; identical to SEQ ID NO: 24320
  source 1..80: mol_type = other DNA

SEQ ID NO: 209051 - DNA, 80 bp, synthetic construct; identical to SEQ ID NO: 24321
  source 1..80: mol_type = other DNA

SEQ ID NO: 209052 - DNA, 80 bp, synthetic construct; identical to SEQ ID NO: 24322
  source 1..80: mol_type = other DNA

SEQ ID NO: 209053 - DNA, 80 bp, synthetic construct; identical to SEQ ID NO: 24323
  source 1..80: mol_type = other DNA

SEQ ID NO: 209054 - DNA, 80 bp, synthetic construct; identical to SEQ ID NO: 24324
  source 1..80: mol_type = other DNA

SEQ ID NO: 209055 - DNA, 80 bp, synthetic construct; identical to SEQ ID NO: 24325
  source 1..80: mol_type = other DNA

SEQ ID NO: 209056 - DNA, 80 bp, synthetic construct; identical to SEQ ID NO: 24326
  source 1..80: mol_type = other DNA

SEQ ID NO: 209057 - DNA, 80 bp, synthetic construct; identical to SEQ ID NO: 24327
  source 1..80: mol_type = other DNA

SEQ ID NO: 209058 - DNA, 80 bp, synthetic construct; identical to SEQ ID NO: 24328
  source 1..80: mol_type = other DNA

SEQ ID NO: 209059 - DNA, 80 bp, synthetic construct; identical to SEQ ID NO: 24329
  source 1..80: mol_type = other DNA

SEQ ID NO: 209060 - DNA, 80 bp, synthetic construct; identical to SEQ ID NO: 24330
  source 1..80: mol_type = other DNA

SEQ ID NO: 209061 - DNA, 80 bp, synthetic construct; identical to SEQ ID NO: 24331
  source 1..80: mol_type = other DNA

SEQ ID NO: 209062 - DNA, 80 bp, synthetic construct; identical to SEQ ID NO: 24332
  source 1..80: mol_type = other DNA

SEQ ID NO: 209063 - DNA, 80 bp, synthetic construct; identical to SEQ ID NO: 24333
  source 1..80: mol_type = other DNA

SEQ ID NO: 209064 - DNA, 80 bp, synthetic construct; identical to SEQ ID NO: 24334
  source 1..80: mol_type = other DNA

SEQ ID NO: 209065 - DNA, 80 bp, synthetic construct; identical to SEQ ID NO: 24335
  source 1..80: mol_type = other DNA

SEQ ID NO: 209066 - DNA, 80 bp, synthetic construct; identical to SEQ ID NO: 24336
  source 1..80: mol_type = other DNA

SEQ ID NO: 209067 - DNA, 80 bp, synthetic construct; identical to SEQ ID NO: 24337
  source 1..80: mol_type = other DNA

SEQ ID NO: 209068 - DNA, 80 bp, synthetic construct; identical to SEQ ID NO: 24338
  source 1..80: mol_type = other DNA

SEQ ID NO: 209069 - DNA, 80 bp, synthetic construct; identical to SEQ ID NO: 24339
  source 1..80: mol_type = other DNA

SEQ ID NO: 209070 - DNA, 80 bp, synthetic construct; identical to SEQ ID NO: 24340
  source 1..80: mol_type = other DNA

SEQ ID NO: 209071 - DNA, 80 bp, synthetic construct; identical to SEQ ID NO: 24341
  source 1..80: mol_type = other DNA

SEQ ID NO: 209072 - DNA, 80 bp, synthetic construct; identical to SEQ ID NO: 24342
  source 1..80: mol_type = other DNA

SEQ ID NO: 209073 - DNA, 80 bp, synthetic construct; identical to SEQ ID NO: 24343
  source 1..80: mol_type = other DNA

SEQ ID NO: 209074 - DNA, 80 bp, synthetic construct; identical to SEQ ID NO: 24344
  source 1..80: mol_type = other DNA

SEQ ID NO: 209075 - DNA, 80 bp, synthetic construct; identical to SEQ ID NO: 24345
  source 1..80: mol_type = other DNA

SEQ ID NO: 209076 - DNA, 80 bp, synthetic construct; identical to SEQ ID NO: 24346
  source 1..80: mol_type = other DNA

SEQ ID NO: 209077 - DNA, 80 bp, synthetic construct; identical to SEQ ID NO: 24347
  source 1..80: mol_type = other DNA

SEQ ID NO: 209078 - DNA, 80 bp, synthetic construct; identical to SEQ ID NO: 24348
  source 1..80: mol_type = other DNA

SEQ ID NO: 209079 - DNA, 80 bp, synthetic construct; identical to SEQ ID NO: 24349
  source 1..80: mol_type = other DNA

SEQ ID NO: 209080 - DNA, 80 bp, synthetic construct; identical to SEQ ID NO: 24350
  source 1..80: mol_type = other DNA

SEQ ID NO: 209081 - DNA, 80 bp, synthetic construct; identical to SEQ ID NO: 24351
  source 1..80: mol_type = other DNA

SEQ ID NO: 209082 - DNA, 80 bp, synthetic construct; identical to SEQ ID NO: 24352
  source 1..80: mol_type = other DNA

SEQ ID NO: 209083 - DNA, 80 bp, synthetic construct; identical to SEQ ID NO: 24353
  source 1..80: mol_type = other DNA

SEQ ID NO: 209084 - DNA, 80 bp, synthetic construct; identical to SEQ ID NO: 24354
  source 1..80: mol_type = other DNA

SEQ ID NO: 209085 - DNA, 80 bp, synthetic construct; identical to SEQ ID NO: 24355
  source 1..80: mol_type = other DNA

SEQ ID NO: 209086 - DNA, 80 bp, synthetic construct; identical to SEQ ID NO: 24356
  source 1..80: mol_type = other DNA

SEQ ID NO: 209087 - DNA, 80 bp, synthetic construct; identical to SEQ ID NO: 24357
  source 1..80: mol_type = other DNA

SEQ ID NO: 209088 - DNA, 80 bp, synthetic construct; identical to SEQ ID NO: 24358
  source 1..80: mol_type = other DNA

SEQ ID NO: 209089 - DNA, 80 bp, synthetic construct; identical to SEQ ID NO: 24359
  source 1..80: mol_type = other DNA

SEQ ID NO: 209090 - DNA, 80 bp, synthetic construct; identical to SEQ ID NO: 24360
  source 1..80: mol_type = other DNA

SEQ ID NO: 209091 - DNA, 80 bp, synthetic construct; identical to SEQ ID NO: 24361
  source 1..80: mol_type = other DNA

SEQ ID NO: 209092 - DNA, 80 bp, synthetic construct; identical to SEQ ID NO: 24362
  source 1..80: mol_type = other DNA

SEQ ID NO: 209093 - DNA, 80 bp, synthetic construct; identical to SEQ ID NO: 24363
  source 1..80: mol_type = other DNA

SEQ ID NO: 209094 - DNA, 80 bp, synthetic construct; identical to SEQ ID NO: 24364
  source 1..80: mol_type = other DNA

SEQ ID NO: 209095 - DNA, 80 bp, synthetic construct; identical to SEQ ID NO: 24365
  source 1..80: mol_type = other DNA

SEQ ID NO: 209096 - DNA, 80 bp, synthetic construct; identical to SEQ ID NO: 24366
  source 1..80: mol_type = other DNA

SEQ ID NO: 209097 - DNA, 80 bp, synthetic construct; identical to SEQ ID NO: 24367
  source 1..80: mol_type = other DNA

SEQ ID NO: 209098 - DNA, 80 bp, synthetic construct; identical to SEQ ID NO: 24368
  source 1..80: mol_type = other DNA

SEQ ID NO: 209099 - DNA, 80 bp, synthetic construct; identical to SEQ ID NO: 24369
  source 1..80: mol_type = other DNA

SEQ ID NO: 209100 - DNA, 80 bp, synthetic construct; identical to SEQ ID NO: 24370
  source 1..80: mol_type = other DNA

SEQ ID NO: 209101 - DNA, 80 bp, synthetic construct; identical to SEQ ID NO: 24371
  source 1..80: mol_type = other DNA

SEQ ID NO: 209102 - DNA, 80 bp, synthetic construct; identical to SEQ ID NO: 24372
  source 1..80: mol_type = other DNA

SEQ ID NO: 209103 - DNA, 80 bp, synthetic construct; identical to SEQ ID NO: 24373
  source 1..80: mol_type = other DNA

SEQ ID NO: 209104 - DNA, 80 bp, synthetic construct; identical to SEQ ID NO: 24374
  source 1..80: mol_type = other DNA

SEQ ID NO: 209105 - DNA, 80 bp, synthetic construct; identical to SEQ ID NO: 24375
  source 1..80: mol_type = other DNA

SEQ ID NO: 209106 - DNA, 80 bp, synthetic construct; identical to SEQ ID NO: 24376
  source 1..80: mol_type = other DNA

SEQ ID NO: 209107 - DNA, 80 bp, synthetic construct; identical to SEQ ID NO: 24377
  source 1..80: mol_type = other DNA

SEQ ID NO: 209108 - DNA, 80 bp, synthetic construct; identical to SEQ ID NO: 24378
  source 1..80: mol_type = other DNA

SEQ ID NO: 209109 - DNA, 80 bp, synthetic construct; identical to SEQ ID NO: 24379
  source 1..80: mol_type = other DNA

SEQ ID NO: 209110 - DNA, 80 bp, synthetic construct; identical to SEQ ID NO: 24380
  source 1..80: mol_type = other DNA

SEQ ID NO: 209111 - DNA, 80 bp, synthetic construct; identical to SEQ ID NO: 24381
  source 1..80: mol_type = other DNA

SEQ ID NO: 209112 - DNA, 80 bp, synthetic construct; identical to SEQ ID NO: 24382
  source 1..80: mol_type = other DNA

SEQ ID NO: 209113 - DNA, 80 bp, synthetic construct; identical to SEQ ID NO: 24383
  source 1..80: mol_type = other DNA

SEQ ID NO: 209114 - DNA, 80 bp, synthetic construct; identical to SEQ ID NO: 24384
  source 1..80: mol_type = other DNA

SEQ ID NO: 209115 - DNA, 80 bp, synthetic construct; identical to SEQ ID NO: 24385
  source 1..80: mol_type = other DNA

SEQ ID NO: 209116 - DNA, 80 bp, synthetic construct; identical to SEQ ID NO: 24386
  source 1..80: mol_type = other DNA

SEQ ID NO: 209117 - DNA, 80 bp, synthetic construct; identical to SEQ ID NO: 24387
  source 1..80: mol_type = other DNA

SEQ ID NO: 209118 - DNA, 80 bp, synthetic construct; identical to SEQ ID NO: 24388
  source 1..80: mol_type = other DNA

SEQ ID NO: 209119 - DNA, 80 bp, synthetic construct; identical to SEQ ID NO: 24389
  source 1..80: mol_type = other DNA

SEQ ID NO: 209120 - DNA, 80 bp, synthetic construct; identical to SEQ ID NO: 24390
  source 1..80: mol_type = other DNA

SEQ ID NO: 209121 - DNA, 80 bp, synthetic construct; identical to SEQ ID NO: 24391
  source 1..80: mol_type = other DNA

SEQ ID NO: 209122 - DNA, 80 bp, synthetic construct; identical to SEQ ID NO: 24392
  source 1..80: mol_type = other DNA

SEQ ID NO: 209123 - DNA, 80 bp, synthetic construct; identical to SEQ ID NO: 24393
  source 1..80: mol_type = other DNA

SEQ ID NO: 209124 - DNA, 80 bp, synthetic construct; identical to SEQ ID NO: 24394
  source 1..80: mol_type = other DNA

SEQ ID NO: 209125 - DNA, 80 bp, synthetic construct; identical to SEQ ID NO: 24395
  source 1..80: mol_type = other DNA

SEQ ID NO: 209126 - DNA, 80 bp, synthetic construct; identical to SEQ ID NO: 24396
  source 1..80: mol_type = other DNA

SEQ ID NO: 209127 - DNA, 80 bp, synthetic construct; identical to SEQ ID NO: 24397
  source 1..80: mol_type = other DNA

SEQ ID NO: 209128 - DNA, 80 bp, synthetic construct; identical to SEQ ID NO: 24398
  source 1..80: mol_type = other DNA

SEQ ID NO: 209129 - DNA, 80 bp, synthetic construct; identical to SEQ ID NO: 24399
  source 1..80: mol_type = other DNA

SEQ ID NO: 209130 - DNA, 80 bp, synthetic construct; identical to SEQ ID NO: 24400
  source 1..80: mol_type = other DNA

SEQ ID NO: 209131 - DNA, 80 bp, synthetic construct; identical to SEQ ID NO: 24401
  source 1..80: mol_type = other DNA

SEQ ID NO: 209132 - DNA, 80 bp, synthetic construct; identical to SEQ ID NO: 24402
  source 1..80: mol_type = other DNA

SEQ ID NO: 209133 - DNA, 80 bp, synthetic construct; identical to SEQ ID NO: 24403
  source 1..80: mol_type = other DNA

SEQ ID NO: 209134 - DNA, 80 bp, synthetic construct; identical to SEQ ID NO: 24404
  source 1..80: mol_type = other DNA

SEQ ID NO: 209135 - DNA, 80 bp, synthetic construct; identical to SEQ ID NO: 24405
  source 1..80: mol_type = other DNA

SEQ ID NO: 209136 - DNA, 80 bp, synthetic construct; identical to SEQ ID NO: 24406
  source 1..80: mol_type = other DNA

SEQ ID NO: 209137 - DNA, 80 bp, synthetic construct; identical to SEQ ID NO: 24407
  source 1..80: mol_type = other DNA

SEQ ID NO: 209138 - DNA, 80 bp, synthetic construct; identical to SEQ ID NO: 24408
  source 1..80: mol_type = other DNA

SEQ ID NO: 209139 - DNA, 80 bp, synthetic construct; identical to SEQ ID NO: 24409
  source 1..80: mol_type = other DNA

SEQ ID NO: 209140 - DNA, 80 bp, synthetic construct; identical to SEQ ID NO: 24410
  source 1..80: mol_type = other DNA

SEQ ID NO: 209141 - DNA, 80 bp, synthetic construct; identical to SEQ ID NO: 24411
  source 1..80: mol_type = other DNA

SEQ ID NO: 209142 - DNA, 80 bp, synthetic construct; identical to SEQ ID NO: 24412
  source 1..80: mol_type = other DNA

SEQ ID NO: 209143 - DNA, 80 bp, synthetic construct; identical to SEQ ID NO: 24413
  source 1..80: mol_type = other DNA

SEQ ID NO: 209144 - DNA, 80 bp, synthetic construct; identical to SEQ ID NO: 24414
  source 1..80: mol_type = other DNA

SEQ ID NO: 209145 - DNA, 80 bp, synthetic construct; identical to SEQ ID NO: 24415
  source 1..80: mol_type = other DNA

SEQ ID NO: 209146 - DNA, 80 bp, synthetic construct; identical to SEQ ID NO: 24416
  source 1..80: mol_type = other DNA

SEQ ID NO: 209147 - DNA, 80 bp, synthetic construct; identical to SEQ ID NO: 24417
  source 1..80: mol_type = other DNA

SEQ ID NO: 209148 - DNA, 80 bp, synthetic construct; identical to SEQ ID NO: 24418
  source 1..80: mol_type = other DNA

SEQ ID NO: 209149 - DNA, 80 bp, synthetic construct; identical to SEQ ID NO: 24419
  source 1..80: mol_type = other DNA

SEQ ID NO: 209150 - DNA, 80 bp, synthetic construct; identical to SEQ ID NO: 24420
  source 1..80: mol_type = other DNA

SEQ ID NO: 209151 - DNA, 80 bp, synthetic construct; identical to SEQ ID NO: 24421
  source 1..80: mol_type = other DNA

SEQ ID NO: 209152 - DNA, 80 bp, synthetic construct; identical to SEQ ID NO: 24422
  source 1..80: mol_type = other DNA

SEQ ID NO: 209153 - DNA, 80 bp, synthetic construct; identical to SEQ ID NO: 24423
  source 1..80: mol_type = other DNA

SEQ ID NO: 209154 - DNA, 80 bp, synthetic construct; identical to SEQ ID NO: 24424
  source 1..80: mol_type = other DNA

SEQ ID NO: 209155 - DNA, 80 bp, synthetic construct; identical to SEQ ID NO: 24425
  source 1..80: mol_type = other DNA

SEQ ID NO: 209156 - DNA, 80 bp, synthetic construct; identical to SEQ ID NO: 24426
  source 1..80: mol_type = other DNA

SEQ ID NO: 209157 - DNA, 80 bp, synthetic construct; identical to SEQ ID NO: 24427
  source 1..80: mol_type = other DNA

SEQ ID NO: 209158 - DNA, 80 bp, synthetic construct; identical to SEQ ID NO: 24428
  source 1..80: mol_type = other DNA

SEQ ID NO: 209159 - DNA, 80 bp, synthetic construct; identical to SEQ ID NO: 24429
  source 1..80: mol_type = other DNA

SEQ ID NO: 209160 - DNA, 80 bp, synthetic construct; identical to SEQ ID NO: 24430
  source 1..80: mol_type = other DNA

SEQ ID NO: 209161 - DNA, 80 bp, synthetic construct; identical to SEQ ID NO: 24431
  source 1..80: mol_type = other DNA

SEQ ID NO: 209162 - DNA, 80 bp, synthetic construct; identical to SEQ ID NO: 24432
  source 1..80: mol_type = other DNA

SEQ ID NO: 209163 - DNA, 80 bp, synthetic construct; identical to SEQ ID NO: 24433
  source 1..80: mol_type = other DNA

SEQ ID NO: 209164 - DNA, 80 bp, synthetic construct; identical to SEQ ID NO: 24434
  source 1..80: mol_type = other DNA

SEQ ID NO: 209165 - DNA, 80 bp, synthetic construct; identical to SEQ ID NO: 24435
  source 1..80: mol_type = other DNA

SEQ ID NO: 209166 - DNA, 80 bp, synthetic construct; identical to SEQ ID NO: 24436
  source 1..80: mol_type = other DNA

SEQ ID NO: 209167 - DNA, 80 bp, synthetic construct; identical to SEQ ID NO: 24437
  source 1..80: mol_type = other DNA

SEQ ID NO: 209168 - DNA, 80 bp, synthetic construct; identical to SEQ ID NO: 24438
  source 1..80: mol_type = other DNA

SEQ ID NO: 209169 - DNA, 80 bp, synthetic construct; identical to SEQ ID NO: 24439
  source 1..80: mol_type = other DNA

SEQ ID NO: 209170 - DNA, 80 bp, synthetic construct; identical to SEQ ID NO: 24440
  source 1..80: mol_type = other DNA

SEQ ID NO: 209171 - DNA, 80 bp, synthetic construct; identical to SEQ ID NO: 24441
  source 1..80: mol_type = other DNA

SEQ ID NO: 209172 - DNA, 80 bp, synthetic construct; identical to SEQ ID NO: 24442
  source 1..80: mol_type = other DNA

SEQ ID NO: 209173 - DNA, 80 bp, synthetic construct; identical to SEQ ID NO: 24443
  source 1..80: mol_type = other DNA

SEQ ID NO: 209174 - DNA, 80 bp, synthetic construct; identical to SEQ ID NO: 24444
  source 1..80: mol_type = other DNA

SEQ ID NO: 209175 - DNA, 80 bp, synthetic construct; identical to SEQ ID NO: 24445
  source 1..80: mol_type = other DNA

SEQ ID NO: 209176 - DNA, 80 bp, synthetic construct; identical to SEQ ID NO: 24446
  source 1..80: mol_type = other DNA

SEQ ID NO: 209177 - DNA, 80 bp, synthetic construct; identical to SEQ ID NO: 24447
  source 1..80: mol_type = other DNA

SEQ ID NO: 209178 - DNA, 80 bp, synthetic construct; identical to SEQ ID NO: 24448
  source 1..80: mol_type = other DNA

SEQ ID NO: 209179 - DNA, 80 bp, synthetic construct; identical to SEQ ID NO: 24449
  source 1..80: mol_type = other DNA

SEQ ID NO: 209180 - DNA, 80 bp, synthetic construct; identical to SEQ ID NO: 24450
  source 1..80: mol_type = other DNA

SEQ ID NO: 209181 - DNA, 80 bp, synthetic construct; identical to SEQ ID NO: 24451
  source 1..80: mol_type = other DNA

SEQ ID NO: 209182 - DNA, 80 bp, synthetic construct; identical to SEQ ID NO: 24452
  source 1..80: mol_type = other DNA

SEQ ID NO: 209183 - DNA, 80 bp, synthetic construct; identical to SEQ ID NO: 24453
  source 1..80: mol_type = other DNA

SEQ ID NO: 209184 - DNA, 80 bp, synthetic construct; identical to SEQ ID NO: 24454
  source 1..80: mol_type = other DNA

SEQ ID NO: 209185 - DNA, 80 bp, synthetic construct; identical to SEQ ID NO: 24455
  source 1..80: mol_type = other DNA

SEQ ID NO: 209186 - DNA, 80 bp, synthetic construct; identical to SEQ ID NO: 24456
  source 1..80: mol_type = other DNA

SEQ ID NO: 209187 - DNA, 80 bp, synthetic construct; identical to SEQ ID NO: 24457
  source 1..80: mol_type = other DNA

SEQ ID NO: 209188 - DNA, 80 bp, synthetic construct; identical to SEQ ID NO: 24458
  source 1..80: mol_type = other DNA

SEQ ID NO: 209189 - DNA, 80 bp, synthetic construct; identical to SEQ ID NO: 24459
  source 1..80: mol_type = other DNA

SEQ ID NO: 209190 - DNA, 80 bp, synthetic construct; identical to SEQ ID NO: 24460
  source 1..80: mol_type = other DNA

SEQ ID NO: 209191 - DNA, 80 bp, synthetic construct; identical to SEQ ID NO: 24461
  source 1..80: mol_type = other DNA

SEQ ID NO: 209192 - DNA, 80 bp, synthetic construct; identical to SEQ ID NO: 24462
  source 1..80: mol_type = other DNA

SEQ ID NO: 209193 - DNA, 80 bp, synthetic construct; identical to SEQ ID NO: 24463
  source 1..80: mol_type = other DNA

SEQ ID NO: 209194 - DNA, 80 bp, synthetic construct; identical to SEQ ID NO: 24464
  source 1..80: mol_type = other DNA

SEQ ID NO: 209195 - DNA, 80 bp, synthetic construct; identical to SEQ ID NO: 24465
  source 1..80: mol_type = other DNA

SEQ ID NO: 209196 - DNA, 80 bp, synthetic construct; identical to SEQ ID NO: 24466
  source 1..80: mol_type = other DNA

SEQ ID NO: 209197 - DNA, 80 bp, synthetic construct; identical to SEQ ID NO: 24467
  source 1..80: mol_type = other DNA

SEQ ID NO: 209198 - DNA, 80 bp, synthetic construct; identical to SEQ ID NO: 24468
  source 1..80: mol_type = other DNA

SEQ ID NO: 209199 - DNA, 80 bp, synthetic construct; identical to SEQ ID NO: 24469
  source 1..80: mol_type = other DNA

SEQ ID NO: 209200 - DNA, 80 bp, synthetic construct; identical to SEQ ID NO: 24470
  source 1..80: mol_type = other DNA

SEQ ID NO: 209201 - DNA, 80 bp, synthetic construct; identical to SEQ ID NO: 24471
  source 1..80: mol_type = other DNA

SEQ ID NO: 209202 - DNA, 80 bp, synthetic construct; identical to SEQ ID NO: 24472
  source 1..80: mol_type = other DNA

SEQ ID NO: 209203 - DNA, 80 bp, synthetic construct; identical to SEQ ID NO: 24473
  source 1..80: mol_type = other DNA

SEQ ID NO: 209204 - DNA, 80 bp, synthetic construct; identical to SEQ ID NO: 24474
  source 1..80: mol_type = other DNA

SEQ ID NO: 209205 - DNA, 80 bp, synthetic construct; identical to SEQ ID NO: 24475
  source 1..80: mol_type = other DNA

SEQ ID NO: 209206 - DNA, 80 bp, synthetic construct; identical to SEQ ID NO: 24476
  source 1..80: mol_type = other DNA

SEQ ID NO: 209207 - DNA, 80 bp, synthetic construct; identical to SEQ ID NO: 24477
  source 1..80: mol_type = other DNA

SEQ ID NO: 209208 - DNA, 80 bp, synthetic construct; identical to SEQ ID NO: 24478
  source 1..80: mol_type = other DNA

SEQ ID NO: 209209 - DNA, 80 bp, synthetic construct; identical to SEQ ID NO: 24479
  source 1..80: mol_type = other DNA

SEQ ID NO: 209210 - DNA, 80 bp, synthetic construct; identical to SEQ ID NO: 24480
  source 1..80: mol_type = other DNA

SEQ ID NO: 209211 - DNA, 80 bp, synthetic construct; identical to SEQ ID NO: 24481
  source 1..80: mol_type = other DNA

SEQ ID NO: 209212 - DNA, 80 bp, synthetic construct; identical to SEQ ID NO: 24482
  source 1..80: mol_type = other DNA

SEQ ID NO: 209213 - DNA, 80 bp, synthetic construct; identical to SEQ ID NO: 24483
  source 1..80: mol_type = other DNA

SEQ ID NO: 209214 - DNA, 80 bp, synthetic construct; identical to SEQ ID NO: 24484
  source 1..80: mol_type = other DNA

SEQ ID NO: 209215 - DNA, 80 bp, synthetic construct; identical to SEQ ID NO: 24485
  source 1..80: mol_type = other DNA

SEQ ID NO: 209216 - DNA, 80 bp, synthetic construct; identical to SEQ ID NO: 24486
  source 1..80: mol_type = other DNA

SEQ ID NO: 209217 - DNA, 80 bp, synthetic construct; identical to SEQ ID NO: 24487
  source 1..80: mol_type = other DNA

SEQ ID NO: 209218 - DNA, 80 bp, synthetic construct; identical to SEQ ID NO: 24488
  source 1..80: mol_type = other DNA

SEQ ID NO: 209219 - DNA, 80 bp, synthetic construct; identical to SEQ ID NO: 24489
  source 1..80: mol_type = other DNA

SEQ ID NO: 209220 - DNA, 80 bp, synthetic construct; identical to SEQ ID NO: 24490
  source 1..80: mol_type = other DNA

SEQ ID NO: 209221 - DNA, 80 bp, synthetic construct; identical to SEQ ID NO: 24491
  source 1..80: mol_type = other DNA

SEQ ID NO: 209222 - DNA, 80 bp, synthetic construct; identical to SEQ ID NO: 24492
  source 1..80: mol_type = other DNA

SEQ ID NO: 209223 - DNA, 80 bp, synthetic construct; identical to SEQ ID NO: 24493
  source 1..80: mol_type = other DNA

SEQ ID NO: 209224 - DNA, 80 bp, synthetic construct; identical to SEQ ID NO: 24494
  source 1..80: mol_type = other DNA

SEQ ID NO: 209225 - DNA, 80 bp, synthetic construct; identical to SEQ ID NO: 24495
  source 1..80: mol_type = other DNA

SEQ ID NO: 209226 - DNA, 80 bp, synthetic construct; identical to SEQ ID NO: 24496
  source 1..80: mol_type = other DNA

SEQ ID NO: 209227 - DNA, 80 bp, synthetic construct; identical to SEQ ID NO: 24497
  source 1..80: mol_type = other DNA

SEQ ID NO: 209228 - DNA, 80 bp, synthetic construct; identical to SEQ ID NO: 24498
  source 1..80: mol_type = other DNA

SEQ ID NO: 209229 - DNA, 80 bp, synthetic construct; identical to SEQ ID NO: 24499
  source 1..80: mol_type = other DNA

SEQ ID NO: 209230 - DNA, 80 bp, synthetic construct; identical to SEQ ID NO: 24500
  source 1..80: mol_type = other DNA

SEQ ID NO: 209231 - DNA, 80 bp, synthetic construct; identical to SEQ ID NO: 24501
  source 1..80: mol_type = other DNA

SEQ ID NO: 209232 - DNA, 80 bp, synthetic construct; identical to SEQ ID NO: 24502
  source 1..80: mol_type = other DNA

SEQ ID NO: 209233 - DNA, 80 bp, synthetic construct; identical to SEQ ID NO: 24503
  source 1..80: mol_type = other DNA

SEQ ID NO: 209234 - DNA, 80 bp, synthetic construct; identical to SEQ ID NO: 24504
  source 1..80: mol_type = other DNA

SEQ ID NO: 209235 - DNA, 80 bp, synthetic construct; identical to SEQ ID NO: 24505
  source 1..80: mol_type = other DNA

SEQ ID NO: 209236 - DNA, 80 bp, synthetic construct; identical to SEQ ID NO: 24506
  source 1..80: mol_type = other DNA

SEQ ID NO: 209237 - DNA, 80 bp, synthetic construct; identical to SEQ ID NO: 24507
  source 1..80: mol_type = other DNA

SEQ ID NO: 209238 - DNA, 80 bp, synthetic construct; identical to SEQ ID NO: 24508
  source 1..80: mol_type = other DNA

SEQ ID NO: 209239 - DNA, 80 bp, synthetic construct; identical to SEQ ID NO: 24509
  source 1..80: mol_type = other DNA

SEQ ID NO: 209240 - DNA, 80 bp, synthetic construct; identical to SEQ ID NO: 24510
  source 1..80: mol_type = other DNA

SEQ ID NO: 209241 - DNA, 80 bp, synthetic construct; identical to SEQ ID NO: 24511
  source 1..80: mol_type = other DNA

SEQ ID NO: 209242 - DNA, 80 bp, synthetic construct; identical to SEQ ID NO: 24512
  source 1..80: mol_type = other DNA

SEQ ID NO: 209243 - DNA, 80 bp, synthetic construct; identical to SEQ ID NO: 24513
  source 1..80: mol_type = other DNA

SEQ ID NO: 209244 - DNA, 80 bp, synthetic construct; identical to SEQ ID NO: 24514
  source 1..80: mol_type = other DNA

SEQ ID NO: 209245 - DNA, 80 bp, synthetic construct; identical to SEQ ID NO: 24515
  source 1..80: mol_type = other DNA

SEQ ID NO: 209246 - DNA, 80 bp, synthetic construct; identical to SEQ ID NO: 24516
  source 1..80: mol_type = other DNA

SEQ ID NO: 209247 - DNA, 80 bp, synthetic construct; identical to SEQ ID NO: 24517
  source 1..80: mol_type = other DNA

SEQ ID NO: 209248 - DNA, 80 bp, synthetic construct; identical to SEQ ID NO: 24518
  source 1..80: mol_type = other DNA

SEQ ID NO: 209249 - DNA, 80 bp, synthetic construct; identical to SEQ ID NO: 24519
  source 1..80: mol_type = other DNA

SEQ ID NO: 209250 - DNA, 80 bp, synthetic construct; identical to SEQ ID NO: 24520
  source 1..80: mol_type = other DNA

SEQ ID NO: 209251 - DNA, 80 bp, synthetic construct; identical to SEQ ID NO: 24521
  source 1..80: mol_type = other DNA

SEQ ID NO: 209252 - DNA, 80 bp, synthetic construct; identical to SEQ ID NO: 24522
  source 1..80: mol_type = other DNA

SEQ ID NO: 209253 - DNA, 80 bp, synthetic construct; identical to SEQ ID NO: 24523
  source 1..80: mol_type = other DNA

SEQ ID NO: 209254 - DNA, 80 bp, synthetic construct; identical to SEQ ID NO: 24524
  source 1..80: mol_type = other DNA

SEQ ID NO: 209255 - DNA, 80 bp, synthetic construct; identical to SEQ ID NO: 24525
  source 1..80: mol_type = other DNA

SEQ ID NO: 209256 - DNA, 80 bp, synthetic construct; identical to SEQ ID NO: 24526
  source 1..80: mol_type = other DNA

SEQ ID NO: 209257 - DNA, 80 bp, synthetic construct; identical to SEQ ID NO: 24527
  source 1..80: mol_type = other DNA

SEQ ID NO: 209258 - DNA, 80 bp, synthetic construct; identical to SEQ ID NO: 24528
  source 1..80: mol_type = other DNA

SEQ ID NO: 209259 - DNA, 80 bp, synthetic construct; identical to SEQ ID NO: 24529
  source 1..80: mol_type = other DNA

SEQ ID NO: 209260 - DNA, 80 bp, synthetic construct; identical to SEQ ID NO: 24530
  source 1..80: mol_type = other DNA

SEQ ID NO: 209261 - DNA, 80 bp, synthetic construct; identical to SEQ ID NO: 24531
  source 1..80: mol_type = other DNA

SEQ ID NO: 209262 - DNA, 80 bp, synthetic construct; identical to SEQ ID NO: 24532
  source 1..80: mol_type = other DNA

SEQ ID NO: 209263 - DNA, 80 bp, synthetic construct; identical to SEQ ID NO: 24533
  source 1..80: mol_type = other DNA

SEQ ID NO: 209264 - DNA, 80 bp, synthetic construct; identical to SEQ ID NO: 24534
  source 1..80: mol_type = other DNA

SEQ ID NO: 209265 - DNA, 80 bp, synthetic construct; identical to SEQ ID NO: 24535
  source 1..80: mol_type = other DNA

SEQ ID NO: 209266 - DNA, 80 bp, synthetic construct; identical to SEQ ID NO: 24536
  source 1..80: mol_type = other DNA

SEQ ID NO: 209267 - DNA, 80 bp, synthetic construct; identical to SEQ ID NO: 24537
  source 1..80: mol_type = other DNA

SEQ ID NO: 209268 - DNA, 80 bp, synthetic construct; identical to SEQ ID NO: 24538
  source 1..80: mol_type = other DNA

SEQ ID NO: 209269 - DNA, 80 bp, synthetic construct; identical to SEQ ID NO: 24539
  source 1..80: mol_type = other DNA

SEQ ID NO: 209270 - DNA, 80 bp, synthetic construct; identical to SEQ ID NO: 24540
  source 1..80: mol_type = other DNA

SEQ ID NO: 209271 - DNA, 80 bp, synthetic construct; identical to SEQ ID NO: 24541
  source 1..80: mol_type = other DNA

SEQ ID NO: 209272 - DNA, 80 bp, synthetic construct; identical to SEQ ID NO: 24542
  source 1..80: mol_type = other DNA

SEQ ID NO: 209273 - DNA, 80 bp, synthetic construct; identical to SEQ ID NO: 24543
  source 1..80: mol_type = other DNA

SEQ ID NO: 209274 - DNA, 80 bp, synthetic construct; identical to SEQ ID NO: 24544
  source 1..80: mol_type = other DNA

SEQ ID NO: 209275 - DNA, 80 bp, synthetic construct; identical to SEQ ID NO: 24545
  source 1..80: mol_type = other DNA

SEQ ID NO: 209276 - DNA, 80 bp, synthetic construct; identical to SEQ ID NO: 24546
  source 1..80: mol_type = other DNA

SEQ ID NO: 209277 - DNA, 80 bp, synthetic construct; identical to SEQ ID NO: 24547
  source 1..80: mol_type = other DNA

SEQ ID NO: 209278 - DNA, 80 bp, synthetic construct; identical to SEQ ID NO: 24548
  source 1..80: mol_type = other DNA

SEQ ID NO: 209279 - DNA, 80 bp, synthetic construct; identical to SEQ ID NO: 24549
  source 1..80: mol_type = other DNA

SEQ ID NO: 209280 - DNA, 80 bp, synthetic construct; identical to SEQ ID NO: 24550
  source 1..80: mol_type = other DNA

SEQ ID NO: 209281 - DNA, 80 bp, synthetic construct; identical to SEQ ID NO: 24551
  source 1..80: mol_type = other DNA

SEQ ID NO: 209282 - DNA, 80 bp, synthetic construct; identical to SEQ ID NO: 24552
  source 1..80: mol_type = other DNA

SEQ ID NO: 209283 - DNA, 80 bp, synthetic construct; identical to SEQ ID NO: 24553
  source 1..80: mol_type = other DNA

SEQ ID NO: 209284 - DNA, 80 bp, synthetic construct; identical to SEQ ID NO: 24554
  source 1..80: mol_type = other DNA

SEQ ID NO: 209285 - DNA, 80 bp, synthetic construct; identical to SEQ ID NO: 24555
  source 1..80: mol_type = other DNA

SEQ ID NO: 209286 - DNA, 80 bp, synthetic construct; identical to SEQ ID NO: 24556
  source 1..80: mol_type = other DNA

SEQ ID NO: 209287 - DNA, 80 bp, synthetic construct; identical to SEQ ID NO: 24557
  source 1..80: mol_type = other DNA

SEQ ID NO: 209288 - DNA, 80 bp, synthetic construct; identical to SEQ ID NO: 24558
  source 1..80: mol_type = other DNA

SEQ ID NO: 209289 - DNA, 80 bp, synthetic construct; identical to SEQ ID NO: 24559
  source 1..80: mol_type = other DNA

SEQ ID NO: 209290 - DNA, 80 bp, synthetic construct; identical to SEQ ID NO: 24560
  source 1..80: mol_type = other DNA

SEQ ID NO: 209291 - DNA, 80 bp, synthetic construct; identical to SEQ ID NO: 24561
  source 1..80: mol_type = other DNA

SEQ ID NO: 209292 - DNA, 80 bp, synthetic construct; identical to SEQ ID NO: 24562
  source 1..80: mol_type = other DNA

SEQ ID NO: 209293 - DNA, 80 bp, synthetic construct; identical to SEQ ID NO: 24563
  source 1..80: mol_type = other DNA

SEQ ID NO: 209294 - DNA, 80 bp, synthetic construct; identical to SEQ ID NO: 24564
  source 1..80: mol_type = other DNA

SEQ ID NO: 209295 - DNA, 80 bp, synthetic construct; identical to SEQ ID NO: 24565
  source 1..80: mol_type = other DNA

SEQ ID NO: 209296 - DNA, 80 bp, synthetic construct; identical to SEQ ID NO: 24566
  source 1..80: mol_type = other DNA

SEQ ID NO: 209297 - DNA, 80 bp, synthetic construct; identical to SEQ ID NO: 24567
  source 1..80: mol_type = other DNA

SEQ ID NO: 209298 - DNA, 80 bp, synthetic construct; identical to SEQ ID NO: 24568
  source 1..80: mol_type = other DNA

SEQ ID NO: 209299 - DNA, 80 bp, synthetic construct; identical to SEQ ID NO: 24569
  source 1..80: mol_type = other DNA

SEQ ID NO: 209300 - DNA, 80 bp, synthetic construct; identical to SEQ ID NO: 24570
  source 1..80: mol_type = other DNA

SEQ ID NO: 209301 - DNA, 80 bp, synthetic construct; identical to SEQ ID NO: 24571
  source 1..80: mol_type = other DNA

SEQ ID NO: 209302 - DNA, 80 bp, synthetic construct; identical to SEQ ID NO: 24572
  source 1..80: mol_type = other DNA

SEQ ID NO: 209303 - DNA, 80 bp, synthetic construct; identical to SEQ ID NO: 24573
  source 1..80: mol_type = other DNA

SEQ ID NO: 209304 - DNA, 80 bp, synthetic construct; identical to SEQ ID NO: 24574
  source 1..80: mol_type = other DNA

SEQ ID NO: 209305 - DNA, 80 bp, synthetic construct; identical to SEQ ID NO: 24575
  source 1..80: mol_type = other DNA

SEQ ID NO: 209306 - DNA, 80 bp, synthetic construct; identical to SEQ ID NO: 24576
  source 1..80: mol_type = other DNA

SEQ ID NO: 209307 - DNA, 80 bp, synthetic construct; identical to SEQ ID NO: 24577
  source 1..80: mol_type = other DNA

SEQ ID NO: 209308 - DNA, 80 bp, synthetic construct; identical to SEQ ID NO: 24578
  source 1..80: mol_type = other DNA

SEQ ID NO: 209309 - DNA, 80 bp, synthetic construct; identical to SEQ ID NO: 24579
  source 1..80: mol_type = other DNA

SEQ ID NO: 209310 - DNA, 80 bp, synthetic construct; identical to SEQ ID NO: 24580
  source 1..80: mol_type = other DNA

SEQ ID NO: 209311 - DNA, 80 bp, synthetic construct; identical to SEQ ID NO: 24581
  source 1..80: mol_type = other DNA

SEQ ID NO: 209312 - DNA, 80 bp, synthetic construct; identical to SEQ ID NO: 24582
  source 1..80: mol_type = other DNA

SEQ ID NO: 209313 - DNA, 80 bp, synthetic construct; identical to SEQ ID NO: 24583
  source 1..80: mol_type = other DNA

SEQ ID NO: 209314 - DNA, 80 bp, synthetic construct; identical to SEQ ID NO: 24584
  source 1..80: mol_type = other DNA

SEQ ID NO: 209315 - DNA, 80 bp, synthetic construct; identical to SEQ ID NO: 24585
  source 1..80: mol_type = other DNA

SEQ ID NO: 209316 - DNA, 80 bp, synthetic construct; identical to SEQ ID NO: 24586
  source 1..80: mol_type = other DNA

SEQ ID NO: 209317 - DNA, 80 bp, synthetic construct; identical to SEQ ID NO: 24587
  source 1..80: mol_type = other DNA

SEQ ID NO: 209318 - DNA, 80 bp, synthetic construct; identical to SEQ ID NO: 24588
  source 1..80: mol_type = other DNA

SEQ ID NO: 209319 - DNA, 80 bp, synthetic construct; identical to SEQ ID NO: 24589
  source 1..80: mol_type = other DNA

SEQ ID NO: 209320 - DNA, 80 bp, synthetic construct; identical to SEQ ID NO: 24590
  source 1..80: mol_type = other DNA

SEQ ID NO: 209321 - DNA, 80 bp, synthetic construct; identical to SEQ ID NO: 24591
  source 1..80: mol_type = other DNA

SEQ ID NO: 209322 - DNA, 80 bp, synthetic construct; identical to SEQ ID NO: 24592
  source 1..80: mol_type = other DNA

SEQ ID NO: 209323 - DNA, 80 bp, synthetic construct; identical to SEQ ID NO: 24593
  source 1..80: mol_type = other DNA

SEQ ID NO: 209324 - DNA, 80 bp, synthetic construct; identical to SEQ ID NO: 24594
  source 1..80: mol_type = other DNA

SEQ ID NO: 209325 - DNA, 80 bp, synthetic construct; identical to SEQ ID NO: 24595
  source 1..80: mol_type = other DNA

SEQ ID NO: 209326 - DNA, 80 bp, synthetic construct; identical to SEQ ID NO: 24596
  source 1..80: mol_type = other DNA

SEQ ID NO: 209327 - DNA, 80 bp, synthetic construct; identical to SEQ ID NO: 24597
  source 1..80: mol_type = other DNA

SEQ ID NO: 209328 - DNA, 80 bp, synthetic construct; identical to SEQ ID NO: 24598
  source 1..80: mol_type = other DNA

SEQ ID NO: 209329 - DNA, 80 bp, synthetic construct; identical to SEQ ID NO: 24599
  source 1..80: mol_type = other DNA

SEQ ID NO: 209330 - DNA, 80 bp, synthetic construct; identical to SEQ ID NO: 24600
  source 1..80: mol_type = other DNA

SEQ ID NO: 209331 - DNA, 80 bp, synthetic construct; identical to SEQ ID NO: 24601
  source 1..80: mol_type = other DNA

SEQ ID NO: 209332 - DNA, 80 bp, synthetic construct; identical to SEQ ID NO: 24602
  source 1..80: mol_type = other DNA

SEQ ID NO: 209333 - DNA, 80 bp, synthetic construct; identical to SEQ ID NO: 24603
  source 1..80: mol_type = other DNA

SEQ ID NO: 209334 - DNA, 80 bp, synthetic construct; identical to SEQ ID NO: 24604
  source 1..80: mol_type = other DNA

SEQ ID NO: 209335 - DNA, 80 bp, synthetic construct; identical to SEQ ID NO: 24605
  source 1..80: mol_type = other DNA

SEQ ID NO: 209336 - DNA, 80 bp, synthetic construct; identical to SEQ ID NO: 24606
  source 1..80: mol_type = other DNA

SEQ ID NO: 209337 - DNA, 80 bp, synthetic construct; identical to SEQ ID NO: 24607
  source 1..80: mol_type = other DNA

SEQ ID NO: 209338 - DNA, 80 bp, synthetic construct; identical to SEQ ID NO: 24608
  source 1..80: mol_type = other DNA

SEQ ID NO: 209339 - DNA, 80 bp, synthetic construct; identical to SEQ ID NO: 24609
  source 1..80: mol_type = other DNA

SEQ ID NO: 209340 - DNA, 80 bp, synthetic construct; identical to SEQ ID NO: 24610
  source 1..80: mol_type = other DNA

SEQ ID NO: 209341 - DNA, 80 bp, synthetic construct; identical to SEQ ID NO: 24611
  source 1..80: mol_type = other DNA

SEQ ID NO: 209342 - DNA, 80 bp, synthetic construct; identical to SEQ ID NO: 24612
  source 1..80: mol_type = other DNA

SEQ ID NO: 209343 - DNA, 80 bp, synthetic construct; identical to SEQ ID NO: 24613
  source 1..80: mol_type = other DNA

SEQ ID NO: 209344 - DNA, 80 bp, synthetic construct; identical to SEQ ID NO: 24614
  source 1..80: mol_type = other DNA

SEQ ID NO: 209345 - DNA, 80 bp, synthetic construct; identical to SEQ ID NO: 24615
  source 1..80: mol_type = other DNA

SEQ ID NO: 209346 - DNA, 80 bp, synthetic construct; identical to SEQ ID NO: 24616
  source 1..80: mol_type = other DNA

SEQ ID NO: 209347 - DNA, 80 bp, synthetic construct; identical to SEQ ID NO: 24617
  source 1..80: mol_type = other DNA

SEQ ID NO: 209348 - DNA, 80 bp, synthetic construct; identical to SEQ ID NO: 24618
  source 1..80: mol_type = other DNA

SEQ ID NO: 209349 - DNA, 80 bp, synthetic construct; identical to SEQ ID NO: 24619
  source 1..80: mol_type = other DNA

SEQ ID NO: 209350 - DNA, 80 bp, synthetic construct; identical to SEQ ID NO: 24620
  source 1..80: mol_type = other DNA

SEQ ID NO: 209351 - DNA, 80 bp, synthetic construct; identical to SEQ ID NO: 24621
  source 1..80: mol_type = other DNA

SEQ ID NO: 209352 - DNA, 80 bp, synthetic construct; identical to SEQ ID NO: 24622
  source 1..80: mol_type = other DNA

SEQ ID NO: 209353 - DNA, 80 bp, synthetic construct; identical to SEQ ID NO: 24623
  source 1..80: mol_type = other DNA

SEQ ID NO: 209354 - DNA, 80 bp, synthetic construct; identical to SEQ ID NO: 24624
  source 1..80: mol_type = other DNA

SEQ ID NO: 209355 - DNA, 80 bp, synthetic construct; identical to SEQ ID NO: 24625
  source 1..80: mol_type = other DNA

SEQ ID NO: 209356 - DNA, 80 bp, synthetic construct; identical to SEQ ID NO: 24626
  source 1..80: mol_type = other DNA

SEQ ID NO: 209357 - DNA, 80 bp, synthetic construct; identical to SEQ ID NO: 24627
  source 1..80: mol_type = other DNA

SEQ ID NO: 209358 - DNA, 80 bp, synthetic construct; identical to SEQ ID NO: 24628
  source 1..80: mol_type = other DNA

SEQ ID NO: 209359 - DNA, 80 bp, synthetic construct; identical to SEQ ID NO: 24629
  source 1..80: mol_type = other DNA

SEQ ID NO: 209360 - DNA, 80 bp, synthetic construct; identical to SEQ ID NO: 24630
  source 1..80: mol_type = other DNA

SEQ ID NO: 209361 - DNA, 80 bp, synthetic construct; identical to SEQ ID NO: 24631
  source 1..80: mol_type = other DNA

SEQ ID NO: 209362 - DNA, 80 bp, synthetic construct; identical to SEQ ID NO: 24632
  source 1..80: mol_type = other DNA

SEQ ID NO: 209363 - DNA, 80 bp, synthetic construct; identical to SEQ ID NO: 24633
  source 1..80: mol_type = other DNA

SEQ ID NO: 209364 - DNA, 80 bp, synthetic construct; identical to SEQ ID NO: 24634
  source 1..80: mol_type = other DNA

SEQ ID NO: 209365 - DNA, 80 bp, synthetic construct; identical to SEQ ID NO: 24635
  source 1..80: mol_type = other DNA

SEQ ID NO: 209366 - DNA, 80 bp, synthetic construct; identical to SEQ ID NO: 24636
  source 1..80: mol_type = other DNA

SEQ ID NO: 209367 - DNA, 80 bp, synthetic construct; identical to SEQ ID NO: 24637
  source 1..80: mol_type = other DNA

SEQ ID NO: 209368 - DNA, 80 bp, synthetic construct; identical to SEQ ID NO: 24638
  source 1..80: mol_type = other DNA

SEQ ID NO: 209369 - DNA, 80 bp, synthetic construct; identical to SEQ ID NO: 24639
  source 1..80: mol_type = other DNA

SEQ ID NO: 209370 - DNA, 80 bp, synthetic construct; identical to SEQ ID NO: 24640
  source 1..80: mol_type = other DNA

SEQ ID NO: 209371 - DNA, 80 bp, synthetic construct; identical to SEQ ID NO: 24641
  source 1..80: mol_type = other DNA

SEQ ID NO: 209372 - DNA, 80 bp, synthetic construct; identical to SEQ ID NO: 24642
  source 1..80: mol_type = other DNA

SEQ ID NO: 209373 - DNA, 80 bp, synthetic construct; identical to SEQ ID NO: 24643
  source 1..80: mol_type = other DNA

SEQ ID NO: 209374 - DNA, 80 bp, synthetic construct; identical to SEQ ID NO: 24644
  source 1..80: mol_type = other DNA

SEQ ID NO: 209375 - DNA, 80 bp, synthetic construct; identical to SEQ ID NO: 24645
  source 1..80: mol_type = other DNA

SEQ ID NO: 209376 - DNA, 80 bp, synthetic construct; identical to SEQ ID NO: 24646
  source 1..80: mol_type = other DNA

SEQ ID NO: 209377 - DNA, 80 bp, synthetic construct; identical to SEQ ID NO: 24647
  source 1..80: mol_type = other DNA

SEQ ID NO: 209378 - DNA, 80 bp, synthetic construct; identical to SEQ ID NO: 24648
  source 1..80: mol_type = other DNA

SEQ ID NO: 209379 - DNA, 80 bp, synthetic construct; identical to SEQ ID NO: 24649
  source 1..80: mol_type = other DNA

SEQ ID NO: 209380 - DNA, 80 bp, synthetic construct; identical to SEQ ID NO: 24650
  source 1..80: mol_type = other DNA

SEQ ID NO: 209381 - DNA, 80 bp, synthetic construct; identical to SEQ ID NO: 24651
  source 1..80: mol_type = other DNA

SEQ ID NO: 209382 - DNA, 80 bp, synthetic construct; identical to SEQ ID NO: 24652
  source 1..80: mol_type = other DNA

SEQ ID NO: 209383 - DNA, 80 bp, synthetic construct; identical to SEQ ID NO: 24653
  source 1..80: mol_type = other DNA

SEQ ID NO: 209384 - DNA, 80 bp, synthetic construct; identical to SEQ ID NO: 24654
  source 1..80: mol_type = other DNA

SEQ ID NO: 209385 - DNA, 80 bp, synthetic construct; identical to SEQ ID NO: 24655
  source 1..80: mol_type = other DNA

SEQ ID NO: 209386 - DNA, 80 bp, synthetic construct; identical to SEQ ID NO: 24656
  source 1..80: mol_type = other DNA

SEQ ID NO: 209387 - DNA, 80 bp, synthetic construct; identical to SEQ ID NO: 24657
  source 1..80: mol_type = other DNA

SEQ ID NO: 209388 - DNA, 80 bp, synthetic construct; identical to SEQ ID NO: 24658
  source 1..80: mol_type = other DNA

SEQ ID NO: 209389 - DNA, 80 bp, synthetic construct; identical to SEQ ID NO: 24659
  source 1..80: mol_type = other DNA

SEQ ID NO: 209390 - DNA, 80 bp, synthetic construct; identical to SEQ ID NO: 24660
  source 1..80: mol_type = other DNA

SEQ ID NO: 209391 - DNA, 80 bp, synthetic construct; identical to SEQ ID NO: 24661
  source 1..80: mol_type = other DNA

SEQ ID NO: 209392 - DNA, 80 bp, synthetic construct; identical to SEQ ID NO: 24662
  source 1..80: mol_type = other DNA

SEQ ID NO: 209393 - DNA, 80 bp, synthetic construct; identical to SEQ ID NO: 24663
  source 1..80: mol_type = other DNA

SEQ ID NO: 209394 - DNA, 80 bp, synthetic construct; identical to SEQ ID NO: 24664
  source 1..80: mol_type = other DNA

SEQ ID NO: 209395 - DNA, 80 bp, synthetic construct; identical to SEQ ID NO: 24665
  source 1..80: mol_type = other DNA

SEQ ID NO: 209396 - DNA, 80 bp, synthetic construct; identical to SEQ ID NO: 24666
  source 1..80: mol_type = other DNA

SEQ ID NO: 209397 - DNA, 80 bp, synthetic construct; identical to SEQ ID NO: 24667
  source 1..80: mol_type = other DNA

SEQ ID NO: 209398 - DNA, 80 bp, synthetic construct; identical to SEQ ID NO: 24668
  source 1..80: mol_type = other DNA

SEQ ID NO: 209399 - DNA, 80 bp, synthetic construct; identical to SEQ ID NO: 24669
  source 1..80: mol_type = other DNA

SEQ ID NO: 209400 - DNA, 80 bp, synthetic construct; identical to SEQ ID NO: 24670
  source 1..80: mol_type = other DNA

SEQ ID NO: 209401 - DNA, 80 bp, synthetic construct; identical to SEQ ID NO: 24671
  source 1..80: mol_type = other DNA

SEQ ID NO: 209402 - DNA, 80 bp, synthetic construct; identical to SEQ ID NO: 24672
  source 1..80: mol_type = other DNA

SEQ ID NO: 209403 - DNA, 80 bp, synthetic construct; identical to SEQ ID NO: 24673
  source 1..80: mol_type = other DNA

SEQ ID NO: 209404 - DNA, 80 bp, synthetic construct; identical to SEQ ID NO: 24674
  source 1..80: mol_type = other DNA

SEQ ID NO: 209405 - DNA, 80 bp, synthetic construct; identical to SEQ ID NO: 24675
  source 1..80: mol_type = other DNA

SEQ ID NO: 209406 - DNA, 80 bp, synthetic construct; identical to SEQ ID NO: 24676
  source 1..80: mol_type = other DNA

SEQ ID NO: 209407 - DNA, 80 bp, synthetic construct; identical to SEQ ID NO: 24677
  source 1..80: mol_type = other DNA

SEQ ID NO: 209408 - DNA, 80 bp, synthetic construct; identical to SEQ ID NO: 24678
  source 1..80: mol_type = other DNA

SEQ ID NO: 209409 - DNA, 80 bp, synthetic construct; identical to SEQ ID NO: 24679
  source 1..80: mol_type = other DNA

SEQ ID NO: 209410 - DNA, 80 bp, synthetic construct; identical to SEQ ID NO: 24680
  source 1..80: mol_type = other DNA

SEQ ID NO: 209411 - DNA, 80 bp, synthetic construct; identical to SEQ ID NO: 24681
  source 1..80: mol_type = other DNA

SEQ ID NO: 209412 - DNA, 80 bp, synthetic construct; identical to SEQ ID NO: 24682
  source 1..80: mol_type = other DNA

SEQ ID NO: 209413 - DNA, 80 bp, synthetic construct; identical to SEQ ID NO: 24683
  source 1..80: mol_type = other DNA

SEQ ID NO: 209414 - DNA, 80 bp, synthetic construct; identical to SEQ ID NO: 24684
  source 1..80: mol_type = other DNA

SEQ ID NO: 209415 - DNA, 80 bp, synthetic construct; identical to SEQ ID NO: 24685
  source 1..80: mol_type = other DNA

SEQ ID NO: 209416 - DNA, 80 bp, synthetic construct; identical to SEQ ID NO: 24686
  source 1..80: mol_type = other DNA

SEQ ID NO: 209417 - DNA, 80 bp, synthetic construct; identical to SEQ ID NO: 24687
  source 1..80: mol_type = other DNA

SEQ ID NO: 209418 - DNA, 80 bp, synthetic construct; identical to SEQ ID NO: 24688
  source 1..80: mol_type = other DNA

SEQ ID NO: 209419 - DNA, 80 bp, synthetic construct; identical to SEQ ID NO: 24689
  source 1..80: mol_type = other DNA

SEQ ID NO: 209420 - DNA, 80 bp, synthetic construct; identical to SEQ ID NO: 24690
  source 1..80: mol_type = other DNA

SEQ ID NO: 209421 - DNA, 80 bp, synthetic construct; identical to SEQ ID NO: 24691
  source 1..80: mol_type = other DNA

SEQ ID NO: 209422 - DNA, 80 bp, synthetic construct; identical to SEQ ID NO: 24692
  source 1..80: mol_type = other DNA

SEQ ID NO: 209423 - DNA, 80 bp, synthetic construct; identical to SEQ ID NO: 24693
  source 1..80: mol_type = other DNA

SEQ ID NO: 209424 - DNA, 80 bp, synthetic construct; identical to SEQ ID NO: 24694
  source 1..80: mol_type = other DNA

SEQ ID NO: 209425 - DNA, 80 bp, synthetic construct; identical to SEQ ID NO: 24695
  source 1..80: mol_type = other DNA

SEQ ID NO: 209426 - DNA, 80 bp, synthetic construct; identical to SEQ ID NO: 24696
  source 1..80: mol_type = other DNA

SEQ ID NO: 209427 - DNA, 80 bp, synthetic construct; identical to SEQ ID NO: 24697
  source 1..80: mol_type = other DNA

SEQ ID NO: 209428 - DNA, 80 bp, synthetic construct; identical to SEQ ID NO: 24698
  source 1..80: mol_type = other DNA

SEQ ID NO: 209429 - DNA, 80 bp, synthetic construct; identical to SEQ ID NO: 24699
  source 1..80: mol_type = other DNA

SEQ ID NO: 209430 - DNA, 80 bp, synthetic construct; identical to SEQ ID NO: 24700
  source 1..80: mol_type = other DNA

SEQ ID NO: 209431 - DNA, 80 bp, synthetic construct; identical to SEQ ID NO: 24701
  source 1..80: mol_type = other DNA

SEQ ID NO: 209432 - DNA, 80 bp, synthetic construct; identical to SEQ ID NO: 24702
  source 1..80: mol_type = other DNA

SEQ ID NO: 209433 - DNA, 80 bp, synthetic construct; identical to SEQ ID NO: 24703
  source 1..80: mol_type = other DNA

SEQ ID NO: 209434 - DNA, 80 bp, synthetic construct; identical to SEQ ID NO: 24704
  source 1..80: mol_type = other DNA

SEQ ID NO: 209435 - DNA, 80 bp, synthetic construct; identical to SEQ ID NO: 24705
  source 1..80: mol_type = other DNA

SEQ ID NO: 209436 - DNA, 80 bp, synthetic construct; identical to SEQ ID NO: 24706
  source 1..80: mol_type = other DNA

SEQ ID NO: 209437 - DNA, 80 bp, synthetic construct; identical to SEQ ID NO: 24707
  source 1..80: mol_type = other DNA

SEQ ID NO: 209438 - DNA, 80 bp, synthetic construct; identical to SEQ ID NO: 24708
  source 1..80: mol_type = other DNA

SEQ ID NO: 209439 - DNA, 80 bp, synthetic construct; identical to SEQ ID NO: 24709
  source 1..80: mol_type = other DNA

SEQ ID NO: 209440 - DNA, 80 bp, synthetic construct; identical to SEQ ID NO: 24710
  source 1..80: mol_type = other DNA

SEQ ID NO: 209441 - DNA, 80 bp, synthetic construct; identical to SEQ ID NO: 24711
  source 1..80: mol_type = other DNA

SEQ ID NO: 209442 - DNA, 80 bp, synthetic construct; identical to SEQ ID NO: 24712
  source 1..80: mol_type = other DNA

SEQ ID NO: 209443 - DNA, 80 bp, synthetic construct; identical to SEQ ID NO: 24713
  source 1..80: mol_type = other DNA

SEQ ID NO: 209444 - DNA, 80 bp, synthetic construct; identical to SEQ ID NO: 24714
  source 1..80: mol_type = other DNA

SEQ ID NO: 209445 - DNA, 80 bp, synthetic construct; identical to SEQ ID NO: 24715
  source 1..80: mol_type = other DNA

SEQ ID NO: 209446 - DNA, 80 bp, synthetic construct; identical to SEQ ID NO: 24716
  source 1..80: mol_type = other DNA

SEQ ID NO: 209447 - DNA, 80 bp, synthetic construct; identical to SEQ ID NO: 24717
  source 1..80: mol_type = other DNA

SEQ ID NO: 209448 - DNA, 80 bp, synthetic construct; identical to SEQ ID NO: 24718
  source 1..80: mol_type = other DNA

SEQ ID NO: 209449 - DNA, 80 bp, synthetic construct; identical to SEQ ID NO: 24719
  source 1..80: mol_type = other DNA

SEQ ID NO: 209450 - DNA, 80 bp, synthetic construct; identical to SEQ ID NO: 24720
  source 1..80: mol_type = other DNA

SEQ ID NO: 209451 - DNA, 80 bp, synthetic construct; identical to SEQ ID NO: 24721
  source 1..80: mol_type = other DNA

SEQ ID NO: 209452 - DNA, 80 bp, synthetic construct; identical to SEQ ID NO: 24722
  source 1..80: mol_type = other DNA

SEQ ID NO: 209453 - DNA, 80 bp, synthetic construct; identical to SEQ ID NO: 24723
  source 1..80: mol_type = other DNA

SEQ ID NO: 209454 - DNA, 80 bp, synthetic construct; identical to SEQ ID NO: 24724
  source 1..80: mol_type = other DNA

SEQ ID NO: 209455 - DNA, 80 bp, synthetic construct; identical to SEQ ID NO: 24725
  source 1..80: mol_type = other DNA

SEQ ID NO: 209456 - DNA, 80 bp, synthetic construct; identical to SEQ ID NO: 24726
  source 1..80: mol_type = other DNA

SEQ ID NO: 209457 - DNA, 80 bp, synthetic construct; identical to SEQ ID NO: 24727
  source 1..80: mol_type = other DNA

SEQ ID NO: 209458 - DNA, 80 bp, synthetic construct; identical to SEQ ID NO: 24728
  source 1..80: mol_type = other DNA

SEQ ID NO: 209459 - DNA, 80 bp, synthetic construct; identical to SEQ ID NO: 24729
  source 1..80: mol_type = other DNA

SEQ ID NO: 209460 - DNA, 80 bp, synthetic construct; identical to SEQ ID NO: 24730
  source 1..80: mol_type = other DNA

SEQ ID NO: 209461 - DNA, 80 bp, synthetic construct; identical to SEQ ID NO: 24731
  source 1..80: mol_type = other DNA

SEQ ID NO: 209462 - DNA, 80 bp, synthetic construct; identical to SEQ ID NO: 24732
  source 1..80: mol_type = other DNA

SEQ ID NO: 209463 - DNA, 80 bp, synthetic construct; identical to SEQ ID NO: 24733
  source 1..80: mol_type = other DNA

SEQ ID NO: 209464 - DNA, 80 bp, synthetic construct; identical to SEQ ID NO: 24734
  source 1..80: mol_type = other DNA

SEQ ID NO: 209465 - DNA, 80 bp, synthetic construct; identical to SEQ ID NO: 24735
  source 1..80: mol_type = other DNA

SEQ ID NO: 209466 - DNA, 80 bp, synthetic construct; identical to SEQ ID NO: 24736
  source 1..80: mol_type = other DNA

SEQ ID NO: 209467 - DNA, 80 bp, synthetic construct; identical to SEQ ID NO: 24737
  source 1..80: mol_type = other DNA

SEQ ID NO: 209468 - DNA, 80 bp, synthetic construct; identical to SEQ ID NO: 24738
  source 1..80: mol_type = other DNA

SEQ ID NO: 209469 - DNA, 80 bp, synthetic construct; identical to SEQ ID NO: 24739
  source 1..80: mol_type = other DNA

SEQ ID NO: 209470 - DNA, 80 bp, synthetic construct; identical to SEQ ID NO: 24740
  source 1..80: mol_type = other DNA

SEQ ID NO: 209471 - DNA, 80 bp, synthetic construct; identical to SEQ ID NO: 24741
  source 1..80: mol_type = other DNA

SEQ ID NO: 209472 - DNA, 80 bp, synthetic construct; identical to SEQ ID NO: 24742
  source 1..80: mol_type = other DNA

SEQ ID NO: 209473 - DNA, 80 bp, synthetic construct; identical to SEQ ID NO: 24743
  source 1..80: mol_type = other DNA

SEQ ID NO: 209474 - DNA, 80 bp, synthetic construct; identical to SEQ ID NO: 24744
  source 1..80: mol_type = other DNA

SEQ ID NO: 209475 - DNA, 80 bp, synthetic construct; identical to SEQ ID NO: 24745
  source 1..80: mol_type = other DNA

SEQ ID NO: 209476 - DNA, 80 bp, synthetic construct; identical to SEQ ID NO: 24746
  source 1..80: mol_type = other DNA

SEQ ID NO: 209477 - DNA, 80 bp, synthetic construct; identical to SEQ ID NO: 24747
  source 1..80: mol_type = other DNA

SEQ ID NO: 209478 - DNA, 80 bp, synthetic construct; identical to SEQ ID NO: 24748
  source 1..80: mol_type = other DNA

SEQ ID NO: 209479 - DNA, 80 bp, synthetic construct; identical to SEQ ID NO: 24749
  source 1..80: mol_type = other DNA

SEQ ID NO: 209480 - DNA, 80 bp, synthetic construct; identical to SEQ ID NO: 24750
  source 1..80: mol_type = other DNA

SEQ ID NO: 209481 - DNA, 80 bp, synthetic construct; identical to SEQ ID NO: 24751
  source 1..80: mol_type = other DNA

SEQ ID NO: 209482 - DNA, 80 bp, synthetic construct; identical to SEQ ID NO: 24752
  source 1..80: mol_type = other DNA

SEQ ID NO: 209483 - DNA, 80 bp, synthetic construct; identical to SEQ ID NO: 24753
  source 1..80: mol_type = other DNA

SEQ ID NO: 209484 - DNA, 80 bp, synthetic construct; identical to SEQ ID NO: 24754
  source 1..80: mol_type = other DNA

SEQ ID NO: 209485 - DNA, 80 bp, synthetic construct; identical to SEQ ID NO: 24755
  source 1..80: mol_type = other DNA

SEQ ID NO: 209486 - DNA, 80 bp, synthetic construct; identical to SEQ ID NO: 24756
  source 1..80: mol_type = other DNA

SEQ ID NO: 209487 - DNA, 80 bp, synthetic construct; identical to SEQ ID NO: 24757
  source 1..80: mol_type = other DNA

SEQ ID NO: 209488 - DNA, 80 bp, synthetic construct; identical to SEQ ID NO: 24758
  source 1..80: mol_type = other DNA

SEQ ID NO: 209489 - DNA, 80 bp, synthetic construct; identical to SEQ ID NO: 24759
  source 1..80: mol_type = other DNA

SEQ ID NO: 209490 - DNA, 80 bp, synthetic construct; identical to SEQ ID NO: 24760
  source 1..80: mol_type = other DNA

SEQ ID NO: 209491 - DNA, 80 bp, synthetic construct; identical to SEQ ID NO: 24761
  source 1..80: mol_type = other DNA

SEQ ID NO: 209492 - DNA, 80 bp, synthetic construct; identical to SEQ ID NO: 24762
  source 1..80: mol_type = other DNA

SEQ ID NO: 209493 - DNA, 80 bp, synthetic construct; identical to SEQ ID NO: 24763
  source 1..80: mol_type = other DNA

SEQ ID NO: 209494 - DNA, 80 bp, synthetic construct; identical to SEQ ID NO: 24764
  source 1..80: mol_type = other DNA

SEQ ID NO: 209495 - DNA, 80 bp, synthetic construct; identical to SEQ ID NO: 24765
  source 1..80: mol_type = other DNA

SEQ ID NO: 209496 - DNA, 80 bp, synthetic construct; identical to SEQ ID NO: 24766
  source 1..80: mol_type = other DNA

SEQ ID NO: 209497 - DNA, 80 bp, synthetic construct; identical to SEQ ID NO: 24767
  source 1..80: mol_type = other DNA

SEQ ID NO: 209498 - DNA, 80 bp, synthetic construct; identical to SEQ ID NO: 24768
  source 1..80: mol_type = other DNA

SEQ ID NO: 209499 - DNA, 80 bp, synthetic construct; identical to SEQ ID NO: 24769
  source 1..80: mol_type = other DNA

SEQ ID NO: 209500 - DNA, 80 bp, synthetic construct; identical to SEQ ID NO: 24770
  source 1..80: mol_type = other DNA

SEQ ID NO: 209501 - DNA, 80 bp, synthetic construct; identical to SEQ ID NO: 24771
  source 1..80: mol_type = other DNA

SEQ ID NO: 209502 - DNA, 80 bp, synthetic construct; identical to SEQ ID NO: 24772
  source 1..80: mol_type = other DNA

SEQ ID NO: 209503 - DNA, 80 bp, synthetic construct; identical to SEQ ID NO: 24773
  source 1..80: mol_type = other DNA

SEQ ID NO: 209504 - DNA, 80 bp, synthetic construct; identical to SEQ ID NO: 24774
  source 1..80: mol_type = other DNA

SEQ ID NO: 209505 - DNA, 80 bp, synthetic construct; identical to SEQ ID NO: 24775
  source 1..80: mol_type = other DNA

SEQ ID NO: 209506 - DNA, 80 bp, synthetic construct; identical to SEQ ID NO: 24776
  source 1..80: mol_type = other DNA

SEQ ID NO: 209507 - DNA, 80 bp, synthetic construct; identical to SEQ ID NO: 24777
  source 1..80: mol_type = other DNA

SEQ ID NO: 209508 - DNA, 80 bp, synthetic construct; identical to SEQ ID NO: 24778
  source 1..80: mol_type = other DNA

SEQ ID NO: 209509 - DNA, 80 bp, synthetic construct; identical to SEQ ID NO: 24779
  source 1..80: mol_type = other DNA

SEQ ID NO: 209510 - DNA, 80 bp, synthetic construct; identical to SEQ ID NO: 24780
  source 1..80: mol_type = other DNA

SEQ ID NO: 209511 - DNA, 80 bp, synthetic construct; identical to SEQ ID NO: 24781
  source 1..80: mol_type = other DNA

SEQ ID NO: 209512 - DNA, 80 bp, synthetic construct; identical to SEQ ID NO: 24782
  source 1..80: mol_type = other DNA

SEQ ID NO: 209513 - DNA, 80 bp, synthetic construct; identical to SEQ ID NO: 24783
  source 1..80: mol_type = other DNA

SEQ ID NO: 209514 - DNA, 80 bp, synthetic construct; identical to SEQ ID NO: 24784
  source 1..80: mol_type = other DNA

SEQ ID NO: 209515 - DNA, 80 bp, synthetic construct; identical to SEQ ID NO: 24785
  source 1..80: mol_type = other DNA

SEQ ID NO: 209516 - DNA, 80 bp, synthetic construct; identical to SEQ ID NO: 24786
  source 1..80: mol_type = other DNA

SEQ ID NO: 209517 - DNA, 80 bp, synthetic construct; identical to SEQ ID NO: 24787
  source 1..80: mol_type = other DNA

SEQ ID NO: 209518 - DNA, 80 bp, synthetic construct; identical to SEQ ID NO: 24788
  source 1..80: mol_type = other DNA

SEQ ID NO: 209519 - DNA, 80 bp, synthetic construct; identical to SEQ ID NO: 24789
  source 1..80: mol_type = other DNA

SEQ ID NO: 209520 - DNA, 80 bp, synthetic construct; identical to SEQ ID NO: 24790
  source 1..80: mol_type = other DNA

SEQ ID NO: 209521 - DNA, 80 bp, synthetic construct; identical to SEQ ID NO: 24791
  source 1..80: mol_type = other DNA

SEQ ID NO: 209522 - DNA, 80 bp, synthetic construct; identical to SEQ ID NO: 24792
  source 1..80: mol_type = other DNA

SEQ ID NO: 209523 - DNA, 80 bp, synthetic construct; identical to SEQ ID NO: 24793
  source 1..80: mol_type = other DNA

SEQ ID NO: 209524 - DNA, 80 bp, synthetic construct; identical to SEQ ID NO: 24794
  source 1..80: mol_type = other DNA

SEQ ID NO: 209525 - DNA, 80 bp, synthetic construct; identical to SEQ ID NO: 24795
  source 1..80: mol_type = other DNA

SEQ ID NO: 209526 - DNA, 80 bp, synthetic construct; identical to SEQ ID NO: 24796
  source 1..80: mol_type = other DNA

SEQ ID NO: 209527 - DNA, 80 bp, synthetic construct; identical to SEQ ID NO: 24797
  source 1..80: mol_type = other DNA

SEQ ID NO: 209528 - DNA, 80 bp, synthetic construct; identical to SEQ ID NO: 24798
  source 1..80: mol_type = other DNA

SEQ ID NO: 209529 - DNA, 80 bp, synthetic construct; identical to SEQ ID NO: 24799
  source 1..80: mol_type = other DNA

SEQ ID NO: 209530 - DNA, 80 bp, synthetic construct; identical to SEQ ID NO: 24800
  source 1..80: mol_type = other DNA

SEQ ID NO: 209531 - DNA, 80 bp, synthetic construct; identical to SEQ ID NO: 24801
  source 1..80: mol_type = other DNA

SEQ ID NO: 209532 - DNA, 80 bp, synthetic construct; identical to SEQ ID NO: 24802
  source 1..80: mol_type = other DNA

SEQ ID NO: 209533 - DNA, 80 bp, synthetic construct; identical to SEQ ID NO: 24803
  source 1..80: mol_type = other DNA

SEQ ID NO: 209534 - DNA, 80 bp, synthetic construct; identical to SEQ ID NO: 24804
  source 1..80: mol_type = other DNA

SEQ ID NO: 209535 - DNA, 80 bp, synthetic construct; identical to SEQ ID NO: 24805
  source 1..80: mol_type = other DNA

SEQ ID NO: 209536 - DNA, 80 bp, synthetic construct; identical to SEQ ID NO: 24806
  source 1..80: mol_type = other DNA

SEQ ID NO: 209537 - DNA, 80 bp, synthetic construct; identical to SEQ ID NO: 24807
  source 1..80: mol_type = other DNA

SEQ ID NO: 209538 - DNA, 80 bp, synthetic construct; identical to SEQ ID NO: 24808
  source 1..80: mol_type = other DNA

SEQ ID NO: 209539 - DNA, 80 bp, synthetic construct; identical to SEQ ID NO: 24809
  source 1..80: mol_type = other DNA

SEQ ID NO: 209540 - DNA, 80 bp, synthetic construct; identical to SEQ ID NO: 24810
  source 1..80: mol_type = other DNA

SEQ ID NO: 209541 - DNA, 80 bp, synthetic construct; identical to SEQ ID NO: 24811
  source 1..80: mol_type = other DNA

SEQ ID NO: 209542 - DNA, 80 bp, synthetic construct; identical to SEQ ID NO: 24812
  source 1..80: mol_type = other DNA

SEQ ID NO: 209543 - DNA, 80 bp, synthetic construct; identical to SEQ ID NO: 24813
  source 1..80: mol_type = other DNA

SEQ ID NO: 209544 - DNA, 80 bp, synthetic construct; identical to SEQ ID NO: 24814
  source 1..80: mol_type = other DNA

SEQ ID NO: 209545 - DNA, 80 bp, synthetic construct; identical to SEQ ID NO: 24815
  source 1..80: mol_type = other DNA

SEQ ID NO: 209546 - DNA, 80 bp, synthetic construct; identical to SEQ ID NO: 24816
  source 1..80: mol_type = other DNA

SEQ ID NO: 209547 - DNA, 80 bp, synthetic construct; identical to SEQ ID NO: 24817
  source 1..80: mol_type = other DNA

SEQ ID NO: 209548 - DNA, 80 bp, synthetic construct; identical to SEQ ID NO: 24818
  source 1..80: mol_type = other DNA

SEQ ID NO: 209549 - DNA, 80 bp, synthetic construct; identical to SEQ ID NO: 24819
  source 1..80: mol_type = other DNA

SEQ ID NO: 209550 - DNA, 80 bp, synthetic construct; identical to SEQ ID NO: 24820
  source 1..80: mol_type = other DNA

SEQ ID NO: 209551 - DNA, 80 bp, synthetic construct; identical to SEQ ID NO: 24821
  source 1..80: mol_type = other DNA

SEQ ID NO: 209552 - DNA, 80 bp, synthetic construct; identical to SEQ ID NO: 24822
  source 1..80: mol_type = other DNA

SEQ ID NO: 209553 - DNA, 80 bp, synthetic construct; identical to SEQ ID NO: 24823
  source 1..80: mol_type = other DNA

SEQ ID NO: 209554 - DNA, 80 bp, synthetic construct; identical to SEQ ID NO: 24824
  source 1..80: mol_type = other DNA

SEQ ID NO: 209555 - DNA, 80 bp, synthetic construct; identical to SEQ ID NO: 24825
  source 1..80: mol_type = other DNA

SEQ ID NO: 209556 - DNA, 80 bp, synthetic construct; identical to SEQ ID NO: 24826
  source 1..80: mol_type = other DNA

SEQ ID NO: 209557 - DNA, 80 bp, synthetic construct; identical to SEQ ID NO: 24827
  source 1..80: mol_type = other DNA

SEQ ID NO: 209558 - DNA, 80 bp, synthetic construct; identical to SEQ ID NO: 24828
  source 1..80: mol_type = other DNA

SEQ ID NO: 209559 - DNA, 80 bp, synthetic construct; identical to SEQ ID NO: 24829
  source 1..80: mol_type = other DNA

SEQ ID NO: 209560 - DNA, 80 bp, synthetic construct; identical to SEQ ID NO: 24830
  source 1..80: mol_type = other DNA

SEQ ID NO: 209561 - DNA, 80 bp, synthetic construct; identical to SEQ ID NO: 24831
  source 1..80: mol_type = other DNA

SEQ ID NO: 209562 - DNA, 80 bp, synthetic construct; identical to SEQ ID NO: 24832
  source 1..80: mol_type = other DNA

SEQ ID NO: 209563 - DNA, 80 bp, synthetic construct; identical to SEQ ID NO: 24833
  source 1..80: mol_type = other DNA

SEQ ID NO: 209564 - DNA, 80 bp, synthetic construct; identical to SEQ ID NO: 24834
  source 1..80: mol_type = other DNA

SEQ ID NO: 209565 - DNA, 80 bp, synthetic construct; identical to SEQ ID NO: 24835
  source 1..80: mol_type = other DNA

SEQ ID NO: 209566 - DNA, 80 bp, synthetic construct; identical to SEQ ID NO: 24836
  source 1..80: mol_type = other DNA

SEQ ID NO: 209567 - DNA, 80 bp, synthetic construct; identical to SEQ ID NO: 24837
  source 1..80: mol_type = other DNA

SEQ ID NO: 209568 - DNA, 80 bp, synthetic construct; identical to SEQ ID NO: 24838
  source 1..80: mol_type = other DNA

SEQ ID NO: 209569 - DNA, 80 bp, synthetic construct; identical to SEQ ID NO: 24839
  source 1..80: mol_type = other DNA

SEQ ID NO: 209570 - DNA, 80 bp, synthetic construct; identical to SEQ ID NO: 24840
  source 1..80: mol_type = other DNA

SEQ ID NO: 209571 - DNA, 80 bp, synthetic construct; identical to SEQ ID NO: 24841
  source 1..80: mol_type = other DNA

SEQ ID NO: 209572 - DNA, 80 bp, synthetic construct; identical to SEQ ID NO: 24842
  source 1..80: mol_type = other DNA

SEQ ID NO: 209573 - DNA, 80 bp, synthetic construct; identical to SEQ ID NO: 24843
  source 1..80: mol_type = other DNA

SEQ ID NO: 209574 - DNA, 80 bp, synthetic construct; identical to SEQ ID NO: 24844
  source 1..80: mol_type = other DNA

SEQ ID NO: 209575 - DNA, 80 bp, synthetic construct; identical to SEQ ID NO: 24845
  source 1..80: mol_type = other DNA

SEQ ID NO: 209576 - DNA, 80 bp, synthetic construct; identical to SEQ ID NO: 24846
  source 1..80: mol_type = other DNA

SEQ ID NO: 209577 - DNA, 80 bp, synthetic construct; identical to SEQ ID NO: 24847
  source 1..80: mol_type = other DNA

SEQ ID NO: 209578 - DNA, 80 bp, synthetic construct; identical to SEQ ID NO: 24848
  source 1..80: mol_type = other DNA

SEQ ID NO: 209579 - DNA, 80 bp, synthetic construct; identical to SEQ ID NO: 24849
  source 1..80: mol_type = other DNA

SEQ ID NO: 209580 - DNA, 80 bp, synthetic construct; identical to SEQ ID NO: 24850
  source 1..80: mol_type = other DNA

SEQ ID NO: 209581 - DNA, 80 bp, synthetic construct; identical to SEQ ID NO: 24851
  source 1..80: mol_type = other DNA

SEQ ID NO: 209582 - DNA, 80 bp, synthetic construct; identical to SEQ ID NO: 24852
  source 1..80: mol_type = other DNA

SEQ ID NO: 209583 - DNA, 80 bp, synthetic construct; identical to SEQ ID NO: 24853
  source 1..80: mol_type = other DNA

SEQ ID NO: 209584 - DNA, 80 bp, synthetic construct; identical to SEQ ID NO: 24854
  source 1..80: mol_type = other DNA

SEQ ID NO: 209585 - DNA, 80 bp, synthetic construct; identical to SEQ ID NO: 24855
  source 1..80: mol_type = other DNA

SEQ ID NO: 209586 - DNA, 80 bp, synthetic construct; identical to SEQ ID NO: 24856
  source 1..80: mol_type = other DNA

SEQ ID NO: 209587 - DNA, 80 bp, synthetic construct; identical to SEQ ID NO: 24857
  source 1..80: mol_type = other DNA

SEQ ID NO: 209588 - DNA, 80 bp, synthetic construct; identical to SEQ ID NO: 24858
  source 1..80: mol_type = other DNA

SEQ ID NO: 209589 - DNA, 80 bp, synthetic construct; identical to SEQ ID NO: 24859
  source 1..80: mol_type = other DNA

SEQ ID NO: 209590 - DNA, 80 bp, synthetic construct; identical to SEQ ID NO: 24860
  source 1..80: mol_type = other DNA

SEQ ID NO: 209591 - DNA, 80 bp, synthetic construct; identical to SEQ ID NO: 24861
  source 1..80: mol_type = other DNA

SEQ ID NO: 209592 - DNA, 80 bp, synthetic construct; identical to SEQ ID NO: 24862
  source 1..80: mol_type = other DNA

SEQ ID NO: 209593 - DNA, 80 bp, synthetic construct; identical to SEQ ID NO: 24863
  source 1..80: mol_type = other DNA

SEQ ID NO: 209594 - DNA, 80 bp, synthetic construct; identical to SEQ ID NO: 24864
  source 1..80: mol_type = other DNA

SEQ ID NO: 209595 - DNA, 80 bp, synthetic construct; identical to SEQ ID NO: 24865
  source 1..80: mol_type = other DNA

SEQ ID NO: 209596 - DNA, 80 bp, synthetic construct; identical to SEQ ID NO: 24866
  source 1..80: mol_type = other DNA

SEQ ID NO: 209597 - DNA, 80 bp, synthetic construct; identical to SEQ ID NO: 24867
  source 1..80: mol_type = other DNA

SEQ ID NO: 209598 - DNA, 80 bp, synthetic construct; identical to SEQ ID NO: 24868
  source 1..80: mol_type = other DNA

SEQ ID NO: 209599 - DNA, 80 bp, synthetic construct; identical to SEQ ID NO: 24869
  source 1..80: mol_type = other DNA

SEQ ID NO: 209600 - DNA, 80 bp, synthetic construct; identical to SEQ ID NO: 24870
  source 1..80: mol_type = other DNA

SEQ ID NO: 209601 - DNA, 80 bp, synthetic construct; identical to SEQ ID NO: 24871
  source 1..80: mol_type = other DNA
